United States Patent Application Publication US 2022/0213167 A1 - sequence listing, part 22

SEQ ID NO: 458967 - protein, 12 aa, Homo sapiens
  CDR3 for alpha chain variable domain of TCR clone 229484 (TRAV39, TRAJ48)
CAVNFGNEKLTF

SEQ ID NO: 458968 - protein, 12 aa, Homo sapiens
  CDR3 for beta chain variable domain of TCR clone 229484 (TRBV5-5, TRBJ2-5)
CASSYFGETQYF

SEQ ID NO: 458969 - protein, 18 aa, Homo sapiens
  CDR3 for alpha chain variable domain of TCR clone 229485 (TRAV26-2, TRAJ45)
CILRLWGYSGGGADGLTF

SEQ ID NO: 458970 - protein, 17 aa, Homo sapiens
  CDR3 for beta chain variable domain of TCR clone 229485 (TRBV28, TRBJ2-3)
CASSPTPAEGRVDTQYF

SEQ ID NO: 458971 - protein, 10 aa, Homo sapiens
  CDR3 for alpha chain variable domain of TCR clone 229486 (TRAV8-4, TRAJ43)
CAVSADDMRL

SEQ ID NO: 458972 - protein, 11 aa, Homo sapiens
  CDR3 for beta chain variable domain of TCR clone 229486 (TRBV12-4, TRBJ2-3)
CASTATDTQYF

SEQ ID NO: 458973 - protein, 15 aa, Homo sapiens
  CDR3 for alpha chain variable domain of TCR clone 229487 (TRAV12-3, TRAJ11)
CAMSEANSGYSTLTF

SEQ ID NO: 458974 - protein, 16 aa, Homo sapiens
  CDR3 for beta chain variable domain of TCR clone 229487 (TRBV5-1, TRBJ2-7)
CASSLEGLAGLYEQYF

SEQ ID NO: 458975 - protein, 15 aa, Homo sapiens
  CDR3 for alpha chain variable domain of TCR clone 229488 (TRAV3, TRAJ29)
CAVRDSPSGNTPLVF

SEQ ID NO: 458976 - protein, 18 aa, Homo sapiens
  CDR3 for beta chain variable domain of TCR clone 229488 (TRBV6-6, TRBJ2-5)
CASSYSWLQGALRETQYF

SEQ ID NO: 458977 - protein, 12 aa, Homo sapiens
  CDR3 for alpha chain variable domain of TCR clone 229489 (TRAV13-2, TRAJ23)
CTERHRGGKLIF

SEQ ID NO: 458978 - protein, 15 aa, Homo sapiens
  CDR3 for beta chain variable domain of TCR clone 229489 (TRBV19, TRBJ1-2)
CASSVGQVLNYGYTF

SEQ ID NO: 458979 - protein, 15 aa, Homo sapiens
  CDR3 for alpha chain variable domain of TCR clone 229490 (TRAV13-1, TRAJ44)
CAASRGGGTASKLTF

SEQ ID NO: 458980 - protein, 15 aa, Homo sapiens
  CDR3 for beta chain variable domain of TCR clone 229490 (TRBV4-1, TRBJ2-5)
CASSQWDLYQETQYF

SEQ ID NO: 458981 - protein, 15 aa, Homo sapiens
  CDR3 for alpha chain variable domain of TCR clone 229491 (TRAV2, TRAJ39)
CAVEDRRNAGNMLAF

SEQ ID NO: 458982 - protein, 16 aa, Homo sapiens
  CDR3 for beta chain variable domain of TCR clone 229491 (TRBV7-8, TRBJ2-7)
CASSLASGTSVYEQYF

SEQ ID NO: 458983 - protein, 15 aa, Homo sapiens
  CDR3 for alpha chain variable domain of TCR clone 229492 (TRAV8-3, TRAJ7)
CAVGPISYGNTRLAF

SEQ ID NO: 458984 - protein, 14 aa, Homo sapiens
  CDR3 for beta chain variable domain of TCR clone 229492 (TRBV19, TRBJ2-2)
CASTVTANTGELFF

SEQ ID NO: 458985 - protein, 11 aa, Homo sapiens
  CDR3 for alpha chain variable domain of TCR clone 229493 (TRAV17, TRAJ49)
CATNTGNQFYF

SEQ ID NO: 458986 - protein, 12 aa, Homo sapiens
  CDR3 for beta chain variable domain of TCR clone 229493 (TRBV2, TRBJ2-7)
SASSGGSGIPYF

SEQ ID NO: 458987 - protein, 15 aa, Homo sapiens
  CDR3 for alpha chain variable domain of TCR clone 229494 (TRAV3, TRAJ13)
CAVRVYSGRYQKVTF

SEQ ID NO: 458988 - protein, 15 aa, Homo sapiens
  CDR3 for beta chain variable domain of TCR clone 229494 (TRBV7-2, TRBJ2-1)
CASSSGLAGGNEQFF

SEQ ID NO: 458989 - protein, 13 aa, Homo sapiens
  CDR3 for alpha chain variable domain of TCR clone 229495 (TRAV12-3, TRAJ35)
CAMAIGFGNVLHC

SEQ ID NO: 458990 - protein, 15 aa, Homo sapiens
  CDR3 for beta chain variable domain of TCR clone 229495 (TRBV20-1, TRBJ2-1)
CSARGSGTYYNKQFF

SEQ ID NO: 458991 - protein, 17 aa, Homo sapiens
  CDR3 for alpha chain variable domain of TCR clone 229496 (TRAV3, TRAJ42)
CAVRDRDYGGSEGNIIF

SEQ ID NO: 458992 - protein, 15 aa, Homo sapiens
  CDR3 for beta chain variable domain of TCR clone 229496 (TRBV6-6, TRBJ2-7)
CASSYSYGGSYEQYF

SEQ ID NO: 458993 - protein, 13 aa, Homo sapiens
  CDR3 for alpha chain variable domain of TCR clone 229497 (TRAV20, TRAJ29)
CAVQAVGNTPLVF

SEQ ID NO: 458994 - protein, 13 aa, Homo sapiens
  CDR3 for beta chain variable domain of TCR clone 229497 (TRBV28, TRBJ2-7)
CAGAQQCLDEQYF

SEQ ID NO: 458995 - protein, 20 aa, Homo sapiens
  CDR3 for alpha chain variable domain of TCR clone 229498 (TRAV12-3, TRAJ4)
CAMTGAGPGWLYTHISRTLT

SEQ ID NO: 458996 - protein, 14 aa, Homo sapiens
  CDR3 for beta chain variable domain of TCR clone 229498 (TRBV10-3, TRBJ1-1)
CAISDTDRGVEAFF

SEQ ID NO: 458997 - protein, 13 aa, Homo sapiens
  CDR3 for alpha chain variable domain of TCR clone 229499 (TRAV8-6, TRAJ49)
CAVITNTGNQFYF

SEQ ID NO: 458998 - protein, 17 aa, Homo sapiens
  CDR3 for beta chain variable domain of TCR clone 229499 (TRBV15, TRBJ1-5)
CATSRAPPGTRNQPQHF

SEQ ID NO: 458999 - protein, 16 aa, Homo sapiens
  CDR3 for alpha chain variable domain of TCR clone 229500 (TRAV3, TRAJ10)
CAVRDMRAGGGNKLNF

SEQ ID NO: 459000 - protein, 14 aa, Homo sapiens
  CDR3 for beta chain variable domain of TCR clone 229500 (TRBV7-2, TRBJ1-1)
CASSFLTGTTEAFF

SEQ ID NO: 459001 - protein, 15 aa, Homo sapiens
  CDR3 for alpha chain variable domain of TCR clone 229501 (TRAV17, TRAJ35)
CATAFVIGFVNVLHC

SEQ ID NO: 459002 - protein, 16 aa, Homo sapiens
  CDR3 for beta chain variable domain of TCR clone 229501 (TRBV11-2, TRBJ2-7)
CASSPLAGGPRYEQYF

SEQ ID NO: 459003 - protein, 14 aa, Homo sapiens
  CDR3 for alpha chain variable domain of TCR clone 229502 (TRAV10, TRAJ34)
CVVSRGGDTAKLIF

SEQ ID NO: 459004 - protein, 17 aa, Homo sapiens
  CDR3 for beta chain variable domain of TCR clone 229502 (TRBV6-3, TRBJ2-3)
CASRRPLGGGSTDTQYF

SEQ ID NO: 459005 - protein, 13 aa, Homo sapiens
  CDR3 for alpha chain variable domain of TCR clone 229503 (TRAV21, TRAJ27)
CAARPGNAGKSTL

SEQ ID NO: 459006 - protein, 13 aa, Homo sapiens
  CDR3 for beta chain variable domain of TCR clone 229503 (TRBV20-1, TRBJ1-1)
CSARGGGNTEAFF

SEQ ID NO: 459007 - protein, 15 aa, Homo sapiens
  CDR3 for alpha chain variable domain of TCR clone 229504 (TRAV12-3, TRAJ11)
CAMSAENSGYSTLTF

SEQ ID NO: 459008 - protein, 16 aa, Homo sapiens
  CDR3 for beta chain variable domain of TCR clone 229504 (TRBV5-1, TRBJ2-7)
CASSLEGLAGLYEQYF

SEQ ID NO: 459009 - protein, 11 aa, Homo sapiens
  CDR3 for alpha chain variable domain of TCR clone 229505 (TRAV1-1, TRAJ9)
CAVAGGFKTIF

SEQ ID NO: 459010 - protein, 18 aa, Homo sapiens
  CDR3 for beta chain variable domain of TCR clone 229505 (TRBV11-2, TRBJ2-3)
CASSLGGASRGAPNTQYF

SEQ ID NO: 459011 - protein, 18 aa, Homo sapiens
  CDR3 for alpha chain variable domain of TCR clone 229506 (TRAV26-2, TRAJ52)
CILRDVNAGGTSYGKLTF

SEQ ID NO: 459012 - protein, 15 aa, Homo sapiens
  CDR3 for beta chain variable domain of TCR clone 229506 (TRBV6-5, TRBJ2-1)
CASSYDAGAGNEQFF

SEQ ID NO: 459013 - protein, 15 aa, Homo sapiens
  CDR3 for alpha chain variable domain of TCR clone 229507 (TRAV19, TRAJ8)
CALSGPNTGFQTLVF

SEQ ID NO: 459014 - protein, 14 aa, Homo sapiens
  CDR3 for beta chain variable domain of TCR clone 229507 (TRBV11-2, TRBJ2-7)
CASSLGAGAYEQYF

SEQ ID NO: 459015 - protein, 11 aa, Homo sapiens
  CDR3 for alpha chain variable domain of TCR clone 229508 (TRAV2, TRAJ13)
CASGGYQKVTC

SEQ ID NO: 459016 - protein, 14 aa, Homo sapiens
  CDR3 for beta chain variable domain of TCR clone 229508 (TRBV7-3, TRBJ2-1)
CASSLAGGTNEQFF

SEQ ID NO: 459017 - protein, 12 aa, Homo sapiens
  CDR3 for alpha chain variable domain of TCR clone 229509 (TRAV26-1, TRAJ53)
CIEGGSNYKLTF

SEQ ID NO: 459018 - protein, 16 aa, Homo sapiens
  CDR3 for beta chain variable domain of TCR clone 229509 (TRBV7-6, TRBJ2-1)
CASSAPGPSSYNEQFF

SEQ ID NO: 459019 - protein, 14 aa, Homo sapiens
  CDR3 for alpha chain variable domain of TCR clone 229510 (TRAV12-2, TRAJ45)
CALPERGGADGLTF

SEQ ID NO: 459020 - protein, 14 aa, Homo sapiens
  CDR3 for beta chain variable domain of TCR clone 229510 (TRBV18, TRBJ1-5)
CASSPANSNQPQHF

SEQ ID NO: 459021 - protein, 12 aa, Homo sapiens
  CDR3 for alpha chain variable domain of TCR clone 229511 (TRAV26-2, TRAJ21)
CILKGNFNKFYF

SEQ ID NO: 459022 - protein, 14 aa, Homo sapiens
  CDR3 for beta chain variable domain of TCR clone 229511 (TRBV7-9, TRBJ1-1)
CASTPFQSYTEAFF

SEQ ID NO: 459023 - protein, 10 aa, Homo sapiens
  CDR3 for alpha chain variable domain of TCR clone 229512 (TRAV30, TRAJ32)
CGTEKDMVVL

SEQ ID NO: 459024 - protein, 13 aa, Homo sapiens
  CDR3 for beta chain variable domain of TCR clone 229512 (TRBV10-3, TRBJ2-7)
CASKLAVNYEQNF

SEQ ID NO: 459025 - protein, 12 aa, Homo sapiens
  CDR3 for alpha chain variable domain of TCR clone 229513 (TRAV21, TRAJ33)
CAKMDSNYQLIW

SEQ ID NO: 459026 - protein, 15 aa, Homo sapiens
  CDR3 for beta chain variable domain of TCR clone 229513 (TRBV5-1, TRBJ2-7)
CASSLNGGPAREQYF

SEQ ID NO: 459027 - protein, 11 aa, Homo sapiens
  CDR3 for alpha chain variable domain of TCR clone 229514 (TRAV3, TRAJ21)
CAVGNFNKFYF

SEQ ID NO: 459028 - protein, 16 aa, Homo sapiens
  CDR3 for beta chain variable domain of TCR clone 229514 (TRBV19, TRBJ2-1)
CASNKAGPSSYNEQLF

SEQ ID NO: 459029 - protein, 14 aa, Homo sapiens
  CDR3 for alpha chain variable domain of TCR clone 229515 (TRAV12-3, TRAJ5)
CAMNTYTGRRALTF

SEQ ID NO: 459030 - protein, 13 aa, Homo sapiens
  CDR3 for beta chain variable domain of TCR clone 229515 (TRBV28, TRBJ2-3)
CASSTGGGDTQYF

SEQ ID NO: 459031 - protein, 13 aa, Homo sapiens
  CDR3 for alpha chain variable domain of TCR clone 229516 (TRAV36/DV7, TRAJ37)
CAVFSSNTGKLIF

SEQ ID NO: 459032 - protein, 12 aa, Homo sapiens
  CDR3 for beta chain variable domain of TCR clone 229516 (TRBV11-2, TRBJ2-2)
CASSLGGGELFF

SEQ ID NO: 459033 - protein, 11 aa, Homo sapiens
  CDR3 for alpha chain variable domain of TCR clone 229517 (TRAV38-2/DV8, TRAJ31)
CAYFSNARLLF

SEQ ID NO: 459034 - protein, 13 aa, Homo sapiens
  CDR3 for beta chain variable domain of TCR clone 229517 (TRBV20-1, TRBJ2-7)
CSARDGKAYEQYF

SEQ ID NO: 459035 - protein, 14 aa, Homo sapiens
  CDR3 for alpha chain variable domain of TCR clone 229518 (TRAV12-2, TRAJ40)
CAVKTPSGTYKYIF

SEQ ID NO: 459036 - protein, 14 aa, Homo sapiens
  CDR3 for beta chain variable domain of TCR clone 229518 (TRBV20-1, TRBJ1-1)
CSEQTRIGGTEAFF

SEQ ID NO: 459037 - protein, 13 aa, Homo sapiens
  CDR3 for alpha chain variable domain of TCR clone 229519 (TRAV12-2, TRAJ47)
FAVFMEYGNKLVF

SEQ ID NO: 459038 - protein, 14 aa, Homo sapiens
  CDR3 for beta chain variable domain of TCR clone 229519 (TRBV4-1, TRBJ1-5)
CASSQGPTNQPQHF

SEQ ID NO: 459039 - protein, 13 aa, Homo sapiens
  CDR3 for alpha chain variable domain of TCR clone 229520 (TRAV12-1, TRAJ33)
CGDAPDSNYQLIW

SEQ ID NO: 459040 - protein, 14 aa, Homo sapiens
  CDR3 for beta chain variable domain of TCR clone 229520 (TRBV20-1, TRBJ2-7)
CSAPELAGVGEQYF

SEQ ID NO: 459041 - protein, 13 aa, Homo sapiens
  CDR3 for alpha chain variable domain of TCR clone 229521 (TRAV35, TRAJ48)
CAGHEFGNEKLNF

SEQ ID NO: 459042 - protein, 13 aa, Homo sapiens
  CDR3 for beta chain variable domain of TCR clone 229521 (TRBV7-2, TRBJ1-6)
CASSLVGSSPLHF

SEQ ID NO: 459043 - protein, 13 aa, Homo sapiens
  CDR3 for alpha chain variable domain of TCR clone 229522 (TRAV12-2, TRAJ50)
CAVIVTSYDKVIF

SEQ ID NO: 459044 - protein, 13 aa, Homo sapiens
  CDR3 for beta chain variable domain of TCR clone 229522 (TRBV19, TRBJ2-7)
CASSIRSSYEQYF

SEQ ID NO: 459045 - protein, 14 aa, Homo sapiens
  CDR3 for alpha chain variable domain of TCR clone 229523 (TRAV8-1, TRAJ5)
CAVRTDTGRRALTF

SEQ ID NO: 459046 - protein, 13 aa, Homo sapiens
  CDR3 for beta chain variable domain of TCR clone 229523 (TRBV7-8, TRBJ2-3)
CQQLPGRQDTQYF

SEQ ID NO: 459047 - protein, 15 aa, Homo sapiens
  CDR3 for alpha chain variable domain of TCR clone 229524 (TRAV8-4, TRAJ29)
CAVSEDVRGNTPLVF

SEQ ID NO: 459048 - protein, 18 aa, Homo sapiens
  CDR3 for beta chain variable domain of TCR clone 229524 (TRBV20-1, TRBJ2-6)
CSARTLAGGPSGANVLTF

SEQ ID NO: 459049 - protein, 16 aa, Homo sapiens
  CDR3 for alpha chain variable domain of TCR clone 229525 (TRAV35, TRAJ28)
CAGQKYSGAGSYQLTF

SEQ ID NO: 459050 - protein, 13 aa, Homo sapiens
  CDR3 for beta chain variable domain of TCR clone 229525 (TRBV19, TRBJ1-2)
CASRQGQVYGYTF

SEQ ID NO: 459051 - protein, 15 aa, Homo sapiens
  CDR3 for alpha chain variable domain of TCR clone 229526 (TRAV8-2, TRAJ36)
CVVSENWGKQPLLWD

SEQ ID NO: 459052 - protein, 14 aa, Homo sapiens
  CDR3 for beta chain variable domain of TCR clone 229526 (TRBV7-8, TRBJ2-5)
CASSATGGQETQYF

SEQ ID NO: 459053 - protein, 15 aa, Homo sapiens
  CDR3 for alpha chain variable domain of TCR clone 229527 (TRAV1-2, TRAJ12)
CAVIPEVDSSYKLIF

SEQ ID NO: 459054 - protein, 15 aa, Homo sapiens
  CDR3 for beta chain variable domain of TCR clone 229527 (TRBV7-8, TRBJ2-1)
CASSLAGGLYNEQFF

SEQ ID NO: 459055 - protein, 14 aa, Homo sapiens
  CDR3 for alpha chain variable domain of TCR clone 229528 (TRAV26-1, TRAJ21)
CIANTTSTTFTLDL

SEQ ID NO: 459056 - protein, 15 aa, Homo sapiens
  CDR3 for beta chain variable domain of TCR clone 229528 (TRBV20-1, TRBJ2-7)
CSARDRVSGMDEQYF

SEQ ID NO: 459057 - protein, 16 aa, Homo sapiens
  CDR3 for alpha chain variable domain of TCR clone 229529 (TRAV12-1, TRAJ43)
CVVNPHRFGAGTRLTV

SEQ ID NO: 459058 - protein, 20 aa, Homo sapiens
  CDR3 for beta chain variable domain of TCR clone 229529 (TRBV11-2, TRBJ1-6)
CASSLVFATGGSVHPSTLGT

SEQ ID NO: 459059 - protein, 14 aa, Homo sapiens
  CDR3 for alpha chain variable domain of TCR clone 229530 (TRAV39, TRAJ42)
CALDIARSQGNLIF

SEQ ID NO: 459060 - protein, 15 aa, Homo sapiens
  CDR3 for beta chain variable domain of TCR clone 229530 (TRBV27, TRBJ2-7)
CASSLFGTGLDEQYF

SEQ ID NO: 459061 - protein, 18 aa, Homo sapiens
  CDR3 for alpha chain variable domain of TCR clone 229531 (TRAV12-3, TRAJ52)
CAMSRTNAVGTSYGKLTF

SEQ ID NO: 459062 - protein, 17 aa, Homo sapiens
  CDR3 for beta chain variable domain of TCR clone 229531 (TRBV7-3, TRBJ2-3)
CASSLMKRRRGADTQYF

SEQ ID NO: 459063 - protein, 11 aa, Homo sapiens
  CDR3 for alpha chain variable domain of TCR clone 229532 (TRAV21, TRAJ34)
CAVTNTDKLIF

SEQ ID NO: 459064 - protein, 13 aa, Homo sapiens
  CDR3 for beta chain variable domain of TCR clone 229532 (TRBV3-1, TRBJ1-1)
CASSPGVITEAFF

SEQ ID NO: 459065 - protein, 17 aa, Homo sapiens
  CDR3 for alpha chain variable domain of TCR clone 229533 (TRAV3, TRAJ12)
CALRDGGRMDSSYKLIF

SEQ ID NO: 459066 - protein, 13 aa, Homo sapiens
  CDR3 for beta chain variable domain of TCR clone 229533 (TRBV20-1, TRBJ1-1)
CSAPLGGGTEAFF

SEQ ID NO: 459067 - protein, 15 aa, Homo sapiens
  CDR3 for alpha chain variable domain of TCR clone 229534 (TRAV4, TRAJ39)
CLVGPNNNAGNMLTF

SEQ ID NO: 459068 - protein, 16 aa, Homo sapiens
  CDR3 for beta chain variable domain of TCR clone 229534 (TRBV13, TRBJ2-2)
CASSPRTGENTGELFF

SEQ ID NO: 459069 - protein, 15 aa, Homo sapiens
  CDR3 for alpha chain variable domain of TCR clone 229535 (TRAV8-4, TRAJ13)
CAVSARGGGYQKVTF

SEQ ID NO: 459070 - protein, 17 aa, Homo sapiens
  CDR3 for beta chain variable domain of TCR clone 229535 (TRBV25-1, TRBJ1-2)
CASSEFGSATTNDGYTF

SEQ ID NO: 459071 - protein, 15 aa, Homo sapiens
  CDR3 for alpha chain variable domain of TCR clone 229536 (TRAV2, TRAJ24)
CAVVRLENSWGKLQF

SEQ ID NO: 459072 - protein, 16 aa, Homo sapiens
  CDR3 for beta chain variable domain of TCR clone 229536 (TRBV7-7, TRBJ2-3)
CASSPGTSGSTDTQYF

SEQ ID NO: 459073 - protein, 14 aa, Homo sapiens
  CDR3 for alpha chain variable domain of TCR clone 229537 (TRAV17, TRAJ49)
CATDARDTGNQFYF

SEQ ID NO: 459074 - protein, 12 aa, Homo sapiens
  CDR3 for beta chain variable domain of TCR clone 229537 (TRBV12-4, TRBJ1-3)
CASSFSGNTIYF

SEQ ID NO: 459075 - protein, 15 aa, Homo sapiens
  CDR3 for alpha chain variable domain of TCR clone 229538 (TRAV3, TRAJ4)
CAQNMFSGGYNKLIF

SEQ ID NO: 459076 - protein, 13 aa, Homo sapiens
  CDR3 for beta chain variable domain of TCR clone 229538 (TRBV12-4, TRBJ2-5)
CASSPGTEETQYC

SEQ ID NO: 459077 - protein, 13 aa, Homo sapiens
  CDR3 for alpha chain variable domain of TCR clone 229539 (TRAV2, TRAJ15)
CAVASQAGTALIF

SEQ ID NO: 459078 - protein, 16 aa, Homo sapiens
  CDR3 for beta chain variable domain of TCR clone 229539 (TRBV4-1, TRBJ2-7)
CASSQNDRDNSYEQYF

SEQ ID NO: 459079 - protein, 20 aa, Homo sapiens
  CDR3 for alpha chain variable domain of TCR clone 229540 (TRAV12-1, TRAJ42)
SSVIQPPTSVKGGSQGNLIF

SEQ ID NO: 459080 - protein, 15 aa, Homo sapiens
  CDR3 for beta chain variable domain of TCR clone 229540 (TRBV7-9, TRBJ1-5)
CASSQGHQPNQPQHF

SEQ ID NO: 459081 - protein, 14 aa, Homo sapiens
  CDR3 for alpha chain variable domain of TCR clone 229541 (TRAV8-3, TRAJ4)
CAVGAAGGYNKLIF

SEQ ID NO: 459082 - protein, 14 aa, Homo sapiens
  CDR3 for beta chain variable domain of TCR clone 229541 (TRBV18, TRBJ1-4)
CASSPRPNGEKLFV

SEQ ID NO: 459083 - protein, 14 aa, Homo sapiens
  CDR3 for alpha chain variable domain of TCR clone 229542 (TRAV12-1, TRAJ30)
CVVNIVGRDDKIIV

SEQ ID NO: 459084 - protein, 13 aa, Homo sapiens
  CDR3 for beta chain variable domain of TCR clone 229542 (TRBV12-5, TRBJ2-1)
CASGLGRGNEQFF

SEQ ID NO: 459085 - protein, 23 aa, Homo sapiens
  CDR3 for alpha chain variable domain of TCR clone 229543 (TRAV8-3, )
CAVVTTRIPDIQNPDPAVYQLRN

SEQ ID NO: 459086 - protein, 14 aa, Homo sapiens
  CDR3 for beta chain variable domain of TCR clone 229543 (TRBV11-2, TRBJ2-7)
CASSPSTTSYEQYF

SEQ ID NO: 459087 - protein, 18 aa, Homo sapiens
  CDR3 for alpha chain variable domain of TCR clone 229544 (TRAV12-3, TRAJ52)
CAMSVGGAGGTSYGKLTF

SEQ ID NO: 459088 - protein, 18 aa, Homo sapiens
  CDR3 for beta chain variable domain of TCR clone 229544 (TRBV4-3, TRBJ2-3)
CASSQSPPAGSSTDTQYF

SEQ ID NO: 459089 - protein, 14 aa, Homo sapiens
  CDR3 for alpha chain variable domain of TCR clone 229545 (TRAV23/DV6, TRAJ8)
CAASKATGFQKLVF

SEQ ID NO: 459090 - protein, 14 aa, Homo sapiens
  CDR3 for beta chain variable domain of TCR clone 229545 (TRBV4-2, TRBJ2-7)
CASSFSGGANEQYF

SEQ ID NO: 459091 - protein, 13 aa, Homo sapiens
  CDR3 for alpha chain variable domain of TCR clone 229546 (TRAV12-3, TRAJ43)
CAMIRPNNNDMRF

SEQ ID NO: 459092 - protein, 16 aa, Homo sapiens
  CDR3 for beta chain variable domain of TCR clone 229546 (TRBV20-1, TRBJ1-4)
CSAPGQGLLTNEKLFF

SEQ ID NO: 459093 - protein, 15 aa, Homo sapiens
  CDR3 for alpha chain variable domain of TCR clone 229547 (TRAV3, TRAJ22)
CAVRDRGGSARQLTF

SEQ ID NO: 459094 - protein, 13 aa, Homo sapiens
  CDR3 for beta chain variable domain of TCR clone 229547 (TRBV7-8, TRBJ2-1)
CASSAGTGNEQFF

SEQ ID NO: 459095 - protein, 12 aa, Homo sapiens
  CDR3 for alpha chain variable domain of TCR clone 229548 (TRAV2, TRAJ31)
CAVEDNNARLMF

SEQ ID NO: 459096 - protein, 15 aa, Homo sapiens
  CDR3 for beta chain variable domain of TCR clone 229548 (TRBV28, TRBJ2-3)
CASSLNLGDADTQYF

SEQ ID NO: 459097 - protein, 13 aa, Homo sapiens
  CDR3 for alpha chain variable domain of TCR clone 229549 (TRAV8-4, TRAJ9)
CAVSESGGFKTIF

SEQ ID NO: 459098 - protein, 14 aa, Homo sapiens
  CDR3 for beta chain variable domain of TCR clone 229549 (TRBV18, TRBJ2-3)
CASSGLADTDTQYF

SEQ ID NO: 459099 - protein, 14 aa, Homo sapiens
  CDR3 for alpha chain variable domain of TCR clone 229550 (TRAV1-2, TRAJ16)
CAVNRFSDVPKLLF

SEQ ID NO: 459100 - protein, 15 aa, Homo sapiens
  CDR3 for beta chain variable domain of TCR clone 229550 (TRBV28, TRBJ1-3)
CASGATGNSGNTIYF

SEQ ID NO: 459101 - protein, 11 aa, Homo sapiens
  CDR3 for alpha chain variable domain of TCR clone 229551 (TRAV2, TRAJ13)
CASGGYQKVTF

SEQ ID NO: 459102 - protein, 14 aa, Homo sapiens
  CDR3 for beta chain variable domain of TCR clone 229551 (TRBV7-3, TRBJ2-7)
FASSYDQDYYEQYF

SEQ ID NO: 459103 - protein, 14 aa, Homo sapiens
  CDR3 for alpha chain variable domain of TCR clone 229552 (TRAV13-1, TRAJ39)
CAASYNNAGNMLTF

SEQ ID NO: 459104 - protein, 13 aa, Homo sapiens
  CDR3 for beta chain variable domain of TCR clone 229552 (TRBV24-1, TRAJ57)
CATNNGRSEKLFF

SEQ ID NO: 459105 - protein, 16 aa, Homo sapiens
  CDR3 for alpha chain variable domain of TCR clone 229553 (TRAV12-1, TRAJ42)
CVVTPYYGGSQGNLIF

SEQ ID NO: 459106 - protein, 15 aa, Homo sapiens
  CDR3 for beta chain variable domain of TCR clone 229553 (TRBV4-3, TRBJ2-7)
CASSQGVRGIYEQYF

SEQ ID NO: 459107 - protein, 13 aa, Homo sapiens
  CDR3 for alpha chain variable domain of TCR clone 229554 (TRAV14/DV4, TRAJ4)
CAMKAGGYNKLIF

SEQ ID NO: 459108 - protein, 13 aa, Homo sapiens
  CDR3 for beta chain variable domain of TCR clone 229554 (TRBV7-9, TRBJ1-2)
CASSPSNFWGYTF

SEQ ID NO: 459109 - protein, 14 aa, Homo sapiens
  CDR3 for alpha chain variable domain of TCR clone 229555 (TRAV9-2, TRAJ39)
CALYSYNAGNMLTF

SEQ ID NO: 459110 - protein, 13 aa, Homo sapiens
  CDR3 for beta chain variable domain of TCR clone 229555 (TRBV15, TRBJ1-6)
CATSGGLNSPLHF

SEQ ID NO: 459111 - protein, 13 aa, Homo sapiens
  CDR3 for alpha chain variable domain of TCR clone 229556 (TRAV26-1, TRAJ33)
CIVRVDSNYQLIW

SEQ ID NO: 459112 - protein, 15 aa, Homo sapiens
  CDR3 for beta chain variable domain of TCR clone 229556 (TRBV7-2, TRBJ1-5)
CTSSFSAGINQPQHF

SEQ ID NO: 459113 - protein, 12 aa, Homo sapiens
  CDR3 for alpha chain variable domain of TCR clone 229557 (TRAV12-2, TRAJ21)
CAVRYNFNKFYF

SEQ ID NO: 459114 - protein, 16 aa, Homo sapiens
  CDR3 for beta chain variable domain of TCR clone 229557 (TRBV7-6, TRBJ2-1)
CASSLNEGPSYNEQFF

SEQ ID NO: 459115 - protein, 14 aa, Homo sapiens
  CDR3 for alpha chain variable domain of TCR clone 229558 (TRAV38-1, TRAJ29)
CAFITPSGNTPLVF

SEQ ID NO: 459116 - protein, 13 aa, Homo sapiens
  CDR3 for beta chain variable domain of TCR clone 229558 (TRBV20-1, TRBJ1-1)
CSARGGGNTEAFF

SEQ ID NO: 459117 - protein, 14 aa, Homo sapiens
  CDR3 for alpha chain variable domain of TCR clone 229559 (TRAV12-1, TRAJ9)
CVVTGDTGCFKTIF

SEQ ID NO: 459118 - protein, 16 aa, Homo sapiens
  CDR3 for beta chain variable domain of TCR clone 229559 (TRBV29-1, TRBJ1-2)
CSVEANRDIANYGYTF

SEQ ID NO: 459119 - protein, 16 aa, Homo sapiens
  CDR3 for alpha chain variable domain of TCR clone 229560 (TRAV26-2, TRAJ57)
CILRDLGSGGSEKLVF

SEQ ID NO: 459120 - protein, 13 aa, Homo sapiens
  CDR3 for beta chain variable domain of TCR clone 229560 (TRBV18, TRBJ2-3)
CASSPGVTDTQYF

SEQ ID NO: 459121 - protein, 13 aa, Homo sapiens
  CDR3 for alpha chain variable domain of TCR clone 229561 (TRAV2, TRAJ40)
CAVVTSGTYKYIF

SEQ ID NO: 459122 - protein, 13 aa, Homo sapiens
  CDR3 for beta chain variable domain of TCR clone 229561 (TRBV20-1, TRBJ1-1)
CSARLGQGTEAFF

SEQ ID NO: 459123 - protein, 17 aa, Homo sapiens
  CDR3 for alpha chain variable domain of TCR clone 229562 (TRAV3, TRAJ28)
CAVREAYSGAGSYQLTF

SEQ ID NO: 459124 - protein, 13 aa, Homo sapiens
  CDR3 for beta chain variable domain of TCR clone 229562 (TRBV4-1, TRBJ2-2)
CASSQENTGELFF

SEQ ID NO: 459125 - protein, 15 aa, Homo sapiens
  CDR3 for alpha chain variable domain of TCR clone 229563 (TRAV3, TRAJ22)
CAVRDRGGSARQLTF

SEQ ID NO: 459126 - protein, 13 aa, Homo sapiens
  CDR3 for beta chain variable domain of TCR clone 229563 (TRBV7-7, TRBJ2-2)
CASSLTSAGELFF

SEQ ID NO: 459127 - protein, 15 aa, Homo sapiens
  CDR3 for alpha chain variable domain of TCR clone 229564 (TRAV23/DV6, )
CATYPDIQNPDPAVY

SEQ ID NO: 459128 - protein, 14 aa, Homo sapiens
  CDR3 for beta chain variable domain of TCR clone 229564 (TRBV7-3, TRBJ2-2)
CASSSGGYTGELFF

SEQ ID NO: 459129 - protein, 12 aa, Homo sapiens
  CDR3 for alpha chain variable domain of TCR clone 229565 (TRAV2, TRAJ10)
CAYTGGGNKLTF

SEQ ID NO: 459130 - protein, 14 aa, Homo sapiens
  CDR3 for beta chain variable domain of TCR clone 229565 (TRBV7-2, TRBJ2-2)
CASRGQGAAGELFF

SEQ ID NO: 459131 - protein, 10 aa, Homo sapiens
  CDR3 for alpha chain variable domain of TCR clone 229566 (TRAV23/DV6, TRAJ57)
CAASSTLSQG

SEQ ID NO: 459132 - protein, 16 aa, Homo sapiens
  CDR3 for beta chain variable domain of TCR clone 229566 (TRBV7-8, TRBJ2-4)
CASSAERTLAKNIQYF

SEQ ID NO: 459133 - protein, 16 aa, Homo sapiens
  CDR3 for alpha chain variable domain of TCR clone 229567 (TRAV17, TRAJ53)
CATDGGSGGSNYKLTL

SEQ ID NO: 459134 - protein, 15 aa, Homo sapiens
  CDR3 for beta chain variable domain of TCR clone 229567 (TRBV5-5, TRBJ1-5)
CASSLKGGGEQPQHF

SEQ ID NO: 459135 - protein, 14 aa, Homo sapiens
  CDR3 for alpha chain variable domain of TCR clone 229568 (TRAV13-2, TRAJ9)
CAENLETGGFKTIF

SEQ ID NO: 459136 - protein, 16 aa, Homo sapiens
  CDR3 for beta chain variable domain of TCR clone 229568 (TRBV28, TRBJ2-5)
CASSFSPAGGWETRYF

SEQ ID NO: 459137 - protein, 15 aa, Homo sapiens
  CDR3 for alpha chain variable domain of TCR clone 229569 (TRAV29/DV5, TRAJ40)
CSASAQGSGTYKYIF

SEQ ID NO: 459138 - protein, 13 aa, Homo sapiens
  CDR3 for beta chain variable domain of TCR clone 229569 (TRBV10-3, TRBJ2-7)
CASKLAVNYEQYF

SEQ ID NO: 459139 - protein, 15 aa, Homo sapiens
  CDR3 for alpha chain variable domain of TCR clone 229570 (TRAV17, TRAJ57)
CATGPSQGGSEKLVF

SEQ ID NO: 459140 - protein, 15 aa, Homo sapiens
  CDR3 for beta chain variable domain of TCR clone 229570 (TRBV12-4, TRBJ1-5)
CQQPTGRGVNQPQHF

SEQ ID NO: 459141 - protein, 18 aa, Homo sapiens
  CDR3 for alpha chain variable domain of TCR clone 229571 (TRAV12-3, TRAJ52)
CAMSRTNAGGTRYGKLTF

SEQ ID NO: 459142 - protein, 16 aa, Homo sapiens
  CDR3 for beta chain variable domain of TCR clone 229571 (TRBV7-3, TRBJ2-3)
ELSLMKRMRGADTQYF

SEQ ID NO: 459143 - protein, 16 aa, Homo sapiens
  CDR3 for alpha chain variable domain of TCR clone 229572 (TRAV26-1, TRAJ37)
CIVRGDGSGNTGKLIF

SEQ ID NO: 459144 - protein, 14 aa, Homo sapiens
  CDR3 for beta chain variable domain of TCR clone 229572 (TRBV20-1, TRBJ1-1)
CSAQTRIGGTEAFF

SEQ ID NO: 459145 - protein, 14 aa, Homo sapiens
  CDR3 for alpha chain variable domain of TCR clone 229573 (TRAV13-1, TRAJ31)
CAASSRPNNGRLMF

SEQ ID NO: 459146 - protein, 15 aa, Homo sapiens
  CDR3 for beta chain variable domain of TCR clone 229573 (TRBV4-2, TRBJ2-4)
CASSPLGAAKNIQYF

SEQ ID NO: 459147 - protein, 14 aa, Homo sapiens
  CDR3 for alpha chain variable domain of TCR clone 229574 (TRAV1-2, TRAJ8)
CAVREDTGFQKLVF

SEQ ID NO: 459148 - protein, 14 aa, Homo sapiens
  CDR3 for beta chain variable domain of TCR clone 229574 (TRBV7-2, TRBJ2-2)
CASRGQGAAGELFF

SEQ ID NO: 459149 - protein, 16 aa, Homo sapiens
  CDR3 for alpha chain variable domain of TCR clone 229575 (TRAV3, TRAJ37)
CAVRGKGSGHTGKLIL

SEQ ID NO: 459150 - protein, 12 aa, Homo sapiens
  CDR3 for beta chain variable domain of TCR clone 229575 (TRBV7-9, TRBJ1-4)
CASSTDREKLFF

SEQ ID NO: 459151 - protein, 13 aa, Homo sapiens
  CDR3 for alpha chain variable domain of TCR clone 229576 (TRAV8-3, TRAJ4)
WVFYSGGYNKMIF

SEQ ID NO: 459152 - protein, 16 aa, Homo sapiens
  CDR3 for beta chain variable domain of TCR clone 229576 (TRBV7-8, TRBJ2-3)
CASSTEGQRETDTQYF

SEQ ID NO: 459153 - protein, 17 aa, Homo sapiens
  CDR3 for alpha chain variable domain of TCR clone 229577 (TRAV19, TRAJ28)
CALSEASSGAGSYQLTL

SEQ ID NO: 459154 - protein, 15 aa, Homo sapiens
  CDR3 for beta chain variable domain of TCR clone 229577 (TRBV9, TRBJ2-1)
CASSLAGSSYNEQFF

SEQ ID NO: 459155 - protein, 14 aa, Homo sapiens
  CDR3 for alpha chain variable domain of TCR clone 229578 (TRAV13-1, TRAJ35)
CAASNGGFGNVLHC

SEQ ID NO: 459156 - protein, 15 aa, Homo sapiens
  CDR3 for beta chain variable domain of TCR clone 229578 (TRBV28, TRBJ2-1)
CASSGLAEVDNEQFF

SEQ ID NO: 459157 - protein, 12 aa, Homo sapiens
  CDR3 for alpha chain variable domain of TCR clone 229579 (TRAV2, TRAJ5)
CALDTGRRALTF

SEQ ID NO: 459158 - protein, 15 aa, Homo sapiens
  CDR3 for beta chain variable domain of TCR clone 229579 (TRBV10-3, TRBJ2-3)
CAISLTSGGTDTQYF

SEQ ID NO: 459159 - protein, 15 aa, Homo sapiens
  CDR3 for alpha chain variable domain of TCR clone 229580 (TRAV38-2/DV8, TRAJ42)
CAYRRGRGSQGNLIF

SEQ ID NO: 459160 - protein, 15 aa, Homo sapiens
  CDR3 for beta chain variable domain of TCR clone 229580 (TRBV29-1, TRBJ2-5)
CSADVGLAVGGTQYF

SEQ ID NO: 459161 - protein, 11 aa, Homo sapiens
  CDR3 for alpha chain variable domain of TCR clone 229581 (TRAV21, TRAJ34)
CAHYNTDKLIF

SEQ ID NO: 459162 - protein, 14 aa, Homo sapiens
  CDR3 for beta chain variable domain of TCR clone 229581 (TRBV9, TRBJ2-1)
CASSAGSSPREQFF

SEQ ID NO: 459163 - protein, 14 aa, Homo sapiens
  CDR3 for alpha chain variable domain of TCR clone 229582 (TRAV26-1, TRAJ38)
CIADNAGNNRKLIW

SEQ ID NO: 459164 - protein, 15 aa, Homo sapiens
  CDR3 for beta chain variable domain of TCR clone 229582 (TRBV3-1, TRBJ1-2)
CASSPTRLPEGGYTF

SEQ ID NO: 459165 - protein, 16 aa, Homo sapiens
  CDR3 for alpha chain variable domain of TCR clone 229583 (TRAV23/DV6, TRAJ48)
CAASGLVNFGNEKLTF

SEQ ID NO: 459166 - protein, 14 aa, Homo sapiens
  CDR3 for beta chain variable domain of TCR clone 229583 (TRBV5-7, TRBJ1-2)
CASSLVRGDYGYTF

SEQ ID NO: 459167 - protein, 18 aa, Homo sapiens
  CDR3 for alpha chain variable domain of TCR clone 229584 (TRAV21, TRAJ52)
CAVRPSPAGGTSYGALTF

SEQ ID NO: 459168 - protein, 17 aa, Homo sapiens
  CDR3 for beta chain variable domain of TCR clone 229584 (TRBV13, TRBJ2-3)
CASSLSRVAGGRNTQYF

SEQ ID NO: 459169 - protein, 14 aa, Homo sapiens
  CDR3 for alpha chain variable domain of TCR clone 229585 (TRAV17, TRAJ34)
CATDSLEGTDKLIF

SEQ ID NO: 459170 - protein, 13 aa, Homo sapiens
  CDR3 for beta chain variable domain of TCR clone 229585 (TRBV11-2, TRBJ2-7)
CASSGTRPYEQYS

SEQ ID NO: 459171 - protein, 14 aa, Homo sapiens
  CDR3 for alpha chain variable domain of TCR clone 229586 (TRAV8-4, TRAJ9)
CAVRINTGGFKTIF

SEQ ID NO: 459172 - protein, 15 aa, Homo sapiens
  CDR3 for beta chain variable domain of TCR clone 229586 (TRBV10-2, TRBJ2-6)
CASSGQGTGDNVLTF

SEQ ID NO: 459173 - protein, 11 aa, Homo sapiens
  CDR3 for alpha chain variable domain of TCR clone 229587 (TRAV12-2, TRAJ42)
CAPGSQGNLIF

SEQ ID NO: 459174 - protein, 13 aa, Homo sapiens
  CDR3 for beta chain variable domain of TCR clone 229587 (TRBV7-3, TRBJ1-1)
CASSQDWGAEAFF

SEQ ID NO: 459175 - protein, 15 aa, Homo sapiens
  CDR3 for alpha chain variable domain of TCR clone 229588 (TRAV3, TRAJ7)
CAVRDKDNGNNRLPF

SEQ ID NO: 459176 - protein, 19 aa, Homo sapiens
  CDR3 for beta chain variable domain of TCR clone 229588 (TRBV5-8, TRBJ2-3)
CASSFLGTSGSHRTDTQYF

SEQ ID NO: 459177 - protein, 14 aa, Homo sapiens
  CDR3 for alpha chain variable domain of TCR clone 229589 (TRAV2, TRAJ16)
CAVERGSDGQKLLI

SEQ ID NO: 459178 - protein, 12 aa, Homo sapiens
  CDR3 for beta chain variable domain of TCR clone 229589 (TRBV6-5, TRBJ2-7)
CASYIYGYEQYF

SEQ ID NO: 459179 - protein, 16 aa, Homo sapiens
  CDR3 for alpha chain variable domain of TCR clone 229590 (TRAV3, TRAJ5)
CAVRNLMDTGRRAVTF

SEQ ID NO: 459180 - protein, 16 aa, Homo sapiens
  CDR3 for beta chain variable domain of TCR clone 229590 (TRBV4-2, TRBJ2-7)
CASSQEGLANSYEQYF

SEQ ID NO: 459181 - protein, 13 aa, Homo sapiens
  CDR3 for alpha chain variable domain of TCR clone 229591 (TRAV23/DV6, TRAJ49)
CAATLRPGNQFYF

SEQ ID NO: 459182 - protein, 14 aa, Homo sapiens
  CDR3 for beta chain variable domain of TCR clone 229591 (TRBV7-2, TRBJ2-6)
CASRQSSGANDLTF

SEQ ID NO: 459183 - protein, 14 aa, Homo sapiens
  CDR3 for alpha chain variable domain of TCR clone 229592 (TRAV2, TRAJ9)
CAVEDRSGGFTTIF

SEQ ID NO: 459184 - protein, 17 aa, Homo sapiens
  CDR3 for beta chain variable domain of TCR clone 229592 (TRBV7-8, TRBJ2-6)
CASSAGTGGAGANVLTF

SEQ ID NO: 459185 - protein, 14 aa, Homo sapiens
  CDR3 for alpha chain variable domain of TCR clone 229593 (TRAV1-2, TRAJ16)
CAVDRFSDGQKLLF

SEQ ID NO: 459186 - protein, 15 aa, Homo sapiens
  CDR3 for beta chain variable domain of TCR clone 229593 (TRBV5-1, TRBJ2-1)
CASSPPRAPYNEQFF

SEQ ID NO: 459187 - protein, 16 aa, Homo sapiens
  CDR3 for alpha chain variable domain of TCR clone 229594 (TRAV21, TRAJ37)
CAVRTAGASNTGKLIF

SEQ ID NO: 459188 - protein, 14 aa, Homo sapiens
  CDR3 for beta chain variable domain of TCR clone 229594 (TRBV6-1, TRBJ1-3)
CASVQGGGGNTIYF

SEQ ID NO: 459189 - protein, 14 aa, Homo sapiens
  CDR3 for alpha chain variable domain of TCR clone 229595 (TRAV26-1, TRAJ38)
CIADNAGNNRKLIW

SEQ ID NO: 459190 - protein, 17 aa, Homo sapiens
  CDR3 for beta chain variable domain of TCR clone 229595 (TRBV20-1, TRBJ2-1)
CSASSSGLAGSYNEQFF

SEQ ID NO: 459191 - protein, 14 aa, Homo sapiens
  CDR3 for alpha chain variable domain of TCR clone 229596 (TRAV20, TRAJ32)
CCGRYGGATNKLIF

SEQ ID NO: 459192 - protein, 16 aa, Homo sapiens
  CDR3 for beta chain variable domain of TCR clone 229596 (TRBV19, TRBJ2-2)
CASRSPGTGATGGLFF

SEQ ID NO: 459193 - protein, 14 aa, Homo sapiens
  CDR3 for alpha chain variable domain of TCR clone 229597 (TRAV23/DV6, TRAJ4)
CAAPSSGGYNKLIF

SEQ ID NO: 459194 - protein, 13 aa, Homo sapiens
  CDR3 for beta chain variable domain of TCR clone 229597 (TRBV12-4, TRBJ1-2)
CASSSGPNYGYTF

SEQ ID NO: 459195 - protein, 16 aa, Homo sapiens
  CDR3 for alpha chain variable domain of TCR clone 229598 (TRAV14/DV4, TRAJ15)
CAMREGSFQAGTALFF

SEQ ID NO: 459196 - protein, 18 aa, Homo sapiens
  CDR3 for beta chain variable domain of TCR clone 229598 (TRBV12-4, TRBJ2-4)
CASSRTGAVDVAKNIQYF

SEQ ID NO: 459197 - protein, 13 aa, Homo sapiens
  CDR3 for alpha chain variable domain of TCR clone 229599 (TRAV29/DV5, TRAJ31)
CAASRNNNARLMF

SEQ ID NO: 459198 - protein, 12 aa, Homo sapiens
  CDR3 for beta chain variable domain of TCR clone 229599 (TRBV11-2, TRBJ2-2)
CASSLGGGELFF

SEQ ID NO: 459199 - protein, 11 aa, Homo sapiens
  CDR3 for alpha chain variable domain of TCR clone 229600 (TRAV2, TRAJ33)
CAVDSHYQLIW

SEQ ID NO: 459200 - protein, 15 aa, Homo sapiens
  CDR3 for beta chain variable domain of TCR clone 229600 (TRBV11-3, TRBJ2-3)
CASLKDGREGDTQYF

SEQ ID NO: 459201 - protein, 12 aa, Homo sapiens
  CDR3 for alpha chain variable domain of TCR clone 229601 (TRAV12-1, TRAJ40)
CVVYSGTYKYIF

SEQ ID NO: 459202 - protein, 15 aa, Homo sapiens
  CDR3 for beta chain variable domain of TCR clone 229601 (TRBV19, TRBJ2-7)
CASRPTPGLSIEQYF

SEQ ID NO: 459203 - protein, 16 aa, Homo sapiens
  CDR3 for alpha chain variable domain of TCR clone 229602 (TRAV3, TRAJ37)
CAVRVRGSVNTGKLIF

SEQ ID NO: 459204 - protein, 13 aa, Homo sapiens
  CDR3 for beta chain variable domain of TCR clone 229602 (TRBV7-9, TRBJ1-2)
CASSLKQNYGYTF

SEQ ID NO: 459205 - protein, 14 aa, Homo sapiens
  CDR3 for alpha chain variable domain of TCR clone 229603 (TRAV12-1, TRAJ29)
CGVNEGSGNTPLVF

SEQ ID NO: 459206 - protein, 13 aa, Homo sapiens
  CDR3 for beta chain variable domain of TCR clone 229603 (TRBV7-9, TRBJ2-3)
CASSPGSTDTQYF

SEQ ID NO: 459207 - protein, 13 aa, Homo sapiens
  CDR3 for alpha chain variable domain of TCR clone 229604 (TRAV30, TRAJ24)
CGTVTDSWGKLQF

SEQ ID NO: 459208 - protein, 13 aa, Homo sapiens
  CDR3 for beta chain variable domain of TCR clone 229604 (TRBV7-7, TRBJ2-5)
CASSRSGQETQYF

SEQ ID NO: 459209 - protein, 14 aa, Homo sapiens
  CDR3 for alpha chain variable domain of TCR clone 229605 (TRAV8-3, TRAJ4)
CAVGAAGGYNKLMF

SEQ ID NO: 459210 - protein, 15 aa, Homo sapiens
  CDR3 for beta chain variable domain of TCR clone 229605 (TRBV6-5, TRBJ2-1)
CASSYDAGAGNEQLF

SEQ ID NO: 459211 - protein, 15 aa, Homo sapiens
  CDR3 for alpha chain variable domain of TCR clone 229606 (TRAV4, TRAJ39)
CLVGPNNNAGNMLTF

SEQ ID NO: 459212 - protein, 14 aa, Homo sapiens
  CDR3 for beta chain variable domain of TCR clone 229606 (TRBV19, TRBJ2-1)
RASPTSVLSGEQFF

SEQ ID NO: 459213 - protein, 13 aa, Homo sapiens
  CDR3 for alpha chain variable domain of TCR clone 229607 (TRAV12-2, TRAJ24)
CAVSTDSWGKLQF

SEQ ID NO: 459214 - protein, 15 aa, Homo sapiens
  CDR3 for beta chain variable domain of TCR clone 229607 (TRBV12-4, TRBJ1-1)
CQQQDRVVANTEAFF

SEQ ID NO: 459215 - protein, 15 aa, Homo sapiens
  CDR3 for alpha chain variable domain of TCR clone 229608 (TRAV26-2, TRAJ39)
CSLRGNNNAGNMLIF

SEQ ID NO: 459216 - protein, 15 aa, Homo sapiens
  CDR3 for beta chain variable domain of TCR clone 229608 (TRBV5-4, TRBJ1-1)
CASSPLGWANTEAFF

SEQ ID NO: 459217 - protein, 13 aa, Homo sapiens
  CDR3 for alpha chain variable domain of TCR clone 229609 (TRAV1-2, TRAJ16)
CAPPGFHWPEAAL

SEQ ID NO: 459218 - protein, 13 aa, Homo sapiens
  CDR3 for beta chain variable domain of TCR clone 229609 (TRBV10-3, TRBJ1-2)
CAISERDSYGYTF

SEQ ID NO: 459219 - protein, 17 aa, Homo sapiens
  CDR3 for alpha chain variable domain of TCR clone 229610 (TRAV13-1, TRAJ28)
CAASPPYSGAGSYQLTF

SEQ ID NO: 459220 - protein, 16 aa, Homo sapiens
  CDR3 for beta chain variable domain of TCR clone 229610 (TRBV7-8, TRBJ2-1)
CASSLVGGGPYNEQFF

SEQ ID NO: 459221 - protein, 13 aa, Homo sapiens
  CDR3 for alpha chain variable domain of TCR clone 229611 (TRAV8-3, TRAJ36)
CAVGATGANNLFF

SEQ ID NO: 459222 - protein, 14 aa, Homo sapiens
  CDR3 for beta chain variable domain of TCR clone 229611 (TRBV2, TRBJ2-1)
CASSDRAYYNEQFF

SEQ ID NO: 459223 - protein, 15 aa, Homo sapiens
  CDR3 for alpha chain variable domain of TCR clone 229612 (TRAV13-1, TRAJ27)
CAARELNTNAGKSTF

SEQ ID NO: 459224 - protein, 14 aa, Homo sapiens
  CDR3 for beta chain variable domain of TCR clone 229612 (TRBV6-5, TRBJ1-2)
CASSYTRDRGRYNF

SEQ ID NO: 459225 - protein, 19 aa, Homo sapiens
  CDR3 for alpha chain variable domain of TCR clone 229613 (TRAV2, TRAJ20)
ILQVREADAAVYRDCKLIF

SEQ ID NO: 459226 - protein, 14 aa, Homo sapiens
  CDR3 for beta chain variable domain of TCR clone 229613 (TRBV6-1, TRBJ2-1)
CASAKDGLYNEQFF

SEQ ID NO: 459227 - protein, 15 aa, Homo sapiens
  CDR3 for alpha chain variable domain of TCR clone 229614 (TRAV8-3, TRAJ6)
CAVGAEHQEESTYLH

SEQ ID NO: 459228 - protein, 14 aa, Homo sapiens
  CDR3 for beta chain variable domain of TCR clone 229614 (TRBV6-6, TRBJ2-7)
CASSDSGAGYEQYF

SEQ ID NO: 459229 - protein, 14 aa, Homo sapiens
  CDR3 for alpha chain variable domain of TCR clone 229615 (TRAV17, TRAJ31)
CATVLRNNNARLMF

SEQ ID NO: 459230 - protein, 15 aa, Homo sapiens
  CDR3 for beta chain variable domain of TCR clone 229615 (TRBV20-1, TRBJ1-1)
CSASRGVTGNTEAFF

SEQ ID NO: 459231 - protein, 14 aa, Homo sapiens
  CDR3 for alpha chain variable domain of TCR clone 229616 (TRAV35, TRAJ22)
CAELRPGSARQLTS

SEQ ID NO: 459232 - protein, 13 aa, Homo sapiens
  CDR3 for beta chain variable domain of TCR clone 229616 (TRBV20-1, TRBJ2-7)
CSATHTSGDEQYF

SEQ ID NO: 459233 - protein, 16 aa, Homo sapiens
  CDR3 for alpha chain variable domain of TCR clone 229617 (TRAV3, TRAJ10)
CAVRDMRAGGGNKLTF

SEQ ID NO: 459234 - protein, 14 aa, Homo sapiens
  CDR3 for beta chain variable domain of TCR clone 229617 (TRBV6-1, TRBJ1-3)
CGSVQGGGGNTIYF

SEQ ID NO: 459235 - protein, 15 aa, Homo sapiens
  CDR3 for alpha chain variable domain of TCR clone 229618 (TRAV23/DV6, TRAJ27)
CAASKPMQANQPLGM

SEQ ID NO: 459236 - protein, 12 aa, Homo sapiens
  CDR3 for beta chain variable domain of TCR clone 229618 (TRBV12-4, TRBJ2-7)
CASSLGGYEQYF

SEQ ID NO: 459237 - protein, 12 aa, Homo sapiens
  CDR3 for alpha chain variable domain of TCR clone 229619 (TRAV36/DV7, TRAJ37)
CACYGNPAKLIF

SEQ ID NO: 459238 - protein, 14 aa, Homo sapiens
  CDR3 for beta chain variable domain of TCR clone 229619 (TRBV6-3, TRBJ1-4)
CASSGQNLNEKLFF

SEQ ID NO: 459239 - protein, 14 aa, Homo sapiens
  CDR3 for alpha chain variable domain of TCR clone 229620 (TRAV29/DV5, TRAJ36)
CAARRKTGANTLCF

SEQ ID NO: 459240 - protein, 14 aa, Homo sapiens
  CDR3 for beta chain variable domain of TCR clone 229620 (TRBV12-5, TRBJ2-5)
CASGSRTHQETQYF

SEQ ID NO: 459241 - protein, 14 aa, Homo sapiens
  CDR3 for alpha chain variable domain of TCR clone 229621 (TRAV12-3, TRAJ29)
CAMTLLSGNTPLVF

SEQ ID NO: 459242 - protein, 16 aa, Homo sapiens
  CDR3 for beta chain variable domain of TCR clone 229621 (TRBV28, TRBJ2-7)
CASSSGTSGGGYEQYF

SEQ ID NO: 459243 - protein, 11 aa, Homo sapiens
  CDR3 for alpha chain variable domain of TCR clone 229622 (TRAV13-1, TRAJ49)
CACVGGNQFYF

SEQ ID NO: 459244 - protein, 15 aa, Homo sapiens
  CDR3 for beta chain variable domain of TCR clone 229622 (TRBV29-1, TRBJ2-7)
CSVEFFDRGSYEQYF

SEQ ID NO: 459245 - protein, 12 aa, Homo sapiens
  CDR3 for alpha chain variable domain of TCR clone 229623 (TRAV29/DV5, TRAJ49)
CAASAIGNKFYF

SEQ ID NO: 459246 - protein, 17 aa, Homo sapiens
  CDR3 for beta chain variable domain of TCR clone 229623 (TRBV5-1, TRBJ2-2)
CASSRTSGRFSTGELFF

SEQ ID NO: 459247 - protein, 15 aa, Homo sapiens
  CDR3 for alpha chain variable domain of TCR clone 229624 (TRAV26-2, TRAJ50)
CILRDDETSYDKVIF

SEQ ID NO: 459248 - protein, 16 aa, Homo sapiens
  CDR3 for beta chain variable domain of TCR clone 229624 (TRBV9, TRBJ2-1)
CASSVGGGGNYNEQFF

SEQ ID NO: 459249 - protein, 15 aa, Homo sapiens
  CDR3 for alpha chain variable domain of TCR clone 229625 (TRAV35, TRAJ20)
CAGQLVGSNDYKLSF

SEQ ID NO: 459250 - protein, 13 aa, Homo sapiens
  CDR3 for beta chain variable domain of TCR clone 229625 (TRBV19, TRBJ2-7)
CASSKKGTHEQYF

SEQ ID NO: 459251 - protein, 14 aa, Homo sapiens
  CDR3 for alpha chain variable domain of TCR clone 229626 (TRAV26-1, TRAJ38)
CIADNAGNNRKLIW

SEQ ID NO: 459252 - protein, 13 aa, Homo sapiens
  CDR3 for beta chain variable domain of TCR clone 229626 (TRBV15, TRBJ2-7)
CATSTTGHYEQYF

SEQ ID NO: 459253 - protein, 12 aa, Homo sapiens
  CDR3 for alpha chain variable domain of TCR clone 229627 (TRAV17, TRAJ4)
CATRGGYNKLIF

SEQ ID NO: 459254 - protein, 12 aa, Homo sapiens
  CDR3 for beta chain variable domain of TCR clone 229627 (TRBV11-2, TRBJ2-2)
CASSLPTGELFF

SEQ ID NO: 459255 - protein, 17 aa, Homo sapiens
  CDR3 for alpha chain variable domain of TCR clone 229628 (TRAV3, TRAJ6)
CAVRDGPRAGGSYIPTF

SEQ ID NO: 459256 - protein, 14 aa, Homo sapiens
  CDR3 for beta chain variable domain of TCR clone 229628 (TRBV19, TRBJ1-5)
CASSLGLIGQPQHF

SEQ ID NO: 459257 - protein, 12 aa, Homo sapiens
  CDR3 for alpha chain variable domain of TCR clone 229629 (TRAV21, TRAJ33)
CAKMDSNYQLIW

SEQ ID NO: 459258 - protein, 14 aa, Homo sapiens
  CDR3 for beta chain variable domain of TCR clone 229629 (TRBV28, TRBJ2-1)
CASSLNGRNNEQFF

SEQ ID NO: 459259 - protein, 18 aa, Homo sapiens
  CDR3 for alpha chain variable domain of TCR clone 229630 (TRAV21, TRAJ52)
CAVRPSPAGGTSYGKLTF

SEQ ID NO: 459260 - protein, 15 aa, Homo sapiens
  CDR3 for beta chain variable domain of TCR clone 229630 (TRBV5-1, TRBJ2-1)
CASTGSGRTYNEQFF

SEQ ID NO: 459261 - protein, 11 aa, Homo sapiens
  CDR3 for alpha chain variable domain of TCR clone 229631 (TRAV13-1, TRAJ39)
CASHAGNMLNF

SEQ ID NO: 459262 - protein, 14 aa, Homo sapiens
  CDR3 for beta chain variable domain of TCR clone 229631 (TRBV11-2, TRBJ1-5)
CASSFDRGRQPQHF

SEQ ID NO: 459263 - protein, 13 aa, Homo sapiens
  CDR3 for alpha chain variable domain of TCR clone 229632 (TRAV12-1, TRAJ26)
SATYLYYGQNFVF

SEQ ID NO: 459264 - protein, 14 aa, Homo sapiens
  CDR3 for beta chain variable domain of TCR clone 229632 (TRBV7-2, TRBJ2-5)
CASSVGWAEETQYF

SEQ ID NO: 459265 - protein, 10 aa, Homo sapiens
  CDR3 for alpha chain variable domain of TCR clone 229633 (TRAV1-2, TRAJ31)
YVSEDARLMF

SEQ ID NO: 459266 - protein, 12 aa, Homo sapiens
  CDR3 for beta chain variable domain of TCR clone 229633 (TRBV11-2, TRBJ2-2)
CASSLGGGELFF

SEQ ID NO: 459267 - protein, 13 aa, Homo sapiens
  CDR3 for alpha chain variable domain of TCR clone 229634 (TRAV27, TRAJ57)
CRSAQGGSEKLVF

SEQ ID NO: 459268 - protein, 16 aa, Homo sapiens
  CDR3 for beta chain variable domain of TCR clone 229634 (TRBV10-3, TRBJ2-1)
CAISGVGDGGGGDQFF

SEQ ID NO: 459269 - protein, 14 aa, Homo sapiens
  CDR3 for alpha chain variable domain of TCR clone 229635 (TRAV17, TRAJ35)
CATDRAGFGNVLHC

SEQ ID NO: 459270 - protein, 18 aa, Homo sapiens
  CDR3 for beta chain variable domain of TCR clone 229635 (TRBV4-3, TRBJ1-6)
CASSQETPASSYNSPLHF

SEQ ID NO: 459271 - protein, 10 aa, Homo sapiens
  CDR3 for alpha chain variable domain of TCR clone 229636 (TRAV5, TRAJ34)
CAEDTDKLIF

SEQ ID NO: 459272 - protein, 13 aa, Homo sapiens
  CDR3 for beta chain variable domain of TCR clone 229636 (TRBV29-1, TRBJ2-2)
CSTTGVNTGELFF

SEQ ID NO: 459273 - protein, 12 aa, Homo sapiens
  CDR3 for alpha chain variable domain of TCR clone 229637 (TRAV17, TRAJ54)
CATPQGAQKLVF

SEQ ID NO: 459274 - protein, 17 aa, Homo sapiens
  CDR3 for beta chain variable domain of TCR clone 229637 (TRBV11-2, TRBJ2-4)
CASSFLALGGAGDIQYF

SEQ ID NO: 459275 - protein, 12 aa, Homo sapiens
  CDR3 for alpha chain variable domain of TCR clone 229638 (TRAV1-1, TRAJ15)
CAVGQAGTALIF

SEQ ID NO: 459276 - protein, 14 aa, Homo sapiens
  CDR3 for beta chain variable domain of TCR clone 229638 (TRBV4-2, TRBJ2-1)
CASGLDRAYNEQFF

SEQ ID NO: 459277 - protein, 15 aa, Homo sapiens
  CDR3 for alpha chain variable domain of TCR clone 229639 (TRAV20, TRAJ41)
CAVQANSNSGYALNF

SEQ ID NO: 459278 - protein, 18 aa, Homo sapiens
  CDR3 for beta chain variable domain of TCR clone 229639 (TRBV7-9, TRBJ2-7)
CASSLTTSGRRTWYEQYF

SEQ ID NO: 459279 - protein, 16 aa, Homo sapiens
  CDR3 for alpha chain variable domain of TCR clone 229640 (TRAV4, TRAJ22)
CLVGDLYSGSARQLTF

SEQ ID NO: 459280 - protein, 14 aa, Homo sapiens
  CDR3 for beta chain variable domain of TCR clone 229640 (TRBV28, TRBJ2-3)
CASSCRGRADTQYF

SEQ ID NO: 459281 - protein, 14 aa, Homo sapiens
  CDR3 for alpha chain variable domain of TCR clone 229641 (TRAV1-2, TRAJ8)
CAVREDTGFQKLVF

SEQ ID NO: 459282 - protein, 12 aa, Homo sapiens
  CDR3 for beta chain variable domain of TCR clone 229641 (TRBV11-2, TRBJ2-2)
CASSLPTGELSF

SEQ ID NO: 459283 - protein, 14 aa, Homo sapiens
  CDR3 for alpha chain variable domain of TCR clone 229642 (TRAV8-1, TRAJ49)
CASSIANTGNQFYF

SEQ ID NO: 459284 - protein, 20 aa, Homo sapiens
  CDR3 for beta chain variable domain of TCR clone 229642 (TRBV9, TRBJ2-2)
CASSAEPLGLAGELHRVLFF

SEQ ID NO: 459285 - protein, 12 aa, Homo sapiens
  CDR3 for alpha chain variable domain of TCR clone 229643 (TRAV36/DV7, TRAJ54)
CDVVRGAQKLVF

SEQ ID NO: 459286 - protein, 14 aa, Homo sapiens
  CDR3 for beta chain variable domain of TCR clone 229643 (TRBV7-3, TRBJ1-1)
CASSLKGGNTEAFF

SEQ ID NO: 459287 - protein, 15 aa, Homo sapiens
  CDR3 for alpha chain variable domain of TCR clone 229644 (TRAV17, TRAJ52)
CATEAGGTSYGKLTF

SEQ ID NO: 459288 - protein, 13 aa, Homo sapiens
  CDR3 for beta chain variable domain of TCR clone 229644 (TRBV12-4, TRBJ1-2)
CASSLRQGKGYTF

SEQ ID NO: 459289 - protein, 15 aa, Homo sapiens
  CDR3 for alpha chain variable domain of TCR clone 229645 (TRAV14/DV4, TRAJ46)
CAMREKKSSGDKLTF

SEQ ID NO: 459290 - protein, 13 aa, Homo sapiens
  CDR3 for beta chain variable domain of TCR clone 229645 (TRBV20-1, TRBJ2-5)
CSAGEAFQETQYF

SEQ ID NO: 459291 - protein, 13 aa, Homo sapiens
  CDR3 for alpha chain variable domain of TCR clone 229646 (TRAV2, TRAJ40)
CAVVTSGTYKYIF

SEQ ID NO: 459292 - protein, 12 aa, Homo sapiens
  CDR3 for beta chain variable domain of TCR clone 229646 (TRBV28, TRBJ2-6)
CAIQAGANVPTF

SEQ ID NO: 459293 - protein, 13 aa, Homo sapiens
  CDR3 for alpha chain variable domain of TCR clone 229647 (TRAV12-2, TRAJ20)
CAVYPSNDYKLSF

SEQ ID NO: 459294 - protein, 14 aa, Homo sapiens
  CDR3 for beta chain variable domain of TCR clone 229647 (TRBV7-2, TRBJ2-2)
CASRGQGAAGELFF

SEQ ID NO: 459295 - protein, 18 aa, Homo sapiens
  CDR3 for alpha chain variable domain of TCR clone 229648 (TRAV13-1, TRAJ52)
CAASKRSAGGTSYGKLTF

SEQ ID NO: 459296 - protein, 13 aa, Homo sapiens
  CDR3 for beta chain variable domain of TCR clone 229648 (TRBV12-4, TRBJ1-2)
CASSVRQGKGDTF

SEQ ID NO: 459297 - protein, 14 aa, Homo sapiens
  CDR3 for alpha chain variable domain of TCR clone 229649 (TRAV12-2, TRAJ17)
CAVLFKAAGNKLTF

SEQ ID NO: 459298 - protein, 16 aa, Homo sapiens
  CDR3 for beta chain variable domain of TCR clone 229649 (TRBV7-8, TRBJ2-4)
CASSAERTLAKNIQYF

SEQ ID NO: 459299 - protein, 16 aa, Homo sapiens
  CDR3 for alpha chain variable domain of TCR clone 229650 (TRAV30, TRAJ24)
CGTEIVDADSWGKFQF

SEQ ID NO: 459300 - protein, 15 aa, Homo sapiens
  CDR3 for beta chain variable domain of TCR clone 229650 (TRBV7-2, TRBJ2-2)
CASSSLTGGTGELFF

SEQ ID NO: 459301 - protein, 18 aa, Homo sapiens
  CDR3 for alpha chain variable domain of TCR clone 229651 (TRAV8-6, TRAJ52)
CAVSRANAGGTSYGKLTF

SEQ ID NO: 459302 - protein, 19 aa, Homo sapiens
  CDR3 for beta chain variable domain of TCR clone 229651 (TRBV7-2, TRBJ2-3)
CAISSQGGPRLAGADTQYF

SEQ ID NO: 459303 - protein, 15 aa, Homo sapiens
  CDR3 for alpha chain variable domain of TCR clone 229652 (TRAV12-3, TRAJ49)
CAMAVTPNTGNQFYF

SEQ ID NO: 459304 - protein, 11 aa, Homo sapiens
  CDR3 for beta chain variable domain of TCR clone 229652 (TRBV10-3, TRBJ2-7)
CAISEGLEQYF

SEQ ID NO: 459305 - protein, 14 aa, Homo sapiens
  CDR3 for alpha chain variable domain of TCR clone 229653 (TRAV8-4, TRAJ48)
CAVSETFGNEKLTF

SEQ ID NO: 459306 - protein, 17 aa, Homo sapiens
  CDR3 for beta chain variable domain of TCR clone 229653 (TRBV24-1, TRBJ2-1)
CATSDVSSSGTYNEQFF

SEQ ID NO: 459307 - protein, 13 aa, Homo sapiens
  CDR3 for alpha chain variable domain of TCR clone 229654 (TRAV38-1, TRAJ42)
CARWGGSQGNVIF

SEQ ID NO: 459308 - protein, 13 aa, Homo sapiens
  CDR3 for beta chain variable domain of TCR clone 229654 (TRBV14, TRBJ1-2)
CASSEDRRYGYTF

SEQ ID NO: 459309 - protein, 14 aa, Homo sapiens
  CDR3 for alpha chain variable domain of TCR clone 229655 (TRAV12-2, TRAJ13)
CAVNKTGGYQKVTL

SEQ ID NO: 459310 - protein, 13 aa, Homo sapiens
  CDR3 for beta chain variable domain of TCR clone 229655 (TRBV11-2, TRBJ2-5)
CASSFSSQETQYF

SEQ ID NO: 459311 - protein, 15 aa, Homo sapiens
  CDR3 for alpha chain variable domain of TCR clone 229656 (TRAV8-6, TRAJ26)
CAVSDQSPGGQNFVC

SEQ ID NO: 459312 - protein, 13 aa, Homo sapiens
  CDR3 for beta chain variable domain of TCR clone 229656 (TRBV27, TRBJ2-7)
CASSLRHRYEQYF

SEQ ID NO: 459313 - protein, 13 aa, Homo sapiens
  CDR3 for alpha chain variable domain of TCR clone 229657 (TRAV20, TRAJ37)
CAGCSSNTCKLIF

SEQ ID NO: 459314 - protein, 15 aa, Homo sapiens
  CDR3 for beta chain variable domain of TCR clone 229657 (TRBV7-2, TRBJ2-1)
CASSFQADEYNEQFF

SEQ ID NO: 459315 - protein, 15 aa, Homo sapiens
  CDR3 for alpha chain variable domain of TCR clone 229658 (TRAV34, TRAJ38)
CGADFTPGNNRKLIW

SEQ ID NO: 459316 - protein, 13 aa, Homo sapiens
  CDR3 for beta chain variable domain of TCR clone 229658 (TRBV3-1, TRBJ1-1)
CASSPGVITEAFF

SEQ ID NO: 459317 - protein, 14 aa, Homo sapiens
  CDR3 for alpha chain variable domain of TCR clone 229659 (TRAV1-2, TRAJ16)
CAVNRFSDGQKMLF

SEQ ID NO: 459318 - protein, 14 aa, Homo sapiens
  CDR3 for beta chain variable domain of TCR clone 229659 (TRBV19, TRBJ2-1)
CASPTFVLSGEQFF

SEQ ID NO: 459319 - protein, 12 aa, Homo sapiens
  CDR3 for alpha chain variable domain of TCR clone 229660 (TRAV27, TRAJ20)
CAGASNDYKLSF

SEQ ID NO: 459320 - protein, 12 aa, Homo sapiens
  CDR3 for beta chain variable domain of TCR clone 229660 (TRBV19, TRBJ2-1)
CASSMQDTEQFF

SEQ ID NO: 459321 - protein, 16 aa, Homo sapiens
  CDR3 for alpha chain variable domain of TCR clone 229661 (TRAV2, TRAJ13)
CAARLLGVTRKLPLEL

SEQ ID NO: 459322 - protein, 14 aa, Homo sapiens
  CDR3 for beta chain variable domain of TCR clone 229661 (TRBV5-1, TRBJ2-3)
CASSRGQGGGTQYF

SEQ ID NO: 459323 - protein, 15 aa, Homo sapiens
  CDR3 for alpha chain variable domain of TCR clone 229662 (TRAV38-1, TRAJ30)
CAFMMSYGGDDKIIF

SEQ ID NO: 459324 - protein, 13 aa, Homo sapiens
  CDR3 for beta chain variable domain of TCR clone 229662 (TRBV7-9, TRBJ1-2)
CASSLKQNYGYTF

SEQ ID NO: 459325 - protein, 17 aa, Homo sapiens
  CDR3 for alpha chain variable domain of TCR clone 229663 (TRAV26-1, TRAJ27)
CIVSTPWINTNAGKSTF

SEQ ID NO: 459326 - protein, 16 aa, Homo sapiens
  CDR3 for beta chain variable domain of TCR clone 229663 (TRBV7-9, TRBJ2-1)
CASSLDPGPAIDEQFF

SEQ ID NO: 459327 - protein, 13 aa, Homo sapiens
  CDR3 for alpha chain variable domain of TCR clone 229664 (TRAV21, TRAJ20)
CAVGVFADYKLSF

SEQ ID NO: 459328 - protein, 15 aa, Homo sapiens
  CDR3 for beta chain variable domain of TCR clone 229664 (TRBV5-1, TRBJ2-7)
CASSLGDFTTYEQYF

SEQ ID NO: 459329 - protein, 16 aa, Homo sapiens
  CDR3 for alpha chain variable domain of TCR clone 229665 (TRAV16, TRAJ4)
CALSRMFSGGYNKLIF

SEQ ID NO: 459330 - protein, 14 aa, Homo sapiens
  CDR3 for beta chain variable domain of TCR clone 229665 (TRBV19, TRBJ2-5)
CASSSSGIQETQYF

SEQ ID NO: 459331 - protein, 11 aa, Homo sapiens
  CDR3 for alpha chain variable domain of TCR clone 229666 (TRAV12-1, TRAJ21)
CVVNNFNKFYF

SEQ ID NO: 459332 - protein, 14 aa, Homo sapiens
  CDR3 for beta chain variable domain of TCR clone 229666 (TRBV15, TRBJ1-5)
CATSREQTNQPQHF

SEQ ID NO: 459333 - protein, 13 aa, Homo sapiens
  CDR3 for alpha chain variable domain of TCR clone 229667 (TRAV38-1, TRAJ42)
CARWGGSQGNLIF

SEQ ID NO: 459334 - protein, 16 aa, Homo sapiens
  CDR3 for beta chain variable domain of TCR clone 229667 (TRBV28, TRBJ1-4)
CASSPPYRGRSEKLFF

SEQ ID NO: 459335 - protein, 15 aa, Homo sapiens
  CDR3 for alpha chain variable domain of TCR clone 229668 (TRAV3, TRAJ13)
SAVRVYSGGYQKVTF

SEQ ID NO: 459336 - protein, 15 aa, Homo sapiens
  CDR3 for beta chain variable domain of TCR clone 229668 (TRBV5-7, TRBJ1-2)
CASSLGVAANYGYTF

SEQ ID NO: 459337 - protein, 13 aa, Homo sapiens
  CDR3 for alpha chain variable domain of TCR clone 229669 (TRAV27, TRAJ41)
CAGEGNSGYALNF

SEQ ID NO: 459338 - protein, 16 aa, Homo sapiens
  CDR3 for beta chain variable domain of TCR clone 229669 (TRBV29-1, TRBJ2-7)
CSVEVVGTSGSYEQYF

SEQ ID NO: 459339 - protein, 16 aa, Homo sapiens
  CDR3 for alpha chain variable domain of TCR clone 229670 (TRAV26-2, TRAJ52)
CIRGPAGGTSYGKLTF

SEQ ID NO: 459340 - protein, 13 aa, Homo sapiens
  CDR3 for beta chain variable domain of TCR clone 229670 (TRBV12-5, TRBJ2-3)
CASGDRQSDTQYF

SEQ ID NO: 459341 - protein, 16 aa, Homo sapiens
  CDR3 for alpha chain variable domain of TCR clone 229671 (TRAV12-2, TRAJ50)
CAVGTATKTSYDKVIF

SEQ ID NO: 459342 - protein, 12 aa, Homo sapiens
  CDR3 for beta chain variable domain of TCR clone 229671 (TRBV12-4, TRBJ1-5)
CASSLGMQPQHV

SEQ ID NO: 459343 - protein, 12 aa, Homo sapiens
  CDR3 for alpha chain variable domain of TCR clone 229672 (TRAV3, TRAJ43)
CAVRDPNNDMRF

SEQ ID NO: 459344 - protein, 14 aa, Homo sapiens
  CDR3 for beta chain variable domain of TCR clone 229672 (TRBV18, TRBJ2-5)
CASSPGVSQETQYF

SEQ ID NO: 459345 - protein, 13 aa, Homo sapiens
  CDR3 for alpha chain variable domain of TCR clone 229673 (TRAV27, TRAJ45)
CRSSGGGADGLTF

SEQ ID NO: 459346 - protein, 15 aa, Homo sapiens
  CDR3 for beta chain variable domain of TCR clone 229673 (TRBV28, TRBJ2-5)
CASSPPWSYQETQYF

SEQ ID NO: 459347 - protein, 16 aa, Homo sapiens
  CDR3 for alpha chain variable domain of TCR clone 229674 (TRAV3, TRAJ37)
CAVRVRGSGNTGKLIF

SEQ ID NO: 459348 - protein, 15 aa, Homo sapiens
  CDR3 for beta chain variable domain of TCR clone 229674 (TRBV3-1, TRBJ2-1)
CAISPRDSGFNEHFF

SEQ ID NO: 459349 - protein, 13 aa, Homo sapiens
  CDR3 for alpha chain variable domain of TCR clone 229675 (TRAV36/DV7, TRAJ21)
CAVEAYNFNKFYF

SEQ ID NO: 459350 - protein, 12 aa, Homo sapiens
  CDR3 for beta chain variable domain of TCR clone 229675 (TRBV12-4, TRBJ2-7)
CASSLGGYEQYF

SEQ ID NO: 459351 - protein, 14 aa, Homo sapiens
  CDR3 for alpha chain variable domain of TCR clone 229676 (TRAV1-2, TRAJ8)
CAVREDTGFQKLAF

SEQ ID NO: 459352 - protein, 15 aa, Homo sapiens
  CDR3 for beta chain variable domain of TCR clone 229676 (TRBV19, TRBJ2-1)
CASSTGTSAYNEQFF

SEQ ID NO: 459353 - protein, 14 aa, Homo sapiens
  CDR3 for alpha chain variable domain of TCR clone 229677 (TRAV12-3, TRAJ10)
SHLPLTGGGNKLTF

SEQ ID NO: 459354 - protein, 14 aa, Homo sapiens
  CDR3 for beta chain variable domain of TCR clone 229677 (TRBV5-4, TRBJ2-1)
CASSLDQGLNEQFF

SEQ ID NO: 459355 - protein, 12 aa, Homo sapiens
  CDR3 for alpha chain variable domain of TCR clone 229678 (TRAV3, TRAJ27)
CAVRDGAGKSTF

SEQ ID NO: 459356 - protein, 13 aa, Homo sapiens
  CDR3 for beta chain variable domain of TCR clone 229678 (TRBV10-3, TRBJ1-2)
CAIDADLNYGYTF

SEQ ID NO: 459357 - protein, 15 aa, Homo sapiens
  CDR3 for alpha chain variable domain of TCR clone 229679 (TRAV17, TRAJ10)
CATVLLTGGVNKLTF

SEQ ID NO: 459358 - protein, 16 aa, Homo sapiens
  CDR3 for beta chain variable domain of TCR clone 229679 (TRBV7-9, TRBJ2-3)
CASSPWREVGTDTQYF

SEQ ID NO: 459359 - protein, 15 aa, Homo sapiens
  CDR3 for alpha chain variable domain of TCR clone 229680 (TRAV3, TRAJ5)
CAVRDLATGRRALTF

SEQ ID NO: 459360 - protein, 14 aa, Homo sapiens
  CDR3 for beta chain variable domain of TCR clone 229680 (TRBV25-1, TRBJ1-1)
CASTHLGGNTEAFF

SEQ ID NO: 459361 - protein, 17 aa, Homo sapiens
  CDR3 for alpha chain variable domain of TCR clone 229681 (TRAV14/DV4, TRAJ28)
CAMRGTSSGSGSYQLTF

SEQ ID NO: 459362 - protein, 13 aa, Homo sapiens
  CDR3 for beta chain variable domain of TCR clone 229681 (TRBV28, TRBJ2-5)
CASSFAGGETQYF

SEQ ID NO: 459363 - protein, 13 aa, Homo sapiens
  CDR3 for alpha chain variable domain of TCR clone 229682 (TRAV12-2, TRAJ50)
CAVIVTSYDKVIF

SEQ ID NO: 459364 - protein, 14 aa, Homo sapiens
  CDR3 for beta chain variable domain of TCR clone 229682 (TRBV9, TRBJ2-1)
CASSVDPRGKEKFF

SEQ ID NO: 459365 - protein, 14 aa, Homo sapiens
  CDR3 for alpha chain variable domain of TCR clone 229683 (TRAV3, TRAJ21)
CAVESQANFNKFYF

SEQ ID NO: 459366 - protein, 18 aa, Homo sapiens
  CDR3 for beta chain variable domain of TCR clone 229683 (TRBV7-9, TRBJ2-1)
CASSLAASWTSGRNEQFF

SEQ ID NO: 459367 - protein, 11 aa, Homo sapiens
  CDR3 for alpha chain variable domain of TCR clone 229684 (TRAV12-3, TRAJ20)
CAMSYDYKLSF

SEQ ID NO: 459368 - protein, 14 aa, Homo sapiens
  CDR3 for beta chain variable domain of TCR clone 229684 (TRBV7-2, TRBJ2-7)
CASSPKTSCYEQYF

SEQ ID NO: 459369 - protein, 12 aa, Homo sapiens
  CDR3 for alpha chain variable domain of TCR clone 229685 (TRAV21, TRAJ33)
CAKMDSNYQLIW

SEQ ID NO: 459370 - protein, 14 aa, Homo sapiens
  CDR3 for beta chain variable domain of TCR clone 229685 (TRBV2, TRBJ2-7)
CASSLASGGYERYF

SEQ ID NO: 459371 - protein, 15 aa, Homo sapiens
  CDR3 for alpha chain variable domain of TCR clone 229686 (TRAV14/DV4, TRAJ22)
CAMREGWTTARQLTF

SEQ ID NO: 459372 - protein, 13 aa, Homo sapiens
  CDR3 for beta chain variable domain of TCR clone 229686 (TRBV5-4, TRBJ1-2)
CASSSRENYGYAF

SEQ ID NO: 459373 - protein, 14 aa, Homo sapiens
  CDR3 for alpha chain variable domain of TCR clone 229687 (TRAV4, TRAJ9)
CLVGSGTGGFKTIF

SEQ ID NO: 459374 - protein, 17 aa, Homo sapiens
  CDR3 for beta chain variable domain of TCR clone 229687 (TRBV7-3, TRBJ2-2)
CASSLSGTSGGTGELSF

SEQ ID NO: 459375 - protein, 14 aa, Homo sapiens
  CDR3 for alpha chain variable domain of TCR clone 229688 (TRAV20, TRAJ56)
CAVQFGGANGKLTF

SEQ ID NO: 459376 - protein, 14 aa, Homo sapiens
  CDR3 for beta chain variable domain of TCR clone 229688 (TRBV7-2, TRBJ1-1)
CASSFLTGTTEAFF

SEQ ID NO: 459377 - protein, 16 aa, Homo sapiens
  CDR3 for alpha chain variable domain of TCR clone 229689 (TRAV26-1, TRAJ45)
CIVEKYSGGGADGLTF

SEQ ID NO: 459378 - protein, 12 aa, Homo sapiens
  CDR3 for beta chain variable domain of TCR clone 229689 (TRBV15, TRBJ2-7)
AEAIQQAYEQYF

SEQ ID NO: 459379 - protein, 14 aa, Homo sapiens
  CDR3 for alpha chain variable domain of TCR clone 229690 (TRAV4, TRAJ20)
CLVGDFINDYKPSF

SEQ ID NO: 459380 - protein, 15 aa, Homo sapiens
  CDR3 for beta chain variable domain of TCR clone 229690 (TRBV9, TRBJ1-6)
CASSVAGTGDSPLHF

SEQ ID NO: 459381 - protein, 13 aa, Homo sapiens
  CDR3 for alpha chain variable domain of TCR clone 229691 (TRAV8-4, TRAJ30)
CAVGVNRDDKIIF

SEQ ID NO: 459382 - protein, 13 aa, Homo sapiens
  CDR3 for beta chain variable domain of TCR clone 229691 (TRBV3-1, TRBJ2-2)
CASLARGSGELFF

SEQ ID NO: 459383 - protein, 14 aa, Homo sapiens
  CDR3 for alpha chain variable domain of TCR clone 229692 (TRAV26-1, TRAJ21)
CIVRPPYNFNKFYF

SEQ ID NO: 459384 - protein, 14 aa, Homo sapiens
  CDR3 for beta chain variable domain of TCR clone 229692 (TRBV4-1, TRBJ2-2)
CASSRAVNTGELFF

SEQ ID NO: 459385 - protein, 11 aa, Homo sapiens
  CDR3 for alpha chain variable domain of TCR clone 229693 (TRAV3, TRAJ21)
CAVGNFNKFYF

SEQ ID NO: 459386 - protein, 16 aa, Homo sapiens
  CDR3 for beta chain variable domain of TCR clone 229693 (TRBV5-1, TRBJ2-2)
CASSLWDTTNTGELFF

SEQ ID NO: 459387 - protein, 14 aa, Homo sapiens
  CDR3 for alpha chain variable domain of TCR clone 229694 (TRAV29/DV5, TRAJ48)
CAAMSLFGNEKLTF

SEQ ID NO: 459388 - protein, 12 aa, Homo sapiens
  CDR3 for beta chain variable domain of TCR clone 229694 (TRBV28, TRBJ2-3)
CASSLYRDTQYF

SEQ ID NO: 459389 - protein, 17 aa, Homo sapiens
  CDR3 for alpha chain variable domain of TCR clone 229695 (TRAV12-3, TRAJ6)
CAMSARGGAGGSYIPTF

SEQ ID NO: 459390 - protein, 13 aa, Homo sapiens
  CDR3 for beta chain variable domain of TCR clone 229695 (TRBV12-4, TRBJ1-1)
CASSPGTGFEAFF

SEQ ID NO: 459391 - protein, 15 aa, Homo sapiens
  CDR3 for alpha chain variable domain of TCR clone 229696 (TRAV26-2, TRAJ13)
CILRDLSGGYQKVTF

SEQ ID NO: 459392 - protein, 11 aa, Homo sapiens
  CDR3 for beta chain variable domain of TCR clone 229696 (TRBV7-9, TRBJ2-3)
CARSYTDTQYF

SEQ ID NO: 459393 - protein, 15 aa, Homo sapiens
  CDR3 for alpha chain variable domain of TCR clone 229697 (TRAV26-1, TRAJ37)
CIVKTGSSNTGKLIF

SEQ ID NO: 459394 - protein, 12 aa, Homo sapiens
  CDR3 for beta chain variable domain of TCR clone 229697 (TRBV7-8, TRBJ2-7)
CASSLGDREQHF

SEQ ID NO: 459395 - protein, 16 aa, Homo sapiens
  CDR3 for alpha chain variable domain of TCR clone 229698 (TRAV30, TRAJ24)
CGTEIVDADSWGKFQF

SEQ ID NO: 459396 - protein, 13 aa, Homo sapiens
  CDR3 for beta chain variable domain of TCR clone 229698 (TRBV20-1, TRBJ2-1)
CSATTFGEGEQFF

SEQ ID NO: 459397 - protein, 16 aa, Homo sapiens
  CDR3 for alpha chain variable domain of TCR clone 229699 (TRAV26-1, TRAJ58)
IASSESGETSGSRLTF

SEQ ID NO: 459398 - protein, 16 aa, Homo sapiens
  CDR3 for beta chain variable domain of TCR clone 229699 (TRBV7-2, TRBJ2-5)
CQRPRQGRKARETQYF

SEQ ID NO: 459399 - protein, 14 aa, Homo sapiens
  CDR3 for alpha chain variable domain of TCR clone 229700 (TRAV16, TRAJ33)
CALSAMDSNYQLIW

SEQ ID NO: 459400 - protein, 13 aa, Homo sapiens
  CDR3 for beta chain variable domain of TCR clone 229700 (TRBV20-1, TRBJ1-1)
CSAPLGGGTEAFF

SEQ ID NO: 459401 - protein, 11 aa, Homo sapiens
  CDR3 for alpha chain variable domain of TCR clone 229701 (TRAV12-3, TRAJ43)
CALSVSNDMRF

SEQ ID NO: 459402 - protein, 14 aa, Homo sapiens
  CDR3 for beta chain variable domain of TCR clone 229701 (TRBV7-8, TRBJ2-3)
CASSLEAGTDTQYF

SEQ ID NO: 459403 - protein, 13 aa, Homo sapiens
  CDR3 for alpha chain variable domain of TCR clone 229702 (TRAV12-3, TRAJ13)
CAMTSGGYQRVTF

SEQ ID NO: 459404 - protein, 13 aa, Homo sapiens
  CDR3 for beta chain variable domain of TCR clone 229702 (TRBV20-1, TRBJ2-2)
CSALSGGAGELLF

SEQ ID NO: 459405 - protein, 11 aa, Homo sapiens
  CDR3 for alpha chain variable domain of TCR clone 229703 (TRAV13-2, TRAJ23)
FAESPRGKLIF

SEQ ID NO: 459406 - protein, 12 aa, Homo sapiens
  CDR3 for beta chain variable domain of TCR clone 229703 (TRBV11-2, TRBJ2-2)
CASSLGGGELFF

SEQ ID NO: 459407 - protein, 12 aa, Homo sapiens
  CDR3 for alpha chain variable domain of TCR clone 229704 (TRAV2, TRAJ33)
CAFMDSNYQLIW

SEQ ID NO: 459408 - protein, 15 aa, Homo sapiens
  CDR3 for beta chain variable domain of TCR clone 229704 (TRBV7-3, TRBJ2-1)
CASSLGQGPFGEQFF

SEQ ID NO: 459409 - protein, 14 aa, Homo sapiens
  CDR3 for alpha chain variable domain of TCR clone 229705 (TRAV13-1, TRAJ43)
CAATILYNNNDMRF

SEQ ID NO: 459410 - protein, 11 aa, Homo sapiens
  CDR3 for beta chain variable domain of TCR clone 229705 (TRBV29-1, TRBJ2-5)
CSEDRTGTQYF

SEQ ID NO: 459411 - protein, 13 aa, Homo sapiens
  CDR3 for alpha chain variable domain of TCR clone 229706 (TRAV3, TRAJ30)
CAVRDRGGDKIIF

SEQ ID NO: 459412 - protein, 16 aa, Homo sapiens
  CDR3 for beta chain variable domain of TCR clone 229706 (TRBV7-3, TRBJ2-2)
CASSLKRGTLSGELFF

SEQ ID NO: 459413 - protein, 15 aa, Homo sapiens
  CDR3 for alpha chain variable domain of TCR clone 229707 (TRAV8-4, TRAJ10)
CAVSDGPGGGKKFTL

SEQ ID NO: 459414 - protein, 13 aa, Homo sapiens
  CDR3 for beta chain variable domain of TCR clone 229707 (TRBV28, TRBJ1-3)
CASSFLGSGTIYF

SEQ ID NO: 459415 - protein, 12 aa, Homo sapiens
  CDR3 for alpha chain variable domain of TCR clone 229708 (TRAV2, TRAJ9)
CAVGAGGFKTIF

SEQ ID NO: 459416 - protein, 11 aa, Homo sapiens
  CDR3 for beta chain variable domain of TCR clone 229708 (TRBV13, TRBJ2-2)
CASSTRTGEHT

SEQ ID NO: 459417 - protein, 14 aa, Homo sapiens
  CDR3 for alpha chain variable domain of TCR clone 229709 (TRAV8-1, TRAJ32)
CAVNARGATNKLIF

SEQ ID NO: 459418 - protein, 18 aa, Homo sapiens
  CDR3 for beta chain variable domain of TCR clone 229709 (TRBV7-9, TRBJ2-7)
CASSLTTSGSRTWYEQYF

SEQ ID NO: 459419 - protein, 12 aa, Homo sapiens
  CDR3 for alpha chain variable domain of TCR clone 229710 (TRAV12-3, TRAJ17)
CAMTLTGNKLTF

SEQ ID NO: 459420 - protein, 13 aa, Homo sapiens
  CDR3 for beta chain variable domain of TCR clone 229710 (TRBV11-2, TRBJ2-5)
CASSRGPSETQYF

SEQ ID NO: 459421 - protein, 13 aa, Homo sapiens
  CDR3 for alpha chain variable domain of TCR clone 229711 (TRAV13-1, TRAJ11)
CAASIRGYSTLTF

SEQ ID NO: 459422 - protein, 10 aa, Homo sapiens
  CDR3 for beta chain variable domain of TCR clone 229711 (TRBV4-3, TRBJ1-2)
CASSSRLQAG

SEQ ID NO: 459423 - protein, 17 aa, Homo sapiens
  CDR3 for alpha chain variable domain of TCR clone 229712 (TRAV3, TRAJ42)
CAVRDRDYGGSQGNLIF

SEQ ID NO: 459424 - protein, 16 aa, Homo sapiens
  CDR3 for beta chain variable domain of TCR clone 229712 (TRBV6-6, TRBJ2-7)
CASSYSYGGSYEQYFG

SEQ ID NO: 459425 - protein, 11 aa, Homo sapiens
  CDR3 for alpha chain variable domain of TCR clone 229713 (TRAV13-1, TRAJ15)
CAATPATALIF

SEQ ID NO: 459426 - protein, 17 aa, Homo sapiens
  CDR3 for beta chain variable domain of TCR clone 229713 (TRBV13, TRBJ2-3)
CASSLSRVAGGRNTQYF

SEQ ID NO: 459427 - protein, 16 aa, Homo sapiens
  CDR3 for alpha chain variable domain of TCR clone 229714 (TRAV3, TRAJ18)
CAVRDGRGSTLGKLYF

SEQ ID NO: 459428 - protein, 15 aa, Homo sapiens
  CDR3 for beta chain variable domain of TCR clone 229714 (TRBV7-9, TRBJ1-6)
CDSSSPGRGNSPLHF

SEQ ID NO: 459429 - protein, 11 aa, Homo sapiens
  CDR3 for alpha chain variable domain of TCR clone 229715 (TRAV26-1, TRAJ37)
CIVRVGRKLIF

SEQ ID NO: 459430 - protein, 19 aa, Homo sapiens
  CDR3 for beta chain variable domain of TCR clone 229715 (TRBV7-9, TRBJ2-6)
CASSLESATVLPGANVLTF

SEQ ID NO: 459431 - protein, 16 aa, Homo sapiens
  CDR3 for alpha chain variable domain of TCR clone 229716 (TRAV16, TRAJ57)
CAPYLITQGGSEKLVF

SEQ ID NO: 459432 - protein, 17 aa, Homo sapiens
  CDR3 for beta chain variable domain of TCR clone 229716 (TRBV24-1, TRBJ2-4)
CATSDAEALGVRNIQYF

SEQ ID NO: 459433 - protein, 19 aa, Homo sapiens
  CDR3 for alpha chain variable domain of TCR clone 229717 (TRAV1-2, TRAJ26)
CLLPLCCERPDNYGQNFVF

SEQ ID NO: 459434 - protein, 14 aa, Homo sapiens
  CDR3 for beta chain variable domain of TCR clone 229717 (TRBV19, TRBJ2-5)
CASSMTGQQETQYF

SEQ ID NO: 459435 - protein, 12 aa, Homo sapiens
  CDR3 for alpha chain variable domain of TCR clone 229718 (TRAV12-3, TRAJ17)
CAMTLTGNKLTF

SEQ ID NO: 459436 - protein, 13 aa, Homo sapiens
  CDR3 for beta chain variable domain of TCR clone 229718 (TRBV18, TRBJ2-7)
CQLTERGAYEQYF

SEQ ID NO: 459437 - protein, 12 aa, Homo sapiens
  CDR3 for alpha chain variable domain of TCR clone 229719 (TRAV1-2, TRAJ42)
CVAGGSQGNLIF

SEQ ID NO: 459438 - protein, 16 aa, Homo sapiens
  CDR3 for beta chain variable domain of TCR clone 229719 (TRBV7-9, TRBJ2-6)
CASSLKGPLRANVLTF

SEQ ID NO: 459439 - protein, 13 aa, Homo sapiens
  CDR3 for alpha chain variable domain of TCR clone 229720 (TRAV8-3, TRAJ28)
CAVGAVGSYQLTF

SEQ ID NO: 459440 - protein, 14 aa, Homo sapiens
  CDR3 for beta chain variable domain of TCR clone 229720 (TRBV15, TRBJ2-1)
CATSRFTGGNEQFF

SEQ ID NO: 459441 - protein, 16 aa, Homo sapiens
  CDR3 for alpha chain variable domain of TCR clone 229721 (TRAV3, TRAJ27)
CAMRDPQGTNAGKSTF

SEQ ID NO: 459442 - protein, 17 aa, Homo sapiens
  CDR3 for beta chain variable domain of TCR clone 229721 (TRBV4-1, TRBJ2-7)
CASSQGRGLQTSYEQYF

SEQ ID NO: 459443 - protein, 13 aa, Homo sapiens
  CDR3 for alpha chain variable domain of TCR clone 229722 (TRAV12-2, TRAJ4)
CAVFSGGYNKLIF

SEQ ID NO: 459444 - protein, 13 aa, Homo sapiens
  CDR3 for beta chain variable domain of TCR clone 229722 (TRBV19, TRBJ1-5)
CASSIDRDQPQHV

SEQ ID NO: 459445 - protein, 18 aa, Homo sapiens
  CDR3 for alpha chain variable domain of TCR clone 229723 (TRAV21, TRAJ52)
CAVKPSPAGGTSYGKLTF

SEQ ID NO: 459446 - protein, 16 aa, Homo sapiens
  CDR3 for beta chain variable domain of TCR clone 229723 (TRBV13, TRBJ2-3)
CQQPLQGSGGGNTQYF

SEQ ID NO: 459447 - protein, 11 aa, Homo sapiens
  CDR3 for alpha chain variable domain of TCR clone 229724 (TRAV13-1, TRAJ39)
CASHAGNMLTF

SEQ ID NO: 459448 - protein, 15 aa, Homo sapiens
  CDR3 for beta chain variable domain of TCR clone 229724 (TRBV5-1, TRBJ2-5)
CASSFKGGDQETQYF

SEQ ID NO: 459449 - protein, 14 aa, Homo sapiens
  CDR3 for alpha chain variable domain of TCR clone 229725 (TRAV35, TRAJ33)
CAGSSQDSNYQVIW

SEQ ID NO: 459450 - protein, 15 aa, Homo sapiens
  CDR3 for beta chain variable domain of TCR clone 229725 (TRBV5-1, TRBJ1-4)
FAPAAWKDGNEKLFF

SEQ ID NO: 459451 - protein, 17 aa, Homo sapiens
  CDR3 for alpha chain variable domain of TCR clone 229726 (TRAV26-1, TRAJ53)
CIVRVDDSGGINYKMTF

SEQ ID NO: 459452 - protein, 15 aa, Homo sapiens
  CDR3 for beta chain variable domain of TCR clone 229726 (TRBV20-1, TRBJ2-7)
CSARVPAAYFYEQYF

SEQ ID NO: 459453 - protein, 11 aa, Homo sapiens
  CDR3 for alpha chain variable domain of TCR clone 229727 (TRAV2, TRAJ33)
CAVESNYQVIW

SEQ ID NO: 459454 - protein, 14 aa, Homo sapiens
  CDR3 for beta chain variable domain of TCR clone 229727 (TRBV7-2, TRBJ2-7)
CASSPKTSFYEQYF

SEQ ID NO: 459455 - protein, 10 aa, Homo sapiens
  CDR3 for alpha chain variable domain of TCR clone 229728 (TRAV12-1, TRAJ37)
ARGNTGKLIF

SEQ ID NO: 459456 - protein, 14 aa, Homo sapiens
  CDR3 for beta chain variable domain of TCR clone 229728 (TRBV18, TRBJ1-1)
CASSPPTGRTEAFF

SEQ ID NO: 459457 - protein, 14 aa, Homo sapiens
  CDR3 for alpha chain variable domain of TCR clone 229729 (TRAV13-1, TRAJ28)
CAASKGAGSHQLTF

SEQ ID NO: 459458 - protein, 16 aa, Homo sapiens
  CDR3 for beta chain variable domain of TCR clone 229729 (TRBV12-4, TRBJ2-5)
CASSFFVRGRQETQYF

SEQ ID NO: 459459 - protein, 16 aa, Homo sapiens
  CDR3 for alpha chain variable domain of TCR clone 229730 (TRAV3, TRAJ10)
CAVRDMRAGGGNKLTF

SEQ ID NO: 459460 - protein, 15 aa, Homo sapiens
  CDR3 for beta chain variable domain of TCR clone 229730 (TRBV12-5, TRBJ2-2)
CASGRLGGNTGELFF

SEQ ID NO: 459461 - protein, 13 aa, Homo sapiens
  CDR3 for alpha chain variable domain of TCR clone 229731 (TRAV35, TRAJ36)
CAGPRIGANNLFF

SEQ ID NO: 459462 - protein, 16 aa, Homo sapiens
  CDR3 for beta chain variable domain of TCR clone 229731 (TRBV7-3, TRBJ2-1)
CASSLEGYRSYNEQFF

SEQ ID NO: 459463 - protein, 12 aa, Homo sapiens
  CDR3 for alpha chain variable domain of TCR clone 229732 (TRAV21, TRAJ31)
CAVWGNNARLMF

SEQ ID NO: 459464 - protein, 16 aa, Homo sapiens
  CDR3 for beta chain variable domain of TCR clone 229732 (TRBV27, TRBJ2-5)
CDSSYGPGGQKETQYF

SEQ ID NO: 459465 - protein, 14 aa, Homo sapiens
  CDR3 for alpha chain variable domain of TCR clone 229733 (TRAV8-4, TRAJ5)
CAVSTDTGRRALTF

SEQ ID NO: 459466 - protein, 16 aa, Homo sapiens
  CDR3 for beta chain variable domain of TCR clone 229733 (TRBV18, TRBJ2-7)
CASSPLQSGTHYEQYF

SEQ ID NO: 459467 - protein, 14 aa, Homo sapiens
  CDR3 for alpha chain variable domain of TCR clone 229734 (TRAV3, TRAJ8)
CAALMNTGFKKLVF

SEQ ID NO: 459468 - protein, 15 aa, Homo sapiens
  CDR3 for beta chain variable domain of TCR clone 229734 (TRBV28, TRBJ2-5)
CASSLGLGNQETQYF

SEQ ID NO: 459469 - protein, 18 aa, Homo sapiens
  CDR3 for alpha chain variable domain of TCR clone 229735 (TRAV12-3, TRAJ52)
CAMSRTNAGGTSYGKLTF

SEQ ID NO: 459470 - protein, 15 aa, Homo sapiens
  CDR3 for beta chain variable domain of TCR clone 229735 (TRBV27, TRBJ2-7)
CASSTAGTGSYEQYF

SEQ ID NO: 459471 - protein, 17 aa, Homo sapiens
  CDR3 for alpha chain variable domain of TCR clone 229736 (TRAV12-1, TRAJ53)
CVAGAIVGGGSNYKLTF

SEQ ID NO: 459472 - protein, 14 aa, Homo sapiens
  CDR3 for beta chain variable domain of TCR clone 229736 (TRBV5-1, TRBJ1-4)
CASSLDRTQEKLFF

SEQ ID NO: 459473 - protein, 14 aa, Homo sapiens
  CDR3 for alpha chain variable domain of TCR clone 229737 (TRAV34, TRAJ44)
CGADGTGTASKLTF

SEQ ID NO: 459474 - protein, 17 aa, Homo sapiens
  CDR3 for beta chain variable domain of TCR clone 229737 (TRBV7-9, TRBJ2-6)
CASSFGAGYSGANVLTF

SEQ ID NO: 459475 - protein, 12 aa, Homo sapiens
  CDR3 for alpha chain variable domain of TCR clone 229738 (TRAV3, TRAJ49)
CAVRDLSNQFYF

SEQ ID NO: 459476 - protein, 14 aa, Homo sapiens
  CDR3 for beta chain variable domain of TCR clone 229738 (TRBV7-3, TRBJ2-7)
CASSGQRGPYEQYF

SEQ ID NO: 459477 - protein, 13 aa, Homo sapiens
  CDR3 for alpha chain variable domain of TCR clone 229739 (TRAV12-1, TRAJ20)
CVVNRETDYKLSF

SEQ ID NO: 459478 - protein, 15 aa, Homo sapiens
  CDR3 for beta chain variable domain of TCR clone 229739 (TRBV7-9, TRBJ1-2)
CASSLDREPNYGYTF

SEQ ID NO: 459479 - protein, 13 aa, Homo sapiens
  CDR3 for alpha chain variable domain of TCR clone 229740 (TRAV1-1, TRAJ28)
CVTSGAGVYQLTF

SEQ ID NO: 459480 - protein, 17 aa, Homo sapiens
  CDR3 for beta chain variable domain of TCR clone 229740 (TRBV18, TRBJ2-2)
CASSQRSSGQGPGELFF

SEQ ID NO: 459481 - protein, 13 aa, Homo sapiens
  CDR3 for alpha chain variable domain of TCR clone 229741 (TRAV1-2, TRAJ9)
VAALNTGGFKTIF

SEQ ID NO: 459482 - protein, 14 aa, Homo sapiens
  CDR3 for beta chain variable domain of TCR clone 229741 (TRBV13, TRBJ2-3)
CASSSGSPTDTQYF

SEQ ID NO: 459483 - protein, 14 aa, Homo sapiens
  CDR3 for alpha chain variable domain of TCR clone 229742 (TRAV12-2, TRAJ44)
CAVNTAGTASKLTF

SEQ ID NO: 459484 - protein, 12 aa, Homo sapiens
  CDR3 for beta chain variable domain of TCR clone 229742 (TRBV19, TRBJ1-4)
CASKDWPGGLFF

SEQ ID NO: 459485 - protein, 17 aa, Homo sapiens
  CDR3 for alpha chain variable domain of TCR clone 229743 (TRAV3, TRAJ38)
CAVRDCLNAGNNRKLIW

SEQ ID NO: 459486 - protein, 13 aa, Homo sapiens
  CDR3 for beta chain variable domain of TCR clone 229743 (TRBV5-1, TRBJ2-3)
CASSTIWAGTQYF

SEQ ID NO: 459487 - protein, 19 aa, Homo sapiens
  CDR3 for alpha chain variable domain of TCR clone 229744 (TRAV26-1, TRAJ32)
CCVLLHRQTFGGSTNKLIF

SEQ ID NO: 459488 - protein, 13 aa, Homo sapiens
  CDR3 for beta chain variable domain of TCR clone 229744 (TRBV5-1, TRBJ2-1)
CASSLGSYNEQFF

SEQ ID NO: 459489 - protein, 18 aa, Homo sapiens
  CDR3 for alpha chain variable domain of TCR clone 229745 (TRAV21, TRAJ52)
CAVRPSPAGGTSYGKLTF

SEQ ID NO: 459490 - protein, 21 aa, Homo sapiens
  CDR3 for beta chain variable domain of TCR clone 229745 (TRBV5-1, TRBJ1-4)
GTRPFIFAPAAWKDGNEKLFF

SEQ ID NO: 459491 - protein, 14 aa, Homo sapiens
  CDR3 for alpha chain variable domain of TCR clone 229746 (TRAV9-2, TRAJ17)
CALYIYNAGNKLTF

SEQ ID NO: 459492 - protein, 17 aa, Homo sapiens
  CDR3 for beta chain variable domain of TCR clone 229746 (TRBV20-1, TRBJ2-2)
CSASGSGQGGLTGELFF

SEQ ID NO: 459493 - protein, 11 aa, Homo sapiens
  CDR3 for alpha chain variable domain of TCR clone 229747 (TRAV12-2, TRAJ33)
CAVGSNYQLIW

SEQ ID NO: 459494 - protein, 13 aa, Homo sapiens
  CDR3 for beta chain variable domain of TCR clone 229747 (TRBV2, TRBJ1-4)
CASSELGVEKLFF

SEQ ID NO: 459495 - protein, 14 aa, Homo sapiens
  CDR3 for alpha chain variable domain of TCR clone 229748 (TRAV12-1, TRAJ17)
CVVNYKDAGNKLTF

SEQ ID NO: 459496 - protein, 11 aa, Homo sapiens
  CDR3 for beta chain variable domain of TCR clone 229748 (TRBV7-8, TRBJ2-7)
CASSLSLEQYF

SEQ ID NO: 459497 - protein, 13 aa, Homo sapiens
  CDR3 for alpha chain variable domain of TCR clone 229749 (TRAV8-3, TRAJ31)
CAVGARNNARIMF

SEQ ID NO: 459498 - protein, 14 aa, Homo sapiens
  CDR3 for beta chain variable domain of TCR clone 229749 (TRBV12-5, TRBJ2-5)
CASGSRTHQETQYF

SEQ ID NO: 459499 - protein, 14 aa, Homo sapiens
  CDR3 for alpha chain variable domain of TCR clone 229750 (TRAV13-1, TRAJ35)
CAARKGGFGNGLRC

SEQ ID NO: 459500 - protein, 13 aa, Homo sapiens
  CDR3 for beta chain variable domain of TCR clone 229750 (TRBV7-3, TRBJ1-1)
CASSQDWGAEAFF

SEQ ID NO: 459501 - protein, 16 aa, Homo sapiens
  CDR3 for alpha chain variable domain of TCR clone 229751 (TRAV3, TRAJ10)
CAVRAIRAGGGNKLTF

SEQ ID NO: 459502 - protein, 13 aa, Homo sapiens
  CDR3 for beta chain variable domain of TCR clone 229751 (TRBV6-1, TRBJ1-1)
CASSRQGNTEAFF

SEQ ID NO: 459503 - protein, 17 aa, Homo sapiens
  CDR3 for alpha chain variable domain of TCR clone 229752 (TRAV3, TRAJ6)
CAVRDGPRAGGSLIPTF

SEQ ID NO: 459504 - protein, 15 aa, Homo sapiens
  CDR3 for beta chain variable domain of TCR clone 229752 (TRBV7-6, TRBJ2-3)
CASSPIIYSTDTQYF

SEQ ID NO: 459505 - protein, 14 aa, Homo sapiens
  CDR3 for alpha chain variable domain of TCR clone 229753 (TRAV12-2, TRAJ13)
CAVKKTGCYQKVTF

SEQ ID NO: 459506 - protein, 16 aa, Homo sapiens
  CDR3 for beta chain variable domain of TCR clone 229753 (TRBV20-1, TRBJ1-2)
CSASMGQGVANYGYTF

SEQ ID NO: 459507 - protein, 12 aa, Homo sapiens
  CDR3 for alpha chain variable domain of TCR clone 229754 (TRAV12-1, TRAJ34)
CVVTFNTDKLIF

SEQ ID NO: 459508 - protein, 14 aa, Homo sapiens
  CDR3 for beta chain variable domain of TCR clone 229754 (TRBV19, TRBJ1-1)
CASRRTGLNTEAFF

SEQ ID NO: 459509 - protein, 11 aa, Homo sapiens
  CDR3 for alpha chain variable domain of TCR clone 229755 (TRAV2, TRAJ33)
CAVDSNYQLIW

SEQ ID NO: 459510 - protein, 14 aa, Homo sapiens
  CDR3 for beta chain variable domain of TCR clone 229755 (TRBV19, TRBJ2-2)
CATTGHANTGELFF

SEQ ID NO: 459511 - protein, 15 aa, Homo sapiens
  CDR3 for alpha chain variable domain of TCR clone 229756 (TRAV1-2, TRAJ12)
CADARWMDSSNKLIF

SEQ ID NO: 459512 - protein, 11 aa, Homo sapiens
  CDR3 for beta chain variable domain of TCR clone 229756 (TRBV29-1, TRBJ2-5)
CSEDRTGTQYF

SEQ ID NO: 459513 - protein, 15 aa, Homo sapiens
  CDR3 for alpha chain variable domain of TCR clone 229757 (TRAV8-4, TRAJ3)
CAVTGENPVQQCFQD

SEQ ID NO: 459514 - protein, 14 aa, Homo sapiens
  CDR3 for beta chain variable domain of TCR clone 229757 (TRBV11-2, TRBJ2-1)
CASSLSGPYNEQFF

SEQ ID NO: 459515 - protein, 12 aa, Homo sapiens
  CDR3 for alpha chain variable domain of TCR clone 229758 (TRAV13-1, TRAJ27)
CAAHTNAGKSTF

SEQ ID NO: 459516 - protein, 12 aa, Homo sapiens
  CDR3 for beta chain variable domain of TCR clone 229758 (TRBV11-2, TRBJ2-2)
CASSLGGGELFF

SEQ ID NO: 459517 - protein, 12 aa, Homo sapiens
  CDR3 for alpha chain variable domain of TCR clone 229759 (TRAV12-3, TRAJ30)
CAMSLVDDKIIF

SEQ ID NO: 459518 - protein, 13 aa, Homo sapiens
  CDR3 for beta chain variable domain of TCR clone 229759 (TRBV12-4, TRBJ1-2)
CASSLSGGFGYTF

SEQ ID NO: 459519 - protein, 13 aa, Homo sapiens
  CDR3 for alpha chain variable domain of TCR clone 229760 (TRAV17, TRAJ5)
CATIDTGRRALTF

SEQ ID NO: 459520 - protein, 15 aa, Homo sapiens
  CDR3 for beta chain variable domain of TCR clone 229760 (TRBV20-1, TRBJ2-5)
CSATRTSGSLETQYF

SEQ ID NO: 459521 - protein, 20 aa, Homo sapiens
  CDR3 for alpha chain variable domain of TCR clone 229761 (TRAV4, TRAJ29)
CCVLLPRGCVPFSGNTPLVF

SEQ ID NO: 459522 - protein, 13 aa, Homo sapiens
  CDR3 for beta chain variable domain of TCR clone 229761 (TRBV12-4, TRBJ1-2)
CASSLRQGKGYTF

SEQ ID NO: 459523 - protein, 12 aa, Homo sapiens
  CDR3 for alpha chain variable domain of TCR clone 229762 (TRAV12-2, TRAJ20)
CAVRPSDYKPSF

SEQ ID NO: 459524 - protein, 15 aa, Homo sapiens
  CDR3 for beta chain variable domain of TCR clone 229762 (TRBV7-2, TRBJ2-1)
CASSSGLAGGNEQFF

SEQ ID NO: 459525 - protein, 14 aa, Homo sapiens
  CDR3 for alpha chain variable domain of TCR clone 229763 (TRAV1-1, TRAJ30)
CSVRSLNRDDKIIF

SEQ ID NO: 459526 - protein, 14 aa, Homo sapiens
  CDR3 for beta chain variable domain of TCR clone 229763 (TRBV7-8, TRBJ2-3)
CASSLEAGTDTQYF

SEQ ID NO: 459527 - protein, 12 aa, Homo sapiens
  CDR3 for alpha chain variable domain of TCR clone 229764 (TRAV16, TRAJ21)
CALLGNFNKFYF

SEQ ID NO: 459528 - protein, 17 aa, Homo sapiens
  CDR3 for beta chain variable domain of TCR clone 229764 (TRBV11-2, TRBJ2-1)
CASSLYPPGVEYNEQFF

SEQ ID NO: 459529 - protein, 13 aa, Homo sapiens
  CDR3 for alpha chain variable domain of TCR clone 229765 (TRAV17, TRAJ5)
CASMDTGRRAITF

SEQ ID NO: 459530 - protein, 11 aa, Homo sapiens
  CDR3 for beta chain variable domain of TCR clone 229765 (TRBV19, TRBJ1-1)
CASSIGSEAFF

SEQ ID NO: 459531 - protein, 23 aa, Homo sapiens
  CDR3 for alpha chain variable domain of TCR clone 229766 (TRAV26-1, )
CIADNTGNNHIQNPDPAVYPLRD

SEQ ID NO: 459532 - protein, 13 aa, Homo sapiens
  CDR3 for beta chain variable domain of TCR clone 229766 (TRBV20-1, TRBJ1-1)
CSARGGGNTEAFF

SEQ ID NO: 459533 - protein, 14 aa, Homo sapiens
  CDR3 for alpha chain variable domain of TCR clone 229767 (TRAV12-2, TRAJ13)
CAVKKTGGYQKVTV

SEQ ID NO: 459534 - protein, 13 aa, Homo sapiens
  CDR3 for beta chain variable domain of TCR clone 229767 (TRBV12-5, TRBJ2-3)
CASGDRQSDTQYF

SEQ ID NO: 459535 - protein, 12 aa, Homo sapiens
  CDR3 for alpha chain variable domain of TCR clone 229768 (TRAV26-1, TRAJ17)
CIVRSAGNKLTF

SEQ ID NO: 459536 - protein, 13 aa, Homo sapiens
  CDR3 for beta chain variable domain of TCR clone 229768 (TRBV4-1, TRBJ2-5)
CASSQGHRETQYF

SEQ ID NO: 459537 - protein, 13 aa, Homo sapiens
  CDR3 for alpha chain variable domain of TCR clone 229769 (TRAV12-1, TRAJ29)
CVVNGPGNTPLVF

SEQ ID NO: 459538 - protein, 14 aa, Homo sapiens
  CDR3 for beta chain variable domain of TCR clone 229769 (TRBV7-2, TRBJ2-7)
CASSPKTSFYEQYF

SEQ ID NO: 459539 - protein, 11 aa, Homo sapiens
  CDR3 for alpha chain variable domain of TCR clone 229770 (TRAV12-2, TRAJ33)
CAVGSNYQLIW

SEQ ID NO: 459540 - protein, 17 aa, Homo sapiens
  CDR3 for beta chain variable domain of TCR clone 229770 (TRBV20-1, TRBJ2-1)
CSAPPRLAGTRYNEQFF

SEQ ID NO: 459541 - protein, 15 aa, Homo sapiens
  CDR3 for alpha chain variable domain of TCR clone 229771 (TRAV21, TRAJ53)
CATLNSGGSNYKLAF

SEQ ID NO: 459542 - protein, 16 aa, Homo sapiens
  CDR3 for beta chain variable domain of TCR clone 229771 (TRBV20-1, TRBJ1-4)
CSAPGQGSLTNEKLFF

SEQ ID NO: 459543 - protein, 13 aa, Homo sapiens
  CDR3 for alpha chain variable domain of TCR clone 229772 (TRAV26-1, TRAJ29)
CIVRRSGNTPLVF

SEQ ID NO: 459544 - protein, 16 aa, Homo sapiens
  CDR3 for beta chain variable domain of TCR clone 229772 (TRBV11-2, TRBJ2-7)
CARSLAPTGVNYEQYF

SEQ ID NO: 459545 - protein, 16 aa, Homo sapiens
  CDR3 for alpha chain variable domain of TCR clone 229773 (TRAV26-1, TRAJ33)
CIVPFWGEDSNYQLIW

SEQ ID NO: 459546 - protein, 11 aa, Homo sapiens
  CDR3 for beta chain variable domain of TCR clone 229773 (TRBV12-4, TRBJ2-3)
CASTATDTQYF

SEQ ID NO: 459547 - protein, 14 aa, Homo sapiens
  CDR3 for alpha chain variable domain of TCR clone 229774 (TRAV26-1, TRAJ45)
CIEVTGGGADGLTF

SEQ ID NO: 459548 - protein, 14 aa, Homo sapiens
  CDR3 for beta chain variable domain of TCR clone 229774 (TRBV7-6, TRBJ2-7)
CASRSQGAAYEQYF

SEQ ID NO: 459549 - protein, 14 aa, Homo sapiens
  CDR3 for alpha chain variable domain of TCR clone 229775 (TRAV13-1, TRAJ39)
CAASKNNSGNMLTF

SEQ ID NO: 459550 - protein, 15 aa, Homo sapiens
  CDR3 for beta chain variable domain of TCR clone 229775 (TRBV7-9, TRBJ1-6)
CASSSPGRGNSPLHF

SEQ ID NO: 459551 - protein, 11 aa, Homo sapiens
  CDR3 for alpha chain variable domain of TCR clone 229776 (TRAV13-1, TRAJ24)
CAASGWGKLQF

SEQ ID NO: 459552 - protein, 16 aa, Homo sapiens
  CDR3 for beta chain variable domain of TCR clone 229776 (TRBV20-1, TRBJ1-4)
CSAPGQGLLTNEKLFF

SEQ ID NO: 459553 - protein, 13 aa, Homo sapiens
  CDR3 for alpha chain variable domain of TCR clone 229777 (TRAV21, TRAJ27)
CAARPGNAGKSTF

SEQ ID NO: 459554 - protein, 15 aa, Homo sapiens
  CDR3 for beta chain variable domain of TCR clone 229777 (TRBV7-2, TRBJ2-1)
CASSLVAGRYNEQFF

SEQ ID NO: 459555 - protein, 13 aa, Homo sapiens
  CDR3 for alpha chain variable domain of TCR clone 229778 (TRAV36/DV7, TRAJ53)
CALSRGSNYKLTF

SEQ ID NO: 459556 - protein, 13 aa, Homo sapiens
  CDR3 for beta chain variable domain of TCR clone 229778 (TRBV28, TRBJ2-7)
CASSLPSRYEQYF

SEQ ID NO: 459557 - protein, 13 aa, Homo sapiens
  CDR3 for alpha chain variable domain of TCR clone 229779 (TRAV21, TRAJ57)
CAVTQGGSEKLVF

SEQ ID NO: 459558 - protein, 12 aa, Homo sapiens
  CDR3 for beta chain variable domain of TCR clone 229779 (TRBV12-4, TRBJ1-5)
CASSLGRQPQHF

SEQ ID NO: 459559 - protein, 13 aa, Homo sapiens
  CDR3 for alpha chain variable domain of TCR clone 229780 (TRAV13-1, TRAJ11)
CAASIRGYSTLTF

SEQ ID NO: 459560 - protein, 17 aa, Homo sapiens
  CDR3 for beta chain variable domain of TCR clone 229780 (TRBV4-3, TRBJ1-2)
CASSSRLQAGGSVGYTV

SEQ ID NO: 459561 - protein, 11 aa, Homo sapiens
  CDR3 for alpha chain variable domain of TCR clone 229781 (TRAV2, TRAJ33)
CAVESNYKLIW

SEQ ID NO: 459562 - protein, 15 aa, Homo sapiens
  CDR3 for beta chain variable domain of TCR clone 229781 (TRBV19, TRBJ1-1)
CASTSGQIQNTEAVF

SEQ ID NO: 459563 - protein, 21 aa, Homo sapiens
  CDR3 for alpha chain variable domain of TCR clone 229782 (TRAV8-3, TRAJ6)
CAVGGAEATYLHLEEEPAFLF

SEQ ID NO: 459564 - protein, 14 aa, Homo sapiens
  CDR3 for beta chain variable domain of TCR clone 229782 (TRBV5-1, TRBJ2-7)
CASSRGESLYEQYF

SEQ ID NO: 459565 - protein, 14 aa, Homo sapiens
  CDR3 for alpha chain variable domain of TCR clone 229783 (TRAV30, TRAJ33)
CGTERRFSNYQLIW

SEQ ID NO: 459566 - protein, 16 aa, Homo sapiens
  CDR3 for beta chain variable domain of TCR clone 229783 (TRBV12-5, TRBJ2-5)
CASGPRTSGNQGTQYF

SEQ ID NO: 459567 - protein, 16 aa, Homo sapiens
  CDR3 for alpha chain variable domain of TCR clone 229784 (TRAV19, TRAJ37)
CALSPHCSSNTGKLIF

SEQ ID NO: 459568 - protein, 16 aa, Homo sapiens
  CDR3 for beta chain variable domain of TCR clone 229784 (TRBV4-2, TRBJ2-1)
CASSQETATPYNEQFF

SEQ ID NO: 459569 - protein, 17 aa, Homo sapiens
  CDR3 for alpha chain variable domain of TCR clone 229785 (TRAV26-2, TRAJ37)
CILRELVGSSNTGKLIF

SEQ ID NO: 459570 - protein, 14 aa, Homo sapiens
  CDR3 for beta chain variable domain of TCR clone 229785 (TRBV7-2, TRBJ2-7)
CASRSQGAAYEQYF

SEQ ID NO: 459571 - protein, 15 aa, Homo sapiens
  CDR3 for alpha chain variable domain of TCR clone 229786 (TRAV25, TRAJ53)
CPTSNSGGSNYKLTF

SEQ ID NO: 459572 - protein, 14 aa, Homo sapiens
  CDR3 for beta chain variable domain of TCR clone 229786 (TRBV5-7, TRBJ1-2)
CASSAVGVSGGYTF

SEQ ID NO: 459573 - protein, 16 aa, Homo sapiens
  CDR3 for alpha chain variable domain of TCR clone 229787 (TRAV20, TRAJ10)
CAVRFFLTGGGNKLTF

SEQ ID NO: 459574 - protein, 20 aa, Homo sapiens
  CDR3 for beta chain variable domain of TCR clone 229787 (TRBV28, TRBJ2-1)
CASTPIGRSPGLAGGNEQFF

SEQ ID NO: 459575 - protein, 13 aa, Homo sapiens
  CDR3 for alpha chain variable domain of TCR clone 229788 (TRAV36/DV7, TRAJ37)
CAVFSSNTGKLTF

SEQ ID NO: 459576 - protein, 16 aa, Homo sapiens
  CDR3 for beta chain variable domain of TCR clone 229788 (TRBV3-1, TRBJ2-5)
CASSPGQFNGFGTQYF

SEQ ID NO: 459577 - protein, 13 aa, Homo sapiens
  CDR3 for alpha chain variable domain of TCR clone 229789 (TRAV1-2, TRAJ9)
CAALNTGGFKTIF

SEQ ID NO: 459578 - protein, 14 aa, Homo sapiens
  CDR3 for beta chain variable domain of TCR clone 229789 (TRBV7-2, TRBJ1-3)
CASSRLRSGNTIYF

SEQ ID NO: 459579 - protein, 12 aa, Homo sapiens
  CDR3 for alpha chain variable domain of TCR clone 229790 (TRAV8-4, TRAJ37)
CAKSSNTGKLIF

SEQ ID NO: 459580 - protein, 16 aa, Homo sapiens
  CDR3 for beta chain variable domain of TCR clone 229790 (TRBV7-9, TRBJ2-1)
CASSDVAGGSYNEQFF

SEQ ID NO: 459581 - protein, 12 aa, Homo sapiens
  CDR3 for alpha chain variable domain of TCR clone 229791 (TRAV12-3, TRAJ17)
CAMTLTGNKLTF

SEQ ID NO: 459582 - protein, 12 aa, Homo sapiens
  CDR3 for beta chain variable domain of TCR clone 229791 (TRBV7-3, TRBJ1-1)
CQQPGWGAEAFF

SEQ ID NO: 459583 - protein, 12 aa, Homo sapiens
  CDR3 for alpha chain variable domain of TCR clone 229792 (TRAV36/DV7, TRAJ54)
CAVVRGAQKLVC

SEQ ID NO: 459584 - protein, 14 aa, Homo sapiens
  CDR3 for beta chain variable domain of TCR clone 229792 (TRBV7-3, TRBJ1-1)
CASSLKGGNTEAFF

SEQ ID NO: 459585 - protein, 14 aa, Homo sapiens
  CDR3 for alpha chain variable domain of TCR clone 229793 (TRAV12-3, TRAJ35)
CAMSLIGFGNVLHC

SEQ ID NO: 459586 - protein, 12 aa, Homo sapiens
  CDR3 for beta chain variable domain of TCR clone 229793 (TRBV12-4, TRBJ1-1)
CASSLARLEAFF

SEQ ID NO: 459587 - protein, 14 aa, Homo sapiens
  CDR3 for alpha chain variable domain of TCR clone 229794 (TRAV12-2, TRAJ44)
CAVKPAGTASKLTF

SEQ ID NO: 459588 - protein, 16 aa, Homo sapiens
  CDR3 for beta chain variable domain of TCR clone 229794 (TRBV2, TRBJ2-6)
CASSEVGGAGANVLTF

SEQ ID NO: 459589 - protein, 11 aa, Homo sapiens
  CDR3 for alpha chain variable domain of TCR clone 229795 (TRAV3, TRAJ17)
PRGAAGNKLTF

SEQ ID NO: 459590 - protein, 16 aa, Homo sapiens
  CDR3 for beta chain variable domain of TCR clone 229795 (TRBV7-6, TRBJ2-1)
CASSAPGPSSYDEQFF

SEQ ID NO: 459591 - protein, 14 aa, Homo sapiens
  CDR3 for alpha chain variable domain of TCR clone 229796 (TRAV13-1, TRAJ31)
CAASSRPNNARPML

SEQ ID NO: 459592 - protein, 15 aa, Homo sapiens
  CDR3 for beta chain variable domain of TCR clone 229796 (TRBV4-2, TRBJ2-4)
CASSPLGAAKNIQYS

SEQ ID NO: 459593 - protein, 13 aa, Homo sapiens
  CDR3 for alpha chain variable domain of TCR clone 229797 (TRAV3, TRAJ21)
CAVREPDFNKFYF

SEQ ID NO: 459594 - protein, 18 aa, Homo sapiens
  CDR3 for beta chain variable domain of TCR clone 229797 (TRBV18, TRBJ2-3)
CASSYTSGAAGGTDTQYF

SEQ ID NO: 459595 - protein, 15 aa, Homo sapiens
  CDR3 for alpha chain variable domain of TCR clone 229798 (TRAV17, TRAJ52)
CATEAGGTSYGKLTF

SEQ ID NO: 459596 - protein, 16 aa, Homo sapiens
  CDR3 for beta chain variable domain of TCR clone 229798 (TRBV7-3, TRBJ2-2)
CASSLKRGTLSGELFF

SEQ ID NO: 459597 - protein, 15 aa, Homo sapiens
  CDR3 for alpha chain variable domain of TCR clone 229799 (TRAV12-1, TRAJ8)
CVVNVENTGFQKLVF

SEQ ID NO: 459598 - protein, 15 aa, Homo sapiens
  CDR3 for beta chain variable domain of TCR clone 229799 (TRBV12-4, TRBJ1-6)
CASSLGQGFRSHLHF

SEQ ID NO: 459599 - protein, 13 aa, Homo sapiens
  CDR3 for alpha chain variable domain of TCR clone 229800 (TRAV8-3, TRAJ43)
CAVGPDNNNDMRF

SEQ ID NO: 459600 - protein, 14 aa, Homo sapiens
  CDR3 for beta chain variable domain of TCR clone 229800 (TRBV2, TRBJ1-1)
CASTQVGENTEAFF

SEQ ID NO: 459601 - protein, 14 aa, Homo sapiens
  CDR3 for alpha chain variable domain of TCR clone 229801 (TRAV1-2, TRAJ8)
CAVREDTGFQKLVF

SEQ ID NO: 459602 - protein, 12 aa, Homo sapiens
  CDR3 for beta chain variable domain of TCR clone 229801 (TRBV27, TRBJ2-2)
CASKRFTGELFS

SEQ ID NO: 459603 - protein, 14 aa, Homo sapiens
  CDR3 for alpha chain variable domain of TCR clone 229802 (TRAV3, TRAJ37)
CAVKESGNTGKLIF

SEQ ID NO: 459604 - protein, 14 aa, Homo sapiens
  CDR3 for beta chain variable domain of TCR clone 229802 (TRBV11-1, TRBJ2-7)
CASSFRQGSYEQYF

SEQ ID NO: 459605 - protein, 12 aa, Homo sapiens
  CDR3 for alpha chain variable domain of TCR clone 229803 (TRAV13-2, TRAJ23)
CAERHRGGKLVF

SEQ ID NO: 459606 - protein, 13 aa, Homo sapiens
  CDR3 for beta chain variable domain of TCR clone 229803 (TRBV7-9, TRBJ2-3)
CASSPGSTDTQYF

SEQ ID NO: 459607 - protein, 15 aa, Homo sapiens
  CDR3 for alpha chain variable domain of TCR clone 229804 (TRAV12-1, TRAJ15)
CVVTRPNQAGTALIF

SEQ ID NO: 459608 - protein, 14 aa, Homo sapiens
  CDR3 for beta chain variable domain of TCR clone 229804 (TRBV5-1, TRBJ1-1)
CASSLVSINTEAFF

SEQ ID NO: 459609 - protein, 15 aa, Homo sapiens
  CDR3 for alpha chain variable domain of TCR clone 229805 (TRAV25, TRAJ52)
CAGTSGGTSCGKLTF

SEQ ID NO: 459610 - protein, 16 aa, Homo sapiens
  CDR3 for beta chain variable domain of TCR clone 229805 (TRBV15, TRBJ1-2)
CATSRGPRTGGGGYTF

SEQ ID NO: 459611 - protein, 14 aa, Homo sapiens
  CDR3 for alpha chain variable domain of TCR clone 229806 (TRAV26-1, TRAJ38)
CIADNAGNNRKLIW

SEQ ID NO: 459612 - protein, 19 aa, Homo sapiens
  CDR3 for beta chain variable domain of TCR clone 229806 (TRBV6-1, TRBJ1-3)
CASVQGGGWKHHIFWRGKL

SEQ ID NO: 459613 - protein, 13 aa, Homo sapiens
  CDR3 for alpha chain variable domain of TCR clone 229807 (TRAV36/DV7, TRAJ56)
CAGTTGANSKLTF

SEQ ID NO: 459614 - protein, 14 aa, Homo sapiens
  CDR3 for beta chain variable domain of TCR clone 229807 (TRBV2, TRBJ2-7)
CASSLTSGGYEQYF

SEQ ID NO: 459615 - protein, 12 aa, Homo sapiens
  CDR3 for alpha chain variable domain of TCR clone 229808 (TRAV27, TRAJ9)
CAGESGGFKTSF

SEQ ID NO: 459616 - protein, 14 aa, Homo sapiens
  CDR3 for beta chain variable domain of TCR clone 229808 (TRBV6-1, TRBJ2-1)
CASAKDGFYNEQFF

SEQ ID NO: 459617 - protein, 16 aa, Homo sapiens
  CDR3 for alpha chain variable domain of TCR clone 229809 (TRAV17, TRAJ35)
CATAEGGMGFGNVLHC

SEQ ID NO: 459618 - protein, 19 aa, Homo sapiens
  CDR3 for beta chain variable domain of TCR clone 229809 (TRBV19, TRBJ2-5)
CASSIGQVTDFFLGETQYF

SEQ ID NO: 459619 - protein, 10 aa, Homo sapiens
  CDR3 for alpha chain variable domain of TCR clone 229810 (TRAV4, TRAJ30)
CGWGDDTIIF

SEQ ID NO: 459620 - protein, 12 aa, Homo sapiens
  CDR3 for beta chain variable domain of TCR clone 229810 (TRBV7-9, TRBJ2-1)
CASRAGVDEQFF

SEQ ID NO: 459621 - protein, 13 aa, Homo sapiens
  CDR3 for alpha chain variable domain of TCR clone 229811 (TRAV1-2, TRAJ9)
CAALNTGGFKTIF

SEQ ID NO: 459622 - protein, 15 aa, Homo sapiens
  CDR3 for beta chain variable domain of TCR clone 229811 (TRBV5-8, TRBJ2-7)
CASKGGTTISYEQYF

SEQ ID NO: 459623 - protein, 14 aa, Homo sapiens
  CDR3 for alpha chain variable domain of TCR clone 229812 (TRAV21, TRAJ21)
CAVGVEDNFNKFYL

SEQ ID NO: 459624 - protein, 14 aa, Homo sapiens
  CDR3 for beta chain variable domain of TCR clone 229812 (TRBV7-2, TRBJ1-2)
CASSQTGSTYGYAF

SEQ ID NO: 459625 - protein, 12 aa, Homo sapiens
  CDR3 for alpha chain variable domain of TCR clone 229813 (TRAV2, TRAJ10)
CASTGGGNKLTF

SEQ ID NO: 459626 - protein, 14 aa, Homo sapiens
  CDR3 for beta chain variable domain of TCR clone 229813 (TRBV6-6, TRBJ2-3)
CASRLQRGADTQYF

SEQ ID NO: 459627 - protein, 11 aa, Homo sapiens
  CDR3 for alpha chain variable domain of TCR clone 229814 (TRAV8-3, TRAJ15)
CAVGPGTALIF

SEQ ID NO: 459628 - protein, 18 aa, Homo sapiens
  CDR3 for beta chain variable domain of TCR clone 229814 (TRBV18, TRBJ2-3)
CASSYTSGTAGGTDTQYF

SEQ ID NO: 459629 - protein, 14 aa, Homo sapiens
  CDR3 for alpha chain variable domain of TCR clone 229815 (TRAV13-1, TRAJ44)
CAAKATGTASTLTF

SEQ ID NO: 459630 - protein, 16 aa, Homo sapiens
  CDR3 for beta chain variable domain of TCR clone 229815 (TRBV15, TRBJ1-2)
CATSRGPRTGGGGYTF

SEQ ID NO: 459631 - protein, 17 aa, Homo sapiens
  CDR3 for alpha chain variable domain of TCR clone 229816 (TRAV8-4, TRAJ10)
CAVSRPTLTGGGNKLTF

SEQ ID NO: 459632 - protein, 13 aa, Homo sapiens
  CDR3 for beta chain variable domain of TCR clone 229816 (TRBV7-9, TRBJ1-2)
CASSLKQNYGYTF

SEQ ID NO: 459633 - protein, 14 aa, Homo sapiens
  CDR3 for alpha chain variable domain of TCR clone 229817 (TRAV3, TRAJ9)
CAVRVDTGGFKTIF

SEQ ID NO: 459634 - protein, 18 aa, Homo sapiens
  CDR3 for beta chain variable domain of TCR clone 229817 (TRBV20-1, TRBJ2-6)
CSAETTPTHGSGANVLTF

SEQ ID NO: 459635 - protein, 15 aa, Homo sapiens
  CDR3 for alpha chain variable domain of TCR clone 229818 (TRAV36/DV7, TRAJ53)
CAVEGSGGSNYKLTF

SEQ ID NO: 459636 - protein, 16 aa, Homo sapiens
  CDR3 for beta chain variable domain of TCR clone 229818 (TRBV27, TRBJ2-2)
CASSLSGFWVTGGLFF

SEQ ID NO: 459637 - protein, 14 aa, Homo sapiens
  CDR3 for alpha chain variable domain of TCR clone 229819 (TRAV12-3, TRAJ10)
SHLPLAGGGNKLTF

SEQ ID NO: 459638 - protein, 17 aa, Homo sapiens
  CDR3 for beta chain variable domain of TCR clone 229819 (TRBV20-1, TRBJ2-2)
CSASGSGQGGLTGELFF

SEQ ID NO: 459639 - protein, 22 aa, Homo sapiens
  CDR3 for alpha chain variable domain of TCR clone 229820 (TRAV3, )
CAVRGEAGNNHIQNPYPAVYQL

SEQ ID NO: 459640 - protein, 13 aa, Homo sapiens
  CDR3 for beta chain variable domain of TCR clone 229820 (TRBV5-1, TRBJ1-5)
CASSLGSNQPQHF

SEQ ID NO: 459641 - protein, 13 aa, Homo sapiens
  CDR3 for alpha chain variable domain of TCR clone 229821 (TRAV3, TRAJ21)
CAVREPDFNKFYF

SEQ ID NO: 459642 - protein, 17 aa, Homo sapiens
  CDR3 for beta chain variable domain of TCR clone 229821 (TRBV25-1, TRBJ2-1)
CASSAYGQGRGVYEQFF

SEQ ID NO: 459643 - protein, 13 aa, Homo sapiens
  CDR3 for alpha chain variable domain of TCR clone 229822 (TRAV20, TRAJ37)
CAGCSSNTGKLIF

SEQ ID NO: 459644 - protein, 17 aa, Homo sapiens
  CDR3 for beta chain variable domain of TCR clone 229822 (TRBV4-1, TRBJ1-4)
CASSQEGPRGVEEKLFF

SEQ ID NO: 459645 - protein, 11 aa, Homo sapiens
  CDR3 for alpha chain variable domain of TCR clone 229823 (TRAV23/DV6, TRAJ48)
CAPRWGEKLTF

SEQ ID NO: 459646 - protein, 15 aa, Homo sapiens
  CDR3 for beta chain variable domain of TCR clone 229823 (TRBV7-9, TRBJ1-6)
CASSSPGRGNSPLHF

SEQ ID NO: 459647 - protein, 18 aa, Homo sapiens
  CDR3 for alpha chain variable domain of TCR clone 229824 (TRAV13-1, TRAJ52)
CAASKRSAGGTSYGKLTF

SEQ ID NO: 459648 - protein, 12 aa, Homo sapiens
  CDR3 for beta chain variable domain of TCR clone 229824 (TRBV19, TRBJ2-7)
CASTSVGSEQYF

SEQ ID NO: 459649 - protein, 11 aa, Homo sapiens
  CDR3 for alpha chain variable domain of TCR clone 229825 (TRAV35, TRAJ30)
CAGERDDKIIV

SEQ ID NO: 459650 - protein, 14 aa, Homo sapiens
  CDR3 for beta chain variable domain of TCR clone 229825 (TRBV15, TRBJ2-5)
CATSGDRGQETQYF

SEQ ID NO: 459651 - protein, 12 aa, Homo sapiens
  CDR3 for alpha chain variable domain of TCR clone 229826 (TRAV12-3, TRAJ3)
CAIDSSASKIIF

SEQ ID NO: 459652 - protein, 17 aa, Homo sapiens
  CDR3 for beta chain variable domain of TCR clone 229826 (TRBV7-9, TRBJ2-3)
CASSLAEAGAYPATQYF

SEQ ID NO: 459653 - protein, 13 aa, Homo sapiens
  CDR3 for alpha chain variable domain of TCR clone 229827 (TRAV23/DV6, TRAJ27)
CAASKPMPANQPL

SEQ ID NO: 459654 - protein, 12 aa, Homo sapiens
  CDR3 for beta chain variable domain of TCR clone 229827 (TRBV12-4, TRBJ2-7)
CASSLGGYEQYF

SEQ ID NO: 459655 - protein, 12 aa, Homo sapiens
  CDR3 for alpha chain variable domain of TCR clone 229828 (TRAV13-1, TRAJ21)
CAAKKGFNKFYF

SEQ ID NO: 459656 - protein, 17 aa, Homo sapiens
  CDR3 for beta chain variable domain of TCR clone 229828 (TRBV18, TRBJ2-3)
CASSPFGDGGFTDTQYF

SEQ ID NO: 459657 - protein, 13 aa, Homo sapiens
  CDR3 for alpha chain variable domain of TCR clone 229829 (TRAV27, TRAJ6)
CAGGTRGSYIPTF

SEQ ID NO: 459658 - protein, 13 aa, Homo sapiens
  CDR3 for beta chain variable domain of TCR clone 229829 (TRBV4-1, TRBJ2-5)
CASSQEVQETQYF

SEQ ID NO: 459659 - protein, 12 aa, Homo sapiens
  CDR3 for alpha chain variable domain of TCR clone 229830 (TRAV13-2, TRAJ23)
CAERHRGGRLIF

SEQ ID NO: 459660 - protein, 14 aa, Homo sapiens
  CDR3 for beta chain variable domain of TCR clone 229830 (TRBV7-8, TRBJ2-3)
CASSFKSSTDTQNF

SEQ ID NO: 459661 - protein, 12 aa, Homo sapiens
  CDR3 for alpha chain variable domain of TCR clone 229831 (TRAV12-1, TRAJ34)
CVVAGATDKLIF

SEQ ID NO: 459662 - protein, 12 aa, Homo sapiens
  CDR3 for beta chain variable domain of TCR clone 229831 (TRBV7-9, TRBJ1-1)
CASNLVRGEAFF

SEQ ID NO: 459663 - protein, 14 aa, Homo sapiens
  CDR3 for alpha chain variable domain of TCR clone 229832 (TRAV12-3, TRAJ10)
CAIILTGGGNKLTF

SEQ ID NO: 459664 - protein, 13 aa, Homo sapiens
  CDR3 for beta chain variable domain of TCR clone 229832 (TRBV5-5, TRBJ1-2)
CASSFWRGEDYTF

SEQ ID NO: 459665 - protein, 12 aa, Homo sapiens
  CDR3 for alpha chain variable domain of TCR clone 229833 (TRAV12-3, TRAJ4)
CAMTGEGKRLAV

SEQ ID NO: 459666 - protein, 14 aa, Homo sapiens
  CDR3 for beta chain variable domain of TCR clone 229833 (TRBV10-3, TRBJ1-1)
CAISDTDRGVEAFF

SEQ ID NO: 459667 - protein, 11 aa, Homo sapiens
  CDR3 for alpha chain variable domain of TCR clone 229834 (TRAV16, TRAJ29)
CAPSGNTPLVF

SEQ ID NO: 459668 - protein, 15 aa, Homo sapiens
  CDR3 for beta chain variable domain of TCR clone 229834 (TRBV5-7, TRBJ2-7)
CASSPYFEGSYEQYF

SEQ ID NO: 459669 - protein, 15 aa, Homo sapiens
  CDR3 for alpha chain variable domain of TCR clone 229835 (TRAV3, TRAJ42)
CAVRGGTGSQGNLIF

SEQ ID NO: 459670 - protein, 12 aa, Homo sapiens
  CDR3 for beta chain variable domain of TCR clone 229835 (TRBV7-8, TRBJ2-7)
CASSLGDREQYF

SEQ ID NO: 459671 - protein, 11 aa, Homo sapiens
  CDR3 for alpha chain variable domain of TCR clone 229836 (TRAV1-1, TRAJ23)
CAVRQGGKLIF

SEQ ID NO: 459672 - protein, 14 aa, Homo sapiens
  CDR3 for beta chain variable domain of TCR clone 229836 (TRBV19, TRBJ2-1)
CASSSGRDYNEQFF

SEQ ID NO: 459673 - protein, 16 aa, Homo sapiens
  CDR3 for alpha chain variable domain of TCR clone 229837 (TRAV12-3, TRAJ45)
CSMGWGSGGGADGLTF

SEQ ID NO: 459674 - protein, 18 aa, Homo sapiens
  CDR3 for beta chain variable domain of TCR clone 229837 (TRBV12-4, TRBJ2-2)
CASSLVAGTRGRTGELFF

SEQ ID NO: 459675 - protein, 10 aa, Homo sapiens
  CDR3 for alpha chain variable domain of TCR clone 229838 (TRAV8-4, TRAJ43)
CAVSADDMRF

SEQ ID NO: 459676 - protein, 14 aa, Homo sapiens
  CDR3 for beta chain variable domain of TCR clone 229838 (TRBV19, TRBJ2-1)
CASPTFVLSGEQFL

SEQ ID NO: 459677 - protein, 17 aa, Homo sapiens
  CDR3 for alpha chain variable domain of TCR clone 229839 (TRAV16, TRAJ42)
CALSPKLYVGSQGNLIF

SEQ ID NO: 459678 - protein, 13 aa, Homo sapiens
  CDR3 for beta chain variable domain of TCR clone 229839 (TRBV19, TRBJ1-5)
CASSTRRDQPQHF

SEQ ID NO: 459679 - protein, 13 aa, Homo sapiens
  CDR3 for alpha chain variable domain of TCR clone 229840 (TRAV27, TRAJ56)
CAGKPGANSKLTF

SEQ ID NO: 459680 - protein, 18 aa, Homo sapiens
  CDR3 for beta chain variable domain of TCR clone 229840 (TRBV11-2, TRBJ2-3)
YASSLGGASRGAPNTQYF

SEQ ID NO: 459681 - protein, 12 aa, Homo sapiens
  CDR3 for alpha chain variable domain of TCR clone 229841 (TRAV8-3, TRAJ27)
CALGAEAGKSTF

SEQ ID NO: 459682 - protein, 14 aa, Homo sapiens
  CDR3 for beta chain variable domain of TCR clone 229841 (TRBV2, TRBJ2-1)
CASRLIVGHDEQFF

SEQ ID NO: 459683 - protein, 14 aa, Homo sapiens
  CDR3 for alpha chain variable domain of TCR clone 229842 (TRAV2, TRAJ37)
CAVDFTSNTGKLTF

SEQ ID NO: 459684 - protein, 13 aa, Homo sapiens
  CDR3 for beta chain variable domain of TCR clone 229842 (TRBV20-1, TRBJ1-5)
CSASGRGNQPQHF

SEQ ID NO: 459685 - protein, 14 aa, Homo sapiens
  CDR3 for alpha chain variable domain of TCR clone 229843 (TRAV12-2, TRAJ36)
CAVNPPTGANNLFL

SEQ ID NO: 459686 - protein, 13 aa, Homo sapiens
  CDR3 for beta chain variable domain of TCR clone 229843 (TRBV20-1, TRBJ1-6)
CSAPTGLGSPLLF

SEQ ID NO: 459687 - protein, 13 aa, Homo sapiens
  CDR3 for alpha chain variable domain of TCR clone 229844 (TRAV3, TRAJ26)
CAVSRGYGQTFVF

SEQ ID NO: 459688 - protein, 15 aa, Homo sapiens
  CDR3 for beta chain variable domain of TCR clone 229844 (TRBV27, TRBJ2-1)
CASSLARGAYNEQFF

SEQ ID NO: 459689 - protein, 17 aa, Homo sapiens
  CDR3 for alpha chain variable domain of TCR clone 229845 (TRAV3, TRAJ12)
CAVRDGGRRDSSYKLIF

SEQ ID NO: 459690 - protein, 13 aa, Homo sapiens
  CDR3 for beta chain variable domain of TCR clone 229845 (TRBV7-3, TRBJ1-1)
CASSQDWGAEAFF

SEQ ID NO: 459691 - protein, 14 aa, Homo sapiens
  CDR3 for alpha chain variable domain of TCR clone 229846 (TRAV9-2, TRAJ39)
CALYIYNAGNMLTF

SEQ ID NO: 459692 - protein, 13 aa, Homo sapiens
  CDR3 for beta chain variable domain of TCR clone 229846 (TRBV4-2, TRBJ1-1)
CASSQAGSTEAFF

SEQ ID NO: 459693 - protein, 15 aa, Homo sapiens
  CDR3 for alpha chain variable domain of TCR clone 229847 (TRAV23/DV6, TRAJ27)
CAASKPMHANQPLGM

SEQ ID NO: 459694 - protein, 14 aa, Homo sapiens
  CDR3 for beta chain variable domain of TCR clone 229847 (TRBV5-4, TRBJ1-1)
CASSLDSRRDEAFF

SEQ ID NO: 459695 - protein, 11 aa, Homo sapiens
  CDR3 for alpha chain variable domain of TCR clone 229848 (TRAV2, TRAJ13)
CASGGYQKVTF

SEQ ID NO: 459696 - protein, 20 aa, Homo sapiens
  CDR3 for beta chain variable domain of TCR clone 229848 (TRBV28, TRBJ2-1)
CASTPIGRSPVLAGGNEQFF

SEQ ID NO: 459697 - protein, 13 aa, Homo sapiens
  CDR3 for alpha chain variable domain of TCR clone 229849 (TRAV2, TRAJ40)
CAVVTSGTYKYIF

SEQ ID NO: 459698 - protein, 16 aa, Homo sapiens
  CDR3 for beta chain variable domain of TCR clone 229849 (TRBV19, TRBJ2-2)
CASRSPGTGATWELFF

SEQ ID NO: 459699 - protein, 13 aa, Homo sapiens
  CDR3 for alpha chain variable domain of TCR clone 229850 (TRAV8-3, TRAJ40)
CAVGAQYLRNLQI

SEQ ID NO: 459700 - protein, 15 aa, Homo sapiens
  CDR3 for beta chain variable domain of TCR clone 229850 (TRBV20-1, TRBJ2-7)
CSARDRVSGMDEQYF

SEQ ID NO: 459701 - protein, 14 aa, Homo sapiens
  CDR3 for alpha chain variable domain of TCR clone 229851 (TRAV8-3, TRAJ4)
CAVGASGGYNKLIF

SEQ ID NO: 459702 - protein, 16 aa, Homo sapiens
  CDR3 for beta chain variable domain of TCR clone 229851 (TRBV4-3, TRBJ2-2)
CASSHLQGSGTGELFF

SEQ ID NO: 459703 - protein, 16 aa, Homo sapiens
  CDR3 for alpha chain variable domain of TCR clone 229852 (TRAV20, TRAJ10)
CAVLRELTGGGNKLTF

SEQ ID NO: 459704 - protein, 14 aa, Homo sapiens
  CDR3 for beta chain variable domain of TCR clone 229852 (TRBV19, TRBJ1-5)
CASRAPDSSLSQHF

SEQ ID NO: 459705 - protein, 16 aa, Homo sapiens
  CDR3 for alpha chain variable domain of TCR clone 229853 (TRAV30, TRAJ24)
CGTEIVDADSWGKFQF

SEQ ID NO: 459706 - protein, 15 aa, Homo sapiens
  CDR3 for beta chain variable domain of TCR clone 229853 (TRBV12-4, TRBJ2-2)
CASSPTDSGTGGLFF

SEQ ID NO: 459707 - protein, 13 aa, Homo sapiens
  CDR3 for alpha chain variable domain of TCR clone 229854 (TRAV20, TRAJ37)
CAGCSSNTGKLIF

SEQ ID NO: 459708 - protein, 21 aa, Homo sapiens
  CDR3 for beta chain variable domain of TCR clone 229854 (TRBV4-2, TRBJ2-3)
PCSQKTRPCISVPAAPGTQYF

SEQ ID NO: 459709 - protein, 17 aa, Homo sapiens
  CDR3 for alpha chain variable domain of TCR clone 229855 (TRAV4, )
CLVDIQNPDPAVYQLRD

SEQ ID NO: 459710 - protein, 12 aa, Homo sapiens
  CDR3 for beta chain variable domain of TCR clone 229855 (TRBV6-1, TRBJ2-7)
CVSSDYSYEQYF

SEQ ID NO: 459711 - protein, 12 aa, Homo sapiens
  CDR3 for alpha chain variable domain of TCR clone 229856 (TRAV2, TRAJ31)
CAVEDNNARLMF

SEQ ID NO: 459712 - protein, 14 aa, Homo sapiens
  CDR3 for beta chain variable domain of TCR clone 229856 (TRBV25-1, TRBJ2-7)
CASSEYRAPHEQYF

SEQ ID NO: 459713 - protein, 15 aa, Homo sapiens
  CDR3 for alpha chain variable domain of TCR clone 229857 (TRAV35, TRAJ33)
CAGQPPRYSNYQLIW

SEQ ID NO: 459714 - protein, 14 aa, Homo sapiens
  CDR3 for beta chain variable domain of TCR clone 229857 (TRBV7-2, TRBJ2-7)
CASSPKTSFYEQYF

SEQ ID NO: 459715 - protein, 14 aa, Homo sapiens
  CDR3 for alpha chain variable domain of TCR clone 229858 (TRAV1-2, TRAJ16)
CAVNRFSDGQKLLF

SEQ ID NO: 459716 - protein, 14 aa, Homo sapiens
  CDR3 for beta chain variable domain of TCR clone 229858 (TRBV9, TRBJ1-6)
CQQRSRDRGLTLHF

SEQ ID NO: 459717 - protein, 14 aa, Homo sapiens
  CDR3 for alpha chain variable domain of TCR clone 229859 (TRAV13-1, TRAJ35)
CAASKGGFWNVLHC

SEQ ID NO: 459718 - protein, 13 aa, Homo sapiens
  CDR3 for beta chain variable domain of TCR clone 229859 (TRBV7-3, TRBJ1-1)
CASSQDWGTEAFF

SEQ ID NO: 459719 - protein, 16 aa, Homo sapiens
  CDR3 for alpha chain variable domain of TCR clone 229860 (TRAV16, TRAJ21)
CACGWATTSTNFTLDL

SEQ ID NO: 459720 - protein, 13 aa, Homo sapiens
  CDR3 for beta chain variable domain of TCR clone 229860 (TRBV7-9, TRBJ1-2)
CASSLKQNYGYTF

SEQ ID NO: 459721 - protein, 12 aa, Homo sapiens
  CDR3 for alpha chain variable domain of TCR clone 229861 (TRAV20, TRAJ56)
CAVTGANSKLPF

SEQ ID NO: 459722 - protein, 14 aa, Homo sapiens
  CDR3 for beta chain variable domain of TCR clone 229861 (TRBV20-1, TRBJ2-5)
CSALVPGYQETQYF

SEQ ID NO: 459723 - protein, 12 aa, Homo sapiens
  CDR3 for alpha chain variable domain of TCR clone 229862 (TRAV12-3, TRAJ17)
CAMTLTGNKLTF

SEQ ID NO: 459724 - protein, 19 aa, Homo sapiens
  CDR3 for beta chain variable domain of TCR clone 229862 (TRBV25-1, TRBJ2-2)
CAILVYRVDRGRKPGELFF

SEQ ID NO: 459725 - protein, 14 aa, Homo sapiens
  CDR3 for alpha chain variable domain of TCR clone 229863 (TRAV1-1, TRAJ30)
CAVRSLNRDDKIIF

SEQ ID NO: 459726 - protein, 14 aa, Homo sapiens
  CDR3 for beta chain variable domain of TCR clone 229863 (TRBV7-2, TRBJ2-7)
CASRSQGAAYEQYF

SEQ ID NO: 459727 - protein, 14 aa, Homo sapiens
  CDR3 for alpha chain variable domain of TCR clone 229864 (TRAV12-2, TRAJ13)
CAVKKTGGCQKVTF

SEQ ID NO: 459728 - protein, 16 aa, Homo sapiens
  CDR3 for beta chain variable domain of TCR clone 229864 (TRBV20-1, TRBJ1-4)
CSAPGQGLLTNEKLFF

SEQ ID NO: 459729 - protein, 10 aa, Homo sapiens
  CDR3 for alpha chain variable domain of TCR clone 229865 (TRAV9-2, TRAJ49)
CALTGNQFYF

SEQ ID NO: 459730 - protein, 16 aa, Homo sapiens
  CDR3 for beta chain variable domain of TCR clone 229865 (TRBV19, TRBJ2-3)
CASSPGAASGTDTQYF

SEQ ID NO: 459731 - protein, 14 aa, Homo sapiens
  CDR3 for alpha chain variable domain of TCR clone 229866 (TRAV8-2, TRAJ4)
CVVSPSGGYNKLIF

SEQ ID NO: 459732 - protein, 15 aa, Homo sapiens
  CDR3 for beta chain variable domain of TCR clone 229866 (TRBV4-1, TRBJ1-4)
CPSSDTGGTNEKLFF

SEQ ID NO: 459733 - protein, 14 aa, Homo sapiens
  CDR3 for alpha chain variable domain of TCR clone 229867 (TRAV23/DV6, TRAJ37)
CAASTSSNTGKLIF

SEQ ID NO: 459734 - protein, 15 aa, Homo sapiens
  CDR3 for beta chain variable domain of TCR clone 229867 (TRBV6-3, TRBJ2-7)
CASSSPGTVFYEQYF

SEQ ID NO: 459735 - protein, 15 aa, Homo sapiens
  CDR3 for alpha chain variable domain of TCR clone 229868 (TRAV12-1, TRAJ5)
CVVNMLETGRRALTF

SEQ ID NO: 459736 - protein, 17 aa, Homo sapiens
  CDR3 for beta chain variable domain of TCR clone 229868 (TRBV28, TRBJ2-1)
CASSSARQALTYNEQFF

SEQ ID NO: 459737 - protein, 13 aa, Homo sapiens
  CDR3 for alpha chain variable domain of TCR clone 229869 (TRAV27, TRAJ45)
CRSSGGGADGRTF

SEQ ID NO: 459738 - protein, 17 aa, Homo sapiens
  CDR3 for beta chain variable domain of TCR clone 229869 (TRBV11-2, TRBJ2-1)
CASSLYPPGVEYNEQFF

SEQ ID NO: 459739 - protein, 16 aa, Homo sapiens
  CDR3 for alpha chain variable domain of TCR clone 229870 (TRAV14/DV4, TRAJ39)
CAMREAYNNAGKMLTF

SEQ ID NO: 459740 - protein, 14 aa, Homo sapiens
  CDR3 for beta chain variable domain of TCR clone 229870 (TRBV7-9, TRBJ2-5)
CASSPAQDQETQYF

SEQ ID NO: 459741 - protein, 15 aa, Homo sapiens
  CDR3 for alpha chain variable domain of TCR clone 229871 (TRAV3, TRAJ32)
CAVSSYGGATNKLIF

SEQ ID NO: 459742 - protein, 12 aa, Homo sapiens
  CDR3 for beta chain variable domain of TCR clone 229871 (TRBV28, TRBJ2-3)
CASSLYRDTQYF

SEQ ID NO: 459743 - protein, 14 aa, Homo sapiens
  CDR3 for alpha chain variable domain of TCR clone 229872 (TRAV26-1, TRAJ38)
CIADNAGNNRKLIW

SEQ ID NO: 459744 - protein, 15 aa, Homo sapiens
  CDR3 for beta chain variable domain of TCR clone 229872 (TRBV12-4, TRBJ2-1)
CASIKSFSGYNEQFF

SEQ ID NO: 459745 - protein, 15 aa, Homo sapiens
  CDR3 for alpha chain variable domain of TCR clone 229873 (TRAV8-3, TRAJ13)
CAVAPNSGGYQKVTF

SEQ ID NO: 459746 - protein, 13 aa, Homo sapiens
  CDR3 for beta chain variable domain of TCR clone 229873 (TRBV10-3, TRBJ2-7)
CASKLAVNYEQYF

SEQ ID NO: 459747 - protein, 17 aa, Homo sapiens
  CDR3 for alpha chain variable domain of TCR clone 229874 (TRAV2, TRAJ36)
CAVEDRGNWGKQPLLWD

SEQ ID NO: 459748 - protein, 14 aa, Homo sapiens
  CDR3 for beta chain variable domain of TCR clone 229874 (TRBV7-9, TRBJ2-5)
SASSLDTAQETQYF

SEQ ID NO: 459749 - protein, 16 aa, Homo sapiens
  CDR3 for alpha chain variable domain of TCR clone 229875 (TRAV12-2, TRAJ32)
CAVNLGQGGATNKLVF

SEQ ID NO: 459750 - protein, 15 aa, Homo sapiens
  CDR3 for beta chain variable domain of TCR clone 229875 (TRBV20-1, TRBJ2-7)
CSARGPLAGGREQYF

SEQ ID NO: 459751 - protein, 13 aa, Homo sapiens
  CDR3 for alpha chain variable domain of TCR clone 229876 (TRAV38-1, TRAJ42)
CARWGGSQGNLIF

SEQ ID NO: 459752 - protein, 13 aa, Homo sapiens
  CDR3 for beta chain variable domain of TCR clone 229876 (TRBV20-1, TRBJ1-1)
CSASLGLGTEAFF

SEQ ID NO: 459753 - protein, 12 aa, Homo sapiens
  CDR3 for alpha chain variable domain of TCR clone 229877 (TRAV13-1, TRAJ21)
CAAKEGFNKFYF

SEQ ID NO: 459754 - protein, 16 aa, Homo sapiens
  CDR3 for beta chain variable domain of TCR clone 229877 (TRBV7-8, TRBJ2-4)
CASSAERTLAKNIQFF

SEQ ID NO: 459755 - protein, 13 aa, Homo sapiens
  CDR3 for alpha chain variable domain of TCR clone 229878 (TRAV2, TRAJ40)
CAVVTSGTYKYIF

SEQ ID NO: 459756 - protein, 15 aa, Homo sapiens
  CDR3 for beta chain variable domain of TCR clone 229878 (TRBV11-3, TRBJ2-3)
CASAKDGREGDTQYF

SEQ ID NO: 459757 - protein, 16 aa, Homo sapiens
  CDR3 for alpha chain variable domain of TCR clone 229879 (TRAV3, TRAJ6)
CAVRDGMGRRKLHTYI

SEQ ID NO: 459758 - protein, 14 aa, Homo sapiens
  CDR3 for beta chain variable domain of TCR clone 229879 (TRBV19, TRBJ2-1)
CASPTFVLSGEQFF

SEQ ID NO: 459759 - protein, 11 aa, Homo sapiens
  CDR3 for alpha chain variable domain of TCR clone 229880 (TRAV23/DV6, TRAJ21)
CEANNFNKFYF

SEQ ID NO: 459760 - protein, 12 aa, Homo sapiens
  CDR3 for beta chain variable domain of TCR clone 229880 (TRBV11-2, TRBJ2-1)
CASSPGNNEQFF

SEQ ID NO: 459761 - protein, 14 aa, Homo sapiens
  CDR3 for alpha chain variable domain of TCR clone 229881 (TRAV26-1, TRAJ38)
CIADNAGNNRNLIW

SEQ ID NO: 459762 - protein, 15 aa, Homo sapiens
  CDR3 for beta chain variable domain of TCR clone 229881 (TRBV4-1, TRBJ1-1)
CASSQEWGHYTEAFF

SEQ ID NO: 459763 - protein, 14 aa, Homo sapiens
  CDR3 for alpha chain variable domain of TCR clone 229882 (TRAV17, TRAJ57)
CATDPQGGAEKLVF

SEQ ID NO: 459764 - protein, 18 aa, Homo sapiens
  CDR3 for beta chain variable domain of TCR clone 229882 (TRBV20-1, TRBJ2-3)
CSASGLAGGPGTTDTQYF

SEQ ID NO: 459765 - protein, 11 aa, Homo sapiens
  CDR3 for alpha chain variable domain of TCR clone 229883 (TRAV12-3, TRAJ27)
CAMANAGKSTL

SEQ ID NO: 459766 - protein, 14 aa, Homo sapiens
  CDR3 for beta chain variable domain of TCR clone 229883 (TRBV4-1, TRBJ2-2)
RASSQAVNTGELFF

SEQ ID NO: 459767 - protein, 14 aa, Homo sapiens
  CDR3 for alpha chain variable domain of TCR clone 229884 (TRAV26-1, TRAJ38)
CISDNAGNNRKLLW

SEQ ID NO: 459768 - protein, 13 aa, Homo sapiens
  CDR3 for beta chain variable domain of TCR clone 229884 (TRBV20-1, TRBJ1-1)
CSARGGGNTEAFF

SEQ ID NO: 459769 - protein, 15 aa, Homo sapiens
  CDR3 for alpha chain variable domain of TCR clone 229885 (TRAV26-1, TRAJ38)
CIVRAEGGNNRKLIW

SEQ ID NO: 459770 - protein, 14 aa, Homo sapiens
  CDR3 for beta chain variable domain of TCR clone 229885 (TRBV7-6, TRBJ2-5)
CASSSTSGSETQCF

SEQ ID NO: 459771 - protein, 12 aa, Homo sapiens
  CDR3 for alpha chain variable domain of TCR clone 229886 (TRAV3, TRAJ31)
CAVRDGNARLMF

SEQ ID NO: 459772 - protein, 18 aa, Homo sapiens
  CDR3 for beta chain variable domain of TCR clone 229886 (TRBV7-2, TRBJ2-3)
CSSSLKSEGSGITDTQYF

SEQ ID NO: 459773 - protein, 13 aa, Homo sapiens
  CDR3 for alpha chain variable domain of TCR clone 229887 (TRAV12-3, TRAJ53)
CAMRGGSNYKLTF

SEQ ID NO: 459774 - protein, 15 aa, Homo sapiens
  CDR3 for beta chain variable domain of TCR clone 229887 (TRBV2, TRBJ2-1)
CATQARLVMIGESSS

SEQ ID NO: 459775 - protein, 15 aa, Homo sapiens
  CDR3 for alpha chain variable domain of TCR clone 229888 (TRAV34, TRAJ38)
CGADFTPGNNRKLIL

SEQ ID NO: 459776 - protein, 15 aa, Homo sapiens
  CDR3 for beta chain variable domain of TCR clone 229888 (TRBV5-5, TRBJ1-5)
CASSLKGGGEQPQHF

SEQ ID NO: 459777 - protein, 11 aa, Homo sapiens
  CDR3 for alpha chain variable domain of TCR clone 229889 (TRAV12-2, TRAJ49)
CAVHTGNQFYF

SEQ ID NO: 459778 - protein, 14 aa, Homo sapiens
  CDR3 for beta chain variable domain of TCR clone 229889 (TRBV7-9, TRBJ1-2)
CASSRQGANYGYTF

SEQ ID NO: 459779 - protein, 15 aa, Homo sapiens
  CDR3 for alpha chain variable domain of TCR clone 229890 (TRAV8-3, TRAJ45)
CASSYSGGGADGLTF

SEQ ID NO: 459780 - protein, 12 aa, Homo sapiens
  CDR3 for beta chain variable domain of TCR clone 229890 (TRBV10-3, TRBJ2-7)
CLQTAVNYEQYF

SEQ ID NO: 459781 - protein, 15 aa, Homo sapiens
  CDR3 for alpha chain variable domain of TCR clone 229891 (TRAV3, TRAJ5)
CAVRDLDTGRSAPTF

SEQ ID NO: 459782 - protein, 13 aa, Homo sapiens
  CDR3 for beta chain variable domain of TCR clone 229891 (TRBV19, TRBJ1-2)
CASSQGQVYGYTF

SEQ ID NO: 459783 - protein, 17 aa, Homo sapiens
  CDR3 for alpha chain variable domain of TCR clone 229892 (TRAV8-6, TRAJ58)
CAVSSWVGETSGSRLTF

SEQ ID NO: 459784 - protein, 14 aa, Homo sapiens
  CDR3 for beta chain variable domain of TCR clone 229892 (TRBV4-2, TRBJ2-1)
CASGLDRAYNEQFV

SEQ ID NO: 459785 - protein, 11 aa, Homo sapiens
  CDR3 for alpha chain variable domain of TCR clone 229893 (TRAV21, TRAJ34)
CAHYNTDKLIF

SEQ ID NO: 459786 - protein, 13 aa, Homo sapiens
  CDR3 for beta chain variable domain of TCR clone 229893 (TRBV7-2, TRBJ1-1)
CASNLKVAKVAFF

SEQ ID NO: 459787 - protein, 15 aa, Homo sapiens
  CDR3 for alpha chain variable domain of TCR clone 229894 (TRAV16, TRAJ12)
CSKWPLRDISYKLIF

SEQ ID NO: 459788 - protein, 13 aa, Homo sapiens
  CDR3 for beta chain variable domain of TCR clone 229894 (TRBV4-2, TRBJ1-1)
CASSQAGNTEAFL

SEQ ID NO: 459789 - protein, 14 aa, Homo sapiens
  CDR3 for alpha chain variable domain of TCR clone 229895 (TRAV2, TRAJ3)
CAVRPYSSASKIIF

SEQ ID NO: 459790 - protein, 20 aa, Homo sapiens
  CDR3 for beta chain variable domain of TCR clone 229895 (TRBV7-8, TRBJ2-2)
CASSHLFPGPTIHITGELFF

SEQ ID NO: 459791 - protein, 16 aa, Homo sapiens
  CDR3 for alpha chain variable domain of TCR clone 229896 (TRAV12-2, TRAJ40)
CAVIGGGTSGTYKYIF

SEQ ID NO: 459792 - protein, 13 aa, Homo sapiens
  CDR3 for beta chain variable domain of TCR clone 229896 (TRBV4-1, TRBJ2-2)
CASSQENTGELFF

SEQ ID NO: 459793 - protein, 12 aa, Homo sapiens
  CDR3 for alpha chain variable domain of TCR clone 229897 (TRAV3, TRAJ31)
CAVRDGNARLMF

SEQ ID NO: 459794 - protein, 20 aa, Homo sapiens
  CDR3 for beta chain variable domain of TCR clone 229897 (TRBV5-1, TRBJ2-1)
CASSLVSGRGVRSSYNEQFF

SEQ ID NO: 459795 - protein, 14 aa, Homo sapiens
  CDR3 for alpha chain variable domain of TCR clone 229898 (TRAV12-2, TRAJ13)
CAVKKTGGYQKVTF

SEQ ID NO: 459796 - protein, 17 aa, Homo sapiens
  CDR3 for beta chain variable domain of TCR clone 229898 (TRBV15, TRBJ1-5)
CATSRVKGIYSNQPQHF

SEQ ID NO: 459797 - protein, 14 aa, Homo sapiens
  CDR3 for alpha chain variable domain of TCR clone 229899 (TRAV21, TRAJ52)
CGRAGGTSYGKLTF

SEQ ID NO: 459798 - protein, 14 aa, Homo sapiens
  CDR3 for beta chain variable domain of TCR clone 229899 (TRBV19, TRBJ1-2)
CASSVLCYNYGYTF

SEQ ID NO: 459799 - protein, 14 aa, Homo sapiens
  CDR3 for alpha chain variable domain of TCR clone 229900 (TRAV21, TRAJ37)
CAVKGSSNTGKLIF

SEQ ID NO: 459800 - protein, 14 aa, Homo sapiens
  CDR3 for beta chain variable domain of TCR clone 229900 (TRBV12-5, TRBJ2-5)
CASGSRTHQETQYF

SEQ ID NO: 459801 - protein, 12 aa, Homo sapiens
  CDR3 for alpha chain variable domain of TCR clone 229901 (TRAV1-1, TRAJ15)
FAVGQAGTALIF

SEQ ID NO: 459802 - protein, 16 aa, Homo sapiens
  CDR3 for beta chain variable domain of TCR clone 229901 (TRBV12-4, TRBJ2-7)
CASSPEGQGSSYEQYF

SEQ ID NO: 459803 - protein, 17 aa, Homo sapiens
  CDR3 for alpha chain variable domain of TCR clone 229902 (TRAV14/DV4, TRAJ4)
CAMREASGRGGYNTLIF

SEQ ID NO: 459804 - protein, 14 aa, Homo sapiens
  CDR3 for beta chain variable domain of TCR clone 229902 (TRBV11-2, TRBJ2-5)
CASRPLAGRETQYF

SEQ ID NO: 459805 - protein, 14 aa, Homo sapiens
  CDR3 for alpha chain variable domain of TCR clone 229903 (TRAV2, TRAJ20)
CAVEDGTTDYKLSF

SEQ ID NO: 459806 - protein, 13 aa, Homo sapiens
  CDR3 for beta chain variable domain of TCR clone 229903 (TRBV7-2, TRBJ1-1)
CASSRNTNTEAFF

SEQ ID NO: 459807 - protein, 12 aa, Homo sapiens
  CDR3 for alpha chain variable domain of TCR clone 229904 (TRAV36/DV7, TRAJ54)
CAVVRGAQKLVF

SEQ ID NO: 459808 - protein, 15 aa, Homo sapiens
  CDR3 for beta chain variable domain of TCR clone 229904 (TRBV19, TRBJ1-1)
CASTSGQIQNTEAFF

SEQ ID NO: 459809 - protein, 15 aa, Homo sapiens
  CDR3 for alpha chain variable domain of TCR clone 229905 (TRAV20, TRAJ41)
CAVQANSNSGYALNF

SEQ ID NO: 459810 - protein, 12 aa, Homo sapiens
  CDR3 for beta chain variable domain of TCR clone 229905 (TRBV7-9, TRBJ2-7)
CASSIKREEQYF

SEQ ID NO: 459811 - protein, 13 aa, Homo sapiens
  CDR3 for alpha chain variable domain of TCR clone 229906 (TRAV1-2, TRAJ20)
CAVRDGNDYKPSF

SEQ ID NO: 459812 - protein, 16 aa, Homo sapiens
  CDR3 for beta chain variable domain of TCR clone 229906 (TRBV12-5, TRBJ2-5)
CASGPRTSGNQETQYF

SEQ ID NO: 459813 - protein, 13 aa, Homo sapiens
  CDR3 for alpha chain variable domain of TCR clone 229907 (TRAV39, TRAJ48)
CAAVNFGNEKLTF

SEQ ID NO: 459814 - protein, 14 aa, Homo sapiens
  CDR3 for beta chain variable domain of TCR clone 229907 (TRBV7-2, TRBJ2-7)
CASRSQGAAYEQYF

SEQ ID NO: 459815 - protein, 12 aa, Homo sapiens
  CDR3 for alpha chain variable domain of TCR clone 229908 (TRAV16, TRAJ10)
CSHTGGGNKLTF

SEQ ID NO: 459816 - protein, 14 aa, Homo sapiens
  CDR3 for beta chain variable domain of TCR clone 229908 (TRBV19, TRBJ2-1)
CASPTFVLSGEQFF

SEQ ID NO: 459817 - protein, 12 aa, Homo sapiens
  CDR3 for alpha chain variable domain of TCR clone 229909 (TRAV21, TRAJ11)
CAATSAYSTLTF

SEQ ID NO: 459818 - protein, 14 aa, Homo sapiens
  CDR3 for beta chain variable domain of TCR clone 229909 (TRBV20-1, TRBJ2-7)
CSAPELAGVGEQYF

SEQ ID NO: 459819 - protein, 13 aa, Homo sapiens
  CDR3 for alpha chain variable domain of TCR clone 229910 (TRAV13-2, TRAJ48)
CAAMDFGNEKLTF

SEQ ID NO: 459820 - protein, 15 aa, Homo sapiens
  CDR3 for beta chain variable domain of TCR clone 229910 (TRBV7-9, TRBJ1-6)
CASSSPGRGKSPLHF

SEQ ID NO: 459821 - protein, 15 aa, Homo sapiens
  CDR3 for alpha chain variable domain of TCR clone 229911 (TRAV8-1, TRAJ6)
CAVNANPGGSYIPTF

SEQ ID NO: 459822 - protein, 17 aa, Homo sapiens
  CDR3 for beta chain variable domain of TCR clone 229911 (TRBV7-9, TRBJ2-6)
CASSFGAGYSGANVLTF

SEQ ID NO: 459823 - protein, 12 aa, Homo sapiens
  CDR3 for alpha chain variable domain of TCR clone 229912 (TRAV21, TRAJ58)
CSAETSGSRLTC

SEQ ID NO: 459824 - protein, 15 aa, Homo sapiens
  CDR3 for beta chain variable domain of TCR clone 229912 (TRBV20-1, TRBJ2-7)
CSARDPVKGEGEQYF

SEQ ID NO: 459825 - protein, 15 aa, Homo sapiens
  CDR3 for alpha chain variable domain of TCR clone 229913 (TRAV23/DV6, TRAJ33)
CAASNSGGGNYQLMW

SEQ ID NO: 459826 - protein, 12 aa, Homo sapiens
  CDR3 for beta chain variable domain of TCR clone 229913 (TRBV7-3, TRBJ2-1)
CASSFINNEQFF

SEQ ID NO: 459827 - protein, 15 aa, Homo sapiens
  CDR3 for alpha chain variable domain of TCR clone 229914 (TRAV13-1, TRAJ21)
CAASIYNFNKFYFDL

SEQ ID NO: 459828 - protein, 15 aa, Homo sapiens
  CDR3 for beta chain variable domain of TCR clone 229914 (TRBV3-1, TRBJ2-2)
CASSQDWTRAGELFF

SEQ ID NO: 459829 - protein, 16 aa, Homo sapiens
  CDR3 for alpha chain variable domain of TCR clone 229915 (TRAV16, TRAJ4)
CALSRMFSGGYNKLIL

SEQ ID NO: 459830 - protein, 12 aa, Homo sapiens
  CDR3 for beta chain variable domain of TCR clone 229915 (TRBV29-1, TRBJ2-3)
CSVTGGADTQYF

SEQ ID NO: 459831 - protein, 17 aa, Homo sapiens
  CDR3 for alpha chain variable domain of TCR clone 229916 (TRAV13-1, TRAJ52)
CAAGRNSGGTGYGKLPF

SEQ ID NO: 459832 - protein, 13 aa, Homo sapiens
  CDR3 for beta chain variable domain of TCR clone 229916 (TRBV7-2, TRBJ1-1)
CASNLKGAKVAFF

SEQ ID NO: 459833 - protein, 15 aa, Homo sapiens
  CDR3 for alpha chain variable domain of TCR clone 229917 (TRAV8-3, TRAJ6)
CAVGEDRGGSYTPTF

SEQ ID NO: 459834 - protein, 14 aa, Homo sapiens
  CDR3 for beta chain variable domain of TCR clone 229917 (TRBV27, TRBJ2-2)
CASLRSPPGGELFF

SEQ ID NO: 459835 - protein, 13 aa, Homo sapiens
  CDR3 for alpha chain variable domain of TCR clone 229918 (TRAV17, TRAJ5)
CATGDTGRSALTF

SEQ ID NO: 459836 - protein, 13 aa, Homo sapiens
  CDR3 for beta chain variable domain of TCR clone 229918 (TRBV19, TRBJ1-5)
CASSIEPVQPQHF

SEQ ID NO: 459837 - protein, 14 aa, Homo sapiens
  CDR3 for alpha chain variable domain of TCR clone 229919 (TRAV20, TRAJ29)
CAVQAWVGNTPLVF

SEQ ID NO: 459838 - protein, 15 aa, Homo sapiens
  CDR3 for beta chain variable domain of TCR clone 229919 (TRBV29-1, TRBJ2-7)
CSVEFFERGSYEQYF

SEQ ID NO: 459839 - protein, 21 aa, Homo sapiens
  CDR3 for alpha chain variable domain of TCR clone 229920 (TRAV1-1, TRAJ6)
CLLLLRCERLERSGGSYIPTF

SEQ ID NO: 459840 - protein, 13 aa, Homo sapiens
  CDR3 for beta chain variable domain of TCR clone 229920 (TRBV10-2, TRBJ2-7)
CASGASGGYEQYF

SEQ ID NO: 459841 - protein, 23 aa, Homo sapiens
  CDR3 for alpha chain variable domain of TCR clone 229921 (TRAV12-1, TRAJ8)
CVVNKGFRNLYLELAPDFWSVQI

SEQ ID NO: 459842 - protein, 15 aa, Homo sapiens
  CDR3 for beta chain variable domain of TCR clone 229921 (TRBV19, TRBJ1-2)
CASSVGQVLNYGYTF

SEQ ID NO: 459843 - protein, 13 aa, Homo sapiens
  CDR3 for alpha chain variable domain of TCR clone 229922 (TRAV3, TRAJ43)
CAVKARNNNDTRF

SEQ ID NO: 459844 - protein, 16 aa, Homo sapiens
  CDR3 for beta chain variable domain of TCR clone 229922 (TRBV7-9, TRBJ2-3)
CASSFSVAGGTDTQYF

SEQ ID NO: 459845 - protein, 13 aa, Homo sapiens
  CDR3 for alpha chain variable domain of TCR clone 229923 (TRAV8-1, TRAJ30)
CAVIMNRDDKIIF

SEQ ID NO: 459846 - protein, 16 aa, Homo sapiens
  CDR3 for beta chain variable domain of TCR clone 229923 (TRBV7-2, TRBJ2-3)
CASSQELAGDTDTQYF

SEQ ID NO: 459847 - protein, 15 aa, Homo sapiens
  CDR3 for alpha chain variable domain of TCR clone 229924 (TRAV29/DV5, TRAJ29)
CAASESSSGNTPLAF

SEQ ID NO: 459848 - protein, 17 aa, Homo sapiens
  CDR3 for beta chain variable domain of TCR clone 229924 (TRBV4-1, TRBJ1-4)
CASSQEGPRGVEEKLFF

SEQ ID NO: 459849 - protein, 11 aa, Homo sapiens
  CDR3 for alpha chain variable domain of TCR clone 229925 (TRAV12-3, TRAJ30)
CVVNGQDKIIF

SEQ ID NO: 459850 - protein, 12 aa, Homo sapiens
  CDR3 for beta chain variable domain of TCR clone 229925 (TRBV27, TRBJ2-2)
CASKLFTGELFF

SEQ ID NO: 459851 - protein, 13 aa, Homo sapiens
  CDR3 for alpha chain variable domain of TCR clone 229926 (TRAV23/DV6, TRAJ22)
CAASKGSARQLTF

SEQ ID NO: 459852 - protein, 16 aa, Homo sapiens
  CDR3 for beta chain variable domain of TCR clone 229926 (TRBV19, TRBJ2-1)
CASSKAGPSSYNEQFF

SEQ ID NO: 459853 - protein, 14 aa, Homo sapiens
  CDR3 for alpha chain variable domain of TCR clone 229927 (TRAV12-2, TRAJ13)
CAVKKTGGYQKVTF

SEQ ID NO: 459854 - protein, 19 aa, Homo sapiens
  CDR3 for beta chain variable domain of TCR clone 229927 (TRBV25-1, TRBJ2-2)
CAILVYRVDRGRKPGELFF

SEQ ID NO: 459855 - protein, 13 aa, Homo sapiens
  CDR3 for alpha chain variable domain of TCR clone 229928 (TRAV1-2, TRAJ9)
CAALNTGGFKTIF

SEQ ID NO: 459856 - protein, 13 aa, Homo sapiens
  CDR3 for beta chain variable domain of TCR clone 229928 (TRBV11-2, TRBJ2-5)
CASSFSSQETQYF

SEQ ID NO: 459857 - protein, 16 aa, Homo sapiens
  CDR3 for alpha chain variable domain of TCR clone 229929 (TRAV3, TRAJ37)
CAVRGKGSGNAGKLIF

SEQ ID NO: 459858 - protein, 16 aa, Homo sapiens
  CDR3 for beta chain variable domain of TCR clone 229929 (TRBV12-4, TRBJ1-5)
CASSRPVGGSNQPQHF

SEQ ID NO: 459859 - protein, 15 aa, Homo sapiens
  CDR3 for alpha chain variable domain of TCR clone 229930 (TRAV3, TRAJ22)
CAARDRGGSARQLTF

SEQ ID NO: 459860 - protein, 12 aa, Homo sapiens
  CDR3 for beta chain variable domain of TCR clone 229930 (TRBV12-4, TRBJ1-2)
CASSFIRLHLRF

SEQ ID NO: 459861 - protein, 13 aa, Homo sapiens
  CDR3 for alpha chain variable domain of TCR clone 229931 (TRAV2, TRAJ40)
CAVVTSGTYKYIF

SEQ ID NO: 459862 - protein, 17 aa, Homo sapiens
  CDR3 for beta chain variable domain of TCR clone 229931 (TRBV4-2, TRBJ2-3)
CASSQDPIAGVGDTQYF

SEQ ID NO: 459863 - protein, 11 aa, Homo sapiens
  CDR3 for alpha chain variable domain of TCR clone 229932 (TRAV4, TRAJ31)
CLVGDNARLMF

SEQ ID NO: 459864 - protein, 14 aa, Homo sapiens
  CDR3 for beta chain variable domain of TCR clone 229932 (TRBV7-2, TRBJ2-7)
CASSPKTSFYEQYF

SEQ ID NO: 459865 - protein, 13 aa, Homo sapiens
  CDR3 for alpha chain variable domain of TCR clone 229933 (TRAV26-1, TRAJ48)
CIVRVVGDEKLTF

SEQ ID NO: 459866 - protein, 16 aa, Homo sapiens
  CDR3 for beta chain variable domain of TCR clone 229933 (TRBV7-3, TRBJ2-2)
CASSLKRGTLSGELFF

SEQ ID NO: 459867 - protein, 10 aa, Homo sapiens
  CDR3 for alpha chain variable domain of TCR clone 229934 (TRAV13-2, TRAJ54)
AVQGTQKLVF

SEQ ID NO: 459868 - protein, 15 aa, Homo sapiens
  CDR3 for beta chain variable domain of TCR clone 229934 (TRBV20-1, TRBJ2-7)
CSAESGTSGAYEQYF

SEQ ID NO: 459869 - protein, 12 aa, Homo sapiens
  CDR3 for alpha chain variable domain of TCR clone 229935 (TRAV2, TRAJ31)
CAVEDNNARLMF

SEQ ID NO: 459870 - protein, 16 aa, Homo sapiens
  CDR3 for beta chain variable domain of TCR clone 229935 (TRBV19, TRBJ2-2)
CASSTARASNTGELFF

SEQ ID NO: 459871 - protein, 12 aa, Homo sapiens
  CDR3 for alpha chain variable domain of TCR clone 229936 (TRAV20, TRAJ20)
CAVRFNDNKLSF

SEQ ID NO: 459872 - protein, 14 aa, Homo sapiens
  CDR3 for beta chain variable domain of TCR clone 229936 (TRBV20-1, TRBJ2-1)
CSAQIGGSANEQFF

SEQ ID NO: 459873 - protein, 12 aa, Homo sapiens
  CDR3 for alpha chain variable domain of TCR clone 229937 (TRAV21, TRAJ29)
CAVTSGNTPLVF

SEQ ID NO: 459874 - protein, 13 aa, Homo sapiens
  CDR3 for beta chain variable domain of TCR clone 229937 (TRBV4-1, TRBJ2-1)
CASSQAGGDEQFF

SEQ ID NO: 459875 - protein, 15 aa, Homo sapiens
  CDR3 for alpha chain variable domain of TCR clone 229938 (TRAV40, TRAJ45)
CILGDLGGGADGLTF

SEQ ID NO: 459876 - protein, 17 aa, Homo sapiens
  CDR3 for beta chain variable domain of TCR clone 229938 (TRBV18, TRBJ1-5)
CASSPTMGQGTNQPQHF

SEQ ID NO: 459877 - protein, 18 aa, Homo sapiens
  CDR3 for alpha chain variable domain of TCR clone 229939 (TRAV21, TRAJ52)
CAVRPSPAGGTSYGKLTF

SEQ ID NO: 459878 - protein, 17 aa, Homo sapiens
  CDR3 for beta chain variable domain of TCR clone 229939 (TRBV5-1, TRBJ1-6)
CASSFGEVSSYNSPLHF

SEQ ID NO: 459879 - protein, 11 aa, Homo sapiens
  CDR3 for alpha chain variable domain of TCR clone 229940 (TRAV1-1, TRAJ23)
CAVRQGGKPIF

SEQ ID NO: 459880 - protein, 13 aa, Homo sapiens
  CDR3 for beta chain variable domain of TCR clone 229940 (TRBV11-2, TRBJ2-5)
CASSRGPSETQYF

SEQ ID NO: 459881 - protein, 13 aa, Homo sapiens
  CDR3 for alpha chain variable domain of TCR clone 229941 (TRAV17, TRAJ9)
CATDYTGGFKTIF

SEQ ID NO: 459882 - protein, 18 aa, Homo sapiens
  CDR3 for beta chain variable domain of TCR clone 229941 (TRBV12-4, TRBJ2-2)
CASSLVAGTRGRTGELFF

SEQ ID NO: 459883 - protein, 16 aa, Homo sapiens
  CDR3 for alpha chain variable domain of TCR clone 229942 (TRAV8-6, TRAJ42)
CAVTANYGGSQGNLIF

SEQ ID NO: 459884 - protein, 18 aa, Homo sapiens
  CDR3 for beta chain variable domain of TCR clone 229942 (TRBV11-2, TRBJ2-3)
CASSLGGASRGAPNTQYF

SEQ ID NO: 459885 - protein, 16 aa, Homo sapiens
  CDR3 for alpha chain variable domain of TCR clone 229943 (TRAV30, TRAJ24)
CGTEIVDADSWGKFQF

SEQ ID NO: 459886 - protein, 15 aa, Homo sapiens
  CDR3 for beta chain variable domain of TCR clone 229943 (TRBV12-4, TRBJ2-7)
CARSQRTSGNYEQYF

SEQ ID NO: 459887 - protein, 15 aa, Homo sapiens
  CDR3 for alpha chain variable domain of TCR clone 229944 (TRAV23/DV6, TRAJ37)
CAAGEGSSNTGKLIF

SEQ ID NO: 459888 - protein, 15 aa, Homo sapiens
  CDR3 for beta chain variable domain of TCR clone 229944 (TRBV7-9, TRBJ2-1)
CASSLLIGSYNEQFF

SEQ ID NO: 459889 - protein, 15 aa, Homo sapiens
  CDR3 for alpha chain variable domain of TCR clone 229945 (TRAV8-3, TRAJ11)
CAVGLLNSGYGTLTF

SEQ ID NO: 459890 - protein, 23 aa, Homo sapiens
  CDR3 for beta chain variable domain of TCR clone 229945 (TRBV7-9, TRBJ1-2)
EAQLEKSRLLSDRFSSGEDGYTF

SEQ ID NO: 459891 - protein, 11 aa, Homo sapiens
  CDR3 for alpha chain variable domain of TCR clone 229946 (TRAV6, TRAJ4)
PISGGYNKLIF

SEQ ID NO: 459892 - protein, 12 aa, Homo sapiens
  CDR3 for beta chain variable domain of TCR clone 229946 (TRBV7-3, TRBJ1-3)
CASSLGGNTIYF

SEQ ID NO: 459893 - protein, 13 aa, Homo sapiens
  CDR3 for alpha chain variable domain of TCR clone 229947 (TRAV13-1, TRAJ38)
CAPYAGNNRKLIW

SEQ ID NO: 459894 - protein, 14 aa, Homo sapiens
  CDR3 for beta chain variable domain of TCR clone 229947 (TRBV7-2, TRBJ2-7)
CASSPKTSFYEQYF

SEQ ID NO: 459895 - protein, 18 aa, Homo sapiens
  CDR3 for alpha chain variable domain of TCR clone 229948 (TRAV12-3, TRAJ52)
CAMSVGGAGGTSYGKLAF

SEQ ID NO: 459896 - protein, 14 aa, Homo sapiens
  CDR3 for beta chain variable domain of TCR clone 229948 (TRBV7-8, TRBJ2-3)
CASSLEAGTDTQYF

SEQ ID NO: 459897 - protein, 10 aa, Homo sapiens
  CDR3 for alpha chain variable domain of TCR clone 229949 (TRAV5, TRAJ34)
CAEDTDKLIF

SEQ ID NO: 459898 - protein, 13 aa, Homo sapiens
  CDR3 for beta chain variable domain of TCR clone 229949 (TRBV19, TRBJ1-4)
CATTARPSEKLFF

SEQ ID NO: 459899 - protein, 15 aa, Homo sapiens
  CDR3 for alpha chain variable domain of TCR clone 229950 (TRAV3, TRAJ5)
CAVRDLDTGRRALTF

SEQ ID NO: 459900 - protein, 15 aa, Homo sapiens
  CDR3 for beta chain variable domain of TCR clone 229950 (TRBV28, TRBJ2-3)
CAPTFRDWSTDTQYF

SEQ ID NO: 459901 - protein, 11 aa, Homo sapiens
  CDR3 for alpha chain variable domain of TCR clone 229951 (TRAV21, TRAJ11)
CAVNGYGTLTF

SEQ ID NO: 459902 - protein, 17 aa, Homo sapiens
  CDR3 for beta chain variable domain of TCR clone 229951 (TRBV18, TRBJ2-3)
CASSAAGTSGSTDTQYF

SEQ ID NO: 459903 - protein, 16 aa, Homo sapiens
  CDR3 for alpha chain variable domain of TCR clone 229952 (TRAV30, TRAJ24)
CGTEIVDADSWGKFQF

SEQ ID NO: 459904 - protein, 14 aa, Homo sapiens
  CDR3 for beta chain variable domain of TCR clone 229952 (TRBV19, TRBJ2-1)
CESKNLVLRGEQLL

SEQ ID NO: 459905 - protein, 11 aa, Homo sapiens
  CDR3 for alpha chain variable domain of TCR clone 229953 (TRAV20, TRAJ53)
CGRGSNYKLTF

SEQ ID NO: 459906 - protein, 14 aa, Homo sapiens
  CDR3 for beta chain variable domain of TCR clone 229953 (TRBV7-3, TRBJ1-1)
CASSLKGGNTEAFF

SEQ ID NO: 459907 - protein, 12 aa, Homo sapiens
  CDR3 for alpha chain variable domain of TCR clone 229954 (TRAV12-1, TRAJ16)
CVVFRDGQKLLF

SEQ ID NO: 459908 - protein, 12 aa, Homo sapiens
  CDR3 for beta chain variable domain of TCR clone 229954 (TRBV5-1, TRBJ2-7)
CASSSTTYEQYF

SEQ ID NO: 459909 - protein, 13 aa, Homo sapiens
  CDR3 for alpha chain variable domain of TCR clone 229955 (TRAV13-2, TRAJ48)
CAEMDFGNEKLTF

SEQ ID NO: 459910 - protein, 20 aa, Homo sapiens
  CDR3 for beta chain variable domain of TCR clone 229955 (TRBV11-2, TRBJ2-2)
LRTRPCISVPAALEAGSCFF

SEQ ID NO: 459911 - protein, 13 aa, Homo sapiens
  CDR3 for alpha chain variable domain of TCR clone 229956 (TRAV12-2, TRAJ20)
CAVYPSNDYKLSF

SEQ ID NO: 459912 - protein, 18 aa, Homo sapiens
  CDR3 for beta chain variable domain of TCR clone 229956 (TRBV4-1, TRBJ2-3)
CASSHQLAGGRSTDTQYF

SEQ ID NO: 459913 - protein, 13 aa, Homo sapiens
  CDR3 for alpha chain variable domain of TCR clone 229957 (TRAV2, TRAJ41)
CAVDPLSGYALNF

SEQ ID NO: 459914 - protein, 16 aa, Homo sapiens
  CDR3 for beta chain variable domain of TCR clone 229957 (TRBV5-1, TRBJ2-7)
CASSYASTSSGGEQYF

SEQ ID NO: 459915 - protein, 14 aa, Homo sapiens
  CDR3 for alpha chain variable domain of TCR clone 229958 (TRAV3, TRAJ36)
CAVRDGTGADNLFF

SEQ ID NO: 459916 - protein, 16 aa, Homo sapiens
  CDR3 for beta chain variable domain of TCR clone 229958 (TRBV7-3, TRBJ2-5)
CASIQPGGSVQETQYF

SEQ ID NO: 459917 - protein, 15 aa, Homo sapiens
  CDR3 for alpha chain variable domain of TCR clone 229959 (TRAV17, TRAJ4)
CATGTWSGGYNKLIF

SEQ ID NO: 459918 - protein, 13 aa, Homo sapiens
  CDR3 for beta chain variable domain of TCR clone 229959 (TRBV6-5, TRBJ1-2)
CASSQGQGVGYTF

SEQ ID NO: 459919 - protein, 14 aa, Homo sapiens
  CDR3 for alpha chain variable domain of TCR clone 229960 (TRAV1-2, TRAJ16)
CAVNRFSDGQKLLF

SEQ ID NO: 459920 - protein, 13 aa, Homo sapiens
  CDR3 for beta chain variable domain of TCR clone 229960 (TRBV7-3, TRBJ1-1)
CASSLGRYTEAFF

SEQ ID NO: 459921 - protein, 17 aa, Homo sapiens
  CDR3 for alpha chain variable domain of TCR clone 229961 (TRAV3, TRAJ38)
CAVRDCINAGNNRKLIW

SEQ ID NO: 459922 - protein, 17 aa, Homo sapiens
  CDR3 for beta chain variable domain of TCR clone 229961 (TRBV6-1, TRBJ2-3)
CASSEFVTGGPTDTQYF

SEQ ID NO: 459923 - protein, 12 aa, Homo sapiens
  CDR3 for alpha chain variable domain of TCR clone 229962 (TRAV17, TRAJ20)
CATDSNDYKLSF

SEQ ID NO: 459924 - protein, 17 aa, Homo sapiens
  CDR3 for beta chain variable domain of TCR clone 229962 (TRBV19, TRBJ1-1)
CASSIAGRGLMNTEAFF

SEQ ID NO: 459925 - protein, 14 aa, Homo sapiens
  CDR3 for alpha chain variable domain of TCR clone 229963 (TRAV12-1, TRAJ17)
CVVNYKAADNKLTF

SEQ ID NO: 459926 - protein, 17 aa, Homo sapiens
  CDR3 for beta chain variable domain of TCR clone 229963 (TRBV20-1, TRBJ2-1)
CSASSSVLAGSYNEQFF

SEQ ID NO: 459927 - protein, 15 aa, Homo sapiens
  CDR3 for alpha chain variable domain of TCR clone 229964 (TRAV8-3, TRAJ23)
CAVGPLYNQGGKLIF

SEQ ID NO: 459928 - protein, 17 aa, Homo sapiens
  CDR3 for beta chain variable domain of TCR clone 229964 (TRBV7-2, TRBJ2-7)
CASSLEAIAGGSYEQYF

SEQ ID NO: 459929 - protein, 16 aa, Homo sapiens
  CDR3 for alpha chain variable domain of TCR clone 229965 (TRAV30, TRAJ24)
CGTEIVDADSWGKFQF

SEQ ID NO: 459930 - protein, 16 aa, Homo sapiens
  CDR3 for beta chain variable domain of TCR clone 229965 (TRBV27, TRBJ2-1)
SMNVEPGTSGDNEQFF

SEQ ID NO: 459931 - protein, 14 aa, Homo sapiens
  CDR3 for alpha chain variable domain of TCR clone 229966 (TRAV13-2, TRAJ17)
CAENSKAAGNKLTF

SEQ ID NO: 459932 - protein, 15 aa, Homo sapiens
  CDR3 for beta chain variable domain of TCR clone 229966 (TRBV5-1, TRBJ2-1)
CASTGSGRTYNEQFF

SEQ ID NO: 459933 - protein, 11 aa, Homo sapiens
  CDR3 for alpha chain variable domain of TCR clone 229967 (TRAV16, TRAJ34)
CALIRTDKLIF

SEQ ID NO: 459934 - protein, 14 aa, Homo sapiens
  CDR3 for beta chain variable domain of TCR clone 229967 (TRBV5-4, TRBJ2-1)
CASSRDRGLHEQFF

SEQ ID NO: 459935 - protein, 15 aa, Homo sapiens
  CDR3 for alpha chain variable domain of TCR clone 229968 (TRAV8-3, TRAJ6)
CAVGPLGGGSYIPTF

SEQ ID NO: 459936 - protein, 15 aa, Homo sapiens
  CDR3 for beta chain variable domain of TCR clone 229968 (TRBV5-1, TRBJ1-1)
CASSLGEGENTEAFF

SEQ ID NO: 459937 - protein, 15 aa, Homo sapiens
  CDR3 for alpha chain variable domain of TCR clone 229969 (TRAV12-1, TRAJ45)
CVVLSGGGGADGLTF

SEQ ID NO: 459938 - protein, 15 aa, Homo sapiens
  CDR3 for beta chain variable domain of TCR clone 229969 (TRBV20-1, TRBJ2-7)
CSARDRVSGMDEPYF

SEQ ID NO: 459939 - protein, 14 aa, Homo sapiens
  CDR3 for alpha chain variable domain of TCR clone 229970 (TRAV1-2, TRAJ8)
CAVREDTGFQKLVF

SEQ ID NO: 459940 - protein, 13 aa, Homo sapiens
  CDR3 for beta chain variable domain of TCR clone 229970 (TRBV7-7, TRBJ2-2)
CASSLDGTGELFF

SEQ ID NO: 459941 - protein, 15 aa, Homo sapiens
  CDR3 for alpha chain variable domain of TCR clone 229971 (TRAV3, TRAJ3)
CAVIGRDSSASKIIF

SEQ ID NO: 459942 - protein, 18 aa, Homo sapiens
  CDR3 for beta chain variable domain of TCR clone 229971 (TRBV25-1, TRBJ1-2)
CASSGLQNGQGLIFGYTF

SEQ ID NO: 459943 - protein, 17 aa, Homo sapiens
  CDR3 for alpha chain variable domain of TCR clone 229972 (TRAV3, TRAJ42)
CAVRDRDYGGSQGNLIF

SEQ ID NO: 459944 - protein, 15 aa, Homo sapiens
  CDR3 for beta chain variable domain of TCR clone 229972 (TRBV6-6, TRBJ2-7)
CAISYSYGGSYEQYF

SEQ ID NO: 459945 - protein, 14 aa, Homo sapiens
  CDR3 for alpha chain variable domain of TCR clone 229973 (TRAV2, TRAJ9)
CTVEDRSGGFKTIF

SEQ ID NO: 459946 - protein, 17 aa, Homo sapiens
  CDR3 for beta chain variable domain of TCR clone 229973 (TRBV4-1, TRBJ2-7)
CASSRDPLGVRGGEQYF

SEQ ID NO: 459947 - protein, 14 aa, Homo sapiens
  CDR3 for alpha chain variable domain of TCR clone 229974 (TRAV17, TRAJ57)
CATDPQGGSEKPVF

SEQ ID NO: 459948 - protein, 17 aa, Homo sapiens
  CDR3 for beta chain variable domain of TCR clone 229974 (TRBV13, TRBJ2-3)
CASSLSRVAGGRNTQYF

SEQ ID NO: 459949 - protein, 14 aa, Homo sapiens
  CDR3 for alpha chain variable domain of TCR clone 229975 (TRAV1-2, TRAJ8)
CAVREDTGFQKLVF

SEQ ID NO: 459950 - protein, 16 aa, Homo sapiens
  CDR3 for beta chain variable domain of TCR clone 229975 (TRBV20-1, TRBJ2-4)
CSARAILAGQVDIQYF

SEQ ID NO: 459951 - protein, 15 aa, Homo sapiens
  CDR3 for alpha chain variable domain of TCR clone 229976 (TRAV34, TRAJ38)
CGADFTPGTNRKLIW

SEQ ID NO: 459952 - protein, 16 aa, Homo sapiens
  CDR3 for beta chain variable domain of TCR clone 229976 (TRBV12-5, TRBJ2-5)
CASGPRTSGDQETQYF

SEQ ID NO: 459953 - protein, 11 aa, Homo sapiens
  CDR3 for alpha chain variable domain of TCR clone 229977 (TRAV13-2, TRAJ20)
CAENMSYKLSF

SEQ ID NO: 459954 - protein, 16 aa, Homo sapiens
  CDR3 for beta chain variable domain of TCR clone 229977 (TRBV7-2, TRBJ2-5)
CASSSKWLSGQETQYF

SEQ ID NO: 459955 - protein, 17 aa, Homo sapiens
  CDR3 for alpha chain variable domain of TCR clone 229978 (TRAV13-1, TRAJ52)
CAASSGDGGTSYGKLTF

SEQ ID NO: 459956 - protein, 15 aa, Homo sapiens
  CDR3 for beta chain variable domain of TCR clone 229978 (TRBV7-2, TRBJ2-1)
CASSSGLAGGNEQFF

SEQ ID NO: 459957 - protein, 13 aa, Homo sapiens
  CDR3 for alpha chain variable domain of TCR clone 229979 (TRAV13-1, TRAJ39)
CAASIVMQATCSP

SEQ ID NO: 459958 - protein, 16 aa, Homo sapiens
  CDR3 for beta chain variable domain of TCR clone 229979 (TRBV20-1, TRBJ1-4)
CSAPGQGLLTNEKLFL

SEQ ID NO: 459959 - protein, 10 aa, Homo sapiens
  CDR3 for alpha chain variable domain of TCR clone 229980 (TRAV2, TRAJ34)
CAVVNDKLIF

SEQ ID NO: 459960 - protein, 17 aa, Homo sapiens
  CDR3 for beta chain variable domain of TCR clone 229980 (TRBV11-2, TRBJ2-1)
CASSLYPPGVEYNEQFF

SEQ ID NO: 459961 - protein, 14 aa, Homo sapiens
  CDR3 for alpha chain variable domain of TCR clone 229981 (TRAV26-1, TRAJ38)
CIADNAGNNRKLIW

SEQ ID NO: 459962 - protein, 12 aa, Homo sapiens
  CDR3 for beta chain variable domain of TCR clone 229981 (TRBV29-1, TRBJ2-3)
CRVTGGADTQYF

SEQ ID NO: 459963 - protein, 13 aa, Homo sapiens
  CDR3 for alpha chain variable domain of TCR clone 229982 (TRAV12-1, TRAJ20)
CVVNRETDYKLSF

SEQ ID NO: 459964 - protein, 13 aa, Homo sapiens
  CDR3 for beta chain variable domain of TCR clone 229982 (TRBV12-5, TRBJ2-3)
CASGDRQSDTQYF

SEQ ID NO: 459965 - protein, 12 aa, Homo sapiens
  CDR3 for alpha chain variable domain of TCR clone 229983 (TRAV13-2, TRAJ41)
CAKNIGRYAHNF

SEQ ID NO: 459966 - protein, 12 aa, Homo sapiens
  CDR3 for beta chain variable domain of TCR clone 229983 (TRBV7-9, TRBJ1-1)
CASSLSGGVAFF

SEQ ID NO: 459967 - protein, 18 aa, Homo sapiens
  CDR3 for alpha chain variable domain of TCR clone 229984 (TRAV12-2, TRAJ52)
CAMSVGGAGGTSYGKLTF

SEQ ID NO: 459968 - protein, 15 aa, Homo sapiens
  CDR3 for beta chain variable domain of TCR clone 229984 (TRBV27, TRBJ1-6)
CASSFDRGLGSPLHF

SEQ ID NO: 459969 - protein, 12 aa, Homo sapiens
  CDR3 for alpha chain variable domain of TCR clone 229985 (TRAV16, TRAJ10)
CSRTGGGNKLTF

SEQ ID NO: 459970 - protein, 14 aa, Homo sapiens
  CDR3 for beta chain variable domain of TCR clone 229985 (TRBV7-2, TRBJ2-1)
CASSLGVGYNEQFI

SEQ ID NO: 459971 - protein, 14 aa, Homo sapiens
  CDR3 for alpha chain variable domain of TCR clone 229986 (TRAV12-1, TRAJ12)
CVVTWMDSSYKLIF

SEQ ID NO: 459972 - protein, 13 aa, Homo sapiens
  CDR3 for beta chain variable domain of TCR clone 229986 (TRBV20-1, TRBJ1-1)
CSARGGGNTEAFF

SEQ ID NO: 459973 - protein, 15 aa, Homo sapiens
  CDR3 for alpha chain variable domain of TCR clone 229987 (TRAV12-3, TRAJ6)
CAMSATTGGSYIPTF

SEQ ID NO: 459974 - protein, 15 aa, Homo sapiens
  CDR3 for beta chain variable domain of TCR clone 229987 (TRBV28, TRBJ2-5)
CASSADRGRGETQYF

SEQ ID NO: 459975 - protein, 16 aa, Homo sapiens
  CDR3 for alpha chain variable domain of TCR clone 229988 (TRAV2, TRAJ13)
CAARILGVTRKLPLEL

SEQ ID NO: 459976 - protein, 14 aa, Homo sapiens
  CDR3 for beta chain variable domain of TCR clone 229988 (TRBV19, TRBJ2-1)
CASEVTGARKEQFF

SEQ ID NO: 459977 - protein, 13 aa, Homo sapiens
  CDR3 for alpha chain variable domain of TCR clone 229989 (TRAV17, TRAJ54)
CATSWGGAQKLVF

SEQ ID NO: 459978 - protein, 15 aa, Homo sapiens
  CDR3 for beta chain variable domain of TCR clone 229989 (TRBV4-3, TRBJ2-3)
CAGSPSLLSTDTQYF

SEQ ID NO: 459979 - protein, 14 aa, Homo sapiens
  CDR3 for alpha chain variable domain of TCR clone 229990 (TRAV1-2, TRAJ8)
CAVREDTGFQKLVF

SEQ ID NO: 459980 - protein, 16 aa, Homo sapiens
  CDR3 for beta chain variable domain of TCR clone 229990 (TRBV4-1, TRBJ2-3)
CASSQSTSGAEDTQYL

SEQ ID NO: 459981 - protein, 15 aa, Homo sapiens
  CDR3 for alpha chain variable domain of TCR clone 229991 (TRAV27, TRAJ20)
CAGSSVRSNDYKLSF

SEQ ID NO: 459982 - protein, 16 aa, Homo sapiens
  CDR3 for beta chain variable domain of TCR clone 229991 (TRBV29-1, TRBJ2-6)
CSVEDITYSGANVLTF

SEQ ID NO: 459983 - protein, 12 aa, Homo sapiens
  CDR3 for alpha chain variable domain of TCR clone 229992 (TRAV26-1, TRAJ36)
CIVRVRADNLFF

SEQ ID NO: 459984 - protein, 13 aa, Homo sapiens
  CDR3 for beta chain variable domain of TCR clone 229992 (TRBV11-2, TRBJ2-5)
CASSRRPSETQYF

SEQ ID NO: 459985 - protein, 13 aa, Homo sapiens
  CDR3 for alpha chain variable domain of TCR clone 229993 (TRAV23/DV6, TRAJ12)
CAPRVDSSYKLIL

SEQ ID NO: 459986 - protein, 12 aa, Homo sapiens
  CDR3 for beta chain variable domain of TCR clone 229993 (TRBV7-6, TRBJ2-5)
CASSLSQETQYF

SEQ ID NO: 459987 - protein, 13 aa, Homo sapiens
  CDR3 for alpha chain variable domain of TCR clone 229994 (TRAV8-6, TRAJ9)
CAVWDTGGFGTIF

SEQ ID NO: 459988 - protein, 14 aa, Homo sapiens
  CDR3 for beta chain variable domain of TCR clone 229994 (TRBV2, TRBJ2-1)
CASSEALIYNEKFF

SEQ ID NO: 459989 - protein, 22 aa, Homo sapiens
  CDR3 for alpha chain variable domain of TCR clone 229995 (TRAV8-3, TRAJ30)
CAVGVCTEMTRSSLEKGHDFIF

SEQ ID NO: 459990 - protein, 15 aa, Homo sapiens
  CDR3 for beta chain variable domain of TCR clone 229995 (TRBV7-2, TRBJ2-7)
CASSLSGALTYEQYF

SEQ ID NO: 459991 - protein, 14 aa, Homo sapiens
  CDR3 for alpha chain variable domain of TCR clone 229996 (TRAV35, TRAJ22)
CAGLRPGSARQLTF

SEQ ID NO: 459992 - protein, 16 aa, Homo sapiens
  CDR3 for beta chain variable domain of TCR clone 229996 (TRBV20-1, TRBJ1-4)
CSTPGQGLLTNEKLFF

SEQ ID NO: 459993 - protein, 18 aa, Homo sapiens
  CDR3 for alpha chain variable domain of TCR clone 229997 (TRAV26-2, TRAJ45)
CILRLWGYSGGGADGLTF

SEQ ID NO: 459994 - protein, 17 aa, Homo sapiens
  CDR3 for beta chain variable domain of TCR clone 229997 (TRBV28, TRBJ2-3)
CESSPTPAGGRVDTQYI

SEQ ID NO: 459995 - protein, 12 aa, Homo sapiens
  CDR3 for alpha chain variable domain of TCR clone 229998 (TRAV13-2, TRAJ8)
CAPWLGFQKLVF

SEQ ID NO: 459996 - protein, 13 aa, Homo sapiens
  CDR3 for beta chain variable domain of TCR clone 229998 (TRBV4-1, TRBJ2-7)
CASSQGQAYEQYF

SEQ ID NO: 459997 - protein, 11 aa, Homo sapiens
  CDR3 for alpha chain variable domain of TCR clone 229999 (TRAV2, TRAJ21)
CAVFNFNKFYF

SEQ ID NO: 459998 - protein, 15 aa, Homo sapiens
  CDR3 for beta chain variable domain of TCR clone 229999 (TRBV7-2, TRBJ2-1)
CASSSGLAGGNEQFF

SEQ ID NO: 459999 - protein, 13 aa, Homo sapiens
  CDR3 for alpha chain variable domain of TCR clone 230000 (TRAV12-2, TRAJ4)
CAVRSGGYNKPIF

SEQ ID NO: 460000 - protein, 15 aa, Homo sapiens
  CDR3 for beta chain variable domain of TCR clone 230000 (TRBV10-3, TRBJ2-1)
CAISDVQDMAYEQFF

SEQ ID NO: 460001 - protein, 12 aa, Homo sapiens
  CDR3 for alpha chain variable domain of TCR clone 230001 (TRAV13-1, TRAJ21)
CAAKEGFNKFYF

SEQ ID NO: 460002 - protein, 15 aa, Homo sapiens
  CDR3 for beta chain variable domain of TCR clone 230001 (TRBV25-1, TRBJ1-4)
CASSPGDSTNEKLFF

SEQ ID NO: 460003 - protein, 14 aa, Homo sapiens
  CDR3 for alpha chain variable domain of TCR clone 230002 (TRAV13-1, TRAJ35)
FAASKGGFGNVLHC

SEQ ID NO: 460004 - protein, 13 aa, Homo sapiens
  CDR3 for beta chain variable domain of TCR clone 230002 (TRBV7-3, TRBJ1-1)
CASSQDWAAEAFF

SEQ ID NO: 460005 - protein, 14 aa, Homo sapiens
  CDR3 for alpha chain variable domain of TCR clone 230003 (TRAV1-2, TRAJ8)
CAVREDTGFQNLVF

SEQ ID NO: 460006 - protein, 14 aa, Homo sapiens
  CDR3 for beta chain variable domain of TCR clone 230003 (TRBV7-2, TRBJ1-1)
CASSFLTGTTEAFF

SEQ ID NO: 460007 - protein, 12 aa, Homo sapiens
  CDR3 for alpha chain variable domain of TCR clone 230004 (TRAV13-2, TRAJ23)
CAERHRGGKLIF

SEQ ID NO: 460008 - protein, 15 aa, Homo sapiens
  CDR3 for beta chain variable domain of TCR clone 230004 (TRBV28, TRBJ2-7)
CASKAGGYTSSTSGR

SEQ ID NO: 460009 - protein, 13 aa, Homo sapiens
  CDR3 for alpha chain variable domain of TCR clone 230005 (TRAV26-1, TRAJ29)
CIVRRSGNTPLVF

SEQ ID NO: 460010 - protein, 16 aa, Homo sapiens
  CDR3 for beta chain variable domain of TCR clone 230005 (TRBV11-2, TRBJ2-7)
CDSSLAPTGVNYEQYF

SEQ ID NO: 460011 - protein, 12 aa, Homo sapiens
  CDR3 for alpha chain variable domain of TCR clone 230006 (TRAV12-3, TRAJ20)
CAMVRGDYKLSF

SEQ ID NO: 460012 - protein, 15 aa, Homo sapiens
  CDR3 for beta chain variable domain of TCR clone 230006 (TRBV18, TRBJ2-3)
CASSLPGRSTDTQYF

SEQ ID NO: 460013 - protein, 12 aa, Homo sapiens
  CDR3 for alpha chain variable domain of TCR clone 230007 (TRAV12-3, TRAJ17)
SAMTHTGNKLTF

SEQ ID NO: 460014 - protein, 15 aa, Homo sapiens
  CDR3 for beta chain variable domain of TCR clone 230007 (TRBV20-1, TRBJ2-7)
CSARDRVSGMDEQYF

SEQ ID NO: 460015 - protein, 16 aa, Homo sapiens
  CDR3 for alpha chain variable domain of TCR clone 230008 (TRAV3, TRAJ23)
CAVKIGIYNQGGKLIF

SEQ ID NO: 460016 - protein, 16 aa, Homo sapiens
  CDR3 for beta chain variable domain of TCR clone 230008 (TRBV12-5, TRBJ2-5)
CASGPRTSGNQETQYF

SEQ ID NO: 460017 - protein, 15 aa, Homo sapiens
  CDR3 for alpha chain variable domain of TCR clone 230009 (TRAV23/DV6, TRAJ4)
CAASPLRGGHNKLIF

SEQ ID NO: 460018 - protein, 15 aa, Homo sapiens
  CDR3 for beta chain variable domain of TCR clone 230009 (TRBV7-9, TRBJ1-6)
CASSSPGRGNSPLHF

SEQ ID NO: 460019 - protein, 18 aa, Homo sapiens
  CDR3 for alpha chain variable domain of TCR clone 230010 (TRAV26-1, TRAJ22)
CIVRVALISSGSSRQLIF

SEQ ID NO: 460020 - protein, 13 aa, Homo sapiens
  CDR3 for beta chain variable domain of TCR clone 230010 (TRBV13, TRBJ2-5)
CASSPEVGETQYF

SEQ ID NO: 460021 - protein, 15 aa, Homo sapiens
  CDR3 for alpha chain variable domain of TCR clone 230011 (TRAV3, TRAJ12)
CAVRDIRDSSYKLIF

SEQ ID NO: 460022 - protein, 15 aa, Homo sapiens
  CDR3 for beta chain variable domain of TCR clone 230011 (TRBV10-2, TRBJ2-6)
CASSEQGTGANVLTF

SEQ ID NO: 460023 - protein, 14 aa, Homo sapiens
  CDR3 for alpha chain variable domain of TCR clone 230012 (TRAV12-3, TRAJ10)
SHLPLTGGGNKLTF

SEQ ID NO: 460024 - protein, 15 aa, Homo sapiens
  CDR3 for beta chain variable domain of TCR clone 230012 (TRBV7-6, TRBJ1-5)
CASSQSSGINQTQHF

SEQ ID NO: 460025 - protein, 18 aa, Homo sapiens
  CDR3 for alpha chain variable domain of TCR clone 230013 (TRAV8-4, TRAJ52)
CAVASFNAAGTSYGKLTF

SEQ ID NO: 460026 - protein, 14 aa, Homo sapiens
  CDR3 for beta chain variable domain of TCR clone 230013 (TRBV18, TRBJ1-5)
CASSRQQRNQPQHF

SEQ ID NO: 460027 - protein, 14 aa, Homo sapiens
  CDR3 for alpha chain variable domain of TCR clone 230014 (TRAV12-2, TRAJ40)
CAVKIPSGTYKYIF

SEQ ID NO: 460028 - protein, 14 aa, Homo sapiens
  CDR3 for beta chain variable domain of TCR clone 230014 (TRBV5-8, TRBJ2-1)
CASRLRGGANEQFF

SEQ ID NO: 460029 - protein, 18 aa, Homo sapiens
  CDR3 for alpha chain variable domain of TCR clone 230015 (TRAV13-1, TRAJ52)
CAAKNPNAGGTSYGKLTF

SEQ ID NO: 460030 - protein, 14 aa, Homo sapiens
  CDR3 for beta chain variable domain of TCR clone 230015 (TRBV18, TRBJ2-7)
CASSPRGGAYEQYF

SEQ ID NO: 460031 - protein, 18 aa, Homo sapiens
  CDR3 for alpha chain variable domain of TCR clone 230016 (TRAV21, TRAJ52)
CPVRPSPAGGTSYGKLTF

SEQ ID NO: 460032 - protein, 14 aa, Homo sapiens
  CDR3 for beta chain variable domain of TCR clone 230016 (TRBV4-1, TRBJ2-2)
CASSQAVNTGELFF

SEQ ID NO: 460033 - protein, 12 aa, Homo sapiens
  CDR3 for alpha chain variable domain of TCR clone 230017 (TRAV12-3, TRAJ17)
CAMTLTGNKLTF

SEQ ID NO: 460034 - protein, 14 aa, Homo sapiens
  CDR3 for beta chain variable domain of TCR clone 230017 (TRBV6-1, TRBJ2-2)
CASTWQGNTGELFF

SEQ ID NO: 460035 - protein, 14 aa, Homo sapiens
  CDR3 for alpha chain variable domain of TCR clone 230018 (TRAV23/DV6, TRAJ57)
CAASNQGGSAKLVF

SEQ ID NO: 460036 - protein, 13 aa, Homo sapiens
  CDR3 for beta chain variable domain of TCR clone 230018 (TRBV11-2, TRBJ2-7)
CASSSYPSYEQYF

SEQ ID NO: 460037 - protein, 14 aa, Homo sapiens
  CDR3 for alpha chain variable domain of TCR clone 230019 (TRAV34, TRAJ44)
CGADGTGTASKLTF

SEQ ID NO: 460038 - protein, 17 aa, Homo sapiens
  CDR3 for beta chain variable domain of TCR clone 230019 (TRBV11-2, TRBJ2-1)
CASSLYPPGGEYNEQFF

SEQ ID NO: 460039 - protein, 12 aa, Homo sapiens
  CDR3 for alpha chain variable domain of TCR clone 230020 (TRAV12-2, TRAJ44)
CADTGTASKLTF

SEQ ID NO: 460040 - protein, 13 aa, Homo sapiens
  CDR3 for beta chain variable domain of TCR clone 230020 (TRBV12-4, TRBJ1-2)
CASSLRQGKGYTF

SEQ ID NO: 460041 - protein, 15 aa, Homo sapiens
  CDR3 for alpha chain variable domain of TCR clone 230021 (TRAV3, TRAJ9)
CAVRGLNNGGFKTIF

SEQ ID NO: 460042 - protein, 14 aa, Homo sapiens
  CDR3 for beta chain variable domain of TCR clone 230021 (TRBV19, TRBJ1-2)
CASEGTGVTYGYTF

SEQ ID NO: 460043 - protein, 14 aa, Homo sapiens
  CDR3 for alpha chain variable domain of TCR clone 230022 (TRAV12-1, TRAJ17)
CVVNYKAAGNKLTY

SEQ ID NO: 460044 - protein, 14 aa, Homo sapiens
  CDR3 for beta chain variable domain of TCR clone 230022 (TRBV7-8, TRBJ2-3)
CASSLEAGTDTQYF

SEQ ID NO: 460045 - protein, 11 aa, Homo sapiens
  CDR3 for alpha chain variable domain of TCR clone 230023 (TRAV21, TRAJ34)
CAVTNTDKLIF

SEQ ID NO: 460046 - protein, 13 aa, Homo sapiens
  CDR3 for beta chain variable domain of TCR clone 230023 (TRBV19, TRBJ1-2)
CATEPTGRYGYTF

SEQ ID NO: 460047 - protein, 14 aa, Homo sapiens
  CDR3 for alpha chain variable domain of TCR clone 230024 (TRAV8-4, TRAJ13)
CAVTLSGGYQKVTF

SEQ ID NO: 460048 - protein, 11 aa, Homo sapiens
  CDR3 for beta chain variable domain of TCR clone 230024 (TRBV7-8, TRBJ2-7)
CASSLSLEQYF

SEQ ID NO: 460049 - protein, 15 aa, Homo sapiens
  CDR3 for alpha chain variable domain of TCR clone 230025 (TRAV12-3, TRAJ6)
CAISATTGGSYIPTF

SEQ ID NO: 460050 - protein, 16 aa, Homo sapiens
  CDR3 for beta chain variable domain of TCR clone 230025 (TRBV20-1, TRBJ1-2)
CSASMVQGVANYGYTF

SEQ ID NO: 460051 - protein, 14 aa, Homo sapiens
  CDR3 for alpha chain variable domain of TCR clone 230026 (TRAV23/DV6, TRAJ27)
CAASRDTNAGKSTL

SEQ ID NO: 460052 - protein, 14 aa, Homo sapiens
  CDR3 for beta chain variable domain of TCR clone 230026 (TRBV5-4, TRBJ1-1)
CASSLDSRRDEAFF

SEQ ID NO: 460053 - protein, 11 aa, Homo sapiens
  CDR3 for alpha chain variable domain of TCR clone 230027 (TRAV39, TRAJ49)
CAVDISTQFYF

SEQ ID NO: 460054 - protein, 15 aa, Homo sapiens
  CDR3 for beta chain variable domain of TCR clone 230027 (TRBV7-2, TRBJ2-3)
CASSSTGLETDTQYF

SEQ ID NO: 460055 - protein, 16 aa, Homo sapiens
  CDR3 for alpha chain variable domain of TCR clone 230028 (TRAV4, TRAJ22)
CLAGDLYSGSARQLTF

SEQ ID NO: 460056 - protein, 16 aa, Homo sapiens
  CDR3 for beta chain variable domain of TCR clone 230028 (TRBV7-9, TRBJ2-3)
CASSPWREVGTDTQYF

SEQ ID NO: 460057 - protein, 15 aa, Homo sapiens
  CDR3 for alpha chain variable domain of TCR clone 230029 (TRAV16, TRAJ16)
CALQGGGPDGQKLLF

SEQ ID NO: 460058 - protein, 13 aa, Homo sapiens
  CDR3 for beta chain variable domain of TCR clone 230029 (TRBV12-5, TRBJ2-3)
CASVDRQSDTQYF

SEQ ID NO: 460059 - protein, 11 aa, Homo sapiens
  CDR3 for alpha chain variable domain of TCR clone 230030 (TRAV2, TRAJ23)
CAVETRGKLIF

SEQ ID NO: 460060 - protein, 13 aa, Homo sapiens
  CDR3 for beta chain variable domain of TCR clone 230030 (TRBV12-4, TRBJ1-2)
CASSLRQGKGYTF

SEQ ID NO: 460061 - protein, 17 aa, Homo sapiens
  CDR3 for alpha chain variable domain of TCR clone 230031 (TRAV26-1, TRAJ37)
CIVRVITVSSNTGKLIF

SEQ ID NO: 460062 - protein, 14 aa, Homo sapiens
  CDR3 for beta chain variable domain of TCR clone 230031 (TRBV19, TRBJ2-3)
CASSIDLGGDTQYF

SEQ ID NO: 460063 - protein, 14 aa, Homo sapiens
  CDR3 for alpha chain variable domain of TCR clone 230032 (TRAV26-1, TRAJ40)
CIVRLLSRTYKYIF

SEQ ID NO: 460064 - protein, 10 aa, Homo sapiens
  CDR3 for beta chain variable domain of TCR clone 230032 (TRBV15, TRBJ2-7)
AETGGYEQYF

SEQ ID NO: 460065 - protein, 14 aa, Homo sapiens
  CDR3 for alpha chain variable domain of TCR clone 230033 (TRAV12-1, TRAJ36)
CVVNYWGNQPLLGD

SEQ ID NO: 460066 - protein, 13 aa, Homo sapiens
  CDR3 for beta chain variable domain of TCR clone 230033 (TRBV14, TRBJ1-1)
CASSREFGTEAFF

SEQ ID NO: 460067 - protein, 13 aa, Homo sapiens
  CDR3 for alpha chain variable domain of TCR clone 230034 (TRAV12-1, TRAJ9)
RVVLNTGGFKTIF

SEQ ID NO: 460068 - protein, 13 aa, Homo sapiens
  CDR3 for beta chain variable domain of TCR clone 230034 (TRBV19, TRBJ1-2)
CASSVPGQDGYTF

SEQ ID NO: 460069 - protein, 14 aa, Homo sapiens
  CDR3 for alpha chain variable domain of TCR clone 230035 (TRAV12-3, TRAJ42)
CAMNYGGSQGNLIF

SEQ ID NO: 460070 - protein, 14 aa, Homo sapiens
  CDR3 for beta chain variable domain of TCR clone 230035 (TRBV7-3, TRBJ2-1)
CASSLAGGTNEQFF

SEQ ID NO: 460071 - protein, 10 aa, Homo sapiens
  CDR3 for alpha chain variable domain of TCR clone 230036 (TRAV2, TRAJ34)
CAAVNDKLIS

SEQ ID NO: 460072 - protein, 15 aa, Homo sapiens
  CDR3 for beta chain variable domain of TCR clone 230036 (TRBV3-1, TRBJ2-2)
CASSQDWTRAGELFF

SEQ ID NO: 460073 - protein, 15 aa, Homo sapiens
  CDR3 for alpha chain variable domain of TCR clone 230037 (TRAV3, TRAJ30)
CAVRDEYGRDDKIIF

SEQ ID NO: 460074 - protein, 20 aa, Homo sapiens
  CDR3 for beta chain variable domain of TCR clone 230037 (TRBV5-1, TRBJ2-5)
CASSLANHRGRRPSTSGQAR

SEQ ID NO: 460075 - protein, 15 aa, Homo sapiens
  CDR3 for alpha chain variable domain of TCR clone 230038 (TRAV12-1, TRAJ9)
CVVSFGDTGGFKPIF

SEQ ID NO: 460076 - protein, 16 aa, Homo sapiens
  CDR3 for beta chain variable domain of TCR clone 230038 (TRBV12-5, TRBJ2-5)
CASGPRTSGNQETQYF

SEQ ID NO: 460077 - protein, 14 aa, Homo sapiens
  CDR3 for alpha chain variable domain of TCR clone 230039 (TRAV8-3, TRAJ27)
CAVGAGTNAGKSTF

SEQ ID NO: 460078 - protein, 14 aa, Homo sapiens
  CDR3 for beta chain variable domain of TCR clone 230039 (TRBV19, TRBJ2-1)
CASPTFVLSGEQFF

SEQ ID NO: 460079 - protein, 16 aa, Homo sapiens
  CDR3 for alpha chain variable domain of TCR clone 230040 (TRAV38-1, TRAJ37)
CAFKGDGSSNTGELIF

SEQ ID NO: 460080 - protein, 13 aa, Homo sapiens
  CDR3 for beta chain variable domain of TCR clone 230040 (TRBV12-4, TRBJ2-5)
CASSLLRRETQYF

SEQ ID NO: 460081 - protein, 14 aa, Homo sapiens
  CDR3 for alpha chain variable domain of TCR clone 230041 (TRAV3, TRAJ21)
CALVRGSTNFTLYL

SEQ ID NO: 460082 - protein, 14 aa, Homo sapiens
  CDR3 for beta chain variable domain of TCR clone 230041 (TRBV7-9, TRBJ2-4)
CASSLAMGGNIQYF

SEQ ID NO: 460083 - protein, 14 aa, Homo sapiens
  CDR3 for alpha chain variable domain of TCR clone 230042 (TRAV12-1, TRAJ13)
CVVIDSGGYQKVTF

SEQ ID NO: 460084 - protein, 13 aa, Homo sapiens
  CDR3 for beta chain variable domain of TCR clone 230042 (TRBV20-1, TRBJ1-1)
CSAPPGGHTEAFV

SEQ ID NO: 460085 - protein, 14 aa, Homo sapiens
  CDR3 for alpha chain variable domain of TCR clone 230043 (TRAV12-1, TRAJ42)
WVVIYGGSQGNLIF

SEQ ID NO: 460086 - protein, 13 aa, Homo sapiens
  CDR3 for beta chain variable domain of TCR clone 230043 (TRBV18, TRBJ2-5)
CASSPPGKETQYF

SEQ ID NO: 460087 - protein, 14 aa, Homo sapiens
  CDR3 for alpha chain variable domain of TCR clone 230044 (TRAV8-1, TRAJ36)
CAVNSPTGANNLFF

SEQ ID NO: 460088 - protein, 17 aa, Homo sapiens
  CDR3 for beta chain variable domain of TCR clone 230044 (TRBV7-3, TRBJ2-3)
CASSLMKRMRGADTQYF

SEQ ID NO: 460089 - protein, 14 aa, Homo sapiens
  CDR3 for alpha chain variable domain of TCR clone 230045 (TRAV12-3, TRAJ10)
SHLPLTGGGNKLTF

SEQ ID NO: 460090 - protein, 15 aa, Homo sapiens
  CDR3 for beta chain variable domain of TCR clone 230045 (TRBV29-1, TRBJ2-6)
CSVGDRGSGANVLIF

SEQ ID NO: 460091 - protein, 11 aa, Homo sapiens
  CDR3 for alpha chain variable domain of TCR clone 230046 (TRAV2, TRAJ13)
CASGGYQKFTF

SEQ ID NO: 460092 - protein, 15 aa, Homo sapiens
  CDR3 for beta chain variable domain of TCR clone 230046 (TRBV6-1, TRBJ2-2)
CASSRLRGDTGELFF

SEQ ID NO: 460093 - protein, 15 aa, Homo sapiens
  CDR3 for alpha chain variable domain of TCR clone 230047 (TRAV4, TRAJ26)
CLVGDLNNYGQNFVF

SEQ ID NO: 460094 - protein, 16 aa, Homo sapiens
  CDR3 for beta chain variable domain of TCR clone 230047 (TRBV28, TRBJ1-4)
CASSSRTGAANEKLFF

SEQ ID NO: 460095 - protein, 12 aa, Homo sapiens
  CDR3 for alpha chain variable domain of TCR clone 230048 (TRAV17, TRAJ29)
CYASSGNTPLVF

SEQ ID NO: 460096 - protein, 14 aa, Homo sapiens
  CDR3 for beta chain variable domain of TCR clone 230048 (TRBV7-3, TRBJ2-2)
CASSSGGYTGELFF

SEQ ID NO: 460097 - protein, 15 aa, Homo sapiens
  CDR3 for alpha chain variable domain of TCR clone 230049 (TRAV3, TRAJ5)
CAVRDLDTGRRALTF

SEQ ID NO: 460098 - protein, 12 aa, Homo sapiens
  CDR3 for beta chain variable domain of TCR clone 230049 (TRBV19, TRBJ2-3)
CASSLLTDTQYF

SEQ ID NO: 460099 - protein, 13 aa, Homo sapiens
  CDR3 for alpha chain variable domain of TCR clone 230050 (TRAV27, TRAJ28)
CAISGAGSYQLTF

SEQ ID NO: 460100 - protein, 14 aa, Homo sapiens
  CDR3 for beta chain variable domain of TCR clone 230050 (TRBV6-3, TRBJ2-2)
CASTYTPDTGELFF

SEQ ID NO: 460101 - protein, 14 aa, Homo sapiens
  CDR3 for alpha chain variable domain of TCR clone 230051 (TRAV3, TRAJ33)
CAVRDMDRNYQLIW

SEQ ID NO: 460102 - protein, 19 aa, Homo sapiens
  CDR3 for beta chain variable domain of TCR clone 230051 (TRBV7-3, TRBJ1-2)
CASSFPQGNDGELWLHLRF

SEQ ID NO: 460103 - protein, 15 aa, Homo sapiens
  CDR3 for alpha chain variable domain of TCR clone 230052 (TRAV3, TRAJ22)
CAVRDRGGSARQLTF

SEQ ID NO: 460104 - protein, 13 aa, Homo sapiens
  CDR3 for beta chain variable domain of TCR clone 230052 (TRBV2, TRBJ1-5)
CATAGPGNQPQHV

SEQ ID NO: 460105 - protein, 13 aa, Homo sapiens
  CDR3 for alpha chain variable domain of TCR clone 230053 (TRAV2, TRAJ40)
CAVVTSGTYKYIF

SEQ ID NO: 460106 - protein, 14 aa, Homo sapiens
  CDR3 for beta chain variable domain of TCR clone 230053 (TRBV19, TRBJ2-1)
CASPTFVLGGEKFF

SEQ ID NO: 460107 - protein, 14 aa, Homo sapiens
  CDR3 for alpha chain variable domain of TCR clone 230054 (TRAV2, TRAJ9)
CAVEDRSGGFKTIF

SEQ ID NO: 460108 - protein, 12 aa, Homo sapiens
  CDR3 for beta chain variable domain of TCR clone 230054 (TRBV14, TRBJ2-7)
CANSRLKGEQYF

SEQ ID NO: 460109 - protein, 16 aa, Homo sapiens
  CDR3 for alpha chain variable domain of TCR clone 230055 (TRAV8-6, TRAJ28)
CAVTSKPGAGSYQLTL

SEQ ID NO: 460110 - protein, 14 aa, Homo sapiens
  CDR3 for beta chain variable domain of TCR clone 230055 (TRBV7-2, TRBJ2-7)
CASRSQGAAYEQYF

SEQ ID NO: 460111 - protein, 14 aa, Homo sapiens
  CDR3 for alpha chain variable domain of TCR clone 230056 (TRAV4, TRAJ9)
CLVGSGTGGFITIF

SEQ ID NO: 460112 - protein, 15 aa, Homo sapiens
  CDR3 for beta chain variable domain of TCR clone 230056 (TRBV7-2, TRBJ2-1)
CASSLASGRVNEQFF

SEQ ID NO: 460113 - protein, 18 aa, Homo sapiens
  CDR3 for alpha chain variable domain of TCR clone 230057 (TRAV21, TRAJ52)
CAVRPSRAGGTSYGKLTF

SEQ ID NO: 460114 - protein, 13 aa, Homo sapiens
  CDR3 for beta chain variable domain of TCR clone 230057 (TRBV2, TRBJ1-5)
CATAGPGNQPQHF

SEQ ID NO: 460115 - protein, 19 aa, Homo sapiens
  CDR3 for alpha chain variable domain of TCR clone 230058 (TRAV36/DV7, TRAJ13)
CAVEAGPFLGVTRKLPLEL

SEQ ID NO: 460116 - protein, 16 aa, Homo sapiens
  CDR3 for beta chain variable domain of TCR clone 230058 (TRBV3-1, TRBJ2-1)
CASSQEWRENYNEQFF

SEQ ID NO: 460117 - protein, 14 aa, Homo sapiens
  CDR3 for alpha chain variable domain of TCR clone 230059 (TRAV8-3, TRAJ4)
CAVGASGGYNKLIF

SEQ ID NO: 460118 - protein, 15 aa, Homo sapiens
  CDR3 for beta chain variable domain of TCR clone 230059 (TRBV11-3, TRBJ2-3)
CASLKDGREGDTQYF

SEQ ID NO: 460119 - protein, 16 aa, Homo sapiens
  CDR3 for alpha chain variable domain of TCR clone 230060 (TRAV12-3, TRAJ53)
CAMSPGSGGSNYKLTF

SEQ ID NO: 460120 - protein, 14 aa, Homo sapiens
  CDR3 for beta chain variable domain of TCR clone 230060 (TRBV7-3, TRBJ2-2)
CASSSGGYTGELFF

SEQ ID NO: 460121 - protein, 14 aa, Homo sapiens
  CDR3 for alpha chain variable domain of TCR clone 230061 (TRAV17, TRAJ31)
CATVLRNNNARLMF

SEQ ID NO: 460122 - protein, 14 aa, Homo sapiens
  CDR3 for beta chain variable domain of TCR clone 230061 (TRBV6-1, TRBJ1-3)
CASVQGGGGNTIYF

SEQ ID NO: 460123 - protein, 16 aa, Homo sapiens
  CDR3 for alpha chain variable domain of TCR clone 230062 (TRAV1-2, TRAJ10)
CAVRGVLTGGGNKLTF

SEQ ID NO: 460124 - protein, 14 aa, Homo sapiens
  CDR3 for beta chain variable domain of TCR clone 230062 (TRBV7-9, TRBJ2-7)
CASSLDYGGLGQYF

SEQ ID NO: 460125 - protein, 14 aa, Homo sapiens
  CDR3 for alpha chain variable domain of TCR clone 230063 (TRAV1-2, TRAJ8)
CVVREDTGFQKLVF

SEQ ID NO: 460126 - protein, 11 aa, Homo sapiens
  CDR3 for beta chain variable domain of TCR clone 230063 (TRBV20-1, TRBJ2-5)
CSADRAETQYF

SEQ ID NO: 460127 - protein, 15 aa, Homo sapiens
  CDR3 for alpha chain variable domain of TCR clone 230064 (TRAV17, TRAJ6)
CATDLPSGGSYIPTF

SEQ ID NO: 460128 - protein, 19 aa, Homo sapiens
  CDR3 for beta chain variable domain of TCR clone 230064 (TRBV7-2, TRBJ2-3)
CASSFLSRNWGGGTDTQYF

SEQ ID NO: 460129 - protein, 10 aa, Homo sapiens
  CDR3 for alpha chain variable domain of TCR clone 230065 (TRAV12-3, TRAJ49)
CAMNDDQFYF

SEQ ID NO: 460130 - protein, 13 aa, Homo sapiens
  CDR3 for beta chain variable domain of TCR clone 230065 (TRBV20-1, TRBJ2-7)
CSARTGAGYEQYF

SEQ ID NO: 460131 - protein, 20 aa, Homo sapiens
  CDR3 for alpha chain variable domain of TCR clone 230066 (TRAV1-1, TRAJ39)
CLLLLRCESSAYNAGNMLTF

SEQ ID NO: 460132 - protein, 13 aa, Homo sapiens
  CDR3 for beta chain variable domain of TCR clone 230066 (TRBV12-4, TRBJ1-5)
CASSPDRAQPQHC

SEQ ID NO: 460133 - protein, 15 aa, Homo sapiens
  CDR3 for alpha chain variable domain of TCR clone 230067 (TRAV26-1, TRAJ17)
CIGRVVKAAGNKLTF

SEQ ID NO: 460134 - protein, 16 aa, Homo sapiens
  CDR3 for beta chain variable domain of TCR clone 230067 (TRBV7-9, TRBJ2-1)
CASSLVSGPSYNEQFF

SEQ ID NO: 460135 - protein, 15 aa, Homo sapiens
  CDR3 for alpha chain variable domain of TCR clone 230068 (TRAV3, TRAJ3)
CAVRDGHSSASKIIF

SEQ ID NO: 460136 - protein, 14 aa, Homo sapiens
  CDR3 for beta chain variable domain of TCR clone 230068 (TRBV7-2, TRBJ2-7)
CASSPKTSFYEQYS

SEQ ID NO: 460137 - protein, 13 aa, Homo sapiens
  CDR3 for alpha chain variable domain of TCR clone 230069 (TRAV23/DV6, TRAJ3)
CAATYSSASKITF

SEQ ID NO: 460138 - protein, 15 aa, Homo sapiens
  CDR3 for beta chain variable domain of TCR clone 230069 (TRBV19, TRBJ1-1)
CASASGQIQNTEAFF

SEQ ID NO: 460139 - protein, 22 aa, Homo sapiens
  CDR3 for alpha chain variable domain of TCR clone 230070 (TRAV27, TRAJ41)
CAVRTQIPDIQNPDPAVYQLRD

SEQ ID NO: 460140 - protein, 16 aa, Homo sapiens
  CDR3 for beta chain variable domain of TCR clone 230070 (TRBV5-1, TRBJ2-3)
CASSLGLAVYKDTQYF

SEQ ID NO: 460141 - protein, 14 aa, Homo sapiens
  CDR3 for alpha chain variable domain of TCR clone 230071 (TRAV8-6, TRAJ49)
CAVSDPVTGNTFYF

SEQ ID NO: 460142 - protein, 16 aa, Homo sapiens
  CDR3 for beta chain variable domain of TCR clone 230071 (TRBV24-1, TRBJ2-1)
CATSGVAGANYNEQFF

SEQ ID NO: 460143 - protein, 17 aa, Homo sapiens
  CDR3 for alpha chain variable domain of TCR clone 230072 (TRAV3, TRAJ6)
CAVRDGPRAGGSYIPPF

SEQ ID NO: 460144 - protein, 14 aa, Homo sapiens
  CDR3 for beta chain variable domain of TCR clone 230072 (TRBV12-5, TRBJ2-5)
CASCSRTHQETQYF

SEQ ID NO: 460145 - protein, 13 aa, Homo sapiens
  CDR3 for alpha chain variable domain of TCR clone 230073 (TRAV38-1, TRAJ42)
CARWGGSQGNLIF

SEQ ID NO: 460146 - protein, 13 aa, Homo sapiens
  CDR3 for beta chain variable domain of TCR clone 230073 (TRBV7-2, TRBJ2-5)
CASSQTSVETQYF

SEQ ID NO: 460147 - protein, 14 aa, Homo sapiens
  CDR3 for alpha chain variable domain of TCR clone 230074 (TRAV2, TRAJ9)
CAVEDRSGGFKTIF

SEQ ID NO: 460148 - protein, 14 aa, Homo sapiens
  CDR3 for beta chain variable domain of TCR clone 230074 (TRBV6-1, TRBJ2-1)
CASAKDGFYNEQFF

SEQ ID NO: 460149 - protein, 13 aa, Homo sapiens
  CDR3 for alpha chain variable domain of TCR clone 230075 (TRAV35, TRAJ33)
CAGQRDSNYQLIW

SEQ ID NO: 460150 - protein, 14 aa, Homo sapiens
  CDR3 for beta chain variable domain of TCR clone 230075 (TRBV18, TRBJ2-5)
CASSPGVSQETQYF

SEQ ID NO: 460151 - protein, 13 aa, Homo sapiens
  CDR3 for alpha chain variable domain of TCR clone 230076 (TRAV21, TRAJ27)
CAARPGNAGKSTF

SEQ ID NO: 460152 - protein, 12 aa, Homo sapiens
  CDR3 for beta chain variable domain of TCR clone 230076 (TRBV12-4, TRBJ1-5)
CASSLGRQPQHF

SEQ ID NO: 460153 - protein, 12 aa, Homo sapiens
  CDR3 for alpha chain variable domain of TCR clone 230077 (TRAV12-2, TRAJ8)
CAVNTGFQKLVF

SEQ ID NO: 460154 - protein, 15 aa, Homo sapiens
  CDR3 for beta chain variable domain of TCR clone 230077 (TRBV7-8, TRBJ1-5)
CASSLERRGLEPHHF

SEQ ID NO: 460155 - protein, 15 aa, Homo sapiens
  CDR3 for alpha chain variable domain of TCR clone 230078 (TRAV16, TRAJ4)
CSNRMFSGGYNKLIF

SEQ ID NO: 460156 - protein, 16 aa, Homo sapiens
  CDR3 for beta chain variable domain of TCR clone 230078 (TRBV24-1, TRBJ2-3)
CATSDPGTGATDTQYF

SEQ ID NO: 460157 - protein, 14 aa, Homo sapiens
  CDR3 for alpha chain variable domain of TCR clone 230079 (TRAV9-2, TRAJ35)
CALSEGGFGNVLHC

SEQ ID NO: 460158 - protein, 14 aa, Homo sapiens
  CDR3 for beta chain variable domain of TCR clone 230079 (TRBV29-1, TRBJ2-7)
CSVFPKGDSYEQYF

SEQ ID NO: 460159 - protein, 14 aa, Homo sapiens
  CDR3 for alpha chain variable domain of TCR clone 230080 (TRAV12-2, TRAJ13)
CAAKKTGGYQKVTF

SEQ ID NO: 460160 - protein, 17 aa, Homo sapiens
  CDR3 for beta chain variable domain of TCR clone 230080 (TRBV20-1, TRBJ2-2)
CSASVSGQGGLTGELFF

SEQ ID NO: 460161 - protein, 15 aa, Homo sapiens
  CDR3 for alpha chain variable domain of TCR clone 230081 (TRAV3, TRAJ5)
CAVRDLDTGRRALTF

SEQ ID NO: 460162 - protein, 12 aa, Homo sapiens
  CDR3 for beta chain variable domain of TCR clone 230081 (TRBV7-9, TRBJ2-7)
CASSIKREEQYF

SEQ ID NO: 460163 - protein, 17 aa, Homo sapiens
  CDR3 for alpha chain variable domain of TCR clone 230082 (TRAV3, TRAJ6)
CAVRNGPRAGGSYIPTF

SEQ ID NO: 460164 - protein, 17 aa, Homo sapiens
  CDR3 for beta chain variable domain of TCR clone 230082 (TRBV20-1, TRBJ1-5)
CSASLSPGQGGNQPQHF

SEQ ID NO: 460165 - protein, 16 aa, Homo sapiens
  CDR3 for alpha chain variable domain of TCR clone 230083 (TRAV36/DV7, TRAJ33)
WRPGNKVQDSNYQLIW

SEQ ID NO: 460166 - protein, 15 aa, Homo sapiens
  CDR3 for beta chain variable domain of TCR clone 230083 (TRBV29-1, TRBJ2-1)
CSVGRHALFCNEQFF

SEQ ID NO: 460167 - protein, 17 aa, Homo sapiens
  CDR3 for alpha chain variable domain of TCR clone 230084 (TRAV12-3, TRAJ18)
CAMIRADRGSTLGRLYF

SEQ ID NO: 460168 - protein, 14 aa, Homo sapiens
  CDR3 for beta chain variable domain of TCR clone 230084 (TRBV5-7, TRBJ1-6)
CASTPWPADSHLHF

SEQ ID NO: 460169 - protein, 18 aa, Homo sapiens
  CDR3 for alpha chain variable domain of TCR clone 230085 (TRAV13-1, TRAJ52)
FAAKNPNADGTSYGKLTF

SEQ ID NO: 460170 - protein, 15 aa, Homo sapiens
  CDR3 for beta chain variable domain of TCR clone 230085 (TRBV6-1, TRBJ2-3)
CASSERGGITDTQYF

SEQ ID NO: 460171 - protein, 17 aa, Homo sapiens
  CDR3 for alpha chain variable domain of TCR clone 230086 (TRAV3, TRAJ6)
CAVRDGPRAGGSYIPTF

SEQ ID NO: 460172 - protein, 14 aa, Homo sapiens
  CDR3 for beta chain variable domain of TCR clone 230086 (TRBV11-2, TRBJ1-5)
CASSSRTGNQPQHF

SEQ ID NO: 460173 - protein, 11 aa, Homo sapiens
  CDR3 for alpha chain variable domain of TCR clone 230087 (TRAV13-1, TRAJ15)
CAATPGTPLIF

SEQ ID NO: 460174 - protein, 17 aa, Homo sapiens
  CDR3 for beta chain variable domain of TCR clone 230087 (TRBV13, TRBJ2-3)
CASSLSRVAGGRNTQYF

SEQ ID NO: 460175 - protein, 12 aa, Homo sapiens
  CDR3 for alpha chain variable domain of TCR clone 230088 (TRAV17, TRAJ30)
CATDARDDKIIF

SEQ ID NO: 460176 - protein, 16 aa, Homo sapiens
  CDR3 for beta chain variable domain of TCR clone 230088 (TRBV4-1, TRBJ1-2)
CASSQDAGQVLYGYTF

SEQ ID NO: 460177 - protein, 14 aa, Homo sapiens
  CDR3 for alpha chain variable domain of TCR clone 230089 (TRAV8-1, TRAJ5)
CAVRTDTGRRALTF

SEQ ID NO: 460178 - protein, 12 aa, Homo sapiens
  CDR3 for beta chain variable domain of TCR clone 230089 (TRBV11-2, TRBJ2-1)
CASSHGNNEQFF

SEQ ID NO: 460179 - protein, 16 aa, Homo sapiens
  CDR3 for alpha chain variable domain of TCR clone 230090 (TRAV30, TRAJ24)
CGTEIVDADSWGKFQF

SEQ ID NO: 460180 - protein, 16 aa, Homo sapiens
  CDR3 for beta chain variable domain of TCR clone 230090 (TRBV7-3, TRBJ2-2)
CASSLKRGTLSGGLFF

SEQ ID NO: 460181 - protein, 14 aa, Homo sapiens
  CDR3 for alpha chain variable domain of TCR clone 230091 (TRAV13-2, TRAJ43)
CAEIPTYNNNDMRF

SEQ ID NO: 460182 - protein, 15 aa, Homo sapiens
  CDR3 for beta chain variable domain of TCR clone 230091 (TRBV7-9, TRBJ2-2)
CASGPLDTFPGEPFF

SEQ ID NO: 460183 - protein, 16 aa, Homo sapiens
  CDR3 for alpha chain variable domain of TCR clone 230092 (TRAV26-1, TRAJ53)
CIVRVAMGGSNSKLTF

SEQ ID NO: 460184 - protein, 16 aa, Homo sapiens
  CDR3 for beta chain variable domain of TCR clone 230092 (TRBV28, TRBJ2-7)
CASSLFFETGGPEQYF

SEQ ID NO: 460185 - protein, 15 aa, Homo sapiens
  CDR3 for alpha chain variable domain of TCR clone 230093 (TRAV38-1, TRAJ57)
CAFMDSQGGSEKLVF

SEQ ID NO: 460186 - protein, 13 aa, Homo sapiens
  CDR3 for beta chain variable domain of TCR clone 230093 (TRBV19, TRBJ2-7)
CASRKAGGSEQYF

SEQ ID NO: 460187 - protein, 17 aa, Homo sapiens
  CDR3 for alpha chain variable domain of TCR clone 230094 (TRAV1-1, TRAJ15)
CLLLLRCPNQAGTALIF

SEQ ID NO: 460188 - protein, 14 aa, Homo sapiens
  CDR3 for beta chain variable domain of TCR clone 230094 (TRBV7-3, TRBJ2-1)
CASSLAGGTNEQFF

SEQ ID NO: 460189 - protein, 14 aa, Homo sapiens
  CDR3 for alpha chain variable domain of TCR clone 230095 (TRAV8-1, TRAJ5)
CAVSMDTGRRARTF

SEQ ID NO: 460190 - protein, 13 aa, Homo sapiens
  CDR3 for beta chain variable domain of TCR clone 230095 (TRBV10-3, TRBJ2-7)
CASKLAVNYEQYF

SEQ ID NO: 460191 - protein, 16 aa, Homo sapiens
  CDR3 for alpha chain variable domain of TCR clone 230096 (TRAV4, TRAJ22)
CLVGDLYSGSARQLTF

SEQ ID NO: 460192 - protein, 17 aa, Homo sapiens
  CDR3 for beta chain variable domain of TCR clone 230096 (TRBV11-2, TRBJ2-7)
CASSLYPPGVEYNEQFF

SEQ ID NO: 460193 - protein, 15 aa, Homo sapiens
  CDR3 for alpha chain variable domain of TCR clone 230097 (TRAV20, TRAJ41)
CAVQANSNSGYALNF

SEQ ID NO: 460194 - protein, 18 aa, Homo sapiens
  CDR3 for beta chain variable domain of TCR clone 230097 (TRBV7-9, TRBJ2-7)
CAGSLTTSGSRTWYEQYF

SEQ ID NO: 460195 - protein, 14 aa, Homo sapiens
  CDR3 for alpha chain variable domain of TCR clone 230098 (TRAV8-1, TRAJ5)
CAVRTDTGRRALTF

SEQ ID NO: 460196 - protein, 16 aa, Homo sapiens
  CDR3 for beta chain variable domain of TCR clone 230098 (TRBV5-1, TRBJ1-6)
CASSLARGTEGTPLHF

SEQ ID NO: 460197 - protein, 18 aa, Homo sapiens
  CDR3 for alpha chain variable domain of TCR clone 230099 (TRAV20, TRAJ4)
CAVQPYYMFSGGYNKLIF

SEQ ID NO: 460198 - protein, 16 aa, Homo sapiens
  CDR3 for beta chain variable domain of TCR clone 230099 (TRBV27, TRBJ1-1)
CASSSRGRTGYTEAFF

SEQ ID NO: 460199 - protein, 14 aa, Homo sapiens
  CDR3 for alpha chain variable domain of TCR clone 230100 (TRAV1-2, TRAJ16)
CAVNRFSGGHKLLF

SEQ ID NO: 460200 - protein, 15 aa, Homo sapiens
  CDR3 for beta chain variable domain of TCR clone 230100 (TRBV9, TRBJ1-6)
CASSVAGTGDSPLHF

SEQ ID NO: 460201 - protein, 16 aa, Homo sapiens
  CDR3 for alpha chain variable domain of TCR clone 230101 (TRAV12-2, TRAJ5)
CAVTRGSGTGRKALTF

SEQ ID NO: 460202 - protein, 15 aa, Homo sapiens
  CDR3 for beta chain variable domain of TCR clone 230101 (TRBV9, TRBJ2-1)
CASSVGTGELNEQFF

SEQ ID NO: 460203 - protein, 11 aa, Homo sapiens
  CDR3 for alpha chain variable domain of TCR clone 230102 (TRAV1-1, TRAJ23)
CAVRQGGKLIF

SEQ ID NO: 460204 - protein, 20 aa, Homo sapiens
  CDR3 for beta chain variable domain of TCR clone 230102 (TRBV7-8, TRBJ2-2)
CAGSHFFPGPTIHITGELFF

SEQ ID NO: 460205 - protein, 14 aa, Homo sapiens
  CDR3 for alpha chain variable domain of TCR clone 230103 (TRAV12-1, TRAJ40)
CVVNRDSGTYKYIF

SEQ ID NO: 460206 - protein, 14 aa, Homo sapiens
  CDR3 for beta chain variable domain of TCR clone 230103 (TRBV20-1, TRBJ2-7)
CSAKRGRSSYEQYF

SEQ ID NO: 460207 - protein, 14 aa, Homo sapiens
  CDR3 for alpha chain variable domain of TCR clone 230104 (TRAV12-1, TRAJ17)
CVVNYKAAGNKLTF

SEQ ID NO: 460208 - protein, 14 aa, Homo sapiens
  CDR3 for beta chain variable domain of TCR clone 230104 (TRBV7-2, TRBJ2-7)
GASRSQGAAYEQYF

SEQ ID NO: 460209 - protein, 13 aa, Homo sapiens
  CDR3 for alpha chain variable domain of TCR clone 230105 (TRAV8-3, TRAJ28)
CAVGAVRSYQPTF

SEQ ID NO: 460210 - protein, 14 aa, Homo sapiens
  CDR3 for beta chain variable domain of TCR clone 230105 (TRBV7-2, TRBJ2-7)
CASRSQGAAYEQYF

SEQ ID NO: 460211 - protein, 14 aa, Homo sapiens
  CDR3 for alpha chain variable domain of TCR clone 230106 (TRAV12-2, TRAJ44)
CAVNPAGTASKLTF

SEQ ID NO: 460212 - protein, 13 aa, Homo sapiens
  CDR3 for beta chain variable domain of TCR clone 230106 (TRBV7-9, TRBJ2-5)
CASLPSGRETQYF

SEQ ID NO: 460213 - protein, 11 aa, Homo sapiens
  CDR3 for alpha chain variable domain of TCR clone 230107 (TRAV17, TRAJ9)
CGFTGGFKTIF

SEQ ID NO: 460214 - protein, 13 aa, Homo sapiens
  CDR3 for beta chain variable domain of TCR clone 230107 (TRBV4-2, TRBJ1-1)
CASSQAGNTEAFF

SEQ ID NO: 460215 - protein, 14 aa, Homo sapiens
  CDR3 for alpha chain variable domain of TCR clone 230108 (TRAV1-2, TRAJ16)
CAVNRFSDGHKLLF

SEQ ID NO: 460216 - protein, 13 aa, Homo sapiens
  CDR3 for beta chain variable domain of TCR clone 230108 (TRBV20-1, TRBJ1-6)
CSAPTGLGSPLHF

SEQ ID NO: 460217 - protein, 14 aa, Homo sapiens
  CDR3 for alpha chain variable domain of TCR clone 230109 (TRAV12-2, TRAJ11)
CAVEGGSGYSPLTF

SEQ ID NO: 460218 - protein, 16 aa, Homo sapiens
  CDR3 for beta chain variable domain of TCR clone 230109 (TRBV6-1, TRBJ1-2)
CASSGAWQGRWHGYTF

SEQ ID NO: 460219 - protein, 14 aa, Homo sapiens
  CDR3 for alpha chain variable domain of TCR clone 230110 (TRAV17, TRAJ16)
CATADFSDGQKLLF

SEQ ID NO: 460220 - protein, 14 aa, Homo sapiens
  CDR3 for beta chain variable domain of TCR clone 230110 (TRBV18, TRBJ2-1)
CSSPPSASYNEQFF

SEQ ID NO: 460221 - protein, 14 aa, Homo sapiens
  CDR3 for alpha chain variable domain of TCR clone 230111 (TRAV13-1, TRAJ44)
CAAKATGTASKLTF

SEQ ID NO: 460222 - protein, 13 aa, Homo sapiens
  CDR3 for beta chain variable domain of TCR clone 230111 (TRBV5-5, TRBJ1-2)
CATSFWRGEDYAF

SEQ ID NO: 460223 - protein, 14 aa, Homo sapiens
  CDR3 for alpha chain variable domain of TCR clone 230112 (TRAV12-2, TRAJ13)
CAVKKTGGYQKVTF

SEQ ID NO: 460224 - protein, 15 aa, Homo sapiens
  CDR3 for beta chain variable domain of TCR clone 230112 (TRBV19, TRBJ1-1)
CASTSGQIQNTEAVF

SEQ ID NO: 460225 - protein, 12 aa, Homo sapiens
  CDR3 for alpha chain variable domain of TCR clone 230113 (TRAV12-1, TRAJ42)
MNYGGSQGNLIF

SEQ ID NO: 460226 - protein, 13 aa, Homo sapiens
  CDR3 for beta chain variable domain of TCR clone 230113 (TRBV7-2, TRBJ1-1)
CASSLARPAEAFF

SEQ ID NO: 460227 - protein, 15 aa, Homo sapiens
  CDR3 for alpha chain variable domain of TCR clone 230114 (TRAV2, TRAJ37)
CAVGDGSTNTGKLIF

SEQ ID NO: 460228 - protein, 13 aa, Homo sapiens
  CDR3 for beta chain variable domain of TCR clone 230114 (TRBV20-1, TRBJ2-7)
CSAQTGLSYEQYF

SEQ ID NO: 460229 - protein, 10 aa, Homo sapiens
  CDR3 for alpha chain variable domain of TCR clone 230115 (TRAV8-3, TRAJ45)
SGGGADGLTF

SEQ ID NO: 460230 - protein, 13 aa, Homo sapiens
  CDR3 for beta chain variable domain of TCR clone 230115 (TRBV10-3, TRBJ2-7)
CASKLTVNYEQYF

SEQ ID NO: 460231 - protein, 12 aa, Homo sapiens
  CDR3 for alpha chain variable domain of TCR clone 230116 (TRAV21, TRAJ36)
CAVNTGANNLFF

SEQ ID NO: 460232 - protein, 14 aa, Homo sapiens
  CDR3 for beta chain variable domain of TCR clone 230116 (TRBV28, TRBJ2-1)
CSSSRPGLRDEQFF

SEQ ID NO: 460233 - protein, 14 aa, Homo sapiens
  CDR3 for alpha chain variable domain of TCR clone 230117 (TRAV1-1, TRAJ23)
CAVSIYNQGGKLIF

SEQ ID NO: 460234 - protein, 15 aa, Homo sapiens
  CDR3 for beta chain variable domain of TCR clone 230117 (TRBV7-3, TRBJ2-1)
CASSPTGGGEVEQFF

SEQ ID NO: 460235 - protein, 16 aa, Homo sapiens
  CDR3 for alpha chain variable domain of TCR clone 230118 (TRAV8-2, TRAJ45)
CVVSEGTGGGADGLTF

SEQ ID NO: 460236 - protein, 16 aa, Homo sapiens
  CDR3 for beta chain variable domain of TCR clone 230118 (TRBV6-1, TRBJ2-5)
CASSETLDRGAETQYF

SEQ ID NO: 460237 - protein, 15 aa, Homo sapiens
  CDR3 for alpha chain variable domain of TCR clone 230119 (TRAV8-4, TRAJ9)
CAVSDRETGGFKTIF

SEQ ID NO: 460238 - protein, 17 aa, Homo sapiens
  CDR3 for beta chain variable domain of TCR clone 230119 (TRBV11-2, TRBJ2-1)
CASSLYPPGVEYNEQFF

SEQ ID NO: 460239 - protein, 13 aa, Homo sapiens
  CDR3 for alpha chain variable domain of TCR clone 230120 (TRAV12-2, TRAJ18)
CAVRGSTLGRLYF

SEQ ID NO: 460240 - protein, 16 aa, Homo sapiens
  CDR3 for beta chain variable domain of TCR clone 230120 (TRBV7-3, TRBJ2-2)
CASSLKRGTLSGELFF

SEQ ID NO: 460241 - protein, 15 aa, Homo sapiens
  CDR3 for alpha chain variable domain of TCR clone 230121 (TRAV25, TRAJ53)
CAATGGGGSNYKLTF

SEQ ID NO: 460242 - protein, 16 aa, Homo sapiens
  CDR3 for beta chain variable domain of TCR clone 230121 (TRBV11-1, TRBJ2-2)
CASSAEGLKNTGELFF

SEQ ID NO: 460243 - protein, 13 aa, Homo sapiens
  CDR3 for alpha chain variable domain of TCR clone 230122 (TRAV13-2, TRAJ48)
CAEMDFGNEKLTF

SEQ ID NO: 460244 - protein, 15 aa, Homo sapiens
  CDR3 for beta chain variable domain of TCR clone 230122 (TRBV7-9, TRBJ1-6)
CASSSPGRGGSPLHF

SEQ ID NO: 460245 - protein, 12 aa, Homo sapiens
  CDR3 for alpha chain variable domain of TCR clone 230123 (TRAV12-3, TRAJ17)
CAMTLTVNKLTF

SEQ ID NO: 460246 - protein, 15 aa, Homo sapiens
  CDR3 for beta chain variable domain of TCR clone 230123 (TRBV20-1, TRBJ2-7)
CSARDRVSGMDEQCF

SEQ ID NO: 460247 - protein, 15 aa, Homo sapiens
  CDR3 for alpha chain variable domain of TCR clone 230124 (TRAV3, TRAJ22)
CAVRDRGGSARQLTF

SEQ ID NO: 460248 - protein, 15 aa, Homo sapiens
  CDR3 for beta chain variable domain of TCR clone 230124 (TRBV5-1, TRBJ1-4)
CASSLTADSDEKLFF

SEQ ID NO: 460249 - protein, 15 aa, Homo sapiens
  CDR3 for alpha chain variable domain of TCR clone 230125 (TRAV21, TRAJ24)
CAARSSIDSWGKLQF

SEQ ID NO: 460250 - protein, 13 aa, Homo sapiens
  CDR3 for beta chain variable domain of TCR clone 230125 (TRBV11-2, TRBJ2-5)
CASSSTGEETQYF

SEQ ID NO: 460251 - protein, 13 aa, Homo sapiens
  CDR3 for alpha chain variable domain of TCR clone 230126 (TRAV35, TRAJ57)
CAGSQGGSEKLVF

SEQ ID NO: 460252 - protein, 13 aa, Homo sapiens
  CDR3 for beta chain variable domain of TCR clone 230126 (TRBV27, TRBJ2-7)
CASSFSQGYEQYF

SEQ ID NO: 460253 - protein, 18 aa, Homo sapiens
  CDR3 for alpha chain variable domain of TCR clone 230127 (TRAV21, TRAJ52)
CAVRPSPAGGTSYGKLTF

SEQ ID NO: 460254 - protein, 14 aa, Homo sapiens
  CDR3 for beta chain variable domain of TCR clone 230127 (TRBV19, TRBJ2-2)
CASSGQGIAGELFF

SEQ ID NO: 460255 - protein, 14 aa, Homo sapiens
  CDR3 for alpha chain variable domain of TCR clone 230128 (TRAV1-2, TRAJ16)
CAVNRLSDGQKLLF

SEQ ID NO: 460256 - protein, 16 aa, Homo sapiens
  CDR3 for beta chain variable domain of TCR clone 230128 (TRBV28, TRBJ2-4)
CASSLIQGSLGNIQYF

SEQ ID NO: 460257 - protein, 15 aa, Homo sapiens
  CDR3 for alpha chain variable domain of TCR clone 230129 (TRAV34, TRAJ38)
CGADFTPGNNPKLIW

SEQ ID NO: 460258 - protein, 16 aa, Homo sapiens
  CDR3 for beta chain variable domain of TCR clone 230129 (TRBV12-5, TRBJ2-5)
CASGPRTSGNQETQYF

SEQ ID NO: 460259 - protein, 14 aa, Homo sapiens
  CDR3 for alpha chain variable domain of TCR clone 230130 (TRAV12-1, TRAJ27)
CGEHIRTNAGKSTF

SEQ ID NO: 460260 - protein, 15 aa, Homo sapiens
  CDR3 for beta chain variable domain of TCR clone 230130 (TRBV19, TRBJ1-1)
CASTSGQIHNTEAFF

SEQ ID NO: 460261 - protein, 17 aa, Homo sapiens
  CDR3 for alpha chain variable domain of TCR clone 230131 (TRAV3, TRAJ6)
CAVSRRTDTGGSYIPTF

SEQ ID NO: 460262 - protein, 18 aa, Homo sapiens
  CDR3 for beta chain variable domain of TCR clone 230131 (TRBV7-2, TRBJ2-3)
CASSLETSRGRKADTQDF

SEQ ID NO: 460263 - protein, 15 aa, Homo sapiens
  CDR3 for alpha chain variable domain of TCR clone 230132 (TRAV1-2, TRAJ24)
CAVRVSTDSWGKFQF

SEQ ID NO: 460264 - protein, 16 aa, Homo sapiens
  CDR3 for beta chain variable domain of TCR clone 230132 (TRBV20-1, TRBJ2-1)
CGAATQGPVSYNEQFF

SEQ ID NO: 460265 - protein, 14 aa, Homo sapiens
  CDR3 for alpha chain variable domain of TCR clone 230133 (TRAV13-1, TRAJ28)
CAASKGAGSYQLTF

SEQ ID NO: 460266 - protein, 16 aa, Homo sapiens
  CDR3 for beta chain variable domain of TCR clone 230133 (TRBV28, TRBJ2-7)
CASSLFFETGGPEQYF

SEQ ID NO: 460267 - protein, 13 aa, Homo sapiens
  CDR3 for alpha chain variable domain of TCR clone 230134 (TRAV12-3, TRAJ13)
CAMSSGGYQKVTF

SEQ ID NO: 460268 - protein, 13 aa, Homo sapiens
  CDR3 for beta chain variable domain of TCR clone 230134 (TRBV20-1, TRBJ1-1)
CSAPPGGHTGDFF

SEQ ID NO: 460269 - protein, 15 aa, Homo sapiens
  CDR3 for alpha chain variable domain of TCR clone 230135 (TRAV35, TRAJ40)
CAGQLGTSGTYKYIF

SEQ ID NO: 460270 - protein, 14 aa, Homo sapiens
  CDR3 for beta chain variable domain of TCR clone 230135 (TRBV7-3, TRBJ2-1)
RASSLAGGTNEQFF

SEQ ID NO: 460271 - protein, 15 aa, Homo sapiens
  CDR3 for alpha chain variable domain of TCR clone 230136 (TRAV8-4, TRAJ15)
CAVSDPVQAGTALIF

SEQ ID NO: 460272 - protein, 18 aa, Homo sapiens
  CDR3 for beta chain variable domain of TCR clone 230136 (TRBV7-9, TRBJ2-7)
CASSLTTSGSRTWYEQYV

SEQ ID NO: 460273 - protein, 23 aa, Homo sapiens
  CDR3 for alpha chain variable domain of TCR clone 230137 (TRAV30, TRAJ43)
GLPAQLLRNLLLWHRGRGNDMRF

SEQ ID NO: 460274 - protein, 11 aa, Homo sapiens
  CDR3 for beta chain variable domain of TCR clone 230137 (TRBV29-1, TRBJ2-5)
CSEDRTGTQYF

SEQ ID NO: 460275 - protein, 14 aa, Homo sapiens
  CDR3 for alpha chain variable domain of TCR clone 230138 (TRAV23/DV6, TRAJ5)
CAAKRPAGRRALTF

SEQ ID NO: 460276 - protein, 13 aa, Homo sapiens
  CDR3 for beta chain variable domain of TCR clone 230138 (TRBV12-4, TRBJ2-7)
CASSPTETYEQYF

SEQ ID NO: 460277 - protein, 12 aa, Homo sapiens
  CDR3 for alpha chain variable domain of TCR clone 230139 (TRAV12-2, TRAJ39)
CAADNAGNMLTF

SEQ ID NO: 460278 - protein, 14 aa, Homo sapiens
  CDR3 for beta chain variable domain of TCR clone 230139 (TRBV7-2, TRBJ2-7)
CASRSQGAAYEQYF

SEQ ID NO: 460279 - protein, 15 aa, Homo sapiens
  CDR3 for alpha chain variable domain of TCR clone 230140 (TRAV8-3, TRAJ45)
CASSYSVGGADGLTF

SEQ ID NO: 460280 - protein, 13 aa, Homo sapiens
  CDR3 for beta chain variable domain of TCR clone 230140 (TRBV10-3, TRBJ2-7)
CASKRAVNYEQYF

SEQ ID NO: 460281 - protein, 17 aa, Homo sapiens
  CDR3 for alpha chain variable domain of TCR clone 230141 (TRAV3, TRAJ6)
CAVRECPRAGGSYIPTF

SEQ ID NO: 460282 - protein, 15 aa, Homo sapiens
  CDR3 for beta chain variable domain of TCR clone 230141 (TRBV20-1, TRBJ1-1)
CSASWDRFLNTEAFF

SEQ ID NO: 460283 - protein, 16 aa, Homo sapiens
  CDR3 for alpha chain variable domain of TCR clone 230142 (TRAV3, TRAJ27)
CAVRDPQGTNAGKSTC

SEQ ID NO: 460284 - protein, 17 aa, Homo sapiens
  CDR3 for beta chain variable domain of TCR clone 230142 (TRBV4-1, TRBJ2-7)
CASSQGRGLQTSYEQYF

SEQ ID NO: 460285 - protein, 17 aa, Homo sapiens
  CDR3 for alpha chain variable domain of TCR clone 230143 (TRAV13-1, TRAJ52)
CAASSGAGGTSYVKLTF

SEQ ID NO: 460286 - protein, 15 aa, Homo sapiens
  CDR3 for beta chain variable domain of TCR clone 230143 (TRBV3-1, TRBJ2-7)
CASSQEWTGSYEQYF

SEQ ID NO: 460287 - protein, 11 aa, Homo sapiens
  CDR3 for alpha chain variable domain of TCR clone 230144 (TRAV12-2, TRAJ23)
CAVDQGGKLIF

SEQ ID NO: 460288 - protein, 13 aa, Homo sapiens
  CDR3 for beta chain variable domain of TCR clone 230144 (TRBV27, TRBJ1-4)
CASSLMGDEKLFF

SEQ ID NO: 460289 - protein, 13 aa, Homo sapiens
  CDR3 for alpha chain variable domain of TCR clone 230145 (TRAV27, TRAJ6)
CAGGTRGSYIPTF

SEQ ID NO: 460290 - protein, 13 aa, Homo sapiens
  CDR3 for beta chain variable domain of TCR clone 230145 (TRBV4-1, TRBJ1-1)
CASSRKMNTEAFF

SEQ ID NO: 460291 - protein, 18 aa, Homo sapiens
  CDR3 for alpha chain variable domain of TCR clone 230146 (TRAV21, TRAJ52)
FAVRPSPAGGSSYGKLTF

SEQ ID NO: 460292 - protein, 13 aa, Homo sapiens
  CDR3 for beta chain variable domain of TCR clone 230146 (TRBV7-3, TRBJ1-1)
CASSQDWGAEAFF

SEQ ID NO: 460293 - protein, 16 aa, Homo sapiens
  CDR3 for alpha chain variable domain of TCR clone 230147 (TRAV2, TRAJ4)
CAVEDRFSGGYNKLIF

SEQ ID NO: 460294 - protein, 13 aa, Homo sapiens
  CDR3 for beta chain variable domain of TCR clone 230147 (TRBV7-7, TRBJ2-5)
CASSRSGQETQYS

SEQ ID NO: 460295 - protein, 14 aa, Homo sapiens
  CDR3 for alpha chain variable domain of TCR clone 230148 (TRAV3, TRAJ28)
CAVRRGAGSYQLTF

SEQ ID NO: 460296 - protein, 16 aa, Homo sapiens
  CDR3 for beta chain variable domain of TCR clone 230148 (TRBV4-1, TRBJ2-7)
GASSQEWTSGPLEQYF

SEQ ID NO: 460297 - protein, 15 aa, Homo sapiens
  CDR3 for alpha chain variable domain of TCR clone 230149 (TRAV17, TRAJ57)
CVTGPSQGGSEKLVF

SEQ ID NO: 460298 - protein, 13 aa, Homo sapiens
  CDR3 for beta chain variable domain of TCR clone 230149 (TRBV4-2, TRBJ1-1)
CACSQAGNTEAFF

SEQ ID NO: 460299 - protein, 14 aa, Homo sapiens
  CDR3 for alpha chain variable domain of TCR clone 230150 (TRAV14/DV4, TRAJ20)
CAMRESLNDYKLSF

SEQ ID NO: 460300 - protein, 14 aa, Homo sapiens
  CDR3 for beta chain variable domain of TCR clone 230150 (TRBV20-1, TRBJ1-3)
CSASPTGAGNTIYF

SEQ ID NO: 460301 - protein, 13 aa, Homo sapiens
  CDR3 for alpha chain variable domain of TCR clone 230151 (TRAV12-1, TRAJ34)
CVVTGYNTDKLIF

SEQ ID NO: 460302 - protein, 17 aa, Homo sapiens
  CDR3 for beta chain variable domain of TCR clone 230151 (TRBV3-1, TRBJ2-2)
CASSQFRDKVDTGELFF

SEQ ID NO: 460303 - protein, 14 aa, Homo sapiens
  CDR3 for alpha chain variable domain of TCR clone 230152 (TRAV3, TRAJ27)
CAVRDDTNAGKSTF

SEQ ID NO: 460304 - protein, 15 aa, Homo sapiens
  CDR3 for beta chain variable domain of TCR clone 230152 (TRBV20-1, TRBJ2-7)
CSARDRVSGMDEQYF

SEQ ID NO: 460305 - protein, 15 aa, Homo sapiens
  CDR3 for alpha chain variable domain of TCR clone 230153 (TRAV25, TRAJ52)
CAGRPGGTSYGKLTF

SEQ ID NO: 460306 - protein, 12 aa, Homo sapiens
  CDR3 for beta chain variable domain of TCR clone 230153 (TRBV5-1, TRBJ2-7)
CASSLDSYEQYF

SEQ ID NO: 460307 - protein, 16 aa, Homo sapiens
  CDR3 for alpha chain variable domain of TCR clone 230154 (TRAV3, TRAJ37)
CAVRGKGSGNTVKLIF

SEQ ID NO: 460308 - protein, 14 aa, Homo sapiens
  CDR3 for beta chain variable domain of TCR clone 230154 (TRBV7-7, TRBJ2-2)
CASSRDGSTGELFF

SEQ ID NO: 460309 - protein, 15 aa, Homo sapiens
  CDR3 for alpha chain variable domain of TCR clone 230155 (TRAV8-3, TRAJ13)
CAVAPNSGGYQKVTF

SEQ ID NO: 460310 - protein, 12 aa, Homo sapiens
  CDR3 for beta chain variable domain of TCR clone 230155 (TRBV19, TRBJ2-7)
CASTDRDYEEYF

SEQ ID NO: 460311 - protein, 14 aa, Homo sapiens
  CDR3 for alpha chain variable domain of TCR clone 230156 (TRAV12-2, TRAJ45)
CAVYSGGGADGLTF

SEQ ID NO: 460312 - protein, 14 aa, Homo sapiens
  CDR3 for beta chain variable domain of TCR clone 230156 (TRBV6-5, TRBJ1-2)
CASNRGRGSDGYTF

SEQ ID NO: 460313 - protein, 13 aa, Homo sapiens
  CDR3 for alpha chain variable domain of TCR clone 230157 (TRAV35, TRAJ42)
CAGFPGSQGNLIF

SEQ ID NO: 460314 - protein, 15 aa, Homo sapiens
  CDR3 for beta chain variable domain of TCR clone 230157 (TRBV5-1, TRBJ2-5)
CASSFKGGDQETQYF

SEQ ID NO: 460315 - protein, 14 aa, Homo sapiens
  CDR3 for alpha chain variable domain of TCR clone 230158 (TRAV21, TRAJ21)
CAVGVEDNFNKFYF

SEQ ID NO: 460316 - protein, 17 aa, Homo sapiens
  CDR3 for beta chain variable domain of TCR clone 230158 (TRBV20-1, TRBJ2-2)
CSASGSGQGGLTGALFF

SEQ ID NO: 460317 - protein, 14 aa, Homo sapiens
  CDR3 for alpha chain variable domain of TCR clone 230159 (TRAV12-1, TRAJ17)
CVVNYKAAGNKLTF

SEQ ID NO: 460318 - protein, 15 aa, Homo sapiens
  CDR3 for beta chain variable domain of TCR clone 230159 (TRBV18, TRBJ2-1)
CASSPPSASYNKQFF

SEQ ID NO: 460319 - protein, 14 aa, Homo sapiens
  CDR3 for alpha chain variable domain of TCR clone 230160 (TRAV8-3, TRAJ4)
CAVGAYGGYNKLIF

SEQ ID NO: 460320 - protein, 13 aa, Homo sapiens
  CDR3 for beta chain variable domain of TCR clone 230160 (TRBV18, TRBJ2-5)
CASSLQGQETQYF

SEQ ID NO: 460321 - protein, 14 aa, Homo sapiens
  CDR3 for alpha chain variable domain of TCR clone 230161 (TRAV12-2, TRAJ33)
CAVKRARSNYQLIW

SEQ ID NO: 460322 - protein, 14 aa, Homo sapiens
  CDR3 for beta chain variable domain of TCR clone 230161 (TRBV5-1, TRBJ2-2)
CASSLIEGAGELFF

SEQ ID NO: 460323 - protein, 13 aa, Homo sapiens
  CDR3 for alpha chain variable domain of TCR clone 230162 (TRAV2, TRAJ40)
GAVVTSGTYKYIF

SEQ ID NO: 460324 - protein, 15 aa, Homo sapiens
  CDR3 for beta chain variable domain of TCR clone 230162 (TRBV5-1, TRBJ2-5)
CASSLGLAEQETQYF

SEQ ID NO: 460325 - protein, 14 aa, Homo sapiens
  CDR3 for alpha chain variable domain of TCR clone 230163 (TRAV17, TRAJ54)
CATDANQGAQKLVF

SEQ ID NO: 460326 - protein, 14 aa, Homo sapiens
  CDR3 for beta chain variable domain of TCR clone 230163 (TRBV19, TRBJ2-1)
CASSDNQGANEQFF

SEQ ID NO: 460327 - protein, 12 aa, Homo sapiens
  CDR3 for alpha chain variable domain of TCR clone 230164 (TRAV12-1, TRAJ40)
CVVYSGTYKYIF

SEQ ID NO: 460328 - protein, 15 aa, Homo sapiens
  CDR3 for beta chain variable domain of TCR clone 230164 (TRBV18, TRBJ2-7)
CASSPSSTGNYEQYF

SEQ ID NO: 460329 - protein, 13 aa, Homo sapiens
  CDR3 for alpha chain variable domain of TCR clone 230165 (TRAV8-3, TRAJ7)
CAVGAYGNNRLAF

SEQ ID NO: 460330 - protein, 18 aa, Homo sapiens
  CDR3 for beta chain variable domain of TCR clone 230165 (TRBV11-2, TRBJ2-3)
CASSLGGASRGAPNTQYF

SEQ ID NO: 460331 - protein, 16 aa, Homo sapiens
  CDR3 for alpha chain variable domain of TCR clone 230166 (TRAV35, TRAJ28)
CAGQKYSGAGSYELTF

SEQ ID NO: 460332 - protein, 13 aa, Homo sapiens
  CDR3 for beta chain variable domain of TCR clone 230166 (TRBV19, TRBJ1-2)
CASSQGQVYGYTF

SEQ ID NO: 460333 - protein, 14 aa, Homo sapiens
  CDR3 for alpha chain variable domain of TCR clone 230167 (TRAV1-2, TRAJ16)
CAVNRFSDGQKLLF

SEQ ID NO: 460334 - protein, 17 aa, Homo sapiens
  CDR3 for beta chain variable domain of TCR clone 230167 (TRBV10-3, TRBJ2-4)
CTSVTSVNKGSKNIQYF

SEQ ID NO: 460335 - protein, 14 aa, Homo sapiens
  CDR3 for alpha chain variable domain of TCR clone 230168 (TRAV13-1, TRAJ44)
CAAKATGTASKFTF

SEQ ID NO: 460336 - protein, 17 aa, Homo sapiens
  CDR3 for beta chain variable domain of TCR clone 230168 (TRBV7-3, TRBJ2-3)
RASSLMKRMRGADTQYF

SEQ ID NO: 460337 - protein, 10 aa, Homo sapiens
  CDR3 for alpha chain variable domain of TCR clone 230169 (TRAV13-1, TRAJ15)
INQAGTALIF

SEQ ID NO: 460338 - protein, 14 aa, Homo sapiens
  CDR3 for beta chain variable domain of TCR clone 230169 (TRBV7-9, TRBJ2-1)
CASSDNSGYNEQFS

SEQ ID NO: 460339 - protein, 14 aa, Homo sapiens
  CDR3 for alpha chain variable domain of TCR clone 230170 (TRAV26-2, TRAJ27)
CILRDISDAGKSTF

SEQ ID NO: 460340 - protein, 12 aa, Homo sapiens
  CDR3 for beta chain variable domain of TCR clone 230170 (TRBV7-9, TRBJ2-7)
CASSIKREEQYF

SEQ ID NO: 460341 - protein, 13 aa, Homo sapiens
  CDR3 for alpha chain variable domain of TCR clone 230171 (TRAV8-6, TRAJ49)
CAVITNTGNQFYF

SEQ ID NO: 460342 - protein, 14 aa, Homo sapiens
  CDR3 for beta chain variable domain of TCR clone 230171 (TRBV7-9, TRBJ2-5)
CASSLVGGEETQYF

SEQ ID NO: 460343 - protein, 14 aa, Homo sapiens
  CDR3 for alpha chain variable domain of TCR clone 230172 (TRAV26-1, TRAJ38)
CIADNAGKNRKLLW

SEQ ID NO: 460344 - protein, 13 aa, Homo sapiens
  CDR3 for beta chain variable domain of TCR clone 230172 (TRBV20-1, TRBJ1-1)
CSARGGGNTEAFF

SEQ ID NO: 460345 - protein, 12 aa, Homo sapiens
  CDR3 for alpha chain variable domain of TCR clone 230173 (TRAV17, TRAJ20)
CATDGDDYKLSF

SEQ ID NO: 460346 - protein, 17 aa, Homo sapiens
  CDR3 for beta chain variable domain of TCR clone 230173 (TRBV28, TRBJ2-2)
CASSLATGMGDAGELFF

SEQ ID NO: 460347 - protein, 13 aa, Homo sapiens
  CDR3 for alpha chain variable domain of TCR clone 230174 (TRAV13-1, TRAJ29)
CAASIVLNTPLVF

SEQ ID NO: 460348 - protein, 14 aa, Homo sapiens
  CDR3 for beta chain variable domain of TCR clone 230174 (TRBV20-1, TRBJ2-5)
CSDRDSGSGETQYF

SEQ ID NO: 460349 - protein, 15 aa, Homo sapiens
  CDR3 for alpha chain variable domain of TCR clone 230175 (TRAV38-2/DV8, TRAJ48)
CAYRSGGFGNEKLTS

SEQ ID NO: 460350 - protein, 16 aa, Homo sapiens
  CDR3 for beta chain variable domain of TCR clone 230175 (TRBV28, TRBJ2-7)
CASSPWVATGDLSQYF

SEQ ID NO: 460351 - protein, 11 aa, Homo sapiens
  CDR3 for alpha chain variable domain of TCR clone 230176 (TRAV2, TRAJ33)
CAVESNYQLIW

SEQ ID NO: 460352 - protein, 14 aa, Homo sapiens
  CDR3 for beta chain variable domain of TCR clone 230176 (TRBV7-9, TRBJ2-1)
CASSSMVGFGEQFF

SEQ ID NO: 460353 - protein, 15 aa, Homo sapiens
  CDR3 for alpha chain variable domain of TCR clone 230177 (TRAV12-2, TRAJ53)
CAMNGGGGSNYKLTF

SEQ ID NO: 460354 - protein, 17 aa, Homo sapiens
  CDR3 for beta chain variable domain of TCR clone 230177 (TRBV7-3, TRBJ2-3)
RASSLMKRMRGADTQYF

SEQ ID NO: 460355 - protein, 13 aa, Homo sapiens
  CDR3 for alpha chain variable domain of TCR clone 230178 (TRAV1-2, TRAJ9)
CAALNTGGFKTIF

SEQ ID NO: 460356 - protein, 17 aa, Homo sapiens
  CDR3 for beta chain variable domain of TCR clone 230178 (TRBV19, TRBJ2-6)
CASSTGQVFSGANVLTF

SEQ ID NO: 460357 - protein, 15 aa, Homo sapiens
  CDR3 for alpha chain variable domain of TCR clone 230179 (TRAV38-2/DV8, TRAJ48)
CAYRSGGFGNEKLTF

SEQ ID NO: 460358 - protein, 16 aa, Homo sapiens
  CDR3 for beta chain variable domain of TCR clone 230179 (TRBV28, TRBJ2-7)
CASSPWVATGDISQYF

SEQ ID NO: 460359 - protein, 14 aa, Homo sapiens
  CDR3 for alpha chain variable domain of TCR clone 230180 (TRAV12-2, TRAJ45)
CAVNIGGGADGLTF

SEQ ID NO: 460360 - protein, 14 aa, Homo sapiens
  CDR3 for beta chain variable domain of TCR clone 230180 (TRBV28, TRBJ2-7)
CASSLLRISYEQYF

SEQ ID NO: 460361 - protein, 12 aa, Homo sapiens
  CDR3 for alpha chain variable domain of TCR clone 230181 (TRAV27, TRAJ41)
CAGRNSGYALNF

SEQ ID NO: 460362 - protein, 15 aa, Homo sapiens
  CDR3 for beta chain variable domain of TCR clone 230181 (TRBV20-1, TRBJ1-5)
CSATSDRGLGQAQHF

SEQ ID NO: 460363 - protein, 17 aa, Homo sapiens
  CDR3 for alpha chain variable domain of TCR clone 230182 (TRAV12-2, TRAJ45)
CAVNIWGSGGGADGLTF

SEQ ID NO: 460364 - protein, 18 aa, Homo sapiens
  CDR3 for beta chain variable domain of TCR clone 230182 (TRBV20-1, TRBJ2-6)
CSAETTPTHGSGANFLTF

SEQ ID NO: 460365 - protein, 14 aa, Homo sapiens
  CDR3 for alpha chain variable domain of TCR clone 230183 (TRAV2, TRAJ9)
CAVEDRSGGFKTSF

SEQ ID NO: 460366 - protein, 16 aa, Homo sapiens
  CDR3 for beta chain variable domain of TCR clone 230183 (TRBV28, TRBJ1-5)
CASSLTGQGWNQPQHF

SEQ ID NO: 460367 - protein, 16 aa, Homo sapiens
  CDR3 for alpha chain variable domain of TCR clone 230184 (TRAV30, TRAJ24)
CGTEIVDADSWGKFQF

SEQ ID NO: 460368 - protein, 14 aa, Homo sapiens
  CDR3 for beta chain variable domain of TCR clone 230184 (TRBV12-5, TRBJ2-5)
RASGSRTRQETQYF

SEQ ID NO: 460369 - protein, 18 aa, Homo sapiens
  CDR3 for alpha chain variable domain of TCR clone 230185 (TRAV26-2, TRAJ54)
CILRDVEVGIQGGQKLVF

SEQ ID NO: 460370 - protein, 17 aa, Homo sapiens
  CDR3 for beta chain variable domain of TCR clone 230185 (TRBV20-1, TRBJ1-5)
CSASLSPGQGGNQPQHF

SEQ ID NO: 460371 - protein, 11 aa, Homo sapiens
  CDR3 for alpha chain variable domain of TCR clone 230186 (TRAV17, TRAJ9)
CATTGGFKTIF

SEQ ID NO: 460372 - protein, 15 aa, Homo sapiens
  CDR3 for beta chain variable domain of TCR clone 230186 (TRBV9, TRBJ1-6)
CASSVAGTGGSPLHF

SEQ ID NO: 460373 - protein, 13 aa, Homo sapiens
  CDR3 for alpha chain variable domain of TCR clone 230187 (TRAV21, TRAJ57)
CAVSQGGSEKLVF

SEQ ID NO: 460374 - protein, 15 aa, Homo sapiens
  CDR3 for beta chain variable domain of TCR clone 230187 (TRBV5-1, TRBJ1-1)
CASSSTTGTNTEAFF

SEQ ID NO: 460375 - protein, 13 aa, Homo sapiens
  CDR3 for alpha chain variable domain of TCR clone 230188 (TRAV29/DV5, TRAJ47)
CAASAEYGNKLVF

SEQ ID NO: 460376 - protein, 15 aa, Homo sapiens
  CDR3 for beta chain variable domain of TCR clone 230188 (TRBV7-9, TRBJ1-4)
CSSSARTGGNEKLFF

SEQ ID NO: 460377 - protein, 15 aa, Homo sapiens
  CDR3 for alpha chain variable domain of TCR clone 230189 (TRAV17, TRAJ57)
CATGPSQGGSEKLVF

SEQ ID NO: 460378 - protein, 15 aa, Homo sapiens
  CDR3 for beta chain variable domain of TCR clone 230189 (TRBV5-8, TRBJ2-2)
CASSLDRGATGELFF

SEQ ID NO: 460379 - protein, 14 aa, Homo sapiens
  CDR3 for alpha chain variable domain of TCR clone 230190 (TRAV27, TRAJ22)
CAGVVPGSARQLTF

SEQ ID NO: 460380 - protein, 16 aa, Homo sapiens
  CDR3 for beta chain variable domain of TCR clone 230190 (TRBV7-9, TRBJ2-7)
CASSSPSANTVNEQYF

SEQ ID NO: 460381 - protein, 12 aa, Homo sapiens
  CDR3 for alpha chain variable domain of TCR clone 230191 (TRAV38-1, TRAJ36)
CAFETGANNLFF

SEQ ID NO: 460382 - protein, 12 aa, Homo sapiens
  CDR3 for beta chain variable domain of TCR clone 230191 (TRBV11-2, TRBJ2-2)
CARSLGGGELFF

SEQ ID NO: 460383 - protein, 14 aa, Homo sapiens
  CDR3 for alpha chain variable domain of TCR clone 230192 (TRAV8-4, TRAJ13)
CAVTLSGGYQKVTF

SEQ ID NO: 460384 - protein, 14 aa, Homo sapiens
  CDR3 for beta chain variable domain of TCR clone 230192 (TRBV7-2, TRBJ1-2)
CASSQTGSTSGYTF

SEQ ID NO: 460385 - protein, 14 aa, Homo sapiens
  CDR3 for alpha chain variable domain of TCR clone 230193 (TRAV36/DV7, TRAJ44)
CCGANTGTASKLTF

SEQ ID NO: 460386 - protein, 14 aa, Homo sapiens
  CDR3 for beta chain variable domain of TCR clone 230193 (TRBV6-1, TRBJ2-6)
YASQQGAGANVLTF

SEQ ID NO: 460387 - protein, 12 aa, Homo sapiens
  CDR3 for alpha chain variable domain of TCR clone 230194 (TRAV1-2, TRAJ33)
CAALDSNYQLIW

SEQ ID NO: 460388 - protein, 15 aa, Homo sapiens
  CDR3 for beta chain variable domain of TCR clone 230194 (TRBV28, TRBJ2-2)
CASSLRTGNTGELFF

SEQ ID NO: 460389 - protein, 13 aa, Homo sapiens
  CDR3 for alpha chain variable domain of TCR clone 230195 (TRAV3, TRAJ21)
CAVREPDFNKFYF

SEQ ID NO: 460390 - protein, 13 aa, Homo sapiens
  CDR3 for beta chain variable domain of TCR clone 230195 (TRBV9, TRBJ2-1)
CASSPSGGYEQFF

SEQ ID NO: 460391 - protein, 16 aa, Homo sapiens
  CDR3 for alpha chain variable domain of TCR clone 230196 (TRAV20, TRAJ22)
CAVQASSSGSARQLTF

SEQ ID NO: 460392 - protein, 12 aa, Homo sapiens
  CDR3 for beta chain variable domain of TCR clone 230196 (TRBV14, TRBJ1-1)
CASSQLKGLAFF

SEQ ID NO: 460393 - protein, 13 aa, Homo sapiens
  CDR3 for alpha chain variable domain of TCR clone 230197 (TRAV21, TRAJ27)
CAARPGHAGKSTF

SEQ ID NO: 460394 - protein, 13 aa, Homo sapiens
  CDR3 for beta chain variable domain of TCR clone 230197 (TRBV19, TRBJ1-2)
CASSVPGQDGYTF

SEQ ID NO: 460395 - protein, 14 aa, Homo sapiens
  CDR3 for alpha chain variable domain of TCR clone 230198 (TRAV12-1, TRAJ17)
CVVNYKAAGNKLTF

SEQ ID NO: 460396 - protein, 15 aa, Homo sapiens
  CDR3 for beta chain variable domain of TCR clone 230198 (TRBV20-1, TRBJ2-7)
CSARDRVSWMDEQYF

SEQ ID NO: 460397 - protein, 14 aa, Homo sapiens
  CDR3 for alpha chain variable domain of TCR clone 230199 (TRAV23/DV6, TRAJ37)
CAASTSSNTGKLIF

SEQ ID NO: 460398 - protein, 13 aa, Homo sapiens
  CDR3 for beta chain variable domain of TCR clone 230199 (TRBV7-7, TRBJ1-1)
CASSWGANTEAFF

SEQ ID NO: 460399 - protein, 15 aa, Homo sapiens
  CDR3 for alpha chain variable domain of TCR clone 230200 (TRAV17, TRAJ22)
CATAPISGSARQLTF

SEQ ID NO: 460400 - protein, 12 aa, Homo sapiens
  CDR3 for beta chain variable domain of TCR clone 230200 (TRBV11-2, TRBJ2-1)
CASSPGNNEQFF

SEQ ID NO: 460401 - protein, 13 aa, Homo sapiens
  CDR3 for alpha chain variable domain of TCR clone 230201 (TRAV21, TRAJ57)
CAVTQGGSEKLVF

SEQ ID NO: 460402 - protein, 11 aa, Homo sapiens
  CDR3 for beta chain variable domain of TCR clone 230201 (TRBV11-3, TRBJ2-2)
CASSLPGELFF

SEQ ID NO: 460403 - protein, 16 aa, Homo sapiens
  CDR3 for alpha chain variable domain of TCR clone 230202 (TRAV12-3, TRAJ53)
CAMSPGSGGSNYKLTF

SEQ ID NO: 460404 - protein, 13 aa, Homo sapiens
  CDR3 for beta chain variable domain of TCR clone 230202 (TRBV25-1, TRBJ2-7)
CASSEDGDYEQYF

SEQ ID NO: 460405 - protein, 13 aa, Homo sapiens
  CDR3 for alpha chain variable domain of TCR clone 230203 (TRAV14/DV4, TRAJ16)
CSMRGTDGQKLLF

SEQ ID NO: 460406 - protein, 18 aa, Homo sapiens
  CDR3 for beta chain variable domain of TCR clone 230203 (TRBV4-1, TRBJ2-3)
CASSHQLAGGRSTDTQYF

SEQ ID NO: 460407 - protein, 16 aa, Homo sapiens
  CDR3 for alpha chain variable domain of TCR clone 230204 (TRAV3, TRAJ13)
CALRDFASGGYQKVTF

SEQ ID NO: 460408 - protein, 16 aa, Homo sapiens
  CDR3 for beta chain variable domain of TCR clone 230204 (TRBV27, TRBJ2-5)
CASSYGPGGQKETLYF

SEQ ID NO: 460409 - protein, 15 aa, Homo sapiens
  CDR3 for alpha chain variable domain of TCR clone 230205 (TRAV3, TRAJ22)
CAVRDRGGSSRQPTF

SEQ ID NO: 460410 - protein, 16 aa, Homo sapiens
  CDR3 for beta chain variable domain of TCR clone 230205 (TRBV5-4, TRBJ2-3)
CASQQPGAGGADTQYF

SEQ ID NO: 460411 - protein, 13 aa, Homo sapiens
  CDR3 for alpha chain variable domain of TCR clone 230206 (TRAV2, TRAJ29)
CAAGNSGNTPLVF

SEQ ID NO: 460412 - protein, 16 aa, Homo sapiens
  CDR3 for beta chain variable domain of TCR clone 230206 (TRBV7-9, TRBJ1-2)
CANSPGGGAINYGYTF

SEQ ID NO: 460413 - protein, 14 aa, Homo sapiens
  CDR3 for alpha chain variable domain of TCR clone 230207 (TRAV12-2, TRAJ24)
CAVTPDDSWGKLQF

SEQ ID NO: 460414 - protein, 12 aa, Homo sapiens
  CDR3 for beta chain variable domain of TCR clone 230207 (TRBV3-1, TRBJ2-1)
CASSQGSSGQFF

SEQ ID NO: 460415 - protein, 13 aa, Homo sapiens
  CDR3 for alpha chain variable domain of TCR clone 230208 (TRAV22, TRAJ26)
CSVEHNYGQNFVF

SEQ ID NO: 460416 - protein, 16 aa, Homo sapiens
  CDR3 for beta chain variable domain of TCR clone 230208 (TRBV7-2, TRBJ2-6)
RASSERRASGANVLTF

SEQ ID NO: 460417 - protein, 14 aa, Homo sapiens
  CDR3 for alpha chain variable domain of TCR clone 230209 (TRAV13-2, TRAJ43)
CAEIPTYNNNDMRV

SEQ ID NO: 460418 - protein, 15 aa, Homo sapiens
  CDR3 for beta chain variable domain of TCR clone 230209 (TRBV7-9, TRBJ2-2)
CASRPLDTFPGELFF

SEQ ID NO: 460419 - protein, 12 aa, Homo sapiens
  CDR3 for alpha chain variable domain of TCR clone 230210 (TRAV8-6, TRAJ8)
CAVTPGFQKLVF

SEQ ID NO: 460420 - protein, 16 aa, Homo sapiens
  CDR3 for beta chain variable domain of TCR clone 230210 (TRBV7-3, TRBJ2-2)
CASSLKRGTMSGELFF

SEQ ID NO: 460421 - protein, 15 aa, Homo sapiens
  CDR3 for alpha chain variable domain of TCR clone 230211 (TRAV8-3, TRAJ11)
CAVGLLNSGYSTLTF

SEQ ID NO: 460422 - protein, 14 aa, Homo sapiens
  CDR3 for beta chain variable domain of TCR clone 230211 (TRBV10-3, TRBJ2-7)
CAISESSGNYEQYF

SEQ ID NO: 460423 - protein, 15 aa, Homo sapiens
  CDR3 for alpha chain variable domain of TCR clone 230212 (TRAV3, TRAJ47)
CAVRDIGEYGNKLVF

SEQ ID NO: 460424 - protein, 13 aa, Homo sapiens
  CDR3 for beta chain variable domain of TCR clone 230212 (TRBV7-9, TRBJ2-5)
CASLSPGQETQYF

SEQ ID NO: 460425 - protein, 17 aa, Homo sapiens
  CDR3 for alpha chain variable domain of TCR clone 230213 (TRAV3, TRAJ6)
CAVSRRTDTGGSYIPTF

SEQ ID NO: 460426 - protein, 15 aa, Homo sapiens
  CDR3 for beta chain variable domain of TCR clone 230213 (TRBV7-2, TRBJ2-1)
CASSSGLAGGNEQFF

SEQ ID NO: 460427 - protein, 15 aa, Homo sapiens
  CDR3 for alpha chain variable domain of TCR clone 230214 (TRAV26-1, TRAJ22)
CIVRVSFWLCKATDL

SEQ ID NO: 460428 - protein, 14 aa, Homo sapiens
  CDR3 for beta chain variable domain of TCR clone 230214 (TRBV4-1, TRBJ2-2)
CASSQAVNTGELFF

SEQ ID NO: 460429 - protein, 13 aa, Homo sapiens
  CDR3 for alpha chain variable domain of TCR clone 230215 (TRAV8-1, TRAJ30)
CAVIMNRDDKIIV

SEQ ID NO: 460430 - protein, 14 aa, Homo sapiens
  CDR3 for beta chain variable domain of TCR clone 230215 (TRBV7-2, TRBJ1-6)
CASSLQGANSPLHF

SEQ ID NO: 460431 - protein, 14 aa, Homo sapiens
  CDR3 for alpha chain variable domain of TCR clone 230216 (TRAV13-1, TRAJ20)
CAARPGSNDYKLSF

SEQ ID NO: 460432 - protein, 13 aa, Homo sapiens
  CDR3 for beta chain variable domain of TCR clone 230216 (TRBV20-1, TRBJ1-1)
CSAPTGGHTEAFF

SEQ ID NO: 460433 - protein, 10 aa, Homo sapiens
  CDR3 for alpha chain variable domain of TCR clone 230217 (TRAV8-4, TRAJ43)
CAVSADDMRF

SEQ ID NO: 460434 - protein, 15 aa, Homo sapiens
  CDR3 for beta chain variable domain of TCR clone 230217 (TRBV19, TRBJ2-4)
CASRGPRRGENIQYF

SEQ ID NO: 460435 - protein, 16 aa, Homo sapiens
  CDR3 for alpha chain variable domain of TCR clone 230218 (TRAV38-2/DV8, TRAJ44)
CAYRSARGGTASKLTF

SEQ ID NO: 460436 - protein, 15 aa, Homo sapiens
  CDR3 for beta chain variable domain of TCR clone 230218 (TRBV11-2, TRBJ2-3)
CASSARRGRGDTQYF

SEQ ID NO: 460437 - protein, 14 aa, Homo sapiens
  CDR3 for alpha chain variable domain of TCR clone 230219 (TRAV1-2, TRAJ16)
CAVNRVSDGQKLLF

SEQ ID NO: 460438 - protein, 18 aa, Homo sapiens
  CDR3 for beta chain variable domain of TCR clone 230219 (TRBV12-4, TRBJ2-2)
CASSLVAGTRGRTGELFF

SEQ ID NO: 460439 - protein, 16 aa, Homo sapiens
  CDR3 for alpha chain variable domain of TCR clone 230220 (TRAV30, TRAJ24)
CGTEIVDAESRGKFQF

SEQ ID NO: 460440 - protein, 14 aa, Homo sapiens
  CDR3 for beta chain variable domain of TCR clone 230220 (TRBV12-5, TRBJ2-5)
CASGSRTHQETQYF

SEQ ID NO: 460441 - protein, 11 aa, Homo sapiens
  CDR3 for alpha chain variable domain of TCR clone 230221 (TRAV2, TRAJ13)
CASGGYQKVTF

SEQ ID NO: 460442 - protein, 18 aa, Homo sapiens
  CDR3 for beta chain variable domain of TCR clone 230221 (TRBV11-2, TRBJ2-3)
CASSLGGASRGAANTQYF

SEQ ID NO: 460443 - protein, 14 aa, Homo sapiens
  CDR3 for alpha chain variable domain of TCR clone 230222 (TRAV12-2, TRAJ45)
CALPERGGADGLTF

SEQ ID NO: 460444 - protein, 14 aa, Homo sapiens
  CDR3 for beta chain variable domain of TCR clone 230222 (TRBV18, TRBJ1-5)
CASSPGNSNQPLHF

SEQ ID NO: 460445 - protein, 14 aa, Homo sapiens
  CDR3 for alpha chain variable domain of TCR clone 230223 (TRAV8-3, TRAJ4)
CAVGASGGYNKLMF

SEQ ID NO: 460446 - protein, 17 aa, Homo sapiens
  CDR3 for beta chain variable domain of TCR clone 230223 (TRBV11-2, TRBJ2-1)
CASSLYPPGVEYNEQFF

SEQ ID NO: 460447 - protein, 15 aa, Homo sapiens
  CDR3 for alpha chain variable domain of TCR clone 230224 (TRAV12-2, TRAJ5)
CAVNRKDTGRRALTF

SEQ ID NO: 460448 - protein, 13 aa, Homo sapiens
  CDR3 for beta chain variable domain of TCR clone 230224 (TRBV7-9, TRBJ1-2)
CASSLKQNYGYTF

SEQ ID NO: 460449 - protein, 15 aa, Homo sapiens
  CDR3 for alpha chain variable domain of TCR clone 230225 (TRAV8-3, TRAJ45)
CASSYSGGGADGLTF

SEQ ID NO: 460450 - protein, 12 aa, Homo sapiens
  CDR3 for beta chain variable domain of TCR clone 230225 (TRBV14, TRBJ2-7)
CASSLYKDGQYF

SEQ ID NO: 460451 - protein, 13 aa, Homo sapiens
  CDR3 for alpha chain variable domain of TCR clone 230226 (TRAV12-1, TRAJ16)
CVVNGPDGQKLLF

SEQ ID NO: 460452 - protein, 14 aa, Homo sapiens
  CDR3 for beta chain variable domain of TCR clone 230226 (TRBV7-3, TRBJ2-2)
CASSAGGYTGELFF

SEQ ID NO: 460453 - protein, 14 aa, Homo sapiens
  CDR3 for alpha chain variable domain of TCR clone 230227 (TRAV21, TRAJ35)
CAVMPIGFGNVLHC

SEQ ID NO: 460454 - protein, 12 aa, Homo sapiens
  CDR3 for beta chain variable domain of TCR clone 230227 (TRBV29-1, TRBJ2-3)
CSVTGGADTQYF

SEQ ID NO: 460455 - protein, 14 aa, Homo sapiens
  CDR3 for alpha chain variable domain of TCR clone 230228 (TRAV35, TRAJ42)
CCVPYGGSQGNLIF

SEQ ID NO: 460456 - protein, 18 aa, Homo sapiens
  CDR3 for beta chain variable domain of TCR clone 230228 (TRBV13, TRBJ2-6)
CASSPMTSGVSGANVLTF

SEQ ID NO: 460457 - protein, 16 aa, Homo sapiens
  CDR3 for alpha chain variable domain of TCR clone 230229 (TRAV26-1, TRAJ23)
CIVRPHGNNQGGKLIF

SEQ ID NO: 460458 - protein, 14 aa, Homo sapiens
  CDR3 for beta chain variable domain of TCR clone 230229 (TRBV19, TRBJ2-5)
CASSMTGQQETQYF

SEQ ID NO: 460459 - protein, 14 aa, Homo sapiens
  CDR3 for alpha chain variable domain of TCR clone 230230 (TRAV1-2, TRAJ16)
CAVNRFSDGQKLPF

SEQ ID NO: 460460 - protein, 13 aa, Homo sapiens
  CDR3 for beta chain variable domain of TCR clone 230230 (TRBV20-1, TRBJ1-1)
CSARVGGNTEAFF

SEQ ID NO: 460461 - protein, 12 aa, Homo sapiens
  CDR3 for alpha chain variable domain of TCR clone 230231 (TRAV21, TRAJ11)
CSATSGYSTLTF

SEQ ID NO: 460462 - protein, 14 aa, Homo sapiens
  CDR3 for beta chain variable domain of TCR clone 230231 (TRBV20-1, TRBJ2-7)
CSAPELAGVGEKYF

SEQ ID NO: 460463 - protein, 13 aa, Homo sapiens
  CDR3 for alpha chain variable domain of TCR clone 230232 (TRAV29/DV5, TRAJ49)
CAASTNTGNQFYF

SEQ ID NO: 460464 - protein, 13 aa, Homo sapiens
  CDR3 for beta chain variable domain of TCR clone 230232 (TRBV7-2, TRBJ1-4)
CASSLAGLEELFF

SEQ ID NO: 460465 - protein, 14 aa, Homo sapiens
  CDR3 for alpha chain variable domain of TCR clone 230233 (TRAV1-2, TRAJ16)
CAVNRFSDDQKLLF

SEQ ID NO: 460466 - protein, 13 aa, Homo sapiens
  CDR3 for beta chain variable domain of TCR clone 230233 (TRBV6-1, TRBJ1-1)
CASSRQGNTEAFF

SEQ ID NO: 460467 - protein, 14 aa, Homo sapiens
  CDR3 for alpha chain variable domain of TCR clone 230234 (TRAV17, TRAJ39)
CATDPVRAGNMLTF

SEQ ID NO: 460468 - protein, 15 aa, Homo sapiens
  CDR3 for beta chain variable domain of TCR clone 230234 (TRBV13, TRBJ1-5)
CASTFGQGGVQPQHF

SEQ ID NO: 460469 - protein, 12 aa, Homo sapiens
  CDR3 for alpha chain variable domain of TCR clone 230235 (TRAV12-3, TRAJ17)
CAMKLTGNKLTF

SEQ ID NO: 460470 - protein, 15 aa, Homo sapiens
  CDR3 for beta chain variable domain of TCR clone 230235 (TRBV20-1, TRBJ2-7)
CSARDRVSGRDEQYF

SEQ ID NO: 460471 - protein, 14 aa, Homo sapiens
  CDR3 for alpha chain variable domain of TCR clone 230236 (TRAV16, TRAJ37)
CALDISGNTGKLLF

SEQ ID NO: 460472 - protein, 14 aa, Homo sapiens
  CDR3 for beta chain variable domain of TCR clone 230236 (TRBV7-6, TRBJ2-7)
CASSFRQGADEQYF

SEQ ID NO: 460473 - protein, 16 aa, Homo sapiens
  CDR3 for alpha chain variable domain of TCR clone 230237 (TRAV30, TRAJ24)
CGTEIVDADSWGKFQF

SEQ ID NO: 460474 - protein, 16 aa, Homo sapiens
  CDR3 for beta chain variable domain of TCR clone 230237 (TRBV10-3, TRBJ1-5)
CAISDQVGAPNQPQHF

SEQ ID NO: 460475 - protein, 16 aa, Homo sapiens
  CDR3 for alpha chain variable domain of TCR clone 230238 (TRAV30, TRAJ24)
CGTEIVDADSWGKFQF

SEQ ID NO: 460476 - protein, 14 aa, Homo sapiens
  CDR3 for beta chain variable domain of TCR clone 230238 (TRBV12-5, TRBJ2-5)
CASGSRTDHETQYF

SEQ ID NO: 460477 - protein, 12 aa, Homo sapiens
  CDR3 for alpha chain variable domain of TCR clone 230239 (TRAV16, TRAJ10)
CSRTGGGNKLTF

SEQ ID NO: 460478 - protein, 15 aa, Homo sapiens
  CDR3 for beta chain variable domain of TCR clone 230239 (TRBV6-3, TRBJ2-7)
CASSSPGTVFYEHYF

SEQ ID NO: 460479 - protein, 14 aa, Homo sapiens
  CDR3 for alpha chain variable domain of TCR clone 230240 (TRAV16, TRAJ33)
CALSAMDSNYQLIW

SEQ ID NO: 460480 - protein, 16 aa, Homo sapiens
  CDR3 for beta chain variable domain of TCR clone 230240 (TRBV25-1, TRBJ2-7)
GASSELTGGGIYEQYF

SEQ ID NO: 460481 - protein, 15 aa, Homo sapiens
  CDR3 for alpha chain variable domain of TCR clone 230241 (TRAV1-1, TRAJ23)
CAVREGDNQGGKLIF

SEQ ID NO: 460482 - protein, 14 aa, Homo sapiens
  CDR3 for beta chain variable domain of TCR clone 230241 (TRBV19, TRBJ2-1)
CASPTFVLSGEQFF

SEQ ID NO: 460483 - protein, 15 aa, Homo sapiens
  CDR3 for alpha chain variable domain of TCR clone 230242 (TRAV8-3, TRAJ27)
CAVGRSKTNAGKSTF

SEQ ID NO: 460484 - protein, 12 aa, Homo sapiens
  CDR3 for beta chain variable domain of TCR clone 230242 (TRBV29-1, TRBJ2-3)
CSVTGGADTQYF

SEQ ID NO: 460485 - protein, 14 aa, Homo sapiens
  CDR3 for alpha chain variable domain of TCR clone 230243 (TRAV12-2, TRAJ17)
CAVLFKAAGNKLTF

SEQ ID NO: 460486 - protein, 16 aa, Homo sapiens
  CDR3 for beta chain variable domain of TCR clone 230243 (TRBV24-1, TRBJ2-5)
CATGKSGLKGRETQYF

SEQ ID NO: 460487 - protein, 11 aa, Homo sapiens
  CDR3 for alpha chain variable domain of TCR clone 230244 (TRAV17, TRAJ43)
CATPRGNDMRF

SEQ ID NO: 460488 - protein, 12 aa, Homo sapiens
  CDR3 for beta chain variable domain of TCR clone 230244 (TRBV4-1, TRBJ2-3)
CASSQGTDTQYF

SEQ ID NO: 460489 - protein, 15 aa, Homo sapiens
  CDR3 for alpha chain variable domain of TCR clone 230245 (TRAV13-2, TRAJ58)
CVTAQKETSGSRLTF

SEQ ID NO: 460490 - protein, 17 aa, Homo sapiens
  CDR3 for beta chain variable domain of TCR clone 230245 (TRBV24-1, TRBJ2-7)
CATRKGLAGGHSYEQYF

SEQ ID NO: 460491 - protein, 14 aa, Homo sapiens
  CDR3 for alpha chain variable domain of TCR clone 230246 (TRAV14/DV4, TRAJ34)
CAMREGRPHRQAHL

SEQ ID NO: 460492 - protein, 16 aa, Homo sapiens
  CDR3 for beta chain variable domain of TCR clone 230246 (TRBV2, TRBJ2-1)
CASSVGGSLSYNEQFF

SEQ ID NO: 460493 - protein, 14 aa, Homo sapiens
  CDR3 for alpha chain variable domain of TCR clone 230247 (TRAV1-2, TRAJ16)
CAVNRFSDGQKLLF

SEQ ID NO: 460494 - protein, 14 aa, Homo sapiens
  CDR3 for beta chain variable domain of TCR clone 230247 (TRBV28, TRBJ1-4)
CASSFGTFDEKLFF

SEQ ID NO: 460495 - protein, 13 aa, Homo sapiens
  CDR3 for alpha chain variable domain of TCR clone 230248 (TRAV12-1, TRAJ6)
CVVFPGGSYIPTF

SEQ ID NO: 460496 - protein, 12 aa, Homo sapiens
  CDR3 for beta chain variable domain of TCR clone 230248 (TRBV11-3, TRBJ1-1)
CASSHRQGEAFF

SEQ ID NO: 460497 - protein, 14 aa, Homo sapiens
  CDR3 for alpha chain variable domain of TCR clone 230249 (TRAV1-2, TRAJ16)
CAVNRFSDGQKLLF

SEQ ID NO: 460498 - protein, 14 aa, Homo sapiens
  CDR3 for beta chain variable domain of TCR clone 230249 (TRBV6-1, TRBJ1-1)
CASSGTGLNTEAFF

SEQ ID NO: 460499 - protein, 15 aa, Homo sapiens
  CDR3 for alpha chain variable domain of TCR clone 230250 (TRAV1-2, TRAJ30)
CAVRPHGNRDDKIIF

SEQ ID NO: 460500 - protein, 13 aa, Homo sapiens
  CDR3 for beta chain variable domain of TCR clone 230250 (TRBV4-1, TRBJ2-7)
FASSQGQAYEQYF

SEQ ID NO: 460501 - protein, 15 aa, Homo sapiens
  CDR3 for alpha chain variable domain of TCR clone 230251 (TRAV2, TRAJ9)
CAVEDRGTGGFKTIF

SEQ ID NO: 460502 - protein, 15 aa, Homo sapiens
  CDR3 for beta chain variable domain of TCR clone 230251 (TRBV12-4, TRBJ2-1)
CASSPLSGRNNEQFF

SEQ ID NO: 460503 - protein, 14 aa, Homo sapiens
  CDR3 for alpha chain variable domain of TCR clone 230252 (TRAV3, TRAJ9)
CAVRLNTGGFKTIF

SEQ ID NO: 460504 - protein, 15 aa, Homo sapiens
  CDR3 for beta chain variable domain of TCR clone 230252 (TRBV7-2, TRBJ2-1)
CASSLASARVNEQFF

SEQ ID NO: 460505 - protein, 17 aa, Homo sapiens
  CDR3 for alpha chain variable domain of TCR clone 230253 (TRAV3, TRAJ6)
CAVRDGPRAGGSYIPTF

SEQ ID NO: 460506 - protein, 12 aa, Homo sapiens
  CDR3 for beta chain variable domain of TCR clone 230253 (TRBV7-3, TRBJ2-5)
CQQLPGGETQYF

SEQ ID NO: 460507 - protein, 11 aa, Homo sapiens
  CDR3 for alpha chain variable domain of TCR clone 230254 (TRAV12-3, TRAJ27)
CAMANAGKSTF

SEQ ID NO: 460508 - protein, 13 aa, Homo sapiens
  CDR3 for beta chain variable domain of TCR clone 230254 (TRBV19, TRBJ1-5)
CASSMRGYQPQHF

SEQ ID NO: 460509 - protein, 13 aa, Homo sapiens
  CDR3 for alpha chain variable domain of TCR clone 230255 (TRAV17, TRAJ5)
CAPMDTGRRALTF

SEQ ID NO: 460510 - protein, 16 aa, Homo sapiens
  CDR3 for beta chain variable domain of TCR clone 230255 (TRBV7-3, TRBJ2-1)
CASSLEGYRSYNEQFF

SEQ ID NO: 460511 - protein, 15 aa, Homo sapiens
  CDR3 for alpha chain variable domain of TCR clone 230256 (TRAV12-3, TRAJ49)
CAMAVTPNTGNQFFF

SEQ ID NO: 460512 - protein, 18 aa, Homo sapiens
  CDR3 for beta chain variable domain of TCR clone 230256 (TRBV4-1, TRBJ1-5)
CASSQDPRVQGLNQPQHF

SEQ ID NO: 460513 - protein, 16 aa, Homo sapiens
  CDR3 for alpha chain variable domain of TCR clone 230257 (TRAV3, TRAJ10)
CAVRDMRAGGGNKLIF

SEQ ID NO: 460514 - protein, 13 aa, Homo sapiens
  CDR3 for beta chain variable domain of TCR clone 230257 (TRBV7-9, TRBJ1-2)
CASSLKQSYGYTF

SEQ ID NO: 460515 - protein, 14 aa, Homo sapiens
  CDR3 for alpha chain variable domain of TCR clone 230258 (TRAV2, TRAJ23)
CAVGLRNQGGKLIF

SEQ ID NO: 460516 - protein, 16 aa, Homo sapiens
  CDR3 for beta chain variable domain of TCR clone 230258 (TRBV19, TRBJ2-1)
CASSKAGPSSYNEQFF

SEQ ID NO: 460517 - protein, 15 aa, Homo sapiens
  CDR3 for alpha chain variable domain of TCR clone 230259 (TRAV35, TRAJ58)
CAGRLQETSGSRLTF

SEQ ID NO: 460518 - protein, 11 aa, Homo sapiens
  CDR3 for beta chain variable domain of TCR clone 230259 (TRBV11-2, TRBJ1-1)
CASSINTEAFF

SEQ ID NO: 460519 - protein, 14 aa, Homo sapiens
  CDR3 for alpha chain variable domain of TCR clone 230260 (TRAV12-2, TRAJ13)
CAVKKTGGYQKVTL

SEQ ID NO: 460520 - protein, 12 aa, Homo sapiens
  CDR3 for beta chain variable domain of TCR clone 230260 (TRBV12-4, TRBJ1-2)
CASSFIWLHLRF

SEQ ID NO: 460521 - protein, 14 aa, Homo sapiens
  CDR3 for alpha chain variable domain of TCR clone 230261 (TRAV12-2, TRAJ13)
CAVKKTGGYEKVTF

SEQ ID NO: 460522 - protein, 12 aa, Homo sapiens
  CDR3 for beta chain variable domain of TCR clone 230261 (TRBV29-1, TRBJ1-1)
CSESDGNTEAFF

SEQ ID NO: 460523 - protein, 14 aa, Homo sapiens
  CDR3 for alpha chain variable domain of TCR clone 230262 (TRAV12-3, TRAJ10)
SHLPLTGGGNKLTF

SEQ ID NO: 460524 - protein, 17 aa, Homo sapiens
  CDR3 for beta chain variable domain of TCR clone 230262 (TRBV13, TRBJ2-3)
CASSRSRVAGGRNTQYF

SEQ ID NO: 460525 - protein, 13 aa, Homo sapiens
  CDR3 for alpha chain variable domain of TCR clone 230263 (TRAV13-1, TRAJ5)
CAARVTGRIALTF

SEQ ID NO: 460526 - protein, 12 aa, Homo sapiens
  CDR3 for beta chain variable domain of TCR clone 230263 (TRBV3-1, TRBJ2-5)
CASSQRGETQYF

SEQ ID NO: 460527 - protein, 13 aa, Homo sapiens
  CDR3 for alpha chain variable domain of TCR clone 230264 (TRAV2, TRAJ15)
CAVASQAGTALIF

SEQ ID NO: 460528 - protein, 12 aa, Homo sapiens
  CDR3 for beta chain variable domain of TCR clone 230264 (TRBV19, TRBJ1-1)
CASSIGTEEAFF

SEQ ID NO: 460529 - protein, 14 aa, Homo sapiens
  CDR3 for alpha chain variable domain of TCR clone 230265 (TRAV8-3, TRAJ4)
CAVGEAGGYNKLIF

SEQ ID NO: 460530 - protein, 15 aa, Homo sapiens
  CDR3 for beta chain variable domain of TCR clone 230265 (TRBV6-5, TRBJ2-1)
CANSYDAGAGNEQFF

SEQ ID NO: 460531 - protein, 11 aa, Homo sapiens
  CDR3 for alpha chain variable domain of TCR clone 230266 (TRAV2, TRAJ33)
CAVDSNYQLIS

SEQ ID NO: 460532 - protein, 15 aa, Homo sapiens
  CDR3 for beta chain variable domain of TCR clone 230266 (TRBV19, TRBJ1-2)
CASSVGQVLNYGYTF

SEQ ID NO: 460533 - protein, 14 aa, Homo sapiens
  CDR3 for alpha chain variable domain of TCR clone 230267 (TRAV8-2, TRAJ45)
CVVSAGGGADGLTF

SEQ ID NO: 460534 - protein, 12 aa, Homo sapiens
  CDR3 for beta chain variable domain of TCR clone 230267 (TRBV12-4, TRBJ2-1)
CASSLVRVEQIV

SEQ ID NO: 460535 - protein, 13 aa, Homo sapiens
  CDR3 for alpha chain variable domain of TCR clone 230268 (TRAV12-1, TRAJ34)
CVVTGYNTDKLIF

SEQ ID NO: 460536 - protein, 13 aa, Homo sapiens
  CDR3 for beta chain variable domain of TCR clone 230268 (TRBV7-2, TRBJ2-4)
CASSREHANIQYF

SEQ ID NO: 460537 - protein, 11 aa, Homo sapiens
  CDR3 for alpha chain variable domain of TCR clone 230269 (TRAV27, TRAJ20)
CAGADDYKLSF

SEQ ID NO: 460538 - protein, 16 aa, Homo sapiens
  CDR3 for beta chain variable domain of TCR clone 230269 (TRBV3-1, TRBJ2-7)
CASSQGATGVAYEQYF

SEQ ID NO: 460539 - protein, 12 aa, Homo sapiens
  CDR3 for alpha chain variable domain of TCR clone 230270 (TRAV13-2, TRAJ23)
CAERHRGGKLIF

SEQ ID NO: 460540 - protein, 15 aa, Homo sapiens
  CDR3 for beta chain variable domain of TCR clone 230270 (TRBV4-2, TRBJ2-7)
CASSQVDRSSYEQYF

SEQ ID NO: 460541 - protein, 15 aa, Homo sapiens
  CDR3 for alpha chain variable domain of TCR clone 230271 (TRAV12-2, TRAJ53)
CAVNGGGGSNYKLTF

SEQ ID NO: 460542 - protein, 16 aa, Homo sapiens
  CDR3 for beta chain variable domain of TCR clone 230271 (TRBV7-3, TRBJ2-2)
CASSLKRGTLSGELLF

SEQ ID NO: 460543 - protein, 15 aa, Homo sapiens
  CDR3 for alpha chain variable domain of TCR clone 230272 (TRAV20, TRAJ6)
CAVRLQSGGSYTPTF

SEQ ID NO: 460544 - protein, 14 aa, Homo sapiens
  CDR3 for beta chain variable domain of TCR clone 230272 (TRBV12-4, TRBJ2-7)
CASSASGGWYEQYF

SEQ ID NO: 460545 - protein, 14 aa, Homo sapiens
  CDR3 for alpha chain variable domain of TCR clone 230273 (TRAV1-2, TRAJ8)
CAVREDTGFQKIVF

SEQ ID NO: 460546 - protein, 15 aa, Homo sapiens
  CDR3 for beta chain variable domain of TCR clone 230273 (TRBV6-5, TRBJ1-6)
CASSLGQGFRSPLHF

SEQ ID NO: 460547 - protein, 18 aa, Homo sapiens
  CDR3 for alpha chain variable domain of TCR clone 230274 (TRAV13-1, TRAJ52)
CAAKNPNAGGTSYGKLTF

SEQ ID NO: 460548 - protein, 14 aa, Homo sapiens
  CDR3 for beta chain variable domain of TCR clone 230274 (TRBV6-1, TRBJ2-1)
CASAKDGFYNEQFF

SEQ ID NO: 460549 - protein, 14 aa, Homo sapiens
  CDR3 for alpha chain variable domain of TCR clone 230275 (TRAV1-2, TRAJ16)
CAVNRFSDGQKLLF

SEQ ID NO: 460550 - protein, 13 aa, Homo sapiens
  CDR3 for beta chain variable domain of TCR clone 230275 (TRBV7-9, TRBJ1-2)
CGSSLKQNYGYTF

SEQ ID NO: 460551 - protein, 15 aa, Homo sapiens
  CDR3 for alpha chain variable domain of TCR clone 230276 (TRAV2, TRAJ15)
CAVEDRKKAGTALIF

SEQ ID NO: 460552 - protein, 16 aa, Homo sapiens
  CDR3 for beta chain variable domain of TCR clone 230276 (TRBV7-3, TRBJ2-2)
CASSLKRGTLSGELFF

SEQ ID NO: 460553 - protein, 15 aa, Homo sapiens
  CDR3 for alpha chain variable domain of TCR clone 230277 (TRAV29/DV5, TRAJ29)
CAASERSSGNTPLVF

SEQ ID NO: 460554 - protein, 19 aa, Homo sapiens
  CDR3 for beta chain variable domain of TCR clone 230277 (TRBV25-1, TRBJ2-2)
CAILVYRVDRGRKTGELFF

SEQ ID NO: 460555 - protein, 12 aa, Homo sapiens
  CDR3 for alpha chain variable domain of TCR clone 230278 (TRAV3, TRAJ20)
CAVRDGDYKLSF

SEQ ID NO: 460556 - protein, 14 aa, Homo sapiens
  CDR3 for beta chain variable domain of TCR clone 230278 (TRBV29-1, TRBJ2-2)
CSVLAETNTGELFF

SEQ ID NO: 460557 - protein, 17 aa, Homo sapiens
  CDR3 for alpha chain variable domain of TCR clone 230279 (TRAV3, TRAJ13)
CAVRAIRRTGGYQKVTF

SEQ ID NO: 460558 - protein, 13 aa, Homo sapiens
  CDR3 for beta chain variable domain of TCR clone 230279 (TRBV19, TRBJ1-2)
CASSVPGQDGYTF

SEQ ID NO: 460559 - protein, 14 aa, Homo sapiens
  CDR3 for alpha chain variable domain of TCR clone 230280 (TRAV12-1, TRAJ46)
CVVTAKSSGHKLTF

SEQ ID NO: 460560 - protein, 17 aa, Homo sapiens
  CDR3 for beta chain variable domain of TCR clone 230280 (TRBV4-1, TRBJ2-3)
CASSQDPAGGPLDTQYF

SEQ ID NO: 460561 - protein, 15 aa, Homo sapiens
  CDR3 for alpha chain variable domain of TCR clone 230281 (TRAV34, TRAJ38)
CGADFTPGNNRKVIC

SEQ ID NO: 460562 - protein, 14 aa, Homo sapiens
  CDR3 for beta chain variable domain of TCR clone 230281 (TRBV12-5, TRBJ2-5)
CASGSRTHQETQYF

SEQ ID NO: 460563 - protein, 15 aa, Homo sapiens
  CDR3 for alpha chain variable domain of TCR clone 230282 (TRAV26-1, TRAJ17)
CIVRVVKAAGNKLTF

SEQ ID NO: 460564 - protein, 15 aa, Homo sapiens
  CDR3 for beta chain variable domain of TCR clone 230282 (TRBV12-4, TRBJ2-7)
CASSLGSGGPYEQYF

SEQ ID NO: 460565 - protein, 14 aa, Homo sapiens
  CDR3 for alpha chain variable domain of TCR clone 230283 (TRAV8-2, TRAJ37)
CVVSLTGNTGNLIF

SEQ ID NO: 460566 - protein, 17 aa, Homo sapiens
  CDR3 for beta chain variable domain of TCR clone 230283 (TRBV7-8, TRBJ2-6)
CASSAGTGGAGANVLTF

SEQ ID NO: 460567 - protein, 14 aa, Homo sapiens
  CDR3 for alpha chain variable domain of TCR clone 230284 (TRAV1-2, TRAJ16)
CAVNRFSDGQKLLF

SEQ ID NO: 460568 - protein, 15 aa, Homo sapiens
  CDR3 for beta chain variable domain of TCR clone 230284 (TRBV15, TRBJ2-3)
CATSRDPRGTDTQYF

SEQ ID NO: 460569 - protein, 14 aa, Homo sapiens
  CDR3 for alpha chain variable domain of TCR clone 230285 (TRAV8-3, TRAJ30)
CAVGDMNRDDKIIF

SEQ ID NO: 460570 - protein, 17 aa, Homo sapiens
  CDR3 for beta chain variable domain of TCR clone 230285 (TRBV19, TRBJ2-2)
RASSRNPGGFGTGELFF

SEQ ID NO: 460571 - protein, 16 aa, Homo sapiens
  CDR3 for alpha chain variable domain of TCR clone 230286 (TRAV12-3, TRAJ53)
CAMSVGSGGSTYKLTF

SEQ ID NO: 460572 - protein, 13 aa, Homo sapiens
  CDR3 for beta chain variable domain of TCR clone 230286 (TRBV7-6, TRBJ1-2)
CASSLVADYGYTF

SEQ ID NO: 460573 - protein, 15 aa, Homo sapiens
  CDR3 for alpha chain variable domain of TCR clone 230287 (TRAV12-3, TRAJ6)
CAMSAKTGGSYIPTF

SEQ ID NO: 460574 - protein, 19 aa, Homo sapiens
  CDR3 for beta chain variable domain of TCR clone 230287 (TRBV25-1, TRBJ2-2)
CAILVYRVDRGRKTGELFF

SEQ ID NO: 460575 - protein, 14 aa, Homo sapiens
  CDR3 for alpha chain variable domain of TCR clone 230288 (TRAV12-2, TRAJ13)
CAVKKTVGYGKVTF

SEQ ID NO: 460576 - protein, 15 aa, Homo sapiens
  CDR3 for beta chain variable domain of TCR clone 230288 (TRBV20-1, TRBJ2-7)
CSAESGTSGAYEQYF

SEQ ID NO: 460577 - protein, 18 aa, Homo sapiens
  CDR3 for alpha chain variable domain of TCR clone 230289 (TRAV26-2, TRAJ54)
CILIDVEVGIQGAQKLVF

SEQ ID NO: 460578 - protein, 16 aa, Homo sapiens
  CDR3 for beta chain variable domain of TCR clone 230289 (TRBV6-1, TRBJ2-5)
CASSETLDRGAETQYF

SEQ ID NO: 460579 - protein, 10 aa, Homo sapiens
  CDR3 for alpha chain variable domain of TCR clone 230290 (TRAV8-4, TRAJ39)
CAVAGNMLTF

SEQ ID NO: 460580 - protein, 15 aa, Homo sapiens
  CDR3 for beta chain variable domain of TCR clone 230290 (TRBV6-1, TRBJ2-1)
CASSELRGQYNEQFF

SEQ ID NO: 460581 - protein, 17 aa, Homo sapiens
  CDR3 for alpha chain variable domain of TCR clone 230291 (TRAV1-1, TRAJ28)
CAVDPAYSGAGSFQLTF

SEQ ID NO: 460582 - protein, 14 aa, Homo sapiens
  CDR3 for beta chain variable domain of TCR clone 230291 (TRBV19, TRBJ2-1)
CASPTFVLSGEQFF

SEQ ID NO: 460583 - protein, 16 aa, Homo sapiens
  CDR3 for alpha chain variable domain of TCR clone 230292 (TRAV12-2, TRAJ52)
CRLANAGGPSYGKLTF

SEQ ID NO: 460584 - protein, 14 aa, Homo sapiens
  CDR3 for beta chain variable domain of TCR clone 230292 (TRBV7-6, TRBJ2-3)
CASSLGTVTDTQYF

SEQ ID NO: 460585 - protein, 14 aa, Homo sapiens
  CDR3 for alpha chain variable domain of TCR clone 230293 (TRAV17, TRAJ12)
CAILPMDSSYKLIF

SEQ ID NO: 460586 - protein, 14 aa, Homo sapiens
  CDR3 for beta chain variable domain of TCR clone 230293 (TRBV19, TRBJ2-5)
CASSMTGQQETQYF

SEQ ID NO: 460587 - protein, 14 aa, Homo sapiens
  CDR3 for alpha chain variable domain of TCR clone 230294 (TRAV12-2, TRAJ5)
CAVKGDTGRRALTF

SEQ ID NO: 460588 - protein, 15 aa, Homo sapiens
  CDR3 for beta chain variable domain of TCR clone 230294 (TRBV7-8, TRBJ2-5)
CASSDAAGSQETQYF

SEQ ID NO: 460589 - protein, 16 aa, Homo sapiens
  CDR3 for alpha chain variable domain of TCR clone 230295 (TRAV17, TRAJ54)
CATDSDIIQGAQKLVF

SEQ ID NO: 460590 - protein, 15 aa, Homo sapiens
  CDR3 for beta chain variable domain of TCR clone 230295 (TRBV7-8, TRBJ2-1)
CASSLADSLYNEQFF

SEQ ID NO: 460591 - protein, 13 aa, Homo sapiens
  CDR3 for alpha chain variable domain of TCR clone 230296 (TRAV1-2, TRAJ31)
CAVRPNNNARLMF

SEQ ID NO: 460592 - protein, 16 aa, Homo sapiens
  CDR3 for beta chain variable domain of TCR clone 230296 (TRBV12-4, TRBJ2-3)
CASSPETGGFSDTQYF

SEQ ID NO: 460593 - protein, 13 aa, Homo sapiens
  CDR3 for alpha chain variable domain of TCR clone 230297 (TRAV27, TRAJ6)
CAVASGGSYIPTF

SEQ ID NO: 460594 - protein, 14 aa, Homo sapiens
  CDR3 for beta chain variable domain of TCR clone 230297 (TRBV5-4, TRBJ2-2)
CASRLDGGTGELFF

SEQ ID NO: 460595 - protein, 17 aa, Homo sapiens
  CDR3 for alpha chain variable domain of TCR clone 230298 (TRAV3, TRAJ42)
CAVRDRDYGGSQGNLIF

SEQ ID NO: 460596 - protein, 15 aa, Homo sapiens
  CDR3 for beta chain variable domain of TCR clone 230298 (TRBV6-6, TRBJ2-7)
CARSYSYGGSYEQYF

SEQ ID NO: 460597 - protein, 14 aa, Homo sapiens
  CDR3 for alpha chain variable domain of TCR clone 230299 (TRAV12-2, TRAJ45)
CALPERGGADGLNF

SEQ ID NO: 460598 - protein, 14 aa, Homo sapiens
  CDR3 for beta chain variable domain of TCR clone 230299 (TRBV18, TRBJ1-5)
CASSPGNSNQPQHF

SEQ ID NO: 460599 - protein, 14 aa, Homo sapiens
  CDR3 for alpha chain variable domain of TCR clone 230300 (TRAV13-1, TRAJ21)
CAAKEGLTNFTLDL

SEQ ID NO: 460600 - protein, 13 aa, Homo sapiens
  CDR3 for beta chain variable domain of TCR clone 230300 (TRBV19, TRBJ2-7)
CASSPRQSYEQYF

SEQ ID NO: 460601 - protein, 14 aa, Homo sapiens
  CDR3 for alpha chain variable domain of TCR clone 230301 (TRAV3, TRAJ13)
CAVSYSGGYQKVTF

SEQ ID NO: 460602 - protein, 13 aa, Homo sapiens
  CDR3 for beta chain variable domain of TCR clone 230301 (TRBV24-1, TRBJ2-2)
CATSDWSTGELFF

SEQ ID NO: 460603 - protein, 12 aa, Homo sapiens
  CDR3 for alpha chain variable domain of TCR clone 230302 (TRAV3, TRAJ27)
CAVRDKAGKSTF

SEQ ID NO: 460604 - protein, 14 aa, Homo sapiens
  CDR3 for beta chain variable domain of TCR clone 230302 (TRBV5-1, TRBJ1-2)
CASSVDSTNYGYIF

SEQ ID NO: 460605 - protein, 15 aa, Homo sapiens
  CDR3 for alpha chain variable domain of TCR clone 230303 (TRAV3, TRAJ3)
CAVRDRDSSASKIIF

SEQ ID NO: 460606 - protein, 17 aa, Homo sapiens
  CDR3 for beta chain variable domain of TCR clone 230303 (TRBV28, TRBJ2-5)
CASSTPEGDALQETQYF

SEQ ID NO: 460607 - protein, 14 aa, Homo sapiens
  CDR3 for alpha chain variable domain of TCR clone 230304 (TRAV8-3, TRAJ4)
CAVGASGGYNKLIF

SEQ ID NO: 460608 - protein, 13 aa, Homo sapiens
  CDR3 for beta chain variable domain of TCR clone 230304 (TRBV7-7, TRBJ1-1)
CASSLGANTEAFF

SEQ ID NO: 460609 - protein, 17 aa, Homo sapiens
  CDR3 for alpha chain variable domain of TCR clone 230305 (TRAV3, TRAJ12)
CAVRDGGRMDSSYKLIF

SEQ ID NO: 460610 - protein, 15 aa, Homo sapiens
  CDR3 for beta chain variable domain of TCR clone 230305 (TRBV4-1, TRBJ1-4)
CASSYTGGTNEKLFF

SEQ ID NO: 460611 - protein, 15 aa, Homo sapiens
  CDR3 for alpha chain variable domain of TCR clone 230306 (TRAV17, TRAJ56)
CATDANTGDNSKLTF

SEQ ID NO: 460612 - protein, 16 aa, Homo sapiens
  CDR3 for beta chain variable domain of TCR clone 230306 (TRBV7-3, TRBJ2-2)
CASSLKRGTLSGELFF

SEQ ID NO: 460613 - protein, 13 aa, Homo sapiens
  CDR3 for alpha chain variable domain of TCR clone 230307 (TRAV35, TRAJ33)
CAGQLYGVYQLIW

SEQ ID NO: 460614 - protein, 13 aa, Homo sapiens
  CDR3 for beta chain variable domain of TCR clone 230307 (TRBV7-3, TRBJ1-1)
CASSQDWGAEAFF

SEQ ID NO: 460615 - protein, 15 aa, Homo sapiens
  CDR3 for alpha chain variable domain of TCR clone 230308 (TRAV26-1, TRAJ40)
CIVSFATSGTYKYIF

SEQ ID NO: 460616 - protein, 15 aa, Homo sapiens
  CDR3 for beta chain variable domain of TCR clone 230308 (TRBV5-6, TRBJ2-3)
CASSPGLATTDTQYF

SEQ ID NO: 460617 - protein, 13 aa, Homo sapiens
  CDR3 for alpha chain variable domain of TCR clone 230309 (TRAV12-3, TRAJ20)
CAMRRSNDYKLSF

SEQ ID NO: 460618 - protein, 14 aa, Homo sapiens
  CDR3 for beta chain variable domain of TCR clone 230309 (TRBV9, TRBJ2-3)
CASSLGTVTDTQYF

SEQ ID NO: 460619 - protein, 10 aa, Homo sapiens
  CDR3 for alpha chain variable domain of TCR clone 230310 (TRAV36/DV7, TRAJ48)
CAVGNEKLTF

SEQ ID NO: 460620 - protein, 16 aa, Homo sapiens
  CDR3 for beta chain variable domain of TCR clone 230310 (TRBV11-2, TRBJ2-7)
CASSPTTGGVSYEQYF

SEQ ID NO: 460621 - protein, 11 aa, Homo sapiens
  CDR3 for alpha chain variable domain of TCR clone 230311 (TRAV21, TRAJ17)
CAAPAGNKLTF

SEQ ID NO: 460622 - protein, 14 aa, Homo sapiens
  CDR3 for beta chain variable domain of TCR clone 230311 (TRBV2, TRBJ2-5)
CASSEVLAQETQYF

SEQ ID NO: 460623 - protein, 13 aa, Homo sapiens
  CDR3 for alpha chain variable domain of TCR clone 230312 (TRAV8-3, TRAJ43)
CAVVPYNNNDMRF

SEQ ID NO: 460624 - protein, 17 aa, Homo sapiens
  CDR3 for beta chain variable domain of TCR clone 230312 (TRBV7-7, TRBJ1-1)
CARIGDRPNLGVTEAFF

SEQ ID NO: 460625 - protein, 15 aa, Homo sapiens
  CDR3 for alpha chain variable domain of TCR clone 230313 (TRAV8-3, TRAJ45)
CASSYSGGGDDGLTF

SEQ ID NO: 460626 - protein, 13 aa, Homo sapiens
  CDR3 for beta chain variable domain of TCR clone 230313 (TRBV20-1, TRBJ1-1)
CSAFDKENTEAFF

SEQ ID NO: 460627 - protein, 10 aa, Homo sapiens
  CDR3 for alpha chain variable domain of TCR clone 230314 (TRAV8-4, TRAJ43)
CAVSADDMRF

SEQ ID NO: 460628 - protein, 15 aa, Homo sapiens
  CDR3 for beta chain variable domain of TCR clone 230314 (TRBV2, TRBJ2-1)
CASSELAGSYNEQFF

SEQ ID NO: 460629 - protein, 12 aa, Homo sapiens
  CDR3 for alpha chain variable domain of TCR clone 230315 (TRAV21, TRAJ3)
CCFYSSASKIIF

SEQ ID NO: 460630 - protein, 15 aa, Homo sapiens
  CDR3 for beta chain variable domain of TCR clone 230315 (TRBV20-1, TRBJ2-7)
CSARDRVSGMDEQYL

SEQ ID NO: 460631 - protein, 12 aa, Homo sapiens
  CDR3 for alpha chain variable domain of TCR clone 230316 (TRAV21, TRAJ33)
CAKMDSNYQLIW

SEQ ID NO: 460632 - protein, 13 aa, Homo sapiens
  CDR3 for beta chain variable domain of TCR clone 230316 (TRBV10-2, TRBJ2-5)
CASSEGGKETQYF

SEQ ID NO: 460633 - protein, 15 aa, Homo sapiens
  CDR3 for alpha chain variable domain of TCR clone 230317 (TRAV8-3, TRAJ45)
FASSYSGGGADGLTC

SEQ ID NO: 460634 - protein, 13 aa, Homo sapiens
  CDR3 for beta chain variable domain of TCR clone 230317 (TRBV10-3, TRBJ2-7)
CASKLAVNYEQYF

SEQ ID NO: 460635 - protein, 14 aa, Homo sapiens
  CDR3 for alpha chain variable domain of TCR clone 230318 (TRAV2, TRAJ22)
CAPLPGGFCKATDL

SEQ ID NO: 460636 - protein, 14 aa, Homo sapiens
  CDR3 for beta chain variable domain of TCR clone 230318 (TRBV7-6, TRBJ2-3)
CASSLGTVTDTQYF

SEQ ID NO: 460637 - protein, 15 aa, Homo sapiens
  CDR3 for alpha chain variable domain of TCR clone 230319 (TRAV12-2, TRAJ53)
CAVNGGGGSNYKLTF

SEQ ID NO: 460638 - protein, 17 aa, Homo sapiens
  CDR3 for beta chain variable domain of TCR clone 230319 (TRBV20-1, TRBJ2-1)
CSASSSGLAGAYNEQFF

SEQ ID NO: 460639 - protein, 14 aa, Homo sapiens
  CDR3 for alpha chain variable domain of TCR clone 230320 (TRAV12-3, TRAJ10)
SHLPLTGGGNKITF

SEQ ID NO: 460640 - protein, 15 aa, Homo sapiens
  CDR3 for beta chain variable domain of TCR clone 230320 (TRBV7-9, TRBJ1-4)
CASSRTGGFNEKLFF

SEQ ID NO: 460641 - protein, 12 aa, Homo sapiens
  CDR3 for alpha chain variable domain of TCR clone 230321 (TRAV12-1, TRAJ40)
CVVYSGTYKYIF

SEQ ID NO: 460642 - protein, 14 aa, Homo sapiens
  CDR3 for beta chain variable domain of TCR clone 230321 (TRBV12-4, TRBJ1-1)
CASSLGTGGTEVFF

SEQ ID NO: 460643 - protein, 13 aa, Homo sapiens
  CDR3 for alpha chain variable domain of TCR clone 230322 (TRAV8-6, TRAJ8)
CAVSNTGFQKLVF

SEQ ID NO: 460644 - protein, 15 aa, Homo sapiens
  CDR3 for beta chain variable domain of TCR clone 230322 (TRBV28, TRBJ2-5)
CASSSGRTKQETQYF

SEQ ID NO: 460645 - protein, 13 aa, Homo sapiens
  CDR3 for alpha chain variable domain of TCR clone 230323 (TRAV12-2, TRAJ20)
CAVNRFDDYKLSL

SEQ ID NO: 460646 - protein, 12 aa, Homo sapiens
  CDR3 for beta chain variable domain of TCR clone 230323 (TRBV19, TRBJ2-1)
CASSQISNEQFF

SEQ ID NO: 460647 - protein, 12 aa, Homo sapiens
  CDR3 for alpha chain variable domain of TCR clone 230324 (TRAV38-1, TRAJ32)
CAPLGATNKLIF

SEQ ID NO: 460648 - protein, 14 aa, Homo sapiens
  CDR3 for beta chain variable domain of TCR clone 230324 (TRBV29-1, TRBJ2-5)
CSVEASGSGENQYF

SEQ ID NO: 460649 - protein, 14 aa, Homo sapiens
  CDR3 for alpha chain variable domain of TCR clone 230325 (TRAV8-4, TRAJ5)
CAVSTDTGRRALTF

SEQ ID NO: 460650 - protein, 15 aa, Homo sapiens
  CDR3 for beta chain variable domain of TCR clone 230325 (TRBV20-1, TRBJ2-7)
CSARDRVSGMDEQYF

SEQ ID NO: 460651 - protein, 16 aa, Homo sapiens
  CDR3 for alpha chain variable domain of TCR clone 230326 (TRAV13-2, TRAJ53)
CAENANSGGSNYKLTF

SEQ ID NO: 460652 - protein, 19 aa, Homo sapiens
  CDR3 for beta chain variable domain of TCR clone 230326 (TRBV28, TRBJ2-7)
CASSYSGTSRLGWVYVQYF

SEQ ID NO: 460653 - protein, 13 aa, Homo sapiens
  CDR3 for alpha chain variable domain of TCR clone 230327 (TRAV21, TRAJ27)
CAALNTNAGKSTF

SEQ ID NO: 460654 - protein, 13 aa, Homo sapiens
  CDR3 for beta chain variable domain of TCR clone 230327 (TRBV27, TRBJ1-1)
CARLLSGLSEAFF

SEQ ID NO: 460655 - protein, 14 aa, Homo sapiens
  CDR3 for alpha chain variable domain of TCR clone 230328 (TRAV8-3, TRAJ15)
CAVGRHQAGTALIF

SEQ ID NO: 460656 - protein, 14 aa, Homo sapiens
  CDR3 for beta chain variable domain of TCR clone 230328 (TRBV12-5, TRBJ2-5)
CASGSRTHQETQYF

SEQ ID NO: 460657 - protein, 16 aa, Homo sapiens
  CDR3 for alpha chain variable domain of TCR clone 230329 (TRAV12-2, TRAJ32)
CAVNLGQGGATTKPIF

SEQ ID NO: 460658 - protein, 15 aa, Homo sapiens
  CDR3 for beta chain variable domain of TCR clone 230329 (TRBV20-1, TRBJ2-7)
CSARGPLAGGREQYF

SEQ ID NO: 460659 - protein, 14 aa, Homo sapiens
  CDR3 for alpha chain variable domain of TCR clone 230330 (TRAV12-3, TRAJ10)
SHLPLTGGGNKLTF

SEQ ID NO: 460660 - protein, 14 aa, Homo sapiens
  CDR3 for beta chain variable domain of TCR clone 230330 (TRBV6-1, TRBJ1-3)
CASVEGGGGNTIYF

SEQ ID NO: 460661 - protein, 12 aa, Homo sapiens
  CDR3 for alpha chain variable domain of TCR clone 230331 (TRAV12-3, TRAJ42)
CAPGGSQGNLIF

SEQ ID NO: 460662 - protein, 15 aa, Homo sapiens
  CDR3 for beta chain variable domain of TCR clone 230331 (TRBV5-1, TRBJ2-1)
CASKGLAGVYNEQFF

SEQ ID NO: 460663 - protein, 12 aa, Homo sapiens
  CDR3 for alpha chain variable domain of TCR clone 230332 (TRAV16, TRAJ9)
CALRAGGFKTIF

SEQ ID NO: 460664 - protein, 13 aa, Homo sapiens
  CDR3 for beta chain variable domain of TCR clone 230332 (TRBV4-3, TRBJ1-1)
CDSSQVEGSMAFF

SEQ ID NO: 460665 - protein, 11 aa, Homo sapiens
  CDR3 for alpha chain variable domain of TCR clone 230333 (TRAV2, TRAJ33)
CAEDSNYQLIW

SEQ ID NO: 460666 - protein, 14 aa, Homo sapiens
  CDR3 for beta chain variable domain of TCR clone 230333 (TRBV11-2, TRBJ2-3)
CASSRLARTDTQYF

SEQ ID NO: 460667 - protein, 15 aa, Homo sapiens
  CDR3 for alpha chain variable domain of TCR clone 230334 (TRAV26-1, TRAJ29)
CIVRVEGSGNTPLVF

SEQ ID NO: 460668 - protein, 14 aa, Homo sapiens
  CDR3 for beta chain variable domain of TCR clone 230334 (TRBV25-1, TRBJ1-1)
CASTHLGGNTEAFC

SEQ ID NO: 460669 - protein, 17 aa, Homo sapiens
  CDR3 for alpha chain variable domain of TCR clone 230335 (TRAV2, TRAJ32)
CAVEDLNYGGATNKLIF

SEQ ID NO: 460670 - protein, 14 aa, Homo sapiens
  CDR3 for beta chain variable domain of TCR clone 230335 (TRBV18, TRBJ2-7)
CASSPRGGAYEQYF

SEQ ID NO: 460671 - protein, 13 aa, Homo sapiens
  CDR3 for alpha chain variable domain of TCR clone 230336 (TRAV29/DV5, TRAJ31)
CAASRNNNARLMF

SEQ ID NO: 460672 - protein, 13 aa, Homo sapiens
  CDR3 for beta chain variable domain of TCR clone 230336 (TRBV7-2, TRBJ2-4)
CASRREHANIQYF

SEQ ID NO: 460673 - protein, 12 aa, Homo sapiens
  CDR3 for alpha chain variable domain of TCR clone 230337 (TRAV1-1, TRAJ20)
CAVKEDDYKLSF

SEQ ID NO: 460674 - protein, 18 aa, Homo sapiens
  CDR3 for beta chain variable domain of TCR clone 230337 (TRBV20-1, TRBJ2-3)
CSASGLAGGPGTTDTQYF

SEQ ID NO: 460675 - protein, 17 aa, Homo sapiens
  CDR3 for alpha chain variable domain of TCR clone 230338 (TRAV13-1, TRAJ52)
CAASSGAGGTSYGKLTF

SEQ ID NO: 460676 - protein, 11 aa, Homo sapiens
  CDR3 for beta chain variable domain of TCR clone 230338 (TRBV29-1, TRBJ2-5)
CSEGRTGTQYF

SEQ ID NO: 460677 - protein, 14 aa, Homo sapiens
  CDR3 for alpha chain variable domain of TCR clone 230339 (TRAV36/DV7, TRAJ16)
CAVEADSDSQKLLF

SEQ ID NO: 460678 - protein, 15 aa, Homo sapiens
  CDR3 for beta chain variable domain of TCR clone 230339 (TRBV5-4, TRBJ2-3)
CATKSSGGALDTQYF

SEQ ID NO: 460679 - protein, 16 aa, Homo sapiens
  CDR3 for alpha chain variable domain of TCR clone 230340 (TRAV12-2, TRAJ10)
CAVNRVLTGGGNKLTF

SEQ ID NO: 460680 - protein, 12 aa, Homo sapiens
  CDR3 for beta chain variable domain of TCR clone 230340 (TRBV28, TRBJ2-7)
CASSFSSYEQYF

SEQ ID NO: 460681 - protein, 16 aa, Homo sapiens
  CDR3 for alpha chain variable domain of TCR clone 230341 (TRAV12-3, TRAJ53)
CAMSPGSGGSNYKLTF

SEQ ID NO: 460682 - protein, 13 aa, Homo sapiens
  CDR3 for beta chain variable domain of TCR clone 230341 (TRBV28, TRBJ2-7)
CASSPSGTYEQYF

SEQ ID NO: 460683 - protein, 21 aa, Homo sapiens
  CDR3 for alpha chain variable domain of TCR clone 230342 (TRAV8-4, TRAJ47)
HLTKPSAHMSDAAERGNKLVF

SEQ ID NO: 460684 - protein, 14 aa, Homo sapiens
  CDR3 for beta chain variable domain of TCR clone 230342 (TRBV7-9, TRBJ2-1)
CASSPRNSLYEQFF

SEQ ID NO: 460685 - protein, 15 aa, Homo sapiens
  CDR3 for alpha chain variable domain of TCR clone 230343 (TRAV3, TRAJ5)
CAVRDLDTGRRALTF

SEQ ID NO: 460686 - protein, 16 aa, Homo sapiens
  CDR3 for beta chain variable domain of TCR clone 230343 (TRBV5-1, TRBJ1-1)
CASSSGGNSLNTEAFF

SEQ ID NO: 460687 - protein, 16 aa, Homo sapiens
  CDR3 for alpha chain variable domain of TCR clone 230344 (TRAV22, TRAJ45)
CAVERGKRGGSDGPTF

SEQ ID NO: 460688 - protein, 13 aa, Homo sapiens
  CDR3 for beta chain variable domain of TCR clone 230344 (TRBV27, TRBJ1-1)
CASSLSIGAEAFF

SEQ ID NO: 460689 - protein, 14 aa, Homo sapiens
  CDR3 for alpha chain variable domain of TCR clone 230345 (TRAV17, TRAJ49)
CATDARDTGNQFYF

SEQ ID NO: 460690 - protein, 15 aa, Homo sapiens
  CDR3 for beta chain variable domain of TCR clone 230345 (TRBV18, TRBJ1-1)
CASSDRGTGDTEAFF

SEQ ID NO: 460691 - protein, 16 aa, Homo sapiens
  CDR3 for alpha chain variable domain of TCR clone 230346 (TRAV13-1, TRAJ37)
CSASSLGYSNTGKLIF

SEQ ID NO: 460692 - protein, 12 aa, Homo sapiens
  CDR3 for beta chain variable domain of TCR clone 230346 (TRBV6-1, TRBJ2-5)
CASSEGRETQYF

SEQ ID NO: 460693 - protein, 12 aa, Homo sapiens
  CDR3 for alpha chain variable domain of TCR clone 230347 (TRAV4, TRAJ6)
CLAPGGSYIPTF

SEQ ID NO: 460694 - protein, 16 aa, Homo sapiens
  CDR3 for beta chain variable domain of TCR clone 230347 (TRBV7-2, TRBJ2-5)
CASSLESAGGRETQYF

SEQ ID NO: 460695 - protein, 18 aa, Homo sapiens
  CDR3 for alpha chain variable domain of TCR clone 230348 (TRAV13-1, TRAJ52)
CAAKNTNAGGTSYVKLTF

SEQ ID NO: 460696 - protein, 15 aa, Homo sapiens
  CDR3 for beta chain variable domain of TCR clone 230348 (TRBV6-1, TRBJ2-3)
CASSERGGITDTQYF

SEQ ID NO: 460697 - protein, 14 aa, Homo sapiens
  CDR3 for alpha chain variable domain of TCR clone 230349 (TRAV8-2, TRAJ6)
CVVISAGGSYLPTF

SEQ ID NO: 460698 - protein, 16 aa, Homo sapiens
  CDR3 for beta chain variable domain of TCR clone 230349 (TRBV7-6, TRBJ2-6)
CASSLPGLSGANVLTF

SEQ ID NO: 460699 - protein, 15 aa, Homo sapiens
  CDR3 for alpha chain variable domain of TCR clone 230350 (TRAV3, TRAJ22)
CAVRDRGGSATQLTF

SEQ ID NO: 460700 - protein, 16 aa, Homo sapiens
  CDR3 for beta chain variable domain of TCR clone 230350 (TRBV5-4, TRBJ2-3)
CASQQPGAGGADTQYF

SEQ ID NO: 460701 - protein, 16 aa, Homo sapiens
  CDR3 for alpha chain variable domain of TCR clone 230351 (TRAV12-3, TRAJ53)
CAMSPGSGGSNYKLTF

SEQ ID NO: 460702 - protein, 14 aa, Homo sapiens
  CDR3 for beta chain variable domain of TCR clone 230351 (TRBV7-8, TRBJ2-7)
CASSLGDREQYLGR

SEQ ID NO: 460703 - protein, 15 aa, Homo sapiens
  CDR3 for alpha chain variable domain of TCR clone 230352 (TRAV21, TRAJ53)
CATLNSGGSTYKLTF

SEQ ID NO: 460704 - protein, 16 aa, Homo sapiens
  CDR3 for beta chain variable domain of TCR clone 230352 (TRBV20-1, TRBJ1-4)
CSAPGQGLLTNEKLFF

SEQ ID NO: 460705 - protein, 19 aa, Homo sapiens
  CDR3 for alpha chain variable domain of TCR clone 230353 (TRAV25, TRAJ20)
TATQTTDVGILPHDYKLSF

SEQ ID NO: 460706 - protein, 15 aa, Homo sapiens
  CDR3 for beta chain variable domain of TCR clone 230353 (TRBV6-6, TRBJ1-5)
CASSSIQGTNQHQHF

SEQ ID NO: 460707 - protein, 13 aa, Homo sapiens
  CDR3 for alpha chain variable domain of TCR clone 230354 (TRAV2, TRAJ24)
CAVEDSGRGKFQV

SEQ ID NO: 460708 - protein, 13 aa, Homo sapiens
  CDR3 for beta chain variable domain of TCR clone 230354 (TRBV10-3, TRBJ2-7)
CASKLAVNYEQYF

SEQ ID NO: 460709 - protein, 15 aa, Homo sapiens
  CDR3 for alpha chain variable domain of TCR clone 230355 (TRAV26-1, TRAJ48)
CIVRVGDFGNEKLTF

SEQ ID NO: 460710 - protein, 17 aa, Homo sapiens
  CDR3 for beta chain variable domain of TCR clone 230355 (TRBV13, TRBJ2-3)
CASSLSRVAGGRNTQYF

SEQ ID NO: 460711 - protein, 15 aa, Homo sapiens
  CDR3 for alpha chain variable domain of TCR clone 230356 (TRAV35, TRAJ40)
CAGQLGTSGTYKYIF

SEQ ID NO: 460712 - protein, 14 aa, Homo sapiens
  CDR3 for beta chain variable domain of TCR clone 230356 (TRBV7-3, TRBJ2-1)
SASSLAGGTNEQFF

SEQ ID NO: 460713 - protein, 12 aa, Homo sapiens
  CDR3 for alpha chain variable domain of TCR clone 230357 (TRAV13-2, TRAJ23)
CAERHRGGKLIF

SEQ ID NO: 460714 - protein, 15 aa, Homo sapiens
  CDR3 for beta chain variable domain of TCR clone 230357 (TRBV7-9, TRBJ1-6)
CASSSSGRGNSPLHF

SEQ ID NO: 460715 - protein, 14 aa, Homo sapiens
  CDR3 for alpha chain variable domain of TCR clone 230358 (TRAV13-1, TRAJ40)
CAARSTSGTYKYIF

SEQ ID NO: 460716 - protein, 16 aa, Homo sapiens
  CDR3 for beta chain variable domain of TCR clone 230358 (TRBV19, TRBJ1-5)
CASSIDRGGPRQPQHF

SEQ ID NO: 460717 - protein, 12 aa, Homo sapiens
  CDR3 for alpha chain variable domain of TCR clone 230359 (TRAV8-3, TRAJ26)
CAGDNYGQNFVF

SEQ ID NO: 460718 - protein, 15 aa, Homo sapiens
  CDR3 for beta chain variable domain of TCR clone 230359 (TRBV6-1, TRBJ2-3)
CASSERGGISDTQYF

SEQ ID NO: 460719 - protein, 13 aa, Homo sapiens
  CDR3 for alpha chain variable domain of TCR clone 230360 (TRAV3, TRAJ20)
CAVRDIGDYKLSF

SEQ ID NO: 460720 - protein, 12 aa, Homo sapiens
  CDR3 for beta chain variable domain of TCR clone 230360 (TRBV3-1, TRBJ1-2)
CASTSGLYGDTF

SEQ ID NO: 460721 - protein, 14 aa, Homo sapiens
  CDR3 for alpha chain variable domain of TCR clone 230361 (TRAV1-2, TRAJ8)
CAEREDTGFQKLAF

SEQ ID NO: 460722 - protein, 15 aa, Homo sapiens
  CDR3 for beta chain variable domain of TCR clone 230361 (TRBV6-3, TRBJ2-7)
CASSSPGTVFYEQYF

SEQ ID NO: 460723 - protein, 12 aa, Homo sapiens
  CDR3 for alpha chain variable domain of TCR clone 230362 (TRAV3, TRAJ31)
CAVRDGNARLMF

SEQ ID NO: 460724 - protein, 13 aa, Homo sapiens
  CDR3 for beta chain variable domain of TCR clone 230362 (TRBV24-1, TRBJ1-3)
CATMADSGNTIYF

SEQ ID NO: 460725 - protein, 15 aa, Homo sapiens
  CDR3 for alpha chain variable domain of TCR clone 230363 (TRAV13-1, TRAJ42)
CAASIAGGSQGNLIF

SEQ ID NO: 460726 - protein, 15 aa, Homo sapiens
  CDR3 for beta chain variable domain of TCR clone 230363 (TRBV19, TRBJ2-1)
CASGIVRGEGREQFF

SEQ ID NO: 460727 - protein, 17 aa, Homo sapiens
  CDR3 for alpha chain variable domain of TCR clone 230364 (TRAV3, TRAJ6)
CAVRDGPRAGGSYIHTF

SEQ ID NO: 460728 - protein, 13 aa, Homo sapiens
  CDR3 for beta chain variable domain of TCR clone 230364 (TRBV12-4, TRBJ2-7)
CASSPTETYEQYF

SEQ ID NO: 460729 - protein, 12 aa, Homo sapiens
  CDR3 for alpha chain variable domain of TCR clone 230365 (TRAV12-3, TRAJ17)
CAMTPTGNKLTF

SEQ ID NO: 460730 - protein, 15 aa, Homo sapiens
  CDR3 for beta chain variable domain of TCR clone 230365 (TRBV20-1, TRBJ2-7)
CSARARVSGMDEQYF

SEQ ID NO: 460731 - protein, 15 aa, Homo sapiens
  CDR3 for alpha chain variable domain of TCR clone 230366 (TRAV16, TRAJ6)
CALNDASGGSYIPTF

SEQ ID NO: 460732 - protein, 13 aa, Homo sapiens
  CDR3 for beta chain variable domain of TCR clone 230366 (TRBV7-9, TRBJ1-2)
CASSLKQNYGYAF

SEQ ID NO: 460733 - protein, 14 aa, Homo sapiens
  CDR3 for alpha chain variable domain of TCR clone 230367 (TRAV4, TRAJ26)
CLVGPHNYGRNFVF

SEQ ID NO: 460734 - protein, 17 aa, Homo sapiens
  CDR3 for beta chain variable domain of TCR clone 230367 (TRBV24-1, TRBJ2-1)
CATSDVSTSGTYNEQFF

SEQ ID NO: 460735 - protein, 15 aa, Homo sapiens
  CDR3 for alpha chain variable domain of TCR clone 230368 (TRAV8-3, TRAJ40)
CAAPSLGSGTYKYIF

SEQ ID NO: 460736 - protein, 14 aa, Homo sapiens
  CDR3 for beta chain variable domain of TCR clone 230368 (TRBV6-1, TRBJ1-3)
CASVQGGGGNTIYF

SEQ ID NO: 460737 - protein, 13 aa, Homo sapiens
  CDR3 for alpha chain variable domain of TCR clone 230369 (TRAV26-1, TRAJ48)
CIVRVVGDEKLTF

SEQ ID NO: 460738 - protein, 14 aa, Homo sapiens
  CDR3 for beta chain variable domain of TCR clone 230369 (TRBV12-5, TRBJ2-5)
CASGSWTHQETQYF

SEQ ID NO: 460739 - protein, 13 aa, Homo sapiens
  CDR3 for alpha chain variable domain of TCR clone 230370 (TRAV2, TRAJ40)
CAVVTSGTYKYIF

SEQ ID NO: 460740 - protein, 16 aa, Homo sapiens
  CDR3 for beta chain variable domain of TCR clone 230370 (TRBV7-3, TRBJ2-1)
CASSLEGYRSYNGQFF

SEQ ID NO: 460741 - protein, 16 aa, Homo sapiens
  CDR3 for alpha chain variable domain of TCR clone 230371 (TRAV38-2/DV8, TRAJ45)
CAYRGNSGGGADGLTF

SEQ ID NO: 460742 - protein, 17 aa, Homo sapiens
  CDR3 for beta chain variable domain of TCR clone 230371 (TRBV7-9, TRBJ1-1)
CASSSPPGQGQNTEAFF

SEQ ID NO: 460743 - protein, 13 aa, Homo sapiens
  CDR3 for alpha chain variable domain of TCR clone 230372 (TRAV29/DV5, TRAJ31)
CAASRNNNARLMF

SEQ ID NO: 460744 - protein, 12 aa, Homo sapiens
  CDR3 for beta chain variable domain of TCR clone 230372 (TRBV14, TRBJ2-5)
CASSQLKGTQYF

SEQ ID NO: 460745 - protein, 14 aa, Homo sapiens
  CDR3 for alpha chain variable domain of TCR clone 230373 (TRAV20, TRAJ4)
CAVRLGGGYNKLIF

SEQ ID NO: 460746 - protein, 12 aa, Homo sapiens
  CDR3 for beta chain variable domain of TCR clone 230373 (TRBV7-9, TRBJ2-7)
CASSFGSYEQYF

SEQ ID NO: 460747 - protein, 16 aa, Homo sapiens
  CDR3 for alpha chain variable domain of TCR clone 230374 (TRAV12-2, TRAJ50)
CAVGTATKTSYDKVIF

SEQ ID NO: 460748 - protein, 12 aa, Homo sapiens
  CDR3 for beta chain variable domain of TCR clone 230374 (TRBV12-4, TRBJ1-5)
CASSLGMQPQHF

SEQ ID NO: 460749 - protein, 14 aa, Homo sapiens
  CDR3 for alpha chain variable domain of TCR clone 230375 (TRAV1-2, TRAJ16)
CAVNRFSDGQKLLF

SEQ ID NO: 460750 - protein, 13 aa, Homo sapiens
  CDR3 for beta chain variable domain of TCR clone 230375 (TRBV20-1, TRBJ2-1)
GSAHGSSYNEQFF

SEQ ID NO: 460751 - protein, 12 aa, Homo sapiens
  CDR3 for alpha chain variable domain of TCR clone 230376 (TRAV13-1, TRAJ9)
CAASYLGFKTIF

SEQ ID NO: 460752 - protein, 13 aa, Homo sapiens
  CDR3 for beta chain variable domain of TCR clone 230376 (TRBV27, TRBJ2-7)
CASSFSQGYEQYF

SEQ ID NO: 460753 - protein, 16 aa, Homo sapiens
  CDR3 for alpha chain variable domain of TCR clone 230377 (TRAV12-1, TRAJ53)
CVVTSVAGGSNYKLTF

SEQ ID NO: 460754 - protein, 14 aa, Homo sapiens
  CDR3 for beta chain variable domain of TCR clone 230377 (TRBV12-4, TRBJ2-5)
CASSLWQKQETQYF

SEQ ID NO: 460755 - protein, 14 aa, Homo sapiens
  CDR3 for alpha chain variable domain of TCR clone 230378 (TRAV3, TRAJ36)
CAVRDGTGANNLCF

SEQ ID NO: 460756 - protein, 16 aa, Homo sapiens
  CDR3 for beta chain variable domain of TCR clone 230378 (TRBV20-1, TRBJ2-6)
CSAREGPGVGANVLTF

SEQ ID NO: 460757 - protein, 16 aa, Homo sapiens
  CDR3 for alpha chain variable domain of TCR clone 230379 (TRAV1-2, TRAJ10)
CAVRGVLTGGGNKLTF

SEQ ID NO: 460758 - protein, 15 aa, Homo sapiens
  CDR3 for beta chain variable domain of TCR clone 230379 (TRBV27, TRBJ2-3)
CASSLGLAGPDTQYF

SEQ ID NO: 460759 - protein, 17 aa, Homo sapiens
  CDR3 for alpha chain variable domain of TCR clone 230380 (TRAV3, TRAJ6)
CAVRDGPRAGGSNIPTF

SEQ ID NO: 460760 - protein, 15 aa, Homo sapiens
  CDR3 for beta chain variable domain of TCR clone 230380 (TRBV6-3, TRBJ2-7)
CASSSPGTVFYEQYF

SEQ ID NO: 460761 - protein, 14 aa, Homo sapiens
  CDR3 for alpha chain variable domain of TCR clone 230381 (TRAV12-2, TRAJ13)
CAVKKTGGYQKVTF

SEQ ID NO: 460762 - protein, 13 aa, Homo sapiens
  CDR3 for beta chain variable domain of TCR clone 230381 (TRBV27, TRBJ2-7)
CASSSVSSYEQYF

SEQ ID NO: 460763 - protein, 13 aa, Homo sapiens
  CDR3 for alpha chain variable domain of TCR clone 230382 (TRAV17, TRAJ5)
CAPMDTGRRTLTF

SEQ ID NO: 460764 - protein, 16 aa, Homo sapiens
  CDR3 for beta chain variable domain of TCR clone 230382 (TRBV27, TRBJ2-7)
CASSSERGDSAYEQYF

SEQ ID NO: 460765 - protein, 13 aa, Homo sapiens
  CDR3 for alpha chain variable domain of TCR clone 230383 (TRAV12-2, TRAJ4)
CAVRSGGYNKLIF

SEQ ID NO: 460766 - protein, 15 aa, Homo sapiens
  CDR3 for beta chain variable domain of TCR clone 230383 (TRBV10-3, TRBJ2-1)
CGISDVQDRAYEQFF

SEQ ID NO: 460767 - protein, 13 aa, Homo sapiens
  CDR3 for alpha chain variable domain of TCR clone 230384 (TRAV1-2, TRAJ9)
CAALNTGGFKTIF

SEQ ID NO: 460768 - protein, 12 aa, Homo sapiens
  CDR3 for beta chain variable domain of TCR clone 230384 (TRBV4-1, TRBJ2-3)
CASSQGTDTQYF

SEQ ID NO: 460769 - protein, 10 aa, Homo sapiens
  CDR3 for alpha chain variable domain of TCR clone 230385 (TRAV12-1, TRAJ22)
HSGSARQLTF

SEQ ID NO: 460770 - protein, 13 aa, Homo sapiens
  CDR3 for beta chain variable domain of TCR clone 230385 (TRBV7-3, TRBJ2-3)
CASSSWSTDTQYF

SEQ ID NO: 460771 - protein, 17 aa, Homo sapiens
  CDR3 for alpha chain variable domain of TCR clone 230386 (TRAV3, TRAJ6)
FSLSRRTDTGGSYIPTF

SEQ ID NO: 460772 - protein, 18 aa, Homo sapiens
  CDR3 for beta chain variable domain of TCR clone 230386 (TRBV7-2, TRBJ2-3)
CASSLDTSRGRKADTQYF

SEQ ID NO: 460773 - protein, 13 aa, Homo sapiens
  CDR3 for alpha chain variable domain of TCR clone 230387 (TRAV2, TRAJ15)
CAVASQAGTALIF

SEQ ID NO: 460774 - protein, 17 aa, Homo sapiens
  CDR3 for beta chain variable domain of TCR clone 230387 (TRBV5-4, TRBJ2-1)
CASSSAGGRGPYNEQFF

SEQ ID NO: 460775 - protein, 13 aa, Homo sapiens
  CDR3 for alpha chain variable domain of TCR clone 230388 (TRAV1-2, TRAJ9)
CAALNTGGFKTIF

SEQ ID NO: 460776 - protein, 17 aa, Homo sapiens
  CDR3 for beta chain variable domain of TCR clone 230388 (TRBV5-1, TRBJ2-1)
CASSLGQISFSYNEQFF

SEQ ID NO: 460777 - protein, 15 aa, Homo sapiens
  CDR3 for alpha chain variable domain of TCR clone 230389 (TRAV8-3, TRAJ45)
CASSYSGGGADGPTF

SEQ ID NO: 460778 - protein, 13 aa, Homo sapiens
  CDR3 for beta chain variable domain of TCR clone 230389 (TRBV10-3, TRBJ2-7)
CASKLTVNYEQYF

SEQ ID NO: 460779 - protein, 17 aa, Homo sapiens
  CDR3 for alpha chain variable domain of TCR clone 230390 (TRAV16, TRAJ16)
CALQGGGQMARSCPLQG

SEQ ID NO: 460780 - protein, 15 aa, Homo sapiens
  CDR3 for beta chain variable domain of TCR clone 230390 (TRBV20-1, TRBJ2-7)
CSARDRVSGMDEQYF

SEQ ID NO: 460781 - protein, 11 aa, Homo sapiens
  CDR3 for alpha chain variable domain of TCR clone 230391 (TRAV12-2, TRAJ42)
CAPGSQGNLIF

SEQ ID NO: 460782 - protein, 14 aa, Homo sapiens
  CDR3 for beta chain variable domain of TCR clone 230391 (TRBV2, TRBJ2-3)
CASSEGQNTDTQYF

SEQ ID NO: 460783 - protein, 13 aa, Homo sapiens
  CDR3 for alpha chain variable domain of TCR clone 230392 (TRAV17, TRAJ9)
CATGITGGFKTIF

SEQ ID NO: 460784 - protein, 14 aa, Homo sapiens
  CDR3 for beta chain variable domain of TCR clone 230392 (TRBV7-8, TRBJ2-7)
CASTFRGGPNEQYF

SEQ ID NO: 460785 - protein, 14 aa, Homo sapiens
  CDR3 for alpha chain variable domain of TCR clone 230393 (TRAV6, TRAJ6)
CALPTSGGSYIPTF

SEQ ID NO: 460786 - protein, 14 aa, Homo sapiens
  CDR3 for beta chain variable domain of TCR clone 230393 (TRBV18, TRBJ2-7)
CASSPRGGAYEQYF

SEQ ID NO: 460787 - protein, 12 aa, Homo sapiens
  CDR3 for alpha chain variable domain of TCR clone 230394 (TRAV38-1, TRAJ47)
CAFETYGNKLVF

SEQ ID NO: 460788 - protein, 13 aa, Homo sapiens
  CDR3 for beta chain variable domain of TCR clone 230394 (TRBV19, TRBJ1-2)
CASSVPGQDGYTF

SEQ ID NO: 460789 - protein, 16 aa, Homo sapiens
  CDR3 for alpha chain variable domain of TCR clone 230395 (TRAV30, TRAJ24)
CGTEIVDTDSWGKFQF

SEQ ID NO: 460790 - protein, 17 aa, Homo sapiens
  CDR3 for beta chain variable domain of TCR clone 230395 (TRBV20-1, TRBJ2-1)
CSARDRRRASSYNEQFF

SEQ ID NO: 460791 - protein, 14 aa, Homo sapiens
  CDR3 for alpha chain variable domain of TCR clone 230396 (TRAV8-1, TRAJ9)
CAVNDRPGGFKTIF

SEQ ID NO: 460792 - protein, 16 aa, Homo sapiens
  CDR3 for beta chain variable domain of TCR clone 230396 (TRBV7-3, TRBJ2-1)
CASSLVSGSSNNEQFF

SEQ ID NO: 460793 - protein, 13 aa, Homo sapiens
  CDR3 for alpha chain variable domain of TCR clone 230397 (TRAV3, TRAJ36)
CAVRDTGANNLFF

SEQ ID NO: 460794 - protein, 13 aa, Homo sapiens
  CDR3 for beta chain variable domain of TCR clone 230397 (TRBV7-3, TRBJ1-1)
CASSQDWGAEAFF

SEQ ID NO: 460795 - protein, 11 aa, Homo sapiens
  CDR3 for alpha chain variable domain of TCR clone 230398 (TRAV4, TRAJ28)
NSGAGSYQLTF

SEQ ID NO: 460796 - protein, 13 aa, Homo sapiens
  CDR3 for beta chain variable domain of TCR clone 230398 (TRBV12-4, TRBJ2-6)
CASSGTGANDLTF

SEQ ID NO: 460797 - protein, 11 aa, Homo sapiens
  CDR3 for alpha chain variable domain of TCR clone 230399 (TRAV14/DV4, )
CAMRERSRTLT

SEQ ID NO: 460798 - protein, 14 aa, Homo sapiens
  CDR3 for beta chain variable domain of TCR clone 230399 (TRBV2, TRBJ2-1)
CASSDRAYYNEQFF

SEQ ID NO: 460799 - protein, 15 aa, Homo sapiens
  CDR3 for alpha chain variable domain of TCR clone 230400 (TRAV16, TRAJ17)
CALSGKKAAGNKLTF

SEQ ID NO: 460800 - protein, 16 aa, Homo sapiens
  CDR3 for beta chain variable domain of TCR clone 230400 (TRBV7-6, TRBJ1-6)
CASSSPPAGEYSPLHF

SEQ ID NO: 460801 - protein, 12 aa, Homo sapiens
  CDR3 for alpha chain variable domain of TCR clone 230401 (TRAV20, TRAJ20)
CAVRFNEYKLSF

SEQ ID NO: 460802 - protein, 14 aa, Homo sapiens
  CDR3 for beta chain variable domain of TCR clone 230401 (TRBV20-1, TRBJ2-1)
CSAQIGGAANEQFF

SEQ ID NO: 460803 - protein, 14 aa, Homo sapiens
  CDR3 for alpha chain variable domain of TCR clone 230402 (TRAV12-3, TRAJ10)
SHLPLTGGGNKLTF

SEQ ID NO: 460804 - protein, 14 aa, Homo sapiens
  CDR3 for beta chain variable domain of TCR clone 230402 (TRBV7-2, TRBJ2-2)
CASSLNSNTVELFF

SEQ ID NO: 460805 - protein, 14 aa, Homo sapiens
  CDR3 for alpha chain variable domain of TCR clone 230403 (TRAV8-3, TRAJ6)
CAVGASGGSYIPTF

SEQ ID NO: 460806 - protein, 17 aa, Homo sapiens
  CDR3 for beta chain variable domain of TCR clone 230403 (TRBV18, TRBJ2-2)
CVSSPSDPWQNTGELFF

SEQ ID NO: 460807 - protein, 13 aa, Homo sapiens
  CDR3 for alpha chain variable domain of TCR clone 230404 (TRAV13-1, TRAJ21)
CAASIYNFNKFYF

SEQ ID NO: 460808 - protein, 13 aa, Homo sapiens
  CDR3 for beta chain variable domain of TCR clone 230404 (TRBV7-9, TRBJ2-7)
CASSFAGAYEQYF

SEQ ID NO: 460809 - protein, 14 aa, Homo sapiens
  CDR3 for alpha chain variable domain of TCR clone 230405 (TRAV17, TRAJ45)
CATASGGGADGLTF

SEQ ID NO: 460810 - protein, 15 aa, Homo sapiens
  CDR3 for beta chain variable domain of TCR clone 230405 (TRBV6-3, TRBJ2-7)
CASSSPGTVFYEQYC

SEQ ID NO: 460811 - protein, 17 aa, Homo sapiens
  CDR3 for alpha chain variable domain of TCR clone 230406 (TRAV8-6, TRAJ58)
CAVSSWVGETSGSRLTF

SEQ ID NO: 460812 - protein, 13 aa, Homo sapiens
  CDR3 for beta chain variable domain of TCR clone 230406 (TRBV7-7, TRBJ2-5)
CASSRSGQETQYF

SEQ ID NO: 460813 - protein, 15 aa, Homo sapiens
  CDR3 for alpha chain variable domain of TCR clone 230407 (TRAV2, TRAJ15)
CAVGGPNQAGTALLF

SEQ ID NO: 460814 - protein, 13 aa, Homo sapiens
  CDR3 for beta chain variable domain of TCR clone 230407 (TRBV2, TRBJ1-5)
CATAGPGNQPQHF

SEQ ID NO: 460815 - protein, 15 aa, Homo sapiens
  CDR3 for alpha chain variable domain of TCR clone 230408 (TRAV8-3, TRAJ32)
CAVGPYGGATNKLIF

SEQ ID NO: 460816 - protein, 14 aa, Homo sapiens
  CDR3 for beta chain variable domain of TCR clone 230408 (TRBV29-1, TRBJ2-2)
CSVLAETNAGELFF

SEQ ID NO: 460817 - protein, 11 aa, Homo sapiens
  CDR3 for alpha chain variable domain of TCR clone 230409 (TRAV21, TRAJ31)
CAVRNNARLMF

SEQ ID NO: 460818 - protein, 14 aa, Homo sapiens
  CDR3 for beta chain variable domain of TCR clone 230409 (TRBV19, TRBJ2-1)
CASPTFVLSGEQFL

SEQ ID NO: 460819 - protein, 13 aa, Homo sapiens
  CDR3 for alpha chain variable domain of TCR clone 230410 (TRAV2, TRAJ40)
CAVVTSETYKYIF

SEQ ID NO: 460820 - protein, 16 aa, Homo sapiens
  CDR3 for beta chain variable domain of TCR clone 230410 (TRBV7-9, TRBJ1-3)
CASSLGAGSSGNTIYF

SEQ ID NO: 460821 - protein, 12 aa, Homo sapiens
  CDR3 for alpha chain variable domain of TCR clone 230411 (TRAV21, TRAJ37)
CAVRGNTGKLIF

SEQ ID NO: 460822 - protein, 14 aa, Homo sapiens
  CDR3 for beta chain variable domain of TCR clone 230411 (TRBV19, TRBJ2-1)
CASEVTGARNEHFF

SEQ ID NO: 460823 - protein, 14 aa, Homo sapiens
  CDR3 for alpha chain variable domain of TCR clone 230412 (TRAV8-4, TRAJ34)
CAVSDPGDTDKRIF

SEQ ID NO: 460824 - protein, 13 aa, Homo sapiens
  CDR3 for beta chain variable domain of TCR clone 230412 (TRBV7-9, TRBJ2-5)
CASLSPGQETQYF

SEQ ID NO: 460825 - protein, 17 aa, Homo sapiens
  CDR3 for alpha chain variable domain of TCR clone 230413 (TRAV23/DV6, TRAJ57)
CAASSTLSQGGSEKLGF

SEQ ID NO: 460826 - protein, 13 aa, Homo sapiens
  CDR3 for beta chain variable domain of TCR clone 230413 (TRBV15, TRBJ1-6)
CATSGGLNSPLHF

SEQ ID NO: 460827 - protein, 17 aa, Homo sapiens
  CDR3 for alpha chain variable domain of TCR clone 230414 (TRAV4, TRAJ18)
CLVGERSVGSTLGRLYF

SEQ ID NO: 460828 - protein, 14 aa, Homo sapiens
  CDR3 for beta chain variable domain of TCR clone 230414 (TRBV6-5, TRBJ1-2)
SASSYDGTGGGYTF

SEQ ID NO: 460829 - protein, 15 aa, Homo sapiens
  CDR3 for alpha chain variable domain of TCR clone 230415 (TRAV21, TRAJ24)
CAARSSTDGWGKLQF

SEQ ID NO: 460830 - protein, 13 aa, Homo sapiens
  CDR3 for beta chain variable domain of TCR clone 230415 (TRBV11-3, TRBJ2-5)
CASSSTGEETQYF

SEQ ID NO: 460831 - protein, 13 aa, Homo sapiens
  CDR3 for alpha chain variable domain of TCR clone 230416 (TRAV12-3, TRAJ33)
CAMSVNSNYQLIW

SEQ ID NO: 460832 - protein, 13 aa, Homo sapiens
  CDR3 for beta chain variable domain of TCR clone 230416 (TRBV7-9, TRBJ2-7)
CASSFAGAYEQYF

SEQ ID NO: 460833 - protein, 13 aa, Homo sapiens
  CDR3 for alpha chain variable domain of TCR clone 230417 (TRAV1-1, TRAJ31)
CASYLNNNARLMF

SEQ ID NO: 460834 - protein, 13 aa, Homo sapiens
  CDR3 for beta chain variable domain of TCR clone 230417 (TRBV15, TRBJ1-6)
CATSGGLNAPLHF

SEQ ID NO: 460835 - protein, 13 aa, Homo sapiens
  CDR3 for alpha chain variable domain of TCR clone 230418 (TRAV16, TRAJ34)
CALTGYNTDKHIF

SEQ ID NO: 460836 - protein, 13 aa, Homo sapiens
  CDR3 for beta chain variable domain of TCR clone 230418 (TRBV6-1, TRBJ2-1)
CASREDGGHEQFF

SEQ ID NO: 460837 - protein, 13 aa, Homo sapiens
  CDR3 for alpha chain variable domain of TCR clone 230419 (TRAV12-2, TRAJ37)
CAGGSGNTGKLIF

SEQ ID NO: 460838 - protein, 14 aa, Homo sapiens
  CDR3 for beta chain variable domain of TCR clone 230419 (TRBV6-1, TRBJ2-6)
CASQPGAGANVLTF

SEQ ID NO: 460839 - protein, 14 aa, Homo sapiens
  CDR3 for alpha chain variable domain of TCR clone 230420 (TRAV8-4, TRAJ43)
CAVSDPRNNNDMRF

SEQ ID NO: 460840 - protein, 14 aa, Homo sapiens
  CDR3 for beta chain variable domain of TCR clone 230420 (TRBV18, TRBJ2-5)
CASSPGVSQETQYF

SEQ ID NO: 460841 - protein, 15 aa, Homo sapiens
  CDR3 for alpha chain variable domain of TCR clone 230421 (TRAV8-3, TRAJ27)
CAVGPSKTNAGKSTF

SEQ ID NO: 460842 - protein, 13 aa, Homo sapiens
  CDR3 for beta chain variable domain of TCR clone 230421 (TRBV7-3, TRBJ1-2)
CASSLKRGYGYTF

SEQ ID NO: 460843 - protein, 15 aa, Homo sapiens
  CDR3 for alpha chain variable domain of TCR clone 230422 (TRAV3, TRAJ22)
CAVRDRGGFARQPTF

SEQ ID NO: 460844 - protein, 16 aa, Homo sapiens
  CDR3 for beta chain variable domain of TCR clone 230422 (TRBV5-4, TRBJ2-3)
CASQQPGAGGADTQYF

SEQ ID NO: 460845 - protein, 15 aa, Homo sapiens
  CDR3 for alpha chain variable domain of TCR clone 230423 (TRAV17, TRAJ57)
CATGPSQGGSEKLVF

SEQ ID NO: 460846 - protein, 13 aa, Homo sapiens
  CDR3 for beta chain variable domain of TCR clone 230423 (TRBV15, TRBJ1-6)
CATSGGLNSPLHF

SEQ ID NO: 460847 - protein, 16 aa, Homo sapiens
  CDR3 for alpha chain variable domain of TCR clone 230424 (TRAV30, TRAJ48)
CGTEIKSNFRNEKLTF

SEQ ID NO: 460848 - protein, 17 aa, Homo sapiens
  CDR3 for beta chain variable domain of TCR clone 230424 (TRBV27, TRBJ2-1)
CASSSERVGQSADEQFF

SEQ ID NO: 460849 - protein, 14 aa, Homo sapiens
  CDR3 for alpha chain variable domain of TCR clone 230425 (TRAV12-2, TRAJ44)
CAVNKAGTASKLTF

SEQ ID NO: 460850 - protein, 12 aa, Homo sapiens
  CDR3 for beta chain variable domain of TCR clone 230425 (TRBV19, TRBJ1-4)
CASKDWPGGLVF

SEQ ID NO: 460851 - protein, 14 aa, Homo sapiens
  CDR3 for alpha chain variable domain of TCR clone 230426 (TRAV8-6, TRAJ48)
CAVRTNFGNEKLTF

SEQ ID NO: 460852 - protein, 13 aa, Homo sapiens
  CDR3 for beta chain variable domain of TCR clone 230426 (TRBV5-5, TRBJ1-2)
CASSCWRGEDYTF

SEQ ID NO: 460853 - protein, 14 aa, Homo sapiens
  CDR3 for alpha chain variable domain of TCR clone 230427 (TRAV12-1, TRAJ7)
GVVTPPHGNNRLAF

SEQ ID NO: 460854 - protein, 14 aa, Homo sapiens
  CDR3 for beta chain variable domain of TCR clone 230427 (TRBV28, TRBJ2-7)
CASSLRARGNEQYF

SEQ ID NO: 460855 - protein, 13 aa, Homo sapiens
  CDR3 for alpha chain variable domain of TCR clone 230428 (TRAV21, TRAJ27)
CAALNTNAGRSTF

SEQ ID NO: 460856 - protein, 15 aa, Homo sapiens
  CDR3 for beta chain variable domain of TCR clone 230428 (TRBV20-1, TRBJ2-1)
CSARGIGGTYNEQFF

SEQ ID NO: 460857 - protein, 13 aa, Homo sapiens
  CDR3 for alpha chain variable domain of TCR clone 230429 (TRAV8-3, TRAJ37)
CAVPSSNTGKLIF

SEQ ID NO: 460858 - protein, 12 aa, Homo sapiens
  CDR3 for beta chain variable domain of TCR clone 230429 (TRBV11-2, TRBJ2-1)
CASSPGKNEQFF

SEQ ID NO: 460859 - protein, 16 aa, Homo sapiens
  CDR3 for alpha chain variable domain of TCR clone 230430 (TRAV26-1, TRAJ41)
CIVRVAVANSGYALNF

SEQ ID NO: 460860 - protein, 12 aa, Homo sapiens
  CDR3 for beta chain variable domain of TCR clone 230430 (TRBV12-5, TRBJ2-5)
CASGQGVETQYF

SEQ ID NO: 460861 - protein, 15 aa, Homo sapiens
  CDR3 for alpha chain variable domain of TCR clone 230431 (TRAV41, TRAJ45)
CAASYSGGGADGLTF

SEQ ID NO: 460862 - protein, 15 aa, Homo sapiens
  CDR3 for beta chain variable domain of TCR clone 230431 (TRBV11-2, TRBJ2-1)
CASSLGPDSYNEQFF

SEQ ID NO: 460863 - protein, 15 aa, Homo sapiens
  CDR3 for alpha chain variable domain of TCR clone 230432 (TRAV17, TRAJ57)
CATGPSQGGSEKLVF

SEQ ID NO: 460864 - protein, 15 aa, Homo sapiens
  CDR3 for beta chain variable domain of TCR clone 230432 (TRBV12-4, TRBJ2-1)
CASSSGLAGGNEQFF

SEQ ID NO: 460865 - protein, 16 aa, Homo sapiens
  CDR3 for alpha chain variable domain of TCR clone 230433 (TRAV13-1, TRAJ18)
CAASRMRSSTLGRLYF

SEQ ID NO: 460866 - protein, 16 aa, Homo sapiens
  CDR3 for beta chain variable domain of TCR clone 230433 (TRBV27, TRBJ1-1)
CASSSRGRTGYTEAFF

SEQ ID NO: 460867 - protein, 14 aa, Homo sapiens
  CDR3 for alpha chain variable domain of TCR clone 230434 (TRAV12-1, TRAJ13)
CVVIDSGGYQKVTF

SEQ ID NO: 460868 - protein, 14 aa, Homo sapiens
  CDR3 for beta chain variable domain of TCR clone 230434 (TRBV7-2, TRBJ2-7)
CASRSQGAAYEQYF

SEQ ID NO: 460869 - protein, 12 aa, Homo sapiens
  CDR3 for alpha chain variable domain of TCR clone 230435 (TRAV17, TRAJ4)
CATDGGYNKLIF

SEQ ID NO: 460870 - protein, 14 aa, Homo sapiens
  CDR3 for beta chain variable domain of TCR clone 230435 (TRBV7-6, TRBJ2-1)
CASSLGGGADEQFF

SEQ ID NO: 460871 - protein, 15 aa, Homo sapiens
  CDR3 for alpha chain variable domain of TCR clone 230436 (TRAV26-1, TRAJ28)
CIVRVAGAGSYQLTF

SEQ ID NO: 460872 - protein, 12 aa, Homo sapiens
  CDR3 for beta chain variable domain of TCR clone 230436 (TRBV11-2, TRBJ2-2)
CAGSLGGGELFF

SEQ ID NO: 460873 - protein, 13 aa, Homo sapiens
  CDR3 for alpha chain variable domain of TCR clone 230437 (TRAV13-1, TRAJ33)
CAASRAGNYQLLW

SEQ ID NO: 460874 - protein, 15 aa, Homo sapiens
  CDR3 for beta chain variable domain of TCR clone 230437 (TRBV2, TRBJ2-7)
EDSAMYFCASSEQYF

SEQ ID NO: 460875 - protein, 12 aa, Homo sapiens
  CDR3 for alpha chain variable domain of TCR clone 230438 (TRAV1-2, TRAJ4)
CAVKGGYNKLIF

SEQ ID NO: 460876 - protein, 16 aa, Homo sapiens
  CDR3 for beta chain variable domain of TCR clone 230438 (TRBV12-4, TRBJ1-5)
CASSRPVGGSNQPQHF

SEQ ID NO: 460877 - protein, 16 aa, Homo sapiens
  CDR3 for alpha chain variable domain of TCR clone 230439 (TRAV38-1, TRAJ32)
CAFMKGGGGATNQLIF

SEQ ID NO: 460878 - protein, 13 aa, Homo sapiens
  CDR3 for beta chain variable domain of TCR clone 230439 (TRBV20-1, TRBJ2-5)
CSAREAFQETQYF

SEQ ID NO: 460879 - protein, 14 aa, Homo sapiens
  CDR3 for alpha chain variable domain of TCR clone 230440 (TRAV2, TRAJ9)
CAVEDRSGGFKTIF

SEQ ID NO: 460880 - protein, 16 aa, Homo sapiens
  CDR3 for beta chain variable domain of TCR clone 230440 (TRBV7-3, TRBJ2-1)
CASSLEGCRSYNEQFF

SEQ ID NO: 460881 - protein, 13 aa, Homo sapiens
  CDR3 for alpha chain variable domain of TCR clone 230441 (TRAV2, TRAJ40)
CAVVTSGTYKYIF

SEQ ID NO: 460882 - protein, 15 aa, Homo sapiens
  CDR3 for beta chain variable domain of TCR clone 230441 (TRBV18, TRBJ2-1)
CASSPPSASYNEQFI

SEQ ID NO: 460883 - protein, 13 aa, Homo sapiens
  CDR3 for alpha chain variable domain of TCR clone 230442 (TRAV1-2, TRAJ11)
CAVRDSGYSTLTF

SEQ ID NO: 460884 - protein, 16 aa, Homo sapiens
  CDR3 for beta chain variable domain of TCR clone 230442 (TRBV5-1, TRBJ2-7)
CASSWGTWGRAWEQYF

SEQ ID NO: 460885 - protein, 15 aa, Homo sapiens
  CDR3 for alpha chain variable domain of TCR clone 230443 (TRAV25, TRAJ52)
CAGTSGGTSYGKLTF

SEQ ID NO: 460886 - protein, 13 aa, Homo sapiens
  CDR3 for beta chain variable domain of TCR clone 230443 (TRBV6-5, TRBJ2-5)
CASSPQGGETQCF

SEQ ID NO: 460887 - protein, 14 aa, Homo sapiens
  CDR3 for alpha chain variable domain of TCR clone 230444 (TRAV1-2, TRAJ8)
CAVRDDTGFQKLVL

SEQ ID NO: 460888 - protein, 12 aa, Homo sapiens
  CDR3 for beta chain variable domain of TCR clone 230444 (TRBV29-1, TRBJ2-3)
CSVTGGADTQYF

SEQ ID NO: 460889 - protein, 13 aa, Homo sapiens
  CDR3 for alpha chain variable domain of TCR clone 230445 (TRAV23/DV6, TRAJ58)
CSASEIGGSRLTF

SEQ ID NO: 460890 - protein, 15 aa, Homo sapiens
  CDR3 for beta chain variable domain of TCR clone 230445 (TRBV19, TRBJ1-1)
CASASGQIQNTEAFF

SEQ ID NO: 460891 - protein, 13 aa, Homo sapiens
  CDR3 for alpha chain variable domain of TCR clone 230446 (TRAV2, TRAJ24)
CAVITDSWGKLQF

SEQ ID NO: 460892 - protein, 14 aa, Homo sapiens
  CDR3 for beta chain variable domain of TCR clone 230446 (TRBV13, TRBJ2-5)
CASSLGRGQETQYF

SEQ ID NO: 460893 - protein, 16 aa, Homo sapiens
  CDR3 for alpha chain variable domain of TCR clone 230447 (TRAV3, TRAJ37)
CAVRGKGSGNTVKLIF

SEQ ID NO: 460894 - protein, 16 aa, Homo sapiens
  CDR3 for beta chain variable domain of TCR clone 230447 (TRBV12-5, TRBJ2-5)
CASGPRTSGSQETQYF

SEQ ID NO: 460895 - protein, 15 aa, Homo sapiens
  CDR3 for alpha chain variable domain of TCR clone 230448 (TRAV12-3, TRAJ6)
CAMSAATGGSYIPTF

SEQ ID NO: 460896 - protein, 16 aa, Homo sapiens
  CDR3 for beta chain variable domain of TCR clone 230448 (TRBV20-1, TRBJ1-2)
CSASMGQGVANYGDTF

SEQ ID NO: 460897 - protein, 16 aa, Homo sapiens
  CDR3 for alpha chain variable domain of TCR clone 230449 (TRAV14/DV4, TRAJ12)
CAMREVLMDSSYKLIF

SEQ ID NO: 460898 - protein, 14 aa, Homo sapiens
  CDR3 for beta chain variable domain of TCR clone 230449 (TRBV7-2, TRBJ2-5)
CASGFTQGQETQYF

SEQ ID NO: 460899 - protein, 14 aa, Homo sapiens
  CDR3 for alpha chain variable domain of TCR clone 230450 (TRAV8-3, TRAJ47)
CAVGAQVRGNKLVF

SEQ ID NO: 460900 - protein, 14 aa, Homo sapiens
  CDR3 for beta chain variable domain of TCR clone 230450 (TRBV6-1, TRBJ1-3)
CASVQGGGGNTIYF

SEQ ID NO: 460901 - protein, 14 aa, Homo sapiens
  CDR3 for alpha chain variable domain of TCR clone 230451 (TRAV29/DV5, TRAJ34)
CAASASGNTDKPIF

SEQ ID NO: 460902 - protein, 14 aa, Homo sapiens
  CDR3 for beta chain variable domain of TCR clone 230451 (TRBV9, TRBJ2-3)
CASSVGLSTDTQYF

SEQ ID NO: 460903 - protein, 16 aa, Homo sapiens
  CDR3 for alpha chain variable domain of TCR clone 230452 (TRAV8-3, TRAJ44)
CAVGTLMTGTASKLTF

SEQ ID NO: 460904 - protein, 14 aa, Homo sapiens
  CDR3 for beta chain variable domain of TCR clone 230452 (TRBV11-2, TRBJ2-3)
CASSRLARTDTQYF

SEQ ID NO: 460905 - protein, 14 aa, Homo sapiens
  CDR3 for alpha chain variable domain of TCR clone 230453 (TRAV35, TRAJ22)
CAGLRPGSARQLTF

SEQ ID NO: 460906 - protein, 12 aa, Homo sapiens
  CDR3 for beta chain variable domain of TCR clone 230453 (TRBV12-4, TRBJ2-1)
CASRQTENEQFF

SEQ ID NO: 460907 - protein, 18 aa, Homo sapiens
  CDR3 for alpha chain variable domain of TCR clone 230454 (TRAV26-2, TRAJ45)
CILRVDKYSGGGADGITF

SEQ ID NO: 460908 - protein, 16 aa, Homo sapiens
  CDR3 for beta chain variable domain of TCR clone 230454 (TRBV2, TRBJ2-3)
CASSTSVEGVTDTQYF

SEQ ID NO: 460909 - protein, 17 aa, Homo sapiens
  CDR3 for alpha chain variable domain of TCR clone 230455 (TRAV8-3, TRAJ32)
CAVGPLDYGGATNKLIF

SEQ ID NO: 460910 - protein, 16 aa, Homo sapiens
  CDR3 for beta chain variable domain of TCR clone 230455 (TRBV20-1, TRBJ2-3)
CSARLHSAGAIDTQYF

SEQ ID NO: 460911 - protein, 14 aa, Homo sapiens
  CDR3 for alpha chain variable domain of TCR clone 230456 (TRAV8-4, TRAJ16)
CAVSPVGRWPEAAL

SEQ ID NO: 460912 - protein, 11 aa, Homo sapiens
  CDR3 for beta chain variable domain of TCR clone 230456 (TRBV29-1, TRBJ2-5)
CSEDRTGTQYF

SEQ ID NO: 460913 - protein, 10 aa, Homo sapiens
  CDR3 for alpha chain variable domain of TCR clone 230457 (TRAV21, TRAJ31)
CAVDNARLMF

SEQ ID NO: 460914 - protein, 15 aa, Homo sapiens
  CDR3 for beta chain variable domain of TCR clone 230457 (TRBV4-1, TRBJ1-1)
CASSRKMNTEASLDK

SEQ ID NO: 460915 - protein, 13 aa, Homo sapiens
  CDR3 for alpha chain variable domain of TCR clone 230458 (TRAV2, TRAJ15)
CAVASQAGTALIF

SEQ ID NO: 460916 - protein, 13 aa, Homo sapiens
  CDR3 for beta chain variable domain of TCR clone 230458 (TRBV7-9, TRBJ2-1)
CASSLDVGNEQFF

SEQ ID NO: 460917 - protein, 14 aa, Homo sapiens
  CDR3 for alpha chain variable domain of TCR clone 230459 (TRAV1-2, TRAJ16)
CAVNRFSDGQKLLF

SEQ ID NO: 460918 - protein, 11 aa, Homo sapiens
  CDR3 for beta chain variable domain of TCR clone 230459 (TRBV7-8, TRBJ2-7)
CASRLSLEQYF

SEQ ID NO: 460919 - protein, 17 aa, Homo sapiens
  CDR3 for alpha chain variable domain of TCR clone 230460 (TRAV3, TRAJ6)
CAVRDGSRAGGSYIPTF

SEQ ID NO: 460920 - protein, 16 aa, Homo sapiens
  CDR3 for beta chain variable domain of TCR clone 230460 (TRBV5-1, TRBJ1-3)
CASSPWAPSSGNTIYF

SEQ ID NO: 460921 - protein, 14 aa, Homo sapiens
  CDR3 for alpha chain variable domain of TCR clone 230461 (TRAV13-1, TRAJ44)
CAAKATGTASKLTF

SEQ ID NO: 460922 - protein, 13 aa, Homo sapiens
  CDR3 for beta chain variable domain of TCR clone 230461 (TRBV5-5, TRBJ1-2)
CASSFWGGEDYTF

SEQ ID NO: 460923 - protein, 12 aa, Homo sapiens
  CDR3 for alpha chain variable domain of TCR clone 230462 (TRAV12-3, TRAJ39)
CAIENAGNMLTF

SEQ ID NO: 460924 - protein, 20 aa, Homo sapiens
  CDR3 for beta chain variable domain of TCR clone 230462 (TRBV28, TRBJ2-1)
CASTPIGRSPGLAGGNEQFF

SEQ ID NO: 460925 - protein, 12 aa, Homo sapiens
  CDR3 for alpha chain variable domain of TCR clone 230463 (TRAV8-1, TRAJ26)
CAVNNYGQNFVF

SEQ ID NO: 460926 - protein, 15 aa, Homo sapiens
  CDR3 for beta chain variable domain of TCR clone 230463 (TRBV20-1, TRBJ1-1)
CGASWDRFLNTEAFF

SEQ ID NO: 460927 - protein, 15 aa, Homo sapiens
  CDR3 for alpha chain variable domain of TCR clone 230464 (TRAV17, TRAJ56)
CATDANPGANSKLTF

SEQ ID NO: 460928 - protein, 14 aa, Homo sapiens
  CDR3 for beta chain variable domain of TCR clone 230464 (TRBV19, TRBJ1-5)
CASSLGTGGQPQHF

SEQ ID NO: 460929 - protein, 16 aa, Homo sapiens
  CDR3 for alpha chain variable domain of TCR clone 230465 (TRAV17, TRAJ4)
CATAAHSSGGYNKLIF

SEQ ID NO: 460930 - protein, 17 aa, Homo sapiens
  CDR3 for beta chain variable domain of TCR clone 230465 (TRBV11-2, TRBJ2-1)
CASSLYPPGVEYNEQFF

SEQ ID NO: 460931 - protein, 15 aa, Homo sapiens
  CDR3 for alpha chain variable domain of TCR clone 230466 (TRAV27, TRAJ38)
CAARRNAGNNRKLIW

SEQ ID NO: 460932 - protein, 16 aa, Homo sapiens
  CDR3 for beta chain variable domain of TCR clone 230466 (TRBV27, TRBJ2-5)
CASSYGPGGQKETQYF

SEQ ID NO: 460933 - protein, 12 aa, Homo sapiens
  CDR3 for alpha chain variable domain of TCR clone 230467 (TRAV12-2, TRAJ9)
CAVYNGGFKTIF

SEQ ID NO: 460934 - protein, 16 aa, Homo sapiens
  CDR3 for beta chain variable domain of TCR clone 230467 (TRBV7-3, TRBJ2-1)
CASSKPLAGGYNEQFF

SEQ ID NO: 460935 - protein, 15 aa, Homo sapiens
  CDR3 for alpha chain variable domain of TCR clone 230468 (TRAV3, TRAJ3)
CAVRDRDSSASTIIF

SEQ ID NO: 460936 - protein, 18 aa, Homo sapiens
  CDR3 for beta chain variable domain of TCR clone 230468 (TRBV25-1, TRBJ1-2)
CASSGLQNGHGLIFGYTF

SEQ ID NO: 460937 - protein, 13 aa, Homo sapiens
  CDR3 for alpha chain variable domain of TCR clone 230469 (TRAV23/DV6, TRAJ22)
CAPYSGSARELTF

SEQ ID NO: 460938 - protein, 15 aa, Homo sapiens
  CDR3 for beta chain variable domain of TCR clone 230469 (TRBV11-2, TRBJ1-6)
CASSLDPWAVSPLHF

SEQ ID NO: 460939 - protein, 11 aa, Homo sapiens
  CDR3 for alpha chain variable domain of TCR clone 230470 (TRAV21, TRAJ11)
CAVNGYSILTF

SEQ ID NO: 460940 - protein, 15 aa, Homo sapiens
  CDR3 for beta chain variable domain of TCR clone 230470 (TRBV6-3, TRBJ2-7)
CASSSPGTVFYEQYF

SEQ ID NO: 460941 - protein, 13 aa, Homo sapiens
  CDR3 for alpha chain variable domain of TCR clone 230471 (TRAV21, TRAJ20)
CAVGLRVDYKLSF

SEQ ID NO: 460942 - protein, 12 aa, Homo sapiens
  CDR3 for beta chain variable domain of TCR clone 230471 (TRBV12-4, TRBJ2-1)
CASSKDRRWQFF

SEQ ID NO: 460943 - protein, 18 aa, Homo sapiens
  CDR3 for alpha chain variable domain of TCR clone 230472 (TRAV21, TRAJ52)
CAVRPSPAGGTSYGQLTF

SEQ ID NO: 460944 - protein, 17 aa, Homo sapiens
  CDR3 for beta chain variable domain of TCR clone 230472 (TRBV7-3, TRBJ2-3)
CASSLMKRMRGADTQYF

SEQ ID NO: 460945 - protein, 13 aa, Homo sapiens
  CDR3 for alpha chain variable domain of TCR clone 230473 (TRAV12-2, TRAJ45)
CAVNRGGADGLTF

SEQ ID NO: 460946 - protein, 16 aa, Homo sapiens
  CDR3 for beta chain variable domain of TCR clone 230473 (TRBV2, TRBJ1-1)
CASSPTLVGASTEAFF

SEQ ID NO: 460947 - protein, 12 aa, Homo sapiens
  CDR3 for alpha chain variable domain of TCR clone 230474 (TRAV8-3, TRAJ26)
CAGDNYGQNFVF

SEQ ID NO: 460948 - protein, 12 aa, Homo sapiens
  CDR3 for beta chain variable domain of TCR clone 230474 (TRBV7-3, TRBJ2-7)
CASSLGDREQYF

SEQ ID NO: 460949 - protein, 15 aa, Homo sapiens
  CDR3 for alpha chain variable domain of TCR clone 230475 (TRAV12-1, TRAJ33)
CVVNGNLDSKYQLIW

SEQ ID NO: 460950 - protein, 13 aa, Homo sapiens
  CDR3 for beta chain variable domain of TCR clone 230475 (TRBV9, TRBJ2-7)
CASSKTGTYEQYF

SEQ ID NO: 460951 - protein, 14 aa, Homo sapiens
  CDR3 for alpha chain variable domain of TCR clone 230476 (TRAV1-1, TRAJ23)
CAVSIYNQGGKLIF

SEQ ID NO: 460952 - protein, 14 aa, Homo sapiens
  CDR3 for beta chain variable domain of TCR clone 230476 (TRBV7-6, TRBJ2-1)
CASSVGGGADEQFF

SEQ ID NO: 460953 - protein, 10 aa, Homo sapiens
  CDR3 for alpha chain variable domain of TCR clone 230477 (TRAV12-3, TRAJ49)
CAVHGNQFYF

SEQ ID NO: 460954 - protein, 12 aa, Homo sapiens
  CDR3 for beta chain variable domain of TCR clone 230477 (TRBV24-1, TRBJ2-7)
CANSDPGYEQYF

SEQ ID NO: 460955 - protein, 14 aa, Homo sapiens
  CDR3 for alpha chain variable domain of TCR clone 230478 (TRAV20, TRAJ40)
CAVSLTSGTYKYIF

SEQ ID NO: 460956 - protein, 13 aa, Homo sapiens
  CDR3 for beta chain variable domain of TCR clone 230478 (TRBV7-9, TRBJ1-2)
CASSLKQNYGYTF

SEQ ID NO: 460957 - protein, 16 aa, Homo sapiens
  CDR3 for alpha chain variable domain of TCR clone 230479 (TRAV3, TRAJ5)
CAVRNLMDTGRRALTF

SEQ ID NO: 460958 - protein, 16 aa, Homo sapiens
  CDR3 for beta chain variable domain of TCR clone 230479 (TRBV4-2, TRBJ2-7)
CASSKEGLANSYEQYF

SEQ ID NO: 460959 - protein, 15 aa, Homo sapiens
  CDR3 for alpha chain variable domain of TCR clone 230480 (TRAV21, TRAJ52)
CAVRGGGTSYGKLTF

SEQ ID NO: 460960 - protein, 14 aa, Homo sapiens
  CDR3 for beta chain variable domain of TCR clone 230480 (TRBV11-2, TRBJ2-3)
CASSRLARTDTQYF

SEQ ID NO: 460961 - protein, 13 aa, Homo sapiens
  CDR3 for alpha chain variable domain of TCR clone 230481 (TRAV27, TRAJ29)
CAGAHSGNTPLVF

SEQ ID NO: 460962 - protein, 14 aa, Homo sapiens
  CDR3 for beta chain variable domain of TCR clone 230481 (TRBV29-1, TRBJ2-3)
CSARAGAGTDTQYF

SEQ ID NO: 460963 - protein, 13 aa, Homo sapiens
  CDR3 for alpha chain variable domain of TCR clone 230482 (TRAV12-3, TRAJ29)
CNDLLSGNTPLVF

SEQ ID NO: 460964 - protein, 16 aa, Homo sapiens
  CDR3 for beta chain variable domain of TCR clone 230482 (TRBV28, TRBJ2-7)
CASSSGTSGRGYEQYF

SEQ ID NO: 460965 - protein, 13 aa, Homo sapiens
  CDR3 for alpha chain variable domain of TCR clone 230483 (TRAV20, TRAJ9)
CAVPDTGGFKTFF

SEQ ID NO: 460966 - protein, 15 aa, Homo sapiens
  CDR3 for beta chain variable domain of TCR clone 230483 (TRBV27, TRBJ2-7)
CASSKAGRGGYEQYF

SEQ ID NO: 460967 - protein, 14 aa, Homo sapiens
  CDR3 for alpha chain variable domain of TCR clone 230484 (TRAV12-2, TRAJ17)
CAVLFNAAGNKLTF

SEQ ID NO: 460968 - protein, 14 aa, Homo sapiens
  CDR3 for beta chain variable domain of TCR clone 230484 (TRBV12-5, TRBJ2-5)
CASGSRTHQETQYF

SEQ ID NO: 460969 - protein, 21 aa, Homo sapiens
  CDR3 for alpha chain variable domain of TCR clone 230485 (TRAV4, TRAJ39)
CCVLLPRGGAAGGNGGNMVTF

SEQ ID NO: 460970 - protein, 16 aa, Homo sapiens
  CDR3 for beta chain variable domain of TCR clone 230485 (TRBV7-6, TRBJ2-7)
CASSGGTGALSYEQYF

SEQ ID NO: 460971 - protein, 15 aa, Homo sapiens
  CDR3 for alpha chain variable domain of TCR clone 230486 (TRAV12-3, TRAJ6)
CAMSATSGGSYIPTF

SEQ ID NO: 460972 - protein, 14 aa, Homo sapiens
  CDR3 for beta chain variable domain of TCR clone 230486 (TRBV18, TRBJ2-7)
CASSPRGGAYEQYF

SEQ ID NO: 460973 - protein, 13 aa, Homo sapiens
  CDR3 for alpha chain variable domain of TCR clone 230487 (TRAV25, TRAJ35)
CAGGGALGMCCIA

SEQ ID NO: 460974 - protein, 14 aa, Homo sapiens
  CDR3 for beta chain variable domain of TCR clone 230487 (TRBV6-1, TRBJ2-1)
CASAGGAIKNEQLF

SEQ ID NO: 460975 - protein, 16 aa, Homo sapiens
  CDR3 for alpha chain variable domain of TCR clone 230488 (TRAV21, TRAJ52)
CAVTNAGGTSYGKLTF

SEQ ID NO: 460976 - protein, 17 aa, Homo sapiens
  CDR3 for beta chain variable domain of TCR clone 230488 (TRBV28, TRBJ2-5)
CASSRQGGLAGAETQCF

SEQ ID NO: 460977 - protein, 15 aa, Homo sapiens
  CDR3 for alpha chain variable domain of TCR clone 230489 (TRAV21, TRAJ37)
CAVRPTLSNTGKLIF

SEQ ID NO: 460978 - protein, 14 aa, Homo sapiens
  CDR3 for beta chain variable domain of TCR clone 230489 (TRBV19, TRBJ2-1)
CASPTFVLSGEQFF

SEQ ID NO: 460979 - protein, 14 aa, Homo sapiens
  CDR3 for alpha chain variable domain of TCR clone 230490 (TRAV12-1, TRAJ30)
CVVNIGGRDDKIIF

SEQ ID NO: 460980 - protein, 13 aa, Homo sapiens
  CDR3 for beta chain variable domain of TCR clone 230490 (TRBV12-5, TRBJ2-1)
CVSGLGRGNEQFF

SEQ ID NO: 460981 - protein, 12 aa, Homo sapiens
  CDR3 for alpha chain variable domain of TCR clone 230491 (TRAV21, TRAJ31)
CAVWGNNARLMF

SEQ ID NO: 460982 - protein, 16 aa, Homo sapiens
  CDR3 for beta chain variable domain of TCR clone 230491 (TRBV27, TRBJ2-5)
FASSYGPGGQKETQYF

SEQ ID NO: 460983 - protein, 15 aa, Homo sapiens
  CDR3 for alpha chain variable domain of TCR clone 230492 (TRAV17, TRAJ16)
CATALRFSDGQKLLF

SEQ ID NO: 460984 - protein, 15 aa, Homo sapiens
  CDR3 for beta chain variable domain of TCR clone 230492 (TRBV20-1, TRBJ1-1)
CSASRGVTGNTAAFF

SEQ ID NO: 460985 - protein, 14 aa, Homo sapiens
  CDR3 for alpha chain variable domain of TCR clone 230493 (TRAV1-2, TRAJ8)
CAVREYTGFQKLVF

SEQ ID NO: 460986 - protein, 14 aa, Homo sapiens
  CDR3 for beta chain variable domain of TCR clone 230493 (TRBV7-3, TRBJ2-1)
CASSLAGGTNEQFF

SEQ ID NO: 460987 - protein, 15 aa, Homo sapiens
  CDR3 for alpha chain variable domain of TCR clone 230494 (TRAV3, TRAJ7)
CAVRDKDNGNNRLAF

SEQ ID NO: 460988 - protein, 19 aa, Homo sapiens
  CDR3 for beta chain variable domain of TCR clone 230494 (TRBV5-8, TRBJ2-3)
CASSFLGTSGSHRKDTQYF

SEQ ID NO: 460989 - protein, 15 aa, Homo sapiens
  CDR3 for alpha chain variable domain of TCR clone 230495 (TRAV8-3, TRAJ11)
CAVGLLNSGYSTLTF

SEQ ID NO: 460990 - protein, 16 aa, Homo sapiens
  CDR3 for beta chain variable domain of TCR clone 230495 (TRBV15, TRBJ2-7)
CDTSRGRAGGTYEQYF

SEQ ID NO: 460991 - protein, 16 aa, Homo sapiens
  CDR3 for alpha chain variable domain of TCR clone 230496 (TRAV12-3, TRAJ28)
CAMRANSGAGSYQLTF

SEQ ID NO: 460992 - protein, 15 aa, Homo sapiens
  CDR3 for beta chain variable domain of TCR clone 230496 (TRBV6-3, TRBJ2-7)
CASGSPGTVFYEQYF

SEQ ID NO: 460993 - protein, 17 aa, Homo sapiens
  CDR3 for alpha chain variable domain of TCR clone 230497 (TRAV38-1, TRAJ48)
CAFMRPRSNFGNEKLTF

SEQ ID NO: 460994 - protein, 12 aa, Homo sapiens
  CDR3 for beta chain variable domain of TCR clone 230497 (TRBV6-6, TRBJ2-7)
CASSGGFYEQYF

SEQ ID NO: 460995 - protein, 16 aa, Homo sapiens
  CDR3 for alpha chain variable domain of TCR clone 230498 (TRAV21, TRAJ45)
CAVSWGSGGGADGPTF

SEQ ID NO: 460996 - protein, 14 aa, Homo sapiens
  CDR3 for beta chain variable domain of TCR clone 230498 (TRBV7-9, TRBJ1-2)
CASSRQGASYGYTF

SEQ ID NO: 460997 - protein, 14 aa, Homo sapiens
  CDR3 for alpha chain variable domain of TCR clone 230499 (TRAV35, TRAJ50)
CAGHRKTSYDKVIF

SEQ ID NO: 460998 - protein, 14 aa, Homo sapiens
  CDR3 for beta chain variable domain of TCR clone 230499 (TRBV19, TRBJ2-1)
CASPTFVLSGEQFF

SEQ ID NO: 460999 - protein, 12 aa, Homo sapiens
  CDR3 for alpha chain variable domain of TCR clone 230500 (TRAV3, TRAJ20)
CAVRDHDFKLSF

SEQ ID NO: 461000 - protein, 13 aa, Homo sapiens
  CDR3 for beta chain variable domain of TCR clone 230500 (TRBV9, TRBJ2-7)
CASSVGQGGEQYF

SEQ ID NO: 461001 - protein, 14 aa, Homo sapiens
  CDR3 for alpha chain variable domain of TCR clone 230501 (TRAV9-2, TRAJ6)
CALSDPGGSYIPTF

SEQ ID NO: 461002 - protein, 15 aa, Homo sapiens
  CDR3 for beta chain variable domain of TCR clone 230501 (TRBV20-1, TRBJ2-7)
CSARDRVSGMDEQYF

SEQ ID NO: 461003 - protein, 17 aa, Homo sapiens
  CDR3 for alpha chain variable domain of TCR clone 230502 (TRAV38-2/DV8, TRAJ56)
CAYRSEVGTGANSKVTF

SEQ ID NO: 461004 - protein, 14 aa, Homo sapiens
  CDR3 for beta chain variable domain of TCR clone 230502 (TRBV11-1, TRBJ1-1)
CASSLEHPNTEAFF

SEQ ID NO: 461005 - protein, 12 aa, Homo sapiens
  CDR3 for alpha chain variable domain of TCR clone 230503 (TRAV3, TRAJ7)
CADLLWEQQTRF

SEQ ID NO: 461006 - protein, 13 aa, Homo sapiens
  CDR3 for beta chain variable domain of TCR clone 230503 (TRBV7-3, TRBJ2-5)
CASSFRGGETQHF

SEQ ID NO: 461007 - protein, 16 aa, Homo sapiens
  CDR3 for alpha chain variable domain of TCR clone 230504 (TRAV27, TRAJ13)
CAGAKSDSGGYQKVTF

SEQ ID NO: 461008 - protein, 14 aa, Homo sapiens
  CDR3 for beta chain variable domain of TCR clone 230504 (TRBV6-6, TRBJ2-7)
CASSDSGAGYEQYF

SEQ ID NO: 461009 - protein, 14 aa, Homo sapiens
  CDR3 for alpha chain variable domain of TCR clone 230505 (TRAV12-3, TRAJ10)
SHLPLTGGGNKLTF

SEQ ID NO: 461010 - protein, 13 aa, Homo sapiens
  CDR3 for beta chain variable domain of TCR clone 230505 (TRBV7-6, TRBJ2-3)
CASSLAVGDTRYF

SEQ ID NO: 461011 - protein, 10 aa, Homo sapiens
  CDR3 for alpha chain variable domain of TCR clone 230506 (TRAV14/DV4, TRAJ48)
CAPRSEELTF

SEQ ID NO: 461012 - protein, 15 aa, Homo sapiens
  CDR3 for beta chain variable domain of TCR clone 230506 (TRBV9, TRBJ1-6)
CASSVAGTGDSPLHF

SEQ ID NO: 461013 - protein, 13 aa, Homo sapiens
  CDR3 for alpha chain variable domain of TCR clone 230507 (TRAV3, TRAJ20)
CCEAFCNDYKLSF

SEQ ID NO: 461014 - protein, 16 aa, Homo sapiens
  CDR3 for beta chain variable domain of TCR clone 230507 (TRBV12-4, TRBJ2-2)
CASSFWIVGNTGELFF

SEQ ID NO: 461015 - protein, 17 aa, Homo sapiens
  CDR3 for alpha chain variable domain of TCR clone 230508 (TRAV4, TRAJ42)
CLVGVLNYGGSQGNHIF

SEQ ID NO: 461016 - protein, 12 aa, Homo sapiens
  CDR3 for beta chain variable domain of TCR clone 230508 (TRBV20-1, TRBJ2-1)
CSAQYTHNEQFF

SEQ ID NO: 461017 - protein, 14 aa, Homo sapiens
  CDR3 for alpha chain variable domain of TCR clone 230509 (TRAV21, TRAJ21)
CAVGVEDNFNKFYC

SEQ ID NO: 461018 - protein, 17 aa, Homo sapiens
  CDR3 for beta chain variable domain of TCR clone 230509 (TRBV20-1, TRBJ2-2)
CSASGSGQGGLTGELFF

SEQ ID NO: 461019 - protein, 14 aa, Homo sapiens
  CDR3 for alpha chain variable domain of TCR clone 230510 (TRAV12-3, TRAJ9)
CAMSPNTGGFKTIF

SEQ ID NO: 461020 - protein, 16 aa, Homo sapiens
  CDR3 for beta chain variable domain of TCR clone 230510 (TRBV7-8, TRBJ2-4)
CASSAERTLAKNNQYF

SEQ ID NO: 461021 - protein, 12 aa, Homo sapiens
  CDR3 for alpha chain variable domain of TCR clone 230511 (TRAV12-1, TRAJ40)
CVVYSGTYKYIF

SEQ ID NO: 461022 - protein, 14 aa, Homo sapiens
  CDR3 for beta chain variable domain of TCR clone 230511 (TRBV5-1, TRBJ2-1)
CASSLARDYNEQFF

SEQ ID NO: 461023 - protein, 17 aa, Homo sapiens
  CDR3 for alpha chain variable domain of TCR clone 230512 (TRAV13-1, TRAJ52)
CAASSGAGGTSYGKLTL

SEQ ID NO: 461024 - protein, 12 aa, Homo sapiens
  CDR3 for beta chain variable domain of TCR clone 230512 (TRBV29-1, TRBJ2-3)
CSVTGGADTQYF

SEQ ID NO: 461025 - protein, 11 aa, Homo sapiens
  CDR3 for alpha chain variable domain of TCR clone 230513 (TRAV23/DV6, TRAJ58)
CPARLLRGETS

SEQ ID NO: 461026 - protein, 15 aa, Homo sapiens
  CDR3 for beta chain variable domain of TCR clone 230513 (TRBV9, TRBJ1-6)
CASSVAGTGDSPLHF

SEQ ID NO: 461027 - protein, 22 aa, Homo sapiens
  CDR3 for alpha chain variable domain of TCR clone 230514 (TRAV16, TRAJ26)
CAVWDRILSLVPEPDCPCCPIS

SEQ ID NO: 461028 - protein, 12 aa, Homo sapiens
  CDR3 for beta chain variable domain of TCR clone 230514 (TRBV11-2, TRBJ2-1)
CASSPGNNEQFF

SEQ ID NO: 461029 - protein, 14 aa, Homo sapiens
  CDR3 for alpha chain variable domain of TCR clone 230515 (TRAV1-2, TRAJ16)
CAVNRFSDGQKLLF

SEQ ID NO: 461030 - protein, 15 aa, Homo sapiens
  CDR3 for beta chain variable domain of TCR clone 230515 (TRBV9, TRBJ1-6)
YASSGAGTGDSPLHF

SEQ ID NO: 461031 - protein, 17 aa, Homo sapiens
  CDR3 for alpha chain variable domain of TCR clone 230516 (TRAV8-6, TRAJ58)
CAVSSWVGETSGSRLTF

SEQ ID NO: 461032 - protein, 14 aa, Homo sapiens
  CDR3 for beta chain variable domain of TCR clone 230516 (TRBV5-1, TRBJ2-7)
CASSRGESLYEQYF

SEQ ID NO: 461033 - protein, 13 aa, Homo sapiens
  CDR3 for alpha chain variable domain of TCR clone 230517 (TRAV21, TRAJ27)
CAARPGNAGKSTF

SEQ ID NO: 461034 - protein, 13 aa, Homo sapiens
  CDR3 for beta chain variable domain of TCR clone 230517 (TRBV14, TRBJ1-2)
CASSEDRRYGYTF

SEQ ID NO: 461035 - protein, 14 aa, Homo sapiens
  CDR3 for alpha chain variable domain of TCR clone 230518 (TRAV13-1, TRAJ44)
CAAKATGTASKPTF

SEQ ID NO: 461036 - protein, 16 aa, Homo sapiens
  CDR3 for beta chain variable domain of TCR clone 230518 (TRBV15, TRBJ1-2)
CATSRGPRTGGGGYTF

SEQ ID NO: 461037 - protein, 17 aa, Homo sapiens
  CDR3 for alpha chain variable domain of TCR clone 230519 (TRAV26-1, TRAJ37)
CIVRVITVSSNTGKLIF

SEQ ID NO: 461038 - protein, 14 aa, Homo sapiens
  CDR3 for beta chain variable domain of TCR clone 230519 (TRBV7-2, TRBJ1-2)
CASSQTGSTYGYTF

SEQ ID NO: 461039 - protein, 14 aa, Homo sapiens
  CDR3 for alpha chain variable domain of TCR clone 230520 (TRAV8-6, TRAJ29)
CAVSGWAGNTPLLF

SEQ ID NO: 461040 - protein, 15 aa, Homo sapiens
  CDR3 for beta chain variable domain of TCR clone 230520 (TRBV6-3, TRBJ2-2)
RASRGMTVDTGELFF

SEQ ID NO: 461041 - protein, 12 aa, Homo sapiens
  CDR3 for alpha chain variable domain of TCR clone 230521 (TRAV12-2, TRAJ52)
IGGGTSYVKLTF

SEQ ID NO: 461042 - protein, 13 aa, Homo sapiens
  CDR3 for beta chain variable domain of TCR clone 230521 (TRBV12-4, TRBJ1-1)
CASSPGTGFEAFF

SEQ ID NO: 461043 - protein, 15 aa, Homo sapiens
  CDR3 for alpha chain variable domain of TCR clone 230522 (TRAV26-1, TRAJ37)
CIVKTGSSNTGKLIF

SEQ ID NO: 461044 - protein, 12 aa, Homo sapiens
  CDR3 for beta chain variable domain of TCR clone 230522 (TRBV7-8, TRBJ2-7)
CASSLGDREQFF

SEQ ID NO: 461045 - protein, 12 aa, Homo sapiens
  CDR3 for alpha chain variable domain of TCR clone 230523 (TRAV21, TRAJ3)
CCFYSSASKLIF

SEQ ID NO: 461046 - protein, 15 aa, Homo sapiens
  CDR3 for beta chain variable domain of TCR clone 230523 (TRBV20-1, TRBJ2-7)
RSARDRVSGMDEQYF

SEQ ID NO: 461047 - protein, 12 aa, Homo sapiens
  CDR3 for alpha chain variable domain of TCR clone 230524 (TRAV12-3, TRAJ17)
CATTITGNKLTF

SEQ ID NO: 461048 - protein, 15 aa, Homo sapiens
  CDR3 for beta chain variable domain of TCR clone 230524 (TRBV20-1, TRBJ2-7)
CSARDRVSGMDEQYF

SEQ ID NO: 461049 - protein, 12 aa, Homo sapiens
  CDR3 for alpha chain variable domain of TCR clone 230525 (TRAV1-1, TRAJ8)
CAGGTDFQKLVF

SEQ ID NO: 461050 - protein, 15 aa, Homo sapiens
  CDR3 for beta chain variable domain of TCR clone 230525 (TRBV7-9, TRBJ1-4)
CASSRTGGFNEQLFF

SEQ ID NO: 461051 - protein, 12 aa, Homo sapiens
  CDR3 for alpha chain variable domain of TCR clone 230526 (TRAV13-1, TRAJ21)
CAAKEGFNKFYF

SEQ ID NO: 461052 - protein, 17 aa, Homo sapiens
  CDR3 for beta chain variable domain of TCR clone 230526 (TRBV5-4, TRBJ1-1)
CASFPPKGRLQNTEAFF

SEQ ID NO: 461053 - protein, 13 aa, Homo sapiens
  CDR3 for alpha chain variable domain of TCR clone 230527 (TRAV8-1, TRAJ34)
CAVRPYNTDKLIF

SEQ ID NO: 461054 - protein, 15 aa, Homo sapiens
  CDR3 for beta chain variable domain of TCR clone 230527 (TRBV7-9, TRBJ1-3)
CASSLWSGSGNTIFF

SEQ ID NO: 461055 - protein, 14 aa, Homo sapiens
  CDR3 for alpha chain variable domain of TCR clone 230528 (TRAV38-1, TRAJ54)
CAFMSPSGAQKLVF

SEQ ID NO: 461056 - protein, 16 aa, Homo sapiens
  CDR3 for beta chain variable domain of TCR clone 230528 (TRBV28, TRBJ2-1)
CASSLGGSGSYNEQFV

SEQ ID NO: 461057 - protein, 18 aa, Homo sapiens
  CDR3 for alpha chain variable domain of TCR clone 230529 (TRAV13-1, TRAJ52)
CAAKNPNAGGTSYVKLTF

SEQ ID NO: 461058 - protein, 15 aa, Homo sapiens
  CDR3 for beta chain variable domain of TCR clone 230529 (TRBV6-1, TRBJ2-3)
CASSERGGITGTQYF

SEQ ID NO: 461059 - protein, 16 aa, Homo sapiens
  CDR3 for alpha chain variable domain of TCR clone 230530 (TRAV12-3, TRAJ53)
CAMSPGSGGSNYKLPF

SEQ ID NO: 461060 - protein, 13 aa, Homo sapiens
  CDR3 for beta chain variable domain of TCR clone 230530 (TRBV10-3, TRBJ2-7)
CASKLAVNYEQYF

SEQ ID NO: 461061 - protein, 14 aa, Homo sapiens
  CDR3 for alpha chain variable domain of TCR clone 230531 (TRAV26-1, TRAJ11)
CIVPLYSGYSTLTF

SEQ ID NO: 461062 - protein, 17 aa, Homo sapiens
  CDR3 for beta chain variable domain of TCR clone 230531 (TRBV4-2, TRBJ2-1)
CASSQVSGLAMNNEQFF

SEQ ID NO: 461063 - protein, 11 aa, Homo sapiens
  CDR3 for alpha chain variable domain of TCR clone 230532 (TRAV2, TRAJ13)
CASGGYQKVTF

SEQ ID NO: 461064 - protein, 12 aa, Homo sapiens
  CDR3 for beta chain variable domain of TCR clone 230532 (TRBV11-2, TRBJ2-1)
CASSPGNNEQVF

SEQ ID NO: 461065 - protein, 14 aa, Homo sapiens
  CDR3 for alpha chain variable domain of TCR clone 230533 (TRAV1-2, TRAJ8)
CAVREDTGFQKLVF

SEQ ID NO: 461066 - protein, 14 aa, Homo sapiens
  CDR3 for beta chain variable domain of TCR clone 230533 (TRBV28, TRBJ2-7)
CASSLRARGNEQYF

SEQ ID NO: 461067 - protein, 12 aa, Homo sapiens
  CDR3 for alpha chain variable domain of TCR clone 230534 (TRAV12-2, TRAJ10)
WGVTGGGNKLTF

SEQ ID NO: 461068 - protein, 13 aa, Homo sapiens
  CDR3 for beta chain variable domain of TCR clone 230534 (TRBV27, TRBJ1-1)
CASSLSIGAEAFF

SEQ ID NO: 461069 - protein, 14 aa, Homo sapiens
  CDR3 for alpha chain variable domain of TCR clone 230535 (TRAV1-2, TRAJ8)
CPVREDTGFQKLVF

SEQ ID NO: 461070 - protein, 15 aa, Homo sapiens
  CDR3 for beta chain variable domain of TCR clone 230535 (TRBV6-3, TRBJ2-7)
CASSSPGKVFYEQYF

SEQ ID NO: 461071 - protein, 16 aa, Homo sapiens
  CDR3 for alpha chain variable domain of TCR clone 230536 (TRAV21, TRAJ52)
CAVNNAGGTSYGKLTF

SEQ ID NO: 461072 - protein, 14 aa, Homo sapiens
  CDR3 for beta chain variable domain of TCR clone 230536 (TRBV19, TRBJ2-1)
CASPTFVLSGEQFF

SEQ ID NO: 461073 - protein, 17 aa, Homo sapiens
  CDR3 for alpha chain variable domain of TCR clone 230537 (TRAV29/DV5, TRAJ40)
CAASVIYTTPGTYKSIF

SEQ ID NO: 461074 - protein, 13 aa, Homo sapiens
  CDR3 for beta chain variable domain of TCR clone 230537 (TRBV6-1, TRBJ2-1)
CASSHDRNNEQFF

SEQ ID NO: 461075 - protein, 10 aa, Homo sapiens
  CDR3 for alpha chain variable domain of TCR clone 230538 (TRAV23/DV6, TRAJ57)
CSASSTLSQG

SEQ ID NO: 461076 - protein, 14 aa, Homo sapiens
  CDR3 for beta chain variable domain of TCR clone 230538 (TRBV7-8, TRBJ2-5)
CASSATGGQETQYF

SEQ ID NO: 461077 - protein, 16 aa, Homo sapiens
  CDR3 for alpha chain variable domain of TCR clone 230539 (TRAV3, TRAJ13)
CAVRDPNSGGYPKVTF

SEQ ID NO: 461078 - protein, 13 aa, Homo sapiens
  CDR3 for beta chain variable domain of TCR clone 230539 (TRBV7-9, TRBJ2-7)
CASSLQGSYEQYF

SEQ ID NO: 461079 - protein, 14 aa, Homo sapiens
  CDR3 for alpha chain variable domain of TCR clone 230540 (TRAV26-1, TRAJ15)
FIEAGNQAGTALIF

SEQ ID NO: 461080 - protein, 16 aa, Homo sapiens
  CDR3 for beta chain variable domain of TCR clone 230540 (TRBV27, TRBJ2-7)
CASSWLGGRGSYEQYF

SEQ ID NO: 461081 - protein, 15 aa, Homo sapiens
  CDR3 for alpha chain variable domain of TCR clone 230541 (TRAV27, TRAJ38)
CAGRFNAGNNRKLIW

SEQ ID NO: 461082 - protein, 13 aa, Homo sapiens
  CDR3 for beta chain variable domain of TCR clone 230541 (TRBV12-5, TRBJ2-3)
CASQNRSTDTQYF

SEQ ID NO: 461083 - protein, 11 aa, Homo sapiens
  CDR3 for alpha chain variable domain of TCR clone 230542 (TRAV12-3, TRAJ17)
CAMTLTQQANF

SEQ ID NO: 461084 - protein, 15 aa, Homo sapiens
  CDR3 for beta chain variable domain of TCR clone 230542 (TRBV20-1, TRBJ2-7)
CSARDRVSGMDEQYF

SEQ ID NO: 461085 - protein, 12 aa, Homo sapiens
  CDR3 for alpha chain variable domain of TCR clone 230543 (TRAV8-3, TRAJ20)
CAVGANAYKLSF

SEQ ID NO: 461086 - protein, 16 aa, Homo sapiens
  CDR3 for beta chain variable domain of TCR clone 230543 (TRBV19, TRBJ2-2)
CASRSPGTGATGELFF

SEQ ID NO: 461087 - protein, 17 aa, Homo sapiens
  CDR3 for alpha chain variable domain of TCR clone 230544 (TRAV23/DV6, TRAJ57)
CAASSTLSQGGSEKLVF

SEQ ID NO: 461088 - protein, 13 aa, Homo sapiens
  CDR3 for beta chain variable domain of TCR clone 230544 (TRBV7-3, TRBJ1-1)
CASSQDWGAEAFL

SEQ ID NO: 461089 - protein, 15 aa, Homo sapiens
  CDR3 for alpha chain variable domain of TCR clone 230545 (TRAV8-3, TRAJ45)
CASSYSGGGAAGLTF

SEQ ID NO: 461090 - protein, 12 aa, Homo sapiens
  CDR3 for beta chain variable domain of TCR clone 230545 (TRBV12-4, TRBJ2-7)
CASSLGGYEQYF

SEQ ID NO: 461091 - protein, 17 aa, Homo sapiens
  CDR3 for alpha chain variable domain of TCR clone 230546 (TRAV12-2, TRAJ4)
CAVNVRPVSGGYNKLIF

SEQ ID NO: 461092 - protein, 14 aa, Homo sapiens
  CDR3 for beta chain variable domain of TCR clone 230546 (TRBV7-6, TRBJ2-3)
CASSVAGGTDTQYF

SEQ ID NO: 461093 - protein, 16 aa, Homo sapiens
  CDR3 for alpha chain variable domain of TCR clone 230547 (TRAV12-3, TRAJ53)
CAMSPGGGGSNYKLTF

SEQ ID NO: 461094 - protein, 20 aa, Homo sapiens
  CDR3 for beta chain variable domain of TCR clone 230547 (TRBV7-8, TRBJ2-2)
CASSHLFPGPTIHITGELFF

SEQ ID NO: 461095 - protein, 13 aa, Homo sapiens
  CDR3 for alpha chain variable domain of TCR clone 230548 (TRAV35, TRAJ13)
CWFPFWGYQKVTF

SEQ ID NO: 461096 - protein, 14 aa, Homo sapiens
  CDR3 for beta chain variable domain of TCR clone 230548 (TRBV12-5, TRBJ2-5)
CASGSRTHQETQYF

SEQ ID NO: 461097 - protein, 15 aa, Homo sapiens
  CDR3 for alpha chain variable domain of TCR clone 230549 (TRAV12-3, TRAJ6)
CAISATTGGSYIPTF

SEQ ID NO: 461098 - protein, 15 aa, Homo sapiens
  CDR3 for beta chain variable domain of TCR clone 230549 (TRBV7-6, TRBJ1-5)
CASSQSSGINQPQHF

SEQ ID NO: 461099 - protein, 13 aa, Homo sapiens
  CDR3 for alpha chain variable domain of TCR clone 230550 (TRAV8-3, TRAJ44)
CAVVPGTASKLTF

SEQ ID NO: 461100 - protein, 13 aa, Homo sapiens
  CDR3 for beta chain variable domain of TCR clone 230550 (TRBV10-3, TRBJ2-7)
CASKLAVNYEQDF

SEQ ID NO: 461101 - protein, 12 aa, Homo sapiens
  CDR3 for alpha chain variable domain of TCR clone 230551 (TRAV8-2, TRAJ17)
CVVQAAGNKLTF

SEQ ID NO: 461102 - protein, 15 aa, Homo sapiens
  CDR3 for beta chain variable domain of TCR clone 230551 (TRBV11-2, TRBJ2-1)
CASSSPSTRYNEQFF

SEQ ID NO: 461103 - protein, 12 aa, Homo sapiens
  CDR3 for alpha chain variable domain of TCR clone 230552 (TRAV25, TRAJ33)
CAGPDSNYQLIW

SEQ ID NO: 461104 - protein, 13 aa, Homo sapiens
  CDR3 for beta chain variable domain of TCR clone 230552 (TRBV10-3, TRBJ2-7)
CASKLAVNYEQYF

SEQ ID NO: 461105 - protein, 15 aa, Homo sapiens
  CDR3 for alpha chain variable domain of TCR clone 230553 (TRAV8-2, TRAJ16)
CVVSDGFSDGQKLLF

SEQ ID NO: 461106 - protein, 13 aa, Homo sapiens
  CDR3 for beta chain variable domain of TCR clone 230553 (TRBV15, TRBJ2-5)
CATSQIGEETQYF

SEQ ID NO: 461107 - protein, 12 aa, Homo sapiens
  CDR3 for alpha chain variable domain of TCR clone 230554 (TRAV13-1, TRAJ53)
CASGGSNYKLTF

SEQ ID NO: 461108 - protein, 11 aa, Homo sapiens
  CDR3 for beta chain variable domain of TCR clone 230554 (TRBV2, TRBJ1-1)
CASREGTEAFF

SEQ ID NO: 461109 - protein, 15 aa, Homo sapiens
  CDR3 for alpha chain variable domain of TCR clone 230555 (TRAV12-3, TRAJ6)
CAMSATTGGSYIPTF

SEQ ID NO: 461110 - protein, 13 aa, Homo sapiens
  CDR3 for beta chain variable domain of TCR clone 230555 (TRBV7-9, TRBJ1-2)
CASSLKQNYGYTV

SEQ ID NO: 461111 - protein, 12 aa, Homo sapiens
  CDR3 for alpha chain variable domain of TCR clone 230556 (TRAV12-3, TRAJ20)
CAMARGDYKLSF

SEQ ID NO: 461112 - protein, 15 aa, Homo sapiens
  CDR3 for beta chain variable domain of TCR clone 230556 (TRBV2, TRBJ2-3)
CASSDFEKATDTQYF

SEQ ID NO: 461113 - protein, 15 aa, Homo sapiens
  CDR3 for alpha chain variable domain of TCR clone 230557 (TRAV3, TRAJ4)
CAVRDGTGGDNKLIF

SEQ ID NO: 461114 - protein, 15 aa, Homo sapiens
  CDR3 for beta chain variable domain of TCR clone 230557 (TRBV27, TRBJ2-7)
CASSPDQGRLYEQYF

SEQ ID NO: 461115 - protein, 12 aa, Homo sapiens
  CDR3 for alpha chain variable domain of TCR clone 230558 (TRAV1-2, TRAJ26)
CAVRYHGQNFVF

SEQ ID NO: 461116 - protein, 14 aa, Homo sapiens
  CDR3 for beta chain variable domain of TCR clone 230558 (TRBV11-1, TRBJ2-7)
CASSFRQGSYEQYF

SEQ ID NO: 461117 - protein, 13 aa, Homo sapiens
  CDR3 for alpha chain variable domain of TCR clone 230559 (TRAV12-2, TRAJ3)
CAFQYSRASKIIF

SEQ ID NO: 461118 - protein, 11 aa, Homo sapiens
  CDR3 for beta chain variable domain of TCR clone 230559 (TRBV20-1, TRBJ2-3)
CSGTSSTTQYF

SEQ ID NO: 461119 - protein, 15 aa, Homo sapiens
  CDR3 for alpha chain variable domain of TCR clone 230560 (TRAV20, TRAJ41)
CAVQANSNSGYARNF

SEQ ID NO: 461120 - protein, 18 aa, Homo sapiens
  CDR3 for beta chain variable domain of TCR clone 230560 (TRBV7-9, TRBJ2-7)
CASSLTTSGSRTWYEQYF

SEQ ID NO: 461121 - protein, 15 aa, Homo sapiens
  CDR3 for alpha chain variable domain of TCR clone 230561 (TRAV21, TRAJ52)
CAVRGGGTSYGKLTF

SEQ ID NO: 461122 - protein, 10 aa, Homo sapiens
  CDR3 for beta chain variable domain of TCR clone 230561 (TRBV2, TRBJ2-5)
CASSAATQYF

SEQ ID NO: 461123 - protein, 12 aa, Homo sapiens
  CDR3 for alpha chain variable domain of TCR clone 230562 (TRAV38-1, TRAJ47)
CAFETYGNKLGF

SEQ ID NO: 461124 - protein, 15 aa, Homo sapiens
  CDR3 for beta chain variable domain of TCR clone 230562 (TRBV20-1, TRBJ2-7)
CSARKGLAESYEQYF

SEQ ID NO: 461125 - protein, 15 aa, Homo sapiens
  CDR3 for alpha chain variable domain of TCR clone 230563 (TRAV13-1, TRAJ10)
CAATILTGGGNKLTF

SEQ ID NO: 461126 - protein, 14 aa, Homo sapiens
  CDR3 for beta chain variable domain of TCR clone 230563 (TRBV7-2, TRBJ1-2)
CASSQTGSTYGYTF

SEQ ID NO: 461127 - protein, 14 aa, Homo sapiens
  CDR3 for alpha chain variable domain of TCR clone 230564 (TRAV20, TRAJ9)
CAVQASTGGFKTIF

SEQ ID NO: 461128 - protein, 17 aa, Homo sapiens
  CDR3 for beta chain variable domain of TCR clone 230564 (TRBV13, TRBJ2-3)
CASSLSRVAGGRNTQYF

SEQ ID NO: 461129 - protein, 14 aa, Homo sapiens
  CDR3 for alpha chain variable domain of TCR clone 230565 (TRAV25, TRAJ6)
CAGRESGGSYIPTL

SEQ ID NO: 461130 - protein, 15 aa, Homo sapiens
  CDR3 for beta chain variable domain of TCR clone 230565 (TRBV7-2, TRBJ2-1)
CASSSGRAGGNEQFF

SEQ ID NO: 461131 - protein, 15 aa, Homo sapiens
  CDR3 for alpha chain variable domain of TCR clone 230566 (TRAV4, )
CLVDIQNPDPAVYQL

SEQ ID NO: 461132 - protein, 12 aa, Homo sapiens
  CDR3 for beta chain variable domain of TCR clone 230566 (TRBV6-1, TRBJ2-7)
CASSDYSYEQYF

SEQ ID NO: 461133 - protein, 13 aa, Homo sapiens
  CDR3 for alpha chain variable domain of TCR clone 230567 (TRAV1-2, TRAJ9)
CAALNTGGFKTIV

SEQ ID NO: 461134 - protein, 13 aa, Homo sapiens
  CDR3 for beta chain variable domain of TCR clone 230567 (TRBV19, TRBJ1-2)
CARSVPGQDGYPF

SEQ ID NO: 461135 - protein, 14 aa, Homo sapiens
  CDR3 for alpha chain variable domain of TCR clone 230568 (TRAV12-1, TRAJ30)
CVVNIGWRDDKTIF

SEQ ID NO: 461136 - protein, 14 aa, Homo sapiens
  CDR3 for beta chain variable domain of TCR clone 230568 (TRBV20-1, TRBJ2-1)
CSAQIGGSANEQFF

SEQ ID NO: 461137 - protein, 13 aa, Homo sapiens
  CDR3 for alpha chain variable domain of TCR clone 230569 (TRAV8-3, TRAJ28)
CAVGAVGSCQLTF

SEQ ID NO: 461138 - protein, 14 aa, Homo sapiens
  CDR3 for beta chain variable domain of TCR clone 230569 (TRBV25-1, TRBJ1-1)
CASTHLGGNTEAFF

SEQ ID NO: 461139 - protein, 16 aa, Homo sapiens
  CDR3 for alpha chain variable domain of TCR clone 230570 (TRAV26-1, TRAJ52)
CIVGNAGGTSYGKLTF

SEQ ID NO: 461140 - protein, 15 aa, Homo sapiens
  CDR3 for beta chain variable domain of TCR clone 230570 (TRBV7-3, TRBJ2-1)
CASSPTGGGEVEQFF

SEQ ID NO: 461141 - protein, 14 aa, Homo sapiens
  CDR3 for alpha chain variable domain of TCR clone 230571 (TRAV1-2, TRAJ8)
CAVREDTGFQKLVF

SEQ ID NO: 461142 - protein, 12 aa, Homo sapiens
  CDR3 for beta chain variable domain of TCR clone 230571 (TRBV7-8, TRBJ2-1)
CASTDRDNEQFF

SEQ ID NO: 461143 - protein, 16 aa, Homo sapiens
  CDR3 for alpha chain variable domain of TCR clone 230572 (TRAV20, TRAJ22)
CTVQASSSGSARQLTF

SEQ ID NO: 461144 - protein, 16 aa, Homo sapiens
  CDR3 for beta chain variable domain of TCR clone 230572 (TRBV20-1, TRBJ1-5)
CSASRGTGYSNQPQHF

SEQ ID NO: 461145 - protein, 15 aa, Homo sapiens
  CDR3 for alpha chain variable domain of TCR clone 230573 (TRAV3, TRAJ13)
CAVRVYSGGYQKVTF

SEQ ID NO: 461146 - protein, 14 aa, Homo sapiens
  CDR3 for beta chain variable domain of TCR clone 230573 (TRBV5-7, TRBJ2-7)
CASSFKGATGEQYF

SEQ ID NO: 461147 - protein, 14 aa, Homo sapiens
  CDR3 for alpha chain variable domain of TCR clone 230574 (TRAV8-3, TRAJ4)
CAVGAAGGYNKLIF

SEQ ID NO: 461148 - protein, 14 aa, Homo sapiens
  CDR3 for beta chain variable domain of TCR clone 230574 (TRBV5-7, TRBJ1-2)
CASSLVRGDYGYTF

SEQ ID NO: 461149 - protein, 13 aa, Homo sapiens
  CDR3 for alpha chain variable domain of TCR clone 230575 (TRAV16, TRAJ54)
CALMVQGAQKLVF

SEQ ID NO: 461150 - protein, 12 aa, Homo sapiens
  CDR3 for beta chain variable domain of TCR clone 230575 (TRBV18, TRBJ2-7)
CASPTAMGEQYF

SEQ ID NO: 461151 - protein, 14 aa, Homo sapiens
  CDR3 for alpha chain variable domain of TCR clone 230576 (TRAV1-2, TRAJ8)
CAVREDTGFRKLVF

SEQ ID NO: 461152 - protein, 13 aa, Homo sapiens
  CDR3 for beta chain variable domain of TCR clone 230576 (TRBV19, TRBJ1-2)
CASSVPGQDGYTF

SEQ ID NO: 461153 - protein, 14 aa, Homo sapiens
  CDR3 for alpha chain variable domain of TCR clone 230577 (TRAV1-2, TRAJ16)
CAVNRFSDGQNLLF

SEQ ID NO: 461154 - protein, 14 aa, Homo sapiens
  CDR3 for beta chain variable domain of TCR clone 230577 (TRBV13, TRBJ2-5)
CASSLGRGQETQYF

SEQ ID NO: 461155 - protein, 14 aa, Homo sapiens
  CDR3 for alpha chain variable domain of TCR clone 230578 (TRAV12-2, TRAJ9)
CAVSFGTGGFKTIF

SEQ ID NO: 461156 - protein, 14 aa, Homo sapiens
  CDR3 for beta chain variable domain of TCR clone 230578 (TRBV15, TRBJ2-3)
CATARDGGGDTQYF

SEQ ID NO: 461157 - protein, 15 aa, Homo sapiens
  CDR3 for alpha chain variable domain of TCR clone 230579 (TRAV3, TRAJ13)
CAVRVYSGGYQKVTF

SEQ ID NO: 461158 - protein, 20 aa, Homo sapiens
  CDR3 for beta chain variable domain of TCR clone 230579 (TRBV7-8, TRBJ2-2)
CASSHLFPGPTIHITGELFF

SEQ ID NO: 461159 - protein, 19 aa, Homo sapiens
  CDR3 for alpha chain variable domain of TCR clone 230580 (TRAV26-1, TRAJ28)
CIVRVAHAYSWAGSYQLTF

SEQ ID NO: 461160 - protein, 12 aa, Homo sapiens
  CDR3 for beta chain variable domain of TCR clone 230580 (TRBV27, TRBJ2-2)
CASKLFTGELFF

SEQ ID NO: 461161 - protein, 15 aa, Homo sapiens
  CDR3 for alpha chain variable domain of TCR clone 230581 (TRAV13-2, TRAJ45)
CAEHHSGGGADGRTF

SEQ ID NO: 461162 - protein, 15 aa, Homo sapiens
  CDR3 for beta chain variable domain of TCR clone 230581 (TRBV7-2, TRBJ2-7)
CASSLALGSAYEQYF

SEQ ID NO: 461163 - protein, 15 aa, Homo sapiens
  CDR3 for alpha chain variable domain of TCR clone 230582 (TRAV13-1, TRAJ32)
CAASIYGGATNKLIF

SEQ ID NO: 461164 - protein, 17 aa, Homo sapiens
  CDR3 for beta chain variable domain of TCR clone 230582 (TRBV25-1, TRBJ2-7)
CQPQQPPRTGVTYEQYF

SEQ ID NO: 461165 - protein, 14 aa, Homo sapiens
  CDR3 for alpha chain variable domain of TCR clone 230583 (TRAV38-1, TRAJ48)
CAFMANFGNEKLTF

SEQ ID NO: 461166 - protein, 15 aa, Homo sapiens
  CDR3 for beta chain variable domain of TCR clone 230583 (TRBV7-3, TRBJ2-1)
CASSLSSGSFDEQFF

SEQ ID NO: 461167 - protein, 19 aa, Homo sapiens
  CDR3 for alpha chain variable domain of TCR clone 230584 (TRAV38-1, TRAJ53)
CAFMKHGLESGGSNYKLTF

SEQ ID NO: 461168 - protein, 14 aa, Homo sapiens
  CDR3 for beta chain variable domain of TCR clone 230584 (TRBV7-3, TRBJ1-1)
CASSLKGGNTEAFF

SEQ ID NO: 461169 - protein, 14 aa, Homo sapiens
  CDR3 for alpha chain variable domain of TCR clone 230585 (TRAV27, TRAJ44)
CAASFTGTASKLTF

SEQ ID NO: 461170 - protein, 20 aa, Homo sapiens
  CDR3 for beta chain variable domain of TCR clone 230585 (TRBV19, TRBJ2-1)
CASSISRTVTSTRLNNEQFF

SEQ ID NO: 461171 - protein, 15 aa, Homo sapiens
  CDR3 for alpha chain variable domain of TCR clone 230586 (TRAV12-1, TRAJ37)
CVVNIMGGNTGKLIF

SEQ ID NO: 461172 - protein, 14 aa, Homo sapiens
  CDR3 for beta chain variable domain of TCR clone 230586 (TRBV7-2, TRBJ2-7)
CASRSQGAAYEQYF

SEQ ID NO: 461173 - protein, 13 aa, Homo sapiens
  CDR3 for alpha chain variable domain of TCR clone 230587 (TRAV26-2, TRAJ43)
CILRAVNNNDMRF

SEQ ID NO: 461174 - protein, 12 aa, Homo sapiens
  CDR3 for beta chain variable domain of TCR clone 230587 (TRBV12-5, TRBJ2-5)
CASGQGVETQYF

SEQ ID NO: 461175 - protein, 17 aa, Homo sapiens
  CDR3 for alpha chain variable domain of TCR clone 230588 (TRAV3, TRAJ6)
CSVRDGPRAGGSYIPTF

SEQ ID NO: 461176 - protein, 14 aa, Homo sapiens
  CDR3 for beta chain variable domain of TCR clone 230588 (TRBV7-2, TRBJ2-7)
CASSPKTSFYEQHF

SEQ ID NO: 461177 - protein, 13 aa, Homo sapiens
  CDR3 for alpha chain variable domain of TCR clone 230589 (TRAV2, TRAJ27)
CAVEAPMQANQPL

SEQ ID NO: 461178 - protein, 15 aa, Homo sapiens
  CDR3 for beta chain variable domain of TCR clone 230589 (TRBV27, TRBJ1-4)
CASSPRHATNEKLFF

SEQ ID NO: 461179 - protein, 17 aa, Homo sapiens
  CDR3 for alpha chain variable domain of TCR clone 230590 (TRAV3, TRAJ42)
CAVRDRDYGGSQGNLIF

SEQ ID NO: 461180 - protein, 15 aa, Homo sapiens
  CDR3 for beta chain variable domain of TCR clone 230590 (TRBV7-2, TRBJ2-1)
CASSPGFISGNEQFF

SEQ ID NO: 461181 - protein, 13 aa, Homo sapiens
  CDR3 for alpha chain variable domain of TCR clone 230591 (TRAV1-2, TRAJ41)
CAVNSNSGYALNF

SEQ ID NO: 461182 - protein, 16 aa, Homo sapiens
  CDR3 for beta chain variable domain of TCR clone 230591 (TRBV7-3, TRBJ2-2)
CASSLKRGTLSGELFF

SEQ ID NO: 461183 - protein, 12 aa, Homo sapiens
  CDR3 for alpha chain variable domain of TCR clone 230592 (TRAV13-1, TRAJ53)
AASGGSDYKLTF

SEQ ID NO: 461184 - protein, 15 aa, Homo sapiens
  CDR3 for beta chain variable domain of TCR clone 230592 (TRBV20-1, TRBJ2-7)
CSARDRVSGMDEQYF

SEQ ID NO: 461185 - protein, 13 aa, Homo sapiens
  CDR3 for alpha chain variable domain of TCR clone 230593 (TRAV2, TRAJ21)
CAVEDLNFNKFYF

SEQ ID NO: 461186 - protein, 15 aa, Homo sapiens
  CDR3 for beta chain variable domain of TCR clone 230593 (TRBV10-2, TRBJ2-6)
CASSTQSPGANVLTF

SEQ ID NO: 461187 - protein, 14 aa, Homo sapiens
  CDR3 for alpha chain variable domain of TCR clone 230594 (TRAV12-3, TRAJ11)
CAMTTNSGYSTLTL

SEQ ID NO: 461188 - protein, 14 aa, Homo sapiens
  CDR3 for beta chain variable domain of TCR clone 230594 (TRBV19, TRBJ2-1)
CASPTFVLSGEQFF

SEQ ID NO: 461189 - protein, 14 aa, Homo sapiens
  CDR3 for alpha chain variable domain of TCR clone 230595 (TRAV12-3, TRAJ12)
CALSRMDSSYKLIF

SEQ ID NO: 461190 - protein, 14 aa, Homo sapiens
  CDR3 for beta chain variable domain of TCR clone 230595 (TRBV20-1, TRBJ1-4)
CSARSGQSNEKLFF

SEQ ID NO: 461191 - protein, 13 aa, Homo sapiens
  CDR3 for alpha chain variable domain of TCR clone 230596 (TRAV13-2, TRAJ40)
CAEFTSGTYKYIF

SEQ ID NO: 461192 - protein, 14 aa, Homo sapiens
  CDR3 for beta chain variable domain of TCR clone 230596 (TRBV10-2, TRBJ1-5)
CASSSTGRNQPQRF

SEQ ID NO: 461193 - protein, 12 aa, Homo sapiens
  CDR3 for alpha chain variable domain of TCR clone 230597 (TRAV3, TRAJ20)
CAVRDPDYKLSF

SEQ ID NO: 461194 - protein, 13 aa, Homo sapiens
  CDR3 for beta chain variable domain of TCR clone 230597 (TRBV18, TRBJ1-1)
CASSPETKPEACF

SEQ ID NO: 461195 - protein, 13 aa, Homo sapiens
  CDR3 for alpha chain variable domain of TCR clone 230598 (TRAV27, TRAJ23)
CAGVLPKGGRLIF

SEQ ID NO: 461196 - protein, 13 aa, Homo sapiens
  CDR3 for beta chain variable domain of TCR clone 230598 (TRBV7-9, TRBJ1-2)
CASSLKQNYGYTF

SEQ ID NO: 461197 - protein, 12 aa, Homo sapiens
  CDR3 for alpha chain variable domain of TCR clone 230599 (TRAV1-2, TRAJ7)
CAVAYGNNRLAL

SEQ ID NO: 461198 - protein, 16 aa, Homo sapiens
  CDR3 for beta chain variable domain of TCR clone 230599 (TRBV5-1, TRBJ2-7)
CASSPMTGALSYEQYF

SEQ ID NO: 461199 - protein, 12 aa, Homo sapiens
  CDR3 for alpha chain variable domain of TCR clone 230600 (TRAV12-2, TRAJ7)
CAVMRGNNRLAF

SEQ ID NO: 461200 - protein, 17 aa, Homo sapiens
  CDR3 for beta chain variable domain of TCR clone 230600 (TRBV7-9, TRBJ2-3)
CASSPTVAGDLADTQYF

SEQ ID NO: 461201 - protein, 14 aa, Homo sapiens
  CDR3 for alpha chain variable domain of TCR clone 230601 (TRAV9-2, TRAJ39)
CALYIYNAGNMLTF

SEQ ID NO: 461202 - protein, 15 aa, Homo sapiens
  CDR3 for beta chain variable domain of TCR clone 230601 (TRBV9, TRBJ1-6)
CASSVAGTGDSPLRF

SEQ ID NO: 461203 - protein, 12 aa, Homo sapiens
  CDR3 for alpha chain variable domain of TCR clone 230602 (TRAV9-2, TRAJ26)
CALRGYGQNFVF

SEQ ID NO: 461204 - protein, 17 aa, Homo sapiens
  CDR3 for beta chain variable domain of TCR clone 230602 (TRBV7-3, TRBJ2-3)
CASSPRGQGYGTDTQYF

SEQ ID NO: 461205 - protein, 15 aa, Homo sapiens
  CDR3 for alpha chain variable domain of TCR clone 230603 (TRAV1-2, TRAJ28)
CAVQYSGAGSYQLTF

SEQ ID NO: 461206 - protein, 13 aa, Homo sapiens
  CDR3 for beta chain variable domain of TCR clone 230603 (TRBV20-1, TRBJ2-7)
CSATHTSGYEQYS

SEQ ID NO: 461207 - protein, 14 aa, Homo sapiens
  CDR3 for alpha chain variable domain of TCR clone 230604 (TRAV12-2, TRAJ13)
CAVKKTGGYQKVTF

SEQ ID NO: 461208 - protein, 15 aa, Homo sapiens
  CDR3 for beta chain variable domain of TCR clone 230604 (TRBV27, TRBJ2-1)
CASSNGGGSPNEQVF

SEQ ID NO: 461209 - protein, 15 aa, Homo sapiens
  CDR3 for alpha chain variable domain of TCR clone 230605 (TRAV38-1, TRAJ45)
CAFMKGGGGADGLTF

SEQ ID NO: 461210 - protein, 13 aa, Homo sapiens
  CDR3 for beta chain variable domain of TCR clone 230605 (TRBV7-9, TRBJ1-2)
CASSSKQNYGDTF

SEQ ID NO: 461211 - protein, 12 aa, Homo sapiens
  CDR3 for alpha chain variable domain of TCR clone 230606 (TRAV10, TRAJ20)
CVVSASDYKLSF

SEQ ID NO: 461212 - protein, 12 aa, Homo sapiens
  CDR3 for beta chain variable domain of TCR clone 230606 (TRBV11-2, TRBJ2-2)
CASSLGGGELFF

SEQ ID NO: 461213 - protein, 14 aa, Homo sapiens
  CDR3 for alpha chain variable domain of TCR clone 230607 (TRAV12-2, TRAJ13)
CAVKKTGGYQKVDF

SEQ ID NO: 461214 - protein, 15 aa, Homo sapiens
  CDR3 for beta chain variable domain of TCR clone 230607 (TRBV27, TRBJ2-1)
CASSNGGGSSNEQFF

SEQ ID NO: 461215 - protein, 14 aa, Homo sapiens
  CDR3 for alpha chain variable domain of TCR clone 230608 (TRAV1-2, TRAJ16)
CAVNRFSDGQKLLF

SEQ ID NO: 461216 - protein, 13 aa, Homo sapiens
  CDR3 for beta chain variable domain of TCR clone 230608 (TRBV20-1, TRBJ2-1)
CSAHGSSYNEQFL

SEQ ID NO: 461217 - protein, 13 aa, Homo sapiens
  CDR3 for alpha chain variable domain of TCR clone 230609 (TRAV8-3, TRAJ5)
CAVGPRGRRALTF

SEQ ID NO: 461218 - protein, 16 aa, Homo sapiens
  CDR3 for beta chain variable domain of TCR clone 230609 (TRBV11-3, TRBJ2-3)
CASSPGGPLGTDTQYF

SEQ ID NO: 461219 - protein, 15 aa, Homo sapiens
  CDR3 for alpha chain variable domain of TCR clone 230610 (TRAV25, TRAJ43)
CAVFMRFGSGTRLTV

SEQ ID NO: 461220 - protein, 13 aa, Homo sapiens
  CDR3 for beta chain variable domain of TCR clone 230610 (TRBV7-9, TRBJ1-2)
CASSLKQNYGYTF

SEQ ID NO: 461221 - protein, 13 aa, Homo sapiens
  CDR3 for alpha chain variable domain of TCR clone 230611 (TRAV6, TRAJ40)
CALVTSGTYKYIF

SEQ ID NO: 461222 - protein, 14 aa, Homo sapiens
  CDR3 for beta chain variable domain of TCR clone 230611 (TRBV11-2, TRBJ2-5)
CASRPLVGRETQYF

SEQ ID NO: 461223 - protein, 13 aa, Homo sapiens
  CDR3 for alpha chain variable domain of TCR clone 230612 (TRAV3, TRAJ20)
CCEAFCNDYKLSF

SEQ ID NO: 461224 - protein, 15 aa, Homo sapiens
  CDR3 for beta chain variable domain of TCR clone 230612 (TRBV19, TRBJ2-6)
CASVRRDSGANVMTF

SEQ ID NO: 461225 - protein, 17 aa, Homo sapiens
  CDR3 for alpha chain variable domain of TCR clone 230613 (TRAV38-2/DV8, TRAJ57)
CAYRSVLTQGGSEKLVF

SEQ ID NO: 461226 - protein, 13 aa, Homo sapiens
  CDR3 for beta chain variable domain of TCR clone 230613 (TRBV7-7, TRBJ2-2)
CASSLTSAGELFF

SEQ ID NO: 461227 - protein, 14 aa, Homo sapiens
  CDR3 for alpha chain variable domain of TCR clone 230614 (TRAV8-3, TRAJ9)
CAVVYNTGGFKAIF

SEQ ID NO: 461228 - protein, 16 aa, Homo sapiens
  CDR3 for beta chain variable domain of TCR clone 230614 (TRBV7-3, TRBJ2-2)
CASSLKRGTLSGELFF

SEQ ID NO: 461229 - protein, 16 aa, Homo sapiens
  CDR3 for alpha chain variable domain of TCR clone 230615 (TRAV23/DV6, TRAJ9)
CAASIGGNTGGFKTIF

SEQ ID NO: 461230 - protein, 14 aa, Homo sapiens
  CDR3 for beta chain variable domain of TCR clone 230615 (TRBV9, TRBJ2-7)
CASSVGVGSSEQYF

SEQ ID NO: 461231 - protein, 15 aa, Homo sapiens
  CDR3 for alpha chain variable domain of TCR clone 230616 (TRAV3, TRAJ42)
CAVRGGTGSQGNLIF

SEQ ID NO: 461232 - protein, 14 aa, Homo sapiens
  CDR3 for beta chain variable domain of TCR clone 230616 (TRBV19, TRBJ1-2)
CASSSLFASDVYTF

SEQ ID NO: 461233 - protein, 16 aa, Homo sapiens
  CDR3 for alpha chain variable domain of TCR clone 230617 (TRAV3, TRAJ22)
CAVRDMGSGSARQLTF

SEQ ID NO: 461234 - protein, 15 aa, Homo sapiens
  CDR3 for beta chain variable domain of TCR clone 230617 (TRBV4-1, TRBJ2-1)
CASSQAQREIYEQFF

SEQ ID NO: 461235 - protein, 11 aa, Homo sapiens
  CDR3 for alpha chain variable domain of TCR clone 230618 (TRAV17, TRAJ43)
CATPRSNEMRF

SEQ ID NO: 461236 - protein, 15 aa, Homo sapiens
  CDR3 for beta chain variable domain of TCR clone 230618 (TRBV11-2, TRBJ2-1)
CASSLGTSGLNEQFF

SEQ ID NO: 461237 - protein, 14 aa, Homo sapiens
  CDR3 for alpha chain variable domain of TCR clone 230619 (TRAV26-1, TRAJ22)
CIVRVYGSARQLTF

SEQ ID NO: 461238 - protein, 17 aa, Homo sapiens
  CDR3 for beta chain variable domain of TCR clone 230619 (TRBV7-3, TRBJ2-3)
CASSPGGLAGFGDTLYF

SEQ ID NO: 461239 - protein, 18 aa, Homo sapiens
  CDR3 for alpha chain variable domain of TCR clone 230620 (TRAV13-1, TRAJ52)
CAASKRSAGGTSYGKLTF

SEQ ID NO: 461240 - protein, 13 aa, Homo sapiens
  CDR3 for beta chain variable domain of TCR clone 230620 (TRBV7-9, TRBJ2-5)
CASLSPGQETQYF

SEQ ID NO: 461241 - protein, 12 aa, Homo sapiens
  CDR3 for alpha chain variable domain of TCR clone 230621 (TRAV12-1, TRAJ40)
CVVYSGTYKYIF

SEQ ID NO: 461242 - protein, 13 aa, Homo sapiens
  CDR3 for beta chain variable domain of TCR clone 230621 (TRBV7-2, TRBJ2-5)
CASSQTSVETQYF

SEQ ID NO: 461243 - protein, 13 aa, Homo sapiens
  CDR3 for alpha chain variable domain of TCR clone 230622 (TRAV35, TRAJ37)
CAGSSGNTGQLIF

SEQ ID NO: 461244 - protein, 16 aa, Homo sapiens
  CDR3 for beta chain variable domain of TCR clone 230622 (TRBV10-3, TRBJ2-1)
CAISLTSGNSYNEQFF

SEQ ID NO: 461245 - protein, 14 aa, Homo sapiens
  CDR3 for alpha chain variable domain of TCR clone 230623 (TRAV13-1, TRAJ9)
CAASALTGGFKTIF

SEQ ID NO: 461246 - protein, 16 aa, Homo sapiens
  CDR3 for beta chain variable domain of TCR clone 230623 (TRBV12-4, TRBJ2-3)
RASSFGTGGISDTQYF

SEQ ID NO: 461247 - protein, 17 aa, Homo sapiens
  CDR3 for alpha chain variable domain of TCR clone 230624 (TRAV3, TRAJ6)
CAVRDAPRAGGSYIPTS

SEQ ID NO: 461248 - protein, 14 aa, Homo sapiens
  CDR3 for beta chain variable domain of TCR clone 230624 (TRBV7-2, TRBJ2-7)
CASSPKTSFYEQYF

SEQ ID NO: 461249 - protein, 13 aa, Homo sapiens
  CDR3 for alpha chain variable domain of TCR clone 230625 (TRAV13-1, TRAJ39)
CAVSIVMQATCSP

SEQ ID NO: 461250 - protein, 13 aa, Homo sapiens
  CDR3 for beta chain variable domain of TCR clone 230625 (TRBV20-1, TRBJ1-1)
CSARGGGNTEAFF

SEQ ID NO: 461251 - protein, 15 aa, Homo sapiens
  CDR3 for alpha chain variable domain of TCR clone 230626 (TRAV14/DV4, TRAJ12)
CAMSELMDSSYKLIF

SEQ ID NO: 461252 - protein, 10 aa, Homo sapiens
  CDR3 for beta chain variable domain of TCR clone 230626 (TRBV20-1, TRBJ2-7)
CSEGYYEQYF

SEQ ID NO: 461253 - protein, 12 aa, Homo sapiens
  CDR3 for alpha chain variable domain of TCR clone 230627 (TRAV12-3, TRAJ20)
CAMVRGDYKLSF

SEQ ID NO: 461254 - protein, 15 aa, Homo sapiens
  CDR3 for beta chain variable domain of TCR clone 230627 (TRBV7-2, TRBJ1-6)
CASSLGPDRGMPLHF

SEQ ID NO: 461255 - protein, 15 aa, Homo sapiens
  CDR3 for alpha chain variable domain of TCR clone 230628 (TRAV8-4, TRAJ3)
CAVTGENLVQQCFQD

SEQ ID NO: 461256 - protein, 16 aa, Homo sapiens
  CDR3 for beta chain variable domain of TCR clone 230628 (TRBV7-3, TRBJ2-1)
CASSLEGYRSYNEQFF

SEQ ID NO: 461257 - protein, 13 aa, Homo sapiens
  CDR3 for alpha chain variable domain of TCR clone 230629 (TRAV26-2, TRAJ43)
CILRAVNNNGMRL

SEQ ID NO: 461258 - protein, 15 aa, Homo sapiens
  CDR3 for beta chain variable domain of TCR clone 230629 (TRBV7-2, TRBJ2-1)
CASTHGTGIYNEQFF

SEQ ID NO: 461259 - protein, 14 aa, Homo sapiens
  CDR3 for alpha chain variable domain of TCR clone 230630 (TRAV12-2, TRAJ17)
CAVLFKAAGNKLTF

SEQ ID NO: 461260 - protein, 15 aa, Homo sapiens
  CDR3 for beta chain variable domain of TCR clone 230630 (TRBV4-3, TRBJ2-1)
CASSPLDRGVNEQFF

SEQ ID NO: 461261 - protein, 14 aa, Homo sapiens
  CDR3 for alpha chain variable domain of TCR clone 230631 (TRAV20, TRAJ42)
CAVQAGGSQGNLIF

SEQ ID NO: 461262 - protein, 15 aa, Homo sapiens
  CDR3 for beta chain variable domain of TCR clone 230631 (TRBV28, TRBJ2-3)
CASSQELGGIDTQYF

SEQ ID NO: 461263 - protein, 11 aa, Homo sapiens
  CDR3 for alpha chain variable domain of TCR clone 230632 (TRAV3, TRAJ21)
CAVGNCNKFYF

SEQ ID NO: 461264 - protein, 13 aa, Homo sapiens
  CDR3 for beta chain variable domain of TCR clone 230632 (TRBV12-5, TRBJ2-3)
CASGDRQSDTQYF

SEQ ID NO: 461265 - protein, 13 aa, Homo sapiens
  CDR3 for alpha chain variable domain of TCR clone 230633 (TRAV17, TRAJ9)
CATDYTGGFKTIF

SEQ ID NO: 461266 - protein, 14 aa, Homo sapiens
  CDR3 for beta chain variable domain of TCR clone 230633 (TRBV5-1, TRBJ2-7)
CASSRGESLYEQYF

SEQ ID NO: 461267 - protein, 15 aa, Homo sapiens
  CDR3 for alpha chain variable domain of TCR clone 230634 (TRAV12-3, TRAJ6)
CAMSATTGGSYIPKF

SEQ ID NO: 461268 - protein, 16 aa, Homo sapiens
  CDR3 for beta chain variable domain of TCR clone 230634 (TRBV20-1, TRBJ1-2)
CSASMGQGVANYGYFF

SEQ ID NO: 461269 - protein, 15 aa, Homo sapiens
  CDR3 for alpha chain variable domain of TCR clone 230635 (TRAV3, TRAJ22)
CAVRDRGGSARQLTL

SEQ ID NO: 461270 - protein, 14 aa, Homo sapiens
  CDR3 for beta chain variable domain of TCR clone 230635 (TRBV12-5, TRBJ2-5)
CASGSRTHQETQYF

SEQ ID NO: 461271 - protein, 17 aa, Homo sapiens
  CDR3 for alpha chain variable domain of TCR clone 230636 (TRAV38-1, TRAJ54)
CAFMKPTGLQGAQKLGF

SEQ ID NO: 461272 - protein, 14 aa, Homo sapiens
  CDR3 for beta chain variable domain of TCR clone 230636 (TRBV19, TRBJ2-7)
CASSIRLGDHEQYF

SEQ ID NO: 461273 - protein, 10 aa, Homo sapiens
  CDR3 for alpha chain variable domain of TCR clone 230637 (TRAV36/DV7, TRAJ49)
CALTGNQFYF

SEQ ID NO: 461274 - protein, 12 aa, Homo sapiens
  CDR3 for beta chain variable domain of TCR clone 230637 (TRBV7-8, TRBJ2-7)
CASSLGDSEQYF

SEQ ID NO: 461275 - protein, 16 aa, Homo sapiens
  CDR3 for alpha chain variable domain of TCR clone 230638 (TRAV1-2, TRAJ10)
CAVRGVLTGGGNKLTF

SEQ ID NO: 461276 - protein, 14 aa, Homo sapiens
  CDR3 for beta chain variable domain of TCR clone 230638 (TRBV7-3, TRBJ1-1)
CASSRQGGDTEAFF

SEQ ID NO: 461277 - protein, 14 aa, Homo sapiens
  CDR3 for alpha chain variable domain of TCR clone 230639 (TRAV12-2, TRAJ44)
CAVNPAGTASKLTF

SEQ ID NO: 461278 - protein, 11 aa, Homo sapiens
  CDR3 for beta chain variable domain of TCR clone 230639 (TRBV27, TRBJ2-3)
CASSLGDTQYF

SEQ ID NO: 461279 - protein, 13 aa, Homo sapiens
  CDR3 for alpha chain variable domain of TCR clone 230640 (TRAV12-1, TRAJ16)
CVVNGPDGQKLLF

SEQ ID NO: 461280 - protein, 14 aa, Homo sapiens
  CDR3 for beta chain variable domain of TCR clone 230640 (TRBV12-4, TRBJ2-7)
CASSPAGLKYEQYF

SEQ ID NO: 461281 - protein, 15 aa, Homo sapiens
  CDR3 for alpha chain variable domain of TCR clone 230641 (TRAV1-2, TRAJ12)
CADARWMDSSYKLIF

SEQ ID NO: 461282 - protein, 21 aa, Homo sapiens
  CDR3 for beta chain variable domain of TCR clone 230641 (TRBV11-2, TRBJ2-7)
LRTRPCISGPAAVGGLDEQYF

SEQ ID NO: 461283 - protein, 15 aa, Homo sapiens
  CDR3 for alpha chain variable domain of TCR clone 230642 (TRAV26-1, TRAJ40)
CIVSFATSGTYKYIF

SEQ ID NO: 461284 - protein, 15 aa, Homo sapiens
  CDR3 for beta chain variable domain of TCR clone 230642 (TRBV5-7, TRBJ2-3)
CASSPGIATTDTQYF

SEQ ID NO: 461285 - protein, 15 aa, Homo sapiens
  CDR3 for alpha chain variable domain of TCR clone 230643 (TRAV4, TRAJ10)
CLVGAGSGGGNKLTF

SEQ ID NO: 461286 - protein, 11 aa, Homo sapiens
  CDR3 for beta chain variable domain of TCR clone 230643 (TRBV5-1, TRBJ2-2)
CASSPSRCEHR

SEQ ID NO: 461287 - protein, 13 aa, Homo sapiens
  CDR3 for alpha chain variable domain of TCR clone 230644 (TRAV8-6, TRAJ49)
CAVITNTGNQFYF

SEQ ID NO: 461288 - protein, 15 aa, Homo sapiens
  CDR3 for beta chain variable domain of TCR clone 230644 (TRBV20-1, TRBJ1-1)
CSASRGVTGNTEAFF

SEQ ID NO: 461289 - protein, 12 aa, Homo sapiens
  CDR3 for alpha chain variable domain of TCR clone 230645 (TRAV3, TRAJ27)
CAMRDGAGKSTF

SEQ ID NO: 461290 - protein, 13 aa, Homo sapiens
  CDR3 for beta chain variable domain of TCR clone 230645 (TRBV10-3, TRBJ1-2)
CAINADLNYGYTF

SEQ ID NO: 461291 - protein, 13 aa, Homo sapiens
  CDR3 for alpha chain variable domain of TCR clone 230646 (TRAV27, TRAJ39)
CAGEGNAGNMLTF

SEQ ID NO: 461292 - protein, 13 aa, Homo sapiens
  CDR3 for beta chain variable domain of TCR clone 230646 (TRBV7-3, TRBJ1-1)
CASSQDWGAEAFF

SEQ ID NO: 461293 - protein, 13 aa, Homo sapiens
  CDR3 for alpha chain variable domain of TCR clone 230647 (TRAV13-2, TRAJ48)
CAEMDFGNEKLTC

SEQ ID NO: 461294 - protein, 13 aa, Homo sapiens
  CDR3 for beta chain variable domain of TCR clone 230647 (TRBV7-9, TRBJ1-2)
CASSLKQNYGYTF

SEQ ID NO: 461295 - protein, 15 aa, Homo sapiens
  CDR3 for alpha chain variable domain of TCR clone 230648 (TRAV29/DV5, TRAJ24)
CAASGATDRWGKFKF

SEQ ID NO: 461296 - protein, 12 aa, Homo sapiens
  CDR3 for beta chain variable domain of TCR clone 230648 (TRBV11-2, TRBJ2-2)
CASSLPTGELFF

SEQ ID NO: 461297 - protein, 13 aa, Homo sapiens
  CDR3 for alpha chain variable domain of TCR clone 230649 (TRAV8-3, TRAJ28)
CAVGAVGSYQLTF

SEQ ID NO: 461298 - protein, 14 aa, Homo sapiens
  CDR3 for beta chain variable domain of TCR clone 230649 (TRBV11-2, TRBJ2-3)
CASSLGGGANTQYF

SEQ ID NO: 461299 - protein, 14 aa, Homo sapiens
  CDR3 for alpha chain variable domain of TCR clone 230650 (TRAV38-1, TRAJ29)
CAFITPSGNTPLVF

SEQ ID NO: 461300 - protein, 11 aa, Homo sapiens
  CDR3 for beta chain variable domain of TCR clone 230650 (TRBV5-1, TRBJ2-1)
CASSIGQEQFF

SEQ ID NO: 461301 - protein, 14 aa, Homo sapiens
  CDR3 for alpha chain variable domain of TCR clone 230651 (TRAV8-3, TRAJ10)
CAVGHAGGGNKLTF

SEQ ID NO: 461302 - protein, 17 aa, Homo sapiens
  CDR3 for beta chain variable domain of TCR clone 230651 (TRBV27, TRBJ2-7)
CASSTKRPGTGPYEQYF

SEQ ID NO: 461303 - protein, 14 aa, Homo sapiens
  CDR3 for alpha chain variable domain of TCR clone 230652 (TRAV3, TRAJ21)
CAVESQANFNKFYF

SEQ ID NO: 461304 - protein, 14 aa, Homo sapiens
  CDR3 for beta chain variable domain of TCR clone 230652 (TRBV7-6, TRBJ2-1)
CASSLGGGADEQFF

SEQ ID NO: 461305 - protein, 14 aa, Homo sapiens
  CDR3 for alpha chain variable domain of TCR clone 230653 (TRAV8-4, TRAJ17)
CAVREGAAGNKLTF

SEQ ID NO: 461306 - protein, 13 aa, Homo sapiens
  CDR3 for beta chain variable domain of TCR clone 230653 (TRBV19, TRBJ2-1)
CASSMYRVNEQFV

SEQ ID NO: 461307 - protein, 17 aa, Homo sapiens
  CDR3 for alpha chain variable domain of TCR clone 230654 (TRAV38-2/DV8, TRAJ38)
CAYRSARGAGNNRKLIW

SEQ ID NO: 461308 - protein, 15 aa, Homo sapiens
  CDR3 for beta chain variable domain of TCR clone 230654 (TRBV5-1, TRBJ2-1)
CASSPPRAPYNEQFF

SEQ ID NO: 461309 - protein, 12 aa, Homo sapiens
  CDR3 for alpha chain variable domain of TCR clone 230655 (TRAV13-1, TRAJ42)
SVLRGSQGNLIF

SEQ ID NO: 461310 - protein, 13 aa, Homo sapiens
  CDR3 for beta chain variable domain of TCR clone 230655 (TRBV2, TRBJ1-4)
CASSELGDEKLFF

SEQ ID NO: 461311 - protein, 15 aa, Homo sapiens
  CDR3 for alpha chain variable domain of TCR clone 230656 (TRAV8-4, TRAJ37)
CAVSRGSGKTGKLIF

SEQ ID NO: 461312 - protein, 17 aa, Homo sapiens
  CDR3 for beta chain variable domain of TCR clone 230656 (TRBV7-8, TRBJ2-6)
CASSAGTGGAGANVLTF

SEQ ID NO: 461313 - protein, 16 aa, Homo sapiens
  CDR3 for alpha chain variable domain of TCR clone 230657 (TRAV35, TRAJ28)
CAGQRYSGAGSYQLTV

SEQ ID NO: 461314 - protein, 13 aa, Homo sapiens
  CDR3 for beta chain variable domain of TCR clone 230657 (TRBV19, TRBJ1-2)
CASSQGQVYGYTF

SEQ ID NO: 461315 - protein, 16 aa, Homo sapiens
  CDR3 for alpha chain variable domain of TCR clone 230658 (TRAV26-1, TRAJ45)
CIVEKYSGGGADGLTF

SEQ ID NO: 461316 - protein, 17 aa, Homo sapiens
  CDR3 for beta chain variable domain of TCR clone 230658 (TRBV7-8, TRBJ2-6)
CASSAGTGGAGANVLTF

SEQ ID NO: 461317 - protein, 11 aa, Homo sapiens
  CDR3 for alpha chain variable domain of TCR clone 230659 (TRAV27, TRAJ45)
CAGAQEEVLTD

SEQ ID NO: 461318 - protein, 17 aa, Homo sapiens
  CDR3 for beta chain variable domain of TCR clone 230659 (TRBV28, TRBJ2-5)
CASSTPEGDALQETQYF

SEQ ID NO: 461319 - protein, 13 aa, Homo sapiens
  CDR3 for alpha chain variable domain of TCR clone 230660 (TRAV26-2, TRAJ43)
CILRAVNNNDMRF

SEQ ID NO: 461320 - protein, 14 aa, Homo sapiens
  CDR3 for beta chain variable domain of TCR clone 230660 (TRBV20-1, TRBJ1-1)
CSAQTRIGGTEAFC

SEQ ID NO: 461321 - protein, 15 aa, Homo sapiens
  CDR3 for alpha chain variable domain of TCR clone 230661 (TRAV23/DV6, TRAJ45)
CAASARGGGAAGLTF

SEQ ID NO: 461322 - protein, 15 aa, Homo sapiens
  CDR3 for beta chain variable domain of TCR clone 230661 (TRBV3-1, TRBJ2-5)
CASSRGQASWKTQYF

SEQ ID NO: 461323 - protein, 11 aa, Homo sapiens
  CDR3 for alpha chain variable domain of TCR clone 230662 (TRAV12-3, TRAJ26)
CAMSYGQNFVF

SEQ ID NO: 461324 - protein, 14 aa, Homo sapiens
  CDR3 for beta chain variable domain of TCR clone 230662 (TRBV7-9, TRBJ2-4)
CASSLAMGGNIQYF

SEQ ID NO: 461325 - protein, 11 aa, Homo sapiens
  CDR3 for alpha chain variable domain of TCR clone 230663 (TRAV21, TRAJ11)
CAVNGYSNLTF

SEQ ID NO: 461326 - protein, 14 aa, Homo sapiens
  CDR3 for beta chain variable domain of TCR clone 230663 (TRBV19, TRBJ2-1)
CASPTFVLSGEQFF

SEQ ID NO: 461327 - protein, 13 aa, Homo sapiens
  CDR3 for alpha chain variable domain of TCR clone 230664 (TRAV1-1, TRAJ28)
CVTSGSGSYQLTF

SEQ ID NO: 461328 - protein, 17 aa, Homo sapiens
  CDR3 for beta chain variable domain of TCR clone 230664 (TRBV18, TRBJ2-2)
CASSQRSSGQGPGELFF

SEQ ID NO: 461329 - protein, 14 aa, Homo sapiens
  CDR3 for alpha chain variable domain of TCR clone 230665 (TRAV8-4, TRAJ54)
CAVSEVLGAQKLVF

SEQ ID NO: 461330 - protein, 15 aa, Homo sapiens
  CDR3 for beta chain variable domain of TCR clone 230665 (TRBV6-1, TRBJ2-5)
CASSEGWGIQETQYF

SEQ ID NO: 461331 - protein, 12 aa, Homo sapiens
  CDR3 for alpha chain variable domain of TCR clone 230666 (TRAV2, TRAJ10)
CASTGGGTKLTF

SEQ ID NO: 461332 - protein, 16 aa, Homo sapiens
  CDR3 for beta chain variable domain of TCR clone 230666 (TRBV19, TRBJ2-2)
CASRSPGTGATGELFF

SEQ ID NO: 461333 - protein, 11 aa, Homo sapiens
  CDR3 for alpha chain variable domain of TCR clone 230667 (TRAV2, TRAJ33)
CAVEINYQLIW

SEQ ID NO: 461334 - protein, 14 aa, Homo sapiens
  CDR3 for beta chain variable domain of TCR clone 230667 (TRBV7-6, TRBJ2-7)
CASSFRQGADEQYF

SEQ ID NO: 461335 - protein, 15 aa, Homo sapiens
  CDR3 for alpha chain variable domain of TCR clone 230668 (TRAV4, TRAJ26)
CLVGDMNNYCQNFVF

SEQ ID NO: 461336 - protein, 16 aa, Homo sapiens
  CDR3 for beta chain variable domain of TCR clone 230668 (TRBV28, TRBJ1-4)
CASSSRTGAANEKLFF

SEQ ID NO: 461337 - protein, 12 aa, Homo sapiens
  CDR3 for alpha chain variable domain of TCR clone 230669 (TRAV20, TRAJ24)
CAVYNSWGKLQF

SEQ ID NO: 461338 - protein, 15 aa, Homo sapiens
  CDR3 for beta chain variable domain of TCR clone 230669 (TRBV20-1, TRBJ2-5)
CSARVPPRGRETQYF

SEQ ID NO: 461339 - protein, 17 aa, Homo sapiens
  CDR3 for alpha chain variable domain of TCR clone 230670 (TRAV4, TRAJ18)
CLVGERSVGSTLGRLYF

SEQ ID NO: 461340 - protein, 13 aa, Homo sapiens
  CDR3 for beta chain variable domain of TCR clone 230670 (TRBV4-1, TRBJ1-1)
CASSRKMNTEAFF

SEQ ID NO: 461341 - protein, 14 aa, Homo sapiens
  CDR3 for alpha chain variable domain of TCR clone 230671 (TRAV16, TRAJ15)
CALSGPQAGTALIF

SEQ ID NO: 461342 - protein, 15 aa, Homo sapiens
  CDR3 for beta chain variable domain of TCR clone 230671 (TRBV7-9, TRBJ1-1)
CASSLLEQGGTEAFF

SEQ ID NO: 461343 - protein, 11 aa, Homo sapiens
  CDR3 for alpha chain variable domain of TCR clone 230672 (TRAV3, TRAJ21)
CAVGNFNKFYF

SEQ ID NO: 461344 - protein, 16 aa, Homo sapiens
  CDR3 for beta chain variable domain of TCR clone 230672 (TRBV19, TRBJ2-1)
CASSKAGPSSYNEQFN

SEQ ID NO: 461345 - protein, 16 aa, Homo sapiens
  CDR3 for alpha chain variable domain of TCR clone 230673 (TRAV22, TRAJ45)
CAVERGKRGGADGLTF

SEQ ID NO: 461346 - protein, 14 aa, Homo sapiens
  CDR3 for beta chain variable domain of TCR clone 230673 (TRBV6-6, TRBJ1-6)
CASSFEGTTSPLHF

SEQ ID NO: 461347 - protein, 14 aa, Homo sapiens
  CDR3 for alpha chain variable domain of TCR clone 230674 (TRAV35, TRAJ53)
CAGKSGGSNYKLTF

SEQ ID NO: 461348 - protein, 15 aa, Homo sapiens
  CDR3 for beta chain variable domain of TCR clone 230674 (TRBV7-9, TRBJ2-1)
CASSLGWGRANEQFF

SEQ ID NO: 461349 - protein, 14 aa, Homo sapiens
  CDR3 for alpha chain variable domain of TCR clone 230675 (TRAV3, TRAJ34)
CAVRAPGNTDKLIF

SEQ ID NO: 461350 - protein, 17 aa, Homo sapiens
  CDR3 for beta chain variable domain of TCR clone 230675 (TRBV20-1, TRBJ2-7)
CSAATGLARGISYEQYF

SEQ ID NO: 461351 - protein, 12 aa, Homo sapiens
  CDR3 for alpha chain variable domain of TCR clone 230676 (TRAV12-2, TRAJ8)
CAVNTGFQKLVF

SEQ ID NO: 461352 - protein, 15 aa, Homo sapiens
  CDR3 for beta chain variable domain of TCR clone 230676 (TRBV7-8, TRBJ1-5)
CASSVERRGLEPQHF

SEQ ID NO: 461353 - protein, 15 aa, Homo sapiens
  CDR3 for alpha chain variable domain of TCR clone 230677 (TRAV13-1, TRAJ17)
CAASIERAAGNKLTF

SEQ ID NO: 461354 - protein, 12 aa, Homo sapiens
  CDR3 for beta chain variable domain of TCR clone 230677 (TRBV5-7, TRBJ1-1)
CANSLGRGRAFF

SEQ ID NO: 461355 - protein, 18 aa, Homo sapiens
  CDR3 for alpha chain variable domain of TCR clone 230678 (TRAV26-1, TRAJ52)
CIVRVEGAGGTSYGKLTF

SEQ ID NO: 461356 - protein, 20 aa, Homo sapiens
  CDR3 for beta chain variable domain of TCR clone 230678 (TRBV28, TRBJ2-1)
CASTPIGRPPGLAGGNEQFF

SEQ ID NO: 461357 - protein, 13 aa, Homo sapiens
  CDR3 for alpha chain variable domain of TCR clone 230679 (TRAV12-3, TRAJ30)
CAMSAKWDDKIIF

SEQ ID NO: 461358 - protein, 13 aa, Homo sapiens
  CDR3 for beta chain variable domain of TCR clone 230679 (TRBV5-5, TRBJ1-2)
CASSFWRGEDYTF

SEQ ID NO: 461359 - protein, 11 aa, Homo sapiens
  CDR3 for alpha chain variable domain of TCR clone 230680 (TRAV2, TRAJ13)
CASGGYQKVTF

SEQ ID NO: 461360 - protein, 15 aa, Homo sapiens
  CDR3 for beta chain variable domain of TCR clone 230680 (TRBV6-1, TRBJ2-2)
CASSSLRGDTGELFF

SEQ ID NO: 461361 - protein, 16 aa, Homo sapiens
  CDR3 for alpha chain variable domain of TCR clone 230681 (TRAV3, TRAJ10)
CAVRDMRAGGGKKLTF

SEQ ID NO: 461362 - protein, 11 aa, Homo sapiens
  CDR3 for beta chain variable domain of TCR clone 230681 (TRBV29-1, TRBJ2-5)
CSEDRTGTQYF

SEQ ID NO: 461363 - protein, 14 aa, Homo sapiens
  CDR3 for alpha chain variable domain of TCR clone 230682 (TRAV12-2, TRAJ13)
CAVKKPGGYQKVTF

SEQ ID NO: 461364 - protein, 13 aa, Homo sapiens
  CDR3 for beta chain variable domain of TCR clone 230682 (TRBV20-1, TRBJ1-1)
CSARLGQGTEAFF

SEQ ID NO: 461365 - protein, 12 aa, Homo sapiens
  CDR3 for alpha chain variable domain of TCR clone 230683 (TRAV23/DV6, TRAJ16)
CAATGTGQKLLF

SEQ ID NO: 461366 - protein, 17 aa, Homo sapiens
  CDR3 for beta chain variable domain of TCR clone 230683 (TRBV13, TRBJ2-3)
CASSLSRVAGGRNTQYF

SEQ ID NO: 461367 - protein, 13 aa, Homo sapiens
  CDR3 for alpha chain variable domain of TCR clone 230684 (TRAV12-2, TRAJ50)
CAVIVTSYDKVIF

SEQ ID NO: 461368 - protein, 15 aa, Homo sapiens
  CDR3 for beta chain variable domain of TCR clone 230684 (TRBV2, TRBJ2-1)
CASSELAGSYNEQFF

SEQ ID NO: 461369 - protein, 14 aa, Homo sapiens
  CDR3 for alpha chain variable domain of TCR clone 230685 (TRAV23/DV6, TRAJ37)
CAASTSSNTGKLIF

SEQ ID NO: 461370 - protein, 13 aa, Homo sapiens
  CDR3 for beta chain variable domain of TCR clone 230685 (TRBV7-2, TRBJ1-1)
CASNLKGAKVAFF

SEQ ID NO: 461371 - protein, 15 aa, Homo sapiens
  CDR3 for alpha chain variable domain of TCR clone 230686 (TRAV2, TRAJ24)
CAVEVLTDSWGKFQL

SEQ ID NO: 461372 - protein, 14 aa, Homo sapiens
  CDR3 for beta chain variable domain of TCR clone 230686 (TRBV19, TRBJ2-1)
CASSMGSGRRSSSS

SEQ ID NO: 461373 - protein, 13 aa, Homo sapiens
  CDR3 for alpha chain variable domain of TCR clone 230687 (TRAV8-3, TRAJ28)
CAVGAVWSYQLTF

SEQ ID NO: 461374 - protein, 15 aa, Homo sapiens
  CDR3 for beta chain variable domain of TCR clone 230687 (TRBV20-1, TRBJ2-7)
CSARDRVSGMDEQYF

SEQ ID NO: 461375 - protein, 16 aa, Homo sapiens
  CDR3 for alpha chain variable domain of TCR clone 230688 (TRAV30, TRAJ24)
CGTEIVDADSWGKFQF

SEQ ID NO: 461376 - protein, 17 aa, Homo sapiens
  CDR3 for beta chain variable domain of TCR clone 230688 (TRBV7-8, TRBJ2-3)
CASSPGGLAGFGDTQYF

SEQ ID NO: 461377 - protein, 13 aa, Homo sapiens
  CDR3 for alpha chain variable domain of TCR clone 230689 (TRAV8-3, TRAJ44)
CAVAPGTASKLTF

SEQ ID NO: 461378 - protein, 14 aa, Homo sapiens
  CDR3 for beta chain variable domain of TCR clone 230689 (TRBV11-2, TRBJ2-3)
CASRRLARTDTQYF

SEQ ID NO: 461379 - protein, 15 aa, Homo sapiens
  CDR3 for alpha chain variable domain of TCR clone 230690 (TRAV26-1, TRAJ44)
CIVRIGTGTASKLTF

SEQ ID NO: 461380 - protein, 11 aa, Homo sapiens
  CDR3 for beta chain variable domain of TCR clone 230690 (TRBV12-4, TRBJ1-2)
CPSRGDRGYTF

SEQ ID NO: 461381 - protein, 12 aa, Homo sapiens
  CDR3 for alpha chain variable domain of TCR clone 230691 (TRAV27, TRAJ42)
CAGGGSQGNLIF

SEQ ID NO: 461382 - protein, 13 aa, Homo sapiens
  CDR3 for beta chain variable domain of TCR clone 230691 (TRBV19, TRBJ2-7)
CASSVRSSYEQYF

SEQ ID NO: 461383 - protein, 14 aa, Homo sapiens
  CDR3 for alpha chain variable domain of TCR clone 230692 (TRAV12-2, TRAJ13)
CAVKKTGGYQKVTF

SEQ ID NO: 461384 - protein, 15 aa, Homo sapiens
  CDR3 for beta chain variable domain of TCR clone 230692 (TRBV27, TRBJ2-1)
CASSNGGASSNEQFF

SEQ ID NO: 461385 - protein, 14 aa, Homo sapiens
  CDR3 for alpha chain variable domain of TCR clone 230693 (TRAV23/DV6, TRAJ27)
CAASRDTNAGKSTF

SEQ ID NO: 461386 - protein, 13 aa, Homo sapiens
  CDR3 for beta chain variable domain of TCR clone 230693 (TRBV20-1, TRBJ1-5)
CSASGRGTQPQHF

SEQ ID NO: 461387 - protein, 12 aa, Homo sapiens
  CDR3 for alpha chain variable domain of TCR clone 230694 (TRAV36/DV7, TRAJ40)
CAVGTGTYKYIF

SEQ ID NO: 461388 - protein, 14 aa, Homo sapiens
  CDR3 for beta chain variable domain of TCR clone 230694 (TRBV7-6, TRBJ2-3)
CASSLGTVTDTQYF

SEQ ID NO: 461389 - protein, 14 aa, Homo sapiens
  CDR3 for alpha chain variable domain of TCR clone 230695 (TRAV1-2, TRAJ16)
CAVNRFSDGQKLLF

SEQ ID NO: 461390 - protein, 12 aa, Homo sapiens
  CDR3 for beta chain variable domain of TCR clone 230695 (TRBV14, TRBJ2-7)
CASSRLEGEQYF

SEQ ID NO: 461391 - protein, 12 aa, Homo sapiens
  CDR3 for alpha chain variable domain of TCR clone 230696 (TRAV23/DV6, TRAJ49)
CAAEAPGNQFYF

SEQ ID NO: 461392 - protein, 15 aa, Homo sapiens
  CDR3 for beta chain variable domain of TCR clone 230696 (TRBV4-1, TRBJ2-3)
CASSRGQGIPDTQYF

SEQ ID NO: 461393 - protein, 12 aa, Homo sapiens
  CDR3 for alpha chain variable domain of TCR clone 230697 (TRAV2, TRAJ10)
CASTGGGNKLSF

SEQ ID NO: 461394 - protein, 14 aa, Homo sapiens
  CDR3 for beta chain variable domain of TCR clone 230697 (TRBV19, TRBJ2-5)
CASSMTGQQETQYF

SEQ ID NO: 461395 - protein, 14 aa, Homo sapiens
  CDR3 for alpha chain variable domain of TCR clone 230698 (TRAV35, TRAJ22)
CAGLRPGSAMQLTF

SEQ ID NO: 461396 - protein, 13 aa, Homo sapiens
  CDR3 for beta chain variable domain of TCR clone 230698 (TRBV20-1, TRBJ1-1)
CSARGGGNTEAFF

SEQ ID NO: 461397 - protein, 13 aa, Homo sapiens
  CDR3 for alpha chain variable domain of TCR clone 230699 (TRAV20, TRAJ42)
CAVQGGSQGNLIF

SEQ ID NO: 461398 - protein, 15 aa, Homo sapiens
  CDR3 for beta chain variable domain of TCR clone 230699 (TRBV10-1, TRBJ2-1)
CASSEWRGTFNEQFF

SEQ ID NO: 461399 - protein, 16 aa, Homo sapiens
  CDR3 for alpha chain variable domain of TCR clone 230700 (TRAV3, TRAJ17)
CAVSATFKAAGNKLTF

SEQ ID NO: 461400 - protein, 12 aa, Homo sapiens
  CDR3 for beta chain variable domain of TCR clone 230700 (TRBV28, TRBJ1-5)
CASTSEAQPQHF

SEQ ID NO: 461401 - protein, 13 aa, Homo sapiens
  CDR3 for alpha chain variable domain of TCR clone 230701 (TRAV2, TRAJ40)
CAVVTSGTYEYIF

SEQ ID NO: 461402 - protein, 13 aa, Homo sapiens
  CDR3 for beta chain variable domain of TCR clone 230701 (TRBV7-6, TRBJ2-1)
CQQLGWGADEQFF

SEQ ID NO: 461403 - protein, 11 aa, Homo sapiens
  CDR3 for alpha chain variable domain of TCR clone 230702 (TRAV29/DV5, TRAJ30)
CAVREVDTIIF

SEQ ID NO: 461404 - protein, 16 aa, Homo sapiens
  CDR3 for beta chain variable domain of TCR clone 230702 (TRBV27, TRBJ1-5)
CASSLSGGASNQPQHF

SEQ ID NO: 461405 - protein, 15 aa, Homo sapiens
  CDR3 for alpha chain variable domain of TCR clone 230703 (TRAV12-3, TRAJ6)
CAMSATTGGSYIPTF

SEQ ID NO: 461406 - protein, 13 aa, Homo sapiens
  CDR3 for beta chain variable domain of TCR clone 230703 (TRBV7-2, TRBJ2-2)
CASSSVRAGELFF

SEQ ID NO: 461407 - protein, 14 aa, Homo sapiens
  CDR3 for alpha chain variable domain of TCR clone 230704 (TRAV3, TRAJ21)
CAVESQANFNKFYF

SEQ ID NO: 461408 - protein, 14 aa, Homo sapiens
  CDR3 for beta chain variable domain of TCR clone 230704 (TRBV28, TRBJ1-2)
CASRIQGANYGYTF

SEQ ID NO: 461409 - protein, 15 aa, Homo sapiens
  CDR3 for alpha chain variable domain of TCR clone 230705 (TRAV17, TRAJ57)
CATGPSQGGSEKLVF

SEQ ID NO: 461410 - protein, 15 aa, Homo sapiens
  CDR3 for beta chain variable domain of TCR clone 230705 (TRBV12-4, TRBJ1-5)
CRQPTGRGSNQPQHF

SEQ ID NO: 461411 - protein, 19 aa, Homo sapiens
  CDR3 for alpha chain variable domain of TCR clone 230706 (TRAV13-1, TRAJ52)
CAASPYQNAGGTSYGKLTF

SEQ ID NO: 461412 - protein, 14 aa, Homo sapiens
  CDR3 for beta chain variable domain of TCR clone 230706 (TRBV2, TRBJ2-5)
CASSEVLAQETQYF

SEQ ID NO: 461413 - protein, 12 aa, Homo sapiens
  CDR3 for alpha chain variable domain of TCR clone 230707 (TRAV13-1, TRAJ21)
CAAKEGFNKFYF

SEQ ID NO: 461414 - protein, 15 aa, Homo sapiens
  CDR3 for beta chain variable domain of TCR clone 230707 (TRBV7-9, TRBJ1-6)
CASSSPGRGNSPLHC

SEQ ID NO: 461415 - protein, 15 aa, Homo sapiens
  CDR3 for alpha chain variable domain of TCR clone 230708 (TRAV21, TRAJ53)
CATLNSGGSNYKLTF

SEQ ID NO: 461416 - protein, 13 aa, Homo sapiens
  CDR3 for beta chain variable domain of TCR clone 230708 (TRBV18, TRBJ2-2)
CASSPARGGELFF

SEQ ID NO: 461417 - protein, 17 aa, Homo sapiens
  CDR3 for alpha chain variable domain of TCR clone 230709 (TRAV17, TRAJ52)
CATERPSGGTSYGKLTF

SEQ ID NO: 461418 - protein, 12 aa, Homo sapiens
  CDR3 for beta chain variable domain of TCR clone 230709 (TRBV7-9, TRBJ2-7)
CASSIKREEQYF

SEQ ID NO: 461419 - protein, 13 aa, Homo sapiens
  CDR3 for alpha chain variable domain of TCR clone 230710 (TRAV30, TRAJ34)
CGTVGYNTDKLIF

SEQ ID NO: 461420 - protein, 16 aa, Homo sapiens
  CDR3 for beta chain variable domain of TCR clone 230710 (TRBV7-9, TRBJ1-2)
CASSLGFSSGEDVYTF

SEQ ID NO: 461421 - protein, 11 aa, Homo sapiens
  CDR3 for alpha chain variable domain of TCR clone 230711 (TRAV16, TRAJ49)
CSLNTGNQFYF

SEQ ID NO: 461422 - protein, 15 aa, Homo sapiens
  CDR3 for beta chain variable domain of TCR clone 230711 (TRBV11-3, TRBJ2-3)
CASLKDGREGDTQYF

SEQ ID NO: 461423 - protein, 15 aa, Homo sapiens
  CDR3 for alpha chain variable domain of TCR clone 230712 (TRAV29/DV5, TRAJ57)
CAASLIRGGSEKLVF

SEQ ID NO: 461424 - protein, 15 aa, Homo sapiens
  CDR3 for beta chain variable domain of TCR clone 230712 (TRBV5-1, TRBJ1-3)
CASSLEGGSGNTIYF

SEQ ID NO: 461425 - protein, 13 aa, Homo sapiens
  CDR3 for alpha chain variable domain of TCR clone 230713 (TRAV12-1, TRAJ31)
CVVNMNNNARLMF

SEQ ID NO: 461426 - protein, 12 aa, Homo sapiens
  CDR3 for beta chain variable domain of TCR clone 230713 (TRBV11-2, TRBJ2-2)
CASSLGGGELFF

SEQ ID NO: 461427 - protein, 16 aa, Homo sapiens
  CDR3 for alpha chain variable domain of TCR clone 230714 (TRAV8-2, TRAJ7)
CVVCEGPYYGNNRLAF

SEQ ID NO: 461428 - protein, 15 aa, Homo sapiens
  CDR3 for beta chain variable domain of TCR clone 230714 (TRBV27, TRBJ2-3)
CASSLGLAATDTQYF

SEQ ID NO: 461429 - protein, 11 aa, Homo sapiens
  CDR3 for alpha chain variable domain of TCR clone 230715 (TRAV23/DV6, TRAJ48)
CPPRWGEKLTF

SEQ ID NO: 461430 - protein, 13 aa, Homo sapiens
  CDR3 for beta chain variable domain of TCR clone 230715 (TRBV12-4, TRBJ2-5)
CASSPGTEETQYF

SEQ ID NO: 461431 - protein, 12 aa, Homo sapiens
  CDR3 for alpha chain variable domain of TCR clone 230716 (TRAV2, TRAJ33)
CAFMDSNYQLIW

SEQ ID NO: 461432 - protein, 16 aa, Homo sapiens
  CDR3 for beta chain variable domain of TCR clone 230716 (TRBV2, TRBJ2-7)
CASSEPWTGPSYDQYF

SEQ ID NO: 461433 - protein, 16 aa, Homo sapiens
  CDR3 for alpha chain variable domain of TCR clone 230717 (TRAV30, TRAJ24)
CGTEIVDADSLGKFQF

SEQ ID NO: 461434 - protein, 15 aa, Homo sapiens
  CDR3 for beta chain variable domain of TCR clone 230717 (TRBV5-1, TRBJ1-1)
CASSLAPRGNTEAFF

SEQ ID NO: 461435 - protein, 15 aa, Homo sapiens
  CDR3 for alpha chain variable domain of TCR clone 230718 (TRAV12-3, TRAJ6)
CAMSATSGGSYIPTF

SEQ ID NO: 461436 - protein, 14 aa, Homo sapiens
  CDR3 for beta chain variable domain of TCR clone 230718 (TRBV7-9, TRBJ2-3)
CASSLEDCTDTQYF

SEQ ID NO: 461437 - protein, 15 aa, Homo sapiens
  CDR3 for alpha chain variable domain of TCR clone 230719 (TRAV3, TRAJ22)
CAVRDRGGSARQLTF

SEQ ID NO: 461438 - protein, 16 aa, Homo sapiens
  CDR3 for beta chain variable domain of TCR clone 230719 (TRBV7-2, TRBJ1-2)
CASSSNQDRRGHGYTF

SEQ ID NO: 461439 - protein, 12 aa, Homo sapiens
  CDR3 for alpha chain variable domain of TCR clone 230720 (TRAV12-1, TRAJ31)
CVSWNNNARLMF

SEQ ID NO: 461440 - protein, 13 aa, Homo sapiens
  CDR3 for beta chain variable domain of TCR clone 230720 (TRBV7-3, TRBJ1-1)
CASSQDWGAEAFF

SEQ ID NO: 461441 - protein, 13 aa, Homo sapiens
  CDR3 for alpha chain variable domain of TCR clone 230721 (TRAV35, TRAJ42)
CAGFPGSQGNLIF

SEQ ID NO: 461442 - protein, 12 aa, Homo sapiens
  CDR3 for beta chain variable domain of TCR clone 230721 (TRBV7-9, TRBJ2-7)
CASSFGSYEQYF

SEQ ID NO: 461443 - protein, 12 aa, Homo sapiens
  CDR3 for alpha chain variable domain of TCR clone 230722 (TRAV25, TRAJ16)
CAGNRDGQQLLF

SEQ ID NO: 461444 - protein, 15 aa, Homo sapiens
  CDR3 for beta chain variable domain of TCR clone 230722 (TRBV11-3, TRBJ2-3)
CASLKDGREGDTQYF

SEQ ID NO: 461445 - protein, 16 aa, Homo sapiens
  CDR3 for alpha chain variable domain of TCR clone 230723 (TRAV26-1, TRAJ32)
CIVRTNYGGATNKLIF

SEQ ID NO: 461446 - protein, 16 aa, Homo sapiens
  CDR3 for beta chain variable domain of TCR clone 230723 (TRBV4-2, TRBJ2-3)
CASSQELAGDTDTQYF

SEQ ID NO: 461447 - protein, 14 aa, Homo sapiens
  CDR3 for alpha chain variable domain of TCR clone 230724 (TRAV4, TRAJ26)
CLVGPHNYGQHFVF

SEQ ID NO: 461448 - protein, 17 aa, Homo sapiens
  CDR3 for beta chain variable domain of TCR clone 230724 (TRBV24-1, TRBJ2-1)
CATSDVSTSGTYNEQFF

SEQ ID NO: 461449 - protein, 12 aa, Homo sapiens
  CDR3 for alpha chain variable domain of TCR clone 230725 (TRAV13-1, TRAJ21)
CAAKEVFNKFYF

SEQ ID NO: 461450 - protein, 19 aa, Homo sapiens
  CDR3 for beta chain variable domain of TCR clone 230725 (TRBV2, TRBJ2-7)
CASSDDETSGRANYYEQYF

SEQ ID NO: 461451 - protein, 13 aa, Homo sapiens
  CDR3 for alpha chain variable domain of TCR clone 230726 (TRAV1-1, TRAJ9)
CAAKNTGGFQTIL

SEQ ID NO: 461452 - protein, 14 aa, Homo sapiens
  CDR3 for beta chain variable domain of TCR clone 230726 (TRBV20-1, TRBJ2-1)
CSAQTGGSANEQFF

SEQ ID NO: 461453 - protein, 14 aa, Homo sapiens
  CDR3 for alpha chain variable domain of TCR clone 230727 (TRAV1-2, TRAJ8)
CAVREDTGFQKLVF

SEQ ID NO: 461454 - protein, 15 aa, Homo sapiens
  CDR3 for beta chain variable domain of TCR clone 230727 (TRBV7-3, TRBJ1-1)
CASSYSGQGSTEAFF

SEQ ID NO: 461455 - protein, 14 aa, Homo sapiens
  CDR3 for alpha chain variable domain of TCR clone 230728 (TRAV34, TRAJ44)
CGADGTGTASKLTF

SEQ ID NO: 461456 - protein, 15 aa, Homo sapiens
  CDR3 for beta chain variable domain of TCR clone 230728 (TRBV5-1, TRBJ2-1)
CASSLPRAPYNEQFF

SEQ ID NO: 461457 - protein, 15 aa, Homo sapiens
  CDR3 for alpha chain variable domain of TCR clone 230729 (TRAV34, TRAJ38)
CGADFTPGNNRKLIW

SEQ ID NO: 461458 - protein, 14 aa, Homo sapiens
  CDR3 for beta chain variable domain of TCR clone 230729 (TRBV4-1, TRBJ2-5)
CASSQYRDQETQYF

SEQ ID NO: 461459 - protein, 11 aa, Homo sapiens
  CDR3 for alpha chain variable domain of TCR clone 230730 (TRAV17, TRAJ39)
CATNPYNMLTF

SEQ ID NO: 461460 - protein, 12 aa, Homo sapiens
  CDR3 for beta chain variable domain of TCR clone 230730 (TRBV28, TRBJ2-3)
CASSLYRDTQYF

SEQ ID NO: 461461 - protein, 15 aa, Homo sapiens
  CDR3 for alpha chain variable domain of TCR clone 230731 (TRAV12-2, TRAJ8)
CSVREENTGFQKLVF

SEQ ID NO: 461462 - protein, 14 aa, Homo sapiens
  CDR3 for beta chain variable domain of TCR clone 230731 (TRBV9, TRBJ1-3)
CASSVVGDGNTIYF

SEQ ID NO: 461463 - protein, 12 aa, Homo sapiens
  CDR3 for alpha chain variable domain of TCR clone 230732 (TRAV12-3, TRAJ17)
CAMTLTGNKLTF

SEQ ID NO: 461464 - protein, 11 aa, Homo sapiens
  CDR3 for beta chain variable domain of TCR clone 230732 (TRBV23-1, TRBJ2-7)
SSSGTGLEQYF

SEQ ID NO: 461465 - protein, 14 aa, Homo sapiens
  CDR3 for alpha chain variable domain of TCR clone 230733 (TRAV1-2, TRAJ8)
CAVREDTGFQKLVF

SEQ ID NO: 461466 - protein, 15 aa, Homo sapiens
  CDR3 for beta chain variable domain of TCR clone 230733 (TRBV27, TRBJ2-1)
CASSNGGGSANEQFF

SEQ ID NO: 461467 - protein, 13 aa, Homo sapiens
  CDR3 for alpha chain variable domain of TCR clone 230734 (TRAV35, TRAJ36)
CAGPRIGANNLFF

SEQ ID NO: 461468 - protein, 15 aa, Homo sapiens
  CDR3 for beta chain variable domain of TCR clone 230734 (TRBV28, TRBJ2-5)
CASSPQWSYQETQYF

SEQ ID NO: 461469 - protein, 16 aa, Homo sapiens
  CDR3 for alpha chain variable domain of TCR clone 230735 (TRAV30, TRAJ24)
CGTEIVDADSWGTFHF

SEQ ID NO: 461470 - protein, 14 aa, Homo sapiens
  CDR3 for beta chain variable domain of TCR clone 230735 (TRBV12-5, TRBJ2-5)
CASGSRTHQETQYF

SEQ ID NO: 461471 - protein, 14 aa, Homo sapiens
  CDR3 for alpha chain variable domain of TCR clone 230736 (TRAV27, TRAJ36)
CAGLPKRGANNLFF

SEQ ID NO: 461472 - protein, 15 aa, Homo sapiens
  CDR3 for beta chain variable domain of TCR clone 230736 (TRBV18, TRBJ2-7)
CASSPASTPNYEQYF

SEQ ID NO: 461473 - protein, 15 aa, Homo sapiens
  CDR3 for alpha chain variable domain of TCR clone 230737 (TRAV13-2, TRAJ15)
CAEILGHQAGTALIF

SEQ ID NO: 461474 - protein, 13 aa, Homo sapiens
  CDR3 for beta chain variable domain of TCR clone 230737 (TRBV27, TRBJ1-4)
CASSLMGDEKLFF

SEQ ID NO: 461475 - protein, 11 aa, Homo sapiens
  CDR3 for alpha chain variable domain of TCR clone 230738 (TRAV26-1, TRAJ37)
CIVRVGRKLIF

SEQ ID NO: 461476 - protein, 13 aa, Homo sapiens
  CDR3 for beta chain variable domain of TCR clone 230738 (TRBV20-1, TRBJ1-1)
CSARGRGNTEAFF

SEQ ID NO: 461477 - protein, 11 aa, Homo sapiens
  CDR3 for alpha chain variable domain of TCR clone 230739 (TRAV26-1, TRAJ37)
CIVRVGRKLIF

SEQ ID NO: 461478 - protein, 12 aa, Homo sapiens
  CDR3 for beta chain variable domain of TCR clone 230739 (TRBV7-9, TRBJ2-7)
CASSFGSYEQYF

SEQ ID NO: 461479 - protein, 18 aa, Homo sapiens
  CDR3 for alpha chain variable domain of TCR clone 230740 (TRAV12-3, TRAJ52)
CAMSVGGACGTSYGKLTF

SEQ ID NO: 461480 - protein, 15 aa, Homo sapiens
  CDR3 for beta chain variable domain of TCR clone 230740 (TRBV19, TRBJ1-2)
CASSVGQVLNYGYTF

SEQ ID NO: 461481 - protein, 11 aa, Homo sapiens
  CDR3 for alpha chain variable domain of TCR clone 230741 (TRAV1-2, TRAJ20)
CAVANDYKLSF

SEQ ID NO: 461482 - protein, 14 aa, Homo sapiens
  CDR3 for beta chain variable domain of TCR clone 230741 (TRBV7-8, TRBJ1-2)
CASSPDSLSYGYTF

SEQ ID NO: 461483 - protein, 15 aa, Homo sapiens
  CDR3 for alpha chain variable domain of TCR clone 230742 (TRAV8-4, TRAJ10)
CAVSDQMGGGNKPTF

SEQ ID NO: 461484 - protein, 16 aa, Homo sapiens
  CDR3 for beta chain variable domain of TCR clone 230742 (TRBV20-1, TRBJ2-1)
CSARDVTPPPYNEQFF

SEQ ID NO: 461485 - protein, 14 aa, Homo sapiens
  CDR3 for alpha chain variable domain of TCR clone 230743 (TRAV9-2, TRAJ53)
CALFSGGSNYKLTF

SEQ ID NO: 461486 - protein, 15 aa, Homo sapiens
  CDR3 for beta chain variable domain of TCR clone 230743 (TRBV7-9, TRBJ1-6)
CASSSPGRGNSPLHF

SEQ ID NO: 461487 - protein, 15 aa, Homo sapiens
  CDR3 for alpha chain variable domain of TCR clone 230744 (TRAV12-3, TRAJ10)
CASYILTGGGNKLTF

SEQ ID NO: 461488 - protein, 20 aa, Homo sapiens
  CDR3 for beta chain variable domain of TCR clone 230744 (TRBV19, TRBJ2-1)
CASSISRTVTSTRLNNEQFF

SEQ ID NO: 461489 - protein, 14 aa, Homo sapiens
  CDR3 for alpha chain variable domain of TCR clone 230745 (TRAV12-2, TRAJ45)
CAVNKGGGAAGLTF

SEQ ID NO: 461490 - protein, 15 aa, Homo sapiens
  CDR3 for beta chain variable domain of TCR clone 230745 (TRBV9, TRBJ1-6)
CASSVAGTGDSPLHF

SEQ ID NO: 461491 - protein, 21 aa, Homo sapiens
  CDR3 for alpha chain variable domain of TCR clone 230746 (TRAV3, )
CAVRPTPDIQNPDPAVYQLRD

SEQ ID NO: 461492 - protein, 18 aa, Homo sapiens
  CDR3 for beta chain variable domain of TCR clone 230746 (TRBV19, TRBJ2-6)
CASSADRAGSSGANVLTF

SEQ ID NO: 461493 - protein, 12 aa, Homo sapiens
  CDR3 for alpha chain variable domain of TCR clone 230747 (TRAV2, TRAJ10)
CASTGGGNKLTF

SEQ ID NO: 461494 - protein, 13 aa, Homo sapiens
  CDR3 for beta chain variable domain of TCR clone 230747 (TRBV10-3, TRBJ2-7)
CASKLAVNYEQYF

SEQ ID NO: 461495 - protein, 16 aa, Homo sapiens
  CDR3 for alpha chain variable domain of TCR clone 230748 (TRAV1-1, TRAJ45)
CAVRAYSGGGADGRTF

SEQ ID NO: 461496 - protein, 13 aa, Homo sapiens
  CDR3 for beta chain variable domain of TCR clone 230748 (TRBV20-1, TRBJ1-2)
CSARGTADYGYTF

SEQ ID NO: 461497 - protein, 14 aa, Homo sapiens
  CDR3 for alpha chain variable domain of TCR clone 230749 (TRAV12-2, TRAJ17)
CAVNIKAAGNTLTF

SEQ ID NO: 461498 - protein, 13 aa, Homo sapiens
  CDR3 for beta chain variable domain of TCR clone 230749 (TRBV4-1, TRBJ2-2)
CASSQENTGELFF

SEQ ID NO: 461499 - protein, 15 aa, Homo sapiens
  CDR3 for alpha chain variable domain of TCR clone 230750 (TRAV2, TRAJ20)
CAVVLRGSNDYKLSF

SEQ ID NO: 461500 - protein, 12 aa, Homo sapiens
  CDR3 for beta chain variable domain of TCR clone 230750 (TRBV19, TRBJ2-3)
CASSIGGQAPYF

SEQ ID NO: 461501 - protein, 14 aa, Homo sapiens
  CDR3 for alpha chain variable domain of TCR clone 230751 (TRAV12-2, TRAJ45)
CALPERGGADGLTF

SEQ ID NO: 461502 - protein, 14 aa, Homo sapiens
  CDR3 for beta chain variable domain of TCR clone 230751 (TRBV7-2, TRBJ2-7)
CASRSQGAAYEQYF

SEQ ID NO: 461503 - protein, 13 aa, Homo sapiens
  CDR3 for alpha chain variable domain of TCR clone 230752 (TRAV12-3, TRAJ9)
CAMSGGGGFKTIF

SEQ ID NO: 461504 - protein, 15 aa, Homo sapiens
  CDR3 for beta chain variable domain of TCR clone 230752 (TRBV20-1, TRBJ2-7)
CSARDRVSGMDEQYF

SEQ ID NO: 461505 - protein, 13 aa, Homo sapiens
  CDR3 for alpha chain variable domain of TCR clone 230753 (TRAV26-1, TRAJ34)
CIVRPWITDKLIF

SEQ ID NO: 461506 - protein, 13 aa, Homo sapiens
  CDR3 for beta chain variable domain of TCR clone 230753 (TRBV5-1, TRBJ2-1)
CASSLGTYNEQFF

SEQ ID NO: 461507 - protein, 14 aa, Homo sapiens
  CDR3 for alpha chain variable domain of TCR clone 230754 (TRAV38-1, TRAJ29)
CAFITPSVNTPPVF

SEQ ID NO: 461508 - protein, 14 aa, Homo sapiens
  CDR3 for beta chain variable domain of TCR clone 230754 (TRBV18, TRBJ2-7)
CASSPRGGAYEQYF

SEQ ID NO: 461509 - protein, 13 aa, Homo sapiens
  CDR3 for alpha chain variable domain of TCR clone 230755 (TRAV12-3, TRAJ13)
CAMTSGGYQKVTF

SEQ ID NO: 461510 - protein, 11 aa, Homo sapiens
  CDR3 for beta chain variable domain of TCR clone 230755 (TRBV7-8, TRBJ2-7)
CASSLSLEQYF

SEQ ID NO: 461511 - protein, 13 aa, Homo sapiens
  CDR3 for alpha chain variable domain of TCR clone 230756 (TRAV12-2, TRAJ50)
CAVIVTSYDEVIF

SEQ ID NO: 461512 - protein, 14 aa, Homo sapiens
  CDR3 for beta chain variable domain of TCR clone 230756 (TRBV9, TRBJ2-1)
CASSVDPRGKEQFF

SEQ ID NO: 461513 - protein, 14 aa, Homo sapiens
  CDR3 for alpha chain variable domain of TCR clone 230757 (TRAV12-2, TRAJ40)
CAVKIPSGTYKNIF

SEQ ID NO: 461514 - protein, 14 aa, Homo sapiens
  CDR3 for beta chain variable domain of TCR clone 230757 (TRBV7-8, TRBJ2-7)
CASSPRDRVYEQYF

SEQ ID NO: 461515 - protein, 13 aa, Homo sapiens
  CDR3 for alpha chain variable domain of TCR clone 230758 (TRAV12-3, TRAJ7)
CAMTPYGNNRLAF

SEQ ID NO: 461516 - protein, 16 aa, Homo sapiens
  CDR3 for beta chain variable domain of TCR clone 230758 (TRBV20-1, TRBJ1-4)
CSAPGQGLLANEKLFF

SEQ ID NO: 461517 - protein, 13 aa, Homo sapiens
  CDR3 for alpha chain variable domain of TCR clone 230759 (TRAV2, TRAJ40)
CAVVTSGTYKYIF

SEQ ID NO: 461518 - protein, 15 aa, Homo sapiens
  CDR3 for beta chain variable domain of TCR clone 230759 (TRBV18, TRBJ2-1)
CASSPPSASSNEQFF

SEQ ID NO: 461519 - protein, 15 aa, Homo sapiens
  CDR3 for alpha chain variable domain of TCR clone 230760 (TRAV12-3, TRAJ6)
CAMSATTGGSYIPTF

SEQ ID NO: 461520 - protein, 13 aa, Homo sapiens
  CDR3 for beta chain variable domain of TCR clone 230760 (TRBV7-6, TRBJ1-5)
CASSQGPNRPQHF

SEQ ID NO: 461521 - protein, 13 aa, Homo sapiens
  CDR3 for alpha chain variable domain of TCR clone 230761 (TRAV3, TRAJ20)
CAVRDTGDYKLSF

SEQ ID NO: 461522 - protein, 12 aa, Homo sapiens
  CDR3 for beta chain variable domain of TCR clone 230761 (TRBV7-8, TRBJ2-7)
CASSLGDREQYF

SEQ ID NO: 461523 - protein, 14 aa, Homo sapiens
  CDR3 for alpha chain variable domain of TCR clone 230762 (TRAV12-2, TRAJ24)
CAVTPADSWGKLRF

SEQ ID NO: 461524 - protein, 15 aa, Homo sapiens
  CDR3 for beta chain variable domain of TCR clone 230762 (TRBV9, TRBJ1-6)
CASSVAGTGDSPLHF

SEQ ID NO: 461525 - protein, 13 aa, Homo sapiens
  CDR3 for alpha chain variable domain of TCR clone 230763 (TRAV2, TRAJ40)
CAVVTSGTYKYIF

SEQ ID NO: 461526 - protein, 16 aa, Homo sapiens
  CDR3 for beta chain variable domain of TCR clone 230763 (TRBV19, TRBJ2-2)
CASRSPGTGATGEPFF

SEQ ID NO: 461527 - protein, 14 aa, Homo sapiens
  CDR3 for alpha chain variable domain of TCR clone 230764 (TRAV12-2, TRAJ13)
CAVKKTGGYKKVTF

SEQ ID NO: 461528 - protein, 10 aa, Homo sapiens
  CDR3 for beta chain variable domain of TCR clone 230764 (TRBV12-4, TRBJ1-2)
CASSFIWLHL

SEQ ID NO: 461529 - protein, 13 aa, Homo sapiens
  CDR3 for alpha chain variable domain of TCR clone 230765 (TRAV17, TRAJ9)
CATDYTGGLKTIF

SEQ ID NO: 461530 - protein, 16 aa, Homo sapiens
  CDR3 for beta chain variable domain of TCR clone 230765 (TRBV7-7, TRBJ2-1)
CASGLASGTSYNEQFF

SEQ ID NO: 461531 - protein, 15 aa, Homo sapiens
  CDR3 for alpha chain variable domain of TCR clone 230766 (TRAV17, TRAJ35)
CATAFVIGFGNVLHC

SEQ ID NO: 461532 - protein, 16 aa, Homo sapiens
  CDR3 for beta chain variable domain of TCR clone 230766 (TRBV11-2, TRBJ2-7)
CASSPLAGGPRYERYF

SEQ ID NO: 461533 - protein, 11 aa, Homo sapiens
  CDR3 for alpha chain variable domain of TCR clone 230767 (TRAV12-2, TRAJ33)
CAVTSNYQLIW

SEQ ID NO: 461534 - protein, 15 aa, Homo sapiens
  CDR3 for beta chain variable domain of TCR clone 230767 (TRBV4-3, TRBJ2-1)
CASSQESAIYNEQFF

SEQ ID NO: 461535 - protein, 15 aa, Homo sapiens
  CDR3 for alpha chain variable domain of TCR clone 230768 (TRAV19, TRAJ8)
CALKLTNTGFQKLVF

SEQ ID NO: 461536 - protein, 12 aa, Homo sapiens
  CDR3 for beta chain variable domain of TCR clone 230768 (TRBV7-2, TRBJ2-2)
CASSLPPGMLFF

SEQ ID NO: 461537 - protein, 15 aa, Homo sapiens
  CDR3 for alpha chain variable domain of TCR clone 230769 (TRAV12-3, TRAJ49)
CAMAVTPNTGNQFYF

SEQ ID NO: 461538 - protein, 16 aa, Homo sapiens
  CDR3 for beta chain variable domain of TCR clone 230769 (TRBV12-4, TRBJ1-5)
CASSRPVGGSNQPQHF

SEQ ID NO: 461539 - protein, 17 aa, Homo sapiens
  CDR3 for alpha chain variable domain of TCR clone 230770 (TRAV3, TRAJ42)
CAVRVRDYGGSQGNLIF

SEQ ID NO: 461540 - protein, 14 aa, Homo sapiens
  CDR3 for beta chain variable domain of TCR clone 230770 (TRBV25-1, TRBJ1-1)
CASTHLGGNTEAFF

SEQ ID NO: 461541 - protein, 16 aa, Homo sapiens
  CDR3 for alpha chain variable domain of TCR clone 230771 (TRAV17, TRAJ28)
CASYAYSGAGSYQLTL

SEQ ID NO: 461542 - protein, 15 aa, Homo sapiens
  CDR3 for beta chain variable domain of TCR clone 230771 (TRBV4-2, TRBJ2-1)
CASSPSGGLYNEQFF

SEQ ID NO: 461543 - protein, 12 aa, Homo sapiens
  CDR3 for alpha chain variable domain of TCR clone 230772 (TRAV27, TRAJ41)
CAGRNSGYALNF

SEQ ID NO: 461544 - protein, 15 aa, Homo sapiens
  CDR3 for beta chain variable domain of TCR clone 230772 (TRBV15, TRBJ1-3)
CATSRDRRPGNTIYF

SEQ ID NO: 461545 - protein, 18 aa, Homo sapiens
  CDR3 for alpha chain variable domain of TCR clone 230773 (TRAV12-1, TRAJ52)
CVVKLINAGGTSYGKLTF

SEQ ID NO: 461546 - protein, 15 aa, Homo sapiens
  CDR3 for beta chain variable domain of TCR clone 230773 (TRBV4-3, TRBJ2-7)
CASSQGGRGIYEQYF

SEQ ID NO: 461547 - protein, 15 aa, Homo sapiens
  CDR3 for alpha chain variable domain of TCR clone 230774 (TRAV38-1, TRAJ37)
CAFIFGSGNTGKLIF

SEQ ID NO: 461548 - protein, 15 aa, Homo sapiens
  CDR3 for beta chain variable domain of TCR clone 230774 (TRBV6-3, TRBJ2-5)
CASSLLRGDQETQYF

SEQ ID NO: 461549 - protein, 12 aa, Homo sapiens
  CDR3 for alpha chain variable domain of TCR clone 230775 (TRAV12-3, TRAJ17)
CAMTLTGDKLTF

SEQ ID NO: 461550 - protein, 15 aa, Homo sapiens
  CDR3 for beta chain variable domain of TCR clone 230775 (TRBV13, TRBJ1-2)
CASSLGRQPGYGYTF

SEQ ID NO: 461551 - protein, 14 aa, Homo sapiens
  CDR3 for alpha chain variable domain of TCR clone 230776 (TRAV26-1, TRAJ39)
CIVRGSRAGNVLTF

SEQ ID NO: 461552 - protein, 15 aa, Homo sapiens
  CDR3 for beta chain variable domain of TCR clone 230776 (TRBV7-9, TRBJ1-5)
CASSQGHKPNQPQHF

SEQ ID NO: 461553 - protein, 15 aa, Homo sapiens
  CDR3 for alpha chain variable domain of TCR clone 230777 (TRAV3, TRAJ3)
CAVRDRDSSASKIIF

SEQ ID NO: 461554 - protein, 16 aa, Homo sapiens
  CDR3 for beta chain variable domain of TCR clone 230777 (TRBV11-2, TRBJ1-2)
CASSLDTGGADYGYTF

SEQ ID NO: 461555 - protein, 12 aa, Homo sapiens
  CDR3 for alpha chain variable domain of TCR clone 230778 (TRAV12-3, TRAJ17)
CAMTLTGNELTF

SEQ ID NO: 461556 - protein, 12 aa, Homo sapiens
  CDR3 for beta chain variable domain of TCR clone 230778 (TRBV2, TRBJ2-1)
CAYGPPGNEQFF

SEQ ID NO: 461557 - protein, 14 aa, Homo sapiens
  CDR3 for alpha chain variable domain of TCR clone 230779 (TRAV26-1, TRAJ38)
CIADNAGDNRKLIW

SEQ ID NO: 461558 - protein, 13 aa, Homo sapiens
  CDR3 for beta chain variable domain of TCR clone 230779 (TRBV7-9, TRBJ1-2)
CASSLKQNYGHTF

SEQ ID NO: 461559 - protein, 15 aa, Homo sapiens
  CDR3 for alpha chain variable domain of TCR clone 230780 (TRAV12-3, TRAJ47)
CAMSALVEYGNKLVF

SEQ ID NO: 461560 - protein, 15 aa, Homo sapiens
  CDR3 for beta chain variable domain of TCR clone 230780 (TRBV6-5, TRBJ1-2)
CASSYSQAFNYGYTF

SEQ ID NO: 461561 - protein, 13 aa, Homo sapiens
  CDR3 for alpha chain variable domain of TCR clone 230781 (TRAV12-1, TRAJ29)
CEVNGPGNTPLVF

SEQ ID NO: 461562 - protein, 13 aa, Homo sapiens
  CDR3 for beta chain variable domain of TCR clone 230781 (TRBV7-2, TRBJ2-5)
CASSRGGLETQYF

SEQ ID NO: 461563 - protein, 18 aa, Homo sapiens
  CDR3 for alpha chain variable domain of TCR clone 230782 (TRAV29/DV5, TRAJ52)
CAAGFRGAGGTSYGKLTF

SEQ ID NO: 461564 - protein, 12 aa, Homo sapiens
  CDR3 for beta chain variable domain of TCR clone 230782 (TRBV7-9, TRBJ2-7)
CASSFGSYEQYF

SEQ ID NO: 461565 - protein, 14 aa, Homo sapiens
  CDR3 for alpha chain variable domain of TCR clone 230783 (TRAV16, TRAJ32)
CALKSGGATNKLIF

SEQ ID NO: 461566 - protein, 16 aa, Homo sapiens
  CDR3 for beta chain variable domain of TCR clone 230783 (TRBV24-1, TRBJ2-3)
CATSDPAHRGSDTQYF

SEQ ID NO: 461567 - protein, 15 aa, Homo sapiens
  CDR3 for alpha chain variable domain of TCR clone 230784 (TRAV26-2, TRAJ6)
CILRADSGGSYIPTF

SEQ ID NO: 461568 - protein, 12 aa, Homo sapiens
  CDR3 for beta chain variable domain of TCR clone 230784 (TRBV7-8, TRBJ2-5)
CASSPRVETQYF

SEQ ID NO: 461569 - protein, 14 aa, Homo sapiens
  CDR3 for alpha chain variable domain of TCR clone 230785 (TRAV12-2, TRAJ13)
CAVKKTGGYQKVTF

SEQ ID NO: 461570 - protein, 13 aa, Homo sapiens
  CDR3 for beta chain variable domain of TCR clone 230785 (TRBV15, TRBJ2-7)
YATSTTGHYEQYF

SEQ ID NO: 461571 - protein, 14 aa, Homo sapiens
  CDR3 for alpha chain variable domain of TCR clone 230786 (TRAV17, TRAJ57)
CATDPQGGSEKLVF

SEQ ID NO: 461572 - protein, 16 aa, Homo sapiens
  CDR3 for beta chain variable domain of TCR clone 230786 (TRBV10-3, TRBJ2-1)
CAISGVGDGGGGEQFF

SEQ ID NO: 461573 - protein, 14 aa, Homo sapiens
  CDR3 for alpha chain variable domain of TCR clone 230787 (TRAV3, TRAJ34)
CAVRAPGNTAKLIF

SEQ ID NO: 461574 - protein, 15 aa, Homo sapiens
  CDR3 for beta chain variable domain of TCR clone 230787 (TRBV28, TRBJ2-1)
CASSIIAGGRSEQFF

SEQ ID NO: 461575 - protein, 14 aa, Homo sapiens
  CDR3 for alpha chain variable domain of TCR clone 230788 (TRAV9-2, TRAJ39)
RALYIYNAGNMLTF

SEQ ID NO: 461576 - protein, 12 aa, Homo sapiens
  CDR3 for beta chain variable domain of TCR clone 230788 (TRBV7-8, TRBJ2-5)
CASSLRAETQYF

SEQ ID NO: 461577 - protein, 11 aa, Homo sapiens
  CDR3 for alpha chain variable domain of TCR clone 230789 (TRAV2, TRAJ33)
CAVDSNYQLIW

SEQ ID NO: 461578 - protein, 16 aa, Homo sapiens
  CDR3 for beta chain variable domain of TCR clone 230789 (TRBV5-1, TRBJ2-5)
CASSLSLAGAQETQYF

SEQ ID NO: 461579 - protein, 13 aa, Homo sapiens
  CDR3 for alpha chain variable domain of TCR clone 230790 (TRAV25, TRAJ54)
CAGTIRGAQKLVF

SEQ ID NO: 461580 - protein, 15 aa, Homo sapiens
  CDR3 for beta chain variable domain of TCR clone 230790 (TRBV19, TRBJ1-5)
CASSILTGENQPQHF

SEQ ID NO: 461581 - protein, 13 aa, Homo sapiens
  CDR3 for alpha chain variable domain of TCR clone 230791 (TRAV17, TRAJ41)
CATGRNSGYALNF

SEQ ID NO: 461582 - protein, 14 aa, Homo sapiens
  CDR3 for beta chain variable domain of TCR clone 230791 (TRBV7-6, TRBJ1-6)
CASSQAGGGSPLHF

SEQ ID NO: 461583 - protein, 13 aa, Homo sapiens
  CDR3 for alpha chain variable domain of TCR clone 230792 (TRAV21, TRAJ20)
SAVGLRVDYKLSF

SEQ ID NO: 461584 - protein, 12 aa, Homo sapiens
  CDR3 for beta chain variable domain of TCR clone 230792 (TRBV27, TRBJ2-5)
CASSPTGETQYF

SEQ ID NO: 461585 - protein, 14 aa, Homo sapiens
  CDR3 for alpha chain variable domain of TCR clone 230793 (TRAV2, TRAJ3)
CAVDRYSSASKIIF

SEQ ID NO: 461586 - protein, 15 aa, Homo sapiens
  CDR3 for beta chain variable domain of TCR clone 230793 (TRBV20-1, TRBJ2-2)
CSAIPGHSNTGELFF

SEQ ID NO: 461587 - protein, 12 aa, Homo sapiens
  CDR3 for alpha chain variable domain of TCR clone 230794 (TRAV16, TRAJ9)
CALSSGGFKTIF

SEQ ID NO: 461588 - protein, 14 aa, Homo sapiens
  CDR3 for beta chain variable domain of TCR clone 230794 (TRBV4-2, TRBJ1-2)
CASSQEGGNYGYTF

SEQ ID NO: 461589 - protein, 18 aa, Homo sapiens
  CDR3 for alpha chain variable domain of TCR clone 230795 (TRAV26-2, TRAJ54)
CILRDVEVGIQGAQKLVF

SEQ ID NO: 461590 - protein, 17 aa, Homo sapiens
  CDR3 for beta chain variable domain of TCR clone 230795 (TRBV13, TRBJ2-3)
CASSLSRVAGGRNTQYF

SEQ ID NO: 461591 - protein, 14 aa, Homo sapiens
  CDR3 for alpha chain variable domain of TCR clone 230796 (TRAV34, TRAJ44)
CGADGTGTVSKLTF

SEQ ID NO: 461592 - protein, 16 aa, Homo sapiens
  CDR3 for beta chain variable domain of TCR clone 230796 (TRBV19, TRBJ2-1)
CASSKAGPSSYNEQFF

SEQ ID NO: 461593 - protein, 11 aa, Homo sapiens
  CDR3 for alpha chain variable domain of TCR clone 230797 (TRAV35, TRAJ49)
CAGLFGNQFYF

SEQ ID NO: 461594 - protein, 13 aa, Homo sapiens
  CDR3 for beta chain variable domain of TCR clone 230797 (TRBV19, TRBJ2-7)
CASSIRSSYEQYF

SEQ ID NO: 461595 - protein, 14 aa, Homo sapiens
  CDR3 for alpha chain variable domain of TCR clone 230798 (TRAV1-2, TRAJ8)
CAVREDTGFQKLVF

SEQ ID NO: 461596 - protein, 19 aa, Homo sapiens
  CDR3 for beta chain variable domain of TCR clone 230798 (TRBV6-3, TRBJ1-2)
CASSYSKGRTGPPNYGYAF

SEQ ID NO: 461597 - protein, 10 aa, Homo sapiens
  CDR3 for alpha chain variable domain of TCR clone 230799 (TRAV1-2, TRAJ18)
CAVRGEAPPW

SEQ ID NO: 461598 - protein, 14 aa, Homo sapiens
  CDR3 for beta chain variable domain of TCR clone 230799 (TRBV7-2, TRBJ2-7)
CASSFKGQDHEQCF

SEQ ID NO: 461599 - protein, 23 aa, Homo sapiens
  CDR3 for alpha chain variable domain of TCR clone 230800 (TRAV12-2, TRAJ36)
SLLIRDSQPSDSATLERANNLFF

SEQ ID NO: 461600 - protein, 14 aa, Homo sapiens
  CDR3 for beta chain variable domain of TCR clone 230800 (TRBV20-1, TRBJ2-4)
CSASGRVGENIQYF

SEQ ID NO: 461601 - protein, 13 aa, Homo sapiens
  CDR3 for alpha chain variable domain of TCR clone 230801 (TRAV20, TRAJ42)
CAVQGGSQGNLIC

SEQ ID NO: 461602 - protein, 15 aa, Homo sapiens
  CDR3 for beta chain variable domain of TCR clone 230801 (TRBV10-1, TRBJ2-1)
CASSEWRGTYNEQFF

SEQ ID NO: 461603 - protein, 14 aa, Homo sapiens
  CDR3 for alpha chain variable domain of TCR clone 230802 (TRAV8-4, TRAJ13)
CAVTLSGGYQKVPF

SEQ ID NO: 461604 - protein, 14 aa, Homo sapiens
  CDR3 for beta chain variable domain of TCR clone 230802 (TRBV7-2, TRBJ1-2)
CASSQTGSSYGYTF

SEQ ID NO: 461605 - protein, 22 aa, Homo sapiens
  CDR3 for alpha chain variable domain of TCR clone 230803 (TRAV2, TRAJ32)
CAFTMVVLQTSSSLELALCLLF

SEQ ID NO: 461606 - protein, 16 aa, Homo sapiens
  CDR3 for beta chain variable domain of TCR clone 230803 (TRBV7-9, TRBJ2-7)
CASSYPDREGGYEQYF

SEQ ID NO: 461607 - protein, 14 aa, Homo sapiens
  CDR3 for alpha chain variable domain of TCR clone 230804 (TRAV13-1, TRAJ20)
CAARPGSNDYKLSF

SEQ ID NO: 461608 - protein, 13 aa, Homo sapiens
  CDR3 for beta chain variable domain of TCR clone 230804 (TRBV20-1, TRBJ1-1)
CSAPPGGHTEAFR

SEQ ID NO: 461609 - protein, 12 aa, Homo sapiens
  CDR3 for alpha chain variable domain of TCR clone 230805 (TRAV16, TRAJ21)
CALLGNFNKFYF

SEQ ID NO: 461610 - protein, 15 aa, Homo sapiens
  CDR3 for beta chain variable domain of TCR clone 230805 (TRBV3-1, TRBJ2-2)
RASSQAVRETGELFF

SEQ ID NO: 461611 - protein, 14 aa, Homo sapiens
  CDR3 for alpha chain variable domain of TCR clone 230806 (TRAV4, TRAJ20)
CLVGRRSNDSKLSF

SEQ ID NO: 461612 - protein, 18 aa, Homo sapiens
  CDR3 for beta chain variable domain of TCR clone 230806 (TRBV2, TRBJ2-5)
CASSGDPQGRGAQETQYF

SEQ ID NO: 461613 - protein, 15 aa, Homo sapiens
  CDR3 for alpha chain variable domain of TCR clone 230807 (TRAV21, TRAJ53)
CATLNSGGSNYKLTF

SEQ ID NO: 461614 - protein, 15 aa, Homo sapiens
  CDR3 for beta chain variable domain of TCR clone 230807 (TRBV27, TRBJ2-7)
CASSTAGTGSYEQYF

SEQ ID NO: 461615 - protein, 12 aa, Homo sapiens
  CDR3 for alpha chain variable domain of TCR clone 230808 (TRAV13-1, TRAJ21)
CAAKEGCNKFYF

SEQ ID NO: 461616 - protein, 17 aa, Homo sapiens
  CDR3 for beta chain variable domain of TCR clone 230808 (TRBV20-1, TRBJ2-1)
CSASSSGLAGSYNEQFF

SEQ ID NO: 461617 - protein, 11 aa, Homo sapiens
  CDR3 for alpha chain variable domain of TCR clone 230809 (TRAV12-2, TRAJ43)
CASPIGNDMGF

SEQ ID NO: 461618 - protein, 13 aa, Homo sapiens
  CDR3 for beta chain variable domain of TCR clone 230809 (TRBV7-3, TRBJ1-2)
CASSLKRGYGYTF

SEQ ID NO: 461619 - protein, 14 aa, Homo sapiens
  CDR3 for alpha chain variable domain of TCR clone 230810 (TRAV1-2, TRAJ16)
CAVNRFSDGQKLLF

SEQ ID NO: 461620 - protein, 19 aa, Homo sapiens
  CDR3 for beta chain variable domain of TCR clone 230810 (TRBV4-1, TRBJ2-4)
CASSQDLGQGAGAKNIQYF

SEQ ID NO: 461621 - protein, 15 aa, Homo sapiens
  CDR3 for alpha chain variable domain of TCR clone 230811 (TRAV12-1, TRAJ5)
CVVNMLETGRRALTF

SEQ ID NO: 461622 - protein, 12 aa, Homo sapiens
  CDR3 for beta chain variable domain of TCR clone 230811 (TRBV11-2, TRBJ2-2)
CASSLGGGELFL

SEQ ID NO: 461623 - protein, 12 aa, Homo sapiens
  CDR3 for alpha chain variable domain of TCR clone 230812 (TRAV12-1, TRAJ40)
CVVYSGTYKYIF

SEQ ID NO: 461624 - protein, 14 aa, Homo sapiens
  CDR3 for beta chain variable domain of TCR clone 230812 (TRBV19, TRBJ2-1)
CASSRLASINEQFF

SEQ ID NO: 461625 - protein, 14 aa, Homo sapiens
  CDR3 for alpha chain variable domain of TCR clone 230813 (TRAV2, TRAJ9)
CAVEDRSGGFKTIF

SEQ ID NO: 461626 - protein, 18 aa, Homo sapiens
  CDR3 for beta chain variable domain of TCR clone 230813 (TRBV25-1, TRBJ1-2)
CASSGPQNGQGLIFGYTF

SEQ ID NO: 461627 - protein, 13 aa, Homo sapiens
  CDR3 for alpha chain variable domain of TCR clone 230814 (TRAV17, TRAJ54)
CAAGIQGAQKLVF

SEQ ID NO: 461628 - protein, 14 aa, Homo sapiens
  CDR3 for beta chain variable domain of TCR clone 230814 (TRBV11-2, TRBJ1-2)
RASSLGTANCGYTF

SEQ ID NO: 461629 - protein, 14 aa, Homo sapiens
  CDR3 for alpha chain variable domain of TCR clone 230815 (TRAV13-2, TRAJ43)
CAEIPTYNNNDMRF

SEQ ID NO: 461630 - protein, 19 aa, Homo sapiens
  CDR3 for beta chain variable domain of TCR clone 230815 (TRBV6-3, TRBJ1-2)
CASSYSKGRTGPPNYGYTF

SEQ ID NO: 461631 - protein, 14 aa, Homo sapiens
  CDR3 for alpha chain variable domain of TCR clone 230816 (TRAV3, TRAJ22)
CCERPGGSARQLTF

SEQ ID NO: 461632 - protein, 16 aa, Homo sapiens
  CDR3 for beta chain variable domain of TCR clone 230816 (TRBV5-4, TRBJ2-3)
CASQQPGAGGADTQYF

SEQ ID NO: 461633 - protein, 14 aa, Homo sapiens
  CDR3 for alpha chain variable domain of TCR clone 230817 (TRAV12-3, TRAJ10)
SHLPLTGGGNKLTF

SEQ ID NO: 461634 - protein, 17 aa, Homo sapiens
  CDR3 for beta chain variable domain of TCR clone 230817 (TRBV18, TRBJ2-1)
CASSPRVAGGSYNEQFF

SEQ ID NO: 461635 - protein, 12 aa, Homo sapiens
  CDR3 for alpha chain variable domain of TCR clone 230818 (TRAV13-1, TRAJ9)
CASHTGGFKTII

SEQ ID NO: 461636 - protein, 18 aa, Homo sapiens
  CDR3 for beta chain variable domain of TCR clone 230818 (TRBV11-2, TRBJ2-3)
CASSLGGASRGAPNTQYF

SEQ ID NO: 461637 - protein, 14 aa, Homo sapiens
  CDR3 for alpha chain variable domain of TCR clone 230819 (TRAV12-3, TRAJ9)
CAMSVETGGFKTIF

SEQ ID NO: 461638 - protein, 17 aa, Homo sapiens
  CDR3 for beta chain variable domain of TCR clone 230819 (TRBV13, TRBJ2-3)
CASSLSRVAGGRNTQYF

SEQ ID NO: 461639 - protein, 13 aa, Homo sapiens
  CDR3 for alpha chain variable domain of TCR clone 230820 (TRAV8-6, TRAJ49)
CAVITNTGNQFYF

SEQ ID NO: 461640 - protein, 17 aa, Homo sapiens
  CDR3 for beta chain variable domain of TCR clone 230820 (TRBV28, TRBJ2-5)
CASSRQGGLAGAETQYF

SEQ ID NO: 461641 - protein, 11 aa, Homo sapiens
  CDR3 for alpha chain variable domain of TCR clone 230821 (TRAV4, TRAJ31)
CLVGDNARLMF

SEQ ID NO: 461642 - protein, 14 aa, Homo sapiens
  CDR3 for beta chain variable domain of TCR clone 230821 (TRBV7-9, TRBJ2-5)
CASSLAFGQETQYF

SEQ ID NO: 461643 - protein, 11 aa, Homo sapiens
  CDR3 for alpha chain variable domain of TCR clone 230822 (TRAV12-3, TRAJ27)
CAMANAGKSTF

SEQ ID NO: 461644 - protein, 14 aa, Homo sapiens
  CDR3 for beta chain variable domain of TCR clone 230822 (TRBV7-3, TRBJ1-1)
CASSLKGGNTEAFF

SEQ ID NO: 461645 - protein, 14 aa, Homo sapiens
  CDR3 for alpha chain variable domain of TCR clone 230823 (TRAV12-3, TRAJ29)
CATSPYSGNTPLVF

SEQ ID NO: 461646 - protein, 15 aa, Homo sapiens
  CDR3 for beta chain variable domain of TCR clone 230823 (TRBV12-4, TRBJ2-5)
CASSPPTGLQETQYF

SEQ ID NO: 461647 - protein, 13 aa, Homo sapiens
  CDR3 for alpha chain variable domain of TCR clone 230824 (TRAV12-2, TRAJ6)
CAALKGGSYIPTF

SEQ ID NO: 461648 - protein, 15 aa, Homo sapiens
  CDR3 for beta chain variable domain of TCR clone 230824 (TRBV4-1, TRBJ2-2)
CASSEGQGITGELFF

SEQ ID NO: 461649 - protein, 14 aa, Homo sapiens
  CDR3 for alpha chain variable domain of TCR clone 230825 (TRAV3, TRAJ21)
CAVRDAYNFNKFYF

SEQ ID NO: 461650 - protein, 17 aa, Homo sapiens
  CDR3 for beta chain variable domain of TCR clone 230825 (TRBV20-1, TRBJ1-6)
CSARGGSTFSYNSPLHF

SEQ ID NO: 461651 - protein, 12 aa, Homo sapiens
  CDR3 for alpha chain variable domain of TCR clone 230826 (TRAV12-3, TRAJ34)
CAMGYNTDKLIF

SEQ ID NO: 461652 - protein, 16 aa, Homo sapiens
  CDR3 for beta chain variable domain of TCR clone 230826 (TRBV20-1, TRBJ1-4)
CSAPGQGLLTNEKLFF

SEQ ID NO: 461653 - protein, 16 aa, Homo sapiens
  CDR3 for alpha chain variable domain of TCR clone 230827 (TRAV23/DV6, TRAJ9)
CAASIGGNTGGFKTIF

SEQ ID NO: 461654 - protein, 17 aa, Homo sapiens
  CDR3 for beta chain variable domain of TCR clone 230827 (TRBV13, TRBJ2-3)
CASSLSRVAGGRNTQYL

SEQ ID NO: 461655 - protein, 14 aa, Homo sapiens
  CDR3 for alpha chain variable domain of TCR clone 230828 (TRAV12-2, TRAJ44)
CAVNPAGTASKLTF

SEQ ID NO: 461656 - protein, 14 aa, Homo sapiens
  CDR3 for beta chain variable domain of TCR clone 230828 (TRBV20-1, TRBJ1-1)
CSAMGGTANTEAFF

SEQ ID NO: 461657 - protein, 11 aa, Homo sapiens
  CDR3 for alpha chain variable domain of TCR clone 230829 (TRAV2, TRAJ13)
CASGGYQKVTF

SEQ ID NO: 461658 - protein, 18 aa, Homo sapiens
  CDR3 for beta chain variable domain of TCR clone 230829 (TRBV7-9, TRBJ2-1)
CASSLAVSGTSGRNEQFF

SEQ ID NO: 461659 - protein, 13 aa, Homo sapiens
  CDR3 for alpha chain variable domain of TCR clone 230830 (TRAV29/DV5, TRAJ31)
CAASRNNNARLMF

SEQ ID NO: 461660 - protein, 16 aa, Homo sapiens
  CDR3 for beta chain variable domain of TCR clone 230830 (TRBV28, TRBJ2-7)
CASSPWVATGDLSQYF

SEQ ID NO: 461661 - protein, 11 aa, Homo sapiens
  CDR3 for alpha chain variable domain of TCR clone 230831 (TRAV12-1, TRAJ34)
CVVNKVRELIF

SEQ ID NO: 461662 - protein, 12 aa, Homo sapiens
  CDR3 for beta chain variable domain of TCR clone 230831 (TRBV2, TRBJ2-1)
CAYGPPGNEQFL

SEQ ID NO: 461663 - protein, 11 aa, Homo sapiens
  CDR3 for alpha chain variable domain of TCR clone 230832 (TRAV20, TRAJ47)
CAALYGNKLVF

SEQ ID NO: 461664 - protein, 14 aa, Homo sapiens
  CDR3 for beta chain variable domain of TCR clone 230832 (TRBV18, TRBJ2-7)
CASSPRGGAYEQYF

SEQ ID NO: 461665 - protein, 13 aa, Homo sapiens
  CDR3 for alpha chain variable domain of TCR clone 230833 (TRAV13-1, TRAJ4)
CAESIGGYNKLIF

SEQ ID NO: 461666 - protein, 16 aa, Homo sapiens
  CDR3 for beta chain variable domain of TCR clone 230833 (TRBV20-1, TRBJ2-1)
CSAPGLAGSYSDEQFF

SEQ ID NO: 461667 - protein, 13 aa, Homo sapiens
  CDR3 for alpha chain variable domain of TCR clone 230834 (TRAV2, TRAJ15)
CAVASQAGTALIF

SEQ ID NO: 461668 - protein, 15 aa, Homo sapiens
  CDR3 for beta chain variable domain of TCR clone 230834 (TRBV6-3, TRBJ2-5)
CASSLLRGDQETQYF

SEQ ID NO: 461669 - protein, 12 aa, Homo sapiens
  CDR3 for alpha chain variable domain of TCR clone 230835 (TRAV12-2, TRAJ31)
CAVDTPDARLMF

SEQ ID NO: 461670 - protein, 17 aa, Homo sapiens
  CDR3 for beta chain variable domain of TCR clone 230835 (TRBV20-1, TRBJ1-6)
RSARGGYTFSYNSPLHF

SEQ ID NO: 461671 - protein, 14 aa, Homo sapiens
  CDR3 for alpha chain variable domain of TCR clone 230836 (TRAV2, TRAJ9)
CAVEDRSGGFKTIF

SEQ ID NO: 461672 - protein, 14 aa, Homo sapiens
  CDR3 for beta chain variable domain of TCR clone 230836 (TRBV15, TRBJ2-5)
CATSRVSVRETQYF

SEQ ID NO: 461673 - protein, 15 aa, Homo sapiens
  CDR3 for alpha chain variable domain of TCR clone 230837 (TRAV8-2, TRAJ16)
CVVSDGLSDGQKLPF

SEQ ID NO: 461674 - protein, 14 aa, Homo sapiens
  CDR3 for beta chain variable domain of TCR clone 230837 (TRBV7-3, TRBJ1-1)
CASSLGTGYTEAFF

SEQ ID NO: 461675 - protein, 13 aa, Homo sapiens
  CDR3 for alpha chain variable domain of TCR clone 230838 (TRAV12-3, TRAJ40)
CAMSDSGTYKYIF

SEQ ID NO: 461676 - protein, 14 aa, Homo sapiens
  CDR3 for beta chain variable domain of TCR clone 230838 (TRBV4-1, TRBJ2-7)
CASSPVAGGDEQYF

SEQ ID NO: 461677 - protein, 14 aa, Homo sapiens
  CDR3 for alpha chain variable domain of TCR clone 230839 (TRAV1-2, TRAJ8)
CAVREDTGFQKLVF

SEQ ID NO: 461678 - protein, 16 aa, Homo sapiens
  CDR3 for beta chain variable domain of TCR clone 230839 (TRBV7-9, TRBJ2-1)
CASSDVAGGSYNEQLF

SEQ ID NO: 461679 - protein, 15 aa, Homo sapiens
  CDR3 for alpha chain variable domain of TCR clone 230840 (TRAV1-2, TRAJ30)
CAVRPHGNRDDKIIY

SEQ ID NO: 461680 - protein, 13 aa, Homo sapiens
  CDR3 for beta chain variable domain of TCR clone 230840 (TRBV4-1, TRBJ2-7)
CASSQGQAYEQYF

SEQ ID NO: 461681 - protein, 12 aa, Homo sapiens
  CDR3 for alpha chain variable domain of TCR clone 230841 (TRAV8-3, TRAJ26)
CAGDNYGQNFVF

SEQ ID NO: 461682 - protein, 14 aa, Homo sapiens
  CDR3 for beta chain variable domain of TCR clone 230841 (TRBV7-3, TRBJ1-1)
CASSLKGGNTEAFF

SEQ ID NO: 461683 - protein, 12 aa, Homo sapiens
  CDR3 for alpha chain variable domain of TCR clone 230842 (TRAV13-1, TRAJ27)
CAAHPNAGKSTF

SEQ ID NO: 461684 - protein, 15 aa, Homo sapiens
  CDR3 for beta chain variable domain of TCR clone 230842 (TRBV7-9, TRBJ1-6)
CASSSPGRGNSPLHV

SEQ ID NO: 461685 - protein, 14 aa, Homo sapiens
  CDR3 for alpha chain variable domain of TCR clone 230843 (TRAV4, TRAJ9)
CLVGSGTGGFKTIF

SEQ ID NO: 461686 - protein, 13 aa, Homo sapiens
  CDR3 for beta chain variable domain of TCR clone 230843 (TRBV19, TRBJ1-5)
CASSMRGYQPQHF

SEQ ID NO: 461687 - protein, 12 aa, Homo sapiens
  CDR3 for alpha chain variable domain of TCR clone 230844 (TRAV23/DV6, TRAJ53)
CAASNLGSGGSN

SEQ ID NO: 461688 - protein, 18 aa, Homo sapiens
  CDR3 for beta chain variable domain of TCR clone 230844 (TRBV11-2, TRBJ2-3)
CASSLGGASRGAPNTQYF

SEQ ID NO: 461689 - protein, 14 aa, Homo sapiens
  CDR3 for alpha chain variable domain of TCR clone 230845 (TRAV26-1, TRAJ39)
CIVFTNNAGNMLTF

SEQ ID NO: 461690 - protein, 15 aa, Homo sapiens
  CDR3 for beta chain variable domain of TCR clone 230845 (TRBV19, TRBJ2-4)
CASSLTGLTENIQYF

SEQ ID NO: 461691 - protein, 14 aa, Homo sapiens
  CDR3 for alpha chain variable domain of TCR clone 230846 (TRAV8-4, TRAJ13)
CAVTLSGGYQKVTF

SEQ ID NO: 461692 - protein, 14 aa, Homo sapiens
  CDR3 for beta chain variable domain of TCR clone 230846 (TRBV7-2, TRBJ1-2)
CPSSQTGSTYGYTF

SEQ ID NO: 461693 - protein, 13 aa, Homo sapiens
  CDR3 for alpha chain variable domain of TCR clone 230847 (TRAV17, TRAJ34)
CATVPYNTDKLIF

SEQ ID NO: 461694 - protein, 15 aa, Homo sapiens
  CDR3 for beta chain variable domain of TCR clone 230847 (TRBV5-8, TRBJ2-2)
CASSLDRGATGELFF

SEQ ID NO: 461695 - protein, 18 aa, Homo sapiens
  CDR3 for alpha chain variable domain of TCR clone 230848 (TRAV29/DV5, TRAJ37)
CSVLLCSEGSGNTGKLIF

SEQ ID NO: 461696 - protein, 14 aa, Homo sapiens
  CDR3 for beta chain variable domain of TCR clone 230848 (TRBV5-1, TRBJ1-1)
CASSLAVGSGEDFF

SEQ ID NO: 461697 - protein, 14 aa, Homo sapiens
  CDR3 for alpha chain variable domain of TCR clone 230849 (TRAV38-1, TRAJ39)
CAFAYNNAGNMLAF

SEQ ID NO: 461698 - protein, 15 aa, Homo sapiens
  CDR3 for beta chain variable domain of TCR clone 230849 (TRBV19, TRBJ2-6)
CASSIGPSGANVLTF

SEQ ID NO: 461699 - protein, 14 aa, Homo sapiens
  CDR3 for alpha chain variable domain of TCR clone 230850 (TRAV3, TRAJ9)
CAVRGNTGGFKTIF

SEQ ID NO: 461700 - protein, 14 aa, Homo sapiens
  CDR3 for beta chain variable domain of TCR clone 230850 (TRBV15, TRBJ2-1)
CATSGVEDYNEQLF

SEQ ID NO: 461701 - protein, 12 aa, Homo sapiens
  CDR3 for alpha chain variable domain of TCR clone 230851 (TRAV3, TRAJ20)
CAVRDPDYKLSF

SEQ ID NO: 461702 - protein, 14 aa, Homo sapiens
  CDR3 for beta chain variable domain of TCR clone 230851 (TRBV4-2, TRBJ2-1)
CASGLYRAYNEQFF

SEQ ID NO: 461703 - protein, 14 aa, Homo sapiens
  CDR3 for alpha chain variable domain of TCR clone 230852 (TRAV12-3, TRAJ56)
CAMSVTGANSKLTF

SEQ ID NO: 461704 - protein, 17 aa, Homo sapiens
  CDR3 for beta chain variable domain of TCR clone 230852 (TRBV20-1, TRBJ2-3)
CSASLLGRGESADTQYF

SEQ ID NO: 461705 - protein, 18 aa, Homo sapiens
  CDR3 for alpha chain variable domain of TCR clone 230853 (TRAV21, TRAJ52)
CAVRPSPAGGTSYGKLTF

SEQ ID NO: 461706 - protein, 13 aa, Homo sapiens
  CDR3 for beta chain variable domain of TCR clone 230853 (TRBV9, TRBJ2-7)
CASSVAEYYEQYF

SEQ ID NO: 461707 - protein, 15 aa, Homo sapiens
  CDR3 for alpha chain variable domain of TCR clone 230854 (TRAV16, TRAJ45)
CSRGASGGGADGLTF

SEQ ID NO: 461708 - protein, 13 aa, Homo sapiens
  CDR3 for beta chain variable domain of TCR clone 230854 (TRBV7-9, TRBJ1-2)
CASSLKQNYGYTF

SEQ ID NO: 461709 - protein, 12 aa, Homo sapiens
  CDR3 for alpha chain variable domain of TCR clone 230855 (TRAV2, TRAJ33)
CAVWGSNYQLIW

SEQ ID NO: 461710 - protein, 16 aa, Homo sapiens
  CDR3 for beta chain variable domain of TCR clone 230855 (TRBV20-1, TRBJ1-4)
CSAPGQGLLTNEKPFF

SEQ ID NO: 461711 - protein, 19 aa, Homo sapiens
  CDR3 for alpha chain variable domain of TCR clone 230856 (TRAV38-1, TRAJ53)
CAFMKHGLESGGSNYKLTF

SEQ ID NO: 461712 - protein, 15 aa, Homo sapiens
  CDR3 for beta chain variable domain of TCR clone 230856 (TRBV11-3, TRBJ2-2)
CASSYFSTGTGELFF

SEQ ID NO: 461713 - protein, 12 aa, Homo sapiens
  CDR3 for alpha chain variable domain of TCR clone 230857 (TRAV3, TRAJ27)
CAVRDKGGKSTF

SEQ ID NO: 461714 - protein, 14 aa, Homo sapiens
  CDR3 for beta chain variable domain of TCR clone 230857 (TRBV5-1, TRBJ1-2)
CASSVDSTNYGYTF

SEQ ID NO: 461715 - protein, 14 aa, Homo sapiens
  CDR3 for alpha chain variable domain of TCR clone 230858 (TRAV12-3, TRAJ48)
CAMSVNFGNEKLTF

SEQ ID NO: 461716 - protein, 13 aa, Homo sapiens
  CDR3 for beta chain variable domain of TCR clone 230858 (TRBV20-1, TRBJ1-3)
CSSAGNPGNTIYF

SEQ ID NO: 461717 - protein, 14 aa, Homo sapiens
  CDR3 for alpha chain variable domain of TCR clone 230859 (TRAV12-2, TRAJ45)
CALPERGGADGLTF

SEQ ID NO: 461718 - protein, 18 aa, Homo sapiens
  CDR3 for beta chain variable domain of TCR clone 230859 (TRBV18, TRBJ1-3)
CASSPRGGAGPSGNTIYF

SEQ ID NO: 461719 - protein, 15 aa, Homo sapiens
  CDR3 for alpha chain variable domain of TCR clone 230860 (TRAV3, TRAJ22)
CAVRDRGGSARQLTF

SEQ ID NO: 461720 - protein, 13 aa, Homo sapiens
  CDR3 for beta chain variable domain of TCR clone 230860 (TRBV2, TRBJ2-7)
CASSEGGQFEQYF

SEQ ID NO: 461721 - protein, 14 aa, Homo sapiens
  CDR3 for alpha chain variable domain of TCR clone 230861 (TRAV25, TRAJ23)
CAGQGDNQGGKLIF

SEQ ID NO: 461722 - protein, 12 aa, Homo sapiens
  CDR3 for beta chain variable domain of TCR clone 230861 (TRBV7-9, TRBJ1-1)
CASSLVRGEAFF

SEQ ID NO: 461723 - protein, 15 aa, Homo sapiens
  CDR3 for alpha chain variable domain of TCR clone 230862 (TRAV14/DV4, TRAJ12)
CAMREERDSSYKLIF

SEQ ID NO: 461724 - protein, 16 aa, Homo sapiens
  CDR3 for beta chain variable domain of TCR clone 230862 (TRBV11-2, TRBJ1-2)
CASSLDTGGANYGYTF

SEQ ID NO: 461725 - protein, 14 aa, Homo sapiens
  CDR3 for alpha chain variable domain of TCR clone 230863 (TRAV12-2, TRAJ24)
CAVTPADSWGKLQF

SEQ ID NO: 461726 - protein, 15 aa, Homo sapiens
  CDR3 for beta chain variable domain of TCR clone 230863 (TRBV11-2, TRBJ2-1)
CASSLGTSGLNEQFF

SEQ ID NO: 461727 - protein, 14 aa, Homo sapiens
  CDR3 for alpha chain variable domain of TCR clone 230864 (TRAV1-2, TRAJ16)
CAVNRFSDGQKLLF

SEQ ID NO: 461728 - protein, 12 aa, Homo sapiens
  CDR3 for beta chain variable domain of TCR clone 230864 (TRBV16, TRBJ2-2)
CASSQSVGELFF

SEQ ID NO: 461729 - protein, 14 aa, Homo sapiens
  CDR3 for alpha chain variable domain of TCR clone 230865 (TRAV23/DV6, TRAJ27)
CAASRDTNAGKSTF

SEQ ID NO: 461730 - protein, 14 aa, Homo sapiens
  CDR3 for beta chain variable domain of TCR clone 230865 (TRBV19, TRBJ2-1)
CASPTFVLSGEQLF

SEQ ID NO: 461731 - protein, 11 aa, Homo sapiens
  CDR3 for alpha chain variable domain of TCR clone 230866 (TRAV17, TRAJ9)
CGFTGGFKTIF

SEQ ID NO: 461732 - protein, 14 aa, Homo sapiens
  CDR3 for beta chain variable domain of TCR clone 230866 (TRBV7-9, TRBJ2-2)
CASSLVQDTAELFF

SEQ ID NO: 461733 - protein, 13 aa, Homo sapiens
  CDR3 for alpha chain variable domain of TCR clone 230867 (TRAV25, TRAJ30)
CAGRVDRDDKIIF

SEQ ID NO: 461734 - protein, 17 aa, Homo sapiens
  CDR3 for beta chain variable domain of TCR clone 230867 (TRBV7-9, TRBJ2-6)
CASSFGAGYSGANDLIF

SEQ ID NO: 461735 - protein, 15 aa, Homo sapiens
  CDR3 for alpha chain variable domain of TCR clone 230868 (TRAV2, TRAJ24)
CAVEVLTDSWGKFQF

SEQ ID NO: 461736 - protein, 15 aa, Homo sapiens
  CDR3 for beta chain variable domain of TCR clone 230868 (TRBV19, TRBJ1-1)
CASRETGGVNTEAFF

SEQ ID NO: 461737 - protein, 14 aa, Homo sapiens
  CDR3 for alpha chain variable domain of TCR clone 230869 (TRAV1-2, TRAJ8)
CAVGEDTGFQKLVF

SEQ ID NO: 461738 - protein, 15 aa, Homo sapiens
  CDR3 for beta chain variable domain of TCR clone 230869 (TRBV28, TRBJ2-6)
CASSLAGSGANVLTF

SEQ ID NO: 461739 - protein, 13 aa, Homo sapiens
  CDR3 for alpha chain variable domain of TCR clone 230870 (TRAV2, TRAJ36)
CAVDQTGANNLFF

SEQ ID NO: 461740 - protein, 12 aa, Homo sapiens
  CDR3 for beta chain variable domain of TCR clone 230870 (TRBV19, TRBJ1-1)
CASMNRYTEAFL

SEQ ID NO: 461741 - protein, 15 aa, Homo sapiens
  CDR3 for alpha chain variable domain of TCR clone 230871 (TRAV8-3, TRAJ41)
CAVGSNSNSGYALNF

SEQ ID NO: 461742 - protein, 14 aa, Homo sapiens
  CDR3 for beta chain variable domain of TCR clone 230871 (TRBV10-3, TRBJ2-1)
CAISSDLAYNKQFF

SEQ ID NO: 461743 - protein, 10 aa, Homo sapiens
  CDR3 for alpha chain variable domain of TCR clone 230872 (TRAV2, TRAJ34)
CAVVNAKLIF

SEQ ID NO: 461744 - protein, 20 aa, Homo sapiens
  CDR3 for beta chain variable domain of TCR clone 230872 (TRBV19, TRBJ2-1)
WASSISRTVTSTRLNNEQFF

SEQ ID NO: 461745 - protein, 16 aa, Homo sapiens
  CDR3 for alpha chain variable domain of TCR clone 230873 (TRAV30, TRAJ24)
CGTAIVDADSWGKFQF

SEQ ID NO: 461746 - protein, 16 aa, Homo sapiens
  CDR3 for beta chain variable domain of TCR clone 230873 (TRBV2, TRBJ1-3)
CASSGGAGRSGNTIYF

SEQ ID NO: 461747 - protein, 14 aa, Homo sapiens
  CDR3 for alpha chain variable domain of TCR clone 230874 (TRAV2, TRAJ3)
CAVRPYSSASKIIF

SEQ ID NO: 461748 - protein, 17 aa, Homo sapiens
  CDR3 for beta chain variable domain of TCR clone 230874 (TRBV7-6, TRBJ2-5)
RASSSPQAGDPSETQYF

SEQ ID NO: 461749 - protein, 16 aa, Homo sapiens
  CDR3 for alpha chain variable domain of TCR clone 230875 (TRAV30, TRAJ24)
CGTEIVDADSWGKFQF

SEQ ID NO: 461750 - protein, 18 aa, Homo sapiens
  CDR3 for beta chain variable domain of TCR clone 230875 (TRBV7-9, TRBJ2-7)
CASSLTTIGSRTWYEQYF

SEQ ID NO: 461751 - protein, 13 aa, Homo sapiens
  CDR3 for alpha chain variable domain of TCR clone 230876 (TRAV29/DV5, TRAJ29)
CAASAAGNPPLVF

SEQ ID NO: 461752 - protein, 14 aa, Homo sapiens
  CDR3 for beta chain variable domain of TCR clone 230876 (TRBV19, TRBJ2-3)
CASSAPRGTDTQYF

SEQ ID NO: 461753 - protein, 12 aa, Homo sapiens
  CDR3 for alpha chain variable domain of TCR clone 230877 (TRAV12-2, TRAJ10)
WGVTGGGNKLTF

SEQ ID NO: 461754 - protein, 15 aa, Homo sapiens
  CDR3 for beta chain variable domain of TCR clone 230877 (TRBV4-3, TRBJ2-7)
CASSQGDWGDYEQYF

SEQ ID NO: 461755 - protein, 18 aa, Homo sapiens
  CDR3 for alpha chain variable domain of TCR clone 230878 (TRAV21, TRAJ52)
CAVRPSPAGGTSYGKRTF

SEQ ID NO: 461756 - protein, 13 aa, Homo sapiens
  CDR3 for beta chain variable domain of TCR clone 230878 (TRBV2, TRBJ1-5)
CATAGPGNQPQHF

SEQ ID NO: 461757 - protein, 10 aa, Homo sapiens
  CDR3 for alpha chain variable domain of TCR clone 230879 (TRAV36/DV7, TRAJ48)
CAVGNEKLTF

SEQ ID NO: 461758 - protein, 15 aa, Homo sapiens
  CDR3 for beta chain variable domain of TCR clone 230879 (TRBV5-1, TRBJ2-1)
CASSPPRAPYNEQFF

SEQ ID NO: 461759 - protein, 14 aa, Homo sapiens
  CDR3 for alpha chain variable domain of TCR clone 230880 (TRAV8-4, TRAJ49)
CAVSESNTGNQFYF

SEQ ID NO: 461760 - protein, 13 aa, Homo sapiens
  CDR3 for beta chain variable domain of TCR clone 230880 (TRBV20-1, TRBJ1-1)
CSAPLGGGTEAFF

SEQ ID NO: 461761 - protein, 14 aa, Homo sapiens
  CDR3 for alpha chain variable domain of TCR clone 230881 (TRAV12-2, TRAJ45)
CAVYSGGGADGLTF

SEQ ID NO: 461762 - protein, 14 aa, Homo sapiens
  CDR3 for beta chain variable domain of TCR clone 230881 (TRBV6-5, TRBJ1-2)
CASTRGGGFDGYTF

SEQ ID NO: 461763 - protein, 15 aa, Homo sapiens
  CDR3 for alpha chain variable domain of TCR clone 230882 (TRAV23/DV6, TRAJ12)
CAAIDLGAMDSSYKL

SEQ ID NO: 461764 - protein, 13 aa, Homo sapiens
  CDR3 for beta chain variable domain of TCR clone 230882 (TRBV12-4, TRBJ2-7)
CASSPTETYEQYF

SEQ ID NO: 461765 - protein, 13 aa, Homo sapiens
  CDR3 for alpha chain variable domain of TCR clone 230883 (TRAV2, TRAJ40)
CAVVTSGTYKYIF

SEQ ID NO: 461766 - protein, 15 aa, Homo sapiens
  CDR3 for beta chain variable domain of TCR clone 230883 (TRBV12-4, TRBJ2-1)
CASSLSTGVSNEQFF

SEQ ID NO: 461767 - protein, 15 aa, Homo sapiens
  CDR3 for alpha chain variable domain of TCR clone 230884 (TRAV26-1, TRAJ22)
CIVRVSFWFSKATDL

SEQ ID NO: 461768 - protein, 12 aa, Homo sapiens
  CDR3 for beta chain variable domain of TCR clone 230884 (TRBV12-4, TRBJ2-7)
CASSLGGYEQYF

SEQ ID NO: 461769 - protein, 12 aa, Homo sapiens
  CDR3 for alpha chain variable domain of TCR clone 230885 (TRAV13-1, TRAJ45)
CAATRGADGLTF

SEQ ID NO: 461770 - protein, 17 aa, Homo sapiens
  CDR3 for beta chain variable domain of TCR clone 230885 (TRBV24-1, TRBJ2-1)
CATSDVSTSGTYNEQFF

SEQ ID NO: 461771 - protein, 11 aa, Homo sapiens
  CDR3 for alpha chain variable domain of TCR clone 230886 (TRAV35, TRAJ30)
CAGPGDNKIIV

SEQ ID NO: 461772 - protein, 14 aa, Homo sapiens
  CDR3 for beta chain variable domain of TCR clone 230886 (TRBV7-6, TRBJ1-6)
CASSQAGGGSPLHF

SEQ ID NO: 461773 - protein, 13 aa, Homo sapiens
  CDR3 for alpha chain variable domain of TCR clone 230887 (TRAV21, TRAJ20)
CAVGLRVDYKLSF

SEQ ID NO: 461774 - protein, 12 aa, Homo sapiens
  CDR3 for beta chain variable domain of TCR clone 230887 (TRBV7-8, TRBJ2-7)
CASSLGDRERYF

SEQ ID NO: 461775 - protein, 12 aa, Homo sapiens
  CDR3 for alpha chain variable domain of TCR clone 230888 (TRAV5, TRAJ27)
CAAITNAGKSTF

SEQ ID NO: 461776 - protein, 15 aa, Homo sapiens
  CDR3 for beta chain variable domain of TCR clone 230888 (TRBV11-2, TRBJ1-2)
CASSLEGVQRNGYTF

SEQ ID NO: 461777 - protein, 11 aa, Homo sapiens
  CDR3 for alpha chain variable domain of TCR clone 230889 (TRAV12-3, TRAJ27)
CAMANAGKSTF

SEQ ID NO: 461778 - protein, 16 aa, Homo sapiens
  CDR3 for beta chain variable domain of TCR clone 230889 (TRBV7-2, TRBJ2-3)
CASSLVGDASTDTQYF

SEQ ID NO: 461779 - protein, 13 aa, Homo sapiens
  CDR3 for alpha chain variable domain of TCR clone 230890 (TRAV22, TRAJ29)
CAVGGSGNTPLVF

SEQ ID NO: 461780 - protein, 13 aa, Homo sapiens
  CDR3 for beta chain variable domain of TCR clone 230890 (TRBV20-1, TRBJ1-1)
CSARGGGNTEAFF

SEQ ID NO: 461781 - protein, 12 aa, Homo sapiens
  CDR3 for alpha chain variable domain of TCR clone 230891 (TRAV29/DV5, TRAJ34)
CEASGNTDKLIF

SEQ ID NO: 461782 - protein, 14 aa, Homo sapiens
  CDR3 for beta chain variable domain of TCR clone 230891 (TRBV7-2, TRBJ2-7)
CASSPKTSFYEQYF

SEQ ID NO: 461783 - protein, 14 aa, Homo sapiens
  CDR3 for alpha chain variable domain of TCR clone 230892 (TRAV4, TRAJ26)
CLVGPNNYGQNFVF

SEQ ID NO: 461784 - protein, 17 aa, Homo sapiens
  CDR3 for beta chain variable domain of TCR clone 230892 (TRBV20-1, TRBJ2-1)
CSASSSGLAGSYNEQFF

SEQ ID NO: 461785 - protein, 13 aa, Homo sapiens
  CDR3 for alpha chain variable domain of TCR clone 230893 (TRAV12-1, TRAJ34)
CVVTGYNTDKLIF

SEQ ID NO: 461786 - protein, 15 aa, Homo sapiens
  CDR3 for beta chain variable domain of TCR clone 230893 (TRBV28, TRBJ2-4)
CAAGSGTLLMGIQYF

SEQ ID NO: 461787 - protein, 18 aa, Homo sapiens
  CDR3 for alpha chain variable domain of TCR clone 230894 (TRAV29/DV5, TRAJ52)
CAAGFRGAGGTSYAKLTF

SEQ ID NO: 461788 - protein, 16 aa, Homo sapiens
  CDR3 for beta chain variable domain of TCR clone 230894 (TRBV7-3, TRBJ2-2)
CASSLKRGTLSGELFF

SEQ ID NO: 461789 - protein, 16 aa, Homo sapiens
  CDR3 for alpha chain variable domain of TCR clone 230895 (TRAV8-3, TRAJ42)
CAVGEGNGGSQGNLIF

SEQ ID NO: 461790 - protein, 14 aa, Homo sapiens
  CDR3 for beta chain variable domain of TCR clone 230895 (TRBV7-2, TRBJ2-1)
CASSRGGARSEQFF

SEQ ID NO: 461791 - protein, 14 aa, Homo sapiens
  CDR3 for alpha chain variable domain of TCR clone 230896 (TRAV1-2, TRAJ8)
CAVREDTGFQKLEF

SEQ ID NO: 461792 - protein, 15 aa, Homo sapiens
  CDR3 for beta chain variable domain of TCR clone 230896 (TRBV27, TRBJ2-1)
CASSNGGGSSNEQFF

SEQ ID NO: 461793 - protein, 13 aa, Homo sapiens
  CDR3 for alpha chain variable domain of TCR clone 230897 (TRAV13-2, TRAJ13)
CAERPGGYQKVTF

SEQ ID NO: 461794 - protein, 19 aa, Homo sapiens
  CDR3 for beta chain variable domain of TCR clone 230897 (TRBV19, TRBJ2-2)
CASTRPGLAGGRVTGELFF

SEQ ID NO: 461795 - protein, 19 aa, Homo sapiens
  CDR3 for alpha chain variable domain of TCR clone 230898 (TRAV1-2, TRAJ26)
CLLPLCCERPDNYGQNFVF

SEQ ID NO: 461796 - protein, 15 aa, Homo sapiens
  CDR3 for beta chain variable domain of TCR clone 230898 (TRBV12-4, TRBJ2-5)
CASSLGGQGRETQYF

SEQ ID NO: 461797 - protein, 15 aa, Homo sapiens
  CDR3 for alpha chain variable domain of TCR clone 230899 (TRAV1-2, TRAJ35)
CAVRDPGGFGNVLHC

SEQ ID NO: 461798 - protein, 14 aa, Homo sapiens
  CDR3 for beta chain variable domain of TCR clone 230899 (TRBV5-1, TRBJ2-1)
CASSLDDWFDEQFF

SEQ ID NO: 461799 - protein, 17 aa, Homo sapiens
  CDR3 for alpha chain variable domain of TCR clone 230900 (TRAV12-1, TRAJ53)
CVAGAIVGGGSNYKLTF

SEQ ID NO: 461800 - protein, 14 aa, Homo sapiens
  CDR3 for beta chain variable domain of TCR clone 230900 (TRBV5-1, TRBJ1-4)
CASSLDRTHEKLFF

SEQ ID NO: 461801 - protein, 16 aa, Homo sapiens
  CDR3 for alpha chain variable domain of TCR clone 230901 (TRAV3, TRAJ37)
CAVRPHGSGNTGKLIF

SEQ ID NO: 461802 - protein, 12 aa, Homo sapiens
  CDR3 for beta chain variable domain of TCR clone 230901 (TRBV5-1, TRBJ2-3)
CASSLAEGTQYF

SEQ ID NO: 461803 - protein, 14 aa, Homo sapiens
  CDR3 for alpha chain variable domain of TCR clone 230902 (TRAV1-2, TRAJ8)
CAVREDTGFQKPVF

SEQ ID NO: 461804 - protein, 17 aa, Homo sapiens
  CDR3 for beta chain variable domain of TCR clone 230902 (TRBV28, TRBJ2-5)
CASSRQGGLAGAETQYF

SEQ ID NO: 461805 - protein, 13 aa, Homo sapiens
  CDR3 for alpha chain variable domain of TCR clone 230903 (TRAV17, TRAJ21)
CATDGGNFNRFYF

SEQ ID NO: 461806 - protein, 14 aa, Homo sapiens
  CDR3 for beta chain variable domain of TCR clone 230903 (TRBV12-4, TRBJ1-1)
CASSLGTGGTEAFF

SEQ ID NO: 461807 - protein, 15 aa, Homo sapiens
  CDR3 for alpha chain variable domain of TCR clone 230904 (TRAV26-2, TRAJ13)
CILRYLSGGYQKVTF

SEQ ID NO: 461808 - protein, 14 aa, Homo sapiens
  CDR3 for beta chain variable domain of TCR clone 230904 (TRBV4-1, TRBJ2-3)
CASSQEGSTDTQYF

SEQ ID NO: 461809 - protein, 14 aa, Homo sapiens
  CDR3 for alpha chain variable domain of TCR clone 230905 (TRAV29/DV5, TRAJ45)
CAASFRGGADGLTF

SEQ ID NO: 461810 - protein, 14 aa, Homo sapiens
  CDR3 for beta chain variable domain of TCR clone 230905 (TRBV2, TRBJ2-3)
CASSEGQNTDTQYF

SEQ ID NO: 461811 - protein, 17 aa, Homo sapiens
  CDR3 for alpha chain variable domain of TCR clone 230906 (TRAV1-1, TRAJ32)
CAVRVDELWWCYKQAHL

SEQ ID NO: 461812 - protein, 13 aa, Homo sapiens
  CDR3 for beta chain variable domain of TCR clone 230906 (TRBV24-1, TRBJ2-2)
CATSETNTGELFF

SEQ ID NO: 461813 - protein, 18 aa, Homo sapiens
  CDR3 for alpha chain variable domain of TCR clone 230907 (TRAV21, TRAJ52)
CAVRPSPSGGTSYGKLTF

SEQ ID NO: 461814 - protein, 11 aa, Homo sapiens
  CDR3 for beta chain variable domain of TCR clone 230907 (TRBV12-4, TRBJ2-3)
CASTATDTQYF

SEQ ID NO: 461815 - protein, 13 aa, Homo sapiens
  CDR3 for alpha chain variable domain of TCR clone 230908 (TRAV2, TRAJ40)
CAVVTSGTYKYIF

SEQ ID NO: 461816 - protein, 11 aa, Homo sapiens
  CDR3 for beta chain variable domain of TCR clone 230908 (TRBV11-2, TRBJ2-1)
CQQPGNNEQFF

SEQ ID NO: 461817 - protein, 13 aa, Homo sapiens
  CDR3 for alpha chain variable domain of TCR clone 230909 (TRAV30, TRAJ24)
CGTVTDSGGKLQF

SEQ ID NO: 461818 - protein, 16 aa, Homo sapiens
  CDR3 for beta chain variable domain of TCR clone 230909 (TRBV7-3, TRBJ2-2)
CASSLKRGTLSGELFF

SEQ ID NO: 461819 - protein, 15 aa, Homo sapiens
  CDR3 for alpha chain variable domain of TCR clone 230910 (TRAV12-1, TRAJ4)
CVVNPFSGGYNKLIF

SEQ ID NO: 461820 - protein, 16 aa, Homo sapiens
  CDR3 for beta chain variable domain of TCR clone 230910 (TRBV5-1, TRBJ1-1)
CASSKTWTEVGTEAFF

SEQ ID NO: 461821 - protein, 15 aa, Homo sapiens
  CDR3 for alpha chain variable domain of TCR clone 230911 (TRAV16, TRAJ12)
CSKWPLRDSSYKLIF

SEQ ID NO: 461822 - protein, 13 aa, Homo sapiens
  CDR3 for beta chain variable domain of TCR clone 230911 (TRBV20-1, TRBJ1-1)
CSASKRGLTEAFF

SEQ ID NO: 461823 - protein, 14 aa, Homo sapiens
  CDR3 for alpha chain variable domain of TCR clone 230912 (TRAV1-2, TRAJ16)
CAVNRFSDGQKLLF

SEQ ID NO: 461824 - protein, 14 aa, Homo sapiens
  CDR3 for beta chain variable domain of TCR clone 230912 (TRBV7-9, TRBJ2-3)
CASSLEDGTDTHYF

SEQ ID NO: 461825 - protein, 15 aa, Homo sapiens
  CDR3 for alpha chain variable domain of TCR clone 230913 (TRAV35, TRAJ40)
CAGKLGTSGTYKYIF

SEQ ID NO: 461826 - protein, 14 aa, Homo sapiens
  CDR3 for beta chain variable domain of TCR clone 230913 (TRBV7-3, TRBJ2-1)
CANSLAGGTNEQFF

SEQ ID NO: 461827 - protein, 13 aa, Homo sapiens
  CDR3 for alpha chain variable domain of TCR clone 230914 (TRAV20, TRAJ42)
CAVQGGSQGNLIF

SEQ ID NO: 461828 - protein, 15 aa, Homo sapiens
  CDR3 for beta chain variable domain of TCR clone 230914 (TRBV10-1, TRBJ2-1)
CASSEWRGTYKEQFF

SEQ ID NO: 461829 - protein, 15 aa, Homo sapiens
  CDR3 for alpha chain variable domain of TCR clone 230915 (TRAV8-3, TRAJ45)
CASSYSGGGADGLTF

SEQ ID NO: 461830 - protein, 17 aa, Homo sapiens
  CDR3 for beta chain variable domain of TCR clone 230915 (TRBV13, TRBJ2-3)
CASILSRVAGGRNTQYF

SEQ ID NO: 461831 - protein, 15 aa, Homo sapiens
  CDR3 for alpha chain variable domain of TCR clone 230916 (TRAV8-4, TRAJ29)
CAVSEDFRGHTPLVF

SEQ ID NO: 461832 - protein, 14 aa, Homo sapiens
  CDR3 for beta chain variable domain of TCR clone 230916 (TRBV7-2, TRBJ2-7)
CASRSQGAAYEQYF

SEQ ID NO: 461833 - protein, 14 aa, Homo sapiens
  CDR3 for alpha chain variable domain of TCR clone 230917 (TRAV8-6, TRAJ5)
CAVSVETGRRALTF

SEQ ID NO: 461834 - protein, 11 aa, Homo sapiens
  CDR3 for beta chain variable domain of TCR clone 230917 (TRBV7-3, TRBJ2-5)
CASSLSETQYF

SEQ ID NO: 461835 - protein, 11 aa, Homo sapiens
  CDR3 for alpha chain variable domain of TCR clone 230918 (TRAV12-2, TRAJ29)
CAVTLRSPLVF

SEQ ID NO: 461836 - protein, 16 aa, Homo sapiens
  CDR3 for beta chain variable domain of TCR clone 230918 (TRBV19, TRBJ1-5)
CASSIDRVGPRQPQHF

SEQ ID NO: 461837 - protein, 13 aa, Homo sapiens
  CDR3 for alpha chain variable domain of TCR clone 230919 (TRAV1-2, TRAJ9)
CAALNTGGFKTIV

SEQ ID NO: 461838 - protein, 15 aa, Homo sapiens
  CDR3 for beta chain variable domain of TCR clone 230919 (TRBV19, TRBJ1-1)
CASTSGQIQNTEAFF

SEQ ID NO: 461839 - protein, 14 aa, Homo sapiens
  CDR3 for alpha chain variable domain of TCR clone 230920 (TRAV12-2, TRAJ13)
CAVKKTGGYQKVTF

SEQ ID NO: 461840 - protein, 13 aa, Homo sapiens
  CDR3 for beta chain variable domain of TCR clone 230920 (TRBV2, TRBJ1-1)
CASSVLMNTEAFF

SEQ ID NO: 461841 - protein, 17 aa, Homo sapiens
  CDR3 for alpha chain variable domain of TCR clone 230921 (TRAV13-1, TRAJ31)
CAPRDRLIFGDGTHLVV

SEQ ID NO: 461842 - protein, 12 aa, Homo sapiens
  CDR3 for beta chain variable domain of TCR clone 230921 (TRBV7-9, TRBJ2-7)
CASSLEGYEQYF

SEQ ID NO: 461843 - protein, 16 aa, Homo sapiens
  CDR3 for alpha chain variable domain of TCR clone 230922 (TRAV20, TRAJ53)
CAVRRGSGGSNYKLTF

SEQ ID NO: 461844 - protein, 15 aa, Homo sapiens
  CDR3 for beta chain variable domain of TCR clone 230922 (TRBV7-2, TRBJ2-1)
CASSSGLAGGNEQFF

SEQ ID NO: 461845 - protein, 19 aa, Homo sapiens
  CDR3 for alpha chain variable domain of TCR clone 230923 (TRAV17, TRAJ40)
TASRAADTASYFCASKYIF

SEQ ID NO: 461846 - protein, 17 aa, Homo sapiens
  CDR3 for beta chain variable domain of TCR clone 230923 (TRBV11-2, TRBJ2-4)
CASSFRALGGAGDMQYF

SEQ ID NO: 461847 - protein, 14 aa, Homo sapiens
  CDR3 for alpha chain variable domain of TCR clone 230924 (TRAV38-1, TRAJ29)
CAFITTSGNTPLVF

SEQ ID NO: 461848 - protein, 13 aa, Homo sapiens
  CDR3 for beta chain variable domain of TCR clone 230924 (TRBV18, TRBJ2-7)
CQLTERGAYEQYF

SEQ ID NO: 461849 - protein, 15 aa, Homo sapiens
  CDR3 for alpha chain variable domain of TCR clone 230925 (TRAV2, TRAJ15)
CAVEDRGQAGTARIF

SEQ ID NO: 461850 - protein, 13 aa, Homo sapiens
  CDR3 for beta chain variable domain of TCR clone 230925 (TRBV12-4, TRBJ2-5)
CASSLGGSRTQYF

SEQ ID NO: 461851 - protein, 17 aa, Homo sapiens
  CDR3 for alpha chain variable domain of TCR clone 230926 (TRAV3, TRAJ6)
CAVRDGPRAGGSYIPTF

SEQ ID NO: 461852 - protein, 16 aa, Homo sapiens
  CDR3 for beta chain variable domain of TCR clone 230926 (TRBV20-1, TRBJ2-2)
CSARDLQGVDTGELFF

SEQ ID NO: 461853 - protein, 14 aa, Homo sapiens
  CDR3 for alpha chain variable domain of TCR clone 230927 (TRAV8-3, TRAJ15)
CAVGRHQAGTALIF

SEQ ID NO: 461854 - protein, 15 aa, Homo sapiens
  CDR3 for beta chain variable domain of TCR clone 230927 (TRBV28, TRBJ2-5)
CASSSPGDPGETQYF

SEQ ID NO: 461855 - protein, 15 aa, Homo sapiens
  CDR3 for alpha chain variable domain of TCR clone 230928 (TRAV12-1, TRAJ45)
CVVLSGGGGADGLTS

SEQ ID NO: 461856 - protein, 13 aa, Homo sapiens
  CDR3 for beta chain variable domain of TCR clone 230928 (TRBV9, TRBJ2-1)
CASSPSGGSEQFF

SEQ ID NO: 461857 - protein, 14 aa, Homo sapiens
  CDR3 for alpha chain variable domain of TCR clone 230929 (TRAV12-2, TRAJ11)
CAVEVGSGYSTLTF

SEQ ID NO: 461858 - protein, 16 aa, Homo sapiens
  CDR3 for beta chain variable domain of TCR clone 230929 (TRBV6-1, TRBJ1-2)
CASSGAWQGRSHGYTF

SEQ ID NO: 461859 - protein, 15 aa, Homo sapiens
  CDR3 for alpha chain variable domain of TCR clone 230930 (TRAV3, TRAJ5)
CAVRDLDTGRRALTF

SEQ ID NO: 461860 - protein, 14 aa, Homo sapiens
  CDR3 for beta chain variable domain of TCR clone 230930 (TRBV27, TRBJ2-1)
CAGSIAETYNVQFF

SEQ ID NO: 461861 - protein, 14 aa, Homo sapiens
  CDR3 for alpha chain variable domain of TCR clone 230931 (TRAV17, TRAJ37)
CATDGSSDTGKLTF

SEQ ID NO: 461862 - protein, 13 aa, Homo sapiens
  CDR3 for beta chain variable domain of TCR clone 230931 (TRBV11-2, TRBJ2-1)
CASSLDLVNEQFF

SEQ ID NO: 461863 - protein, 11 aa, Homo sapiens
  CDR3 for alpha chain variable domain of TCR clone 230932 (TRAV1-2, TRAJ20)
CAVANDYKLSS

SEQ ID NO: 461864 - protein, 18 aa, Homo sapiens
  CDR3 for beta chain variable domain of TCR clone 230932 (TRBV20-1, TRBJ2-6)
CSAEATPTHGSGANVLTF

SEQ ID NO: 461865 - protein, 14 aa, Homo sapiens
  CDR3 for alpha chain variable domain of TCR clone 230933 (TRAV3, TRAJ37)
CAVKESGNTGKLIF

SEQ ID NO: 461866 - protein, 13 aa, Homo sapiens
  CDR3 for beta chain variable domain of TCR clone 230933 (TRBV12-5, TRBJ2-3)
CASGDRQSDMQYF

SEQ ID NO: 461867 - protein, 15 aa, Homo sapiens
  CDR3 for alpha chain variable domain of TCR clone 230934 (TRAV8-3, TRAJ27)
CAVGPSKTNAGKSTF

SEQ ID NO: 461868 - protein, 14 aa, Homo sapiens
  CDR3 for beta chain variable domain of TCR clone 230934 (TRBV11-2, TRBJ2-3)
CTSSRLARTDTQYF

SEQ ID NO: 461869 - protein, 16 aa, Homo sapiens
  CDR3 for alpha chain variable domain of TCR clone 230935 (TRAV20, TRAJ28)
CAVRDPSGAGSYQLTF

SEQ ID NO: 461870 - protein, 11 aa, Homo sapiens
  CDR3 for beta chain variable domain of TCR clone 230935 (TRBV7-9, TRBJ2-3)
CASSPTDTQYF

SEQ ID NO: 461871 - protein, 17 aa, Homo sapiens
  CDR3 for alpha chain variable domain of TCR clone 230936 (TRAV3, TRAJ42)
CAVRDRDYGGSQGNLIF

SEQ ID NO: 461872 - protein, 16 aa, Homo sapiens
  CDR3 for beta chain variable domain of TCR clone 230936 (TRBV7-3, TRBJ2-2)
CASSLKRGTSSGELFF

SEQ ID NO: 461873 - protein, 18 aa, Homo sapiens
  CDR3 for alpha chain variable domain of TCR clone 230937 (TRAV13-1, TRAJ52)
CAASKRSAGGTSYGKLTF

SEQ ID NO: 461874 - protein, 13 aa, Homo sapiens
  CDR3 for beta chain variable domain of TCR clone 230937 (TRBV7-6, TRBJ1-2)
CASSLVADYGYAF

SEQ ID NO: 461875 - protein, 14 aa, Homo sapiens
  CDR3 for alpha chain variable domain of TCR clone 230938 (TRAV8-6, TRAJ37)
CAVRSRSNTGKLIF

SEQ ID NO: 461876 - protein, 14 aa, Homo sapiens
  CDR3 for beta chain variable domain of TCR clone 230938 (TRBV6-5, TRBJ1-1)
CASRKPDSDTEAFF

SEQ ID NO: 461877 - protein, 15 aa, Homo sapiens
  CDR3 for alpha chain variable domain of TCR clone 230939 (TRAV12-3, TRAJ6)
CAMSATTGGSYIPTF

SEQ ID NO: 461878 - protein, 16 aa, Homo sapiens
  CDR3 for beta chain variable domain of TCR clone 230939 (TRBV20-1, TRBJ1-2)
CSASMGQGLANYGYAF

SEQ ID NO: 461879 - protein, 13 aa, Homo sapiens
  CDR3 for alpha chain variable domain of TCR clone 230940 (TRAV8-6, TRAJ21)
CAVSPSSLNKFYF

SEQ ID NO: 461880 - protein, 14 aa, Homo sapiens
  CDR3 for beta chain variable domain of TCR clone 230940 (TRBV7-9, TRBJ2-5)
CASSIDTAQETQYF

SEQ ID NO: 461881 - protein, 13 aa, Homo sapiens
  CDR3 for alpha chain variable domain of TCR clone 230941 (TRAV13-1, TRAJ13)
CAASKGGYQKVTF

SEQ ID NO: 461882 - protein, 18 aa, Homo sapiens
  CDR3 for beta chain variable domain of TCR clone 230941 (TRBV11-2, TRBJ2-3)
CASSLGGASRGAPNTQYF

SEQ ID NO: 461883 - protein, 12 aa, Homo sapiens
  CDR3 for alpha chain variable domain of TCR clone 230942 (TRAV12-3, TRAJ40)
CAMSSGTYKYIF

SEQ ID NO: 461884 - protein, 12 aa, Homo sapiens
  CDR3 for beta chain variable domain of TCR clone 230942 (TRBV6-3, TRBJ2-7)
CASSLTPYEQYF

SEQ ID NO: 461885 - protein, 17 aa, Homo sapiens
  CDR3 for alpha chain variable domain of TCR clone 230943 (TRAV3, TRAJ6)
CAVRDGPRAGGSYIPTF

SEQ ID NO: 461886 - protein, 15 aa, Homo sapiens
  CDR3 for beta chain variable domain of TCR clone 230943 (TRBV7-2, TRBJ2-7)
CASSLSSGRTYEQYF

SEQ ID NO: 461887 - protein, 14 aa, Homo sapiens
  CDR3 for alpha chain variable domain of TCR clone 230944 (TRAV1-2, TRAJ16)
CAVNRVSDGQKLLF

SEQ ID NO: 461888 - protein, 16 aa, Homo sapiens
  CDR3 for beta chain variable domain of TCR clone 230944 (TRBV9, TRBJ2-1)
CASSVGGGGNYNEQFF

SEQ ID NO: 461889 - protein, 10 aa, Homo sapiens
  CDR3 for alpha chain variable domain of TCR clone 230945 (TRAV1-2, TRAJ23)
CAGQGGKLIF

SEQ ID NO: 461890 - protein, 16 aa, Homo sapiens
  CDR3 for beta chain variable domain of TCR clone 230945 (TRBV11-2, TRBJ1-1)
CASSLRQGGEQSKAFF

SEQ ID NO: 461891 - protein, 11 aa, Homo sapiens
  CDR3 for alpha chain variable domain of TCR clone 230946 (TRAV12-2, TRAJ29)
CAVTLRSPLVF

SEQ ID NO: 461892 - protein, 16 aa, Homo sapiens
  CDR3 for beta chain variable domain of TCR clone 230946 (TRBV19, TRBJ1-5)
FASSIDRGGPRQPQHF

SEQ ID NO: 461893 - protein, 12 aa, Homo sapiens
  CDR3 for alpha chain variable domain of TCR clone 230947 (TRAV12-3, TRAJ17)
CAMTLTGYKLTF

SEQ ID NO: 461894 - protein, 13 aa, Homo sapiens
  CDR3 for beta chain variable domain of TCR clone 230947 (TRBV9, TRBJ2-2)
CASSPRPAGELFF

SEQ ID NO: 461895 - protein, 12 aa, Homo sapiens
  CDR3 for alpha chain variable domain of TCR clone 230948 (TRAV2, TRAJ24)
CAASDSWGKFQF

SEQ ID NO: 461896 - protein, 20 aa, Homo sapiens
  CDR3 for beta chain variable domain of TCR clone 230948 (TRBV7-8, TRBJ2-2)
CASSHLFPGPTIHITGELFF

SEQ ID NO: 461897 - protein, 15 aa, Homo sapiens
  CDR3 for alpha chain variable domain of TCR clone 230949 (TRAV12-3, TRAJ6)
CAMSATSGGSYIPTF

SEQ ID NO: 461898 - protein, 14 aa, Homo sapiens
  CDR3 for beta chain variable domain of TCR clone 230949 (TRBV4-2, TRBJ2-1)
CASGLDRAYNEQFF

SEQ ID NO: 461899 - protein, 14 aa, Homo sapiens
  CDR3 for alpha chain variable domain of TCR clone 230950 (TRAV12-3, TRAJ10)
SHLPLMGGGNKLTF

SEQ ID NO: 461900 - protein, 12 aa, Homo sapiens
  CDR3 for beta chain variable domain of TCR clone 230950 (TRBV29-1, TRBJ1-1)
CSVATPGVEAFF

SEQ ID NO: 461901 - protein, 16 aa, Homo sapiens
  CDR3 for alpha chain variable domain of TCR clone 230951 (TRAV3, TRAJ10)
CAVRDMRAGGGNKLTV

SEQ ID NO: 461902 - protein, 17 aa, Homo sapiens
  CDR3 for beta chain variable domain of TCR clone 230951 (TRBV28, TRBJ2-5)
CASSTPEGDALQETQYF

SEQ ID NO: 461903 - protein, 16 aa, Homo sapiens
  CDR3 for alpha chain variable domain of TCR clone 230952 (TRAV30, TRAJ24)
CGTEIVDADSWGKFQF

SEQ ID NO: 461904 - protein, 13 aa, Homo sapiens
  CDR3 for beta chain variable domain of TCR clone 230952 (TRBV12-4, TRBJ2-7)
CASSFVRGYGQYF

SEQ ID NO: 461905 - protein, 14 aa, Homo sapiens
  CDR3 for alpha chain variable domain of TCR clone 230953 (TRAV9-2, TRAJ39)
CALYIYNAGNMLTF

SEQ ID NO: 461906 - protein, 12 aa, Homo sapiens
  CDR3 for beta chain variable domain of TCR clone 230953 (TRBV7-2, TRBJ2-5)
CASSQYKETQYF

SEQ ID NO: 461907 - protein, 13 aa, Homo sapiens
  CDR3 for alpha chain variable domain of TCR clone 230954 (TRAV30, TRAJ24)
CGTVTDSWGKLQF

SEQ ID NO: 461908 - protein, 15 aa, Homo sapiens
  CDR3 for beta chain variable domain of TCR clone 230954 (TRBV11-2, TRBJ2-2)
CASSSDRVNAGELFF

SEQ ID NO: 461909 - protein, 14 aa, Homo sapiens
  CDR3 for alpha chain variable domain of TCR clone 230955 (TRAV8-4, TRAJ9)
CAVRINTGGFKTIF

SEQ ID NO: 461910 - protein, 14 aa, Homo sapiens
  CDR3 for beta chain variable domain of TCR clone 230955 (TRBV28, TRBJ2-7)
CASTTDRDGFVQYF

SEQ ID NO: 461911 - protein, 13 aa, Homo sapiens
  CDR3 for alpha chain variable domain of TCR clone 230956 (TRAV8-1, TRAJ30)
CAVIMNRDDKIIF

SEQ ID NO: 461912 - protein, 15 aa, Homo sapiens
  CDR3 for beta chain variable domain of TCR clone 230956 (TRBV11-2, TRBJ2-1)
CASSSPSTRYNEQFF

SEQ ID NO: 461913 - protein, 12 aa, Homo sapiens
  CDR3 for alpha chain variable domain of TCR clone 230957 (TRAV12-3, TRAJ17)
CAITLTGNKLTF

SEQ ID NO: 461914 - protein, 15 aa, Homo sapiens
  CDR3 for beta chain variable domain of TCR clone 230957 (TRBV20-1, TRBJ2-7)
CSARDRVSWMDEQYF

SEQ ID NO: 461915 - protein, 13 aa, Homo sapiens
  CDR3 for alpha chain variable domain of TCR clone 230958 (TRAV23/DV6, TRAJ6)
CAAKKGGSYIPTF

SEQ ID NO: 461916 - protein, 15 aa, Homo sapiens
  CDR3 for beta chain variable domain of TCR clone 230958 (TRBV5-1, TRBJ1-2)
CASSSYGEFDYGYTF

SEQ ID NO: 461917 - protein, 12 aa, Homo sapiens
  CDR3 for alpha chain variable domain of TCR clone 230959 (TRAV13-1, TRAJ49)
CAASPMGNQFYS

SEQ ID NO: 461918 - protein, 13 aa, Homo sapiens
  CDR3 for beta chain variable domain of TCR clone 230959 (TRBV20-1, TRBJ2-2)
CSASAAGTGELFF

SEQ ID NO: 461919 - protein, 14 aa, Homo sapiens
  CDR3 for alpha chain variable domain of TCR clone 230960 (TRAV8-1, TRAJ34)
YAVITTYNTDKLIF

SEQ ID NO: 461920 - protein, 14 aa, Homo sapiens
  CDR3 for beta chain variable domain of TCR clone 230960 (TRBV11-3, TRBJ1-3)
CASSHNGQGNTIYF

SEQ ID NO: 461921 - protein, 14 aa, Homo sapiens
  CDR3 for alpha chain variable domain of TCR clone 230961 (TRAV1-2, TRAJ16)
CAVNRFSDGQKLLF

SEQ ID NO: 461922 - protein, 16 aa, Homo sapiens
  CDR3 for beta chain variable domain of TCR clone 230961 (TRBV13, TRBJ2-2)
CATSPRTGEHTGELFF

SEQ ID NO: 461923 - protein, 15 aa, Homo sapiens
  CDR3 for alpha chain variable domain of TCR clone 230962 (TRAV2, TRAJ24)
CAVVRLKNSWGKLQF

SEQ ID NO: 461924 - protein, 16 aa, Homo sapiens
  CDR3 for beta chain variable domain of TCR clone 230962 (TRBV7-7, TRBJ2-3)
CASSPGTSGSTDTQYS

SEQ ID NO: 461925 - protein, 12 aa, Homo sapiens
  CDR3 for alpha chain variable domain of TCR clone 230963 (TRAV36/DV7, TRAJ40)
CAVAGGTYKYIF

SEQ ID NO: 461926 - protein, 18 aa, Homo sapiens
  CDR3 for beta chain variable domain of TCR clone 230963 (TRBV27, TRBJ2-3)
CASSKGSSGRTSTDTQYF

SEQ ID NO: 461927 - protein, 17 aa, Homo sapiens
  CDR3 for alpha chain variable domain of TCR clone 230964 (TRAV26-1, TRAJ37)
CIVRVITVSSTTGKLIF

SEQ ID NO: 461928 - protein, 11 aa, Homo sapiens
  CDR3 for beta chain variable domain of TCR clone 230964 (TRBV29-1, TRBJ2-5)
CSEDRTGTQYF

SEQ ID NO: 461929 - protein, 14 aa, Homo sapiens
  CDR3 for alpha chain variable domain of TCR clone 230965 (TRAV12-2, TRAJ13)
CAVKKTGGYQKVTF

SEQ ID NO: 461930 - protein, 15 aa, Homo sapiens
  CDR3 for beta chain variable domain of TCR clone 230965 (TRBV27, TRBJ2-1)
YASSNRGGSSNEQFF

SEQ ID NO: 461931 - protein, 14 aa, Homo sapiens
  CDR3 for alpha chain variable domain of TCR clone 230966 (TRAV8-4, TRAJ40)
CAVLSTSGTYKYIF

SEQ ID NO: 461932 - protein, 17 aa, Homo sapiens
  CDR3 for beta chain variable domain of TCR clone 230966 (TRBV7-2, TRBJ2-4)
CASSFRLAGGPVNIQYF

SEQ ID NO: 461933 - protein, 18 aa, Homo sapiens
  CDR3 for alpha chain variable domain of TCR clone 230967 (TRAV16, TRAJ52)
CALSGVDAGGTSYGKLTF

SEQ ID NO: 461934 - protein, 16 aa, Homo sapiens
  CDR3 for beta chain variable domain of TCR clone 230967 (TRBV4-2, TRBJ2-3)
CASSQELAGDTDTQYF

SEQ ID NO: 461935 - protein, 16 aa, Homo sapiens
  CDR3 for alpha chain variable domain of TCR clone 230968 (TRAV3, TRAJ10)
CAVGEMRAGGGNKLTF

SEQ ID NO: 461936 - protein, 13 aa, Homo sapiens
  CDR3 for beta chain variable domain of TCR clone 230968 (TRBV7-9, TRBJ1-2)
CASSLKQNYGYTF

SEQ ID NO: 461937 - protein, 12 aa, Homo sapiens
  CDR3 for alpha chain variable domain of TCR clone 230969 (TRAV13-2, TRAJ29)
CAENPGNTPLVF

SEQ ID NO: 461938 - protein, 19 aa, Homo sapiens
  CDR3 for beta chain variable domain of TCR clone 230969 (TRBV11-3, TRBJ2-1)
CASSLGTRKARSSYNEQFF

SEQ ID NO: 461939 - protein, 16 aa, Homo sapiens
  CDR3 for alpha chain variable domain of TCR clone 230970 (TRAV8-3, TRAJ28)
CAVPPQRGAGSYQLTF

SEQ ID NO: 461940 - protein, 15 aa, Homo sapiens
  CDR3 for beta chain variable domain of TCR clone 230970 (TRBV7-3, TRBJ2-1)
CASSPTGGGEVEQFF

SEQ ID NO: 461941 - protein, 15 aa, Homo sapiens
  CDR3 for alpha chain variable domain of TCR clone 230971 (TRAV12-3, TRAJ6)
CAMSATTGGSHIPTF

SEQ ID NO: 461942 - protein, 14 aa, Homo sapiens
  CDR3 for beta chain variable domain of TCR clone 230971 (TRBV19, TRBJ2-1)
CASPAFVLSGEQFF

SEQ ID NO: 461943 - protein, 15 aa, Homo sapiens
  CDR3 for alpha chain variable domain of TCR clone 230972 (TRAV17, TRAJ6)
FATDLPSGGSYIPTF

SEQ ID NO: 461944 - protein, 16 aa, Homo sapiens
  CDR3 for beta chain variable domain of TCR clone 230972 (TRBV4-1, TRBJ2-7)
CASSQDPTGYSYEQYF

SEQ ID NO: 461945 - protein, 14 aa, Homo sapiens
  CDR3 for alpha chain variable domain of TCR clone 230973 (TRAV12-2, TRAJ13)
CAVKKTGGYQKVTL

SEQ ID NO: 461946 - protein, 13 aa, Homo sapiens
  CDR3 for beta chain variable domain of TCR clone 230973 (TRBV12-4, TRBJ2-1)
CASSFQGYNEQFF

SEQ ID NO: 461947 - protein, 14 aa, Homo sapiens
  CDR3 for alpha chain variable domain of TCR clone 230974 (TRAV27, TRAJ22)
CAGLPSGSARQLTF

SEQ ID NO: 461948 - protein, 17 aa, Homo sapiens
  CDR3 for beta chain variable domain of TCR clone 230974 (TRBV13, TRBJ2-3)
CASSLSRVAGGRNTQYF

SEQ ID NO: 461949 - protein, 13 aa, Homo sapiens
  CDR3 for alpha chain variable domain of TCR clone 230975 (TRAV12-3, TRAJ31)
CAMSANNNARLMF

SEQ ID NO: 461950 - protein, 16 aa, Homo sapiens
  CDR3 for beta chain variable domain of TCR clone 230975 (TRBV7-9, TRBJ1-2)
CACSLGFSSGEGGYAF

SEQ ID NO: 461951 - protein, 13 aa, Homo sapiens
  CDR3 for alpha chain variable domain of TCR clone 230976 (TRAV3, TRAJ30)
CAVRDIPDDKIIL

SEQ ID NO: 461952 - protein, 17 aa, Homo sapiens
  CDR3 for beta chain variable domain of TCR clone 230976 (TRBV4-1, TRBJ1-4)
CASSQEGLRGVEEKLFF

SEQ ID NO: 461953 - protein, 12 aa, Homo sapiens
  CDR3 for alpha chain variable domain of TCR clone 230977 (TRAV8-6, TRAJ20)
CAVSSNDYKLSL

SEQ ID NO: 461954 - protein, 15 aa, Homo sapiens
  CDR3 for beta chain variable domain of TCR clone 230977 (TRBV6-5, TRBJ2-2)
CASVSGGPSTGELFF

SEQ ID NO: 461955 - protein, 16 aa, Homo sapiens
  CDR3 for alpha chain variable domain of TCR clone 230978 (TRAV30, TRAJ24)
CGTEIVDADSWGKCQL

SEQ ID NO: 461956 - protein, 14 aa, Homo sapiens
  CDR3 for beta chain variable domain of TCR clone 230978 (TRBV12-5, TRBJ2-5)
CASGSRTHQETQYF

SEQ ID NO: 461957 - protein, 12 aa, Homo sapiens
  CDR3 for alpha chain variable domain of TCR clone 230979 (TRAV21, TRAJ8)
CAVNTGFQKLVF

SEQ ID NO: 461958 - protein, 13 aa, Homo sapiens
  CDR3 for beta chain variable domain of TCR clone 230979 (TRBV6-3, TRBJ2-1)
CASRYDNYNEQFF

SEQ ID NO: 461959 - protein, 16 aa, Homo sapiens
  CDR3 for alpha chain variable domain of TCR clone 230980 (TRAV30, TRAJ24)
CGTEIVYADSWGKFQF

SEQ ID NO: 461960 - protein, 13 aa, Homo sapiens
  CDR3 for beta chain variable domain of TCR clone 230980 (TRBV11-2, TRBJ2-5)
CASSSTGEETQYF

SEQ ID NO: 461961 - protein, 14 aa, Homo sapiens
  CDR3 for alpha chain variable domain of TCR clone 230981 (TRAV26-1, TRAJ38)
CIADNAGNNRKLIW

SEQ ID NO: 461962 - protein, 15 aa, Homo sapiens
  CDR3 for beta chain variable domain of TCR clone 230981 (TRBV11-2, TRBJ2-7)
CASSLMVGGSYEQYF

SEQ ID NO: 461963 - protein, 16 aa, Homo sapiens
  CDR3 for alpha chain variable domain of TCR clone 230982 (TRAV13-1, TRAJ45)
CAASWESGGGADGLHF

SEQ ID NO: 461964 - protein, 14 aa, Homo sapiens
  CDR3 for beta chain variable domain of TCR clone 230982 (TRBV12-4, TRBJ1-3)
CASGQTVSGNTIYF

SEQ ID NO: 461965 - protein, 12 aa, Homo sapiens
  CDR3 for alpha chain variable domain of TCR clone 230983 (TRAV22, TRAJ20)
CSVGGNDYKLSF

SEQ ID NO: 461966 - protein, 13 aa, Homo sapiens
  CDR3 for beta chain variable domain of TCR clone 230983 (TRBV9, TRBJ1-1)
CASSVGTGTEAFF

SEQ ID NO: 461967 - protein, 16 aa, Homo sapiens
  CDR3 for alpha chain variable domain of TCR clone 230984 (TRAV26-1, TRAJ42)
CIVRVATGGSQGNLIF

SEQ ID NO: 461968 - protein, 13 aa, Homo sapiens
  CDR3 for beta chain variable domain of TCR clone 230984 (TRBV7-9, TRBJ1-2)
CASSLKQNYGYTF

SEQ ID NO: 461969 - protein, 15 aa, Homo sapiens
  CDR3 for alpha chain variable domain of TCR clone 230985 (TRAV4, TRAJ27)
CLGAPLDTNAGKSTF

SEQ ID NO: 461970 - protein, 14 aa, Homo sapiens
  CDR3 for beta chain variable domain of TCR clone 230985 (TRBV19, TRBJ2-1)
CASPTFVLSGEQFF

SEQ ID NO: 461971 - protein, 13 aa, Homo sapiens
  CDR3 for alpha chain variable domain of TCR clone 230986 (TRAV2, TRAJ40)
CAVVTSGTYKYLF

SEQ ID NO: 461972 - protein, 17 aa, Homo sapiens
  CDR3 for beta chain variable domain of TCR clone 230986 (TRBV7-3, TRBJ2-3)
CASSLMKRMRGADTQYF

SEQ ID NO: 461973 - protein, 10 aa, Homo sapiens
  CDR3 for alpha chain variable domain of TCR clone 230987 (TRAV12-3, TRAJ49)
CAMNDDQFYF

SEQ ID NO: 461974 - protein, 15 aa, Homo sapiens
  CDR3 for beta chain variable domain of TCR clone 230987 (TRBV7-3, TRBJ2-1)
CASSPQRGGYNEQFF

SEQ ID NO: 461975 - protein, 12 aa, Homo sapiens
  CDR3 for alpha chain variable domain of TCR clone 230988 (TRAV1-2, TRAJ29)
CAVPSGNTPLVF

SEQ ID NO: 461976 - protein, 15 aa, Homo sapiens
  CDR3 for beta chain variable domain of TCR clone 230988 (TRBV5-1, TRBJ2-5)
CASSLGLAEQETQYF

SEQ ID NO: 461977 - protein, 14 aa, Homo sapiens
  CDR3 for alpha chain variable domain of TCR clone 230989 (TRAV2, TRAJ9)
CAVEDRSGGFKTIF

SEQ ID NO: 461978 - protein, 15 aa, Homo sapiens
  CDR3 for beta chain variable domain of TCR clone 230989 (TRBV9, TRBJ1-6)
CAGSVAGTGDSPLHF

SEQ ID NO: 461979 - protein, 12 aa, Homo sapiens
  CDR3 for alpha chain variable domain of TCR clone 230990 (TRAV29/DV5, TRAJ34)
CAASGNTDKLIF

SEQ ID NO: 461980 - protein, 10 aa, Homo sapiens
  CDR3 for beta chain variable domain of TCR clone 230990 (TRBV6-1, TRBJ2-5)
CASSEGWGYK

SEQ ID NO: 461981 - protein, 14 aa, Homo sapiens
  CDR3 for alpha chain variable domain of TCR clone 230991 (TRAV2, TRAJ9)
CAVADRSGGFKTIF

SEQ ID NO: 461982 - protein, 17 aa, Homo sapiens
  CDR3 for beta chain variable domain of TCR clone 230991 (TRBV11-2, TRBJ2-1)
CASSLYPPGVEYNEQFF

SEQ ID NO: 461983 - protein, 17 aa, Homo sapiens
  CDR3 for alpha chain variable domain of TCR clone 230992 (TRAV13-2, TRAJ31)
CAENARLMFEDGTQLVV

SEQ ID NO: 461984 - protein, 14 aa, Homo sapiens
  CDR3 for beta chain variable domain of TCR clone 230992 (TRBV7-9, TRBJ2-1)
CASSLGVADNEQFF

SEQ ID NO: 461985 - protein, 13 aa, Homo sapiens
  CDR3 for alpha chain variable domain of TCR clone 230993 (TRAV23/DV6, TRAJ33)
CAASADSNYQLIW

SEQ ID NO: 461986 - protein, 14 aa, Homo sapiens
  CDR3 for beta chain variable domain of TCR clone 230993 (TRBV28, TRBJ1-1)
CASSSEQGYTEAFF

SEQ ID NO: 461987 - protein, 12 aa, Homo sapiens
  CDR3 for alpha chain variable domain of TCR clone 230994 (TRAV21, TRAJ27)
CAANTMQANQPL

SEQ ID NO: 461988 - protein, 15 aa, Homo sapiens
  CDR3 for beta chain variable domain of TCR clone 230994 (TRBV29-1, TRBJ1-4)
CSVVGIGDINEKLFF

SEQ ID NO: 461989 - protein, 12 aa, Homo sapiens
  CDR3 for alpha chain variable domain of TCR clone 230995 (TRAV12-3, TRAJ17)
CAMTLKGNKLTF

SEQ ID NO: 461990 - protein, 14 aa, Homo sapiens
  CDR3 for beta chain variable domain of TCR clone 230995 (TRBV2, TRBJ2-1)
CASSEALIYNEQFF

SEQ ID NO: 461991 - protein, 15 aa, Homo sapiens
  CDR3 for alpha chain variable domain of TCR clone 230996 (TRAV2, TRAJ15)
CAVEDREQAGTDLIF

SEQ ID NO: 461992 - protein, 13 aa, Homo sapiens
  CDR3 for beta chain variable domain of TCR clone 230996 (TRBV10-2, TRBJ2-3)
CASSESGDHTQYF

SEQ ID NO: 461993 - protein, 13 aa, Homo sapiens
  CDR3 for alpha chain variable domain of TCR clone 230997 (TRAV21, TRAJ15)
CAVANQAGTALIF

SEQ ID NO: 461994 - protein, 15 aa, Homo sapiens
  CDR3 for beta chain variable domain of TCR clone 230997 (TRBV27, TRBJ2-7)
CASSLGCSVSPEQYF

SEQ ID NO: 461995 - protein, 17 aa, Homo sapiens
  CDR3 for alpha chain variable domain of TCR clone 230998 (TRAV3, TRAJ6)
CAVRDGPRAGGSYIPTF

SEQ ID NO: 461996 - protein, 14 aa, Homo sapiens
  CDR3 for beta chain variable domain of TCR clone 230998 (TRBV7-2, TRBJ2-7)
CASSPKTSFYEHYV

SEQ ID NO: 461997 - protein, 15 aa, Homo sapiens
  CDR3 for alpha chain variable domain of TCR clone 230999 (TRAV12-3, TRAJ42)
CAMSGQGGSQGNLIF

SEQ ID NO: 461998 - protein, 13 aa, Homo sapiens
  CDR3 for beta chain variable domain of TCR clone 230999 (TRBV19, TRBJ2-5)
CASSGRAGETQYF

SEQ ID NO: 461999 - protein, 14 aa, Homo sapiens
  CDR3 for alpha chain variable domain of TCR clone 231000 (TRAV13-1, TRAJ35)
CAARKGGFGNVLHC

SEQ ID NO: 462000 - protein, 13 aa, Homo sapiens
  CDR3 for beta chain variable domain of TCR clone 231000 (TRBV7-3, TRBJ1-1)
CASSQDWGAEAFV

SEQ ID NO: 462001 - protein, 16 aa, Homo sapiens
  CDR3 for alpha chain variable domain of TCR clone 231001 (TRAV30, TRAJ24)
CGAEIVDADSWGKFQL

SEQ ID NO: 462002 - protein, 14 aa, Homo sapiens
  CDR3 for beta chain variable domain of TCR clone 231001 (TRBV12-5, TRBJ2-5)
CASGSRTHQETQYF

SEQ ID NO: 462003 - protein, 13 aa, Homo sapiens
  CDR3 for alpha chain variable domain of TCR clone 231002 (TRAV3, TRAJ36)
CAVRDTGAKNLFF

SEQ ID NO: 462004 - protein, 15 aa, Homo sapiens
  CDR3 for beta chain variable domain of TCR clone 231002 (TRBV24-1, TRBJ2-1)
CATSGSGGFYNEQFF

SEQ ID NO: 462005 - protein, 14 aa, Homo sapiens
  CDR3 for alpha chain variable domain of TCR clone 231003 (TRAV4, TRAJ17)
CLVGDMAAGNKLPF

SEQ ID NO: 462006 - protein, 13 aa, Homo sapiens
  CDR3 for beta chain variable domain of TCR clone 231003 (TRBV18, TRBJ2-7)
CASQSGGGYEQYF

SEQ ID NO: 462007 - protein, 16 aa, Homo sapiens
  CDR3 for alpha chain variable domain of TCR clone 231004 (TRAV13-1, TRAJ15)
CAADGGPVRAGTALIF

SEQ ID NO: 462008 - protein, 13 aa, Homo sapiens
  CDR3 for beta chain variable domain of TCR clone 231004 (TRBV20-1, TRBJ2-3)
CSATSGRRDTQYF

SEQ ID NO: 462009 - protein, 13 aa, Homo sapiens
  CDR3 for alpha chain variable domain of TCR clone 231005 (TRAV13-1, TRAJ37)
CAAVSGNTGELIF

SEQ ID NO: 462010 - protein, 17 aa, Homo sapiens
  CDR3 for beta chain variable domain of TCR clone 231005 (TRBV10-2, TRBJ1-6)
CASSENRGSSYNSPLHF

SEQ ID NO: 462011 - protein, 14 aa, Homo sapiens
  CDR3 for alpha chain variable domain of TCR clone 231006 (TRAV8-2, TRAJ23)
CVVSHDNQGGKLIF

SEQ ID NO: 462012 - protein, 13 aa, Homo sapiens
  CDR3 for beta chain variable domain of TCR clone 231006 (TRBV7-7, TRBJ2-2)
CASSLTSAGELFF

SEQ ID NO: 462013 - protein, 15 aa, Homo sapiens
  CDR3 for alpha chain variable domain of TCR clone 231007 (TRAV1-2, TRAJ13)
CAVRGSSGGYQKVTF

SEQ ID NO: 462014 - protein, 15 aa, Homo sapiens
  CDR3 for beta chain variable domain of TCR clone 231007 (TRBV7-2, TRBJ2-1)
CASTHGTGIYNEQFF

SEQ ID NO: 462015 - protein, 14 aa, Homo sapiens
  CDR3 for alpha chain variable domain of TCR clone 231008 (TRAV12-2, TRAJ6)
CVPLRPGGSYIPTF

SEQ ID NO: 462016 - protein, 15 aa, Homo sapiens
  CDR3 for beta chain variable domain of TCR clone 231008 (TRBV9, TRBJ2-1)
CASSLAGSSYNEQFF

SEQ ID NO: 462017 - protein, 14 aa, Homo sapiens
  CDR3 for alpha chain variable domain of TCR clone 231009 (TRAV12-2, TRAJ44)
CAVNPAGAASKLTF

SEQ ID NO: 462018 - protein, 13 aa, Homo sapiens
  CDR3 for beta chain variable domain of TCR clone 231009 (TRBV20-1, TRBJ1-6)
CSAPLGVGSPLHL

SEQ ID NO: 462019 - protein, 14 aa, Homo sapiens
  CDR3 for alpha chain variable domain of TCR clone 231010 (TRAV4, TRAJ33)
CLVGDVQSNYQLIY

SEQ ID NO: 462020 - protein, 15 aa, Homo sapiens
  CDR3 for beta chain variable domain of TCR clone 231010 (TRBV6-5, TRBJ2-1)
CASSYDAGAGNEQFF

SEQ ID NO: 462021 - protein, 13 aa, Homo sapiens
  CDR3 for alpha chain variable domain of TCR clone 231011 (TRAV12-3, TRAJ13)
CAMSSGGYQKVTF

SEQ ID NO: 462022 - protein, 13 aa, Homo sapiens
  CDR3 for beta chain variable domain of TCR clone 231011 (TRBV20-1, TRBJ1-1)
SAVLLQGATEAFF

SEQ ID NO: 462023 - protein, 14 aa, Homo sapiens
  CDR3 for alpha chain variable domain of TCR clone 231012 (TRAV8-2, TRAJ4)
CVVSPSGGYNKLIF

SEQ ID NO: 462024 - protein, 15 aa, Homo sapiens
  CDR3 for beta chain variable domain of TCR clone 231012 (TRBV2, TRBJ2-1)
CASSALAGSYNEQFF

SEQ ID NO: 462025 - protein, 12 aa, Homo sapiens
  CDR3 for alpha chain variable domain of TCR clone 231013 (TRAV8-3, TRAJ20)
CAVGANDYKLSF

SEQ ID NO: 462026 - protein, 14 aa, Homo sapiens
  CDR3 for beta chain variable domain of TCR clone 231013 (TRBV11-2, TRBJ2-5)
CASRPLAGRETQYF

SEQ ID NO: 462027 - protein, 11 aa, Homo sapiens
  CDR3 for alpha chain variable domain of TCR clone 231014 (TRAV2, TRAJ23)
CAVETRGKLIF

SEQ ID NO: 462028 - protein, 12 aa, Homo sapiens
  CDR3 for beta chain variable domain of TCR clone 231014 (TRBV2, TRBJ2-1)
CAKREGYNEQFF

SEQ ID NO: 462029 - protein, 18 aa, Homo sapiens
  CDR3 for alpha chain variable domain of TCR clone 231015 (TRAV4, TRAJ29)
CLVGAYRSQETHLLSLDR

SEQ ID NO: 462030 - protein, 17 aa, Homo sapiens
  CDR3 for beta chain variable domain of TCR clone 231015 (TRBV25-1, TRBJ2-7)
CASSDARVVFSSYEQYF

SEQ ID NO: 462031 - protein, 15 aa, Homo sapiens
  CDR3 for alpha chain variable domain of TCR clone 231016 (TRAV12-2, TRAJ52)
CAAPGGGTSYGKLTF

SEQ ID NO: 462032 - protein, 15 aa, Homo sapiens
  CDR3 for beta chain variable domain of TCR clone 231016 (TRBV6-6, TRBJ2-7)
CASSPTGAQSGEQYF

SEQ ID NO: 462033 - protein, 15 aa, Homo sapiens
  CDR3 for alpha chain variable domain of TCR clone 231017 (TRAV8-3, TRAJ45)
CASSYSGGGADGLTF

SEQ ID NO: 462034 - protein, 16 aa, Homo sapiens
  CDR3 for beta chain variable domain of TCR clone 231017 (TRBV7-9, TRBJ2-1)
CASSDVAGGSYNEQFL

SEQ ID NO: 462035 - protein, 14 aa, Homo sapiens
  CDR3 for alpha chain variable domain of TCR clone 231018 (TRAV8-1, TRAJ24)
CAVNAADSWGKLQF

SEQ ID NO: 462036 - protein, 16 aa, Homo sapiens
  CDR3 for beta chain variable domain of TCR clone 231018 (TRBV4-3, TRBJ2-1)
CSSSPALDRGVNEQFF

SEQ ID NO: 462037 - protein, 12 aa, Homo sapiens
  CDR3 for alpha chain variable domain of TCR clone 231019 (TRAV24, TRAJ40)
CAFMPGSYKYIF

SEQ ID NO: 462038 - protein, 11 aa, Homo sapiens
  CDR3 for beta chain variable domain of TCR clone 231019 (TRBV10-1, TRBJ2-3)
CASSDSDTQYF

SEQ ID NO: 462039 - protein, 15 aa, Homo sapiens
  CDR3 for alpha chain variable domain of TCR clone 231020 (TRAV17, TRAJ4)
CATGTWSGGYNQLIF

SEQ ID NO: 462040 - protein, 14 aa, Homo sapiens
  CDR3 for beta chain variable domain of TCR clone 231020 (TRBV7-8, TRBJ2-3)
CASSLEAGTDTQYF

SEQ ID NO: 462041 - protein, 14 aa, Homo sapiens
  CDR3 for alpha chain variable domain of TCR clone 231021 (TRAV9-2, TRAJ39)
CALYIYNAGNMLTF

SEQ ID NO: 462042 - protein, 12 aa, Homo sapiens
  CDR3 for beta chain variable domain of TCR clone 231021 (TRBV5-1, TRBJ2-7)
CASSFRGYEQYF

SEQ ID NO: 462043 - protein, 14 aa, Homo sapiens
  CDR3 for alpha chain variable domain of TCR clone 231022 (TRAV13-1, TRAJ44)
CAAKATGTASKLTF

SEQ ID NO: 462044 - protein, 18 aa, Homo sapiens
  CDR3 for beta chain variable domain of TCR clone 231022 (TRBV5-5, TRBJ2-1)
CASSLGPSLGHTYNEQFF

SEQ ID NO: 462045 - protein, 14 aa, Homo sapiens
  CDR3 for alpha chain variable domain of TCR clone 231023 (TRAV12-2, TRAJ13)
WAVKKTGVYQKVTF

SEQ ID NO: 462046 - protein, 15 aa, Homo sapiens
  CDR3 for beta chain variable domain of TCR clone 231023 (TRBV27, TRBJ2-1)
CASSNGGGSSNEQFF

SEQ ID NO: 462047 - protein, 13 aa, Homo sapiens
  CDR3 for alpha chain variable domain of TCR clone 231024 (TRAV21, TRAJ57)
CAVTQGGSEKLVF

SEQ ID NO: 462048 - protein, 15 aa, Homo sapiens
  CDR3 for beta chain variable domain of TCR clone 231024 (TRBV19, TRBJ2-4)
CASRGPRRGENIQYF

SEQ ID NO: 462049 - protein, 16 aa, Homo sapiens
  CDR3 for alpha chain variable domain of TCR clone 231025 (TRAV23/DV6, TRAJ9)
CAASIGGNTGGFKTIF

SEQ ID NO: 462050 - protein, 12 aa, Homo sapiens
  CDR3 for beta chain variable domain of TCR clone 231025 (TRBV6-3, TRBJ2-7)
CASSRQSYEQYF

SEQ ID NO: 462051 - protein, 13 aa, Homo sapiens
  CDR3 for alpha chain variable domain of TCR clone 231026 (TRAV2, TRAJ29)
CAAQNSGNTPLVF

SEQ ID NO: 462052 - protein, 13 aa, Homo sapiens
  CDR3 for beta chain variable domain of TCR clone 231026 (TRBV27, TRBJ1-1)
CASSLSIGAEAFF

SEQ ID NO: 462053 - protein, 15 aa, Homo sapiens
  CDR3 for alpha chain variable domain of TCR clone 231027 (TRAV2, TRAJ15)
CAVEDREQAGTALIF

SEQ ID NO: 462054 - protein, 15 aa, Homo sapiens
  CDR3 for beta chain variable domain of TCR clone 231027 (TRBV7-3, TRBJ2-2)
CASSETGQGTGELFF

SEQ ID NO: 462055 - protein, 14 aa, Homo sapiens
  CDR3 for alpha chain variable domain of TCR clone 231028 (TRAV12-3, TRAJ10)
SHLPLPGGGNKLTF

SEQ ID NO: 462056 - protein, 16 aa, Homo sapiens
  CDR3 for beta chain variable domain of TCR clone 231028 (TRBV19, TRBJ2-1)
CASSKAGPSSYNEQFF

SEQ ID NO: 462057 - protein, 15 aa, Homo sapiens
  CDR3 for alpha chain variable domain of TCR clone 231029 (TRAV1-2, TRAJ12)
CAVIPEGDSSYKLIF

SEQ ID NO: 462058 - protein, 12 aa, Homo sapiens
  CDR3 for beta chain variable domain of TCR clone 231029 (TRBV20-1, TRBJ1-2)
CSASHPSGGYTF

SEQ ID NO: 462059 - protein, 11 aa, Homo sapiens
  CDR3 for alpha chain variable domain of TCR clone 231030 (TRAV16, TRAJ33)
CALHSNYQLIW

SEQ ID NO: 462060 - protein, 15 aa, Homo sapiens
  CDR3 for beta chain variable domain of TCR clone 231030 (TRBV4-1, TRBJ2-7)
CASSQQGQGFDEHYF

SEQ ID NO: 462061 - protein, 11 aa, Homo sapiens
  CDR3 for alpha chain variable domain of TCR clone 231031 (TRAV12-3, TRAJ31)
CAMKDRLMFGD

SEQ ID NO: 462062 - protein, 15 aa, Homo sapiens
  CDR3 for beta chain variable domain of TCR clone 231031 (TRBV7-2, TRBJ1-2)
CASSPRAGWNYGYTF

SEQ ID NO: 462063 - protein, 13 aa, Homo sapiens
  CDR3 for alpha chain variable domain of TCR clone 231032 (TRAV8-3, TRAJ4)
WVFYSGGYNKLIF

SEQ ID NO: 462064 - protein, 14 aa, Homo sapiens
  CDR3 for beta chain variable domain of TCR clone 231032 (TRBV7-9, TRBJ2-3)
CASSLEDGTDTQYY

SEQ ID NO: 462065 - protein, 10 aa, Homo sapiens
  CDR3 for alpha chain variable domain of TCR clone 231033 (TRAV16, TRAJ22)
SAMYLRQLTF

SEQ ID NO: 462066 - protein, 15 aa, Homo sapiens
  CDR3 for beta chain variable domain of TCR clone 231033 (TRBV7-9, TRBJ2-7)
CASSLALAEAYEQYF

SEQ ID NO: 462067 - protein, 13 aa, Homo sapiens
  CDR3 for alpha chain variable domain of TCR clone 231034 (TRAV21, TRAJ27)
CAARPGNAGKSTF

SEQ ID NO: 462068 - protein, 17 aa, Homo sapiens
  CDR3 for beta chain variable domain of TCR clone 231034 (TRBV7-8, TRBJ1-2)
CASSLRPLQGHLYGYTF

SEQ ID NO: 462069 - protein, 13 aa, Homo sapiens
  CDR3 for alpha chain variable domain of TCR clone 231035 (TRAV29/DV5, TRAJ31)
CAASRNNNARIMV

SEQ ID NO: 462070 - protein, 12 aa, Homo sapiens
  CDR3 for beta chain variable domain of TCR clone 231035 (TRBV14, TRBJ2-7)
CASSLYKDEQYF

SEQ ID NO: 462071 - protein, 14 aa, Homo sapiens
  CDR3 for alpha chain variable domain of TCR clone 231036 (TRAV1-2, TRAJ16)
YAVNRFSDGQKLLF

SEQ ID NO: 462072 - protein, 13 aa, Homo sapiens
  CDR3 for beta chain variable domain of TCR clone 231036 (TRBV10-3, TRBJ2-7)
CASKLAVNYEQYF

SEQ ID NO: 462073 - protein, 15 aa, Homo sapiens
  CDR3 for alpha chain variable domain of TCR clone 231037 (TRAV3, TRAJ22)
CAVRDRGGSARQLTF

SEQ ID NO: 462074 - protein, 16 aa, Homo sapiens
  CDR3 for beta chain variable domain of TCR clone 231037 (TRBV9, TRBJ2-2)
CASSAMGKGDTGELFF

SEQ ID NO: 462075 - protein, 13 aa, Homo sapiens
  CDR3 for alpha chain variable domain of TCR clone 231038 (TRAV13-2, TRAJ13)
CAERPGGYQKVTF

SEQ ID NO: 462076 - protein, 15 aa, Homo sapiens
  CDR3 for beta chain variable domain of TCR clone 231038 (TRBV7-9, TRBJ1-4)
CASSRTGGFNEKLFF

SEQ ID NO: 462077 - protein, 12 aa, Homo sapiens
  CDR3 for alpha chain variable domain of TCR clone 231039 (TRAV8-1, TRAJ21)
CAVNGTKFYLDL

SEQ ID NO: 462078 - protein, 16 aa, Homo sapiens
  CDR3 for beta chain variable domain of TCR clone 231039 (TRBV7-2, TRBJ1-5)
CASSPWGPEGNQPQHF

SEQ ID NO: 462079 - protein, 13 aa, Homo sapiens
  CDR3 for alpha chain variable domain of TCR clone 231040 (TRAV12-2, TRAJ10)
CAVPTGGGNKLTF

SEQ ID NO: 462080 - protein, 14 aa, Homo sapiens
  CDR3 for beta chain variable domain of TCR clone 231040 (TRBV19, TRBJ2-7)
CASTVQGRPYEQYF

SEQ ID NO: 462081 - protein, 10 aa, Homo sapiens
  CDR3 for alpha chain variable domain of TCR clone 231041 (TRAV8-3, TRAJ43)
CAVALADKRF

SEQ ID NO: 462082 - protein, 14 aa, Homo sapiens
  CDR3 for beta chain variable domain of TCR clone 231041 (TRBV4-2, TRBJ2-1)
CASGLDRAYNEQFF

SEQ ID NO: 462083 - protein, 15 aa, Homo sapiens
  CDR3 for alpha chain variable domain of TCR clone 231042 (TRAV17, TRAJ42)
CATDHYGGSQGNLIF

SEQ ID NO: 462084 - protein, 14 aa, Homo sapiens
  CDR3 for beta chain variable domain of TCR clone 231042 (TRBV19, TRBJ2-5)
CASSIEHAQETQYF

SEQ ID NO: 462085 - protein, 13 aa, Homo sapiens
  CDR3 for alpha chain variable domain of TCR clone 231043 (TRAV27, TRAJ57)
CRSAQGGSEKLVF

SEQ ID NO: 462086 - protein, 11 aa, Homo sapiens
  CDR3 for beta chain variable domain of TCR clone 231043 (TRBV11-2, TRBJ1-1)
CTSSINTEAFF

SEQ ID NO: 462087 - protein, 17 aa, Homo sapiens
  CDR3 for alpha chain variable domain of TCR clone 231044 (TRAV4, TRAJ42)
CLVGVLNYGGSQGNLIF

SEQ ID NO: 462088 - protein, 12 aa, Homo sapiens
  CDR3 for beta chain variable domain of TCR clone 231044 (TRBV20-1, TRBJ2-1)
CSAQYTYNEQFI

SEQ ID NO: 462089 - protein, 16 aa, Homo sapiens
  CDR3 for alpha chain variable domain of TCR clone 231045 (TRAV12-2, TRAJ40)
CAVIRGGTSGTYKYIF

SEQ ID NO: 462090 - protein, 15 aa, Homo sapiens
  CDR3 for beta chain variable domain of TCR clone 231045 (TRBV5-1, TRBJ2-3)
CASSSTSGSTDTQYF

SEQ ID NO: 462091 - protein, 14 aa, Homo sapiens
  CDR3 for alpha chain variable domain of TCR clone 231046 (TRAV13-2, TRAJ4)
CAEKGPKGYNKLIF

SEQ ID NO: 462092 - protein, 14 aa, Homo sapiens
  CDR3 for beta chain variable domain of TCR clone 231046 (TRBV19, TRBJ2-7)
CASSIFAGTYEQYF

SEQ ID NO: 462093 - protein, 13 aa, Homo sapiens
  CDR3 for alpha chain variable domain of TCR clone 231047 (TRAV13-2, TRAJ13)
CAERPGGYQKDTF

SEQ ID NO: 462094 - protein, 14 aa, Homo sapiens
  CDR3 for beta chain variable domain of TCR clone 231047 (TRBV12-5, TRBJ2-5)
CASGSRTHQETQYF

SEQ ID NO: 462095 - protein, 15 aa, Homo sapiens
  CDR3 for alpha chain variable domain of TCR clone 231048 (TRAV26-1, TRAJ38)
CIVRAEGGNNRKLIS

SEQ ID NO: 462096 - protein, 14 aa, Homo sapiens
  CDR3 for beta chain variable domain of TCR clone 231048 (TRBV7-6, TRBJ2-5)
CASSSPSGSETQYF

SEQ ID NO: 462097 - protein, 14 aa, Homo sapiens
  CDR3 for alpha chain variable domain of TCR clone 231049 (TRAV23/DV6, TRAJ23)
CAAGPYNPGGKLIF

SEQ ID NO: 462098 - protein, 17 aa, Homo sapiens
  CDR3 for beta chain variable domain of TCR clone 231049 (TRBV4-2, TRBJ1-1)
CASSQVATGGMNTEAFF

SEQ ID NO: 462099 - protein, 17 aa, Homo sapiens
  CDR3 for alpha chain variable domain of TCR clone 231050 (TRAV12-2, TRAJ39)
CAVNNMLIFGGGTRLIV

SEQ ID NO: 462100 - protein, 16 aa, Homo sapiens
  CDR3 for beta chain variable domain of TCR clone 231050 (TRBV9, TRBJ2-7)
CASSAGPDRSPYEQYF

SEQ ID NO: 462101 - protein, 16 aa, Homo sapiens
  CDR3 for alpha chain variable domain of TCR clone 231051 (TRAV12-3, TRAJ53)
CAMSPGSGGSNYKLTF

SEQ ID NO: 462102 - protein, 15 aa, Homo sapiens
  CDR3 for beta chain variable domain of TCR clone 231051 (TRBV11-3, TRBJ2-2)
CASSSDRVNAGELFF

SEQ ID NO: 462103 - protein, 12 aa, Homo sapiens
  CDR3 for alpha chain variable domain of TCR clone 231052 (TRAV13-2, TRAJ39)
CAESREGNMLAF

SEQ ID NO: 462104 - protein, 15 aa, Homo sapiens
  CDR3 for beta chain variable domain of TCR clone 231052 (TRBV10-2, TRBJ2-6)
CASSEQGTGANVLTF

SEQ ID NO: 462105 - protein, 18 aa, Homo sapiens
  CDR3 for alpha chain variable domain of TCR clone 231053 (TRAV21, TRAJ52)
CAVMPSPAGGTSYGKLTF

SEQ ID NO: 462106 - protein, 17 aa, Homo sapiens
  CDR3 for beta chain variable domain of TCR clone 231053 (TRBV13, TRBJ2-3)
CASSPSRVAGGRNTQYF

SEQ ID NO: 462107 - protein, 14 aa, Homo sapiens
  CDR3 for alpha chain variable domain of TCR clone 231054 (TRAV20, TRAJ42)
CAVQGWRSQGNLIF

SEQ ID NO: 462108 - protein, 12 aa, Homo sapiens
  CDR3 for beta chain variable domain of TCR clone 231054 (TRBV12-4, TRBJ2-7)
CASSLGGYEQYF

SEQ ID NO: 462109 - protein, 13 aa, Homo sapiens
  CDR3 for alpha chain variable domain of TCR clone 231055 (TRAV26-2, TRAJ57)
CILSRGGSEKLVF

SEQ ID NO: 462110 - protein, 16 aa, Homo sapiens
  CDR3 for beta chain variable domain of TCR clone 231055 (TRBV24-1, TRBJ2-3)
CATSDAISGITDTQYF

SEQ ID NO: 462111 - protein, 12 aa, Homo sapiens
  CDR3 for alpha chain variable domain of TCR clone 231056 (TRAV2, TRAJ9)
CAVGAGGFKTIF

SEQ ID NO: 462112 - protein, 11 aa, Homo sapiens
  CDR3 for beta chain variable domain of TCR clone 231056 (TRBV13, TRBJ2-2)
CASSPSTGEHT

SEQ ID NO: 462113 - protein, 13 aa, Homo sapiens
  CDR3 for alpha chain variable domain of TCR clone 231057 (TRAV8-4, TRAJ10)
CAAFTGGGNKLTF

SEQ ID NO: 462114 - protein, 15 aa, Homo sapiens
  CDR3 for beta chain variable domain of TCR clone 231057 (TRBV2, TRBJ2-3)
CANSDFEKATDTQYF

SEQ ID NO: 462115 - protein, 14 aa, Homo sapiens
  CDR3 for alpha chain variable domain of TCR clone 231058 (TRAV13-1, TRAJ44)
CAAKATGTASKLTF

SEQ ID NO: 462116 - protein, 12 aa, Homo sapiens
  CDR3 for beta chain variable domain of TCR clone 231058 (TRBV7-3, TRBJ2-1)
CASSFQSGPQFF

SEQ ID NO: 462117 - protein, 15 aa, Homo sapiens
  CDR3 for alpha chain variable domain of TCR clone 231059 (TRAV8-6, TRAJ6)
CAVSGESGGSYIPTF

SEQ ID NO: 462118 - protein, 14 aa, Homo sapiens
  CDR3 for beta chain variable domain of TCR clone 231059 (TRBV18, TRBJ1-5)
CASSPGNSNQPQHF

SEQ ID NO: 462119 - protein, 12 aa, Homo sapiens
  CDR3 for alpha chain variable domain of TCR clone 231060 (TRAV8-3, TRAJ26)
CAGDNYGQNFVF

SEQ ID NO: 462120 - protein, 14 aa, Homo sapiens
  CDR3 for beta chain variable domain of TCR clone 231060 (TRBV9, TRBJ2-3)
CASSPLALPDTQYF

SEQ ID NO: 462121 - protein, 20 aa, Homo sapiens
  CDR3 for alpha chain variable domain of TCR clone 231061 (TRAV12-1, TRAJ42)
SSVIQPPTSVKGGSQGNLIF

SEQ ID NO: 462122 - protein, 16 aa, Homo sapiens
  CDR3 for beta chain variable domain of TCR clone 231061 (TRBV10-3, TRBJ2-1)
CAISGVGDGGGGEQFF

SEQ ID NO: 462123 - protein, 14 aa, Homo sapiens
  CDR3 for alpha chain variable domain of TCR clone 231062 (TRAV12-2, TRAJ13)
CAVKKTGGYQKVTF

SEQ ID NO: 462124 - protein, 17 aa, Homo sapiens
  CDR3 for beta chain variable domain of TCR clone 231062 (TRBV3-1, TRBJ2-3)
CASSQLLDRGHTDTQYF

SEQ ID NO: 462125 - protein, 11 aa, Homo sapiens
  CDR3 for alpha chain variable domain of TCR clone 231063 (TRAV3, TRAJ17)
CAEAAGNKLTF

SEQ ID NO: 462126 - protein, 17 aa, Homo sapiens
  CDR3 for beta chain variable domain of TCR clone 231063 (TRBV7-8, TRBJ2-1)
CASSPPTGTLAYNEQFF

SEQ ID NO: 462127 - protein, 13 aa, Homo sapiens
  CDR3 for alpha chain variable domain of TCR clone 231064 (TRAV38-2/DV8, TRAJ34)
CVYRTWNTDKLIF

SEQ ID NO: 462128 - protein, 16 aa, Homo sapiens
  CDR3 for beta chain variable domain of TCR clone 231064 (TRBV19, TRBJ2-1)
CASSKAGPSSYNGQFF

SEQ ID NO: 462129 - protein, 15 aa, Homo sapiens
  CDR3 for alpha chain variable domain of TCR clone 231065 (TRAV8-1, TRAJ6)
CAVNTPPGGSYIPTF

SEQ ID NO: 462130 - protein, 14 aa, Homo sapiens
  CDR3 for beta chain variable domain of TCR clone 231065 (TRBV12-4, TRBJ2-1)
CASSLVQGASEQFF

SEQ ID NO: 462131 - protein, 14 aa, Homo sapiens
  CDR3 for alpha chain variable domain of TCR clone 231066 (TRAV8-2, TRAJ4)
CVVSPSGGYNKLIF

SEQ ID NO: 462132 - protein, 13 aa, Homo sapiens
  CDR3 for beta chain variable domain of TCR clone 231066 (TRBV7-2, TRBJ2-7)
CASSSPSGSEQYF

SEQ ID NO: 462133 - protein, 16 aa, Homo sapiens
  CDR3 for alpha chain variable domain of TCR clone 231067 (TRAV23/DV6, TRAJ52)
CAARPSGGPSYGKLTF

SEQ ID NO: 462134 - protein, 13 aa, Homo sapiens
  CDR3 for beta chain variable domain of TCR clone 231067 (TRBV7-9, TRBJ1-1)
CASSLSGETEAFF

SEQ ID NO: 462135 - protein, 18 aa, Homo sapiens
  CDR3 for alpha chain variable domain of TCR clone 231068 (TRAV13-1, TRAJ52)
CAASKRSAGGTSYVKLTF

SEQ ID NO: 462136 - protein, 16 aa, Homo sapiens
  CDR3 for beta chain variable domain of TCR clone 231068 (TRBV7-3, TRBJ2-2)
CASSLKRGTLSGELFF

SEQ ID NO: 462137 - protein, 13 aa, Homo sapiens
  CDR3 for alpha chain variable domain of TCR clone 231069 (TRAV13-1, TRAJ39)
CAASIWAGNMLTF

SEQ ID NO: 462138 - protein, 16 aa, Homo sapiens
  CDR3 for beta chain variable domain of TCR clone 231069 (TRBV19, TRBJ2-3)
CASSPGAASRTDTQYF

SEQ ID NO: 462139 - protein, 15 aa, Homo sapiens
  CDR3 for alpha chain variable domain of TCR clone 231070 (TRAV20, TRAJ41)
CAVQANSNSGYALNF

SEQ ID NO: 462140 - protein, 18 aa, Homo sapiens
  CDR3 for beta chain variable domain of TCR clone 231070 (TRBV7-9, TRBJ2-7)
CASSLPTSGSRTWYEQYF

SEQ ID NO: 462141 - protein, 14 aa, Homo sapiens
  CDR3 for alpha chain variable domain of TCR clone 231071 (TRAV12-2, TRAJ11)
CAVNRESGYSTRTF

SEQ ID NO: 462142 - protein, 10 aa, Homo sapiens
  CDR3 for beta chain variable domain of TCR clone 231071 (TRBV20-1, TRBJ2-5)
CGARFETQYF

SEQ ID NO: 462143 - protein, 13 aa, Homo sapiens
  CDR3 for alpha chain variable domain of TCR clone 231072 (TRAV2, TRAJ29)
CAAQNSGNTPLVF

SEQ ID NO: 462144 - protein, 13 aa, Homo sapiens
  CDR3 for beta chain variable domain of TCR clone 231072 (TRBV6-5, TRBJ2-5)
CASSPQGGETQYF

SEQ ID NO: 462145 - protein, 14 aa, Homo sapiens
  CDR3 for alpha chain variable domain of TCR clone 231073 (TRAV12-2, TRAJ40)
CAVKIPSGTYKYIF

SEQ ID NO: 462146 - protein, 14 aa, Homo sapiens
  CDR3 for beta chain variable domain of TCR clone 231073 (TRBV19, TRBJ2-2)
CASSTGQGAGELFF

SEQ ID NO: 462147 - protein, 13 aa, Homo sapiens
  CDR3 for alpha chain variable domain of TCR clone 231074 (TRAV27, TRAJ37)
CAGGPSNTGKLIF

SEQ ID NO: 462148 - protein, 17 aa, Homo sapiens
  CDR3 for beta chain variable domain of TCR clone 231074 (TRBV20-1, TRBJ2-7)
CSARDPEGDHREYEQYF

SEQ ID NO: 462149 - protein, 15 aa, Homo sapiens
  CDR3 for alpha chain variable domain of TCR clone 231075 (TRAV3, TRAJ22)
CAVRDLGGSARQLTF

SEQ ID NO: 462150 - protein, 13 aa, Homo sapiens
  CDR3 for beta chain variable domain of TCR clone 231075 (TRBV2, TRBJ1-5)
CATAGPGNQPQHF

SEQ ID NO: 462151 - protein, 20 aa, Homo sapiens
  CDR3 for alpha chain variable domain of TCR clone 231076 (TRAV1-1, TRAJ4)
CLLLLRCEGFLSGGYNKLIF

SEQ ID NO: 462152 - protein, 16 aa, Homo sapiens
  CDR3 for beta chain variable domain of TCR clone 231076 (TRBV28, TRBJ1-4)
CASSPPYRGRSEKLVF

SEQ ID NO: 462153 - protein, 14 aa, Homo sapiens
  CDR3 for alpha chain variable domain of TCR clone 231077 (TRAV26-1, TRAJ26)
CIVRATFLGENFVF

SEQ ID NO: 462154 - protein, 16 aa, Homo sapiens
  CDR3 for beta chain variable domain of TCR clone 231077 (TRBV12-3, TRBJ2-7)
CASRSTGTGPSYEQYF

SEQ ID NO: 462155 - protein, 12 aa, Homo sapiens
  CDR3 for alpha chain variable domain of TCR clone 231078 (TRAV20, TRAJ36)
CAQVTGANNLFF

SEQ ID NO: 462156 - protein, 15 aa, Homo sapiens
  CDR3 for beta chain variable domain of TCR clone 231078 (TRBV20-1, TRBJ1-1)
CSASRGVTGNTEAFF

SEQ ID NO: 462157 - protein, 11 aa, Homo sapiens
  CDR3 for alpha chain variable domain of TCR clone 231079 (TRAV27, TRAJ45)
CAGAQEEVLTD

SEQ ID NO: 462158 - protein, 15 aa, Homo sapiens
  CDR3 for beta chain variable domain of TCR clone 231079 (TRBV19, TRBJ2-3)
CAAGDTNAPNDTQYF

SEQ ID NO: 462159 - protein, 13 aa, Homo sapiens
  CDR3 for alpha chain variable domain of TCR clone 231080 (TRAV12-2, TRAJ9)
CAVKLAGGFKTIF

SEQ ID NO: 462160 - protein, 13 aa, Homo sapiens
  CDR3 for beta chain variable domain of TCR clone 231080 (TRBV7-3, TRBJ1-1)
CASSQDWGAEAFF

SEQ ID NO: 462161 - protein, 16 aa, Homo sapiens
  CDR3 for alpha chain variable domain of TCR clone 231081 (TRAV29/DV5, TRAJ36)
CAASAPYQSGANNLFF

SEQ ID NO: 462162 - protein, 16 aa, Homo sapiens
  CDR3 for beta chain variable domain of TCR clone 231081 (TRBV4-2, TRBJ2-3)
CASSQELAGDTDTQYF

SEQ ID NO: 462163 - protein, 14 aa, Homo sapiens
  CDR3 for alpha chain variable domain of TCR clone 231082 (TRAV13-1, TRAJ16)
CAAGQMARSCSLQG

SEQ ID NO: 462164 - protein, 12 aa, Homo sapiens
  CDR3 for beta chain variable domain of TCR clone 231082 (TRBV7-9, TRBJ2-7)
CASSLFDYEQYF

SEQ ID NO: 462165 - protein, 17 aa, Homo sapiens
  CDR3 for alpha chain variable domain of TCR clone 231083 (TRAV14/DV4, TRAJ4)
CAMREASGRGGYNKLIF

SEQ ID NO: 462166 - protein, 13 aa, Homo sapiens
  CDR3 for beta chain variable domain of TCR clone 231083 (TRBV5-5, TRBJ2-7)
CASSSQTRQRQYF

SEQ ID NO: 462167 - protein, 16 aa, Homo sapiens
  CDR3 for alpha chain variable domain of TCR clone 231084 (TRAV3, TRAJ37)
CAVRGKGTGNTGKLIF

SEQ ID NO: 462168 - protein, 13 aa, Homo sapiens
  CDR3 for beta chain variable domain of TCR clone 231084 (TRBV14, TRBJ2-7)
CASSQDRRYEQYF

SEQ ID NO: 462169 - protein, 14 aa, Homo sapiens
  CDR3 for alpha chain variable domain of TCR clone 231085 (TRAV25, TRAJ53)
CAGPPGGSNYKLTF

SEQ ID NO: 462170 - protein, 12 aa, Homo sapiens
  CDR3 for beta chain variable domain of TCR clone 231085 (TRBV7-8, TRBJ2-7)
CASSLGDREQYF

SEQ ID NO: 462171 - protein, 11 aa, Homo sapiens
  CDR3 for alpha chain variable domain of TCR clone 231086 (TRAV1-2, TRAJ20)
CAVANDYKVSF

SEQ ID NO: 462172 - protein, 18 aa, Homo sapiens
  CDR3 for beta chain variable domain of TCR clone 231086 (TRBV20-1, TRBJ2-6)
CSAETTPTHGSGANVLTF

SEQ ID NO: 462173 - protein, 15 aa, Homo sapiens
  CDR3 for alpha chain variable domain of TCR clone 231087 (TRAV12-3, TRAJ6)
CATSPASGGSYIPTF

SEQ ID NO: 462174 - protein, 15 aa, Homo sapiens
  CDR3 for beta chain variable domain of TCR clone 231087 (TRBV2, TRBJ1-2)
CASSESRTVNYGYTF

SEQ ID NO: 462175 - protein, 14 aa, Homo sapiens
  CDR3 for alpha chain variable domain of TCR clone 231088 (TRAV2, TRAJ37)
CAADFTSNTGKLIF

SEQ ID NO: 462176 - protein, 13 aa, Homo sapiens
  CDR3 for beta chain variable domain of TCR clone 231088 (TRBV4-1, TRBJ2-2)
CASSQENTGELFF

SEQ ID NO: 462177 - protein, 20 aa, Homo sapiens
  CDR3 for alpha chain variable domain of TCR clone 231089 (TRAV26-1, TRAJ42)
CCVLLHRQTYYGGSQGNLIF

SEQ ID NO: 462178 - protein, 11 aa, Homo sapiens
  CDR3 for beta chain variable domain of TCR clone 231089 (TRBV7-3, TRBJ2-2)
CASSLKRGTLS

SEQ ID NO: 462179 - protein, 15 aa, Homo sapiens
  CDR3 for alpha chain variable domain of TCR clone 231090 (TRAV21, TRAJ22)
CAVRLFFWFCKATDI

SEQ ID NO: 462180 - protein, 14 aa, Homo sapiens
  CDR3 for beta chain variable domain of TCR clone 231090 (TRBV19, TRBJ1-5)
CASRAPDSFLSQHF

SEQ ID NO: 462181 - protein, 16 aa, Homo sapiens
  CDR3 for alpha chain variable domain of TCR clone 231091 (TRAV30, TRAJ24)
CGTEIVDADSWGKFQF

SEQ ID NO: 462182 - protein, 17 aa, Homo sapiens
  CDR3 for beta chain variable domain of TCR clone 231091 (TRBV4-2, TRBJ2-1)
CASSQVSGLAMNNEQFF

SEQ ID NO: 462183 - protein, 13 aa, Homo sapiens
  CDR3 for alpha chain variable domain of TCR clone 231092 (TRAV1-2, TRAJ16)
CAPPGFHWPEAAL

SEQ ID NO: 462184 - protein, 13 aa, Homo sapiens
  CDR3 for beta chain variable domain of TCR clone 231092 (TRBV10-3, TRBJ1-2)
CAISERDSYGHTF

SEQ ID NO: 462185 - protein, 11 aa, Homo sapiens
  CDR3 for alpha chain variable domain of TCR clone 231093 (TRAV13-1, TRAJ39)
CASHAGNMLTF

SEQ ID NO: 462186 - protein, 14 aa, Homo sapiens
  CDR3 for beta chain variable domain of TCR clone 231093 (TRBV11-2, TRBJ1-5)
CASSLARGRQTQHF

SEQ ID NO: 462187 - protein, 22 aa, Homo sapiens
  CDR3 for alpha chain variable domain of TCR clone 231094 (TRAV4, )
CLVGPHNYDIQNPDHAVYQLRD

SEQ ID NO: 462188 - protein, 17 aa, Homo sapiens
  CDR3 for beta chain variable domain of TCR clone 231094 (TRBV24-1, TRBJ2-1)
CATSDVSTSGTYNEQFF

SEQ ID NO: 462189 - protein, 10 aa, Homo sapiens
  CDR3 for alpha chain variable domain of TCR clone 231095 (TRAV3, TRAJ23)
CAVKIGIYNQ

SEQ ID NO: 462190 - protein, 17 aa, Homo sapiens
  CDR3 for beta chain variable domain of TCR clone 231095 (TRBV10-3, TRBJ2-6)
CAISESTAPSGANILTF

SEQ ID NO: 462191 - protein, 14 aa, Homo sapiens
  CDR3 for alpha chain variable domain of TCR clone 231096 (TRAV26-1, TRAJ39)
CIVRCSRAVNMLTF

SEQ ID NO: 462192 - protein, 15 aa, Homo sapiens
  CDR3 for beta chain variable domain of TCR clone 231096 (TRBV7-9, TRBJ1-5)
CASSQGHQPNQPQHF

SEQ ID NO: 462193 - protein, 13 aa, Homo sapiens
  CDR3 for alpha chain variable domain of TCR clone 231097 (TRAV1-2, TRAJ9)
CAVLNTGGFKTIF

SEQ ID NO: 462194 - protein, 23 aa, Homo sapiens
  CDR3 for beta chain variable domain of TCR clone 231097 (TRBV5-1, TRBJ2-2)
GAGGLGPLSLRQQLGRGIGELFF

SEQ ID NO: 462195 - protein, 13 aa, Homo sapiens
  CDR3 for alpha chain variable domain of TCR clone 231098 (TRAV13-1, TRAJ10)
CAALEGGGNKLTF

SEQ ID NO: 462196 - protein, 13 aa, Homo sapiens
  CDR3 for beta chain variable domain of TCR clone 231098 (TRBV4-2, TRBJ1-1)
CASSQAGNTEAFF

SEQ ID NO: 462197 - protein, 13 aa, Homo sapiens
  CDR3 for alpha chain variable domain of TCR clone 231099 (TRAV27, TRAJ23)
CAGVLPKGGKLIF

SEQ ID NO: 462198 - protein, 12 aa, Homo sapiens
  CDR3 for beta chain variable domain of TCR clone 231099 (TRBV3-1, TRBJ2-1)
CASGGLGNEQFF

SEQ ID NO: 462199 - protein, 11 aa, Homo sapiens
  CDR3 for alpha chain variable domain of TCR clone 231100 (TRAV1-2, TRAJ20)
CAVSNNYKLSF

SEQ ID NO: 462200 - protein, 15 aa, Homo sapiens
  CDR3 for beta chain variable domain of TCR clone 231100 (TRBV5-1, TRBJ2-2)
CASSSQGGNTGELFF

SEQ ID NO: 462201 - protein, 15 aa, Homo sapiens
  CDR3 for alpha chain variable domain of TCR clone 231101 (TRAV30, TRAJ32)
CGTENLGGATNKLIF

SEQ ID NO: 462202 - protein, 13 aa, Homo sapiens
  CDR3 for beta chain variable domain of TCR clone 231101 (TRBV6-3, TRBJ2-7)
CASSFSGGYEQYF

SEQ ID NO: 462203 - protein, 10 aa, Homo sapiens
  CDR3 for alpha chain variable domain of TCR clone 231102 (TRAV12-3, TRAJ18)
CAMSAEAQPW

SEQ ID NO: 462204 - protein, 15 aa, Homo sapiens
  CDR3 for beta chain variable domain of TCR clone 231102 (TRBV7-9, TRBJ1-6)
CASSSPGRGNSPLHF

SEQ ID NO: 462205 - protein, 12 aa, Homo sapiens
  CDR3 for alpha chain variable domain of TCR clone 231103 (TRAV3, TRAJ20)
CAVRDPDYKLSF

SEQ ID NO: 462206 - protein, 16 aa, Homo sapiens
  CDR3 for beta chain variable domain of TCR clone 231103 (TRBV6-1, TRBJ1-3)
CASVQGGVETPYILER

SEQ ID NO: 462207 - protein, 11 aa, Homo sapiens
  CDR3 for alpha chain variable domain of TCR clone 231104 (TRAV2, TRAJ13)
CASGGYQEVTF

SEQ ID NO: 462208 - protein, 13 aa, Homo sapiens
  CDR3 for beta chain variable domain of TCR clone 231104 (TRBV20-1, TRBJ2-5)
CSAREAFQETQYF

SEQ ID NO: 462209 - protein, 14 aa, Homo sapiens
  CDR3 for alpha chain variable domain of TCR clone 231105 (TRAV13-1, TRAJ35)
CAASKGGFGNVLHC

SEQ ID NO: 462210 - protein, 17 aa, Homo sapiens
  CDR3 for beta chain variable domain of TCR clone 231105 (TRBV20-1, TRBJ2-3)
CSAEVGGYGSSTDTQYF

SEQ ID NO: 462211 - protein, 16 aa, Homo sapiens
  CDR3 for alpha chain variable domain of TCR clone 231106 (TRAV30, TRAJ24)
CGTEIVDADSWGKFQF

SEQ ID NO: 462212 - protein, 11 aa, Homo sapiens
  CDR3 for beta chain variable domain of TCR clone 231106 (TRBV20-1, TRBJ2-7)
CSARLSYEQYF

SEQ ID NO: 462213 - protein, 13 aa, Homo sapiens
  CDR3 for alpha chain variable domain of TCR clone 231107 (TRAV23/DV6, TRAJ27)
CAASKPMKANQPL

SEQ ID NO: 462214 - protein, 14 aa, Homo sapiens
  CDR3 for beta chain variable domain of TCR clone 231107 (TRBV5-4, TRBJ1-1)
CASSLDSRRDEAFF

SEQ ID NO: 462215 - protein, 16 aa, Homo sapiens
  CDR3 for alpha chain variable domain of TCR clone 231108 (TRAV22, TRAJ45)
CAVERGKRGGADGLTF

SEQ ID NO: 462216 - protein, 11 aa, Homo sapiens
  CDR3 for beta chain variable domain of TCR clone 231108 (TRBV29-1, TRBJ2-5)
CSEDRTGTQYC

SEQ ID NO: 462217 - protein, 16 aa, Homo sapiens
  CDR3 for alpha chain variable domain of TCR clone 231109 (TRAV4, TRAJ5)
CLVGPDHGHGQESTYF

SEQ ID NO: 462218 - protein, 14 aa, Homo sapiens
  CDR3 for beta chain variable domain of TCR clone 231109 (TRBV7-8, TRBJ2-7)
RASSLGRASYEQYF

SEQ ID NO: 462219 - protein, 13 aa, Homo sapiens
  CDR3 for alpha chain variable domain of TCR clone 231110 (TRAV13-1, TRAJ10)
CAALEGGGNKLTF

SEQ ID NO: 462220 - protein, 13 aa, Homo sapiens
  CDR3 for beta chain variable domain of TCR clone 231110 (TRBV7-9, TRBJ1-2)
CASSLEQNYGYTF

SEQ ID NO: 462221 - protein, 15 aa, Homo sapiens
  CDR3 for alpha chain variable domain of TCR clone 231111 (TRAV12-3, TRAJ5)
CAMSGLGTGRRALTF

SEQ ID NO: 462222 - protein, 15 aa, Homo sapiens
  CDR3 for beta chain variable domain of TCR clone 231111 (TRBV19, TRBJ1-1)
CASTSGQVQNTEAFF

SEQ ID NO: 462223 - protein, 15 aa, Homo sapiens
  CDR3 for alpha chain variable domain of TCR clone 231112 (TRAV21, TRAJ13)
CAVRPTSGGYQKVTF

SEQ ID NO: 462224 - protein, 16 aa, Homo sapiens
  CDR3 for beta chain variable domain of TCR clone 231112 (TRBV7-2, TRBJ2-5)
CASSLVLWTKQETQYF

SEQ ID NO: 462225 - protein, 14 aa, Homo sapiens
  CDR3 for alpha chain variable domain of TCR clone 231113 (TRAV9-2, TRAJ39)
CALYIYNAGNMLTF

SEQ ID NO: 462226 - protein, 16 aa, Homo sapiens
  CDR3 for beta chain variable domain of TCR clone 231113 (TRBV18, TRBJ1-1)
CASSPGVGGRGGEAFF

SEQ ID NO: 462227 - protein, 13 aa, Homo sapiens
  CDR3 for alpha chain variable domain of TCR clone 231114 (TRAV27, TRAJ6)
CAGGTRGSYISTF

SEQ ID NO: 462228 - protein, 14 aa, Homo sapiens
  CDR3 for beta chain variable domain of TCR clone 231114 (TRBV20-1, TRBJ2-4)
CSASGRVGENIQYF

SEQ ID NO: 462229 - protein, 12 aa, Homo sapiens
  CDR3 for alpha chain variable domain of TCR clone 231115 (TRAV12-1, TRAJ34)
CVVAGATDKLIS

SEQ ID NO: 462230 - protein, 12 aa, Homo sapiens
  CDR3 for beta chain variable domain of TCR clone 231115 (TRBV7-9, TRBJ1-1)
CASSLVRGEAFF

SEQ ID NO: 462231 - protein, 14 aa, Homo sapiens
  CDR3 for alpha chain variable domain of TCR clone 231116 (TRAV2, TRAJ3)
CAVRPYSSASKIIF

SEQ ID NO: 462232 - protein, 14 aa, Homo sapiens
  CDR3 for beta chain variable domain of TCR clone 231116 (TRBV12-4, TRBJ2-5)
CASSLSSGRETQYF

SEQ ID NO: 462233 - protein, 12 aa, Homo sapiens
  CDR3 for alpha chain variable domain of TCR clone 231117 (TRAV2, TRAJ31)
CSVEDNNARLMF

SEQ ID NO: 462234 - protein, 14 aa, Homo sapiens
  CDR3 for beta chain variable domain of TCR clone 231117 (TRBV28, TRBJ1-5)
CASSRTGLNQPQHF

SEQ ID NO: 462235 - protein, 12 aa, Homo sapiens
  CDR3 for alpha chain variable domain of TCR clone 231118 (TRAV13-1, TRAJ21)
CAAKEGFNKFYF

SEQ ID NO: 462236 - protein, 16 aa, Homo sapiens
  CDR3 for beta chain variable domain of TCR clone 231118 (TRBV13, TRBJ2-2)
CASSLGRGYGTGELFF

SEQ ID NO: 462237 - protein, 13 aa, Homo sapiens
  CDR3 for alpha chain variable domain of TCR clone 231119 (TRAV29/DV5, TRAJ31)
CAASRNNNARLMF

SEQ ID NO: 462238 - protein, 14 aa, Homo sapiens
  CDR3 for beta chain variable domain of TCR clone 231119 (TRBV7-9, TRBJ2-2)
CASSLVQDTGELFC

SEQ ID NO: 462239 - protein, 14 aa, Homo sapiens
  CDR3 for alpha chain variable domain of TCR clone 231120 (TRAV12-2, TRAJ17)
CAVLFKAAGNNLTF

SEQ ID NO: 462240 - protein, 14 aa, Homo sapiens
  CDR3 for beta chain variable domain of TCR clone 231120 (TRBV4-1, TRBJ2-2)
CASSQAVNTGELFF

SEQ ID NO: 462241 - protein, 16 aa, Homo sapiens
  CDR3 for alpha chain variable domain of TCR clone 231121 (TRAV23/DV6, TRAJ9)
CAASVGGNTGGFKTIF

SEQ ID NO: 462242 - protein, 12 aa, Homo sapiens
  CDR3 for beta chain variable domain of TCR clone 231121 (TRBV11-2, TRBJ2-1)
CASSVQREGQFF

SEQ ID NO: 462243 - protein, 13 aa, Homo sapiens
  CDR3 for alpha chain variable domain of TCR clone 231122 (TRAV1-2, TRAJ9)
CAVLNTGCFKTIF

SEQ ID NO: 462244 - protein, 13 aa, Homo sapiens
  CDR3 for beta chain variable domain of TCR clone 231122 (TRBV19, TRBJ2-7)
CASRKAGGSEQYF

SEQ ID NO: 462245 - protein, 14 aa, Homo sapiens
  CDR3 for alpha chain variable domain of TCR clone 231123 (TRAV12-2, TRAJ17)
CAVLFKAAGNKLTL

SEQ ID NO: 462246 - protein, 17 aa, Homo sapiens
  CDR3 for beta chain variable domain of TCR clone 231123 (TRBV11-2, TRBJ2-1)
CASSLYPPGVEYNEQFF

SEQ ID NO: 462247 - protein, 14 aa, Homo sapiens
  CDR3 for alpha chain variable domain of TCR clone 231124 (TRAV2, TRAJ37)
RAVDFTSNTGKLIF

SEQ ID NO: 462248 - protein, 23 aa, Homo sapiens
  CDR3 for beta chain variable domain of TCR clone 231124 (TRBV18, TRBJ2-1)
CASSPRLFPGTSGPGSSYNEQFF

SEQ ID NO: 462249 - protein, 15 aa, Homo sapiens
  CDR3 for alpha chain variable domain of TCR clone 231125 (TRAV12-2, TRAJ5)
CAVTPSGTRRRALTF

SEQ ID NO: 462250 - protein, 15 aa, Homo sapiens
  CDR3 for beta chain variable domain of TCR clone 231125 (TRBV19, TRBJ1-5)
CASSIVWADNQPQHF

SEQ ID NO: 462251 - protein, 14 aa, Homo sapiens
  CDR3 for alpha chain variable domain of TCR clone 231126 (TRAV1-2, TRAJ16)
CAVNRFSDGRKLLF

SEQ ID NO: 462252 - protein, 12 aa, Homo sapiens
  CDR3 for beta chain variable domain of TCR clone 231126 (TRBV28, TRBJ2-6)
CAIQAGANVLTF

SEQ ID NO: 462253 - protein, 15 aa, Homo sapiens
  CDR3 for alpha chain variable domain of TCR clone 231127 (TRAV13-1, TRAJ32)
CAASIYGGATNKLIF

SEQ ID NO: 462254 - protein, 15 aa, Homo sapiens
  CDR3 for beta chain variable domain of TCR clone 231127 (TRBV28, TRBJ2-1)
CASSIIAGGRSEQFL

SEQ ID NO: 462255 - protein, 13 aa, Homo sapiens
  CDR3 for alpha chain variable domain of TCR clone 231128 (TRAV3, TRAJ26)
CAVSRGYGQNFVF

SEQ ID NO: 462256 - protein, 13 aa, Homo sapiens
  CDR3 for beta chain variable domain of TCR clone 231128 (TRBV10-3, TRBJ2-7)
CASKLAVNYEQYF

SEQ ID NO: 462257 - protein, 14 aa, Homo sapiens
  CDR3 for alpha chain variable domain of TCR clone 231129 (TRAV12-2, TRAJ40)
CAVKIPSGPYKYIF

SEQ ID NO: 462258 - protein, 15 aa, Homo sapiens
  CDR3 for beta chain variable domain of TCR clone 231129 (TRBV27, TRBJ2-5)
CASSLYPRGGETQYF

SEQ ID NO: 462259 - protein, 15 aa, Homo sapiens
  CDR3 for alpha chain variable domain of TCR clone 231130 (TRAV21, TRAJ40)
CAVRPQTSGTYKYIF

SEQ ID NO: 462260 - protein, 12 aa, Homo sapiens
  CDR3 for beta chain variable domain of TCR clone 231130 (TRBV20-1, TRBJ2-7)
CSASSGANEQYF

SEQ ID NO: 462261 - protein, 15 aa, Homo sapiens
  CDR3 for alpha chain variable domain of TCR clone 231131 (TRAV4, TRAJ39)
FLVGPNNNAGNMLTF

SEQ ID NO: 462262 - protein, 14 aa, Homo sapiens
  CDR3 for beta chain variable domain of TCR clone 231131 (TRBV19, TRBJ2-7)
CSSNFRDTFTGMYF

SEQ ID NO: 462263 - protein, 11 aa, Homo sapiens
  CDR3 for alpha chain variable domain of TCR clone 231132 (TRAV1-1, TRAJ23)
CAVRQGGKLIF

SEQ ID NO: 462264 - protein, 15 aa, Homo sapiens
  CDR3 for beta chain variable domain of TCR clone 231132 (TRBV6-1, TRBJ2-7)
CASSESMGDFYEQYF

SEQ ID NO: 462265 - protein, 13 aa, Homo sapiens
  CDR3 for alpha chain variable domain of TCR clone 231133 (TRAV12-2, TRAJ37)
CAGGSGNTGKLIF

SEQ ID NO: 462266 - protein, 17 aa, Homo sapiens
  CDR3 for beta chain variable domain of TCR clone 231133 (TRBV11-2, TRBJ2-4)
CASSSVGPGGHRNIQYF

SEQ ID NO: 462267 - protein, 12 aa, Homo sapiens
  CDR3 for alpha chain variable domain of TCR clone 231134 (TRAV16, TRAJ10)
FSRTGGGNKLTF

SEQ ID NO: 462268 - protein, 12 aa, Homo sapiens
  CDR3 for beta chain variable domain of TCR clone 231134 (TRBV11-3, TRBJ1-1)
CASSHRQGEAFF

SEQ ID NO: 462269 - protein, 14 aa, Homo sapiens
  CDR3 for alpha chain variable domain of TCR clone 231135 (TRAV1-2, TRAJ16)
CAVNRFSHGQKLLF

SEQ ID NO: 462270 - protein, 12 aa, Homo sapiens
  CDR3 for beta chain variable domain of TCR clone 231135 (TRBV6-5, TRBJ2-5)
CASSEGSETQYF

SEQ ID NO: 462271 - protein, 14 aa, Homo sapiens
  CDR3 for alpha chain variable domain of TCR clone 231136 (TRAV1-2, TRAJ16)
CAVNRFSDGQKLLF

SEQ ID NO: 462272 - protein, 13 aa, Homo sapiens
  CDR3 for beta chain variable domain of TCR clone 231136 (TRBV28, TRBJ2-7)
CASSLPSRYEQYF

SEQ ID NO: 462273 - protein, 14 aa, Homo sapiens
  CDR3 for alpha chain variable domain of TCR clone 231137 (TRAV8-4, TRAJ9)
CAVRINTGGFKTNF

SEQ ID NO: 462274 - protein, 15 aa, Homo sapiens
  CDR3 for beta chain variable domain of TCR clone 231137 (TRBV10-2, TRBJ2-6)
CASSEQGTGANDLTF

SEQ ID NO: 462275 - protein, 15 aa, Homo sapiens
  CDR3 for alpha chain variable domain of TCR clone 231138 (TRAV12-1, TRAJ9)
CVVSFGDTGGFKTIF

SEQ ID NO: 462276 - protein, 15 aa, Homo sapiens
  CDR3 for beta chain variable domain of TCR clone 231138 (TRBV19, TRBJ2-1)
CASSIQATSYNEQFF

SEQ ID NO: 462277 - protein, 11 aa, Homo sapiens
  CDR3 for alpha chain variable domain of TCR clone 231139 (TRAV12-2, TRAJ31)
CAVTRWARLMF

SEQ ID NO: 462278 - protein, 15 aa, Homo sapiens
  CDR3 for beta chain variable domain of TCR clone 231139 (TRBV19, TRBJ2-7)
CASSIGGGLVNQQYF

SEQ ID NO: 462279 - protein, 14 aa, Homo sapiens
  CDR3 for alpha chain variable domain of TCR clone 231140 (TRAV27, TRAJ36)
RAGPPKRVANNLFF

SEQ ID NO: 462280 - protein, 15 aa, Homo sapiens
  CDR3 for beta chain variable domain of TCR clone 231140 (TRBV18, TRBJ2-7)
CASSPASTPNYEQYF

SEQ ID NO: 462281 - protein, 11 aa, Homo sapiens
  CDR3 for alpha chain variable domain of TCR clone 231141 (TRAV8-3, TRAJ15)
CAVGPGTALIY

SEQ ID NO: 462282 - protein, 18 aa, Homo sapiens
  CDR3 for beta chain variable domain of TCR clone 231141 (TRBV18, TRBJ2-3)
CASSYTSGAAGGTDTQYF

SEQ ID NO: 462283 - protein, 14 aa, Homo sapiens
  CDR3 for alpha chain variable domain of TCR clone 231142 (TRAV26-1, TRAJ49)
CIVRPSNTGNQCYF

SEQ ID NO: 462284 - protein, 15 aa, Homo sapiens
  CDR3 for beta chain variable domain of TCR clone 231142 (TRBV19, TRBJ1-1)
CASMGFRDVNTEAFF

SEQ ID NO: 462285 - protein, 16 aa, Homo sapiens
  CDR3 for alpha chain variable domain of TCR clone 231143 (TRAV14/DV4, TRAJ54)
CAMREGRIQGAQKLVF

SEQ ID NO: 462286 - protein, 13 aa, Homo sapiens
  CDR3 for beta chain variable domain of TCR clone 231143 (TRBV19, TRBJ1-2)
CASSVPGQDGYTF

SEQ ID NO: 462287 - protein, 13 aa, Homo sapiens
  CDR3 for alpha chain variable domain of TCR clone 231144 (TRAV26-1, TRAJ36)
CIVVGTGANNLFF

SEQ ID NO: 462288 - protein, 12 aa, Homo sapiens
  CDR3 for beta chain variable domain of TCR clone 231144 (TRBV28, TRBJ1-3)
CASVSSGNTIYF

SEQ ID NO: 462289 - protein, 15 aa, Homo sapiens
  CDR3 for alpha chain variable domain of TCR clone 231145 (TRAV35, TRAJ38)
CAGFSNAGDNRKLIW

SEQ ID NO: 462290 - protein, 15 aa, Homo sapiens
  CDR3 for beta chain variable domain of TCR clone 231145 (TRBV7-8, TRBJ2-1)
CASSLAGGLYNEQFF

SEQ ID NO: 462291 - protein, 13 aa, Homo sapiens
  CDR3 for alpha chain variable domain of TCR clone 231146 (TRAV12-2, TRAJ18)
CAVRGSTLGRLYF

SEQ ID NO: 462292 - protein, 20 aa, Homo sapiens
  CDR3 for beta chain variable domain of TCR clone 231146 (TRBV7-8, TRBJ2-2)
CASSHLFPGPTIHSTGELFF

SEQ ID NO: 462293 - protein, 17 aa, Homo sapiens
  CDR3 for alpha chain variable domain of TCR clone 231147 (TRAV3, TRAJ6)
CAVRDGPRAGGIYIPTF

SEQ ID NO: 462294 - protein, 20 aa, Homo sapiens
  CDR3 for beta chain variable domain of TCR clone 231147 (TRBV28, TRBJ2-1)
CASTPIGRSPGLAGGNEQFL

SEQ ID NO: 462295 - protein, 16 aa, Homo sapiens
  CDR3 for alpha chain variable domain of TCR clone 231148 (TRAV1-2, TRAJ27)
RAVREPQTPMHANQPL

SEQ ID NO: 462296 - protein, 13 aa, Homo sapiens
  CDR3 for beta chain variable domain of TCR clone 231148 (TRBV6-1, TRBJ1-2)
CASSARERYGYTF

SEQ ID NO: 462297 - protein, 13 aa, Homo sapiens
  CDR3 for alpha chain variable domain of TCR clone 231149 (TRAV13-1, TRAJ37)
CAARSGNTCKLIF

SEQ ID NO: 462298 - protein, 14 aa, Homo sapiens
  CDR3 for beta chain variable domain of TCR clone 231149 (TRBV12-4, TRBJ2-3)
CGSSLGQGTDTQYF

SEQ ID NO: 462299 - protein, 13 aa, Homo sapiens
  CDR3 for alpha chain variable domain of TCR clone 231150 (TRAV3, TRAJ29)
CAVRDIIDTPLVF

SEQ ID NO: 462300 - protein, 15 aa, Homo sapiens
  CDR3 for beta chain variable domain of TCR clone 231150 (TRBV28, TRBJ2-1)
CASSIIAGGRSEQFF

SEQ ID NO: 462301 - protein, 17 aa, Homo sapiens
  CDR3 for alpha chain variable domain of TCR clone 231151 (TRAV13-1, TRAJ52)
CSASSGAGGTSYGKLTF

SEQ ID NO: 462302 - protein, 12 aa, Homo sapiens
  CDR3 for beta chain variable domain of TCR clone 231151 (TRBV11-2, TRBJ2-2)
CASSLGGGELFF

SEQ ID NO: 462303 - protein, 12 aa, Homo sapiens
  CDR3 for alpha chain variable domain of TCR clone 231152 (TRAV21, TRAJ11)
CAVTSGYSTLTF

SEQ ID NO: 462304 - protein, 17 aa, Homo sapiens
  CDR3 for beta chain variable domain of TCR clone 231152 (TRBV13, TRBJ2-3)
CASSLSRVAGGRNTQYF

SEQ ID NO: 462305 - protein, 10 aa, Homo sapiens
  CDR3 for alpha chain variable domain of TCR clone 231153 (TRAV23/DV6, TRAJ57)
CAASSTLSQG

SEQ ID NO: 462306 - protein, 15 aa, Homo sapiens
  CDR3 for beta chain variable domain of TCR clone 231153 (TRBV4-3, TRBJ2-2)
CASSQGTGGTGELFF

SEQ ID NO: 462307 - protein, 18 aa, Homo sapiens
  CDR3 for alpha chain variable domain of TCR clone 231154 (TRAV13-1, TRAJ52)
CAASKRSAGGTSYGKLTF

SEQ ID NO: 462308 - protein, 16 aa, Homo sapiens
  CDR3 for beta chain variable domain of TCR clone 231154 (TRBV15, TRBJ1-2)
CATSRGPRTGGGGYTS

SEQ ID NO: 462309 - protein, 11 aa, Homo sapiens
  CDR3 for alpha chain variable domain of TCR clone 231155 (TRAV12-1, TRAJ8)
CVVTVFQKLVF

SEQ ID NO: 462310 - protein, 14 aa, Homo sapiens
  CDR3 for beta chain variable domain of TCR clone 231155 (TRBV19, TRBJ2-1)
CASGKSTQYNEQFF

SEQ ID NO: 462311 - protein, 14 aa, Homo sapiens
  CDR3 for alpha chain variable domain of TCR clone 231156 (TRAV17, TRAJ6)
CATDASGGSYIPTF

SEQ ID NO: 462312 - protein, 19 aa, Homo sapiens
  CDR3 for beta chain variable domain of TCR clone 231156 (TRBV4-3, TRBJ2-7)
CASSQEFIGWQVNPYEQYF

SEQ ID NO: 462313 - protein, 11 aa, Homo sapiens
  CDR3 for alpha chain variable domain of TCR clone 231157 (TRAV12-1, TRAJ8)
CVVTGFQKLVF

SEQ ID NO: 462314 - protein, 14 aa, Homo sapiens
  CDR3 for beta chain variable domain of TCR clone 231157 (TRBV19, TRBJ2-1)
CASGKSTQYNEQFL

SEQ ID NO: 462315 - protein, 13 aa, Homo sapiens
  CDR3 for alpha chain variable domain of TCR clone 231158 (TRAV23/DV6, TRAJ47)
CAASIRNGIWKQT

SEQ ID NO: 462316 - protein, 13 aa, Homo sapiens
  CDR3 for beta chain variable domain of TCR clone 231158 (TRBV19, TRBJ1-2)
CASSPGQVYGYTF

SEQ ID NO: 462317 - protein, 12 aa, Homo sapiens
  CDR3 for alpha chain variable domain of TCR clone 231159 (TRAV16, TRAJ21)
CSLLGNFNKFYF

SEQ ID NO: 462318 - protein, 13 aa, Homo sapiens
  CDR3 for beta chain variable domain of TCR clone 231159 (TRBV28, TRBJ2-7)
CASKAGGVYEQYF

SEQ ID NO: 462319 - protein, 14 aa, Homo sapiens
  CDR3 for alpha chain variable domain of TCR clone 231160 (TRAV27, TRAJ45)
CAGAQEEVLTDTPL

SEQ ID NO: 462320 - protein, 17 aa, Homo sapiens
  CDR3 for beta chain variable domain of TCR clone 231160 (TRBV11-2, TRBJ2-1)
CASSLYPPGVEYNEQFL

SEQ ID NO: 462321 - protein, 17 aa, Homo sapiens
  CDR3 for alpha chain variable domain of TCR clone 231161 (TRAV26-1, TRAJ53)
CIVRVDDSGGSNYKLTF

SEQ ID NO: 462322 - protein, 15 aa, Homo sapiens
  CDR3 for beta chain variable domain of TCR clone 231161 (TRBV20-1, TRBJ2-7)
CSARVPTAYFYEQYF

SEQ ID NO: 462323 - protein, 15 aa, Homo sapiens
  CDR3 for alpha chain variable domain of TCR clone 231162 (TRAV29/DV5, TRAJ29)
CAASERSSGNTPLVF

SEQ ID NO: 462324 - protein, 17 aa, Homo sapiens
  CDR3 for beta chain variable domain of TCR clone 231162 (TRBV20-1, TRBJ2-2)
CSASGSGQGGLTGELFF

SEQ ID NO: 462325 - protein, 16 aa, Homo sapiens
  CDR3 for alpha chain variable domain of TCR clone 231163 (TRAV16, TRAJ52)
FALSAAGGTSYGKLTF

SEQ ID NO: 462326 - protein, 12 aa, Homo sapiens
  CDR3 for beta chain variable domain of TCR clone 231163 (TRBV12-4, TRBJ1-3)
CASSFSGNTMYF

SEQ ID NO: 462327 - protein, 11 aa, Homo sapiens
  CDR3 for alpha chain variable domain of TCR clone 231164 (TRAV17, TRAJ43)
CATPRSNDMRF

SEQ ID NO: 462328 - protein, 13 aa, Homo sapiens
  CDR3 for beta chain variable domain of TCR clone 231164 (TRBV11-3, TRBJ1-1)
CASSRQPNTEAFF

SEQ ID NO: 462329 - protein, 16 aa, Homo sapiens
  CDR3 for alpha chain variable domain of TCR clone 231165 (TRAV30, TRAJ24)
CVTEIVDADSWGKFQF

SEQ ID NO: 462330 - protein, 16 aa, Homo sapiens
  CDR3 for beta chain variable domain of TCR clone 231165 (TRBV12-5, TRBJ2-5)
CASGPRTSGNQETQYF

SEQ ID NO: 462331 - protein, 18 aa, Homo sapiens
  CDR3 for alpha chain variable domain of TCR clone 231166 (TRAV21, TRAJ52)
CAVRSSPAGGTSYGKLTF

SEQ ID NO: 462332 - protein, 17 aa, Homo sapiens
  CDR3 for beta chain variable domain of TCR clone 231166 (TRBV13, TRBJ2-3)
RASSLSRVAGGRNTQYF

SEQ ID NO: 462333 - protein, 18 aa, Homo sapiens
  CDR3 for alpha chain variable domain of TCR clone 231167 (TRAV13-1, TRAJ52)
CAAKNPNAGGTSYGKLTF

SEQ ID NO: 462334 - protein, 14 aa, Homo sapiens
  CDR3 for beta chain variable domain of TCR clone 231167 (TRBV7-3, TRBJ2-1)
CAISLAGGTNEQFF

SEQ ID NO: 462335 - protein, 14 aa, Homo sapiens
  CDR3 for alpha chain variable domain of TCR clone 231168 (TRAV17, TRAJ12)
CAILPMDSSYKLIF

SEQ ID NO: 462336 - protein, 17 aa, Homo sapiens
  CDR3 for beta chain variable domain of TCR clone 231168 (TRBV7-3, TRBJ2-3)
CASSPRGQGYCTDTQYF

SEQ ID NO: 462337 - protein, 16 aa, Homo sapiens
  CDR3 for alpha chain variable domain of TCR clone 231169 (TRAV1-2, TRAJ10)
CAVRGVLTGGGNKLTF

SEQ ID NO: 462338 - protein, 17 aa, Homo sapiens
  CDR3 for beta chain variable domain of TCR clone 231169 (TRBV7-2, TRBJ2-1)
CASSLGPPWGGLDEQFF

SEQ ID NO: 462339 - protein, 12 aa, Homo sapiens
  CDR3 for alpha chain variable domain of TCR clone 231170 (TRAV21, TRAJ56)
CAVGVNRSKLTF

SEQ ID NO: 462340 - protein, 15 aa, Homo sapiens
  CDR3 for beta chain variable domain of TCR clone 231170 (TRBV20-1, TRBJ2-7)
CSARDRVSGMDEQYF

SEQ ID NO: 462341 - protein, 16 aa, Homo sapiens
  CDR3 for alpha chain variable domain of TCR clone 231171 (TRAV14/DV4, TRAJ54)
CAMREGRIQGAQKLVF

SEQ ID NO: 462342 - protein, 14 aa, Homo sapiens
  CDR3 for beta chain variable domain of TCR clone 231171 (TRBV7-8, TRBJ2-1)
CQQLSGGLYNEQFF

SEQ ID NO: 462343 - protein, 13 aa, Homo sapiens
  CDR3 for alpha chain variable domain of TCR clone 231172 (TRAV1-2, TRAJ9)
CAALNTGGFKTIF

SEQ ID NO: 462344 - protein, 14 aa, Homo sapiens
  CDR3 for beta chain variable domain of TCR clone 231172 (TRBV19, TRBJ2-7)
CASSTEASSYEQYF

SEQ ID NO: 462345 - protein, 12 aa, Homo sapiens
  CDR3 for alpha chain variable domain of TCR clone 231173 (TRAV21, TRAJ41)
CAVREFRLCTQL

SEQ ID NO: 462346 - protein, 15 aa, Homo sapiens
  CDR3 for beta chain variable domain of TCR clone 231173 (TRBV18, TRBJ1-5)
CASSPQARSNQPQHF

SEQ ID NO: 462347 - protein, 13 aa, Homo sapiens
  CDR3 for alpha chain variable domain of TCR clone 231174 (TRAV27, TRAJ45)
CRSSGGGADGLTF

SEQ ID NO: 462348 - protein, 15 aa, Homo sapiens
  CDR3 for beta chain variable domain of TCR clone 231174 (TRBV11-2, TRBJ1-2)
CASSLEGVQRDGYTF

SEQ ID NO: 462349 - protein, 14 aa, Homo sapiens
  CDR3 for alpha chain variable domain of TCR clone 231175 (TRAV29/DV5, TRAJ45)
CAASFRGGADGLTF

SEQ ID NO: 462350 - protein, 18 aa, Homo sapiens
  CDR3 for beta chain variable domain of TCR clone 231175 (TRBV20-1, TRBJ2-3)
CSASGLAGGPGTTDTQYF

SEQ ID NO: 462351 - protein, 12 aa, Homo sapiens
  CDR3 for alpha chain variable domain of TCR clone 231176 (TRAV8-3, TRAJ43)
CAVGAGNNDMRF

SEQ ID NO: 462352 - protein, 18 aa, Homo sapiens
  CDR3 for beta chain variable domain of TCR clone 231176 (TRBV11-2, TRBJ2-3)
CARCLGGASRGAPNTQYF

SEQ ID NO: 462353 - protein, 14 aa, Homo sapiens
  CDR3 for alpha chain variable domain of TCR clone 231177 (TRAV12-2, TRAJ45)
CAVYSGGGADGLTF

SEQ ID NO: 462354 - protein, 12 aa, Homo sapiens
  CDR3 for beta chain variable domain of TCR clone 231177 (TRBV2, TRBJ1-2)
CASDLDNYGYTF

SEQ ID NO: 462355 - protein, 18 aa, Homo sapiens
  CDR3 for alpha chain variable domain of TCR clone 231178 (TRAV13-1, TRAJ52)
CAAKNPNAGGTSYGKLTF

SEQ ID NO: 462356 - protein, 16 aa, Homo sapiens
  CDR3 for beta chain variable domain of TCR clone 231178 (TRBV11-1, TRBJ2-2)
CASSAEGLKNTGELFF

SEQ ID NO: 462357 - protein, 14 aa, Homo sapiens
  CDR3 for alpha chain variable domain of TCR clone 231179 (TRAV36/DV7, TRAJ44)
CCGANTGTASKLTF

SEQ ID NO: 462358 - protein, 13 aa, Homo sapiens
  CDR3 for beta chain variable domain of TCR clone 231179 (TRBV2, TRBJ1-1)
CASSVLLNTEAFF

SEQ ID NO: 462359 - protein, 17 aa, Homo sapiens
  CDR3 for alpha chain variable domain of TCR clone 231180 (TRAV27, TRAJ42)
CAGRVIYYGGSQGNLIF

SEQ ID NO: 462360 - protein, 14 aa, Homo sapiens
  CDR3 for beta chain variable domain of TCR clone 231180 (TRBV6-6, TRBJ2-3)
CASRLQREADTQYF

SEQ ID NO: 462361 - protein, 14 aa, Homo sapiens
  CDR3 for alpha chain variable domain of TCR clone 231181 (TRAV13-1, TRAJ22)
CAESYSGSARQLTF

SEQ ID NO: 462362 - protein, 13 aa, Homo sapiens
  CDR3 for beta chain variable domain of TCR clone 231181 (TRBV6-3, TRBJ1-2)
CASSLTGDYGYTF

SEQ ID NO: 462363 - protein, 12 aa, Homo sapiens
  CDR3 for alpha chain variable domain of TCR clone 231182 (TRAV29/DV5, TRAJ34)
CAARHNTEKLIF

SEQ ID NO: 462364 - protein, 15 aa, Homo sapiens
  CDR3 for beta chain variable domain of TCR clone 231182 (TRBV6-3, TRBJ2-7)
CASSSPGTVFYEQYF

SEQ ID NO: 462365 - protein, 14 aa, Homo sapiens
  CDR3 for alpha chain variable domain of TCR clone 231183 (TRAV17, TRAJ54)
CATDANKGAQKLVF

SEQ ID NO: 462366 - protein, 12 aa, Homo sapiens
  CDR3 for beta chain variable domain of TCR clone 231183 (TRBV6-3, TRBJ2-1)
CASSGSYNEQFF

SEQ ID NO: 462367 - protein, 13 aa, Homo sapiens
  CDR3 for alpha chain variable domain of TCR clone 231184 (TRAV1-2, TRAJ9)
CAALNTGGFKTIF

SEQ ID NO: 462368 - protein, 15 aa, Homo sapiens
  CDR3 for beta chain variable domain of TCR clone 231184 (TRBV7-8, TRBJ2-7)
CASSSPGTVFYEQYF

SEQ ID NO: 462369 - protein, 13 aa, Homo sapiens
  CDR3 for alpha chain variable domain of TCR clone 231185 (TRAV35, TRAJ33)
CAGRHDRNYQLIW

SEQ ID NO: 462370 - protein, 19 aa, Homo sapiens
  CDR3 for beta chain variable domain of TCR clone 231185 (TRBV6-3, TRBJ2-1)
RASSYSWTSGRATYNEQFF

SEQ ID NO: 462371 - protein, 14 aa, Homo sapiens
  CDR3 for alpha chain variable domain of TCR clone 231186 (TRAV1-2, TRAJ33)
CAVRAPDSNYQLIW

SEQ ID NO: 462372 - protein, 17 aa, Homo sapiens
  CDR3 for beta chain variable domain of TCR clone 231186 (TRBV11-2, TRBJ2-1)
CASSLYPPGVEYNEQFF

SEQ ID NO: 462373 - protein, 14 aa, Homo sapiens
  CDR3 for alpha chain variable domain of TCR clone 231187 (TRAV2, TRAJ9)
CAVEDRGGGFKTIF

SEQ ID NO: 462374 - protein, 14 aa, Homo sapiens
  CDR3 for beta chain variable domain of TCR clone 231187 (TRBV20-1, TRBJ2-1)
CSAQIGGSANEQFF

SEQ ID NO: 462375 - protein, 13 aa, Homo sapiens
  CDR3 for alpha chain variable domain of TCR clone 231188 (TRAV27, TRAJ3)
ASLRGNSASKIIF

SEQ ID NO: 462376 - protein, 15 aa, Homo sapiens
  CDR3 for beta chain variable domain of TCR clone 231188 (TRBV28, TRBJ1-3)
CASSMGWASGNTMYF

SEQ ID NO: 462377 - protein, 22 aa, Homo sapiens
  CDR3 for alpha chain variable domain of TCR clone 231189 (TRAV25, TRAJ13)
TATQTTDVGTFLDSGGYQKVTF

SEQ ID NO: 462378 - protein, 17 aa, Homo sapiens
  CDR3 for beta chain variable domain of TCR clone 231189 (TRBV13, TRBJ2-3)
CASSLSRVAGGRNTQYF

SEQ ID NO: 462379 - protein, 15 aa, Homo sapiens
  CDR3 for alpha chain variable domain of TCR clone 231190 (TRAV3, TRAJ22)
CAVRDRGGSARQLTF

SEQ ID NO: 462380 - protein, 12 aa, Homo sapiens
  CDR3 for beta chain variable domain of TCR clone 231190 (TRBV2, TRBJ1-2)
CASSGQTYGYTF

SEQ ID NO: 462381 - protein, 13 aa, Homo sapiens
  CDR3 for alpha chain variable domain of TCR clone 231191 (TRAV2, TRAJ22)
CAVDSGSARQLTF

SEQ ID NO: 462382 - protein, 15 aa, Homo sapiens
  CDR3 for beta chain variable domain of TCR clone 231191 (TRBV7-2, TRBJ2-3)
CASSLAGAFIDTQYF

SEQ ID NO: 462383 - protein, 16 aa, Homo sapiens
  CDR3 for alpha chain variable domain of TCR clone 231192 (TRAV30, TRAJ24)
CGTEIVDADSCGKFQF

SEQ ID NO: 462384 - protein, 15 aa, Homo sapiens
  CDR3 for beta chain variable domain of TCR clone 231192 (TRBV20-1, TRBJ2-4)
CSARDLTGGPNIQYF

SEQ ID NO: 462385 - protein, 19 aa, Homo sapiens
  CDR3 for alpha chain variable domain of TCR clone 231193 (TRAV30, TRAJ52)
CGTEANTNAGGTSYGKLTF

SEQ ID NO: 462386 - protein, 17 aa, Homo sapiens
  CDR3 for beta chain variable domain of TCR clone 231193 (TRBV28, TRBJ2-7)
CASSPLRGRQWKGGQYF

SEQ ID NO: 462387 - protein, 14 aa, Homo sapiens
  CDR3 for alpha chain variable domain of TCR clone 231194 (TRAV29/DV5, TRAJ36)
CAARRKTGANNLFF

SEQ ID NO: 462388 - protein, 15 aa, Homo sapiens
  CDR3 for beta chain variable domain of TCR clone 231194 (TRBV12-4, TRBJ1-5)
CASTRGSGFGQPQHF

SEQ ID NO: 462389 - protein, 14 aa, Homo sapiens
  CDR3 for alpha chain variable domain of TCR clone 231195 (TRAV1-2, TRAJ8)
CAVRGDTGFQKLVF

SEQ ID NO: 462390 - protein, 15 aa, Homo sapiens
  CDR3 for beta chain variable domain of TCR clone 231195 (TRBV7-3, TRBJ2-6)
CASSLGGSGANVLTF

SEQ ID NO: 462391 - protein, 12 aa, Homo sapiens
  CDR3 for alpha chain variable domain of TCR clone 231196 (TRAV2, TRAJ10)
CATTGGGNKLTF

SEQ ID NO: 462392 - protein, 20 aa, Homo sapiens
  CDR3 for beta chain variable domain of TCR clone 231196 (TRBV7-8, TRBJ2-2)
CASSHLFPGPTIHITGELFF

SEQ ID NO: 462393 - protein, 16 aa, Homo sapiens
  CDR3 for alpha chain variable domain of TCR clone 231197 (TRAV8-3, TRAJ10)
CAVGPILTGGGNKLTF

SEQ ID NO: 462394 - protein, 20 aa, Homo sapiens
  CDR3 for beta chain variable domain of TCR clone 231197 (TRBV7-2, TRBJ2-5)
CASSSKWLSGQETVLRARHA

SEQ ID NO: 462395 - protein, 12 aa, Homo sapiens
  CDR3 for alpha chain variable domain of TCR clone 231198 (TRAV27, TRAJ37)
CSDSGNTGKLIF

SEQ ID NO: 462396 - protein, 18 aa, Homo sapiens
  CDR3 for beta chain variable domain of TCR clone 231198 (TRBV7-9, TRBJ1-1)
CASSKPWDTMGMNTEAFF

SEQ ID NO: 462397 - protein, 18 aa, Homo sapiens
  CDR3 for alpha chain variable domain of TCR clone 231199 (TRAV26-1, TRAJ23)
CIVRVGLEVWNQGGKMIF

SEQ ID NO: 462398 - protein, 16 aa, Homo sapiens
  CDR3 for beta chain variable domain of TCR clone 231199 (TRBV12-4, TRBJ2-5)
CASSFFVRGRQETQYF

SEQ ID NO: 462399 - protein, 15 aa, Homo sapiens
  CDR3 for alpha chain variable domain of TCR clone 231200 (TRAV3, TRAJ22)
CAVRDRGGSARQLTF

SEQ ID NO: 462400 - protein, 15 aa, Homo sapiens
  CDR3 for beta chain variable domain of TCR clone 231200 (TRBV10-3, TRBJ2-1)
CAIRNGTSGHNEQFF

SEQ ID NO: 462401 - protein, 17 aa, Homo sapiens
  CDR3 for alpha chain variable domain of TCR clone 231201 (TRAV3, TRAJ38)
CAVRDCLNAGSNRKLIW

SEQ ID NO: 462402 - protein, 14 aa, Homo sapiens
  CDR3 for beta chain variable domain of TCR clone 231201 (TRBV5-5, TRBJ1-5)
CASSGQGVDQPQHF

SEQ ID NO: 462403 - protein, 14 aa, Homo sapiens
  CDR3 for alpha chain variable domain of TCR clone 231202 (TRAV26-1, TRAJ34)
CIVRESYNTDKLIF

SEQ ID NO: 462404 - protein, 13 aa, Homo sapiens
  CDR3 for beta chain variable domain of TCR clone 231202 (TRBV19, TRBJ2-1)
CASSMYRVNEQFF

SEQ ID NO: 462405 - protein, 16 aa, Homo sapiens
  CDR3 for alpha chain variable domain of TCR clone 231203 (TRAV12-3, TRAJ53)
CAMSPGSEGSNYNLTF

SEQ ID NO: 462406 - protein, 11 aa, Homo sapiens
  CDR3 for beta chain variable domain of TCR clone 231203 (TRBV29-1, TRBJ2-5)
CSEDRTGTQYF

SEQ ID NO: 462407 - protein, 17 aa, Homo sapiens
  CDR3 for alpha chain variable domain of TCR clone 231204 (TRAV13-1, TRAJ52)
CAAGRNAGGTSYGKLTF

SEQ ID NO: 462408 - protein, 13 aa, Homo sapiens
  CDR3 for beta chain variable domain of TCR clone 231204 (TRBV7-2, TRBJ1-1)
FASDLKGAKVAFF

SEQ ID NO: 462409 - protein, 14 aa, Homo sapiens
  CDR3 for alpha chain variable domain of TCR clone 231205 (TRAV29/DV5, TRAJ5)
CAASGDTGRRALTF

SEQ ID NO: 462410 - protein, 14 aa, Homo sapiens
  CDR3 for beta chain variable domain of TCR clone 231205 (TRBV4-3, TRBJ1-5)
CASSQGGQGWPQHF

SEQ ID NO: 462411 - protein, 17 aa, Homo sapiens
  CDR3 for alpha chain variable domain of TCR clone 231206 (TRAV3, TRAJ38)
CAVRDCFNAGNNRKLIW

SEQ ID NO: 462412 - protein, 14 aa, Homo sapiens
  CDR3 for beta chain variable domain of TCR clone 231206 (TRBV5-5, TRBJ1-5)
CASSGQGVDQPQHF

SEQ ID NO: 462413 - protein, 13 aa, Homo sapiens
  CDR3 for alpha chain variable domain of TCR clone 231207 (TRAV21, TRAJ56)
CAGWVGANSKLTF

SEQ ID NO: 462414 - protein, 14 aa, Homo sapiens
  CDR3 for beta chain variable domain of TCR clone 231207 (TRBV4-1, TRBJ2-5)
CASSRSGSGETQYF

SEQ ID NO: 462415 - protein, 16 aa, Homo sapiens
  CDR3 for alpha chain variable domain of TCR clone 231208 (TRAV1-2, TRAJ10)
CAVRGVLTGGGNKLTL

SEQ ID NO: 462416 - protein, 12 aa, Homo sapiens
  CDR3 for beta chain variable domain of TCR clone 231208 (TRBV11-2, TRBJ2-1)
CASSPGNNEQFF

SEQ ID NO: 462417 - protein, 15 aa, Homo sapiens
  CDR3 for alpha chain variable domain of TCR clone 231209 (TRAV12-3, TRAJ6)
CAMSATTGGSYIPPF

SEQ ID NO: 462418 - protein, 16 aa, Homo sapiens
  CDR3 for beta chain variable domain of TCR clone 231209 (TRBV27, TRBJ2-5)
CASSFGPGGTKETQYF

SEQ ID NO: 462419 - protein, 14 aa, Homo sapiens
  CDR3 for alpha chain variable domain of TCR clone 231210 (TRAV17, TRAJ16)
CATADFSDGQKLLF

SEQ ID NO: 462420 - protein, 16 aa, Homo sapiens
  CDR3 for beta chain variable domain of TCR clone 231210 (TRBV4-1, TRBJ2-7)
CASSLTAGQATYEQYF

SEQ ID NO: 462421 - protein, 16 aa, Homo sapiens
  CDR3 for alpha chain variable domain of TCR clone 231211 (TRAV1-2, TRAJ10)
CAVRGVLAGGGNKLTF

SEQ ID NO: 462422 - protein, 12 aa, Homo sapiens
  CDR3 for beta chain variable domain of TCR clone 231211 (TRBV12-4, TRBJ2-7)
CASSLGGYEQYF

SEQ ID NO: 462423 - protein, 16 aa, Homo sapiens
  CDR3 for alpha chain variable domain of TCR clone 231212 (TRAV29/DV5, TRAJ36)
CAASAGVETGANNLFF

SEQ ID NO: 462424 - protein, 16 aa, Homo sapiens
  CDR3 for beta chain variable domain of TCR clone 231212 (TRBV5-1, TRBJ2-3)
CASSLGLSVYTDTQYF

SEQ ID NO: 462425 - protein, 18 aa, Homo sapiens
  CDR3 for alpha chain variable domain of TCR clone 231213 (TRAV12-3, TRAJ52)
CAMSVGGAGGTSYGKLTF

SEQ ID NO: 462426 - protein, 15 aa, Homo sapiens
  CDR3 for beta chain variable domain of TCR clone 231213 (TRBV7-2, TRBJ2-1)
CASSLVGSSYNEQFF

SEQ ID NO: 462427 - protein, 13 aa, Homo sapiens
  CDR3 for alpha chain variable domain of TCR clone 231214 (TRAV30, TRAJ16)
CGTFGGDGQKLLF

SEQ ID NO: 462428 - protein, 13 aa, Homo sapiens
  CDR3 for beta chain variable domain of TCR clone 231214 (TRBV12-4, TRBJ2-7)
CASSPTETYEQYF

SEQ ID NO: 462429 - protein, 11 aa, Homo sapiens
  CDR3 for alpha chain variable domain of TCR clone 231215 (TRAV21, TRAJ34)
CAVTNTDELIF

SEQ ID NO: 462430 - protein, 15 aa, Homo sapiens
  CDR3 for beta chain variable domain of TCR clone 231215 (TRBV6-5, TRBJ2-1)
CASSYDAGAGNEQFF

SEQ ID NO: 462431 - protein, 14 aa, Homo sapiens
  CDR3 for alpha chain variable domain of TCR clone 231216 (TRAV12-3, TRAJ39)
SATYLSSAGNMLTF

SEQ ID NO: 462432 - protein, 13 aa, Homo sapiens
  CDR3 for beta chain variable domain of TCR clone 231216 (TRBV28, TRBJ1-2)
CASSPGSRNGYTF

SEQ ID NO: 462433 - protein, 13 aa, Homo sapiens
  CDR3 for alpha chain variable domain of TCR clone 231217 (TRAV8-6, TRAJ21)
CAVSPSSLSKFYF

SEQ ID NO: 462434 - protein, 18 aa, Homo sapiens
  CDR3 for beta chain variable domain of TCR clone 231217 (TRBV11-2, TRBJ2-3)
CASSLGGASRGAPNTQYF

SEQ ID NO: 462435 - protein, 12 aa, Homo sapiens
  CDR3 for alpha chain variable domain of TCR clone 231218 (TRAV2, TRAJ9)
CAVGAGGFKTIF

SEQ ID NO: 462436 - protein, 16 aa, Homo sapiens
  CDR3 for beta chain variable domain of TCR clone 231218 (TRBV5-4, TRBJ2-3)
CASQQPGAGGADTQYF

SEQ ID NO: 462437 - protein, 14 aa, Homo sapiens
  CDR3 for alpha chain variable domain of TCR clone 231219 (TRAV13-2, TRAJ17)
CAENSKAAGNKLTF

SEQ ID NO: 462438 - protein, 16 aa, Homo sapiens
  CDR3 for beta chain variable domain of TCR clone 231219 (TRBV7-9, TRBJ1-2)
CASSLGFSSGEDGYTF

SEQ ID NO: 462439 - protein, 15 aa, Homo sapiens
  CDR3 for alpha chain variable domain of TCR clone 231220 (TRAV21, TRAJ24)
CAARSSTDSWGKLQF

SEQ ID NO: 462440 - protein, 13 aa, Homo sapiens
  CDR3 for beta chain variable domain of TCR clone 231220 (TRBV19, TRBJ1-2)
CASSAPGQDGYTF

SEQ ID NO: 462441 - protein, 10 aa, Homo sapiens
  CDR3 for alpha chain variable domain of TCR clone 231221 (TRAV30, TRAJ24)
CGTEIVDLTA

SEQ ID NO: 462442 - protein, 14 aa, Homo sapiens
  CDR3 for beta chain variable domain of TCR clone 231221 (TRBV12-5, TRBJ2-5)
CASGSRTHQETQYF

SEQ ID NO: 462443 - protein, 17 aa, Homo sapiens
  CDR3 for alpha chain variable domain of TCR clone 231222 (TRAV3, TRAJ22)
CAVRPFISSGSARQLTF

SEQ ID NO: 462444 - protein, 16 aa, Homo sapiens
  CDR3 for beta chain variable domain of TCR clone 231222 (TRBV7-6, TRBJ2-3)
CASSHLAGGSTDTQYF

SEQ ID NO: 462445 - protein, 13 aa, Homo sapiens
  CDR3 for alpha chain variable domain of TCR clone 231223 (TRAV8-3, TRAJ28)
CAVGAVGSYQLTF

SEQ ID NO: 462446 - protein, 17 aa, Homo sapiens
  CDR3 for beta chain variable domain of TCR clone 231223 (TRBV11-2, TRBJ2-6)
CASSQRDIFSGANVLTF

SEQ ID NO: 462447 - protein, 15 aa, Homo sapiens
  CDR3 for alpha chain variable domain of TCR clone 231224 (TRAV27, TRAJ53)
CSAINSGGSNYKLTF

SEQ ID NO: 462448 - protein, 14 aa, Homo sapiens
  CDR3 for beta chain variable domain of TCR clone 231224 (TRBV7-3, TRBJ2-1)
CASSLAGRTNEQFF

SEQ ID NO: 462449 - protein, 13 aa, Homo sapiens
  CDR3 for alpha chain variable domain of TCR clone 231225 (TRAV3, TRAJ27)
CAVRPLGAGKSTF

SEQ ID NO: 462450 - protein, 14 aa, Homo sapiens
  CDR3 for beta chain variable domain of TCR clone 231225 (TRBV7-7, TRBJ2-7)
CASSPGGPTYEQYF

SEQ ID NO: 462451 - protein, 13 aa, Homo sapiens
  CDR3 for alpha chain variable domain of TCR clone 231226 (TRAV12-3, TRAJ10)
HLPLTGGGNKLTF

SEQ ID NO: 462452 - protein, 16 aa, Homo sapiens
  CDR3 for beta chain variable domain of TCR clone 231226 (TRBV5-8, TRBJ2-2)
CASSLINPGGAGELFF

SEQ ID NO: 462453 - protein, 12 aa, Homo sapiens
  CDR3 for alpha chain variable domain of TCR clone 231227 (TRAV12-2, TRAJ8)
CSVNTGFQKLVF

SEQ ID NO: 462454 - protein, 14 aa, Homo sapiens
  CDR3 for beta chain variable domain of TCR clone 231227 (TRBV19, TRBJ2-1)
CASPTFVLSGEQFF

SEQ ID NO: 462455 - protein, 14 aa, Homo sapiens
  CDR3 for alpha chain variable domain of TCR clone 231228 (TRAV2, TRAJ37)
CAVDFTSNTGKLIF

SEQ ID NO: 462456 - protein, 13 aa, Homo sapiens
  CDR3 for beta chain variable domain of TCR clone 231228 (TRBV4-2, TRBJ1-1)
CASSQARNTEAFF

SEQ ID NO: 462457 - protein, 20 aa, Homo sapiens
  CDR3 for alpha chain variable domain of TCR clone 231229 (TRAV12-3, TRAJ41)
SLFIRDSQPSDSATPEALNF

SEQ ID NO: 462458 - protein, 15 aa, Homo sapiens
  CDR3 for beta chain variable domain of TCR clone 231229 (TRBV5-1, TRBJ2-7)
CASSWDLTSSYEQYF

SEQ ID NO: 462459 - protein, 15 aa, Homo sapiens
  CDR3 for alpha chain variable domain of TCR clone 231230 (TRAV26-1, TRAJ22)
CIVRVSFWFCKATDL

SEQ ID NO: 462460 - protein, 13 aa, Homo sapiens
  CDR3 for beta chain variable domain of TCR clone 231230 (TRBV7-9, TRBJ1-2)
CASSLQQNSGSTF

SEQ ID NO: 462461 - protein, 13 aa, Homo sapiens
  CDR3 for alpha chain variable domain of TCR clone 231231 (TRAV1-2, TRAJ9)
CAALNTGGFNTIF

SEQ ID NO: 462462 - protein, 14 aa, Homo sapiens
  CDR3 for beta chain variable domain of TCR clone 231231 (TRBV7-6, TRBJ2-3)
CASNSGGDANTQYF

SEQ ID NO: 462463 - protein, 18 aa, Homo sapiens
  CDR3 for alpha chain variable domain of TCR clone 231232 (TRAV13-1, TRAJ52)
CAASKRSAGGTSYGKLTF

SEQ ID NO: 462464 - protein, 14 aa, Homo sapiens
  CDR3 for beta chain variable domain of TCR clone 231232 (TRBV7-2, TRBJ2-5)
CASSTGGELKNQYF

SEQ ID NO: 462465 - protein, 12 aa, Homo sapiens
  CDR3 for alpha chain variable domain of TCR clone 231233 (TRAV13-2, TRAJ23)
CAERHRGGKLIF

SEQ ID NO: 462466 - protein, 14 aa, Homo sapiens
  CDR3 for beta chain variable domain of TCR clone 231233 (TRBV7-3, TRBJ2-1)
RASSSRGSYNEPFF

SEQ ID NO: 462467 - protein, 19 aa, Homo sapiens
  CDR3 for alpha chain variable domain of TCR clone 231234 (TRAV1-2, TRAJ26)
CLLPLCCERPDNYGQNFVF

SEQ ID NO: 462468 - protein, 12 aa, Homo sapiens
  CDR3 for beta chain variable domain of TCR clone 231234 (TRBV20-1, TRBJ2-1)
CSAQYTYNKQFF

SEQ ID NO: 462469 - protein, 14 aa, Homo sapiens
  CDR3 for alpha chain variable domain of TCR clone 231235 (TRAV38-2/DV8, TRAJ23)
CAYRSQNQGGKLIF

SEQ ID NO: 462470 - protein, 15 aa, Homo sapiens
  CDR3 for beta chain variable domain of TCR clone 231235 (TRBV5-1, TRBJ2-3)
CASSVTSGSTDTQYF

SEQ ID NO: 462471 - protein, 13 aa, Homo sapiens
  CDR3 for alpha chain variable domain of TCR clone 231236 (TRAV12-1, TRAJ21)
CVVIGDNFNKFYF

SEQ ID NO: 462472 - protein, 14 aa, Homo sapiens
  CDR3 for beta chain variable domain of TCR clone 231236 (TRBV7-3, TRBJ2-2)
CARSLYPLTGELFF

SEQ ID NO: 462473 - protein, 11 aa, Homo sapiens
  CDR3 for alpha chain variable domain of TCR clone 231237 (TRAV3, TRAJ21)
CAFGNFNKLYF

SEQ ID NO: 462474 - protein, 17 aa, Homo sapiens
  CDR3 for beta chain variable domain of TCR clone 231237 (TRBV24-1, TRBJ2-1)
CATSDVSTSGTYNEQFF

SEQ ID NO: 462475 - protein, 12 aa, Homo sapiens
  CDR3 for alpha chain variable domain of TCR clone 231238 (TRAV17, TRAJ12)
CAGGDSSYKLIF

SEQ ID NO: 462476 - protein, 12 aa, Homo sapiens
  CDR3 for beta chain variable domain of TCR clone 231238 (TRBV29-1, TRBJ1-1)
CSESDGNTEAFY

SEQ ID NO: 462477 - protein, 14 aa, Homo sapiens
  CDR3 for alpha chain variable domain of TCR clone 231239 (TRAV12-3, TRAJ5)
CAMTWDTGRRALTC

SEQ ID NO: 462478 - protein, 14 aa, Homo sapiens
  CDR3 for beta chain variable domain of TCR clone 231239 (TRBV10-2, TRBJ1-5)
CASSSTGRNQPQHF

SEQ ID NO: 462479 - protein, 14 aa, Homo sapiens
  CDR3 for alpha chain variable domain of TCR clone 231240 (TRAV35, TRAJ33)
CAGSSQDSNYQLIW

SEQ ID NO: 462480 - protein, 15 aa, Homo sapiens
  CDR3 for beta chain variable domain of TCR clone 231240 (TRBV7-2, TRBJ2-3)
CASSSTGLETDTQYF

SEQ ID NO: 462481 - protein, 15 aa, Homo sapiens
  CDR3 for alpha chain variable domain of TCR clone 231241 (TRAV13-1, TRAJ52)
CAASSPSTSCGKLTF

SEQ ID NO: 462482 - protein, 13 aa, Homo sapiens
  CDR3 for beta chain variable domain of TCR clone 231241 (TRBV27, TRBJ2-5)
CASSLSSLETQYF

SEQ ID NO: 462483 - protein, 15 aa, Homo sapiens
  CDR3 for alpha chain variable domain of TCR clone 231242 (TRAV38-1, TRAJ28)
CARRISGAGSYQLTF

SEQ ID NO: 462484 - protein, 14 aa, Homo sapiens
  CDR3 for beta chain variable domain of TCR clone 231242 (TRBV12-5, TRBJ2-5)
CASGSRTHQETQYF

SEQ ID NO: 462485 - protein, 17 aa, Homo sapiens
  CDR3 for alpha chain variable domain of TCR clone 231243 (TRAV12-3, TRAJ6)
CAMSARGGAGGNYIPTF

SEQ ID NO: 462486 - protein, 12 aa, Homo sapiens
  CDR3 for beta chain variable domain of TCR clone 231243 (TRBV12-4, TRBJ2-3)
CASSTLPDTQYF

SEQ ID NO: 462487 - protein, 15 aa, Homo sapiens
  CDR3 for alpha chain variable domain of TCR clone 231244 (TRAV8-3, TRAJ27)
CAVGPSKTNAGKSTF

SEQ ID NO: 462488 - protein, 15 aa, Homo sapiens
  CDR3 for beta chain variable domain of TCR clone 231244 (TRBV6-5, TRBJ1-6)
CASSYGGYYNSPLHF

SEQ ID NO: 462489 - protein, 14 aa, Homo sapiens
  CDR3 for alpha chain variable domain of TCR clone 231245 (TRAV1-2, TRAJ8)
CAVREDTGFQKLVF

SEQ ID NO: 462490 - protein, 16 aa, Homo sapiens
  CDR3 for beta chain variable domain of TCR clone 231245 (TRBV7-3, TRBJ2-2)
CASSLKRGTVSGELFF

SEQ ID NO: 462491 - protein, 13 aa, Homo sapiens
  CDR3 for alpha chain variable domain of TCR clone 231246 (TRAV12-3, TRAJ13)
CAMSSGGYQKVTF

SEQ ID NO: 462492 - protein, 14 aa, Homo sapiens
  CDR3 for beta chain variable domain of TCR clone 231246 (TRBV6-1, TRBJ1-3)
CASVQGGGGNTMYF

SEQ ID NO: 462493 - protein, 12 aa, Homo sapiens
  CDR3 for alpha chain variable domain of TCR clone 231247 (TRAV3, TRAJ20)
CAVRDPDYKLSF

SEQ ID NO: 462494 - protein, 14 aa, Homo sapiens
  CDR3 for beta chain variable domain of TCR clone 231247 (TRBV7-8, TRBJ2-5)
CASNATGGQETQYF

SEQ ID NO: 462495 - protein, 15 aa, Homo sapiens
  CDR3 for alpha chain variable domain of TCR clone 231248 (TRAV26-2, TRAJ39)
CILRDVHNAGNTLTF

SEQ ID NO: 462496 - protein, 11 aa, Homo sapiens
  CDR3 for beta chain variable domain of TCR clone 231248 (TRBV11-2, TRBJ2-1)
PPGVEYNEQFF

SEQ ID NO: 462497 - protein, 13 aa, Homo sapiens
  CDR3 for alpha chain variable domain of TCR clone 231249 (TRAV12-2, TRAJ23)
CAVIYNQGGKLIF

SEQ ID NO: 462498 - protein, 14 aa, Homo sapiens
  CDR3 for beta chain variable domain of TCR clone 231249 (TRBV11-2, TRBJ1-2)
CASSLYRGNYGYTF

SEQ ID NO: 462499 - protein, 13 aa, Homo sapiens
  CDR3 for alpha chain variable domain of TCR clone 231250 (TRAV20, TRAJ31)
CAVQAWNNARLMF

SEQ ID NO: 462500 - protein, 16 aa, Homo sapiens
  CDR3 for beta chain variable domain of TCR clone 231250 (TRBV6-6, TRBJ2-1)
CASSWGGQGPYNEEFF

SEQ ID NO: 462501 - protein, 14 aa, Homo sapiens
  CDR3 for alpha chain variable domain of TCR clone 231251 (TRAV13-1, TRAJ44)
CAAKATGTASKLTF

SEQ ID NO: 462502 - protein, 15 aa, Homo sapiens
  CDR3 for beta chain variable domain of TCR clone 231251 (TRBV11-2, TRBJ2-1)
CASSKNRGLIYEQFF

SEQ ID NO: 462503 - protein, 18 aa, Homo sapiens
  CDR3 for alpha chain variable domain of TCR clone 231252 (TRAV8-4, TRAJ52)
CAVTRANAGGTSYGKLTF

SEQ ID NO: 462504 - protein, 13 aa, Homo sapiens
  CDR3 for beta chain variable domain of TCR clone 231252 (TRBV4-1, TRBJ2-2)
CASSQENTGELFF

SEQ ID NO: 462505 - protein, 12 aa, Homo sapiens
  CDR3 for alpha chain variable domain of TCR clone 231253 (TRAV36/DV7, TRAJ50)
CAVEPENLLRQG

SEQ ID NO: 462506 - protein, 16 aa, Homo sapiens
  CDR3 for beta chain variable domain of TCR clone 231253 (TRBV5-4, TRBJ2-3)
CASQQPGAGGADTQYF

SEQ ID NO: 462507 - protein, 12 aa, Homo sapiens
  CDR3 for alpha chain variable domain of TCR clone 231254 (TRAV21, TRAJ49)
CAVTNTGNQFYF

SEQ ID NO: 462508 - protein, 17 aa, Homo sapiens
  CDR3 for beta chain variable domain of TCR clone 231254 (TRBV13, TRBJ2-3)
CASSLPRVAGGGEYAVF

SEQ ID NO: 462509 - protein, 15 aa, Homo sapiens
  CDR3 for alpha chain variable domain of TCR clone 231255 (TRAV8-3, TRAJ15)
CAVGAPNQAGTALIF

SEQ ID NO: 462510 - protein, 14 aa, Homo sapiens
  CDR3 for beta chain variable domain of TCR clone 231255 (TRBV7-3, TRBJ1-1)
CASSLKGGNTEAFF

SEQ ID NO: 462511 - protein, 12 aa, Homo sapiens
  CDR3 for alpha chain variable domain of TCR clone 231256 (TRAV12-2, TRAJ43)
CAVNANNNDMRF

SEQ ID NO: 462512 - protein, 14 aa, Homo sapiens
  CDR3 for beta chain variable domain of TCR clone 231256 (TRBV12-5, TRBJ2-5)
CASGSRTHQETQYF

SEQ ID NO: 462513 - protein, 16 aa, Homo sapiens
  CDR3 for alpha chain variable domain of TCR clone 231257 (TRAV12-3, TRAJ53)
CAMSPGSGGSNYTLTF

SEQ ID NO: 462514 - protein, 14 aa, Homo sapiens
  CDR3 for beta chain variable domain of TCR clone 231257 (TRBV7-2, TRBJ1-1)
CASSFLTGTTEAFF

SEQ ID NO: 462515 - protein, 14 aa, Homo sapiens
  CDR3 for alpha chain variable domain of TCR clone 231258 (TRAV8-2, TRAJ23)
CAVSDDNQGGKLIF

SEQ ID NO: 462516 - protein, 16 aa, Homo sapiens
  CDR3 for beta chain variable domain of TCR clone 231258 (TRBV4-2, TRBJ2-5)
CASSQELVGSQETQYF

SEQ ID NO: 462517 - protein, 10 aa, Homo sapiens
  CDR3 for alpha chain variable domain of TCR clone 231259 (TRAV12-3, TRAJ34)
CAMSAAKLIF

SEQ ID NO: 462518 - protein, 15 aa, Homo sapiens
  CDR3 for beta chain variable domain of TCR clone 231259 (TRBV20-1, TRBJ2-3)
CSARRGEAITDTQYF

SEQ ID NO: 462519 - protein, 16 aa, Homo sapiens
  CDR3 for alpha chain variable domain of TCR clone 231260 (TRAV30, TRAJ24)
CGTEIVDADSWGKSQL

SEQ ID NO: 462520 - protein, 14 aa, Homo sapiens
  CDR3 for beta chain variable domain of TCR clone 231260 (TRBV7-2, TRBJ2-7)
CASSPKTSFYEQYF

SEQ ID NO: 462521 - protein, 15 aa, Homo sapiens
  CDR3 for alpha chain variable domain of TCR clone 231261 (TRAV25, TRAJ52)
CAGRPGGTSYGKLTF

SEQ ID NO: 462522 - protein, 17 aa, Homo sapiens
  CDR3 for beta chain variable domain of TCR clone 231261 (TRBV7-8, TRBJ2-6)
CASSAGTGGAGDNDLTF

SEQ ID NO: 462523 - protein, 17 aa, Homo sapiens
  CDR3 for alpha chain variable domain of TCR clone 231262 (TRAV17, TRAJ7)
CATLVRLAFGKGNQVAV

SEQ ID NO: 462524 - protein, 13 aa, Homo sapiens
  CDR3 for beta chain variable domain of TCR clone 231262 (TRBV12-4, TRBJ2-7)
CASSLERVREQYF

SEQ ID NO: 462525 - protein, 14 aa, Homo sapiens
  CDR3 for alpha chain variable domain of TCR clone 231263 (TRAV16, TRAJ8)
CALLLNTGFQKLVF

SEQ ID NO: 462526 - protein, 15 aa, Homo sapiens
  CDR3 for beta chain variable domain of TCR clone 231263 (TRBV7-7, TRBJ2-2)
CATSKLAKNAGELFF

SEQ ID NO: 462527 - protein, 11 aa, Homo sapiens
  CDR3 for alpha chain variable domain of TCR clone 231264 (TRAV12-2, TRAJ29)
CAVTFRSPLVF

SEQ ID NO: 462528 - protein, 14 aa, Homo sapiens
  CDR3 for beta chain variable domain of TCR clone 231264 (TRBV9, TRBJ1-2)
CASSVSTRSYGYTF

SEQ ID NO: 462529 - protein, 16 aa, Homo sapiens
  CDR3 for alpha chain variable domain of TCR clone 231265 (TRAV12-2, TRAJ18)
CAVTTDRGSTLGRLYF

SEQ ID NO: 462530 - protein, 15 aa, Homo sapiens
  CDR3 for beta chain variable domain of TCR clone 231265 (TRBV6-1, TRBJ2-3)
CASSERGGITDTQYF

SEQ ID NO: 462531 - protein, 14 aa, Homo sapiens
  CDR3 for alpha chain variable domain of TCR clone 231266 (TRAV26-1, TRAJ3)
CIVRVGSSASKIIF

SEQ ID NO: 462532 - protein, 14 aa, Homo sapiens
  CDR3 for beta chain variable domain of TCR clone 231266 (TRBV12-5, TRBJ2-5)
CASGSRTHQETQYF

SEQ ID NO: 462533 - protein, 14 aa, Homo sapiens
  CDR3 for alpha chain variable domain of TCR clone 231267 (TRAV2, TRAJ37)
CAVDFTSNTGKIIF

SEQ ID NO: 462534 - protein, 13 aa, Homo sapiens
  CDR3 for beta chain variable domain of TCR clone 231267 (TRBV4-1, TRBJ2-2)
CASSQENTGELFF

SEQ ID NO: 462535 - protein, 16 aa, Homo sapiens
  CDR3 for alpha chain variable domain of TCR clone 231268 (TRAV16, TRAJ4)
WALSRMFSGGYNKLIF

SEQ ID NO: 462536 - protein, 16 aa, Homo sapiens
  CDR3 for beta chain variable domain of TCR clone 231268 (TRBV24-1, TRBJ2-3)
CATSDPGTGATDTQYF

SEQ ID NO: 462537 - protein, 15 aa, Homo sapiens
  CDR3 for alpha chain variable domain of TCR clone 231269 (TRAV8-3, TRAJ45)
CASSYSGGGADGLTF

SEQ ID NO: 462538 - protein, 11 aa, Homo sapiens
  CDR3 for beta chain variable domain of TCR clone 231269 (TRBV10-1, TRBJ2-3)
CASSDSDTQYF

SEQ ID NO: 462539 - protein, 15 aa, Homo sapiens
  CDR3 for alpha chain variable domain of TCR clone 231270 (TRAV8-4, TRAJ10)
CAVSDGPGGGNKLTF

SEQ ID NO: 462540 - protein, 13 aa, Homo sapiens
  CDR3 for beta chain variable domain of TCR clone 231270 (TRBV28, TRBJ1-3)
CASSFLGSGTIYC

SEQ ID NO: 462541 - protein, 15 aa, Homo sapiens
  CDR3 for alpha chain variable domain of TCR clone 231271 (TRAV8-2, TRAJ16)
CVVRDGFSDGQKLLF

SEQ ID NO: 462542 - protein, 15 aa, Homo sapiens
  CDR3 for beta chain variable domain of TCR clone 231271 (TRBV5-1, TRBJ2-4)
CASSLGGGGSYIQYF

SEQ ID NO: 462543 - protein, 13 aa, Homo sapiens
  CDR3 for alpha chain variable domain of TCR clone 231272 (TRAV12-3, TRAJ40)
CAMSDSGTYKYIF

SEQ ID NO: 462544 - protein, 13 aa, Homo sapiens
  CDR3 for beta chain variable domain of TCR clone 231272 (TRBV7-2, TRBJ1-5)
CQQHTGGRSAQHF

SEQ ID NO: 462545 - protein, 14 aa, Homo sapiens
  CDR3 for alpha chain variable domain of TCR clone 231273 (TRAV13-1, TRAJ10)
CAAKEPGGGNKLTF

SEQ ID NO: 462546 - protein, 14 aa, Homo sapiens
  CDR3 for beta chain variable domain of TCR clone 231273 (TRBV7-2, TRBJ2-7)
CASRSQGAAYEQYF

SEQ ID NO: 462547 - protein, 14 aa, Homo sapiens
  CDR3 for alpha chain variable domain of TCR clone 231274 (TRAV8-2, TRAJ45)
CVVSAGGGAYGLTF

SEQ ID NO: 462548 - protein, 12 aa, Homo sapiens
  CDR3 for beta chain variable domain of TCR clone 231274 (TRBV12-4, TRBJ2-1)
CASSLVRVEQFF

SEQ ID NO: 462549 - protein, 16 aa, Homo sapiens
  CDR3 for alpha chain variable domain of TCR clone 231275 (TRAV5, TRAJ28)
CAPGPGSGAGSYQLTF

SEQ ID NO: 462550 - protein, 15 aa, Homo sapiens
  CDR3 for beta chain variable domain of TCR clone 231275 (TRBV29-1, TRBJ2-7)
CSVEFFDRGSYEQYF

SEQ ID NO: 462551 - protein, 17 aa, Homo sapiens
  CDR3 for alpha chain variable domain of TCR clone 231276 (TRAV26-1, TRAJ28)
CIVRARYSGAGSYQLTF

SEQ ID NO: 462552 - protein, 10 aa, Homo sapiens
  CDR3 for beta chain variable domain of TCR clone 231276 (TRBV12-4, TRBJ2-7)
CASMTFEQYF

SEQ ID NO: 462553 - protein, 12 aa, Homo sapiens
  CDR3 for alpha chain variable domain of TCR clone 231277 (TRAV12-3, TRAJ17)
CAMTLTGNKLTF

SEQ ID NO: 462554 - protein, 15 aa, Homo sapiens
  CDR3 for beta chain variable domain of TCR clone 231277 (TRBV20-1, TRBJ2-5)
YSARDRVSGMDEQYF

SEQ ID NO: 462555 - protein, 12 aa, Homo sapiens
  CDR3 for alpha chain variable domain of TCR clone 231278 (TRAV2, TRAJ33)
CAVPDSNYQLIW

SEQ ID NO: 462556 - protein, 15 aa, Homo sapiens
  CDR3 for beta chain variable domain of TCR clone 231278 (TRBV15, TRBJ1-5)
CATSGDPVSNQPQHF

SEQ ID NO: 462557 - protein, 14 aa, Homo sapiens
  CDR3 for alpha chain variable domain of TCR clone 231279 (TRAV29/DV5, TRAJ6)
CAARVSGGSYIPTF

SEQ ID NO: 462558 - protein, 17 aa, Homo sapiens
  CDR3 for beta chain variable domain of TCR clone 231279 (TRBV6-1, TRBJ1-5)
CASSEAEFIRARQPQHF

SEQ ID NO: 462559 - protein, 15 aa, Homo sapiens
  CDR3 for alpha chain variable domain of TCR clone 231280 (TRAV17, TRAJ35)
RATAFVIGFGNVLHC

SEQ ID NO: 462560 - protein, 16 aa, Homo sapiens
  CDR3 for beta chain variable domain of TCR clone 231280 (TRBV12-4, TRBJ2-1)
CASSAVGQGNGDEQFF

SEQ ID NO: 462561 - protein, 13 aa, Homo sapiens
  CDR3 for alpha chain variable domain of TCR clone 231281 (TRAV13-1, TRAJ53)
CAASKGSNYKLTF

SEQ ID NO: 462562 - protein, 16 aa, Homo sapiens
  CDR3 for beta chain variable domain of TCR clone 231281 (TRBV6-4, TRBJ1-2)
CASSEAVGDPNYGYTF

SEQ ID NO: 462563 - protein, 14 aa, Homo sapiens
  CDR3 for alpha chain variable domain of TCR clone 231282 (TRAV1-2, TRAJ6)
CAVSLPGGSYITTF

SEQ ID NO: 462564 - protein, 15 aa, Homo sapiens
  CDR3 for beta chain variable domain of TCR clone 231282 (TRBV28, TRBJ2-7)
CASSPGGRGFYEQYF

SEQ ID NO: 462565 - protein, 13 aa, Homo sapiens
  CDR3 for alpha chain variable domain of TCR clone 231283 (TRAV13-1, TRAJ6)
CAASSGGIYIPTF

SEQ ID NO: 462566 - protein, 14 aa, Homo sapiens
  CDR3 for beta chain variable domain of TCR clone 231283 (TRBV20-1, TRBJ2-4)
CSAVAGGPGNIQYF

SEQ ID NO: 462567 - protein, 19 aa, Homo sapiens
  CDR3 for alpha chain variable domain of TCR clone 231284 (TRAV25, TRAJ20)
TATQTTDVGILPHDYKLSF

SEQ ID NO: 462568 - protein, 16 aa, Homo sapiens
  CDR3 for beta chain variable domain of TCR clone 231284 (TRBV11-2, TRBJ1-1)
CASSLRQGGEHSKAFF

SEQ ID NO: 462569 - protein, 14 aa, Homo sapiens
  CDR3 for alpha chain variable domain of TCR clone 231285 (TRAV30, TRAJ26)
CGTEIVSYGQNFVF

SEQ ID NO: 462570 - protein, 15 aa, Homo sapiens
  CDR3 for beta chain variable domain of TCR clone 231285 (TRBV12-4, TRBJ2-5)
CASSPPTGLQETQYF

SEQ ID NO: 462571 - protein, 14 aa, Homo sapiens
  CDR3 for alpha chain variable domain of TCR clone 231286 (TRAV8-2, TRAJ4)
CVVSPSVGDNKLIF

SEQ ID NO: 462572 - protein, 16 aa, Homo sapiens
  CDR3 for beta chain variable domain of TCR clone 231286 (TRBV7-3, TRBJ2-1)
CASSLEGYRSYNEQFF

SEQ ID NO: 462573 - protein, 11 aa, Homo sapiens
  CDR3 for alpha chain variable domain of TCR clone 231287 (TRAV1-1, TRAJ16)
CAAGDGQKLLS

SEQ ID NO: 462574 - protein, 16 aa, Homo sapiens
  CDR3 for beta chain variable domain of TCR clone 231287 (TRBV7-3, TRBJ2-2)
CASSLKRGTLSGELFF

SEQ ID NO: 462575 - protein, 10 aa, Homo sapiens
  CDR3 for alpha chain variable domain of TCR clone 231288 (TRAV26-1, TRAJ22)
CIVSLNFFWF

SEQ ID NO: 462576 - protein, 17 aa, Homo sapiens
  CDR3 for beta chain variable domain of TCR clone 231288 (TRBV4-2, TRBJ2-1)
CASSQVSGLAMNNEQFF

SEQ ID NO: 462577 - protein, 12 aa, Homo sapiens
  CDR3 for alpha chain variable domain of TCR clone 231289 (TRAV13-2, TRAJ48)
AEMDFGNEKLTF

SEQ ID NO: 462578 - protein, 15 aa, Homo sapiens
  CDR3 for beta chain variable domain of TCR clone 231289 (TRBV7-9, TRBJ1-6)
CASSSPGRGNSPLHF

SEQ ID NO: 462579 - protein, 14 aa, Homo sapiens
  CDR3 for alpha chain variable domain of TCR clone 231290 (TRAV6, TRAJ37)
CSLGSQGNTGKLIF

SEQ ID NO: 462580 - protein, 15 aa, Homo sapiens
  CDR3 for beta chain variable domain of TCR clone 231290 (TRBV2, TRBJ2-1)
CASSEEREGDNEQFF

SEQ ID NO: 462581 - protein, 11 aa, Homo sapiens
  CDR3 for alpha chain variable domain of TCR clone 231291 (TRAV17, TRAJ49)
CATDAGNQFYF

SEQ ID NO: 462582 - protein, 12 aa, Homo sapiens
  CDR3 for beta chain variable domain of TCR clone 231291 (TRBV11-2, TRBJ2-7)
CASSPPADEQYF

SEQ ID NO: 462583 - protein, 16 aa, Homo sapiens
  CDR3 for alpha chain variable domain of TCR clone 231292 (TRAV17, TRAJ28)
CATASVSGAGSYQLTF

SEQ ID NO: 462584 - protein, 15 aa, Homo sapiens
  CDR3 for beta chain variable domain of TCR clone 231292 (TRBV7-3, TRBJ2-1)
CASSPTGGGEVEQFF

SEQ ID NO: 462585 - protein, 14 aa, Homo sapiens
  CDR3 for alpha chain variable domain of TCR clone 231293 (TRAV36/DV7, TRAJ53)
CAVVDGGSNYKLTF

SEQ ID NO: 462586 - protein, 18 aa, Homo sapiens
  CDR3 for beta chain variable domain of TCR clone 231293 (TRBV18, TRBJ1-3)
CASSPRGGAGPSGNTIYF

SEQ ID NO: 462587 - protein, 13 aa, Homo sapiens
  CDR3 for alpha chain variable domain of TCR clone 231294 (TRAV21, TRAJ27)
CAARPGNTGKSTF

SEQ ID NO: 462588 - protein, 14 aa, Homo sapiens
  CDR3 for beta chain variable domain of TCR clone 231294 (TRBV7-6, TRBJ2-3)
CAGSLGTVTDTQYF

SEQ ID NO: 462589 - protein, 14 aa, Homo sapiens
  CDR3 for alpha chain variable domain of TCR clone 231295 (TRAV23/DV6, TRAJ17)
CGASVQAAGNKLTF

SEQ ID NO: 462590 - protein, 18 aa, Homo sapiens
  CDR3 for beta chain variable domain of TCR clone 231295 (TRBV20-1, TRBJ2-7)
CSAGLPPRSGGSPYEQYF

SEQ ID NO: 462591 - protein, 11 aa, Homo sapiens
  CDR3 for alpha chain variable domain of TCR clone 231296 (TRAV12-2, TRAJ39)
CAVNNMLTFGG

SEQ ID NO: 462592 - protein, 16 aa, Homo sapiens
  CDR3 for beta chain variable domain of TCR clone 231296 (TRBV9, TRBJ2-7)
CASSAGLDRSPYEQYF

SEQ ID NO: 462593 - protein, 12 aa, Homo sapiens
  CDR3 for alpha chain variable domain of TCR clone 231297 (TRAV13-1, TRAJ21)
CAAKEGFNKLYF

SEQ ID NO: 462594 - protein, 14 aa, Homo sapiens
  CDR3 for beta chain variable domain of TCR clone 231297 (TRBV5-4, TRBJ1-1)
CASSLDSRGDEAFF

SEQ ID NO: 462595 - protein, 11 aa, Homo sapiens
  CDR3 for alpha chain variable domain of TCR clone 231298 (TRAV35, TRAJ34)
CWARNTDKLIF

SEQ ID NO: 462596 - protein, 13 aa, Homo sapiens
  CDR3 for beta chain variable domain of TCR clone 231298 (TRBV19, TRBJ2-7)
CVSSIDRTYEQYF

SEQ ID NO: 462597 - protein, 15 aa, Homo sapiens
  CDR3 for alpha chain variable domain of TCR clone 231299 (TRAV8-3, TRAJ7)
CAVGSISYGNNRLAF

SEQ ID NO: 462598 - protein, 15 aa, Homo sapiens
  CDR3 for beta chain variable domain of TCR clone 231299 (TRBV4-2, TRBJ1-1)
CASSQEDLPSTEAFF

SEQ ID NO: 462599 - protein, 13 aa, Homo sapiens
  CDR3 for alpha chain variable domain of TCR clone 231300 (TRAV2, TRAJ15)
CAVASQAGTALIF

SEQ ID NO: 462600 - protein, 16 aa, Homo sapiens
  CDR3 for beta chain variable domain of TCR clone 231300 (TRBV6-1, TRBJ2-5)
CASSETLDRGAETQYF

SEQ ID NO: 462601 - protein, 10 aa, Homo sapiens
  CDR3 for alpha chain variable domain of TCR clone 231301 (TRAV16, TRAJ22)
SAMYLRQLTF

SEQ ID NO: 462602 - protein, 16 aa, Homo sapiens
  CDR3 for beta chain variable domain of TCR clone 231301 (TRBV12-5, TRBJ2-5)
CASGPRTSGNQETQYF

SEQ ID NO: 462603 - protein, 14 aa, Homo sapiens
  CDR3 for alpha chain variable domain of TCR clone 231302 (TRAV12-2, TRAJ13)
CAVKKTGGYQKVTF

SEQ ID NO: 462604 - protein, 16 aa, Homo sapiens
  CDR3 for beta chain variable domain of TCR clone 231302 (TRBV6-1, TRBJ2-7)
CASSAGPSGASYEQYF

SEQ ID NO: 462605 - protein, 15 aa, Homo sapiens
  CDR3 for alpha chain variable domain of TCR clone 231303 (TRAV8-6, TRAJ45)
CAVSEQGGGAGGLTF

SEQ ID NO: 462606 - protein, 14 aa, Homo sapiens
  CDR3 for beta chain variable domain of TCR clone 231303 (TRBV28, TRBJ2-5)
CASRGSSFWETQYF

SEQ ID NO: 462607 - protein, 19 aa, Homo sapiens
  CDR3 for alpha chain variable domain of TCR clone 231304 (TRAV3, TRAJ6)
CAVRDRNPSRSGGSYIPTF

SEQ ID NO: 462608 - protein, 14 aa, Homo sapiens
  CDR3 for beta chain variable domain of TCR clone 231304 (TRBV12-4, TRBJ1-1)
CASSLGTGGTEAFF

SEQ ID NO: 462609 - protein, 17 aa, Homo sapiens
  CDR3 for alpha chain variable domain of TCR clone 231305 (TRAV13-1, TRAJ53)
CAASWKSSGGSNYKLTF

SEQ ID NO: 462610 - protein, 19 aa, Homo sapiens
  CDR3 for beta chain variable domain of TCR clone 231305 (TRBV7-9, TRBJ2-1)
CASGHNRGALLRAYNEQFF

SEQ ID NO: 462611 - protein, 13 aa, Homo sapiens
  CDR3 for alpha chain variable domain of TCR clone 231306 (TRAV8-3, TRAJ21)
CAVGLDNFNKFYF

SEQ ID NO: 462612 - protein, 14 aa, Homo sapiens
  CDR3 for beta chain variable domain of TCR clone 231306 (TRBV19, TRBJ1-1)
CASSIEVSGGSAFF

SEQ ID NO: 462613 - protein, 11 aa, Homo sapiens
  CDR3 for alpha chain variable domain of TCR clone 231307 (TRAV12-2, TRAJ23)
CARGRRGKLIF

SEQ ID NO: 462614 - protein, 14 aa, Homo sapiens
  CDR3 for beta chain variable domain of TCR clone 231307 (TRBV28, TRBJ2-5)
CASSLGDRAETQYF

SEQ ID NO: 462615 - protein, 12 aa, Homo sapiens
  CDR3 for alpha chain variable domain of TCR clone 231308 (TRAV21, TRAJ13)
PGPSGGYQKVTF

SEQ ID NO: 462616 - protein, 12 aa, Homo sapiens
  CDR3 for beta chain variable domain of TCR clone 231308 (TRBV7-8, TRBJ2-7)
CASSLGDREQYF

SEQ ID NO: 462617 - protein, 16 aa, Homo sapiens
  CDR3 for alpha chain variable domain of TCR clone 231309 (TRAV27, TRAJ53)
CAAPEGSGGSNYKLTF

SEQ ID NO: 462618 - protein, 15 aa, Homo sapiens
  CDR3 for beta chain variable domain of TCR clone 231309 (TRBV20-1, TRBJ1-1)
CSPSRGVTGNTEAFF

SEQ ID NO: 462619 - protein, 13 aa, Homo sapiens
  CDR3 for alpha chain variable domain of TCR clone 231310 (TRAV23/DV6, TRAJ22)
CAPYSGSARQLTF

SEQ ID NO: 462620 - protein, 13 aa, Homo sapiens
  CDR3 for beta chain variable domain of TCR clone 231310 (TRBV7-9, TRBJ1-2)
CASSLKQNYGYTF

SEQ ID NO: 462621 - protein, 14 aa, Homo sapiens
  CDR3 for alpha chain variable domain of TCR clone 231311 (TRAV1-2, TRAJ16)
CAVNRFSDGQKLLF

SEQ ID NO: 462622 - protein, 19 aa, Homo sapiens
  CDR3 for beta chain variable domain of TCR clone 231311 (TRBV12-5, TRBJ2-2)
CASGLGQGTMFADTGELFF

SEQ ID NO: 462623 - protein, 14 aa, Homo sapiens
  CDR3 for alpha chain variable domain of TCR clone 231312 (TRAV1-2, TRAJ16)
CAVRSASDGQKLLC

SEQ ID NO: 462624 - protein, 17 aa, Homo sapiens
  CDR3 for beta chain variable domain of TCR clone 231312 (TRBV7-3, TRBJ2-3)
CASSLMKRMRGADTQYF

SEQ ID NO: 462625 - protein, 16 aa, Homo sapiens
  CDR3 for alpha chain variable domain of TCR clone 231313 (TRAV26-1, )
CIDIQNPDPAVYQLTD

SEQ ID NO: 462626 - protein, 19 aa, Homo sapiens
  CDR3 for beta chain variable domain of TCR clone 231313 (TRBV19, TRBJ2-5)
CASSIGQVTDFFLGETQYF

SEQ ID NO: 462627 - protein, 14 aa, Homo sapiens
  CDR3 for alpha chain variable domain of TCR clone 231314 (TRAV8-3, TRAJ4)
CAVGAAGGYNKLIF

SEQ ID NO: 462628 - protein, 17 aa, Homo sapiens
  CDR3 for beta chain variable domain of TCR clone 231314 (TRBV7-8, TRBJ1-2)
CASSLRPLQGHLYGYTF

SEQ ID NO: 462629 - protein, 16 aa, Homo sapiens
  CDR3 for alpha chain variable domain of TCR clone 231315 (TRAV23/DV6, TRAJ22)
CAAAAISSGSARQLTF

SEQ ID NO: 462630 - protein, 12 aa, Homo sapiens
  CDR3 for beta chain variable domain of TCR clone 231315 (TRBV11-2, TRBJ2-1)
CASSPGNNEQFF

SEQ ID NO: 462631 - protein, 15 aa, Homo sapiens
  CDR3 for alpha chain variable domain of TCR clone 231316 (TRAV35, TRAJ58)
CAGRRQETIGSRLTF

SEQ ID NO: 462632 - protein, 11 aa, Homo sapiens
  CDR3 for beta chain variable domain of TCR clone 231316 (TRBV11-2, TRBJ1-1)
CASSINTEAFF

SEQ ID NO: 462633 - protein, 23 aa, Homo sapiens
  CDR3 for alpha chain variable domain of TCR clone 231317 (TRAV27, TRAJ44)
TAAQPGDTGLSIINTGTASKLTF

SEQ ID NO: 462634 - protein, 15 aa, Homo sapiens
  CDR3 for beta chain variable domain of TCR clone 231317 (TRBV5-1, TRBJ1-4)
FAPAAWKDGNEKLFF

SEQ ID NO: 462635 - protein, 23 aa, Homo sapiens
  CDR3 for alpha chain variable domain of TCR clone 231318 (TRAV26-1, TRAJ38)
CIADNAGNNHIKNPDPAVYQLRD

SEQ ID NO: 462636 - protein, 16 aa, Homo sapiens
  CDR3 for beta chain variable domain of TCR clone 231318 (TRBV19, TRBJ2-1)
CASSKAGPSSYNEQFF

SEQ ID NO: 462637 - protein, 16 aa, Homo sapiens
  CDR3 for alpha chain variable domain of TCR clone 231319 (TRAV26-2, TRAJ28)
CILRPYSGAGSYQLTF

SEQ ID NO: 462638 - protein, 17 aa, Homo sapiens
  CDR3 for beta chain variable domain of TCR clone 231319 (TRBV27, TRBJ2-5)
CASRLRPGQGVQETQDF

SEQ ID NO: 462639 - protein, 14 aa, Homo sapiens
  CDR3 for alpha chain variable domain of TCR clone 231320 (TRAV13-1, TRAJ44)
CGAKATGTASKLTF

SEQ ID NO: 462640 - protein, 17 aa, Homo sapiens
  CDR3 for beta chain variable domain of TCR clone 231320 (TRBV7-3, TRBJ2-3)
CASSLMKRMRGADTQYF

SEQ ID NO: 462641 - protein, 12 aa, Homo sapiens
  CDR3 for alpha chain variable domain of TCR clone 231321 (TRAV21, TRAJ8)
CALNTGFQKLVV

SEQ ID NO: 462642 - protein, 15 aa, Homo sapiens
  CDR3 for beta chain variable domain of TCR clone 231321 (TRBV7-2, TRBJ2-5)
CASSLRGASGETQYF

SEQ ID NO: 462643 - protein, 13 aa, Homo sapiens
  CDR3 for alpha chain variable domain of TCR clone 231322 (TRAV12-2, TRAJ52)
CAVGGTSYGKLTF

SEQ ID NO: 462644 - protein, 14 aa, Homo sapiens
  CDR3 for beta chain variable domain of TCR clone 231322 (TRBV19, TRBJ2-1)
CTSPTFVLSGEQFF

SEQ ID NO: 462645 - protein, 15 aa, Homo sapiens
  CDR3 for alpha chain variable domain of TCR clone 231323 (TRAV38-2/DV8, TRAJ57)
CAYGRVFGKGTKLTV

SEQ ID NO: 462646 - protein, 11 aa, Homo sapiens
  CDR3 for beta chain variable domain of TCR clone 231323 (TRBV29-1, TRBJ2-5)
CSEDRTGTQYF

SEQ ID NO: 462647 - protein, 15 aa, Homo sapiens
  CDR3 for alpha chain variable domain of TCR clone 231324 (TRAV17, TRAJ57)
CATGPSQGGSEKLVF

SEQ ID NO: 462648 - protein, 15 aa, Homo sapiens
  CDR3 for beta chain variable domain of TCR clone 231324 (TRBV6-1, TRBJ2-1)
CASSEAAYSYNEQFF

SEQ ID NO: 462649 - protein, 13 aa, Homo sapiens
  CDR3 for alpha chain variable domain of TCR clone 231325 (TRAV2, TRAJ21)
CAVEDLNFNKFHF

SEQ ID NO: 462650 - protein, 15 aa, Homo sapiens
  CDR3 for beta chain variable domain of TCR clone 231325 (TRBV28, TRBJ2-5)
CASSPGQGSIETQYF

SEQ ID NO: 462651 - protein, 14 aa, Homo sapiens
  CDR3 for alpha chain variable domain of TCR clone 231326 (TRAV17, TRAJ56)
CATEDTGANSKLTF

SEQ ID NO: 462652 - protein, 16 aa, Homo sapiens
  CDR3 for beta chain variable domain of TCR clone 231326 (TRBV19, TRBJ2-1)
CASSIKLACSYNEQFF

SEQ ID NO: 462653 - protein, 11 aa, Homo sapiens
  CDR3 for alpha chain variable domain of TCR clone 231327 (TRAV12-1, TRAJ3)
CVVSSASKIIF

SEQ ID NO: 462654 - protein, 16 aa, Homo sapiens
  CDR3 for beta chain variable domain of TCR clone 231327 (TRBV20-1, TRBJ2-5)
SAGLGGLGGGGETQYF

SEQ ID NO: 462655 - protein, 15 aa, Homo sapiens
  CDR3 for alpha chain variable domain of TCR clone 231328 (TRAV9-2, TRAJ42)
CALSDPGGSQGNPIF

SEQ ID NO: 462656 - protein, 13 aa, Homo sapiens
  CDR3 for beta chain variable domain of TCR clone 231328 (TRBV6-5, TRBJ2-5)
CATAPSPQETQYF

SEQ ID NO: 462657 - protein, 12 aa, Homo sapiens
  CDR3 for alpha chain variable domain of TCR clone 231329 (TRAV12-1, TRAJ31)
CVVNRNNARLMF

SEQ ID NO: 462658 - protein, 15 aa, Homo sapiens
  CDR3 for beta chain variable domain of TCR clone 231329 (TRBV10-3, TRBJ2-3)
CAISEALASTDTQYF

SEQ ID NO: 462659 - protein, 15 aa, Homo sapiens
  CDR3 for alpha chain variable domain of TCR clone 231330 (TRAV8-3, TRAJ32)
CAVGPYGGATHKLIF

SEQ ID NO: 462660 - protein, 14 aa, Homo sapiens
  CDR3 for beta chain variable domain of TCR clone 231330 (TRBV29-1, TRBJ2-2)
CSVLAETNTGEPFF

SEQ ID NO: 462661 - protein, 12 aa, Homo sapiens
  CDR3 for alpha chain variable domain of TCR clone 231331 (TRAV35, TRAJ39)
LAPNNAGNMLTF

SEQ ID NO: 462662 - protein, 15 aa, Homo sapiens
  CDR3 for beta chain variable domain of TCR clone 231331 (TRBV6-5, TRBJ1-5)
CASSLTALGNQPQHF

SEQ ID NO: 462663 - protein, 18 aa, Homo sapiens
  CDR3 for alpha chain variable domain of TCR clone 231332 (TRAV17, TRAJ45)
CATSLDLYSGGGADGLTF

SEQ ID NO: 462664 - protein, 15 aa, Homo sapiens
  CDR3 for beta chain variable domain of TCR clone 231332 (TRBV11-2, TRBJ2-1)
CASSNNRGLIYEQFF

SEQ ID NO: 462665 - protein, 14 aa, Homo sapiens
  CDR3 for alpha chain variable domain of TCR clone 231333 (TRAV16, TRAJ33)
CALSAMDSNYQLIL

SEQ ID NO: 462666 - protein, 14 aa, Homo sapiens
  CDR3 for beta chain variable domain of TCR clone 231333 (TRBV25-1, TRBJ1-1)
CASTHLGGNTEAFF

SEQ ID NO: 462667 - protein, 13 aa, Homo sapiens
  CDR3 for alpha chain variable domain of TCR clone 231334 (TRAV1-2, TRAJ9)
CAALNTGGFKTIF

SEQ ID NO: 462668 - protein, 12 aa, Homo sapiens
  CDR3 for beta chain variable domain of TCR clone 231334 (TRBV5-7, TRBJ2-1)
CASRLDWGEQFF

SEQ ID NO: 462669 - protein, 11 aa, Homo sapiens
  CDR3 for alpha chain variable domain of TCR clone 231335 (TRAV13-1, TRAJ15)
CAATPGTALIF

SEQ ID NO: 462670 - protein, 17 aa, Homo sapiens
  CDR3 for beta chain variable domain of TCR clone 231335 (TRBV13, TRBJ2-3)
CASSLSMVAGGRNTQYF

SEQ ID NO: 462671 - protein, 17 aa, Homo sapiens
  CDR3 for alpha chain variable domain of TCR clone 231336 (TRAV3, TRAJ28)
CAVRPLYSGAGSYQLTF

SEQ ID NO: 462672 - protein, 12 aa, Homo sapiens
  CDR3 for beta chain variable domain of TCR clone 231336 (TRBV11-2, TRBJ2-2)
CASSLGGGELFF

SEQ ID NO: 462673 - protein, 14 aa, Homo sapiens
  CDR3 for alpha chain variable domain of TCR clone 231337 (TRAV2, TRAJ22)
CAVGRGGAARQLTF

SEQ ID NO: 462674 - protein, 12 aa, Homo sapiens
  CDR3 for beta chain variable domain of TCR clone 231337 (TRBV19, TRBJ2-1)
CASSMQDTEQFF

SEQ ID NO: 462675 - protein, 14 aa, Homo sapiens
  CDR3 for alpha chain variable domain of TCR clone 231338 (TRAV2, TRAJ37)
CAVDSTSNTGKLIF

SEQ ID NO: 462676 - protein, 13 aa, Homo sapiens
  CDR3 for beta chain variable domain of TCR clone 231338 (TRBV20-1, TRBJ1-1)
CSAPLGGGTEAFF

SEQ ID NO: 462677 - protein, 12 aa, Homo sapiens
  CDR3 for alpha chain variable domain of TCR clone 231339 (TRAV12-3, TRAJ17)
CTMTLTGNKLTF

SEQ ID NO: 462678 - protein, 15 aa, Homo sapiens
  CDR3 for beta chain variable domain of TCR clone 231339 (TRBV27, TRBJ2-1)
CASSNGGGSSNEQFF

SEQ ID NO: 462679 - protein, 11 aa, Homo sapiens
  CDR3 for alpha chain variable domain of TCR clone 231340 (TRAV12-3, TRAJ43)
CAMSVSNDMRF

SEQ ID NO: 462680 - protein, 14 aa, Homo sapiens
  CDR3 for beta chain variable domain of TCR clone 231340 (TRBV2, TRBJ2-3)
CASSEGQNTDTQYF

SEQ ID NO: 462681 - protein, 12 aa, Homo sapiens
  CDR3 for alpha chain variable domain of TCR clone 231341 (TRAV12-1, TRAJ40)
CVFYSGTYKYIF

SEQ ID NO: 462682 - protein, 12 aa, Homo sapiens
  CDR3 for beta chain variable domain of TCR clone 231341 (TRBV6-3, TRBJ2-7)
CASSLTPYEQYF

SEQ ID NO: 462683 - protein, 11 aa, Homo sapiens
  CDR3 for alpha chain variable domain of TCR clone 231342 (TRAV12-1, TRAJ34)
CVVNKGRELIF

SEQ ID NO: 462684 - protein, 12 aa, Homo sapiens
  CDR3 for beta chain variable domain of TCR clone 231342 (TRBV2, TRBJ2-1)
CAKREGYNEQFF

SEQ ID NO: 462685 - protein, 12 aa, Homo sapiens
  CDR3 for alpha chain variable domain of TCR clone 231343 (TRAV12-3, TRAJ3)
CAIDSSASKIIF

SEQ ID NO: 462686 - protein, 13 aa, Homo sapiens
  CDR3 for beta chain variable domain of TCR clone 231343 (TRBV9, TRBJ2-1)
CASSPSGGNEQFF

SEQ ID NO: 462687 - protein, 14 aa, Homo sapiens
  CDR3 for alpha chain variable domain of TCR clone 231344 (TRAV20, TRAJ57)
CAVQGQGGSEKLVF

SEQ ID NO: 462688 - protein, 17 aa, Homo sapiens
  CDR3 for beta chain variable domain of TCR clone 231344 (TRBV7-9, TRBJ2-1)
CASSLVASYPSYNEQFF

SEQ ID NO: 462689 - protein, 15 aa, Homo sapiens
  CDR3 for alpha chain variable domain of TCR clone 231345 (TRAV13-1, TRAJ49)
CAASTEGNTGNQFYF

SEQ ID NO: 462690 - protein, 12 aa, Homo sapiens
  CDR3 for beta chain variable domain of TCR clone 231345 (TRBV11-2, TRBJ2-2)
CASSLPTGELFF

SEQ ID NO: 462691 - protein, 11 aa, Homo sapiens
  CDR3 for alpha chain variable domain of TCR clone 231346 (TRAV1-2, TRAJ40)
CAVPGTYKYIF

SEQ ID NO: 462692 - protein, 16 aa, Homo sapiens
  CDR3 for beta chain variable domain of TCR clone 231346 (TRBV12-4, TRBJ2-5)
CASSFFVRGRQETQYV

SEQ ID NO: 462693 - protein, 15 aa, Homo sapiens
  CDR3 for alpha chain variable domain of TCR clone 231347 (TRAV2, TRAJ13)
CATTSYSGGYQKVTF

SEQ ID NO: 462694 - protein, 14 aa, Homo sapiens
  CDR3 for beta chain variable domain of TCR clone 231347 (TRBV11-2, TRBJ2-3)
CASSRLARTDTQYF

SEQ ID NO: 462695 - protein, 15 aa, Homo sapiens
  CDR3 for alpha chain variable domain of TCR clone 231348 (TRAV2, TRAJ37)
CAVEDGSSNTGKLIF

SEQ ID NO: 462696 - protein, 16 aa, Homo sapiens
  CDR3 for beta chain variable domain of TCR clone 231348 (TRBV5-1, TRBJ2-5)
CASSLSLAGAQETQYF

SEQ ID NO: 462697 - protein, 13 aa, Homo sapiens
  CDR3 for alpha chain variable domain of TCR clone 231349 (TRAV2, TRAJ12)
CAVGADSSYKLIF

SEQ ID NO: 462698 - protein, 13 aa, Homo sapiens
  CDR3 for beta chain variable domain of TCR clone 231349 (TRBV20-1, TRBJ2-1)
CSDRSSPRDEQFF

SEQ ID NO: 462699 - protein, 14 aa, Homo sapiens
  CDR3 for alpha chain variable domain of TCR clone 231350 (TRAV29/DV5, TRAJ32)
CAAAYGGATNKLIF

SEQ ID NO: 462700 - protein, 13 aa, Homo sapiens
  CDR3 for beta chain variable domain of TCR clone 231350 (TRBV7-9, TRBJ1-2)
CASSLKQNYGYTF

SEQ ID NO: 462701 - protein, 14 aa, Homo sapiens
  CDR3 for alpha chain variable domain of TCR clone 231351 (TRAV21, TRAJ35)
CAVMPTGFGNVLHC

SEQ ID NO: 462702 - protein, 12 aa, Homo sapiens
  CDR3 for beta chain variable domain of TCR clone 231351 (TRBV7-9, TRBJ2-7)
CASNIKREEQYF

SEQ ID NO: 462703 - protein, 14 aa, Homo sapiens
  CDR3 for alpha chain variable domain of TCR clone 231352 (TRAV8-2, TRAJ11)
CVVSEKSGYSTLTL

SEQ ID NO: 462704 - protein, 16 aa, Homo sapiens
  CDR3 for beta chain variable domain of TCR clone 231352 (TRBV28, TRBJ2-1)
CASSSPEYPRGNEQFF

SEQ ID NO: 462705 - protein, 11 aa, Homo sapiens
  CDR3 for alpha chain variable domain of TCR clone 231353 (TRAV29/DV5, TRAJ27)
CAASPSGKSTF

SEQ ID NO: 462706 - protein, 13 aa, Homo sapiens
  CDR3 for beta chain variable domain of TCR clone 231353 (TRBV28, TRBJ2-7)
CASKAGGVYEQYF

SEQ ID NO: 462707 - protein, 15 aa, Homo sapiens
  CDR3 for alpha chain variable domain of TCR clone 231354 (TRAV29/DV5, TRAJ57)
CAASLLRGGSEKLVF

SEQ ID NO: 462708 - protein, 15 aa, Homo sapiens
  CDR3 for beta chain variable domain of TCR clone 231354 (TRBV5-1, TRBJ1-3)
CGSSLEGGSGNTMYF

SEQ ID NO: 462709 - protein, 14 aa, Homo sapiens
  CDR3 for alpha chain variable domain of TCR clone 231355 (TRAV12-2, TRAJ13)
CAVNPSGGYQKVTF

SEQ ID NO: 462710 - protein, 14 aa, Homo sapiens
  CDR3 for beta chain variable domain of TCR clone 231355 (TRBV11-1, TRBJ1-1)
CASSLEHPNTEDFF

SEQ ID NO: 462711 - protein, 18 aa, Homo sapiens
  CDR3 for alpha chain variable domain of TCR clone 231356 (TRAV21, TRAJ52)
CAVRPSPACGTSYGRLTF

SEQ ID NO: 462712 - protein, 15 aa, Homo sapiens
  CDR3 for beta chain variable domain of TCR clone 231356 (TRBV20-1, TRBJ1-5)
CSAFKNGQRNQPQHF

SEQ ID NO: 462713 - protein, 11 aa, Homo sapiens
  CDR3 for alpha chain variable domain of TCR clone 231357 (TRAV21, TRAJ34)
CAHYNTDKLIF

SEQ ID NO: 462714 - protein, 17 aa, Homo sapiens
  CDR3 for beta chain variable domain of TCR clone 231357 (TRBV20-1, TRBJ2-2)
CSASGSGQGGLTGELFF

SEQ ID NO: 462715 - protein, 16 aa, Homo sapiens
  CDR3 for alpha chain variable domain of TCR clone 231358 (TRAV2, TRAJ13)
CAARILGVTRKLPLDL

SEQ ID NO: 462716 - protein, 14 aa, Homo sapiens
  CDR3 for beta chain variable domain of TCR clone 231358 (TRBV19, TRBJ2-1)
CASEVTGARNEQFF

SEQ ID NO: 462717 - protein, 15 aa, Homo sapiens
  CDR3 for alpha chain variable domain of TCR clone 231359 (TRAV26-1, TRAJ9)
CIVRESNTGGFNTIF

SEQ ID NO: 462718 - protein, 11 aa, Homo sapiens
  CDR3 for beta chain variable domain of TCR clone 231359 (TRBV7-6, TRBJ2-5)
CASSIQETQYF

SEQ ID NO: 462719 - protein, 15 aa, Homo sapiens
  CDR3 for alpha chain variable domain of TCR clone 231360 (TRAV17, TRAJ57)
CATGPSQGGPEKLVF

SEQ ID NO: 462720 - protein, 15 aa, Homo sapiens
  CDR3 for beta chain variable domain of TCR clone 231360 (TRBV25-1, TRBJ1-4)
CASSPGDSTNEKLFF

SEQ ID NO: 462721 - protein, 12 aa, Homo sapiens
  CDR3 for alpha chain variable domain of TCR clone 231361 (TRAV8-3, TRAJ26)
CAGDNYGQNFVF

SEQ ID NO: 462722 - protein, 12 aa, Homo sapiens
  CDR3 for beta chain variable domain of TCR clone 231361 (TRBV7-9, TRBJ1-1)
CASSLSGGVAFF

SEQ ID NO: 462723 - protein, 14 aa, Homo sapiens
  CDR3 for alpha chain variable domain of TCR clone 231362 (TRAV8-3, TRAJ15)
CAVGRHQAGTALIF

SEQ ID NO: 462724 - protein, 13 aa, Homo sapiens
  CDR3 for beta chain variable domain of TCR clone 231362 (TRBV9, TRBJ2-7)
CVSSASDSYEQYF

SEQ ID NO: 462725 - protein, 11 aa, Homo sapiens
  CDR3 for alpha chain variable domain of TCR clone 231363 (TRAV12-3, TRAJ43)
CAMSVSNDMRF

SEQ ID NO: 462726 - protein, 14 aa, Homo sapiens
  CDR3 for beta chain variable domain of TCR clone 231363 (TRBV20-1, TRBJ1-1)
YAVLHLGGGTEAFF

SEQ ID NO: 462727 - protein, 13 aa, Homo sapiens
  CDR3 for alpha chain variable domain of TCR clone 231364 (TRAV17, TRAJ57)
CAIYQGGSEKLVF

SEQ ID NO: 462728 - protein, 16 aa, Homo sapiens
  CDR3 for beta chain variable domain of TCR clone 231364 (TRBV12-4, TRBJ1-5)
CASSRPVGGSNQPQHF

SEQ ID NO: 462729 - protein, 13 aa, Homo sapiens
  CDR3 for alpha chain variable domain of TCR clone 231365 (TRAV13-1, TRAJ21)
CAASIYNFNKFYF

SEQ ID NO: 462730 - protein, 16 aa, Homo sapiens
  CDR3 for beta chain variable domain of TCR clone 231365 (TRBV20-1, TRBJ1-4)
CSAPGQGLLTNENLFF

SEQ ID NO: 462731 - protein, 17 aa, Homo sapiens
  CDR3 for alpha chain variable domain of TCR clone 231366 (TRAV2, TRAJ36)
CAVEDRGSWGKQPLLWN

SEQ ID NO: 462732 - protein, 14 aa, Homo sapiens
  CDR3 for beta chain variable domain of TCR clone 231366 (TRBV7-9, TRBJ2-5)
CASSLDTAQETQYF

SEQ ID NO: 462733 - protein, 11 aa, Homo sapiens
  CDR3 for alpha chain variable domain of TCR clone 231367 (TRAV26-1, TRAJ37)
CIVRVGRKLIF

SEQ ID NO: 462734 - protein, 13 aa, Homo sapiens
  CDR3 for beta chain variable domain of TCR clone 231367 (TRBV7-9, TRBJ2-7)
CASSFAGAYEQYF

SEQ ID NO: 462735 - protein, 14 aa, Homo sapiens
  CDR3 for alpha chain variable domain of TCR clone 231368 (TRAV12-1, TRAJ3)
CGEHCYSSASKIIF

SEQ ID NO: 462736 - protein, 15 aa, Homo sapiens
  CDR3 for beta chain variable domain of TCR clone 231368 (TRBV28, TRBJ2-7)
CASRPWDRFSYEQYF

SEQ ID NO: 462737 - protein, 14 aa, Homo sapiens
  CDR3 for alpha chain variable domain of TCR clone 231369 (TRAV1-2, TRAJ16)
CAVNRFSDGQKLLF

SEQ ID NO: 462738 - protein, 13 aa, Homo sapiens
  CDR3 for beta chain variable domain of TCR clone 231369 (TRBV27, TRBJ2-3)
CASSLPQGDTQYF

SEQ ID NO: 462739 - protein, 15 aa, Homo sapiens
  CDR3 for alpha chain variable domain of TCR clone 231370 (TRAV12-2, TRAJ52)
CAVTSGGTCYGKLTF

SEQ ID NO: 462740 - protein, 15 aa, Homo sapiens
  CDR3 for beta chain variable domain of TCR clone 231370 (TRBV7-2, TRBJ2-1)
CASSPGFISGNEQFF

SEQ ID NO: 462741 - protein, 14 aa, Homo sapiens
  CDR3 for alpha chain variable domain of TCR clone 231371 (TRAV16, TRAJ58)
CALFKETSCSRLTF

SEQ ID NO: 462742 - protein, 15 aa, Homo sapiens
  CDR3 for beta chain variable domain of TCR clone 231371 (TRBV9, TRBJ1-6)
CASSVAGTGDSPLHF

SEQ ID NO: 462743 - protein, 21 aa, Homo sapiens
  CDR3 for alpha chain variable domain of TCR clone 231372 (TRAV12-1, TRAJ37)
CVVNGGLWQHRQTTLWARDNF

SEQ ID NO: 462744 - protein, 12 aa, Homo sapiens
  CDR3 for beta chain variable domain of TCR clone 231372 (TRBV20-1, TRBJ1-2)
CSAPGFNYSYTF

SEQ ID NO: 462745 - protein, 14 aa, Homo sapiens
  CDR3 for alpha chain variable domain of TCR clone 231373 (TRAV12-3, TRAJ27)
CAMSGGTNAGKSTF

SEQ ID NO: 462746 - protein, 13 aa, Homo sapiens
  CDR3 for beta chain variable domain of TCR clone 231373 (TRBV10-3, TRBJ2-3)
SAISGGDSYTQYF

SEQ ID NO: 462747 - protein, 14 aa, Homo sapiens
  CDR3 for alpha chain variable domain of TCR clone 231374 (TRAV12-2, TRAJ40)
CAVKIPSGTYKYIF

SEQ ID NO: 462748 - protein, 13 aa, Homo sapiens
  CDR3 for beta chain variable domain of TCR clone 231374 (TRBV20-1, TRBJ1-2)
CSASTERIYGYTF

SEQ ID NO: 462749 - protein, 15 aa, Homo sapiens
  CDR3 for alpha chain variable domain of TCR clone 231375 (TRAV39, TRAJ32)
CAVDMEGGATNKLIF

SEQ ID NO: 462750 - protein, 16 aa, Homo sapiens
  CDR3 for beta chain variable domain of TCR clone 231375 (TRBV20-1, TRBJ2-1)
CSARDLKQGMNNEQFF

SEQ ID NO: 462751 - protein, 14 aa, Homo sapiens
  CDR3 for alpha chain variable domain of TCR clone 231376 (TRAV12-2, TRAJ9)
CAGNALEGGFKTIF

SEQ ID NO: 462752 - protein, 16 aa, Homo sapiens
  CDR3 for beta chain variable domain of TCR clone 231376 (TRBV7-2, TRBJ2-5)
CASSPFPTGGEETQYF

SEQ ID NO: 462753 - protein, 12 aa, Homo sapiens
  CDR3 for alpha chain variable domain of TCR clone 231377 (TRAV12-3, TRAJ17)
CAITLTGNKLTF

SEQ ID NO: 462754 - protein, 15 aa, Homo sapiens
  CDR3 for beta chain variable domain of TCR clone 231377 (TRBV20-1, TRBJ2-7)
CSARDRVSGMDEQYI

SEQ ID NO: 462755 - protein, 14 aa, Homo sapiens
  CDR3 for alpha chain variable domain of TCR clone 231378 (TRAV8-2, TRAJ37)
CVVSISGSTGKLIF

SEQ ID NO: 462756 - protein, 15 aa, Homo sapiens
  CDR3 for beta chain variable domain of TCR clone 231378 (TRBV7-8, TRBJ2-1)
CASSLHGGPYNEQFF

SEQ ID NO: 462757 - protein, 16 aa, Homo sapiens
  CDR3 for alpha chain variable domain of TCR clone 231379 (TRAV12-3, TRAJ53)
CAMSPGSGGSNYKLKF

SEQ ID NO: 462758 - protein, 17 aa, Homo sapiens
  CDR3 for beta chain variable domain of TCR clone 231379 (TRBV28, TRBJ2-7)
CASSPLRGRRWKGGQYF

SEQ ID NO: 462759 - protein, 22 aa, Homo sapiens
  CDR3 for alpha chain variable domain of TCR clone 231380 (TRAV3, )
CAVRDCLNAGDNHIQKPDPAVY

SEQ ID NO: 462760 - protein, 14 aa, Homo sapiens
  CDR3 for beta chain variable domain of TCR clone 231380 (TRBV5-5, TRBJ1-5)
CASSGQGVDQPQHF

SEQ ID NO: 462761 - protein, 13 aa, Homo sapiens
  CDR3 for alpha chain variable domain of TCR clone 231381 (TRAV13-1, TRAJ6)
CAASSGGSYIPTF

SEQ ID NO: 462762 - protein, 14 aa, Homo sapiens
  CDR3 for beta chain variable domain of TCR clone 231381 (TRBV20-1, TRBJ2-4)
CSAVAGGPGNIQYF

SEQ ID NO: 462763 - protein, 13 aa, Homo sapiens
  CDR3 for alpha chain variable domain of TCR clone 231382 (TRAV12-1, TRAJ11)
CVVTRGGYSTLTF

SEQ ID NO: 462764 - protein, 14 aa, Homo sapiens
  CDR3 for beta chain variable domain of TCR clone 231382 (TRBV7-8, TRBJ2-3)
CASSLEAGTDTQYF

SEQ ID NO: 462765 - protein, 12 aa, Homo sapiens
  CDR3 for alpha chain variable domain of TCR clone 231383 (TRAV4, TRAJ6)
CLAPGGSYIPTF

SEQ ID NO: 462766 - protein, 12 aa, Homo sapiens
  CDR3 for beta chain variable domain of TCR clone 231383 (TRBV11-2, TRBJ2-2)
CASSLGGGELFF

SEQ ID NO: 462767 - protein, 14 aa, Homo sapiens
  CDR3 for alpha chain variable domain of TCR clone 231384 (TRAV1-1, TRAJ27)
CAVIYNTNAGQSTF

SEQ ID NO: 462768 - protein, 12 aa, Homo sapiens
  CDR3 for beta chain variable domain of TCR clone 231384 (TRBV11-2, TRBJ2-1)
CASSPGNNEQFF

SEQ ID NO: 462769 - protein, 16 aa, Homo sapiens
  CDR3 for alpha chain variable domain of TCR clone 231385 (TRAV3, TRAJ10)
CAVRDMRAGGGNKLTF

SEQ ID NO: 462770 - protein, 20 aa, Homo sapiens
  CDR3 for beta chain variable domain of TCR clone 231385 (TRBV11-3, TRBJ2-7)
CASSQRTSGSLRAGLRAGHQ

SEQ ID NO: 462771 - protein, 12 aa, Homo sapiens
  CDR3 for alpha chain variable domain of TCR clone 231386 (TRAV38-1, TRAJ43)
CAFMTRLADMRF

SEQ ID NO: 462772 - protein, 15 aa, Homo sapiens
  CDR3 for beta chain variable domain of TCR clone 231386 (TRBV20-1, TRBJ2-7)
CSARDRVSGMDEQYF

SEQ ID NO: 462773 - protein, 17 aa, Homo sapiens
  CDR3 for alpha chain variable domain of TCR clone 231387 (TRAV14/DV4, TRAJ28)
CAMREVSSGAGSYQLTF

SEQ ID NO: 462774 - protein, 15 aa, Homo sapiens
  CDR3 for beta chain variable domain of TCR clone 231387 (TRBV11-2, TRBJ1-6)
CASTLREAGNSPLHF

SEQ ID NO: 462775 - protein, 12 aa, Homo sapiens
  CDR3 for alpha chain variable domain of TCR clone 231388 (TRAV20, TRAJ37)
CPLPSNTGKLIF

SEQ ID NO: 462776 - protein, 14 aa, Homo sapiens
  CDR3 for beta chain variable domain of TCR clone 231388 (TRBV19, TRBJ2-1)
CASPTFVLSGEQFF

SEQ ID NO: 462777 - protein, 15 aa, Homo sapiens
  CDR3 for alpha chain variable domain of TCR clone 231389 (TRAV3, TRAJ22)
CAVRDRGGSSRQLTF

SEQ ID NO: 462778 - protein, 16 aa, Homo sapiens
  CDR3 for beta chain variable domain of TCR clone 231389 (TRBV4-2, TRBJ2-4)
CASSQELRRAKNSQYF

SEQ ID NO: 462779 - protein, 16 aa, Homo sapiens
  CDR3 for alpha chain variable domain of TCR clone 231390 (TRAV17, TRAJ28)
CAAASVSGAGSYQLTF

SEQ ID NO: 462780 - protein, 13 aa, Homo sapiens
  CDR3 for beta chain variable domain of TCR clone 231390 (TRBV7-9, TRBJ1-2)
CASSLKQNYGYTF

SEQ ID NO: 462781 - protein, 12 aa, Homo sapiens
  CDR3 for alpha chain variable domain of TCR clone 231391 (TRAV27, TRAJ13)
CAGVRGYKKVTF

SEQ ID NO: 462782 - protein, 11 aa, Homo sapiens
  CDR3 for beta chain variable domain of TCR clone 231391 (TRBV6-1, TRBJ2-5)
CASTGVETQYF

SEQ ID NO: 462783 - protein, 13 aa, Homo sapiens
  CDR3 for alpha chain variable domain of TCR clone 231392 (TRAV17, TRAJ5)
CALRGTGRRALTF

SEQ ID NO: 462784 - protein, 12 aa, Homo sapiens
  CDR3 for beta chain variable domain of TCR clone 231392 (TRBV7-9, TRBJ2-7)
CASSIKREEQYF

SEQ ID NO: 462785 - protein, 13 aa, Homo sapiens
  CDR3 for alpha chain variable domain of TCR clone 231393 (TRAV20, TRAJ34)
CAVSSDNTDKHIF

SEQ ID NO: 462786 - protein, 13 aa, Homo sapiens
  CDR3 for beta chain variable domain of TCR clone 231393 (TRBV7-9, TRBJ1-2)
CASSLKQNYGYTF

SEQ ID NO: 462787 - protein, 14 aa, Homo sapiens
  CDR3 for alpha chain variable domain of TCR clone 231394 (TRAV12-2, TRAJ13)
CAVKKTGGYQKVTF

SEQ ID NO: 462788 - protein, 14 aa, Homo sapiens
  CDR3 for beta chain variable domain of TCR clone 231394 (TRBV7-3, TRBJ1-1)
CASSLNGGNTEAFF

SEQ ID NO: 462789 - protein, 10 aa, Homo sapiens
  CDR3 for alpha chain variable domain of TCR clone 231395 (TRAV26-1, TRAJ40)
CIAGTYKYVF

SEQ ID NO: 462790 - protein, 15 aa, Homo sapiens
  CDR3 for beta chain variable domain of TCR clone 231395 (TRBV2, TRBJ2-7)
CASSENRQGKGEQYF

SEQ ID NO: 462791 - protein, 13 aa, Homo sapiens
  CDR3 for alpha chain variable domain of TCR clone 231396 (TRAV24, TRAJ44)
CALLTGTASKLTF

SEQ ID NO: 462792 - protein, 15 aa, Homo sapiens
  CDR3 for beta chain variable domain of TCR clone 231396 (TRBV7-2, TRBJ2-3)
CASSLVVRGPDTQYF

SEQ ID NO: 462793 - protein, 16 aa, Homo sapiens
  CDR3 for alpha chain variable domain of TCR clone 231397 (TRAV20, TRAJ53)
CAVQGNSGGSNYKLTF

SEQ ID NO: 462794 - protein, 14 aa, Homo sapiens
  CDR3 for beta chain variable domain of TCR clone 231397 (TRBV6-5, TRBJ2-7)
CASSPDRGLREQYF

SEQ ID NO: 462795 - protein, 12 aa, Homo sapiens
  CDR3 for alpha chain variable domain of TCR clone 231398 (TRAV2, TRAJ10)
CASTVGGNKLTF

SEQ ID NO: 462796 - protein, 13 aa, Homo sapiens
  CDR3 for beta chain variable domain of TCR clone 231398 (TRBV11-2, TRBJ1-6)
CASSLAGVSPLHF

SEQ ID NO: 462797 - protein, 12 aa, Homo sapiens
  CDR3 for alpha chain variable domain of TCR clone 231399 (TRAV8-6, TRAJ21)
CAVRPNFNKFYF

SEQ ID NO: 462798 - protein, 11 aa, Homo sapiens
  CDR3 for beta chain variable domain of TCR clone 231399 (TRBV6-1, TRBJ2-1)
CASISSNEQFF

SEQ ID NO: 462799 - protein, 16 aa, Homo sapiens
  CDR3 for alpha chain variable domain of TCR clone 231400 (TRAV12-2, TRAJ32)
CAVNMNSGGATNKLIF

SEQ ID NO: 462800 - protein, 16 aa, Homo sapiens
  CDR3 for beta chain variable domain of TCR clone 231400 (TRBV7-8, TRBJ2-3)
CASSTEGQRETDTQYF

SEQ ID NO: 462801 - protein, 14 aa, Homo sapiens
  CDR3 for alpha chain variable domain of TCR clone 231401 (TRAV8-4, TRAJ5)
CAVSTDTGRRALTF

SEQ ID NO: 462802 - protein, 12 aa, Homo sapiens
  CDR3 for beta chain variable domain of TCR clone 231401 (TRBV5-5, TRBJ2-5)
CASSYFGETQYF

SEQ ID NO: 462803 - protein, 14 aa, Homo sapiens
  CDR3 for alpha chain variable domain of TCR clone 231402 (TRAV26-1, TRAJ49)
CIVRLTNTGNKFYF

SEQ ID NO: 462804 - protein, 13 aa, Homo sapiens
  CDR3 for beta chain variable domain of TCR clone 231402 (TRBV10-1, TRBJ1-1)
CASQGQTNTEAFF

SEQ ID NO: 462805 - protein, 16 aa, Homo sapiens
  CDR3 for alpha chain variable domain of TCR clone 231403 (TRAV21, TRAJ37)
CAVLTAGSSNTGKLLF

SEQ ID NO: 462806 - protein, 13 aa, Homo sapiens
  CDR3 for beta chain variable domain of TCR clone 231403 (TRBV7-9, TRBJ2-5)
CASLPSGRETQYF

SEQ ID NO: 462807 - protein, 15 aa, Homo sapiens
  CDR3 for alpha chain variable domain of TCR clone 231404 (TRAV21, TRAJ53)
CATLNSGGSNYKLTF

SEQ ID NO: 462808 - protein, 15 aa, Homo sapiens
  CDR3 for beta chain variable domain of TCR clone 231404 (TRBV20-1, TRBJ2-7)
CSARDRVSGMDEQCF

SEQ ID NO: 462809 - protein, 14 aa, Homo sapiens
  CDR3 for alpha chain variable domain of TCR clone 231405 (TRAV12-3, TRAJ10)
SHPPLTGGGNKLTF

SEQ ID NO: 462810 - protein, 11 aa, Homo sapiens
  CDR3 for beta chain variable domain of TCR clone 231405 (TRBV19, TRBJ1-1)
CARSIGSEAFF

SEQ ID NO: 462811 - protein, 14 aa, Homo sapiens
  CDR3 for alpha chain variable domain of TCR clone 231406 (TRAV12-2, TRAJ13)
CAVKKPGGYQKVTF

SEQ ID NO: 462812 - protein, 17 aa, Homo sapiens
  CDR3 for beta chain variable domain of TCR clone 231406 (TRBV20-1, TRBJ2-2)
CSASGSGQGGLTGELFF

SEQ ID NO: 462813 - protein, 23 aa, Homo sapiens
  CDR3 for alpha chain variable domain of TCR clone 231407 (TRAV8-4, TRAJ38)
CARPNAGNNHIQNPDPAVYQLID

SEQ ID NO: 462814 - protein, 12 aa, Homo sapiens
  CDR3 for beta chain variable domain of TCR clone 231407 (TRBV6-1, TRBJ2-7)
CASSEPLYEQYF

SEQ ID NO: 462815 - protein, 15 aa, Homo sapiens
  CDR3 for alpha chain variable domain of TCR clone 231408 (TRAV12-2, TRAJ53)
CAVNGGGGSNYKLTF

SEQ ID NO: 462816 - protein, 12 aa, Homo sapiens
  CDR3 for beta chain variable domain of TCR clone 231408 (TRBV6-5, TRBJ2-2)
CASTTGTGELFF

SEQ ID NO: 462817 - protein, 16 aa, Homo sapiens
  CDR3 for alpha chain variable domain of TCR clone 231409 (TRAV4, TRAJ9)
CLVGDPNRPEASKLSL

SEQ ID NO: 462818 - protein, 16 aa, Homo sapiens
  CDR3 for beta chain variable domain of TCR clone 231409 (TRBV28, TRBJ1-4)
CASSPPYRGRSEKLFF

SEQ ID NO: 462819 - protein, 14 aa, Homo sapiens
  CDR3 for alpha chain variable domain of TCR clone 231410 (TRAV38-1, TRAJ40)
CALRPTSGTYKYIF

SEQ ID NO: 462820 - protein, 13 aa, Homo sapiens
  CDR3 for beta chain variable domain of TCR clone 231410 (TRBV2, TRBJ2-7)
CASSVGGSGEQYF

SEQ ID NO: 462821 - protein, 13 aa, Homo sapiens
  CDR3 for alpha chain variable domain of TCR clone 231411 (TRAV3, TRAJ33)
CAVRYRSNYQLIW

SEQ ID NO: 462822 - protein, 16 aa, Homo sapiens
  CDR3 for beta chain variable domain of TCR clone 231411 (TRBV4-2, TRBJ2-7)
CASSQDRGTSSYEQYF

SEQ ID NO: 462823 - protein, 13 aa, Homo sapiens
  CDR3 for alpha chain variable domain of TCR clone 231412 (TRAV13-1, TRAJ5)
CAASDTGRRALPF

SEQ ID NO: 462824 - protein, 14 aa, Homo sapiens
  CDR3 for beta chain variable domain of TCR clone 231412 (TRBV4-2, TRBJ2-1)
CASGLDRAYNEQFF

SEQ ID NO: 462825 - protein, 10 aa, Homo sapiens
  CDR3 for alpha chain variable domain of TCR clone 231413 (TRAV1-2, TRAJ20)
CACNDYKLSF

SEQ ID NO: 462826 - protein, 14 aa, Homo sapiens
  CDR3 for beta chain variable domain of TCR clone 231413 (TRBV18, TRBJ2-7)
CSSSPRGGAYEQYF

SEQ ID NO: 462827 - protein, 14 aa, Homo sapiens
  CDR3 for alpha chain variable domain of TCR clone 231414 (TRAV21, TRAJ45)
CAVSSGGGADGLTF

SEQ ID NO: 462828 - protein, 16 aa, Homo sapiens
  CDR3 for beta chain variable domain of TCR clone 231414 (TRBV4-1, TRBJ1-2)
CASSQDAGQVLYGYTF

SEQ ID NO: 462829 - protein, 12 aa, Homo sapiens
  CDR3 for alpha chain variable domain of TCR clone 231415 (TRAV21, TRAJ11)
CAATSGYSPLTF

SEQ ID NO: 462830 - protein, 13 aa, Homo sapiens
  CDR3 for beta chain variable domain of TCR clone 231415 (TRBV20-1, TRBJ1-1)
CSARGGGNTEAFF

SEQ ID NO: 462831 - protein, 15 aa, Homo sapiens
  CDR3 for alpha chain variable domain of TCR clone 231416 (TRAV3, TRAJ4)
CAVRDGTGGYNKLIF

SEQ ID NO: 462832 - protein, 15 aa, Homo sapiens
  CDR3 for beta chain variable domain of TCR clone 231416 (TRBV20-1, TRBJ2-7)
CSAESGTSGAYEQYF

SEQ ID NO: 462833 - protein, 14 aa, Homo sapiens
  CDR3 for alpha chain variable domain of TCR clone 231417 (TRAV20, TRAJ13)
CAVLNSGGYQKVTF

SEQ ID NO: 462834 - protein, 14 aa, Homo sapiens
  CDR3 for beta chain variable domain of TCR clone 231417 (TRBV19, TRBJ2-5)
CASSMTGQQETQYF

SEQ ID NO: 462835 - protein, 13 aa, Homo sapiens
  CDR3 for alpha chain variable domain of TCR clone 231418 (TRAV20, TRAJ54)
CALTFEGAQKLVF

SEQ ID NO: 462836 - protein, 13 aa, Homo sapiens
  CDR3 for beta chain variable domain of TCR clone 231418 (TRBV11-2, TRBJ1-1)
CASSLGRNTEAFF

SEQ ID NO: 462837 - protein, 13 aa, Homo sapiens
  CDR3 for alpha chain variable domain of TCR clone 231419 (TRAV12-1, TRAJ13)
CVVTSGGYQKVTF

SEQ ID NO: 462838 - protein, 14 aa, Homo sapiens
  CDR3 for beta chain variable domain of TCR clone 231419 (TRBV27, TRBJ2-1)
CASSSTGGYNEQFF

SEQ ID NO: 462839 - protein, 13 aa, Homo sapiens
  CDR3 for alpha chain variable domain of TCR clone 231420 (TRAV27, TRAJ6)
CAVASGGSYIPTF

SEQ ID NO: 462840 - protein, 13 aa, Homo sapiens
  CDR3 for beta chain variable domain of TCR clone 231420 (TRBV25-1, TRBJ2-5)
CASSESGRETQYF

SEQ ID NO: 462841 - protein, 16 aa, Homo sapiens
  CDR3 for alpha chain variable domain of TCR clone 231421 (TRAV30, TRAJ24)
CGTEIVDADSWGKFQF

SEQ ID NO: 462842 - protein, 14 aa, Homo sapiens
  CDR3 for beta chain variable domain of TCR clone 231421 (TRBV27, TRBJ2-2)
CASRPGVKTGEPFF

SEQ ID NO: 462843 - protein, 14 aa, Homo sapiens
  CDR3 for alpha chain variable domain of TCR clone 231422 (TRAV21, TRAJ35)
CAVMPIGFGNVLHG

SEQ ID NO: 462844 - protein, 13 aa, Homo sapiens
  CDR3 for beta chain variable domain of TCR clone 231422 (TRBV23-1, TRBJ1-4)
CASRGKFNEKLFF

SEQ ID NO: 462845 - protein, 14 aa, Homo sapiens
  CDR3 for alpha chain variable domain of TCR clone 231423 (TRAV22, TRAJ29)
CAVTRNSGNTPLVF

SEQ ID NO: 462846 - protein, 15 aa, Homo sapiens
  CDR3 for beta chain variable domain of TCR clone 231423 (TRBV27, TRBJ2-7)
CASSPQREGQREQYF

SEQ ID NO: 462847 - protein, 11 aa, Homo sapiens
  CDR3 for alpha chain variable domain of TCR clone 231424 (TRAV12-2, TRAJ49)
CALQGGNHFYF

SEQ ID NO: 462848 - protein, 14 aa, Homo sapiens
  CDR3 for beta chain variable domain of TCR clone 231424 (TRBV7-2, TRBJ2-7)
CASSPKTSFYEQYF

SEQ ID NO: 462849 - protein, 18 aa, Homo sapiens
  CDR3 for alpha chain variable domain of TCR clone 231425 (TRAV13-1, TRAJ52)
CAAKNPNAGGTSYGKLTF

SEQ ID NO: 462850 - protein, 18 aa, Homo sapiens
  CDR3 for beta chain variable domain of TCR clone 231425 (TRBV4-1, TRBJ1-4)
CASSPRTGGAWTDEKLFF

SEQ ID NO: 462851 - protein, 13 aa, Homo sapiens
  CDR3 for alpha chain variable domain of TCR clone 231426 (TRAV30, TRAJ24)
CGTVTDSWGKLQF

SEQ ID NO: 462852 - protein, 15 aa, Homo sapiens
  CDR3 for beta chain variable domain of TCR clone 231426 (TRBV5-1, TRBJ2-7)
CASSLDLTSSYEQYF

SEQ ID NO: 462853 - protein, 14 aa, Homo sapiens
  CDR3 for alpha chain variable domain of TCR clone 231427 (TRAV12-3, TRAJ10)
SHLPLTGGGNKLTF

SEQ ID NO: 462854 - protein, 16 aa, Homo sapiens
  CDR3 for beta chain variable domain of TCR clone 231427 (TRBV28, TRBJ2-5)
CASSFSPAGGWETQYF

SEQ ID NO: 462855 - protein, 12 aa, Homo sapiens
  CDR3 for alpha chain variable domain of TCR clone 231428 (TRAV16, TRAJ29)
CALSLGNTPLVF

SEQ ID NO: 462856 - protein, 14 aa, Homo sapiens
  CDR3 for beta chain variable domain of TCR clone 231428 (TRBV7-2, TRBJ2-1)
CASRLEGSWYEQFF

SEQ ID NO: 462857 - protein, 11 aa, Homo sapiens
  CDR3 for alpha chain variable domain of TCR clone 231429 (TRAV17, TRAJ39)
CATNPYNMLTF

SEQ ID NO: 462858 - protein, 13 aa, Homo sapiens
  CDR3 for beta chain variable domain of TCR clone 231429 (TRBV13, TRBJ2-7)
CASSQGVSYEQYF

SEQ ID NO: 462859 - protein, 12 aa, Homo sapiens
  CDR3 for alpha chain variable domain of TCR clone 231430 (TRAV21, TRAJ33)
CAKMDSNNQSIW

SEQ ID NO: 462860 - protein, 14 aa, Homo sapiens
  CDR3 for beta chain variable domain of TCR clone 231430 (TRBV2, TRBJ2-7)
CASSLASGGYEQYF

SEQ ID NO: 462861 - protein, 12 aa, Homo sapiens
  CDR3 for alpha chain variable domain of TCR clone 231431 (TRAV21, TRAJ33)
CAKMDSNYQLIW

SEQ ID NO: 462862 - protein, 17 aa, Homo sapiens
  CDR3 for beta chain variable domain of TCR clone 231431 (TRBV5-1, TRBJ2-5)
CASAVTRQFGNKETQYF

SEQ ID NO: 462863 - protein, 11 aa, Homo sapiens
  CDR3 for alpha chain variable domain of TCR clone 231432 (TRAV2, TRAJ13)
YASGGYQKVTF

SEQ ID NO: 462864 - protein, 14 aa, Homo sapiens
  CDR3 for beta chain variable domain of TCR clone 231432 (TRBV7-3, TRBJ2-7)
CASSYDQDYYEQYF

SEQ ID NO: 462865 - protein, 14 aa, Homo sapiens
  CDR3 for alpha chain variable domain of TCR clone 231433 (TRAV12-2, TRAJ13)
CAVKNTGGYQKVTF

SEQ ID NO: 462866 - protein, 15 aa, Homo sapiens
  CDR3 for beta chain variable domain of TCR clone 231433 (TRBV28, TRBJ2-5)
CASSPPWSYQETQYF

SEQ ID NO: 462867 - protein, 13 aa, Homo sapiens
  CDR3 for alpha chain variable domain of TCR clone 231434 (TRAV2, TRAJ40)
CVVVTSGTSKYIF

SEQ ID NO: 462868 - protein, 14 aa, Homo sapiens
  CDR3 for beta chain variable domain of TCR clone 231434 (TRBV19, TRBJ2-1)
CASPTFVLSSEQFF

SEQ ID NO: 462869 - protein, 14 aa, Homo sapiens
  CDR3 for alpha chain variable domain of TCR clone 231435 (TRAV1-2, TRAJ8)
CAVREDTGFQKLVF

SEQ ID NO: 462870 - protein, 16 aa, Homo sapiens
  CDR3 for beta chain variable domain of TCR clone 231435 (TRBV20-1, TRBJ2-4)
CSATSLAELAKNIQYF

SEQ ID NO: 462871 - protein, 13 aa, Homo sapiens
  CDR3 for alpha chain variable domain of TCR clone 231436 (TRAV35, TRAJ37)
GASQGSNTGKLIF

SEQ ID NO: 462872 - protein, 14 aa, Homo sapiens
  CDR3 for beta chain variable domain of TCR clone 231436 (TRBV15, TRBJ2-5)
CATSRRDNQETQYF

SEQ ID NO: 462873 - protein, 12 aa, Homo sapiens
  CDR3 for alpha chain variable domain of TCR clone 231437 (TRAV26-2, TRAJ21)
CILKGNFNKFYF

SEQ ID NO: 462874 - protein, 12 aa, Homo sapiens
  CDR3 for beta chain variable domain of TCR clone 231437 (TRBV7-9, TRBJ1-1)
CASSLVRGEAFF

SEQ ID NO: 462875 - protein, 12 aa, Homo sapiens
  CDR3 for alpha chain variable domain of TCR clone 231438 (TRAV12-3, TRAJ17)
CAMTLTGNKLTF

SEQ ID NO: 462876 - protein, 15 aa, Homo sapiens
  CDR3 for beta chain variable domain of TCR clone 231438 (TRBV9, TRBJ1-6)
CASGVAGTGDSPLHF

SEQ ID NO: 462877 - protein, 14 aa, Homo sapiens
  CDR3 for alpha chain variable domain of TCR clone 231439 (TRAV1-2, TRAJ16)
CAVNRFSDGQKLLF

SEQ ID NO: 462878 - protein, 16 aa, Homo sapiens
  CDR3 for beta chain variable domain of TCR clone 231439 (TRBV4-2, TRBJ2-7)
CASSQEELAGTYEQYF

SEQ ID NO: 462879 - protein, 12 aa, Homo sapiens
  CDR3 for alpha chain variable domain of TCR clone 231440 (TRAV12-3, TRAJ17)
CAMTLTGNKLTF

SEQ ID NO: 462880 - protein, 15 aa, Homo sapiens
  CDR3 for beta chain variable domain of TCR clone 231440 (TRBV27, TRBJ2-1)
CASSNGGGYSSEQFF

SEQ ID NO: 462881 - protein, 14 aa, Homo sapiens
  CDR3 for alpha chain variable domain of TCR clone 231441 (TRAV3, TRAJ36)
CAVRDGTGANNLFF

SEQ ID NO: 462882 - protein, 16 aa, Homo sapiens
  CDR3 for beta chain variable domain of TCR clone 231441 (TRBV7-3, TRBJ2-5)
CARIQPGGSVQETRYF

SEQ ID NO: 462883 - protein, 17 aa, Homo sapiens
  CDR3 for alpha chain variable domain of TCR clone 231442 (TRAV4, )
CLVDIQNPDPAVYQLRD

SEQ ID NO: 462884 - protein, 14 aa, Homo sapiens
  CDR3 for beta chain variable domain of TCR clone 231442 (TRBV28, TRBJ2-7)
CASSLGVPTYEQYF

SEQ ID NO: 462885 - protein, 17 aa, Homo sapiens
  CDR3 for alpha chain variable domain of TCR clone 231443 (TRAV3, TRAJ42)
CAVRDRDYGGSQGNLIF

SEQ ID NO: 462886 - protein, 17 aa, Homo sapiens
  CDR3 for beta chain variable domain of TCR clone 231443 (TRBV24-1, TRBJ2-1)
CATSDVSTSGTYNEQFF

SEQ ID NO: 462887 - protein, 15 aa, Homo sapiens
  CDR3 for alpha chain variable domain of TCR clone 231444 (TRAV12-3, TRAJ49)
CAMAVTPNTGNQFYL

SEQ ID NO: 462888 - protein, 14 aa, Homo sapiens
  CDR3 for beta chain variable domain of TCR clone 231444 (TRBV7-8, TRBJ2-3)
CASSLEAGTDTQYF

SEQ ID NO: 462889 - protein, 15 aa, Homo sapiens
  CDR3 for alpha chain variable domain of TCR clone 231445 (TRAV35, TRAJ41)
CAGQLFSNSGYALNF

SEQ ID NO: 462890 - protein, 14 aa, Homo sapiens
  CDR3 for beta chain variable domain of TCR clone 231445 (TRBV7-2, TRBJ1-2)
CASSRGGTNCGYTF

SEQ ID NO: 462891 - protein, 15 aa, Homo sapiens
  CDR3 for alpha chain variable domain of TCR clone 231446 (TRAV3, TRAJ23)
CAVRDMGNQGGKLIF

SEQ ID NO: 462892 - protein, 13 aa, Homo sapiens
  CDR3 for beta chain variable domain of TCR clone 231446 (TRBV12-4, TRBJ1-2)
CASSLRQGKGYTF

SEQ ID NO: 462893 - protein, 11 aa, Homo sapiens
  CDR3 for alpha chain variable domain of TCR clone 231447 (TRAV2, TRAJ33)
CAVDSNYQLIW

SEQ ID NO: 462894 - protein, 15 aa, Homo sapiens
  CDR3 for beta chain variable domain of TCR clone 231447 (TRBV28, TRBJ1-3)
CASSMGWASGNTIYF

SEQ ID NO: 462895 - protein, 13 aa, Homo sapiens
  CDR3 for alpha chain variable domain of TCR clone 231448 (TRAV8-3, TRAJ21)
CAVGAYNFNKFYF

SEQ ID NO: 462896 - protein, 16 aa, Homo sapiens
  CDR3 for beta chain variable domain of TCR clone 231448 (TRBV19, TRBJ2-1)
CASSMGGVSSYNEQFF

SEQ ID NO: 462897 - protein, 15 aa, Homo sapiens
  CDR3 for alpha chain variable domain of TCR clone 231449 (TRAV8-3, TRAJ23)
CAVVDRYNQGGKLIF

SEQ ID NO: 462898 - protein, 16 aa, Homo sapiens
  CDR3 for beta chain variable domain of TCR clone 231449 (TRBV19, TRBJ2-1)
CASSKAGPSSYNEQFF

SEQ ID NO: 462899 - protein, 14 aa, Homo sapiens
  CDR3 for alpha chain variable domain of TCR clone 231450 (TRAV12-3, TRAJ42)
CAMNYGGSQGNLIF

SEQ ID NO: 462900 - protein, 15 aa, Homo sapiens
  CDR3 for beta chain variable domain of TCR clone 231450 (TRBV15, TRBJ2-7)
CATSSGTTTTYEQYF

SEQ ID NO: 462901 - protein, 12 aa, Homo sapiens
  CDR3 for alpha chain variable domain of TCR clone 231451 (TRAV13-1, TRAJ42)
SVLRGSQGNLIF

SEQ ID NO: 462902 - protein, 14 aa, Homo sapiens
  CDR3 for beta chain variable domain of TCR clone 231451 (TRBV4-2, TRBJ2-1)
CASGLDRAYNEQFF

SEQ ID NO: 462903 - protein, 14 aa, Homo sapiens
  CDR3 for alpha chain variable domain of TCR clone 231452 (TRAV23/DV6, TRAJ17)
CAARGRAAGNKLTF

SEQ ID NO: 462904 - protein, 13 aa, Homo sapiens
  CDR3 for beta chain variable domain of TCR clone 231452 (TRBV7-6, TRBJ1-2)
CASRLVADYGYTF

SEQ ID NO: 462905 - protein, 13 aa, Homo sapiens
  CDR3 for alpha chain variable domain of TCR clone 231453 (TRAV1-2, TRAJ9)
CAALNTGGFKTIF

SEQ ID NO: 462906 - protein, 13 aa, Homo sapiens
  CDR3 for beta chain variable domain of TCR clone 231453 (TRBV19, TRBJ1-2)
CASSGPGQDGDTF

SEQ ID NO: 462907 - protein, 15 aa, Homo sapiens
  CDR3 for alpha chain variable domain of TCR clone 231454 (TRAV29/DV5, TRAJ29)
CAASERSSGNTPLVF

SEQ ID NO: 462908 - protein, 14 aa, Homo sapiens
  CDR3 for beta chain variable domain of TCR clone 231454 (TRBV7-6, TRBJ2-3)
CASSVAGGTDTQYF

SEQ ID NO: 462909 - protein, 14 aa, Homo sapiens
  CDR3 for alpha chain variable domain of TCR clone 231455 (TRAV8-3, TRAJ39)
CAVGANNAGNMLTF

SEQ ID NO: 462910 - protein, 15 aa, Homo sapiens
  CDR3 for beta chain variable domain of TCR clone 231455 (TRBV4-3, TRBJ1-1)
CASSQELGRGTEAVF

SEQ ID NO: 462911 - protein, 15 aa, Homo sapiens
  CDR3 for alpha chain variable domain of TCR clone 231456 (TRAV2, TRAJ3)
CAVEDAYSSASKIIF

SEQ ID NO: 462912 - protein, 16 aa, Homo sapiens
  CDR3 for beta chain variable domain of TCR clone 231456 (TRBV7-3, TRBJ2-2)
GGTQPCIQWNTGELFF

SEQ ID NO: 462913 - protein, 16 aa, Homo sapiens
  CDR3 for alpha chain variable domain of TCR clone 231457 (TRAV38-1, TRAJ45)
CAFMKGSGGGADGFTF

SEQ ID NO: 462914 - protein, 15 aa, Homo sapiens
  CDR3 for beta chain variable domain of TCR clone 231457 (TRBV7-2, TRBJ2-3)
CASSSTGLETDTQYF

SEQ ID NO: 462915 - protein, 12 aa, Homo sapiens
  CDR3 for alpha chain variable domain of TCR clone 231458 (TRAV16, TRAJ27)
CALNTNAGKSTF

SEQ ID NO: 462916 - protein, 14 aa, Homo sapiens
  CDR3 for beta chain variable domain of TCR clone 231458 (TRBV19, TRBJ2-1)
CASPTFVLSGEQFF

SEQ ID NO: 462917 - protein, 11 aa, Homo sapiens
  CDR3 for alpha chain variable domain of TCR clone 231459 (TRAV21, TRAJ17)
CAAPAGNKLTF

SEQ ID NO: 462918 - protein, 16 aa, Homo sapiens
  CDR3 for beta chain variable domain of TCR clone 231459 (TRBV19, TRBJ2-1)
CASSKAGPSSYNEQFF

SEQ ID NO: 462919 - protein, 11 aa, Homo sapiens
  CDR3 for alpha chain variable domain of TCR clone 231460 (TRAV29/DV5, TRAJ30)
CAVREVDKIIF

SEQ ID NO: 462920 - protein, 14 aa, Homo sapiens
  CDR3 for beta chain variable domain of TCR clone 231460 (TRBV6-1, TRBJ1-3)
CASVQGGGGNTIYF

SEQ ID NO: 462921 - protein, 14 aa, Homo sapiens
  CDR3 for alpha chain variable domain of TCR clone 231461 (TRAV12-2, TRAJ44)
CAVNPAGTASKLTF

SEQ ID NO: 462922 - protein, 13 aa, Homo sapiens
  CDR3 for beta chain variable domain of TCR clone 231461 (TRBV27, TRBJ1-1)
CASSLSIGAEAFF

SEQ ID NO: 462923 - protein, 13 aa, Homo sapiens
  CDR3 for alpha chain variable domain of TCR clone 231462 (TRAV8-3, TRAJ31)
CAVGASNNARLMF

SEQ ID NO: 462924 - protein, 16 aa, Homo sapiens
  CDR3 for beta chain variable domain of TCR clone 231462 (TRBV18, TRBJ1-3)
CASSLGILNGESTIYF

SEQ ID NO: 462925 - protein, 14 aa, Homo sapiens
  CDR3 for alpha chain variable domain of TCR clone 231463 (TRAV1-2, TRAJ8)
CAVREDTGFQKLVF

SEQ ID NO: 462926 - protein, 15 aa, Homo sapiens
  CDR3 for beta chain variable domain of TCR clone 231463 (TRBV6-3, TRBJ2-7)
CARSSPGTVLYEQYF

SEQ ID NO: 462927 - protein, 13 aa, Homo sapiens
  CDR3 for alpha chain variable domain of TCR clone 231464 (TRAV30, TRAJ24)
CGTVTASWGKLQF

SEQ ID NO: 462928 - protein, 16 aa, Homo sapiens
  CDR3 for beta chain variable domain of TCR clone 231464 (TRBV7-3, TRBJ2-2)
CASSLKRGTLSGELFF

SEQ ID NO: 462929 - protein, 15 aa, Homo sapiens
  CDR3 for alpha chain variable domain of TCR clone 231465 (TRAV35, TRAJ47)
CWAAMHMEYGNKLVF

SEQ ID NO: 462930 - protein, 11 aa, Homo sapiens
  CDR3 for beta chain variable domain of TCR clone 231465 (TRBV11-2, TRBJ1-1)
CASSINTEAFF

SEQ ID NO: 462931 - protein, 15 aa, Homo sapiens
  CDR3 for alpha chain variable domain of TCR clone 231466 (TRAV3, TRAJ3)
CAVRDRDSSASKIIF

SEQ ID NO: 462932 - protein, 14 aa, Homo sapiens
  CDR3 for beta chain variable domain of TCR clone 231466 (TRBV7-2, TRBJ2-7)
CASSPKTSFYEQYF

SEQ ID NO: 462933 - protein, 19 aa, Homo sapiens
  CDR3 for alpha chain variable domain of TCR clone 231467 (TRAV26-1, TRAJ52)
CIVRVANNAGGTSYGKLTF

SEQ ID NO: 462934 - protein, 14 aa, Homo sapiens
  CDR3 for beta chain variable domain of TCR clone 231467 (TRBV19, TRBJ1-2)
CASSTGAGSYGYTF

SEQ ID NO: 462935 - protein, 14 aa, Homo sapiens
  CDR3 for alpha chain variable domain of TCR clone 231468 (TRAV34, TRAJ44)
CGADGTGTASKLTF

SEQ ID NO: 462936 - protein, 19 aa, Homo sapiens
  CDR3 for beta chain variable domain of TCR clone 231468 (TRBV7-2, TRBJ2-3)
CASSFLSRNWGGGTDTQYF

SEQ ID NO: 462937 - protein, 14 aa, Homo sapiens
  CDR3 for alpha chain variable domain of TCR clone 231469 (TRAV25, TRAJ35)
CARRMEGFGTVLHC

SEQ ID NO: 462938 - protein, 13 aa, Homo sapiens
  CDR3 for beta chain variable domain of TCR clone 231469 (TRBV7-2, TRBJ1-4)
CASSLAGLEKLFF

SEQ ID NO: 462939 - protein, 15 aa, Homo sapiens
  CDR3 for alpha chain variable domain of TCR clone 231470 (TRAV27, TRAJ52)
CAGYAGGTSYGKLTF

SEQ ID NO: 462940 - protein, 15 aa, Homo sapiens
  CDR3 for beta chain variable domain of TCR clone 231470 (TRBV20-1, TRBJ2-7)
CSAPELTSVTYEQYF

SEQ ID NO: 462941 - protein, 15 aa, Homo sapiens
  CDR3 for alpha chain variable domain of TCR clone 231471 (TRAV8-4, TRAJ10)
CAVSDQMGGGNKLPF

SEQ ID NO: 462942 - protein, 16 aa, Homo sapiens
  CDR3 for beta chain variable domain of TCR clone 231471 (TRBV20-1, TRBJ2-1)
CSARDVTPPPYNEQFF

SEQ ID NO: 462943 - protein, 13 aa, Homo sapiens
  CDR3 for alpha chain variable domain of TCR clone 231472 (TRAV8-3, TRAJ36)
CVVGATGANNLFF

SEQ ID NO: 462944 - protein, 14 aa, Homo sapiens
  CDR3 for beta chain variable domain of TCR clone 231472 (TRBV18, TRBJ2-5)
CASSPGVSQETQYF

SEQ ID NO: 462945 - protein, 14 aa, Homo sapiens
  CDR3 for alpha chain variable domain of TCR clone 231473 (TRAV23/DV6, TRAJ24)
CAASLSDSWGKLQF

SEQ ID NO: 462946 - protein, 15 aa, Homo sapiens
  CDR3 for beta chain variable domain of TCR clone 231473 (TRBV9, TRBJ1-6)
CASSVAGTGDSPLDF

SEQ ID NO: 462947 - protein, 18 aa, Homo sapiens
  CDR3 for alpha chain variable domain of TCR clone 231474 (TRAV21, TRAJ52)
CAVRPSPSGGTSYGKLTV

SEQ ID NO: 462948 - protein, 17 aa, Homo sapiens
  CDR3 for beta chain variable domain of TCR clone 231474 (TRBV13, TRBJ2-3)
CASSLSRVAGGRNTQYF

SEQ ID NO: 462949 - protein, 13 aa, Homo sapiens
  CDR3 for alpha chain variable domain of TCR clone 231475 (TRAV3, TRAJ21)
CAVIPPPFNKFYF

SEQ ID NO: 462950 - protein, 13 aa, Homo sapiens
  CDR3 for beta chain variable domain of TCR clone 231475 (TRBV20-1, TRBJ1-1)
CSAGTVGNTEAFF

SEQ ID NO: 462951 - protein, 14 aa, Homo sapiens
  CDR3 for alpha chain variable domain of TCR clone 231476 (TRAV1-2, TRAJ16)
CAVNRFSDGQKLLF

SEQ ID NO: 462952 - protein, 14 aa, Homo sapiens
  CDR3 for beta chain variable domain of TCR clone 231476 (TRBV19, TRBJ2-1)
CASPTFVLSGDQFF

SEQ ID NO: 462953 - protein, 15 aa, Homo sapiens
  CDR3 for alpha chain variable domain of TCR clone 231477 (TRAV21, TRAJ53)
CATLNSGGSNYKLTF

SEQ ID NO: 462954 - protein, 14 aa, Homo sapiens
  CDR3 for beta chain variable domain of TCR clone 231477 (TRBV15, TRBJ1-2)
CATSRVSVNYGYTF

SEQ ID NO: 462955 - protein, 14 aa, Homo sapiens
  CDR3 for alpha chain variable domain of TCR clone 231478 (TRAV13-1, TRAJ35)
CAASKGGFGNVLHC

SEQ ID NO: 462956 - protein, 17 aa, Homo sapiens
  CDR3 for beta chain variable domain of TCR clone 231478 (TRBV10-3, TRBJ2-4)
CTSVPSVNKGSKNIQYF

SEQ ID NO: 462957 - protein, 14 aa, Homo sapiens
  CDR3 for alpha chain variable domain of TCR clone 231479 (TRAV13-1, TRAJ44)
CAAKATGTASKLTF

SEQ ID NO: 462958 - protein, 15 aa, Homo sapiens
  CDR3 for beta chain variable domain of TCR clone 231479 (TRBV18, TRBJ2-1)
CSSSPPSASYNEQFF

SEQ ID NO: 462959 - protein, 10 aa, Homo sapiens
  CDR3 for alpha chain variable domain of TCR clone 231480 (TRAV12-2, TRAJ49)
CAVRRNQFYF

SEQ ID NO: 462960 - protein, 16 aa, Homo sapiens
  CDR3 for beta chain variable domain of TCR clone 231480 (TRBV28, TRBJ2-5)
CASSFSPAGGWETQYF

SEQ ID NO: 462961 - protein, 14 aa, Homo sapiens
  CDR3 for alpha chain variable domain of TCR clone 231481 (TRAV1-2, TRAJ8)
CAGREDTGFQKLVF

SEQ ID NO: 462962 - protein, 15 aa, Homo sapiens
  CDR3 for beta chain variable domain of TCR clone 231481 (TRBV11-3, TRBJ2-3)
RASLKDGREGDTQYF

SEQ ID NO: 462963 - protein, 13 aa, Homo sapiens
  CDR3 for alpha chain variable domain of TCR clone 231482 (TRAV12-3, TRAJ13)
CAMSSGGYQKVTF

SEQ ID NO: 462964 - protein, 13 aa, Homo sapiens
  CDR3 for beta chain variable domain of TCR clone 231482 (TRBV20-1, TRBJ1-1)
CSAPPGGHTAAFF

SEQ ID NO: 462965 - protein, 12 aa, Homo sapiens
  CDR3 for alpha chain variable domain of TCR clone 231483 (TRAV1-2, TRAJ29)
CAVPSGNTPPVF

SEQ ID NO: 462966 - protein, 12 aa, Homo sapiens
  CDR3 for beta chain variable domain of TCR clone 231483 (TRBV7-9, TRBJ2-7)
CASSFGSYEQYF

SEQ ID NO: 462967 - protein, 15 aa, Homo sapiens
  CDR3 for alpha chain variable domain of TCR clone 231484 (TRAV9-2, TRAJ49)
CALSPPDHTGNQFYF

SEQ ID NO: 462968 - protein, 16 aa, Homo sapiens
  CDR3 for beta chain variable domain of TCR clone 231484 (TRBV5-1, TRBJ2-5)
CASSLRRTSGQETQYF

SEQ ID NO: 462969 - protein, 17 aa, Homo sapiens
  CDR3 for alpha chain variable domain of TCR clone 231485 (TRAV17, TRAJ20)
CATRYKLSFGAGTTVTV

SEQ ID NO: 462970 - protein, 12 aa, Homo sapiens
  CDR3 for beta chain variable domain of TCR clone 231485 (TRBV11-2, TRBJ2-2)
CASSLGGGELFF

SEQ ID NO: 462971 - protein, 14 aa, Homo sapiens
  CDR3 for alpha chain variable domain of TCR clone 231486 (TRAV38-1, TRAJ40)
CALRPTSGTYKYIF

SEQ ID NO: 462972 - protein, 17 aa, Homo sapiens
  CDR3 for beta chain variable domain of TCR clone 231486 (TRBV20-1, TRBJ2-4)
CSARDWASGGRENIQYF

SEQ ID NO: 462973 - protein, 14 aa, Homo sapiens
  CDR3 for alpha chain variable domain of TCR clone 231487 (TRAV3, TRAJ34)
CAVRDINNTDKPIF

SEQ ID NO: 462974 - protein, 16 aa, Homo sapiens
  CDR3 for beta chain variable domain of TCR clone 231487 (TRBV11-2, TRBJ1-1)
CASSLRQGGEHSKAFF

SEQ ID NO: 462975 - protein, 12 aa, Homo sapiens
  CDR3 for alpha chain variable domain of TCR clone 231488 (TRAV3, TRAJ20)
CAVRDGDYKPSF

SEQ ID NO: 462976 - protein, 13 aa, Homo sapiens
  CDR3 for beta chain variable domain of TCR clone 231488 (TRBV9, TRBJ2-1)
CASSVGQRGEQFF

SEQ ID NO: 462977 - protein, 14 aa, Homo sapiens
  CDR3 for alpha chain variable domain of TCR clone 231489 (TRAV3, TRAJ20)
CAVRDSFNDYKLSF

SEQ ID NO: 462978 - protein, 14 aa, Homo sapiens
  CDR3 for beta chain variable domain of TCR clone 231489 (TRBV19, TRBJ2-1)
CASPTFVLGGEQFF

SEQ ID NO: 462979 - protein, 17 aa, Homo sapiens
  CDR3 for alpha chain variable domain of TCR clone 231490 (TRAV13-1, )
CAANIQNPDPAVYQLRD

SEQ ID NO: 462980 - protein, 14 aa, Homo sapiens
  CDR3 for beta chain variable domain of TCR clone 231490 (TRBV25-1, TRBJ1-1)
CASTHLGGNTEAFF

SEQ ID NO: 462981 - protein, 15 aa, Homo sapiens
  CDR3 for alpha chain variable domain of TCR clone 231491 (TRAV3, TRAJ3)
CAVRDRDSSASKIIF

SEQ ID NO: 462982 - protein, 18 aa, Homo sapiens
  CDR3 for beta chain variable domain of TCR clone 231491 (TRBV25-1, TRBJ1-2)
CASSGLQNGQGFIFGDTF

SEQ ID NO: 462983 - protein, 18 aa, Homo sapiens
  CDR3 for alpha chain variable domain of TCR clone 231492 (TRAV12-3, TRAJ52)
CAMSRTNAGGTSYGKLTF

SEQ ID NO: 462984 - protein, 13 aa, Homo sapiens
  CDR3 for beta chain variable domain of TCR clone 231492 (TRBV7-2, TRBJ2-5)
CASSQTSVETQYF

SEQ ID NO: 462985 - protein, 13 aa, Homo sapiens
  CDR3 for alpha chain variable domain of TCR clone 231493 (TRAV8-3, TRAJ43)
CAVVPYNKNDMRF

SEQ ID NO: 462986 - protein, 16 aa, Homo sapiens
  CDR3 for beta chain variable domain of TCR clone 231493 (TRBV7-2, TRBJ2-5)
CASSPFLTGGEETQYF

SEQ ID NO: 462987 - protein, 16 aa, Homo sapiens
  CDR3 for alpha chain variable domain of TCR clone 231494 (TRAV30, TRAJ24)
CGTEIVDADSWGKFQF

SEQ ID NO: 462988 - protein, 15 aa, Homo sapiens
  CDR3 for beta chain variable domain of TCR clone 231494 (TRBV20-1, TRBJ2-4)
CSARDLTGGPNIQYS

SEQ ID NO: 462989 - protein, 15 aa, Homo sapiens
  CDR3 for alpha chain variable domain of TCR clone 231495 (TRAV2, TRAJ11)
CAVGGRNSGYSILTF

SEQ ID NO: 462990 - protein, 14 aa, Homo sapiens
  CDR3 for beta chain variable domain of TCR clone 231495 (TRBV20-1, TRBJ2-1)
CSAQIGGSANEQFF

SEQ ID NO: 462991 - protein, 12 aa, Homo sapiens
  CDR3 for alpha chain variable domain of TCR clone 231496 (TRAV3, TRAJ20)
CAVRDPDYTLSF

SEQ ID NO: 462992 - protein, 15 aa, Homo sapiens
  CDR3 for beta chain variable domain of TCR clone 231496 (TRBV2, TRBJ2-2)
CASSRETVGTGELFF

SEQ ID NO: 462993 - protein, 16 aa, Homo sapiens
  CDR3 for alpha chain variable domain of TCR clone 231497 (TRAV30, TRAJ24)
CGTEIVDAASWGKFQF

SEQ ID NO: 462994 - protein, 14 aa, Homo sapiens
  CDR3 for beta chain variable domain of TCR clone 231497 (TRBV7-6, TRBJ2-3)
CASSLGTVTDTQYF

SEQ ID NO: 462995 - protein, 11 aa, Homo sapiens
  CDR3 for alpha chain variable domain of TCR clone 231498 (TRAV16, TRAJ33)
CALHSNYQLIW

SEQ ID NO: 462996 - protein, 13 aa, Homo sapiens
  CDR3 for beta chain variable domain of TCR clone 231498 (TRBV7-3, TRBJ1-1)
CASSQDWGAEAFF

SEQ ID NO: 462997 - protein, 14 aa, Homo sapiens
  CDR3 for alpha chain variable domain of TCR clone 231499 (TRAV13-2, TRAJ10)
CAETLPGGGNELTF

SEQ ID NO: 462998 - protein, 15 aa, Homo sapiens
  CDR3 for beta chain variable domain of TCR clone 231499 (TRBV3-1, TRBJ2-1)
CASSRDYTPRGEQFF

SEQ ID NO: 462999 - protein, 14 aa, Homo sapiens
  CDR3 for alpha chain variable domain of TCR clone 231500 (TRAV38-1, TRAJ39)
CAFAYNNAGNMLTF

SEQ ID NO: 463000 - protein, 13 aa, Homo sapiens
  CDR3 for beta chain variable domain of TCR clone 231500 (TRBV15, TRBJ1-6)
CATSGGLNSPLHF

SEQ ID NO: 463001 - protein, 11 aa, Homo sapiens
  CDR3 for alpha chain variable domain of TCR clone 231501 (TRAV35, TRAJ30)
CAPGGDDKIIF

SEQ ID NO: 463002 - protein, 18 aa, Homo sapiens
  CDR3 for beta chain variable domain of TCR clone 231501 (TRBV11-2, TRBJ2-3)
CASSLGGASRGAPNTQYF

SEQ ID NO: 463003 - protein, 14 aa, Homo sapiens
  CDR3 for alpha chain variable domain of TCR clone 231502 (TRAV12-2, TRAJ15)
CAPHTGQAGTALIF

SEQ ID NO: 463004 - protein, 14 aa, Homo sapiens
  CDR3 for beta chain variable domain of TCR clone 231502 (TRBV7-2, TRBJ2-7)
CASSPKTSVYEQYF

SEQ ID NO: 463005 - protein, 15 aa, Homo sapiens
  CDR3 for alpha chain variable domain of TCR clone 231503 (TRAV17, TRAJ52)
CATEAGGTSYGKLTF

SEQ ID NO: 463006 - protein, 15 aa, Homo sapiens
  CDR3 for beta chain variable domain of TCR clone 231503 (TRBV10-2, TRBJ2-6)
CASSEQGTGANVLTF

SEQ ID NO: 463007 - protein, 14 aa, Homo sapiens
  CDR3 for alpha chain variable domain of TCR clone 231504 (TRAV26-1, TRAJ45)
CIEVTGGAADGLTF

SEQ ID NO: 463008 - protein, 12 aa, Homo sapiens
  CDR3 for beta chain variable domain of TCR clone 231504 (TRBV12-4, TRBJ2-7)
CASSLGGYEQYF

SEQ ID NO: 463009 - protein, 15 aa, Homo sapiens
  CDR3 for alpha chain variable domain of TCR clone 231505 (TRAV29/DV5, TRAJ24)
CAASGATDSLGKFQF

SEQ ID NO: 463010 - protein, 12 aa, Homo sapiens
  CDR3 for beta chain variable domain of TCR clone 231505 (TRBV11-2, TRBJ2-2)
CASSLPTGELFF

SEQ ID NO: 463011 - protein, 14 aa, Homo sapiens
  CDR3 for alpha chain variable domain of TCR clone 231506 (TRAV16, TRAJ31)
CALSGRNNNARLMF

SEQ ID NO: 463012 - protein, 12 aa, Homo sapiens
  CDR3 for beta chain variable domain of TCR clone 231506 (TRBV11-2, TRBJ1-2)
CASSREGDGYTS

SEQ ID NO: 463013 - protein, 14 aa, Homo sapiens
  CDR3 for alpha chain variable domain of TCR clone 231507 (TRAV17, TRAJ54)
CATDANQGAQQLVF

SEQ ID NO: 463014 - protein, 14 aa, Homo sapiens
  CDR3 for beta chain variable domain of TCR clone 231507 (TRBV25-1, TRBJ1-1)
CASTHLGGNTEAFF

SEQ ID NO: 463015 - protein, 13 aa, Homo sapiens
  CDR3 for alpha chain variable domain of TCR clone 231508 (TRAV21, TRAJ20)
CAVGLRVDYKLSF

SEQ ID NO: 463016 - protein, 14 aa, Homo sapiens
  CDR3 for beta chain variable domain of TCR clone 231508 (TRBV11-2, TRBJ1-1)
CASSTQRGRTEAFF

SEQ ID NO: 463017 - protein, 15 aa, Homo sapiens
  CDR3 for alpha chain variable domain of TCR clone 231509 (TRAV21, TRAJ24)
CAARSSPDSWGKLQF

SEQ ID NO: 463018 - protein, 19 aa, Homo sapiens
  CDR3 for beta chain variable domain of TCR clone 231509 (TRBV14, TRBJ2-1)
CASSQDQLWEAPEYNEQFF

SEQ ID NO: 463019 - protein, 14 aa, Homo sapiens
  CDR3 for alpha chain variable domain of TCR clone 231510 (TRAV12-3, TRAJ10)
SHLPLAGGGNKLTF

SEQ ID NO: 463020 - protein, 14 aa, Homo sapiens
  CDR3 for beta chain variable domain of TCR clone 231510 (TRBV2, TRBJ2-7)
CASSLTSGGYEQYF

SEQ ID NO: 463021 - protein, 12 aa, Homo sapiens
  CDR3 for alpha chain variable domain of TCR clone 231511 (TRAV16, TRAJ27)
CALNHQCGQINL

SEQ ID NO: 463022 - protein, 14 aa, Homo sapiens
  CDR3 for beta chain variable domain of TCR clone 231511 (TRBV11-2, TRBJ1-5)
CASSLDRGRQPQHF

SEQ ID NO: 463023 - protein, 13 aa, Homo sapiens
  CDR3 for alpha chain variable domain of TCR clone 231512 (TRAV12-2, TRAJ37)
CAGGSGNTGKLIF

SEQ ID NO: 463024 - protein, 13 aa, Homo sapiens
  CDR3 for beta chain variable domain of TCR clone 231512 (TRBV19, TRBJ1-2)
CASSQGQVYGYTF

SEQ ID NO: 463025 - protein, 13 aa, Homo sapiens
  CDR3 for alpha chain variable domain of TCR clone 231513 (TRAV13-1, TRAJ10)
CAAAEGGGNKPTF

SEQ ID NO: 463026 - protein, 15 aa, Homo sapiens
  CDR3 for beta chain variable domain of TCR clone 231513 (TRBV7-8, TRBJ2-2)
CASSLDQGWTGELFF

SEQ ID NO: 463027 - protein, 13 aa, Homo sapiens
  CDR3 for alpha chain variable domain of TCR clone 231514 (TRAV5, TRAJ30)
CAEIANRDDKLIF

SEQ ID NO: 463028 - protein, 14 aa, Homo sapiens
  CDR3 for beta chain variable domain of TCR clone 231514 (TRBV4-1, TRBJ2-2)
CASSQAVNTGELFF

SEQ ID NO: 463029 - protein, 15 aa, Homo sapiens
  CDR3 for alpha chain variable domain of TCR clone 231515 (TRAV41, TRAJ45)
CAASYSGGGADGLTF

SEQ ID NO: 463030 - protein, 14 aa, Homo sapiens
  CDR3 for beta chain variable domain of TCR clone 231515 (TRBV12-5, TRBJ2-5)
CASGSRTHRETQYF

SEQ ID NO: 463031 - protein, 11 aa, Homo sapiens
  CDR3 for alpha chain variable domain of TCR clone 231516 (TRAV2, TRAJ13)
CASGGYQKVTF

SEQ ID NO: 463032 - protein, 13 aa, Homo sapiens
  CDR3 for beta chain variable domain of TCR clone 231516 (TRBV2, TRBJ2-7)
CASSVVEAYEQYF

SEQ ID NO: 463033 - protein, 14 aa, Homo sapiens
  CDR3 for alpha chain variable domain of TCR clone 231517 (TRAV12-2, TRAJ6)
CASKWGGGSYIPTF

SEQ ID NO: 463034 - protein, 14 aa, Homo sapiens
  CDR3 for beta chain variable domain of TCR clone 231517 (TRBV19, TRBJ1-5)
CASRAPDSFLSQHF

SEQ ID NO: 463035 - protein, 14 aa, Homo sapiens
  CDR3 for alpha chain variable domain of TCR clone 231518 (TRAV12-3, TRAJ6)
RAMSAKGGSYIPTF

SEQ ID NO: 463036 - protein, 16 aa, Homo sapiens
  CDR3 for beta chain variable domain of TCR clone 231518 (TRBV4-2, TRBJ2-1)
CASSPRAGQGANEQFF

SEQ ID NO: 463037 - protein, 15 aa, Homo sapiens
  CDR3 for alpha chain variable domain of TCR clone 231519 (TRAV20, TRAJ42)
CAVKATRGSQGNLIF

SEQ ID NO: 463038 - protein, 11 aa, Homo sapiens
  CDR3 for beta chain variable domain of TCR clone 231519 (TRBV12-4, TRBJ2-1)
CASSKFNEQFF

SEQ ID NO: 463039 - protein, 16 aa, Homo sapiens
  CDR3 for alpha chain variable domain of TCR clone 231520 (TRAV12-1, TRAJ45)
CVVNLSSGGGSDGLTF

SEQ ID NO: 463040 - protein, 15 aa, Homo sapiens
  CDR3 for beta chain variable domain of TCR clone 231520 (TRBV20-1, TRBJ2-7)
CSARDRVSGMDEQYF

SEQ ID NO: 463041 - protein, 11 aa, Homo sapiens
  CDR3 for alpha chain variable domain of TCR clone 231521 (TRAV27, TRAJ47)
SIVEYGNKLIF

SEQ ID NO: 463042 - protein, 18 aa, Homo sapiens
  CDR3 for beta chain variable domain of TCR clone 231521 (TRBV2, TRBJ2-1)
CASRGLAGGPRTYNEQFF

SEQ ID NO: 463043 - protein, 13 aa, Homo sapiens
  CDR3 for alpha chain variable domain of TCR clone 231522 (TRAV23/DV6, TRAJ9)
CAASTTGGFKTIF

SEQ ID NO: 463044 - protein, 14 aa, Homo sapiens
  CDR3 for beta chain variable domain of TCR clone 231522 (TRBV5-1, TRBJ2-3)
CASRVDVVSDTQYF

SEQ ID NO: 463045 - protein, 12 aa, Homo sapiens
  CDR3 for alpha chain variable domain of TCR clone 231523 (TRAV9-2, TRAJ5)
CALSPGRRALTF

SEQ ID NO: 463046 - protein, 15 aa, Homo sapiens
  CDR3 for beta chain variable domain of TCR clone 231523 (TRBV6-1, TRBJ2-3)
CASSERGGITDTQYF

SEQ ID NO: 463047 - protein, 11 aa, Homo sapiens
  CDR3 for alpha chain variable domain of TCR clone 231524 (TRAV21, TRAJ34)
CAVTNTDKLIF

SEQ ID NO: 463048 - protein, 15 aa, Homo sapiens
  CDR3 for beta chain variable domain of TCR clone 231524 (TRBV10-2, TRBJ2-6)
CASSEQGTGANVLTF

SEQ ID NO: 463049 - protein, 16 aa, Homo sapiens
  CDR3 for alpha chain variable domain of TCR clone 231525 (TRAV3, TRAJ21)
CAVRDIERGNFNKFYF

SEQ ID NO: 463050 - protein, 15 aa, Homo sapiens
  CDR3 for beta chain variable domain of TCR clone 231525 (TRBV19, TRBJ2-7)
CASSIGLAVSYEQYF

SEQ ID NO: 463051 - protein, 16 aa, Homo sapiens
  CDR3 for alpha chain variable domain of TCR clone 231526 (TRAV38-1, TRAJ37)
CAFKGGGSSNTGKLIF

SEQ ID NO: 463052 - protein, 13 aa, Homo sapiens
  CDR3 for beta chain variable domain of TCR clone 231526 (TRBV12-4, TRBJ2-5)
CASSLLRRETQYF

SEQ ID NO: 463053 - protein, 11 aa, Homo sapiens
  CDR3 for alpha chain variable domain of TCR clone 231527 (TRAV17, TRAJ9)
CATTGGFKTIF

SEQ ID NO: 463054 - protein, 13 aa, Homo sapiens
  CDR3 for beta chain variable domain of TCR clone 231527 (TRBV20-1, TRBJ1-1)
FSAPLWEATEPFF

SEQ ID NO: 463055 - protein, 17 aa, Homo sapiens
  CDR3 for alpha chain variable domain of TCR clone 231528 (TRAV3, TRAJ6)
CAVRDGPRAGGSYIPTS

SEQ ID NO: 463056 - protein, 14 aa, Homo sapiens
  CDR3 for beta chain variable domain of TCR clone 231528 (TRBV7-2, TRBJ2-7)
CASSPKTSIYEQYF

SEQ ID NO: 463057 - protein, 16 aa, Homo sapiens
  CDR3 for alpha chain variable domain of TCR clone 231529 (TRAV30, TRAJ24)
CGTEIVDADSWGKCQF

SEQ ID NO: 463058 - protein, 12 aa, Homo sapiens
  CDR3 for beta chain variable domain of TCR clone 231529 (TRBV11-2, TRBJ2-1)
CASSPGNNEQFF

SEQ ID NO: 463059 - protein, 13 aa, Homo sapiens
  CDR3 for alpha chain variable domain of TCR clone 231530 (TRAV1-2, TRAJ9)
CAALNTGGFKTIF

SEQ ID NO: 463060 - protein, 15 aa, Homo sapiens
  CDR3 for beta chain variable domain of TCR clone 231530 (TRBV7-9, TRBJ1-4)
CASSARTGGNEKLFF

SEQ ID NO: 463061 - protein, 14 aa, Homo sapiens
  CDR3 for alpha chain variable domain of TCR clone 231531 (TRAV8-3, TRAJ39)
CAVGAYNAGNMLTF

SEQ ID NO: 463062 - protein, 14 aa, Homo sapiens
  CDR3 for beta chain variable domain of TCR clone 231531 (TRBV6-3, TRBJ1-1)
CASSYQRRDTEAFF

SEQ ID NO: 463063 - protein, 16 aa, Homo sapiens
  CDR3 for alpha chain variable domain of TCR clone 231532 (TRAV1-2, TRAJ31)
CAFFRCQTHVWSWNSA

SEQ ID NO: 463064 - protein, 13 aa, Homo sapiens
  CDR3 for beta chain variable domain of TCR clone 231532 (TRBV7-9, TRBJ1-2)
CASSLKQNYGYTF

SEQ ID NO: 463065 - protein, 14 aa, Homo sapiens
  CDR3 for alpha chain variable domain of TCR clone 231533 (TRAV12-3, TRAJ5)
CAMSSYTGRRALTF

SEQ ID NO: 463066 - protein, 13 aa, Homo sapiens
  CDR3 for beta chain variable domain of TCR clone 231533 (TRBV28, TRBJ2-3)
CASSTGGGDTQYF

SEQ ID NO: 463067 - protein, 16 aa, Homo sapiens
  CDR3 for alpha chain variable domain of TCR clone 231534 (TRAV3, TRAJ10)
FAVRDMRAGGGNKLTF

SEQ ID NO: 463068 - protein, 19 aa, Homo sapiens
  CDR3 for beta chain variable domain of TCR clone 231534 (TRBV6-3, TRBJ1-2)
CASSYSKGRTGPPNYGYTF

SEQ ID NO: 463069 - protein, 10 aa, Homo sapiens
  CDR3 for alpha chain variable domain of TCR clone 231535 (TRAV30, TRAJ48)
CGMGNEKLTF

SEQ ID NO: 463070 - protein, 16 aa, Homo sapiens
  CDR3 for beta chain variable domain of TCR clone 231535 (TRBV27, TRBJ2-1)
SMNVEPGTSGDNEQFF

SEQ ID NO: 463071 - protein, 21 aa, Homo sapiens
  CDR3 for alpha chain variable domain of TCR clone 231536 (TRAV2, TRAJ26)
CAGSPGRLWSEFCLWSRNLIV

SEQ ID NO: 463072 - protein, 16 aa, Homo sapiens
  CDR3 for beta chain variable domain of TCR clone 231536 (TRBV13, TRBJ2-2)
CASSPRTGEHTGELFF

SEQ ID NO: 463073 - protein, 13 aa, Homo sapiens
  CDR3 for alpha chain variable domain of TCR clone 231537 (TRAV12-1, TRAJ26)
CVVRRNYGQNFVF

SEQ ID NO: 463074 - protein, 16 aa, Homo sapiens
  CDR3 for beta chain variable domain of TCR clone 231537 (TRBV20-1, TRBJ1-2)
CSASMGQGVANYGYAF

SEQ ID NO: 463075 - protein, 13 aa, Homo sapiens
  CDR3 for alpha chain variable domain of TCR clone 231538 (TRAV6, TRAJ33)
CALPMASNYQLIW

SEQ ID NO: 463076 - protein, 15 aa, Homo sapiens
  CDR3 for beta chain variable domain of TCR clone 231538 (TRBV11-2, TRBJ2-2)
CASRGLAANTGELFF

SEQ ID NO: 463077 - protein, 12 aa, Homo sapiens
  CDR3 for alpha chain variable domain of TCR clone 231539 (TRAV12-3, TRAJ17)
CAMTLTGNKLTF

SEQ ID NO: 463078 - protein, 14 aa, Homo sapiens
  CDR3 for beta chain variable domain of TCR clone 231539 (TRBV19, TRBJ2-5)
CASSSSGIQETQYF

SEQ ID NO: 463079 - protein, 13 aa, Homo sapiens
  CDR3 for alpha chain variable domain of TCR clone 231540 (TRAV2, TRAJ40)
CTVVTSGTYKYIF

SEQ ID NO: 463080 - protein, 14 aa, Homo sapiens
  CDR3 for beta chain variable domain of TCR clone 231540 (TRBV19, TRBJ2-1)
CASATFVLSGEQFF

SEQ ID NO: 463081 - protein, 14 aa, Homo sapiens
  CDR3 for alpha chain variable domain of TCR clone 231541 (TRAV12-2, TRAJ13)
CAVKKTGGYKKVTF

SEQ ID NO: 463082 - protein, 15 aa, Homo sapiens
  CDR3 for beta chain variable domain of TCR clone 231541 (TRBV27, TRBJ2-1)
CASSNGGGSSNERFF

SEQ ID NO: 463083 - protein, 14 aa, Homo sapiens
  CDR3 for alpha chain variable domain of TCR clone 231542 (TRAV35, TRAJ10)
CAGILTGGGNKLTF

SEQ ID NO: 463084 - protein, 17 aa, Homo sapiens
  CDR3 for beta chain variable domain of TCR clone 231542 (TRBV7-8, TRBJ2-7)
CASSFTSGRPPSYEQYF

SEQ ID NO: 463085 - protein, 13 aa, Homo sapiens
  CDR3 for alpha chain variable domain of TCR clone 231543 (TRAV12-1, TRAJ5)
CGFTDTGRRALTF

SEQ ID NO: 463086 - protein, 15 aa, Homo sapiens
  CDR3 for beta chain variable domain of TCR clone 231543 (TRBV9, TRBJ1-6)
CASSVAGTGDSPLHF

SEQ ID NO: 463087 - protein, 11 aa, Homo sapiens
  CDR3 for alpha chain variable domain of TCR clone 231544 (TRAV1-2, TRAJ20)
CAVANDYKLSF

SEQ ID NO: 463088 - protein, 18 aa, Homo sapiens
  CDR3 for beta chain variable domain of TCR clone 231544 (TRBV20-1, TRBJ2-6)
CSAETTPTHGPGADVLTF

SEQ ID NO: 463089 - protein, 13 aa, Homo sapiens
  CDR3 for alpha chain variable domain of TCR clone 231545 (TRAV1-2, TRAJ12)
CAVSMDCSYKLIF

SEQ ID NO: 463090 - protein, 15 aa, Homo sapiens
  CDR3 for beta chain variable domain of TCR clone 231545 (TRBV27, TRBJ2-5)
CASSLIPSGGETQYF

SEQ ID NO: 463091 - protein, 15 aa, Homo sapiens
  CDR3 for alpha chain variable domain of TCR clone 231546 (TRAV3, TRAJ5)
CAVRDLDTGRRALTF

SEQ ID NO: 463092 - protein, 14 aa, Homo sapiens
  CDR3 for beta chain variable domain of TCR clone 231546 (TRBV27, TRBJ2-1)
CASSATGGYNEQFF

SEQ ID NO: 463093 - protein, 16 aa, Homo sapiens
  CDR3 for alpha chain variable domain of TCR clone 231547 (TRAV16, TRAJ52)
CALSAAGGTSYGKLTF

SEQ ID NO: 463094 - protein, 13 aa, Homo sapiens
  CDR3 for beta chain variable domain of TCR clone 231547 (TRBV7-9, TRBJ2-5)
CASLSPGQETQYF

SEQ ID NO: 463095 - protein, 11 aa, Homo sapiens
  CDR3 for alpha chain variable domain of TCR clone 231548 (TRAV23/DV6, TRAJ9)
CFHTGGFKTIF

SEQ ID NO: 463096 - protein, 20 aa, Homo sapiens
  CDR3 for beta chain variable domain of TCR clone 231548 (TRBV28, TRBJ2-1)
CASTPIGRSPGLAGGNEQFF

SEQ ID NO: 463097 - protein, 12 aa, Homo sapiens
  CDR3 for alpha chain variable domain of TCR clone 231549 (TRAV23/DV6, TRAJ24)
CAANDSWGKLQC

SEQ ID NO: 463098 - protein, 16 aa, Homo sapiens
  CDR3 for beta chain variable domain of TCR clone 231549 (TRBV12-4, TRBJ2-5)
CASSLSTSGGKETQYF

SEQ ID NO: 463099 - protein, 13 aa, Homo sapiens
  CDR3 for alpha chain variable domain of TCR clone 231550 (TRAV21, TRAJ17)
CAPVKAAGNKLTF

SEQ ID NO: 463100 - protein, 11 aa, Homo sapiens
  CDR3 for beta chain variable domain of TCR clone 231550 (TRBV20-1, TRBJ1-2)
CIIWASYGYTF

SEQ ID NO: 463101 - protein, 17 aa, Homo sapiens
  CDR3 for alpha chain variable domain of TCR clone 231551 (TRAV27, TRAJ52)
CAGAGWAGGTSYGKMTF

SEQ ID NO: 463102 - protein, 16 aa, Homo sapiens
  CDR3 for beta chain variable domain of TCR clone 231551 (TRBV19, TRBJ2-1)
CASSKAGPSSYNEQFF

SEQ ID NO: 463103 - protein, 14 aa, Homo sapiens
  CDR3 for alpha chain variable domain of TCR clone 231552 (TRAV14/DV4, TRAJ15)
CAMRRVQAGTALIF

SEQ ID NO: 463104 - protein, 11 aa, Homo sapiens
  CDR3 for beta chain variable domain of TCR clone 231552 (TRBV7-2, TRBJ2-7)
CASSSGLWQYF

SEQ ID NO: 463105 - protein, 15 aa, Homo sapiens
  CDR3 for alpha chain variable domain of TCR clone 231553 (TRAV21, TRAJ53)
CATLNSGGSNYKLTF

SEQ ID NO: 463106 - protein, 17 aa, Homo sapiens
  CDR3 for beta chain variable domain of TCR clone 231553 (TRBV11-2, TRBJ2-1)
CASSLYPPGVEYNEHFF

SEQ ID NO: 463107 - protein, 15 aa, Homo sapiens
  CDR3 for alpha chain variable domain of TCR clone 231554 (TRAV27, TRAJ38)
CAARRNAGNNRKLIW

SEQ ID NO: 463108 - protein, 15 aa, Homo sapiens
  CDR3 for beta chain variable domain of TCR clone 231554 (TRBV27, TRBJ2-5)
CASSLYPRGGETQYF

SEQ ID NO: 463109 - protein, 13 aa, Homo sapiens
  CDR3 for alpha chain variable domain of TCR clone 231555 (TRAV13-2, TRAJ22)
CLGWISYARQLTF

SEQ ID NO: 463110 - protein, 15 aa, Homo sapiens
  CDR3 for beta chain variable domain of TCR clone 231555 (TRBV7-2, TRBJ2-3)
CASSSTGLETDTQYF

SEQ ID NO: 463111 - protein, 17 aa, Homo sapiens
  CDR3 for alpha chain variable domain of TCR clone 231556 (TRAV8-6, TRAJ52)
CAVTRNAGGTSYGKLTF

SEQ ID NO: 463112 - protein, 13 aa, Homo sapiens
  CDR3 for beta chain variable domain of TCR clone 231556 (TRBV7-9, TRBJ1-2)
CASSLKQKYGYTF

SEQ ID NO: 463113 - protein, 15 aa, Homo sapiens
  CDR3 for alpha chain variable domain of TCR clone 231557 (TRAV9-2, TRAJ9)
CALSLTNTGGFKTIF

SEQ ID NO: 463114 - protein, 14 aa, Homo sapiens
  CDR3 for beta chain variable domain of TCR clone 231557 (TRBV19, TRBJ2-7)
CASSVDSESYEQYF

SEQ ID NO: 463115 - protein, 16 aa, Homo sapiens
  CDR3 for alpha chain variable domain of TCR clone 231558 (TRAV21, TRAJ52)
CAVTNAGGTSYGNLTF

SEQ ID NO: 463116 - protein, 13 aa, Homo sapiens
  CDR3 for beta chain variable domain of TCR clone 231558 (TRBV27, TRBJ2-1)
CASRTLGVGEQFF

SEQ ID NO: 463117 - protein, 14 aa, Homo sapiens
  CDR3 for alpha chain variable domain of TCR clone 231559 (TRAV1-2, TRAJ8)
CAVREDTVFQKLVF

SEQ ID NO: 463118 - protein, 14 aa, Homo sapiens
  CDR3 for beta chain variable domain of TCR clone 231559 (TRBV29-1, TRBJ2-5)
CSVETSGSGETQYF

SEQ ID NO: 463119 - protein, 12 aa, Homo sapiens
  CDR3 for alpha chain variable domain of TCR clone 231560 (TRAV30, TRAJ15)
CGTNQAGTALIF

SEQ ID NO: 463120 - protein, 13 aa, Homo sapiens
  CDR3 for beta chain variable domain of TCR clone 231560 (TRBV7-9, TRBJ1-2)
CASSLKQNYGYTF

SEQ ID NO: 463121 - protein, 14 aa, Homo sapiens
  CDR3 for alpha chain variable domain of TCR clone 231561 (TRAV8-1, TRAJ5)
CAVRTDTGRRALTF

SEQ ID NO: 463122 - protein, 15 aa, Homo sapiens
  CDR3 for beta chain variable domain of TCR clone 231561 (TRBV28, TRBJ2-1)
CASSIIAGGRSEQFF

SEQ ID NO: 463123 - protein, 16 aa, Homo sapiens
  CDR3 for alpha chain variable domain of TCR clone 231562 (TRAV1-2, TRAJ10)
CAVRDQGGGGGNKLTF

SEQ ID NO: 463124 - protein, 15 aa, Homo sapiens
  CDR3 for beta chain variable domain of TCR clone 231562 (TRBV29-1, TRBJ1-1)
CSVGDSRNTELSLDK

SEQ ID NO: 463125 - protein, 14 aa, Homo sapiens
  CDR3 for alpha chain variable domain of TCR clone 231563 (TRAV1-2, TRAJ8)
CAVREDTGCQKLVF

SEQ ID NO: 463126 - protein, 14 aa, Homo sapiens
  CDR3 for beta chain variable domain of TCR clone 231563 (TRBV5-4, TRBJ1-1)
CASSLDSRRDEAFF

SEQ ID NO: 463127 - protein, 13 aa, Homo sapiens
  CDR3 for alpha chain variable domain of TCR clone 231564 (TRAV12-3, TRAJ9)
CAMRNTGGFKTIF

SEQ ID NO: 463128 - protein, 14 aa, Homo sapiens
  CDR3 for beta chain variable domain of TCR clone 231564 (TRBV11-2, TRBJ2-7)
CASSATGEGYEQYC

SEQ ID NO: 463129 - protein, 12 aa, Homo sapiens
  CDR3 for alpha chain variable domain of TCR clone 231565 (TRAV1-2, TRAJ17)
CAVRAAGKKLTF

SEQ ID NO: 463130 - protein, 16 aa, Homo sapiens
  CDR3 for beta chain variable domain of TCR clone 231565 (TRBV20-1, TRBJ2-1)
CSAPGLAGSYSDEQFF

SEQ ID NO: 463131 - protein, 13 aa, Homo sapiens
  CDR3 for alpha chain variable domain of TCR clone 231566 (TRAV23/DV6, TRAJ24)
CAASTDSWGKFQF

SEQ ID NO: 463132 - protein, 12 aa, Homo sapiens
  CDR3 for beta chain variable domain of TCR clone 231566 (TRBV5-4, TRBJ2-5)
CASSSTRETQYF

SEQ ID NO: 463133 - protein, 14 aa, Homo sapiens
  CDR3 for alpha chain variable domain of TCR clone 231567 (TRAV29/DV5, TRAJ47)
CAASSIEYGNKLVF

SEQ ID NO: 463134 - protein, 12 aa, Homo sapiens
  CDR3 for beta chain variable domain of TCR clone 231567 (TRBV29-1, TRBJ2-3)
CSVTGGADTQYF

SEQ ID NO: 463135 - protein, 14 aa, Homo sapiens
  CDR3 for alpha chain variable domain of TCR clone 231568 (TRAV1-2, TRAJ16)
CAVNRFSDGKKLLI

SEQ ID NO: 463136 - protein, 15 aa, Homo sapiens
  CDR3 for beta chain variable domain of TCR clone 231568 (TRBV7-9, TRBJ1-6)
CASSSPGRGNSPLHF

SEQ ID NO: 463137 - protein, 17 aa, Homo sapiens
  CDR3 for alpha chain variable domain of TCR clone 231569 (TRAV21, TRAJ52)
AASQPGDSATYLCAVTN

SEQ ID NO: 463138 - protein, 17 aa, Homo sapiens
  CDR3 for beta chain variable domain of TCR clone 231569 (TRBV28, TRBJ2-5)
CASSRQGGLAGAETQYF

SEQ ID NO: 463139 - protein, 15 aa, Homo sapiens
  CDR3 for alpha chain variable domain of TCR clone 231570 (TRAV14/DV4, TRAJ12)
CAMREGWDSSYKLIF

SEQ ID NO: 463140 - protein, 16 aa, Homo sapiens
  CDR3 for beta chain variable domain of TCR clone 231570 (TRBV2, TRBJ2-5)
CASGETQGVGEETQHF

SEQ ID NO: 463141 - protein, 16 aa, Homo sapiens
  CDR3 for alpha chain variable domain of TCR clone 231571 (TRAV12-3, TRAJ53)
CAMSPGSGGSNYKLTF

SEQ ID NO: 463142 - protein, 14 aa, Homo sapiens
  CDR3 for beta chain variable domain of TCR clone 231571 (TRBV4-2, TRBJ2-5)
CASSQDRGRETQYF

SEQ ID NO: 463143 - protein, 14 aa, Homo sapiens
  CDR3 for alpha chain variable domain of TCR clone 231572 (TRAV12-3, TRAJ15)
CAMIPHQAGTALIF

SEQ ID NO: 463144 - protein, 12 aa, Homo sapiens
  CDR3 for beta chain variable domain of TCR clone 231572 (TRBV11-2, TRBJ2-2)
CASSFGGGELFF

SEQ ID NO: 463145 - protein, 14 aa, Homo sapiens
  CDR3 for alpha chain variable domain of TCR clone 231573 (TRAV1-2, TRAJ16)
CAVNRFSDGQKLLF

SEQ ID NO: 463146 - protein, 15 aa, Homo sapiens
  CDR3 for beta chain variable domain of TCR clone 231573 (TRBV7-9, TRBJ1-6)
CASTSPGRGNSPLHF

SEQ ID NO: 463147 - protein, 11 aa, Homo sapiens
  CDR3 for alpha chain variable domain of TCR clone 231574 (TRAV17, TRAJ43)
CATPRSNDMRS

SEQ ID NO: 463148 - protein, 15 aa, Homo sapiens
  CDR3 for beta chain variable domain of TCR clone 231574 (TRBV11-2, TRBJ2-1)
CASSLGTSGLNEQFF

SEQ ID NO: 463149 - protein, 17 aa, Homo sapiens
  CDR3 for alpha chain variable domain of TCR clone 231575 (TRAV8-6, TRAJ52)
CALTRNAGGTSYGKLTF

SEQ ID NO: 463150 - protein, 13 aa, Homo sapiens
  CDR3 for beta chain variable domain of TCR clone 231575 (TRBV7-9, TRBJ1-2)
CASSLKQNYGYTF

SEQ ID NO: 463151 - protein, 21 aa, Homo sapiens
  CDR3 for alpha chain variable domain of TCR clone 231576 (TRAV38-1, TRAJ4)
CDVFLCFHDSLFSGGYNKLIF

SEQ ID NO: 463152 - protein, 14 aa, Homo sapiens
  CDR3 for beta chain variable domain of TCR clone 231576 (TRBV12-4, TRBJ1-1)
CASRQGQEYTEAFF

SEQ ID NO: 463153 - protein, 17 aa, Homo sapiens
  CDR3 for alpha chain variable domain of TCR clone 231577 (TRAV35, TRAJ28)
CAGLQVYSGAGSYQLTF

SEQ ID NO: 463154 - protein, 15 aa, Homo sapiens
  CDR3 for beta chain variable domain of TCR clone 231577 (TRBV2, TRBJ1-2)
CSSSEIGGANYGYTF

SEQ ID NO: 463155 - protein, 14 aa, Homo sapiens
  CDR3 for alpha chain variable domain of TCR clone 231578 (TRAV17, TRAJ57)
CVTDPQGGSEKLFF

SEQ ID NO: 463156 - protein, 14 aa, Homo sapiens
  CDR3 for beta chain variable domain of TCR clone 231578 (TRBV7-2, TRBJ1-1)
CASSFLTGTTEAFF

SEQ ID NO: 463157 - protein, 17 aa, Homo sapiens
  CDR3 for alpha chain variable domain of TCR clone 231579 (TRAV17, TRAJ52)
CATERPSGGTSYGKLTF

SEQ ID NO: 463158 - protein, 13 aa, Homo sapiens
  CDR3 for beta chain variable domain of TCR clone 231579 (TRBV6-4, TRBJ1-5)
CASSADLNQTQHF

SEQ ID NO: 463159 - protein, 12 aa, Homo sapiens
  CDR3 for alpha chain variable domain of TCR clone 231580 (TRAV25, TRAJ38)
CAGTGNNRKLIW

SEQ ID NO: 463160 - protein, 14 aa, Homo sapiens
  CDR3 for beta chain variable domain of TCR clone 231580 (TRBV19, TRBJ1-5)
CASSKMTGPQPKHF

SEQ ID NO: 463161 - protein, 15 aa, Homo sapiens
  CDR3 for alpha chain variable domain of TCR clone 231581 (TRAV23/DV6, TRAJ33)
CAASNSGGGNYQLIW

SEQ ID NO: 463162 - protein, 16 aa, Homo sapiens
  CDR3 for beta chain variable domain of TCR clone 231581 (TRBV5-1, TRBJ2-3)
CASSLGLAVYTDTQYF

SEQ ID NO: 463163 - protein, 15 aa, Homo sapiens
  CDR3 for alpha chain variable domain of TCR clone 231582 (TRAV12-2, TRAJ8)
CAVREENTGFQKLVF

SEQ ID NO: 463164 - protein, 15 aa, Homo sapiens
  CDR3 for beta chain variable domain of TCR clone 231582 (TRBV28, TRBJ2-4)
CAAGSGTLPMGIQYF

SEQ ID NO: 463165 - protein, 16 aa, Homo sapiens
  CDR3 for alpha chain variable domain of TCR clone 231583 (TRAV26-1, TRAJ37)
CIVRGDGSGNTGKLIF

SEQ ID NO: 463166 - protein, 17 aa, Homo sapiens
  CDR3 for beta chain variable domain of TCR clone 231583 (TRBV4-1, TRBJ2-7)
CASSRDPLGVRVGEQYF

SEQ ID NO: 463167 - protein, 15 aa, Homo sapiens
  CDR3 for alpha chain variable domain of TCR clone 231584 (TRAV4, TRAJ42)
CLAGGYGGSQGNLIF

SEQ ID NO: 463168 - protein, 16 aa, Homo sapiens
  CDR3 for beta chain variable domain of TCR clone 231584 (TRBV27, TRBJ1-1)
CASSTRTGGVGTEAFF

SEQ ID NO: 463169 - protein, 16 aa, Homo sapiens
  CDR3 for alpha chain variable domain of TCR clone 231585 (TRAV3, TRAJ10)
CAVRDMRAGGGNKLTF

SEQ ID NO: 463170 - protein, 14 aa, Homo sapiens
  CDR3 for beta chain variable domain of TCR clone 231585 (TRBV27, TRBJ2-5)
CASSSLKGWETQYF

SEQ ID NO: 463171 - protein, 14 aa, Homo sapiens
  CDR3 for alpha chain variable domain of TCR clone 231586 (TRAV12-3, TRAJ58)
CAMSTETSGSRLTF

SEQ ID NO: 463172 - protein, 13 aa, Homo sapiens
  CDR3 for beta chain variable domain of TCR clone 231586 (TRBV27, TRBJ2-3)
CASSGGRTETQYF

SEQ ID NO: 463173 - protein, 13 aa, Homo sapiens
  CDR3 for alpha chain variable domain of TCR clone 231587 (TRAV8-4, TRAJ30)
CAVSVNRDDKIIF

SEQ ID NO: 463174 - protein, 17 aa, Homo sapiens
  CDR3 for beta chain variable domain of TCR clone 231587 (TRBV7-9, TRBJ1-1)
CASSLGIAGAENTEAFF

SEQ ID NO: 463175 - protein, 16 aa, Homo sapiens
  CDR3 for alpha chain variable domain of TCR clone 231588 (TRAV20, TRAJ22)
CAVQASSSGSARQLTF

SEQ ID NO: 463176 - protein, 15 aa, Homo sapiens
  CDR3 for beta chain variable domain of TCR clone 231588 (TRBV7-2, TRBJ2-1)
CASTHGTGIYNEQFF

SEQ ID NO: 463177 - protein, 14 aa, Homo sapiens
  CDR3 for alpha chain variable domain of TCR clone 231589 (TRAV1-1, TRAJ30)
CAVRYLNRDDKIIF

SEQ ID NO: 463178 - protein, 13 aa, Homo sapiens
  CDR3 for beta chain variable domain of TCR clone 231589 (TRBV11-2, TRBJ2-5)
CASSSTGEETQYF

SEQ ID NO: 463179 - protein, 15 aa, Homo sapiens
  CDR3 for alpha chain variable domain of TCR clone 231590 (TRAV16, TRAJ16)
CALQGGGSDGQKLLF

SEQ ID NO: 463180 - protein, 15 aa, Homo sapiens
  CDR3 for beta chain variable domain of TCR clone 231590 (TRBV4-1, TRBJ1-4)
CASSDTGGTNEKLFF

SEQ ID NO: 463181 - protein, 21 aa, Homo sapiens
  CDR3 for alpha chain variable domain of TCR clone 231591 (TRAV8-6, TRAJ38)
CAVRNAGNNHIHNTDPAVYQL

SEQ ID NO: 463182 - protein, 15 aa, Homo sapiens
  CDR3 for beta chain variable domain of TCR clone 231591 (TRBV4-1, TRBJ2-2)
CASSEGQGITGELFF

SEQ ID NO: 463183 - protein, 14 aa, Homo sapiens
  CDR3 for alpha chain variable domain of TCR clone 231592 (TRAV8-3, TRAJ4)
CAVGASGGYNKLIF

SEQ ID NO: 463184 - protein, 13 aa, Homo sapiens
  CDR3 for beta chain variable domain of TCR clone 231592 (TRBV18, TRBJ2-5)
CASSLQGQETQYF

SEQ ID NO: 463185 - protein, 15 aa, Homo sapiens
  CDR3 for alpha chain variable domain of TCR clone 231593 (TRAV8-6, TRAJ11)
CAVSDRRSGYSTLTF

SEQ ID NO: 463186 - protein, 14 aa, Homo sapiens
  CDR3 for beta chain variable domain of TCR clone 231593 (TRBV25-1, TRBJ1-1)
CASTHLGGNTEAFF

SEQ ID NO: 463187 - protein, 12 aa, Homo sapiens
  CDR3 for alpha chain variable domain of TCR clone 231594 (TRAV12-2, TRAJ10)
WGVTGGGNKLTF

SEQ ID NO: 463188 - protein, 10 aa, Homo sapiens
  CDR3 for beta chain variable domain of TCR clone 231594 (TRBV19, TRBJ1-1)
CASRQVEAFF

SEQ ID NO: 463189 - protein, 13 aa, Homo sapiens
  CDR3 for alpha chain variable domain of TCR clone 231595 (TRAV23/DV6, TRAJ16)
CAASISDGQKLLF

SEQ ID NO: 463190 - protein, 15 aa, Homo sapiens
  CDR3 for beta chain variable domain of TCR clone 231595 (TRBV2, TRBJ2-2)
CASSRETVGTGKLFF

SEQ ID NO: 463191 - protein, 18 aa, Homo sapiens
  CDR3 for alpha chain variable domain of TCR clone 231596 (TRAV21, TRAJ52)
CAVRTSPAGGTSYGELTF

SEQ ID NO: 463192 - protein, 13 aa, Homo sapiens
  CDR3 for beta chain variable domain of TCR clone 231596 (TRBV12-4, TRBJ2-1)
CASSHYTDNEQFF

SEQ ID NO: 463193 - protein, 13 aa, Homo sapiens
  CDR3 for alpha chain variable domain of TCR clone 231597 (TRAV1-2, TRAJ9)
CAALNTGGFKTIF

SEQ ID NO: 463194 - protein, 15 aa, Homo sapiens
  CDR3 for beta chain variable domain of TCR clone 231597 (TRBV7-3, TRBJ2-1)
CASSQRGGALIEQFF

SEQ ID NO: 463195 - protein, 18 aa, Homo sapiens
  CDR3 for alpha chain variable domain of TCR clone 231598 (TRAV21, TRAJ52)
CAVRPSPAGGTSYGKLTF

SEQ ID NO: 463196 - protein, 22 aa, Homo sapiens
  CDR3 for beta chain variable domain of TCR clone 231598 (TRBV6-1, TRBJ1-3)
CASVQGGGWKHHIFWRGKLAHC

SEQ ID NO: 463197 - protein, 13 aa, Homo sapiens
  CDR3 for alpha chain variable domain of TCR clone 231599 (TRAV21, TRAJ24)
GLMTTDSWGRLQF

SEQ ID NO: 463198 - protein, 12 aa, Homo sapiens
  CDR3 for beta chain variable domain of TCR clone 231599 (TRBV11-2, TRBJ2-7)
CASSPPADEQYF

SEQ ID NO: 463199 - protein, 14 aa, Homo sapiens
  CDR3 for alpha chain variable domain of TCR clone 231600 (TRAV12-1, TRAJ22)
CVAFSSVSARQLTF

SEQ ID NO: 463200 - protein, 13 aa, Homo sapiens
  CDR3 for beta chain variable domain of TCR clone 231600 (TRBV15, TRBJ1-6)
CATSGGLNSPLHF

SEQ ID NO: 463201 - protein, 17 aa, Homo sapiens
  CDR3 for alpha chain variable domain of TCR clone 231601 (TRAV3, TRAJ6)
CAVRDGPRAGGSYIPTV

SEQ ID NO: 463202 - protein, 14 aa, Homo sapiens
  CDR3 for beta chain variable domain of TCR clone 231601 (TRBV11-2, TRBJ2-3)
CASSRLARTDTQYF

SEQ ID NO: 463203 - protein, 18 aa, Homo sapiens
  CDR3 for alpha chain variable domain of TCR clone 231602 (TRAV12-3, TRAJ52)
CAMSVGGAGGTSYGELTF

SEQ ID NO: 463204 - protein, 15 aa, Homo sapiens
  CDR3 for beta chain variable domain of TCR clone 231602 (TRBV27, TRBJ1-6)
CASSFYRGLGSPLHF

SEQ ID NO: 463205 - protein, 15 aa, Homo sapiens
  CDR3 for alpha chain variable domain of TCR clone 231603 (TRAV26-1, TRAJ29)
CIVRVEGSGNTPLVF

SEQ ID NO: 463206 - protein, 10 aa, Homo sapiens
  CDR3 for beta chain variable domain of TCR clone 231603 (TRBV28, TRBJ1-2)
CASSSDRAVF

SEQ ID NO: 463207 - protein, 15 aa, Homo sapiens
  CDR3 for alpha chain variable domain of TCR clone 231604 (TRAV4, TRAJ31)
CCVLLPRGPDARLVF

SEQ ID NO: 463208 - protein, 15 aa, Homo sapiens
  CDR3 for beta chain variable domain of TCR clone 231604 (TRBV7-8, TRBJ1-2)
CASSLVLDGGLGYTF

SEQ ID NO: 463209 - protein, 13 aa, Homo sapiens
  CDR3 for alpha chain variable domain of TCR clone 231605 (TRAV27, TRAJ45)
CRSSGGGADGLTF

SEQ ID NO: 463210 - protein, 17 aa, Homo sapiens
  CDR3 for beta chain variable domain of TCR clone 231605 (TRBV11-2, TRBJ2-1)
CASSLDPPGVEYNEQFF

SEQ ID NO: 463211 - protein, 13 aa, Homo sapiens
  CDR3 for alpha chain variable domain of TCR clone 231606 (TRAV21, TRAJ27)
CAACPGNAGKSTF

SEQ ID NO: 463212 - protein, 14 aa, Homo sapiens
  CDR3 for beta chain variable domain of TCR clone 231606 (TRBV11-2, TRBJ2-7)
CASSLGAGAYEQYF

SEQ ID NO: 463213 - protein, 13 aa, Homo sapiens
  CDR3 for alpha chain variable domain of TCR clone 231607 (TRAV20, TRAJ37)
CAGCSSNTGTLIF

SEQ ID NO: 463214 - protein, 15 aa, Homo sapiens
  CDR3 for beta chain variable domain of TCR clone 231607 (TRBV7-2, TRBJ2-1)
CASSFQADEYNEQFF

SEQ ID NO: 463215 - protein, 14 aa, Homo sapiens
  CDR3 for alpha chain variable domain of TCR clone 231608 (TRAV27, TRAJ58)
CAGDGETSGSRLTF

SEQ ID NO: 463216 - protein, 14 aa, Homo sapiens
  CDR3 for beta chain variable domain of TCR clone 231608 (TRBV11-2, TRBJ1-2)
CASSLYRGNYGYTF

SEQ ID NO: 463217 - protein, 15 aa, Homo sapiens
  CDR3 for alpha chain variable domain of TCR clone 231609 (TRAV35, TRAJ50)
CAGQLRNTSYDKVIF

SEQ ID NO: 463218 - protein, 12 aa, Homo sapiens
  CDR3 for beta chain variable domain of TCR clone 231609 (TRBV5-1, TRBJ2-5)
CASSLGLETQYF

SEQ ID NO: 463219 - protein, 11 aa, Homo sapiens
  CDR3 for alpha chain variable domain of TCR clone 231610 (TRAV27, TRAJ20)
CAGPNDYKLSF

SEQ ID NO: 463220 - protein, 14 aa, Homo sapiens
  CDR3 for beta chain variable domain of TCR clone 231610 (TRBV6-1, TRBJ1-1)
CASTPLQMNTEAFF

SEQ ID NO: 463221 - protein, 16 aa, Homo sapiens
  CDR3 for alpha chain variable domain of TCR clone 231611 (TRAV8-3, TRAJ42)
CAVAGDYGGSQGNLIF

SEQ ID NO: 463222 - protein, 16 aa, Homo sapiens
  CDR3 for beta chain variable domain of TCR clone 231611 (TRBV15, TRBJ2-3)
CATSRDLGIVTDTQYF

SEQ ID NO: 463223 - protein, 14 aa, Homo sapiens
  CDR3 for alpha chain variable domain of TCR clone 231612 (TRAV12-2, TRAJ36)
CAVKISTGANNLFF

SEQ ID NO: 463224 - protein, 15 aa, Homo sapiens
  CDR3 for beta chain variable domain of TCR clone 231612 (TRBV6-3, TRBJ2-7)
CASSSPGTVFYEQYF

SEQ ID NO: 463225 - protein, 18 aa, Homo sapiens
  CDR3 for alpha chain variable domain of TCR clone 231613 (TRAV13-1, TRAJ52)
CAAKNPNAGGTSYGKLTF

SEQ ID NO: 463226 - protein, 15 aa, Homo sapiens
  CDR3 for beta chain variable domain of TCR clone 231613 (TRBV5-1, TRBJ1-1)
CASSSTTGTNTEAFF

SEQ ID NO: 463227 - protein, 15 aa, Homo sapiens
  CDR3 for alpha chain variable domain of TCR clone 231614 (TRAV35, TRAJ58)
CTGRRQETSGSRLTL

SEQ ID NO: 463228 - protein, 11 aa, Homo sapiens
  CDR3 for beta chain variable domain of TCR clone 231614 (TRBV11-2, TRBJ1-1)
CASSINTEAFF

SEQ ID NO: 463229 - protein, 14 aa, Homo sapiens
  CDR3 for alpha chain variable domain of TCR clone 231615 (TRAV1-1, TRAJ27)
CAVIYNTNAGKSTF

SEQ ID NO: 463230 - protein, 14 aa, Homo sapiens
  CDR3 for beta chain variable domain of TCR clone 231615 (TRBV25-1, TRBJ1-1)
CASTHLGGNTEVVF

SEQ ID NO: 463231 - protein, 13 aa, Homo sapiens
  CDR3 for alpha chain variable domain of TCR clone 231616 (TRAV8-6, TRAJ49)
CAVITNTGNQFYF

SEQ ID NO: 463232 - protein, 12 aa, Homo sapiens
  CDR3 for beta chain variable domain of TCR clone 231616 (TRBV11-2, TRBJ2-2)
CASSRGGGELFF

SEQ ID NO: 463233 - protein, 16 aa, Homo sapiens
  CDR3 for alpha chain variable domain of TCR clone 231617 (TRAV3, TRAJ37)
CAVRGKGSGNTGKLIF

SEQ ID NO: 463234 - protein, 14 aa, Homo sapiens
  CDR3 for beta chain variable domain of TCR clone 231617 (TRBV19, TRBJ2-5)
CASSMTGQQETQYF

SEQ ID NO: 463235 - protein, 15 aa, Homo sapiens
  CDR3 for alpha chain variable domain of TCR clone 231618 (TRAV13-1, TRAJ42)
CAASIAGGSQGNLIF

SEQ ID NO: 463236 - protein, 14 aa, Homo sapiens
  CDR3 for beta chain variable domain of TCR clone 231618 (TRBV7-6, TRBJ2-3)
CASSLGTATDTQYF

SEQ ID NO: 463237 - protein, 14 aa, Homo sapiens
  CDR3 for alpha chain variable domain of TCR clone 231619 (TRAV8-3, TRAJ4)
CAVGAAGGYNKLIF

SEQ ID NO: 463238 - protein, 15 aa, Homo sapiens
  CDR3 for beta chain variable domain of TCR clone 231619 (TRBV18, TRBJ1-1)
CASSPRQGENTEAFF

SEQ ID NO: 463239 - protein, 12 aa, Homo sapiens
  CDR3 for alpha chain variable domain of TCR clone 231620 (TRAV2, TRAJ9)
CAVGAGVLKTIF

SEQ ID NO: 463240 - protein, 16 aa, Homo sapiens
  CDR3 for beta chain variable domain of TCR clone 231620 (TRBV13, TRBJ2-2)
CASSPRTGEHTGELFF

SEQ ID NO: 463241 - protein, 14 aa, Homo sapiens
  CDR3 for alpha chain variable domain of TCR clone 231621 (TRAV3, TRAJ13)
CAVSYSGGYQKVTF

SEQ ID NO: 463242 - protein, 14 aa, Homo sapiens
  CDR3 for beta chain variable domain of TCR clone 231621 (TRBV19, TRBJ2-1)
CASPTFVLSGEQFF

SEQ ID NO: 463243 - protein, 17 aa, Homo sapiens
  CDR3 for alpha chain variable domain of TCR clone 231622 (TRAV3, TRAJ4)
CAVRGIMFSGGYNKLIF

SEQ ID NO: 463244 - protein, 13 aa, Homo sapiens
  CDR3 for beta chain variable domain of TCR clone 231622 (TRBV28, TRBJ2-1)
CASSLIGRDEQFF

SEQ ID NO: 463245 - protein, 12 aa, Homo sapiens
  CDR3 for alpha chain variable domain of TCR clone 231623 (TRAV13-1, TRAJ21)
CAAKEGFNKFCF

SEQ ID NO: 463246 - protein, 14 aa, Homo sapiens
  CDR3 for beta chain variable domain of TCR clone 231623 (TRBV23-1, TRBJ2-5)
CASRFLRSQETQYF

SEQ ID NO: 463247 - protein, 16 aa, Homo sapiens
  CDR3 for alpha chain variable domain of TCR clone 231624 (TRAV26-2, TRAJ45)
CTTASPIGGGADGLTF

SEQ ID NO: 463248 - protein, 20 aa, Homo sapiens
  CDR3 for beta chain variable domain of TCR clone 231624 (TRBV28, TRBJ2-1)
CASTSIGRSPGLAGGNEQFF

SEQ ID NO: 463249 - protein, 12 aa, Homo sapiens
  CDR3 for alpha chain variable domain of TCR clone 231625 (TRAV12-3, TRAJ17)
CAMTLTGNKLTF

SEQ ID NO: 463250 - protein, 14 aa, Homo sapiens
  CDR3 for beta chain variable domain of TCR clone 231625 (TRBV2, TRBJ1-5)
CASSENRGGQPQHF

SEQ ID NO: 463251 - protein, 14 aa, Homo sapiens
  CDR3 for alpha chain variable domain of TCR clone 231626 (TRAV29/DV5, TRAJ36)
CAARRKTGANNLFF

SEQ ID NO: 463252 - protein, 13 aa, Homo sapiens
  CDR3 for beta chain variable domain of TCR clone 231626 (TRBV25-1, TRBJ2-3)
CASSEWGTDTQYF

SEQ ID NO: 463253 - protein, 17 aa, Homo sapiens
  CDR3 for alpha chain variable domain of TCR clone 231627 (TRAV19, TRAJ58)
CALRGLRVGTSGSRLTF

SEQ ID NO: 463254 - protein, 15 aa, Homo sapiens
  CDR3 for beta chain variable domain of TCR clone 231627 (TRBV27, TRBJ2-1)
CASSNGGGSSNEQFF

SEQ ID NO: 463255 - protein, 13 aa, Homo sapiens
  CDR3 for alpha chain variable domain of TCR clone 231628 (TRAV36/DV7, TRAJ54)
CAVDIQGAQKLVV

SEQ ID NO: 463256 - protein, 14 aa, Homo sapiens
  CDR3 for beta chain variable domain of TCR clone 231628 (TRBV19, TRBJ2-7)
CASNFRDTFTGMYF

SEQ ID NO: 463257 - protein, 13 aa, Homo sapiens
  CDR3 for alpha chain variable domain of TCR clone 231629 (TRAV2, TRAJ40)
CAVVTSGTYKYIF

SEQ ID NO: 463258 - protein, 13 aa, Homo sapiens
  CDR3 for beta chain variable domain of TCR clone 231629 (TRBV11-2, TRBJ2-5)
CASSFSSQETQYF

SEQ ID NO: 463259 - protein, 13 aa, Homo sapiens
  CDR3 for alpha chain variable domain of TCR clone 231630 (TRAV8-6, TRAJ24)
CAVSSDSWGKLQF

SEQ ID NO: 463260 - protein, 17 aa, Homo sapiens
  CDR3 for beta chain variable domain of TCR clone 231630 (TRBV15, TRBJ1-1)
CATSRVGGADGDTEAFF

SEQ ID NO: 463261 - protein, 15 aa, Homo sapiens
  CDR3 for alpha chain variable domain of TCR clone 231631 (TRAV26-1, TRAJ29)
CIVRVEGTGNTPPVF

SEQ ID NO: 463262 - protein, 15 aa, Homo sapiens
  CDR3 for beta chain variable domain of TCR clone 231631 (TRBV7-9, TRBJ1-5)
CASSQGHQPNQPQHF

SEQ ID NO: 463263 - protein, 17 aa, Homo sapiens
  CDR3 for alpha chain variable domain of TCR clone 231632 (TRAV20, TRAJ42)
CAVQAWGYGGSQGNLIF

SEQ ID NO: 463264 - protein, 16 aa, Homo sapiens
  CDR3 for beta chain variable domain of TCR clone 231632 (TRBV29-1, TRBJ2-5)
CSGEGLAGDYQETQYF

SEQ ID NO: 463265 - protein, 13 aa, Homo sapiens
  CDR3 for alpha chain variable domain of TCR clone 231633 (TRAV26-1, TRAJ34)
CIVRGHNTDKLIF

SEQ ID NO: 463266 - protein, 15 aa, Homo sapiens
  CDR3 for beta chain variable domain of TCR clone 231633 (TRBV4-1, TRBJ2-7)
CASSQEWGPSDEQYF

SEQ ID NO: 463267 - protein, 14 aa, Homo sapiens
  CDR3 for alpha chain variable domain of TCR clone 231634 (TRAV1-2, TRAJ16)
CAVNRFSDGKKLLF

SEQ ID NO: 463268 - protein, 13 aa, Homo sapiens
  CDR3 for beta chain variable domain of TCR clone 231634 (TRBV10-2, TRBJ2-7)
CASSESGVYEQYF

SEQ ID NO: 463269 - protein, 11 aa, Homo sapiens
  CDR3 for alpha chain variable domain of TCR clone 231635 (TRAV3, TRAJ17)
PRGAAGNKLTF

SEQ ID NO: 463270 - protein, 15 aa, Homo sapiens
  CDR3 for beta chain variable domain of TCR clone 231635 (TRBV12-4, TRBJ2-7)
CASSLGSGGPYEQYF

SEQ ID NO: 463271 - protein, 14 aa, Homo sapiens
  CDR3 for alpha chain variable domain of TCR clone 231636 (TRAV1-2, TRAJ16)
CAVNRFSDGQQLLF

SEQ ID NO: 463272 - protein, 13 aa, Homo sapiens
  CDR3 for beta chain variable domain of TCR clone 231636 (TRBV20-1, TRBJ1-1)
CSARAGGNTEAFF

SEQ ID NO: 463273 - protein, 14 aa, Homo sapiens
  CDR3 for alpha chain variable domain of TCR clone 231637 (TRAV8-3, TRAJ4)
CAVGAAGGYNKLIF

SEQ ID NO: 463274 - protein, 14 aa, Homo sapiens
  CDR3 for beta chain variable domain of TCR clone 231637 (TRBV4-2, TRBJ2-7)
CASSHRTGEYEQYF

SEQ ID NO: 463275 - protein, 15 aa, Homo sapiens
  CDR3 for alpha chain variable domain of TCR clone 231638 (TRAV26-2, TRAJ28)
CILVESGAGSYQLTF

SEQ ID NO: 463276 - protein, 16 aa, Homo sapiens
  CDR3 for beta chain variable domain of TCR clone 231638 (TRBV4-2, TRBJ1-2)
CASSQEIGGASYGYTY

SEQ ID NO: 463277 - protein, 14 aa, Homo sapiens
  CDR3 for alpha chain variable domain of TCR clone 231639 (TRAV3, TRAJ34)
CAVRDINNTDKLIF

SEQ ID NO: 463278 - protein, 16 aa, Homo sapiens
  CDR3 for beta chain variable domain of TCR clone 231639 (TRBV4-3, TRBJ2-2)
CASSHLQGSGTGELFF

SEQ ID NO: 463279 - protein, 14 aa, Homo sapiens
  CDR3 for alpha chain variable domain of TCR clone 231640 (TRAV16, TRAJ44)
CALSTTGTASKLTF

SEQ ID NO: 463280 - protein, 14 aa, Homo sapiens
  CDR3 for beta chain variable domain of TCR clone 231640 (TRBV4-1, TRBJ2-2)
CASSQAVNTGELFF

SEQ ID NO: 463281 - protein, 13 aa, Homo sapiens
  CDR3 for alpha chain variable domain of TCR clone 231641 (TRAV20, TRAJ37)
CAGCSSNTGKLIF

SEQ ID NO: 463282 - protein, 13 aa, Homo sapiens
  CDR3 for beta chain variable domain of TCR clone 231641 (TRBV7-6, TRBJ2-3)
CASSLRSDNTQYF

SEQ ID NO: 463283 - protein, 13 aa, Homo sapiens
  CDR3 for alpha chain variable domain of TCR clone 231642 (TRAV21, TRAJ27)
CAARPGNAGKSTF

SEQ ID NO: 463284 - protein, 14 aa, Homo sapiens
  CDR3 for beta chain variable domain of TCR clone 231642 (TRBV11-2, TRBJ2-7)
CASSLGAVAYEQYF

SEQ ID NO: 463285 - protein, 13 aa, Homo sapiens
  CDR3 for alpha chain variable domain of TCR clone 231643 (TRAV29/DV5, TRAJ49)
CAASTNTGNQIYF

SEQ ID NO: 463286 - protein, 13 aa, Homo sapiens
  CDR3 for beta chain variable domain of TCR clone 231643 (TRBV7-2, TRBJ1-4)
CASSLAGLEKLFF

SEQ ID NO: 463287 - protein, 18 aa, Homo sapiens
  CDR3 for alpha chain variable domain of TCR clone 231644 (TRAV26-1, TRAJ5)
CIVRVVPPRDTGRRALTF

SEQ ID NO: 463288 - protein, 15 aa, Homo sapiens
  CDR3 for beta chain variable domain of TCR clone 231644 (TRBV7-9, TRBJ2-7)
CASSLPMGQANEQFF

SEQ ID NO: 463289 - protein, 15 aa, Homo sapiens
  CDR3 for alpha chain variable domain of TCR clone 231645 (TRAV27, TRAJ38)
CAARRTAGNNRKLIW

SEQ ID NO: 463290 - protein, 13 aa, Homo sapiens
  CDR3 for beta chain variable domain of TCR clone 231645 (TRBV10-3, TRBJ2-7)
CASKLAVNYEQYF

SEQ ID NO: 463291 - protein, 17 aa, Homo sapiens
  CDR3 for alpha chain variable domain of TCR clone 231646 (TRAV3, TRAJ12)
CAVRDGGRMASSYKLIF

SEQ ID NO: 463292 - protein, 13 aa, Homo sapiens
  CDR3 for beta chain variable domain of TCR clone 231646 (TRBV4-2, TRBJ1-1)
CASSQAGNTEAFF

SEQ ID NO: 463293 - protein, 12 aa, Homo sapiens
  CDR3 for alpha chain variable domain of TCR clone 231647 (TRAV21, TRAJ49)
CAVTNTGNQFYF

SEQ ID NO: 463294 - protein, 14 aa, Homo sapiens
  CDR3 for beta chain variable domain of TCR clone 231647 (TRBV5-1, TRBJ2-7)
CASSFASGVNEQYF

SEQ ID NO: 463295 - protein, 15 aa, Homo sapiens
  CDR3 for alpha chain variable domain of TCR clone 231648 (TRAV13-1, TRAJ32)
RAASIYGGATNKLIF

SEQ ID NO: 463296 - protein, 14 aa, Homo sapiens
  CDR3 for beta chain variable domain of TCR clone 231648 (TRBV7-9, TRBJ2-1)
CASSLASGSNEQFF

SEQ ID NO: 463297 - protein, 16 aa, Homo sapiens
  CDR3 for alpha chain variable domain of TCR clone 231649 (TRAV16, TRAJ4)
CALSRMFSGGYNKLIF

SEQ ID NO: 463298 - protein, 15 aa, Homo sapiens
  CDR3 for beta chain variable domain of TCR clone 231649 (TRBV5-1, TRBJ2-1)
CASTGSGRTYNEQFF

SEQ ID NO: 463299 - protein, 14 aa, Homo sapiens
  CDR3 for alpha chain variable domain of TCR clone 231650 (TRAV12-2, TRAJ17)
CAVLFKAACNKLTF

SEQ ID NO: 463300 - protein, 12 aa, Homo sapiens
  CDR3 for beta chain variable domain of TCR clone 231650 (TRBV28, TRBJ2-6)
CAIQAGANVLTF

SEQ ID NO: 463301 - protein, 16 aa, Homo sapiens
  CDR3 for alpha chain variable domain of TCR clone 231651 (TRAV26-2, TRAJ23)
CILRVLSYNQGGKLIF

SEQ ID NO: 463302 - protein, 13 aa, Homo sapiens
  CDR3 for beta chain variable domain of TCR clone 231651 (TRBV10-3, TRBJ1-2)
CAISERDSYGYTF

SEQ ID NO: 463303 - protein, 20 aa, Homo sapiens
  CDR3 for alpha chain variable domain of TCR clone 231652 (TRAV12-2, TRAJ52)
SPVIQPPARAGGTSYGKLTF

SEQ ID NO: 463304 - protein, 16 aa, Homo sapiens
  CDR3 for beta chain variable domain of TCR clone 231652 (TRBV15, TRBJ1-2)
CATSRCPRTGGGGYTF

SEQ ID NO: 463305 - protein, 16 aa, Homo sapiens
  CDR3 for alpha chain variable domain of TCR clone 231653 (TRAV3, TRAJ10)
CAVRYMRAGGGNKLTF

SEQ ID NO: 463306 - protein, 15 aa, Homo sapiens
  CDR3 for beta chain variable domain of TCR clone 231653 (TRBV20-1, TRBJ2-1)
CSAEGGLLAGDEQFF

SEQ ID NO: 463307 - protein, 15 aa, Homo sapiens
  CDR3 for alpha chain variable domain of TCR clone 231654 (TRAV3, TRAJ47)
CAVRDIGEYGNKLVF

SEQ ID NO: 463308 - protein, 16 aa, Homo sapiens
  CDR3 for beta chain variable domain of TCR clone 231654 (TRBV4-1, TRBJ2-3)
CASSQSTSGAEDTQYF

SEQ ID NO: 463309 - protein, 13 aa, Homo sapiens
  CDR3 for alpha chain variable domain of TCR clone 231655 (TRAV12-3, TRAJ47)
CAMKKEYGNKLVF

SEQ ID NO: 463310 - protein, 14 aa, Homo sapiens
  CDR3 for beta chain variable domain of TCR clone 231655 (TRBV6-3, TRBJ1-1)
CASSSNRLNTEAFF

SEQ ID NO: 463311 - protein, 13 aa, Homo sapiens
  CDR3 for alpha chain variable domain of TCR clone 231656 (TRAV17, TRAJ9)
CATDGTGGFKTIF

SEQ ID NO: 463312 - protein, 13 aa, Homo sapiens
  CDR3 for beta chain variable domain of TCR clone 231656 (TRBV7-9, TRBJ1-2)
CASSLKQSYGYTF

SEQ ID NO: 463313 - protein, 22 aa, Homo sapiens
  CDR3 for alpha chain variable domain of TCR clone 231657 (TRAV21, )
CAVRQDAGNNHIQNPDPAVYQL

SEQ ID NO: 463314 - protein, 15 aa, Homo sapiens
  CDR3 for beta chain variable domain of TCR clone 231657 (TRBV11-2, TRBJ1-6)
CASSLDPWAVSPLHF

SEQ ID NO: 463315 - protein, 14 aa, Homo sapiens
  CDR3 for alpha chain variable domain of TCR clone 231658 (TRAV12-1, TRAJ3)
CVVNNPSSASKIIF

SEQ ID NO: 463316 - protein, 11 aa, Homo sapiens
  CDR3 for beta chain variable domain of TCR clone 231658 (TRBV2, TRBJ2-7)
CASGIPNEQYF

SEQ ID NO: 463317 - protein, 14 aa, Homo sapiens
  CDR3 for alpha chain variable domain of TCR clone 231659 (TRAV1-2, TRAJ16)
CAVRGFSDGQKLLF

SEQ ID NO: 463318 - protein, 12 aa, Homo sapiens
  CDR3 for beta chain variable domain of TCR clone 231659 (TRBV11-2, TRBJ2-1)
CASSPGNNEQFF

SEQ ID NO: 463319 - protein, 14 aa, Homo sapiens
  CDR3 for alpha chain variable domain of TCR clone 231660 (TRAV26-1, TRAJ45)
CIEVTGGGADGLTF

SEQ ID NO: 463320 - protein, 14 aa, Homo sapiens
  CDR3 for beta chain variable domain of TCR clone 231660 (TRBV7-2, TRBJ1-4)
CASSHSKTNEKLFF

SEQ ID NO: 463321 - protein, 17 aa, Homo sapiens
  CDR3 for alpha chain variable domain of TCR clone 231661 (TRAV12-2, TRAJ4)
CAVNVRPVSGGYNKLIF

SEQ ID NO: 463322 - protein, 13 aa, Homo sapiens
  CDR3 for beta chain variable domain of TCR clone 231661 (TRBV20-1, TRBJ2-5)
CSARDNYMETQYF

SEQ ID NO: 463323 - protein, 17 aa, Homo sapiens
  CDR3 for alpha chain variable domain of TCR clone 231662 (TRAV3, TRAJ6)
CAVRDGPRAGGSYIPTF

SEQ ID NO: 463324 - protein, 17 aa, Homo sapiens
  CDR3 for beta chain variable domain of TCR clone 231662 (TRBV20-1, TRBJ2-1)
FSAPPRLAGTRYNEQFF

SEQ ID NO: 463325 - protein, 14 aa, Homo sapiens
  CDR3 for alpha chain variable domain of TCR clone 231663 (TRAV8-3, TRAJ39)
CAVGASNAGNMLTF

SEQ ID NO: 463326 - protein, 12 aa, Homo sapiens
  CDR3 for beta chain variable domain of TCR clone 231663 (TRBV11-3, TRBJ1-1)
CASSHRQGEAFF

SEQ ID NO: 463327 - protein, 13 aa, Homo sapiens
  CDR3 for alpha chain variable domain of TCR clone 231664 (TRAV3, TRAJ41)
CAVSSNAGYALNF

SEQ ID NO: 463328 - protein, 14 aa, Homo sapiens
  CDR3 for beta chain variable domain of TCR clone 231664 (TRBV7-2, TRBJ2-7)
CASSPKTSFYEQYF

SEQ ID NO: 463329 - protein, 14 aa, Homo sapiens
  CDR3 for alpha chain variable domain of TCR clone 231665 (TRAV17, TRAJ22)
CATSPSGSARQLTF

SEQ ID NO: 463330 - protein, 15 aa, Homo sapiens
  CDR3 for beta chain variable domain of TCR clone 231665 (TRBV28, TRBJ2-5)
CASSAPRQVQETQYF

SEQ ID NO: 463331 - protein, 13 aa, Homo sapiens
  CDR3 for alpha chain variable domain of TCR clone 231666 (TRAV13-2, TRAJ13)
CAERPGGYQKVTF

SEQ ID NO: 463332 - protein, 13 aa, Homo sapiens
  CDR3 for beta chain variable domain of TCR clone 231666 (TRBV6-4, TRBJ1-5)
CASSADLNQPQHF

SEQ ID NO: 463333 - protein, 14 aa, Homo sapiens
  CDR3 for alpha chain variable domain of TCR clone 231667 (TRAV1-2, TRAJ8)
CAVREYTGFQKLVF

SEQ ID NO: 463334 - protein, 16 aa, Homo sapiens
  CDR3 for beta chain variable domain of TCR clone 231667 (TRBV6-1, TRBJ2-5)
CASSETLDRGAETQYF

SEQ ID NO: 463335 - protein, 13 aa, Homo sapiens
  CDR3 for alpha chain variable domain of TCR clone 231668 (TRAV35, TRAJ44)
CAGLSGTASKLTF

SEQ ID NO: 463336 - protein, 17 aa, Homo sapiens
  CDR3 for beta chain variable domain of TCR clone 231668 (TRBV7-8, TRBJ1-2)
CASSLRPPQGHLYGYTF

SEQ ID NO: 463337 - protein, 14 aa, Homo sapiens
  CDR3 for alpha chain variable domain of TCR clone 231669 (TRAV12-3, TRAJ57)
CARALAGGSEKLVF

SEQ ID NO: 463338 - protein, 17 aa, Homo sapiens
  CDR3 for beta chain variable domain of TCR clone 231669 (TRBV11-3, TRBJ2-3)
CASSLGLTGGGTDTQYF

SEQ ID NO: 463339 - protein, 13 aa, Homo sapiens
  CDR3 for alpha chain variable domain of TCR clone 231670 (TRAV13-2, TRAJ13)
CAGRPGGYQKVTF

SEQ ID NO: 463340 - protein, 16 aa, Homo sapiens
  CDR3 for beta chain variable domain of TCR clone 231670 (TRBV18, TRBJ2-5)
CASSPPSSGGAKTQYF

SEQ ID NO: 463341 - protein, 14 aa, Homo sapiens
  CDR3 for alpha chain variable domain of TCR clone 231671 (TRAV5, TRAJ4)
CAASFSGVYNKLIF

SEQ ID NO: 463342 - protein, 19 aa, Homo sapiens
  CDR3 for beta chain variable domain of TCR clone 231671 (TRBV2, TRBJ2-7)
CASSDDETSGRANDYEQYF

SEQ ID NO: 463343 - protein, 15 aa, Homo sapiens
  CDR3 for alpha chain variable domain of TCR clone 231672 (TRAV12-3, TRAJ6)
CAMSATTGGSYIPTY

SEQ ID NO: 463344 - protein, 19 aa, Homo sapiens
  CDR3 for beta chain variable domain of TCR clone 231672 (TRBV25-1, TRBJ2-2)
CAILVYRVDRGRKTGELFF

SEQ ID NO: 463345 - protein, 13 aa, Homo sapiens
  CDR3 for alpha chain variable domain of TCR clone 231673 (TRAV12-1, TRAJ21)
CVVTLYNCNKFYF

SEQ ID NO: 463346 - protein, 20 aa, Homo sapiens
  CDR3 for beta chain variable domain of TCR clone 231673 (TRBV7-8, TRBJ2-1)
CASSLAHRRAGVRSYNEQFF

SEQ ID NO: 463347 - protein, 14 aa, Homo sapiens
  CDR3 for alpha chain variable domain of TCR clone 231674 (TRAV12-2, TRAJ13)
CAVMKTGGYQKVTF

SEQ ID NO: 463348 - protein, 13 aa, Homo sapiens
  CDR3 for beta chain variable domain of TCR clone 231674 (TRBV20-1, TRBJ2-5)
CSAREGGKETQYF

SEQ ID NO: 463349 - protein, 14 aa, Homo sapiens
  CDR3 for alpha chain variable domain of TCR clone 231675 (TRAV13-1, TRAJ41)
CAARSGDSGHALNF

SEQ ID NO: 463350 - protein, 15 aa, Homo sapiens
  CDR3 for beta chain variable domain of TCR clone 231675 (TRBV29-1, TRBJ2-5)
CSVAGASGTQETQYF

SEQ ID NO: 463351 - protein, 11 aa, Homo sapiens
  CDR3 for alpha chain variable domain of TCR clone 231676 (TRAV1-2, TRAJ40)
CAVPGTYKYIF

SEQ ID NO: 463352 - protein, 16 aa, Homo sapiens
  CDR3 for beta chain variable domain of TCR clone 231676 (TRBV29-1, TRBJ2-7)
CSVEVVGTSGSFEQYF

SEQ ID NO: 463353 - protein, 17 aa, Homo sapiens
  CDR3 for alpha chain variable domain of TCR clone 231677 (TRAV8-6, TRAJ8)
CAVKEGIENTGFQKLVF

SEQ ID NO: 463354 - protein, 12 aa, Homo sapiens
  CDR3 for beta chain variable domain of TCR clone 231677 (TRBV19, TRBJ1-4)
CASKDWPGGLFV

SEQ ID NO: 463355 - protein, 13 aa, Homo sapiens
  CDR3 for alpha chain variable domain of TCR clone 231678 (TRAV12-2, TRAJ39)
CAVNNNAGNMLTF

SEQ ID NO: 463356 - protein, 13 aa, Homo sapiens
  CDR3 for beta chain variable domain of TCR clone 231678 (TRBV2, TRBJ1-5)
CATAGPGNHPQHF

SEQ ID NO: 463357 - protein, 14 aa, Homo sapiens
  CDR3 for alpha chain variable domain of TCR clone 231679 (TRAV12-3, TRAJ6)
CAMSATTGGSYIHI

SEQ ID NO: 463358 - protein, 16 aa, Homo sapiens
  CDR3 for beta chain variable domain of TCR clone 231679 (TRBV20-1, TRBJ1-2)
CSASMGQGVANYGYTF

SEQ ID NO: 463359 - protein, 14 aa, Homo sapiens
  CDR3 for alpha chain variable domain of TCR clone 231680 (TRAV12-2, TRAJ40)
CAVKIPSGTYKYIF

SEQ ID NO: 463360 - protein, 12 aa, Homo sapiens
  CDR3 for beta chain variable domain of TCR clone 231680 (TRBV12-5, TRBJ2-5)
CASGQGVETQYF

SEQ ID NO: 463361 - protein, 15 aa, Homo sapiens
  CDR3 for alpha chain variable domain of TCR clone 231681 (TRAV12-1, TRAJ26)
CVLNSWVTMVRILSL

SEQ ID NO: 463362 - protein, 13 aa, Homo sapiens
  CDR3 for beta chain variable domain of TCR clone 231681 (TRBV10-3, TRBJ2-7)
CASKLAVNYEQYF

SEQ ID NO: 463363 - protein, 14 aa, Homo sapiens
  CDR3 for alpha chain variable domain of TCR clone 231682 (TRAV23/DV6, TRAJ22)
CAASVSGSASQLNF

SEQ ID NO: 463364 - protein, 16 aa, Homo sapiens
  CDR3 for beta chain variable domain of TCR clone 231682 (TRBV19, TRBJ2-2)
CASSFPGQGLAGELFF

SEQ ID NO: 463365 - protein, 14 aa, Homo sapiens
  CDR3 for alpha chain variable domain of TCR clone 231683 (TRAV17, TRAJ35)
CATWKIGFGNVLHC

SEQ ID NO: 463366 - protein, 15 aa, Homo sapiens
  CDR3 for beta chain variable domain of TCR clone 231683 (TRBV7-2, TRBJ2-5)
CASSPLGLDKETQYF

SEQ ID NO: 463367 - protein, 10 aa, Homo sapiens
  CDR3 for alpha chain variable domain of TCR clone 231684 (TRAV26-1, TRAJ22)
RSGSARQLTF

SEQ ID NO: 463368 - protein, 15 aa, Homo sapiens
  CDR3 for beta chain variable domain of TCR clone 231684 (TRBV9, TRBJ1-6)
CASSVAGTGDSPLHF

SEQ ID NO: 463369 - protein, 17 aa, Homo sapiens
  CDR3 for alpha chain variable domain of TCR clone 231685 (TRAV3, TRAJ6)
CAVRDGPRAGGSYLPTF

SEQ ID NO: 463370 - protein, 14 aa, Homo sapiens
  CDR3 for beta chain variable domain of TCR clone 231685 (TRBV7-2, TRBJ2-7)
CASSPKTSFHEQYF

SEQ ID NO: 463371 - protein, 10 aa, Homo sapiens
  CDR3 for alpha chain variable domain of TCR clone 231686 (TRAV13-2, TRAJ49)
CADTGNQFYF

SEQ ID NO: 463372 - protein, 16 aa, Homo sapiens
  CDR3 for beta chain variable domain of TCR clone 231686 (TRBV12-5, TRBJ2-5)
CASGPRTSGNQETQYF

SEQ ID NO: 463373 - protein, 12 aa, Homo sapiens
  CDR3 for alpha chain variable domain of TCR clone 231687 (TRAV3, TRAJ20)
CAVRDPDYKLSF

SEQ ID NO: 463374 - protein, 16 aa, Homo sapiens
  CDR3 for beta chain variable domain of TCR clone 231687 (TRBV7-9, TRBJ2-2)
CASSLATGVGTGELFF

SEQ ID NO: 463375 - protein, 12 aa, Homo sapiens
  CDR3 for alpha chain variable domain of TCR clone 231688 (TRAV12-3, TRAJ17)
CAMTLTGNKLTF

SEQ ID NO: 463376 - protein, 17 aa, Homo sapiens
  CDR3 for beta chain variable domain of TCR clone 231688 (TRBV7-2, TRBJ2-3)
CASSLAGGRAGTAGQYF

SEQ ID NO: 463377 - protein, 14 aa, Homo sapiens
  CDR3 for alpha chain variable domain of TCR clone 231689 (TRAV12-2, TRAJ17)
CAVLFKAAGNNLTF

SEQ ID NO: 463378 - protein, 14 aa, Homo sapiens
  CDR3 for beta chain variable domain of TCR clone 231689 (TRBV7-2, TRBJ2-7)
CASRSQGAAYEQYF

SEQ ID NO: 463379 - protein, 14 aa, Homo sapiens
  CDR3 for alpha chain variable domain of TCR clone 231690 (TRAV8-4, TRAJ8)
CAVSLNTGVQKLVF

SEQ ID NO: 463380 - protein, 13 aa, Homo sapiens
  CDR3 for beta chain variable domain of TCR clone 231690 (TRBV7-9, TRBJ2-3)
CASSPGSTDTQYF

SEQ ID NO: 463381 - protein, 20 aa, Homo sapiens
  CDR3 for alpha chain variable domain of TCR clone 231691 (TRAV1-1, TRAJ4)
CLLLLRCEGFLSCGYNKLIF

SEQ ID NO: 463382 - protein, 13 aa, Homo sapiens
  CDR3 for beta chain variable domain of TCR clone 231691 (TRBV20-1, TRBJ2-5)
CSVTQGNEETQYF

SEQ ID NO: 463383 - protein, 13 aa, Homo sapiens
  CDR3 for alpha chain variable domain of TCR clone 231692 (TRAV3, TRAJ20)
CAVRDTPRYKLSF

SEQ ID NO: 463384 - protein, 14 aa, Homo sapiens
  CDR3 for beta chain variable domain of TCR clone 231692 (TRBV7-8, TRBJ2-7)
CASSVGQGAYEQYF

SEQ ID NO: 463385 - protein, 11 aa, Homo sapiens
  CDR3 for alpha chain variable domain of TCR clone 231693 (TRAV12-2, TRAJ31)
CAVTRWARLMF

SEQ ID NO: 463386 - protein, 16 aa, Homo sapiens
  CDR3 for beta chain variable domain of TCR clone 231693 (TRBV7-2, TRBJ1-2)
CASSSNQDRRGHGYTF

SEQ ID NO: 463387 - protein, 14 aa, Homo sapiens
  CDR3 for alpha chain variable domain of TCR clone 231694 (TRAV1-2, TRAJ8)
CAVREDTGFQKLVC

SEQ ID NO: 463388 - protein, 16 aa, Homo sapiens
  CDR3 for beta chain variable domain of TCR clone 231694 (TRBV12-5, TRBJ2-5)
CASGPRTSGNQETQYF

SEQ ID NO: 463389 - protein, 13 aa, Homo sapiens
  CDR3 for alpha chain variable domain of TCR clone 231695 (TRAV1-2, TRAJ12)
CAVSIDSSYKLIF

SEQ ID NO: 463390 - protein, 15 aa, Homo sapiens
  CDR3 for beta chain variable domain of TCR clone 231695 (TRBV7-3, TRBJ2-2)
CASSETGQGTGELFL

SEQ ID NO: 463391 - protein, 16 aa, Homo sapiens
  CDR3 for alpha chain variable domain of TCR clone 231696 (TRAV13-1, TRAJ10)
CAAGYILTGGGNKHTF

SEQ ID NO: 463392 - protein, 15 aa, Homo sapiens
  CDR3 for beta chain variable domain of TCR clone 231696 (TRBV12-4, TRBJ2-7)
CASSQTGAISYEQYF

SEQ ID NO: 463393 - protein, 21 aa, Homo sapiens
  CDR3 for alpha chain variable domain of TCR clone 231697 (TRAV3, )
CAVRPTPDIQNPDPAVYQLRD

SEQ ID NO: 463394 - protein, 13 aa, Homo sapiens
  CDR3 for beta chain variable domain of TCR clone 231697 (TRBV12-5, TRBJ2-3)
CASGDRQSDTQYF

SEQ ID NO: 463395 - protein, 15 aa, Homo sapiens
  CDR3 for alpha chain variable domain of TCR clone 231698 (TRAV2, TRAJ13)
CATPSYSGGYQKVTF

SEQ ID NO: 463396 - protein, 14 aa, Homo sapiens
  CDR3 for beta chain variable domain of TCR clone 231698 (TRBV11-2, TRBJ2-3)
CASSRLARKDTQYF

SEQ ID NO: 463397 - protein, 18 aa, Homo sapiens
  CDR3 for alpha chain variable domain of TCR clone 231699 (TRAV21, TRAJ52)
CAVRPSPAGGTSYEKLTF

SEQ ID NO: 463398 - protein, 16 aa, Homo sapiens
  CDR3 for beta chain variable domain of TCR clone 231699 (TRBV2, TRBJ2-1)
CASSDSPGQPYNEQFF

SEQ ID NO: 463399 - protein, 12 aa, Homo sapiens
  CDR3 for alpha chain variable domain of TCR clone 231700 (TRAV13-1, TRAJ21)
CAAKEGFNKFYF

SEQ ID NO: 463400 - protein, 15 aa, Homo sapiens
  CDR3 for beta chain variable domain of TCR clone 231700 (TRBV28, TRBJ2-1)
CASSLRQGGYNEQFF

SEQ ID NO: 463401 - protein, 11 aa, Homo sapiens
  CDR3 for alpha chain variable domain of TCR clone 231701 (TRAV12-1, TRAJ21)
CVVNNFNKFYF

SEQ ID NO: 463402 - protein, 15 aa, Homo sapiens
  CDR3 for beta chain variable domain of TCR clone 231701 (TRBV7-9, TRBJ2-7)
CASSPGGGLTYEQYF

SEQ ID NO: 463403 - protein, 11 aa, Homo sapiens
  CDR3 for alpha chain variable domain of TCR clone 231702 (TRAV13-1, TRAJ5)
CAPKGRRALTF

SEQ ID NO: 463404 - protein, 14 aa, Homo sapiens
  CDR3 for beta chain variable domain of TCR clone 231702 (TRBV6-1, TRBJ1-1)
CASSGTGLNTEAFF

SEQ ID NO: 463405 - protein, 15 aa, Homo sapiens
  CDR3 for alpha chain variable domain of TCR clone 231703 (TRAV35, TRAJ40)
CAGVSGASGTYKYIF

SEQ ID NO: 463406 - protein, 14 aa, Homo sapiens
  CDR3 for beta chain variable domain of TCR clone 231703 (TRBV11-2, TRBJ2-5)
CASSRTGGIETQYF

SEQ ID NO: 463407 - protein, 16 aa, Homo sapiens
  CDR3 for alpha chain variable domain of TCR clone 231704 (TRAV14/DV4, TRAJ53)
CAMREGGGGSNYKLTF

SEQ ID NO: 463408 - protein, 16 aa, Homo sapiens
  CDR3 for beta chain variable domain of TCR clone 231704 (TRBV19, TRBJ2-1)
CASSKAGPSSYNEQFF

SEQ ID NO: 463409 - protein, 13 aa, Homo sapiens
  CDR3 for alpha chain variable domain of TCR clone 231705 (TRAV3, TRAJ15)
CAVRDQAGTALIF

SEQ ID NO: 463410 - protein, 15 aa, Homo sapiens
  CDR3 for beta chain variable domain of TCR clone 231705 (TRBV19, TRBJ1-1)
CASTSGQIQNTEAFF

SEQ ID NO: 463411 - protein, 17 aa, Homo sapiens
  CDR3 for alpha chain variable domain of TCR clone 231706 (TRAV3, TRAJ28)
CAVREAYSGAGSYRLTF

SEQ ID NO: 463412 - protein, 13 aa, Homo sapiens
  CDR3 for beta chain variable domain of TCR clone 231706 (TRBV10-3, TRBJ2-7)
CASKLAVNYEQYF

SEQ ID NO: 463413 - protein, 14 aa, Homo sapiens
  CDR3 for alpha chain variable domain of TCR clone 231707 (TRAV1-2, TRAJ16)
CAVNRFSDGQKLLF

SEQ ID NO: 463414 - protein, 14 aa, Homo sapiens
  CDR3 for beta chain variable domain of TCR clone 231707 (TRBV2, TRBJ1-5)
CASIGTVSNQPQHF

SEQ ID NO: 463415 - protein, 15 aa, Homo sapiens
  CDR3 for alpha chain variable domain of TCR clone 231708 (TRAV12-2, TRAJ53)
CAVNGGGGSNYELTF

SEQ ID NO: 463416 - protein, 13 aa, Homo sapiens
  CDR3 for beta chain variable domain of TCR clone 231708 (TRBV3-1, TRBJ1-1)
CASSPGVITEAFF

SEQ ID NO: 463417 - protein, 14 aa, Homo sapiens
  CDR3 for alpha chain variable domain of TCR clone 231709 (TRAV1-2, TRAJ8)
CAVREDTGFQKLVF

SEQ ID NO: 463418 - protein, 16 aa, Homo sapiens
  CDR3 for beta chain variable domain of TCR clone 231709 (TRBV7-9, TRBJ1-2)
CASSLAPLRAAYGYTF

SEQ ID NO: 463419 - protein, 21 aa, Homo sapiens
  CDR3 for alpha chain variable domain of TCR clone 231710 (TRAV9-2, )
CALIQIGDIQNPDPAVYQLSD

SEQ ID NO: 463420 - protein, 13 aa, Homo sapiens
  CDR3 for beta chain variable domain of TCR clone 231710 (TRBV20-1, TRBJ1-1)
CSARGGGNTEAFF

SEQ ID NO: 463421 - protein, 12 aa, Homo sapiens
  CDR3 for alpha chain variable domain of TCR clone 231711 (TRAV20, TRAJ39)
CAVGNAGNMLTF

SEQ ID NO: 463422 - protein, 16 aa, Homo sapiens
  CDR3 for beta chain variable domain of TCR clone 231711 (TRBV12-4, TRBJ1-5)
CASRQPVEGSNQPQHF

SEQ ID NO: 463423 - protein, 12 aa, Homo sapiens
  CDR3 for alpha chain variable domain of TCR clone 231712 (TRAV2, TRAJ31)
CAVEDNNARLMF

SEQ ID NO: 463424 - protein, 18 aa, Homo sapiens
  CDR3 for beta chain variable domain of TCR clone 231712 (TRBV20-1, TRBJ2-6)
CSARTLAGGPSGANGLTF

SEQ ID NO: 463425 - protein, 16 aa, Homo sapiens
  CDR3 for alpha chain variable domain of TCR clone 231713 (TRAV8-3, TRAJ44)
CAVGASNTGTAIKLTF

SEQ ID NO: 463426 - protein, 15 aa, Homo sapiens
  CDR3 for beta chain variable domain of TCR clone 231713 (TRBV27, TRBJ1-5)
CASTFNRGSNQPQHF

SEQ ID NO: 463427 - protein, 14 aa, Homo sapiens
  CDR3 for alpha chain variable domain of TCR clone 231714 (TRAV12-2, TRAJ44)
CAVNPAGTASKLTL

SEQ ID NO: 463428 - protein, 15 aa, Homo sapiens
  CDR3 for beta chain variable domain of TCR clone 231714 (TRBV19, TRBJ2-7)
CASSPAGSGEALRYF

SEQ ID NO: 463429 - protein, 13 aa, Homo sapiens
  CDR3 for alpha chain variable domain of TCR clone 231715 (TRAV1-2, TRAJ36)
CAVDQTGANNLFF

SEQ ID NO: 463430 - protein, 14 aa, Homo sapiens
  CDR3 for beta chain variable domain of TCR clone 231715 (TRBV20-1, TRBJ2-5)
CSAREMTKQETQYV

SEQ ID NO: 463431 - protein, 13 aa, Homo sapiens
  CDR3 for alpha chain variable domain of TCR clone 231716 (TRAV20, TRAJ37)
CAGCSSNTGKLIF

SEQ ID NO: 463432 - protein, 11 aa, Homo sapiens
  CDR3 for beta chain variable domain of TCR clone 231716 (TRBV12-4, TRBJ2-3)
CASTATDRQYF

SEQ ID NO: 463433 - protein, 14 aa, Homo sapiens
  CDR3 for alpha chain variable domain of TCR clone 231717 (TRAV8-3, TRAJ12)
CAVGARDSSYKLIF

SEQ ID NO: 463434 - protein, 11 aa, Homo sapiens
  CDR3 for beta chain variable domain of TCR clone 231717 (TRBV13, TRBJ2-2)
CASSPRTGEHT

SEQ ID NO: 463435 - protein, 12 aa, Homo sapiens
  CDR3 for alpha chain variable domain of TCR clone 231718 (TRAV3, TRAJ43)
CAVRDPNNDMRF

SEQ ID NO: 463436 - protein, 13 aa, Homo sapiens
  CDR3 for beta chain variable domain of TCR clone 231718 (TRBV19, TRBJ2-2)
CASSIWSTGELFF

SEQ ID NO: 463437 - protein, 13 aa, Homo sapiens
  CDR3 for alpha chain variable domain of TCR clone 231719 (TRAV8-4, TRAJ49)
CAVRTLTGNQFYF

SEQ ID NO: 463438 - protein, 15 aa, Homo sapiens
  CDR3 for beta chain variable domain of TCR clone 231719 (TRBV28, TRBJ2-2)
CASKTGTTGAGELFF

SEQ ID NO: 463439 - protein, 14 aa, Homo sapiens
  CDR3 for alpha chain variable domain of TCR clone 231720 (TRAV17, TRAJ6)
CATDASGGRYIPTF

SEQ ID NO: 463440 - protein, 19 aa, Homo sapiens
  CDR3 for beta chain variable domain of TCR clone 231720 (TRBV4-3, TRBJ2-7)
CASSQECIGWQVTPCEQYF

SEQ ID NO: 463441 - protein, 14 aa, Homo sapiens
  CDR3 for alpha chain variable domain of TCR clone 231721 (TRAV12-2, TRAJ40)
CAVKIPSGTYKYIF

SEQ ID NO: 463442 - protein, 14 aa, Homo sapiens
  CDR3 for beta chain variable domain of TCR clone 231721 (TRBV19, TRBJ2-1)
CASPTYVLSGEQFF

SEQ ID NO: 463443 - protein, 13 aa, Homo sapiens
  CDR3 for alpha chain variable domain of TCR clone 231722 (TRAV8-6, TRAJ16)
CAVSSPDGQKLLF

SEQ ID NO: 463444 - protein, 16 aa, Homo sapiens
  CDR3 for beta chain variable domain of TCR clone 231722 (TRBV5-7, TRBJ2-3)
YASSSLGGAITDTQYF

SEQ ID NO: 463445 - protein, 13 aa, Homo sapiens
  CDR3 for alpha chain variable domain of TCR clone 231723 (TRAV12-3, TRAJ48)
CAMSLVGNEKLTF

SEQ ID NO: 463446 - protein, 14 aa, Homo sapiens
  CDR3 for beta chain variable domain of TCR clone 231723 (TRBV11-2, TRBJ2-7)
CASSLGAGAYEQYF

SEQ ID NO: 463447 - protein, 11 aa, Homo sapiens
  CDR3 for alpha chain variable domain of TCR clone 231724 (TRAV4, TRAJ20)
CLVGDKVPTTS

SEQ ID NO: 463448 - protein, 15 aa, Homo sapiens
  CDR3 for beta chain variable domain of TCR clone 231724 (TRBV18, TRBJ2-7)
CASSPSSTGNYEQYF

SEQ ID NO: 463449 - protein, 13 aa, Homo sapiens
  CDR3 for alpha chain variable domain of TCR clone 231725 (TRAV12-1, TRAJ34)
WVVTGYNTDKLIF

SEQ ID NO: 463450 - protein, 13 aa, Homo sapiens
  CDR3 for beta chain variable domain of TCR clone 231725 (TRBV28, TRBJ2-7)
CASKAGGVYEQYF

SEQ ID NO: 463451 - protein, 12 aa, Homo sapiens
  CDR3 for alpha chain variable domain of TCR clone 231726 (TRAV2, TRAJ9)
CAVGAGGFKTIF

SEQ ID NO: 463452 - protein, 13 aa, Homo sapiens
  CDR3 for beta chain variable domain of TCR clone 231726 (TRBV7-9, TRBJ2-7)
CASSFAGAYEQYF

SEQ ID NO: 463453 - protein, 13 aa, Homo sapiens
  CDR3 for alpha chain variable domain of TCR clone 231727 (TRAV26-1, TRAJ54)
FIVRVKGAQKLVF

SEQ ID NO: 463454 - protein, 15 aa, Homo sapiens
  CDR3 for beta chain variable domain of TCR clone 231727 (TRBV20-1, TRBJ2-1)
CSAQPGGGPYNEQFF

SEQ ID NO: 463455 - protein, 17 aa, Homo sapiens
  CDR3 for alpha chain variable domain of TCR clone 231728 (TRAV8-3, TRAJ52)
SAVGAEAGGTSYGKLTF

SEQ ID NO: 463456 - protein, 15 aa, Homo sapiens
  CDR3 for beta chain variable domain of TCR clone 231728 (TRBV5-1, TRBJ2-5)
CASSRQGLGQETQYF

SEQ ID NO: 463457 - protein, 15 aa, Homo sapiens
  CDR3 for alpha chain variable domain of TCR clone 231729 (TRAV27, TRAJ38)
CAGRFNAGTNRKLIW

SEQ ID NO: 463458 - protein, 13 aa, Homo sapiens
  CDR3 for beta chain variable domain of TCR clone 231729 (TRBV12-5, TRBJ2-3)
CASQNRGTDTQYF

SEQ ID NO: 463459 - protein, 13 aa, Homo sapiens
  CDR3 for alpha chain variable domain of TCR clone 231730 (TRAV12-2, TRAJ30)
RAVNLNRDDKIIF

SEQ ID NO: 463460 - protein, 14 aa, Homo sapiens
  CDR3 for beta chain variable domain of TCR clone 231730 (TRBV7-2, TRBJ1-2)
CASSSQGAHYGYTF

SEQ ID NO: 463461 - protein, 14 aa, Homo sapiens
  CDR3 for alpha chain variable domain of TCR clone 231731 (TRAV12-1, TRAJ30)
CVVNIGNRADKIIF

SEQ ID NO: 463462 - protein, 14 aa, Homo sapiens
  CDR3 for beta chain variable domain of TCR clone 231731 (TRBV7-9, TRBJ2-5)
CASSPRPSGETQYF

SEQ ID NO: 463463 - protein, 16 aa, Homo sapiens
  CDR3 for alpha chain variable domain of TCR clone 231732 (TRAV26-1, TRAJ38)
CIGRPLNAGNNRKLIW

SEQ ID NO: 463464 - protein, 13 aa, Homo sapiens
  CDR3 for beta chain variable domain of TCR clone 231732 (TRBV18, TRBJ1-1)
CASSPNGDTEAFF

SEQ ID NO: 463465 - protein, 17 aa, Homo sapiens
  CDR3 for alpha chain variable domain of TCR clone 231733 (TRAV3, TRAJ6)
CAVRDGPRAGGSYIPTF

SEQ ID NO: 463466 - protein, 16 aa, Homo sapiens
  CDR3 for beta chain variable domain of TCR clone 231733 (TRBV13, TRBJ2-7)
CASSSRESGRTYEQYF

SEQ ID NO: 463467 - protein, 18 aa, Homo sapiens
  CDR3 for alpha chain variable domain of TCR clone 231734 (TRAV21, TRAJ52)
YAVRPSPAGGTSYGKLTF

SEQ ID NO: 463468 - protein, 17 aa, Homo sapiens
  CDR3 for beta chain variable domain of TCR clone 231734 (TRBV13, TRBJ2-3)
CASSLSRVAGVRNTQYF

SEQ ID NO: 463469 - protein, 16 aa, Homo sapiens
  CDR3 for alpha chain variable domain of TCR clone 231735 (TRAV12-3, TRAJ53)
CAMSPGSGGSNYKLTF

SEQ ID NO: 463470 - protein, 16 aa, Homo sapiens
  CDR3 for beta chain variable domain of TCR clone 231735 (TRBV4-3, TRBJ2-1)
CASSPALDRGVNEQFF

SEQ ID NO: 463471 - protein, 14 aa, Homo sapiens
  CDR3 for alpha chain variable domain of TCR clone 231736 (TRAV12-2, TRAJ5)
CAVNRSTGRRALTF

SEQ ID NO: 463472 - protein, 14 aa, Homo sapiens
  CDR3 for beta chain variable domain of TCR clone 231736 (TRBV11-1, TRBJ2-7)
CASTFAVPSYEQYF

SEQ ID NO: 463473 - protein, 13 aa, Homo sapiens
  CDR3 for alpha chain variable domain of TCR clone 231737 (TRAV27, TRAJ29)
CAGAHSGNTPLVF

SEQ ID NO: 463474 - protein, 14 aa, Homo sapiens
  CDR3 for beta chain variable domain of TCR clone 231737 (TRBV13, TRBJ2-5)
CASSLGPRGETQYF

SEQ ID NO: 463475 - protein, 12 aa, Homo sapiens
  CDR3 for alpha chain variable domain of TCR clone 231738 (TRAV13-2, TRAJ23)
FAERHRGGKLIF

SEQ ID NO: 463476 - protein, 16 aa, Homo sapiens
  CDR3 for beta chain variable domain of TCR clone 231738 (TRBV7-9, TRBJ1-2)
CASSLGFSSGEDGYTF

SEQ ID NO: 463477 - protein, 18 aa, Homo sapiens
  CDR3 for alpha chain variable domain of TCR clone 231739 (TRAV12-3, TRAJ52)
CAMSRTNAGGTSYGKLTF

SEQ ID NO: 463478 - protein, 18 aa, Homo sapiens
  CDR3 for beta chain variable domain of TCR clone 231739 (TRBV7-7, TRBJ2-1)
CASSLALTSGRSYNEQFF

SEQ ID NO: 463479 - protein, 10 aa, Homo sapiens
  CDR3 for alpha chain variable domain of TCR clone 231740 (TRAV1-2, TRAJ23)
CAGQGGKLIF

SEQ ID NO: 463480 - protein, 16 aa, Homo sapiens
  CDR3 for beta chain variable domain of TCR clone 231740 (TRBV11-2, TRBJ1-1)
CASSLQQGGEHSKAFF

SEQ ID NO: 463481 - protein, 11 aa, Homo sapiens
  CDR3 for alpha chain variable domain of TCR clone 231741 (TRAV21, TRAJ11)
CAVNGYSNLTF

SEQ ID NO: 463482 - protein, 14 aa, Homo sapiens
  CDR3 for beta chain variable domain of TCR clone 231741 (TRBV25-1, TRBJ1-1)
CASTHLGGNTEAFF

SEQ ID NO: 463483 - protein, 14 aa, Homo sapiens
  CDR3 for alpha chain variable domain of TCR clone 231742 (TRAV35, TRAJ13)
CAGRSPGGYQKVTF

SEQ ID NO: 463484 - protein, 15 aa, Homo sapiens
  CDR3 for beta chain variable domain of TCR clone 231742 (TRBV5-1, TRBJ2-5)
CASSFKGGDQETQYF

SEQ ID NO: 463485 - protein, 14 aa, Homo sapiens
  CDR3 for alpha chain variable domain of TCR clone 231743 (TRAV12-2, TRAJ17)
CAVLFKAAGNKLTF

SEQ ID NO: 463486 - protein, 14 aa, Homo sapiens
  CDR3 for beta chain variable domain of TCR clone 231743 (TRBV7-2, TRBJ2-7)
CARRSQGAAYEQYF

SEQ ID NO: 463487 - protein, 16 aa, Homo sapiens
  CDR3 for alpha chain variable domain of TCR clone 231744 (TRAV26-2, TRAJ45)
CTTASPIGAGADGLTF

SEQ ID NO: 463488 - protein, 20 aa, Homo sapiens
  CDR3 for beta chain variable domain of TCR clone 231744 (TRBV28, TRBJ2-1)
CASPPTGRSPGLAGGNEQFF

SEQ ID NO: 463489 - protein, 19 aa, Homo sapiens
  CDR3 for alpha chain variable domain of TCR clone 231745 (TRAV2, TRAJ20)
ILQVREADAAVYRDCKLSF

SEQ ID NO: 463490 - protein, 13 aa, Homo sapiens
  CDR3 for beta chain variable domain of TCR clone 231745 (TRBV12-4, TRBJ2-2)
CASSITGSGELFF

SEQ ID NO: 463491 - protein, 14 aa, Homo sapiens
  CDR3 for alpha chain variable domain of TCR clone 231746 (TRAV16, TRAJ15)
CALRPNQAGTSLIF

SEQ ID NO: 463492 - protein, 13 aa, Homo sapiens
  CDR3 for beta chain variable domain of TCR clone 231746 (TRBV7-3, TRBJ1-1)
CASSQDWGAEAFF

SEQ ID NO: 463493 - protein, 14 aa, Homo sapiens
  CDR3 for alpha chain variable domain of TCR clone 231747 (TRAV12-3, TRAJ43)
CAMSLGGAGTRLTG

SEQ ID NO: 463494 - protein, 15 aa, Homo sapiens
  CDR3 for beta chain variable domain of TCR clone 231747 (TRBV7-9, TRBJ2-2)
CASRPADRDTGELFF

SEQ ID NO: 463495 - protein, 15 aa, Homo sapiens
  CDR3 for alpha chain variable domain of TCR clone 231748 (TRAV12-3, TRAJ42)
CAMITSGGSQGNLIF

SEQ ID NO: 463496 - protein, 12 aa, Homo sapiens
  CDR3 for beta chain variable domain of TCR clone 231748 (TRBV29-1, TRBJ2-7)
CSARDRPYEQYF

SEQ ID NO: 463497 - protein, 14 aa, Homo sapiens
  CDR3 for alpha chain variable domain of TCR clone 231749 (TRAV9-2, TRAJ39)
CALYIYNAGNMLTF

SEQ ID NO: 463498 - protein, 12 aa, Homo sapiens
  CDR3 for beta chain variable domain of TCR clone 231749 (TRBV11-2, TRBJ2-4)
CASSSASGSEYF

SEQ ID NO: 463499 - protein, 16 aa, Homo sapiens
  CDR3 for alpha chain variable domain of TCR clone 231750 (TRAV3, TRAJ37)
CAVRGKGSGNTGKLIL

SEQ ID NO: 463500 - protein, 14 aa, Homo sapiens
  CDR3 for beta chain variable domain of TCR clone 231750 (TRBV7-2, TRBJ2-7)
CASSPKTSFYEQYF

SEQ ID NO: 463501 - protein, 15 aa, Homo sapiens
  CDR3 for alpha chain variable domain of TCR clone 231751 (TRAV13-1, TRAJ50)
CSAKGSETSYDKVIF

SEQ ID NO: 463502 - protein, 18 aa, Homo sapiens
  CDR3 for beta chain variable domain of TCR clone 231751 (TRBV10-3, TRBJ2-1)
CTSVPSVSLRGGVDEQFF

SEQ ID NO: 463503 - protein, 11 aa, Homo sapiens
  CDR3 for alpha chain variable domain of TCR clone 231752 (TRAV12-3, TRAJ17)
CNDAYRHKLTF

SEQ ID NO: 463504 - protein, 19 aa, Homo sapiens
  CDR3 for beta chain variable domain of TCR clone 231752 (TRBV25-1, TRBJ2-2)
CAILVYRVDRGRKTGELFF

SEQ ID NO: 463505 - protein, 15 aa, Homo sapiens
  CDR3 for alpha chain variable domain of TCR clone 231753 (TRAV2, TRAJ9)
CAVEDRGTGGFKAIF

SEQ ID NO: 463506 - protein, 15 aa, Homo sapiens
  CDR3 for beta chain variable domain of TCR clone 231753 (TRBV20-1, TRBJ2-7)
CSARDRVSGMDEQYF

SEQ ID NO: 463507 - protein, 13 aa, Homo sapiens
  CDR3 for alpha chain variable domain of TCR clone 231754 (TRAV21, TRAJ27)
CAARPGNAGKSTF

SEQ ID NO: 463508 - protein, 14 aa, Homo sapiens
  CDR3 for beta chain variable domain of TCR clone 231754 (TRBV11-2, TRBJ2-3)
CASSFPDGQDTQYF

SEQ ID NO: 463509 - protein, 13 aa, Homo sapiens
  CDR3 for alpha chain variable domain of TCR clone 231755 (TRAV12-3, TRAJ13)
CAMISGGYQEVTF

SEQ ID NO: 463510 - protein, 13 aa, Homo sapiens
  CDR3 for beta chain variable domain of TCR clone 231755 (TRBV20-1, TRBJ1-1)
CSAPPGGHTEAFF

SEQ ID NO: 463511 - protein, 14 aa, Homo sapiens
  CDR3 for alpha chain variable domain of TCR clone 231756 (TRAV20, TRAJ56)
CAVQFGGANSKLTF

SEQ ID NO: 463512 - protein, 14 aa, Homo sapiens
  CDR3 for beta chain variable domain of TCR clone 231756 (TRBV20-1, TRBJ2-7)
CSANRGRSSYEQYC

SEQ ID NO: 463513 - protein, 14 aa, Homo sapiens
  CDR3 for alpha chain variable domain of TCR clone 231757 (TRAV3, TRAJ7)
CAVREEEREQQTRF

SEQ ID NO: 463514 - protein, 20 aa, Homo sapiens
  CDR3 for beta chain variable domain of TCR clone 231757 (TRBV19, TRBJ2-1)
CASSISRTVTSTRLNNEQFF

SEQ ID NO: 463515 - protein, 12 aa, Homo sapiens
  CDR3 for alpha chain variable domain of TCR clone 231758 (TRAV12-2, TRAJ10)
WGVTGGGNKLTF

SEQ ID NO: 463516 - protein, 16 aa, Homo sapiens
  CDR3 for beta chain variable domain of TCR clone 231758 (TRBV12-4, TRBJ1-5)
CASSSGYGASNQPQHF

SEQ ID NO: 463517 - protein, 15 aa, Homo sapiens
  CDR3 for alpha chain variable domain of TCR clone 231759 (TRAV12-3, TRAJ48)
CAMSASNFRNEKLTF

SEQ ID NO: 463518 - protein, 13 aa, Homo sapiens
  CDR3 for beta chain variable domain of TCR clone 231759 (TRBV24-1, TRBJ2-1)
CATSRGARNEQFF

SEQ ID NO: 463519 - protein, 15 aa, Homo sapiens
  CDR3 for alpha chain variable domain of TCR clone 231760 (TRAV26-1, TRAJ29)
WIVRVEGSGNTPLVF

SEQ ID NO: 463520 - protein, 13 aa, Homo sapiens
  CDR3 for beta chain variable domain of TCR clone 231760 (TRBV24-1, TRBJ2-1)
CATSAGPYNEQFF

SEQ ID NO: 463521 - protein, 15 aa, Homo sapiens
  CDR3 for alpha chain variable domain of TCR clone 231761 (TRAV3, TRAJ11)
CAVRDRGSGYSTLTF

SEQ ID NO: 463522 - protein, 16 aa, Homo sapiens
  CDR3 for beta chain variable domain of TCR clone 231761 (TRBV7-2, TRBJ2-7)
CASSLEAGGPWYEQYF

SEQ ID NO: 463523 - protein, 14 aa, Homo sapiens
  CDR3 for alpha chain variable domain of TCR clone 231762 (TRAV8-3, TRAJ4)
CAVGAAGGYNKLIF

SEQ ID NO: 463524 - protein, 15 aa, Homo sapiens
  CDR3 for beta chain variable domain of TCR clone 231762 (TRBV6-5, TRBJ2-1)
SASSYDAGAGNEQFF

SEQ ID NO: 463525 - protein, 15 aa, Homo sapiens
  CDR3 for alpha chain variable domain of TCR clone 231763 (TRAV21, TRAJ40)
CAVRPQTSGTYKYIF

SEQ ID NO: 463526 - protein, 18 aa, Homo sapiens
  CDR3 for beta chain variable domain of TCR clone 231763 (TRBV4-1, TRBJ1-5)
CASSQDPRGQGLNQPQHF

SEQ ID NO: 463527 - protein, 10 aa, Homo sapiens
  CDR3 for alpha chain variable domain of TCR clone 231764 (TRAV9-2, TRAJ49)
CALTGNQFYF

SEQ ID NO: 463528 - protein, 16 aa, Homo sapiens
  CDR3 for beta chain variable domain of TCR clone 231764 (TRBV19, TRBJ2-3)
CASSRGAASRTDTQYF

SEQ ID NO: 463529 - protein, 23 aa, Homo sapiens
  CDR3 for alpha chain variable domain of TCR clone 231765 (TRAV3, TRAJ38)
CAVRDCLNAGNNHIQNPDPAVYQ

SEQ ID NO: 463530 - protein, 19 aa, Homo sapiens
  CDR3 for beta chain variable domain of TCR clone 231765 (TRBV7-2, TRBJ2-3)
CASSFLSRNWGGGADTQYF

SEQ ID NO: 463531 - protein, 11 aa, Homo sapiens
  CDR3 for alpha chain variable domain of TCR clone 231766 (TRAV1-2, TRAJ20)
CAVSNDYKLSF

SEQ ID NO: 463532 - protein, 13 aa, Homo sapiens
  CDR3 for beta chain variable domain of TCR clone 231766 (TRBV15, TRBJ1-6)
CATSGGLNSPLHF

SEQ ID NO: 463533 - protein, 11 aa, Homo sapiens
  CDR3 for alpha chain variable domain of TCR clone 231767 (TRAV8-6, TRAJ45)
REGGGADGLTF

SEQ ID NO: 463534 - protein, 14 aa, Homo sapiens
  CDR3 for beta chain variable domain of TCR clone 231767 (TRBV7-9, TRBJ2-5)
CASSLDTAQETQYF

SEQ ID NO: 463535 - protein, 12 aa, Homo sapiens
  CDR3 for alpha chain variable domain of TCR clone 231768 (TRAV13-2, TRAJ8)
CAPWLGFQKLVL

SEQ ID NO: 463536 - protein, 14 aa, Homo sapiens
  CDR3 for beta chain variable domain of TCR clone 231768 (TRBV18, TRBJ1-5)
CASSRQQRNQPQHF

SEQ ID NO: 463537 - protein, 14 aa, Homo sapiens
  CDR3 for alpha chain variable domain of TCR clone 231769 (TRAV12-2, TRAJ45)
CAVYSGGGADGLTF

SEQ ID NO: 463538 - protein, 15 aa, Homo sapiens
  CDR3 for beta chain variable domain of TCR clone 231769 (TRBV7-9, TRBJ1-4)
CASSRTGGFNEKLFF

SEQ ID NO: 463539 - protein, 14 aa, Homo sapiens
  CDR3 for alpha chain variable domain of TCR clone 231770 (TRAV1-2, TRAJ8)
CAVREDTGFQKLVF

SEQ ID NO: 463540 - protein, 19 aa, Homo sapiens
  CDR3 for beta chain variable domain of TCR clone 231770 (TRBV28, TRBJ2-1)
CASSFSIRGSGRPRYEQFF

SEQ ID NO: 463541 - protein, 14 aa, Homo sapiens
  CDR3 for alpha chain variable domain of TCR clone 231771 (TRAV26-1, TRAJ38)
CIADNAGNNRKLIW

SEQ ID NO: 463542 - protein, 14 aa, Homo sapiens
  CDR3 for beta chain variable domain of TCR clone 231771 (TRBV5-1, TRBJ2-1)
CASSALWAGNEQFF

SEQ ID NO: 463543 - protein, 14 aa, Homo sapiens
  CDR3 for alpha chain variable domain of TCR clone 231772 (TRAV9-2, TRAJ39)
CALYIYNAGNMRTF

SEQ ID NO: 463544 - protein, 12 aa, Homo sapiens
  CDR3 for beta chain variable domain of TCR clone 231772 (TRBV12-4, TRBJ2-1)
CASSLQGSEQFF

SEQ ID NO: 463545 - protein, 17 aa, Homo sapiens
  CDR3 for alpha chain variable domain of TCR clone 231773 (TRAV38-2/DV8, TRAJ38)
CAYRSARGAGNNRKLIW

SEQ ID NO: 463546 - protein, 13 aa, Homo sapiens
  CDR3 for beta chain variable domain of TCR clone 231773 (TRBV6-5, TRBJ2-1)
CASRGRVRNEQFF

SEQ ID NO: 463547 - protein, 13 aa, Homo sapiens
  CDR3 for alpha chain variable domain of TCR clone 231774 (TRAV27, TRAJ45)
CRSSGGGVDGLTF

SEQ ID NO: 463548 - protein, 15 aa, Homo sapiens
  CDR3 for beta chain variable domain of TCR clone 231774 (TRBV12-4, TRBJ2-5)
CASSPPTGLQETQYF

SEQ ID NO: 463549 - protein, 11 aa, Homo sapiens
  CDR3 for alpha chain variable domain of TCR clone 231775 (TRAV16, TRAJ20)
CALSEGFKAAL

SEQ ID NO: 463550 - protein, 13 aa, Homo sapiens
  CDR3 for beta chain variable domain of TCR clone 231775 (TRBV7-3, TRBJ2-1)
WASSLDSYNEQFF

SEQ ID NO: 463551 - protein, 14 aa, Homo sapiens
  CDR3 for alpha chain variable domain of TCR clone 231776 (TRAV12-1, TRAJ30)
CVVNIGGRDDKIIF

SEQ ID NO: 463552 - protein, 13 aa, Homo sapiens
  CDR3 for beta chain variable domain of TCR clone 231776 (TRBV12-5, TRBJ2-1)
CASGLGRGNKQFF

SEQ ID NO: 463553 - protein, 13 aa, Homo sapiens
  CDR3 for alpha chain variable domain of TCR clone 231777 (TRAV12-1, TRAJ11)
RVVTRGGYSTLTF

SEQ ID NO: 463554 - protein, 13 aa, Homo sapiens
  CDR3 for beta chain variable domain of TCR clone 231777 (TRBV20-1, TRBJ1-2)
CSARDQGAYGYTF

SEQ ID NO: 463555 - protein, 15 aa, Homo sapiens
  CDR3 for alpha chain variable domain of TCR clone 231778 (TRAV30, TRAJ57)
CGTAIPQGGSEKLVF

SEQ ID NO: 463556 - protein, 13 aa, Homo sapiens
  CDR3 for beta chain variable domain of TCR clone 231778 (TRBV4-2, TRBJ1-1)
CASSQAGNTEAFF

SEQ ID NO: 463557 - protein, 14 aa, Homo sapiens
  CDR3 for alpha chain variable domain of TCR clone 231779 (TRAV17, TRAJ31)
CATDAEDNNARLMF

SEQ ID NO: 463558 - protein, 12 aa, Homo sapiens
  CDR3 for beta chain variable domain of TCR clone 231779 (TRBV11-2, TRBJ2-2)
CASSLPTGELFF

SEQ ID NO: 463559 - protein, 15 aa, Homo sapiens
  CDR3 for alpha chain variable domain of TCR clone 231780 (TRAV17, TRAJ57)
CATGPSQGGSEKLVF

SEQ ID NO: 463560 - protein, 11 aa, Homo sapiens
  CDR3 for beta chain variable domain of TCR clone 231780 (TRBV29-1, TRBJ2-5)
CSEDRTGTQYV

SEQ ID NO: 463561 - protein, 14 aa, Homo sapiens
  CDR3 for alpha chain variable domain of TCR clone 231781 (TRAV12-2, TRAJ17)
CAVLFKAAGNKLTF

SEQ ID NO: 463562 - protein, 13 aa, Homo sapiens
  CDR3 for beta chain variable domain of TCR clone 231781 (TRBV7-3, TRBJ2-1)
CASSLWPYNEQFF

SEQ ID NO: 463563 - protein, 14 aa, Homo sapiens
  CDR3 for alpha chain variable domain of TCR clone 231782 (TRAV12-3, TRAJ10)
SHLPLTGGGNKLTF

SEQ ID NO: 463564 - protein, 15 aa, Homo sapiens
  CDR3 for beta chain variable domain of TCR clone 231782 (TRBV5-1, TRBJ2-7)
CASSLDLTSSYEQYF

SEQ ID NO: 463565 - protein, 15 aa, Homo sapiens
  CDR3 for alpha chain variable domain of TCR clone 231783 (TRAV20, TRAJ4)
CAVTMFSGGYNKLIF

SEQ ID NO: 463566 - protein, 14 aa, Homo sapiens
  CDR3 for beta chain variable domain of TCR clone 231783 (TRBV7-6, TRBJ2-3)
CASSLGTVTDTQYF

SEQ ID NO: 463567 - protein, 13 aa, Homo sapiens
  CDR3 for alpha chain variable domain of TCR clone 231784 (TRAV8-3, TRAJ43)
CVVGPDNNNDMRF

SEQ ID NO: 463568 - protein, 12 aa, Homo sapiens
  CDR3 for beta chain variable domain of TCR clone 231784 (TRBV7-2, TRBJ1-6)
CASSLSSSPLHF

SEQ ID NO: 463569 - protein, 16 aa, Homo sapiens
  CDR3 for alpha chain variable domain of TCR clone 231785 (TRAV30, TRAJ24)
CGTEIVDTDSWGKFQF

SEQ ID NO: 463570 - protein, 17 aa, Homo sapiens
  CDR3 for beta chain variable domain of TCR clone 231785 (TRBV7-9, TRBJ1-4)
CASSARTGGNEKLFLAV

SEQ ID NO: 463571 - protein, 13 aa, Homo sapiens
  CDR3 for alpha chain variable domain of TCR clone 231786 (TRAV27, TRAJ43)
CAGAGNNNNDMRF

SEQ ID NO: 463572 - protein, 14 aa, Homo sapiens
  CDR3 for beta chain variable domain of TCR clone 231786 (TRBV7-2, TRBJ2-7)
CASRSQGAAYGQYF

SEQ ID NO: 463573 - protein, 14 aa, Homo sapiens
  CDR3 for alpha chain variable domain of TCR clone 231787 (TRAV17, TRAJ34)
CATDSLEGTDKPIF

SEQ ID NO: 463574 - protein, 13 aa, Homo sapiens
  CDR3 for beta chain variable domain of TCR clone 231787 (TRBV11-2, TRBJ2-7)
FASSGTRPYEQYF

SEQ ID NO: 463575 - protein, 12 aa, Homo sapiens
  CDR3 for alpha chain variable domain of TCR clone 231788 (TRAV12-3, TRAJ17)
CAMTPTGNKLTF

SEQ ID NO: 463576 - protein, 15 aa, Homo sapiens
  CDR3 for beta chain variable domain of TCR clone 231788 (TRBV19, TRBJ1-5)
CASSILTGEDQPQHF

SEQ ID NO: 463577 - protein, 13 aa, Homo sapiens
  CDR3 for alpha chain variable domain of TCR clone 231789 (TRAV17, TRAJ5)
CATGDTGRRALTF

SEQ ID NO: 463578 - protein, 15 aa, Homo sapiens
  CDR3 for beta chain variable domain of TCR clone 231789 (TRBV7-9, TRBJ2-2)
CASGPLDTFPGELFF

SEQ ID NO: 463579 - protein, 14 aa, Homo sapiens
  CDR3 for alpha chain variable domain of TCR clone 231790 (TRAV1-2, TRAJ15)
CAVRDRQAGTALIF

SEQ ID NO: 463580 - protein, 13 aa, Homo sapiens
  CDR3 for beta chain variable domain of TCR clone 231790 (TRBV29-1, TRBJ1-1)
CSVGDSRNTEAFF

SEQ ID NO: 463581 - protein, 13 aa, Homo sapiens
  CDR3 for alpha chain variable domain of TCR clone 231791 (TRAV8-3, TRAJ48)
CAVVPFGNEELTF

SEQ ID NO: 463582 - protein, 12 aa, Homo sapiens
  CDR3 for beta chain variable domain of TCR clone 231791 (TRBV11-2, TRBJ2-2)
CASSLGGGELFF

SEQ ID NO: 463583 - protein, 14 aa, Homo sapiens
  CDR3 for alpha chain variable domain of TCR clone 231792 (TRAV1-2, TRAJ16)
CAVNRFSDGQKLPF

SEQ ID NO: 463584 - protein, 15 aa, Homo sapiens
  CDR3 for beta chain variable domain of TCR clone 231792 (TRBV18, TRBJ1-1)
CASSGRTGEVTEAFF

SEQ ID NO: 463585 - protein, 14 aa, Homo sapiens
  CDR3 for alpha chain variable domain of TCR clone 231793 (TRAV2, TRAJ3)
CAVRPYSSASKIIF

SEQ ID NO: 463586 - protein, 17 aa, Homo sapiens
  CDR3 for beta chain variable domain of TCR clone 231793 (TRBV7-6, TRBJ2-5)
GASSSPQAGDPSETQYF

SEQ ID NO: 463587 - protein, 12 aa, Homo sapiens
  CDR3 for alpha chain variable domain of TCR clone 231794 (TRAV13-1, TRAJ49)
CAASIEGDPFYF

SEQ ID NO: 463588 - protein, 20 aa, Homo sapiens
  CDR3 for beta chain variable domain of TCR clone 231794 (TRBV28, TRBJ2-1)
CASTPIGRSPGLAGGNEQFF

SEQ ID NO: 463589 - protein, 14 aa, Homo sapiens
  CDR3 for alpha chain variable domain of TCR clone 231795 (TRAV12-2, TRAJ13)
CAVKKNGGYQKVIF

SEQ ID NO: 463590 - protein, 15 aa, Homo sapiens
  CDR3 for beta chain variable domain of TCR clone 231795 (TRBV27, TRBJ2-1)
CASSNGGGSSNEQFF

SEQ ID NO: 463591 - protein, 12 aa, Homo sapiens
  CDR3 for alpha chain variable domain of TCR clone 231796 (TRAV13-2, TRAJ23)
CAERHRGGKLIF

SEQ ID NO: 463592 - protein, 14 aa, Homo sapiens
  CDR3 for beta chain variable domain of TCR clone 231796 (TRBV7-6, TRBJ2-3)
CASNSGGDANTQYF

SEQ ID NO: 463593 - protein, 15 aa, Homo sapiens
  CDR3 for alpha chain variable domain of TCR clone 231797 (TRAV17, TRAJ4)
CATGTWSGGYNKLIF

SEQ ID NO: 463594 - protein, 13 aa, Homo sapiens
  CDR3 for beta chain variable domain of TCR clone 231797 (TRBV6-6, TRBJ2-7)
CASSPKHLAEEYF

SEQ ID NO: 463595 - protein, 18 aa, Homo sapiens
  CDR3 for alpha chain variable domain of TCR clone 231798 (TRAV26-1, TRAJ5)
CIVRVVPPRDTGRRALTF

SEQ ID NO: 463596 - protein, 15 aa, Homo sapiens
  CDR3 for beta chain variable domain of TCR clone 231798 (TRBV7-9, TRBJ2-7)
CASSLPMGQANERYF

SEQ ID NO: 463597 - protein, 15 aa, Homo sapiens
  CDR3 for alpha chain variable domain of TCR clone 231799 (TRAV29/DV5, TRAJ24)
FAASGATDSWGKFQF

SEQ ID NO: 463598 - protein, 13 aa, Homo sapiens
  CDR3 for beta chain variable domain of TCR clone 231799 (TRBV19, TRBJ1-2)
CASSVPGQDGYTF

SEQ ID NO: 463599 - protein, 14 aa, Homo sapiens
  CDR3 for alpha chain variable domain of TCR clone 231800 (TRAV17, TRAJ16)
CAPADFSDGQKLLF

SEQ ID NO: 463600 - protein, 15 aa, Homo sapiens
  CDR3 for beta chain variable domain of TCR clone 231800 (TRBV18, TRBJ2-1)
CASSPPSASYNEQFF

SEQ ID NO: 463601 - protein, 14 aa, Homo sapiens
  CDR3 for alpha chain variable domain of TCR clone 231801 (TRAV12-1, TRAJ17)
CVVNYKAAGNKLTF

SEQ ID NO: 463602 - protein, 16 aa, Homo sapiens
  CDR3 for beta chain variable domain of TCR clone 231801 (TRBV20-1, TRBJ2-1)
QSSSSGLAGSYNEQFF

SEQ ID NO: 463603 - protein, 15 aa, Homo sapiens
  CDR3 for alpha chain variable domain of TCR clone 231802 (TRAV12-1, TRAJ36)
CVVNEHQTGAKNLFF

SEQ ID NO: 463604 - protein, 12 aa, Homo sapiens
  CDR3 for beta chain variable domain of TCR clone 231802 (TRBV29-1, TRBJ2-3)
CSVTGGADTQYF

SEQ ID NO: 463605 - protein, 14 aa, Homo sapiens
  CDR3 for alpha chain variable domain of TCR clone 231803 (TRAV1-2, TRAJ16)
CAVNRFSDGQKLLF

SEQ ID NO: 463606 - protein, 14 aa, Homo sapiens
  CDR3 for beta chain variable domain of TCR clone 231803 (TRBV10-2, TRBJ1-5)
CASSSTGGNQPQHF

SEQ ID NO: 463607 - protein, 13 aa, Homo sapiens
  CDR3 for alpha chain variable domain of TCR clone 231804 (TRAV1-2, TRAJ9)
CAALNTGGFKTIF

SEQ ID NO: 463608 - protein, 14 aa, Homo sapiens
  CDR3 for beta chain variable domain of TCR clone 231804 (TRBV13, TRBJ2-3)
CASSSGSRTDTQYF

SEQ ID NO: 463609 - protein, 12 aa, Homo sapiens
  CDR3 for alpha chain variable domain of TCR clone 231805 (TRAV1-2, TRAJ33)
CAALDSNYQLIW

SEQ ID NO: 463610 - protein, 16 aa, Homo sapiens
  CDR3 for beta chain variable domain of TCR clone 231805 (TRBV24-1, TRBJ2-3)
CATSDRRQDLTDMQYF

SEQ ID NO: 463611 - protein, 16 aa, Homo sapiens
  CDR3 for alpha chain variable domain of TCR clone 231806 (TRAV16, TRAJ57)
CAPYLITQGGSEKLVF

SEQ ID NO: 463612 - protein, 14 aa, Homo sapiens
  CDR3 for beta chain variable domain of TCR clone 231806 (TRBV7-6, TRBJ2-3)
CASSLGTVTDTQYF

SEQ ID NO: 463613 - protein, 14 aa, Homo sapiens
  CDR3 for alpha chain variable domain of TCR clone 231807 (TRAV12-1, TRAJ21)
CVVNGEYNFNKFYF

SEQ ID NO: 463614 - protein, 17 aa, Homo sapiens
  CDR3 for beta chain variable domain of TCR clone 231807 (TRBV11-2, TRBJ2-1)
CASSLYPPGVEYNEQFF

SEQ ID NO: 463615 - protein, 14 aa, Homo sapiens
  CDR3 for alpha chain variable domain of TCR clone 231808 (TRAV2, TRAJ20)
CAVDLRKHDYKPSF

SEQ ID NO: 463616 - protein, 15 aa, Homo sapiens
  CDR3 for beta chain variable domain of TCR clone 231808 (TRBV11-3, TRBJ2-7)
CASSLLSGSSYEQYF

SEQ ID NO: 463617 - protein, 15 aa, Homo sapiens
  CDR3 for alpha chain variable domain of TCR clone 231809 (TRAV3, TRAJ13)
CAVRVYSGGYQKVTF

SEQ ID NO: 463618 - protein, 13 aa, Homo sapiens
  CDR3 for beta chain variable domain of TCR clone 231809 (TRBV9, TRBJ2-7)
CASSASDSYEQYF

SEQ ID NO: 463619 - protein, 12 aa, Homo sapiens
  CDR3 for alpha chain variable domain of TCR clone 231810 (TRAV12-1, TRAJ40)
CVFYSGTYKYIF

SEQ ID NO: 463620 - protein, 13 aa, Homo sapiens
  CDR3 for beta chain variable domain of TCR clone 231810 (TRBV4-1, TRBJ1-5)
CASSQEVRRPQHF

SEQ ID NO: 463621 - protein, 15 aa, Homo sapiens
  CDR3 for alpha chain variable domain of TCR clone 231811 (TRAV21, TRAJ53)
CSTLNSGGSNYKLTF

SEQ ID NO: 463622 - protein, 15 aa, Homo sapiens
  CDR3 for beta chain variable domain of TCR clone 231811 (TRBV18, TRBJ2-1)
CASSPPSASYNEQFF

SEQ ID NO: 463623 - protein, 13 aa, Homo sapiens
  CDR3 for alpha chain variable domain of TCR clone 231812 (TRAV13-2, TRAJ53)
CAENMGSNYKLTF

SEQ ID NO: 463624 - protein, 15 aa, Homo sapiens
  CDR3 for beta chain variable domain of TCR clone 231812 (TRBV6-1, TRBJ2-3)
CASSERGGITDTQYF

SEQ ID NO: 463625 - protein, 13 aa, Homo sapiens
  CDR3 for alpha chain variable domain of TCR clone 231813 (TRAV23/DV6, TRAJ27)
RAASKPMQANQPL

SEQ ID NO: 463626 - protein, 14 aa, Homo sapiens
  CDR3 for beta chain variable domain of TCR clone 231813 (TRBV12-5, TRBJ2-5)
CASGSRTHQETQYF

SEQ ID NO: 463627 - protein, 12 aa, Homo sapiens
  CDR3 for alpha chain variable domain of TCR clone 231814 (TRAV17, TRAJ39)
CATGAAGNMLTF

SEQ ID NO: 463628 - protein, 14 aa, Homo sapiens
  CDR3 for beta chain variable domain of TCR clone 231814 (TRBV7-9, TRBJ1-2)
CASSRQGANYGYVF

SEQ ID NO: 463629 - protein, 12 aa, Homo sapiens
  CDR3 for alpha chain variable domain of TCR clone 231815 (TRAV21, TRAJ27)
CCASRQCRQINL

SEQ ID NO: 463630 - protein, 14 aa, Homo sapiens
  CDR3 for beta chain variable domain of TCR clone 231815 (TRBV11-2, TRBJ2-7)
CASSLGAGAYEQYF

SEQ ID NO: 463631 - protein, 15 aa, Homo sapiens
  CDR3 for alpha chain variable domain of TCR clone 231816 (TRAV12-3, TRAJ52)
CNGGAGCTSYGKLTF

SEQ ID NO: 463632 - protein, 13 aa, Homo sapiens
  CDR3 for beta chain variable domain of TCR clone 231816 (TRBV20-1, TRBJ2-5)
CSARGDYQETQYF

SEQ ID NO: 463633 - protein, 12 aa, Homo sapiens
  CDR3 for alpha chain variable domain of TCR clone 231817 (TRAV9-2, TRAJ13)
CALSGGYQKVTF

SEQ ID NO: 463634 - protein, 16 aa, Homo sapiens
  CDR3 for beta chain variable domain of TCR clone 231817 (TRBV11-2, TRBJ1-6)
CASSYRVQSYNSPLHF

SEQ ID NO: 463635 - protein, 14 aa, Homo sapiens
  CDR3 for alpha chain variable domain of TCR clone 231818 (TRAV1-2, TRAJ16)
CAVNRFSDGQKLLF

SEQ ID NO: 463636 - protein, 11 aa, Homo sapiens
  CDR3 for beta chain variable domain of TCR clone 231818 (TRBV19, TRBJ1-2)
CASSISSGYTF

SEQ ID NO: 463637 - protein, 13 aa, Homo sapiens
  CDR3 for alpha chain variable domain of TCR clone 231819 (TRAV2, TRAJ40)
CAVVTSGTYKYIF

SEQ ID NO: 463638 - protein, 14 aa, Homo sapiens
  CDR3 for beta chain variable domain of TCR clone 231819 (TRBV19, TRBJ2-1)
CASTTFVVSGEQFF

SEQ ID NO: 463639 - protein, 11 aa, Homo sapiens
  CDR3 for alpha chain variable domain of TCR clone 231820 (TRAV21, TRAJ11)
CAVNGYGTLTF

SEQ ID NO: 463640 - protein, 11 aa, Homo sapiens
  CDR3 for beta chain variable domain of TCR clone 231820 (TRBV11-2, TRBJ2-7)
CASSSDYEQYF

SEQ ID NO: 463641 - protein, 15 aa, Homo sapiens
  CDR3 for alpha chain variable domain of TCR clone 231821 (TRAV21, TRAJ53)
CATLNSGCSNYNLTL

SEQ ID NO: 463642 - protein, 14 aa, Homo sapiens
  CDR3 for beta chain variable domain of TCR clone 231821 (TRBV7-2, TRBJ2-7)
CASRSQGAAYEQYF

SEQ ID NO: 463643 - protein, 13 aa, Homo sapiens
  CDR3 for alpha chain variable domain of TCR clone 231822 (TRAV29/DV5, TRAJ44)
CAASTGTASKLTF

SEQ ID NO: 463644 - protein, 12 aa, Homo sapiens
  CDR3 for beta chain variable domain of TCR clone 231822 (TRBV7-3, TRBJ2-5)
CASSSPGGTQYF

SEQ ID NO: 463645 - protein, 14 aa, Homo sapiens
  CDR3 for alpha chain variable domain of TCR clone 231823 (TRAV26-1, TRAJ44)
CIVRPTGTASKLTF

SEQ ID NO: 463646 - protein, 13 aa, Homo sapiens
  CDR3 for beta chain variable domain of TCR clone 231823 (TRBV14, TRBJ1-1)
CASSQEAGTEAFF

SEQ ID NO: 463647 - protein, 13 aa, Homo sapiens
  CDR3 for alpha chain variable domain of TCR clone 231824 (TRAV12-1, TRAJ22)
CVVPSGSARQLTF

SEQ ID NO: 463648 - protein, 15 aa, Homo sapiens
  CDR3 for beta chain variable domain of TCR clone 231824 (TRBV7-9, TRBJ2-1)
CASSLGWGRANEQFF

SEQ ID NO: 463649 - protein, 14 aa, Homo sapiens
  CDR3 for alpha chain variable domain of TCR clone 231825 (TRAV12-3, TRAJ10)
SHLPLTGGGNKLTF

SEQ ID NO: 463650 - protein, 14 aa, Homo sapiens
  CDR3 for beta chain variable domain of TCR clone 231825 (TRBV7-2, TRBJ2-7)
CASSLPPGRGPQYF

SEQ ID NO: 463651 - protein, 14 aa, Homo sapiens
  CDR3 for alpha chain variable domain of TCR clone 231826 (TRAV26-1, TRAJ54)
CIVRRTQGAQKLVF

SEQ ID NO: 463652 - protein, 12 aa, Homo sapiens
  CDR3 for beta chain variable domain of TCR clone 231826 (TRBV7-9, TRBJ2-7)
CASSIKREEQYF

SEQ ID NO: 463653 - protein, 10 aa, Homo sapiens
  CDR3 for alpha chain variable domain of TCR clone 231827 (TRAV13-1, TRAJ4)
CAASIGPLLR

SEQ ID NO: 463654 - protein, 12 aa, Homo sapiens
  CDR3 for beta chain variable domain of TCR clone 231827 (TRBV2, TRBJ2-1)
CAYGPPGNEQFF

SEQ ID NO: 463655 - protein, 12 aa, Homo sapiens
  CDR3 for alpha chain variable domain of TCR clone 231828 (TRAV30, TRAJ43)
CGTEERGNDMRF

SEQ ID NO: 463656 - protein, 17 aa, Homo sapiens
  CDR3 for beta chain variable domain of TCR clone 231828 (TRBV11-2, TRBJ2-1)
CASSLCPPGVEYNEQFF

SEQ ID NO: 463657 - protein, 11 aa, Homo sapiens
  CDR3 for alpha chain variable domain of TCR clone 231829 (TRAV27, TRAJ47)
SIVEYGNKLVF

SEQ ID NO: 463658 - protein, 18 aa, Homo sapiens
  CDR3 for beta chain variable domain of TCR clone 231829 (TRBV2, TRBJ2-1)
CASRGLAGGPRTYNEKSF

SEQ ID NO: 463659 - protein, 14 aa, Homo sapiens
  CDR3 for alpha chain variable domain of TCR clone 231830 (TRAV38-1, TRAJ40)
CALRPTSGTYKYIF

SEQ ID NO: 463660 - protein, 12 aa, Homo sapiens
  CDR3 for beta chain variable domain of TCR clone 231830 (TRBV5-1, TRBJ2-7)
CASSLDSYEQYF

SEQ ID NO: 463661 - protein, 15 aa, Homo sapiens
  CDR3 for alpha chain variable domain of TCR clone 231831 (TRAV26-1, TRAJ29)
CIARVEGSGNTPPVF

SEQ ID NO: 463662 - protein, 15 aa, Homo sapiens
  CDR3 for beta chain variable domain of TCR clone 231831 (TRBV7-9, TRBJ1-5)
CASSQGHQPNQPQHF

SEQ ID NO: 463663 - protein, 13 aa, Homo sapiens
  CDR3 for alpha chain variable domain of TCR clone 231832 (TRAV8-6, TRAJ21)
CAVSPSSLNKFYF

SEQ ID NO: 463664 - protein, 14 aa, Homo sapiens
  CDR3 for beta chain variable domain of TCR clone 231832 (TRBV27, TRBJ1-1)
CASSLLSGLSEAFF

SEQ ID NO: 463665 - protein, 14 aa, Homo sapiens
  CDR3 for alpha chain variable domain of TCR clone 231833 (TRAV1-2, TRAJ8)
CAVREDTGFQKLVF

SEQ ID NO: 463666 - protein, 16 aa, Homo sapiens
  CDR3 for beta chain variable domain of TCR clone 231833 (TRBV20-1, TRBJ1-4)
CSAPGQGVLANDKLFF

SEQ ID NO: 463667 - protein, 13 aa, Homo sapiens
  CDR3 for alpha chain variable domain of TCR clone 231834 (TRAV12-3, TRAJ9)
CAMRNTGGFKTIF

SEQ ID NO: 463668 - protein, 13 aa, Homo sapiens
  CDR3 for beta chain variable domain of TCR clone 231834 (TRBV2, TRBJ2-5)
CASSGQGEQTQYF

SEQ ID NO: 463669 - protein, 14 aa, Homo sapiens
  CDR3 for alpha chain variable domain of TCR clone 231835 (TRAV12-2, TRAJ49)
CAVTLGLYGNQFYF

SEQ ID NO: 463670 - protein, 12 aa, Homo sapiens
  CDR3 for beta chain variable domain of TCR clone 231835 (TRBV12-4, TRBJ1-3)
CASSFSGNTIYF

SEQ ID NO: 463671 - protein, 14 aa, Homo sapiens
  CDR3 for alpha chain variable domain of TCR clone 231836 (TRAV20, TRAJ36)
CAVQAGTGANNLFF

SEQ ID NO: 463672 - protein, 16 aa, Homo sapiens
  CDR3 for beta chain variable domain of TCR clone 231836 (TRBV25-1, TRBJ1-1)
CASSGDRDRGRIEAFF

SEQ ID NO: 463673 - protein, 12 aa, Homo sapiens
  CDR3 for alpha chain variable domain of TCR clone 231837 (TRAV8-4, TRAJ43)
CAVSVNNNDMRF

SEQ ID NO: 463674 - protein, 14 aa, Homo sapiens
  CDR3 for beta chain variable domain of TCR clone 231837 (TRBV7-3, TRBJ2-2)
CASSSGGCTGELFF

SEQ ID NO: 463675 - protein, 15 aa, Homo sapiens
  CDR3 for alpha chain variable domain of TCR clone 231838 (TRAV1-2, TRAJ39)
CAVEGVDHAGNMLTF

SEQ ID NO: 463676 - protein, 13 aa, Homo sapiens
  CDR3 for beta chain variable domain of TCR clone 231838 (TRBV27, TRBJ1-6)
CASRWTGYSPLHF

SEQ ID NO: 463677 - protein, 14 aa, Homo sapiens
  CDR3 for alpha chain variable domain of TCR clone 231839 (TRAV1-2, TRAJ16)
CAVNRFSGGQKLLF

SEQ ID NO: 463678 - protein, 13 aa, Homo sapiens
  CDR3 for beta chain variable domain of TCR clone 231839 (TRBV10-2, TRBJ2-7)
CASGASGGYEQYF

SEQ ID NO: 463679 - protein, 13 aa, Homo sapiens
  CDR3 for alpha chain variable domain of TCR clone 231840 (TRAV13-1, TRAJ39)
CSKYSNAGNMLTF

SEQ ID NO: 463680 - protein, 14 aa, Homo sapiens
  CDR3 for beta chain variable domain of TCR clone 231840 (TRBV11-3, TRBJ2-5)
CASRPLAGRETQYF

SEQ ID NO: 463681 - protein, 13 aa, Homo sapiens
  CDR3 for alpha chain variable domain of TCR clone 231841 (TRAV13-1, TRAJ21)
CAASKGNFNKFYF

SEQ ID NO: 463682 - protein, 16 aa, Homo sapiens
  CDR3 for beta chain variable domain of TCR clone 231841 (TRBV5-4, TRBJ2-3)
CASSWGTSGGTDTQYF

SEQ ID NO: 463683 - protein, 12 aa, Homo sapiens
  CDR3 for alpha chain variable domain of TCR clone 231842 (TRAV16, TRAJ49)
CALNEGGNQFYF

SEQ ID NO: 463684 - protein, 15 aa, Homo sapiens
  CDR3 for beta chain variable domain of TCR clone 231842 (TRBV7-2, TRBJ2-3)
CASSLAGAFIDTQYF

SEQ ID NO: 463685 - protein, 14 aa, Homo sapiens
  CDR3 for alpha chain variable domain of TCR clone 231843 (TRAV35, TRAJ13)
CAGSPSGSYQKVTF

SEQ ID NO: 463686 - protein, 13 aa, Homo sapiens
  CDR3 for beta chain variable domain of TCR clone 231843 (TRBV29-1, TRBJ1-1)
CSVGDSRNTEAFF

SEQ ID NO: 463687 - protein, 15 aa, Homo sapiens
  CDR3 for alpha chain variable domain of TCR clone 231844 (TRAV3, TRAJ22)
CAVRDRGGSARQLSF

SEQ ID NO: 463688 - protein, 13 aa, Homo sapiens
  CDR3 for beta chain variable domain of TCR clone 231844 (TRBV7-3, TRBJ2-1)
CASSPVAYTEQFF

SEQ ID NO: 463689 - protein, 15 aa, Homo sapiens
  CDR3 for alpha chain variable domain of TCR clone 231845 (TRAV8-4, TRAJ3)
CAVTGENLVQQCFQD

SEQ ID NO: 463690 - protein, 15 aa, Homo sapiens
  CDR3 for beta chain variable domain of TCR clone 231845 (TRBV28, TRBJ2-1)
CASSGLAEVDNEQFF

SEQ ID NO: 463691 - protein, 13 aa, Homo sapiens
  CDR3 for alpha chain variable domain of TCR clone 231846 (TRAV12-1, TRAJ11)
CVVNWAGYGTLTF

SEQ ID NO: 463692 - protein, 15 aa, Homo sapiens
  CDR3 for beta chain variable domain of TCR clone 231846 (TRBV7-3, TRBJ2-2)
CASSETGQGTGELFF

SEQ ID NO: 463693 - protein, 14 aa, Homo sapiens
  CDR3 for alpha chain variable domain of TCR clone 231847 (TRAV17, TRAJ12)
CAILPMDSSYKLIF

SEQ ID NO: 463694 - protein, 11 aa, Homo sapiens
  CDR3 for beta chain variable domain of TCR clone 231847 (TRBV19, TRBJ1-1)
CASSIGGEAFF

SEQ ID NO: 463695 - protein, 16 aa, Homo sapiens
  CDR3 for alpha chain variable domain of TCR clone 231848 (TRAV30, TRAJ24)
CGTEFVDADSWGRFQF

SEQ ID NO: 463696 - protein, 16 aa, Homo sapiens
  CDR3 for beta chain variable domain of TCR clone 231848 (TRBV2, TRBJ1-3)
CASSGGAGRSGNTIYF

SEQ ID NO: 463697 - protein, 13 aa, Homo sapiens
  CDR3 for alpha chain variable domain of TCR clone 231849 (TRAV27, TRAJ41)
FSGEGNSGYALNF

SEQ ID NO: 463698 - protein, 14 aa, Homo sapiens
  CDR3 for beta chain variable domain of TCR clone 231849 (TRBV25-1, TRBJ1-1)
CASTHLGGNTEAFF

SEQ ID NO: 463699 - protein, 10 aa, Homo sapiens
  CDR3 for alpha chain variable domain of TCR clone 231850 (TRAV12-3, TRAJ49)
CAMNDDQFYF

SEQ ID NO: 463700 - protein, 12 aa, Homo sapiens
  CDR3 for beta chain variable domain of TCR clone 231850 (TRBV12-5, TRBJ2-5)
CASGQGVETQYF

SEQ ID NO: 463701 - protein, 15 aa, Homo sapiens
  CDR3 for alpha chain variable domain of TCR clone 231851 (TRAV8-4, TRAJ13)
CAVSDWGGGYQKVTF

SEQ ID NO: 463702 - protein, 13 aa, Homo sapiens
  CDR3 for beta chain variable domain of TCR clone 231851 (TRBV7-9, TRBJ1-2)
CASSLKQNYGYTF

SEQ ID NO: 463703 - protein, 13 aa, Homo sapiens
  CDR3 for alpha chain variable domain of TCR clone 231852 (TRAV12-3, TRAJ13)
CVVNLGGYQKVTF

SEQ ID NO: 463704 - protein, 14 aa, Homo sapiens
  CDR3 for beta chain variable domain of TCR clone 231852 (TRBV4-1, TRBJ2-2)
CASSQAVNTGELFF

SEQ ID NO: 463705 - protein, 14 aa, Homo sapiens
  CDR3 for alpha chain variable domain of TCR clone 231853 (TRAV1-2, TRAJ16)
CAVNRFSDGQKLLF

SEQ ID NO: 463706 - protein, 14 aa, Homo sapiens
  CDR3 for beta chain variable domain of TCR clone 231853 (TRBV19, TRBJ2-2)
CASSGQGIAGELSF

SEQ ID NO: 463707 - protein, 16 aa, Homo sapiens
  CDR3 for alpha chain variable domain of TCR clone 231854 (TRAV30, TRAJ24)
CGTEMVDADSWGKFQF

SEQ ID NO: 463708 - protein, 12 aa, Homo sapiens
  CDR3 for beta chain variable domain of TCR clone 231854 (TRBV27, TRBJ2-1)
CASRGFYNEQFF

SEQ ID NO: 463709 - protein, 13 aa, Homo sapiens
  CDR3 for alpha chain variable domain of TCR clone 231855 (TRAV21, TRAJ57)
CAVTQGGSEKLVF

SEQ ID NO: 463710 - protein, 16 aa, Homo sapiens
  CDR3 for beta chain variable domain of TCR clone 231855 (TRBV29-1, TRBJ2-7)
CSLEDAEDGTAYEQYF

SEQ ID NO: 463711 - protein, 16 aa, Homo sapiens
  CDR3 for alpha chain variable domain of TCR clone 231856 (TRAV25, TRAJ24)
CAQRRGTTDSWGKLQF

SEQ ID NO: 463712 - protein, 15 aa, Homo sapiens
  CDR3 for beta chain variable domain of TCR clone 231856 (TRBV20-1, TRBJ2-5)
CSAEGTGGLQETQYF

SEQ ID NO: 463713 - protein, 14 aa, Homo sapiens
  CDR3 for alpha chain variable domain of TCR clone 231857 (TRAV39, TRAJ33)
CAVDIKNSNYQLIL

SEQ ID NO: 463714 - protein, 13 aa, Homo sapiens
  CDR3 for beta chain variable domain of TCR clone 231857 (TRBV4-2, TRBJ2-1)
CASSPGTYNEQFF

SEQ ID NO: 463715 - protein, 11 aa, Homo sapiens
  CDR3 for alpha chain variable domain of TCR clone 231858 (TRAV4, TRAJ29)
CLVEVNTPLVF

SEQ ID NO: 463716 - protein, 12 aa, Homo sapiens
  CDR3 for beta chain variable domain of TCR clone 231858 (TRBV7-8, TRBJ2-7)
CASSLGDREQYF

SEQ ID NO: 463717 - protein, 15 aa, Homo sapiens
  CDR3 for alpha chain variable domain of TCR clone 231859 (TRAV8-3, TRAJ15)
CAVGAPNQAGTALIF

SEQ ID NO: 463718 - protein, 14 aa, Homo sapiens
  CDR3 for beta chain variable domain of TCR clone 231859 (TRBV20-1, TRBJ2-1)
CSPHDEASYNEQFF

SEQ ID NO: 463719 - protein, 13 aa, Homo sapiens
  CDR3 for alpha chain variable domain of TCR clone 231860 (TRAV23/DV6, TRAJ16)
CAATISAGQKLIF

SEQ ID NO: 463720 - protein, 15 aa, Homo sapiens
  CDR3 for beta chain variable domain of TCR clone 231860 (TRBV2, TRBJ2-2)
CASSRETVGTGELFF

SEQ ID NO: 463721 - protein, 16 aa, Homo sapiens
  CDR3 for alpha chain variable domain of TCR clone 231861 (TRAV14/DV4, TRAJ21)
CAMREGPENNFNKFYF

SEQ ID NO: 463722 - protein, 12 aa, Homo sapiens
  CDR3 for beta chain variable domain of TCR clone 231861 (TRBV29-1, TRBJ2-2)
CSVDKYTGELFC

SEQ ID NO: 463723 - protein, 15 aa, Homo sapiens
  CDR3 for alpha chain variable domain of TCR clone 231862 (TRAV26-1, TRAJ44)
CIVRANTGTASKLTF

SEQ ID NO: 463724 - protein, 11 aa, Homo sapiens
  CDR3 for beta chain variable domain of TCR clone 231862 (TRBV19, TRBJ2-5)
CASSIKETQYF

SEQ ID NO: 463725 - protein, 14 aa, Homo sapiens
  CDR3 for alpha chain variable domain of TCR clone 231863 (TRAV8-2, TRAJ4)
CVVSPSGGYNKLIF

SEQ ID NO: 463726 - protein, 15 aa, Homo sapiens
  CDR3 for beta chain variable domain of TCR clone 231863 (TRBV2, TRBJ2-1)
CASSELEGAKMSSSS

SEQ ID NO: 463727 - protein, 18 aa, Homo sapiens
  CDR3 for alpha chain variable domain of TCR clone 231864 (TRAV17, TRAJ45)
CATSLDLYTGGGADGLTL

SEQ ID NO: 463728 - protein, 15 aa, Homo sapiens
  CDR3 for beta chain variable domain of TCR clone 231864 (TRBV11-2, TRBJ2-1)
CASSKNRGLIYEQFF

SEQ ID NO: 463729 - protein, 12 aa, Homo sapiens
  CDR3 for alpha chain variable domain of TCR clone 231865 (TRAV20, TRAJ20)
CAGRFNDYKLSF

SEQ ID NO: 463730 - protein, 14 aa, Homo sapiens
  CDR3 for beta chain variable domain of TCR clone 231865 (TRBV20-1, TRBJ2-1)
CSAQIGGSANEQLF

SEQ ID NO: 463731 - protein, 16 aa, Homo sapiens
  CDR3 for alpha chain variable domain of TCR clone 231866 (TRAV17, TRAJ53)
CATDGGSGGSNYKLTF

SEQ ID NO: 463732 - protein, 12 aa, Homo sapiens
  CDR3 for beta chain variable domain of TCR clone 231866 (TRBV18, TRBJ2-7)
CASSPRSWEQYF

SEQ ID NO: 463733 - protein, 17 aa, Homo sapiens
  CDR3 for alpha chain variable domain of TCR clone 231867 (TRAV3, TRAJ6)
CAVRDGPRAGGSYIPTF

SEQ ID NO: 463734 - protein, 20 aa, Homo sapiens
  CDR3 for beta chain variable domain of TCR clone 231867 (TRBV28, TRBJ2-1)
CASTPIGRSPGLAGGNAQFL

SEQ ID NO: 463735 - protein, 12 aa, Homo sapiens
  CDR3 for alpha chain variable domain of TCR clone 231868 (TRAV16, TRAJ10)
CSRTGGGKKLTF

SEQ ID NO: 463736 - protein, 13 aa, Homo sapiens
  CDR3 for beta chain variable domain of TCR clone 231868 (TRBV7-3, TRBJ1-1)
CASSQDWGAEAFF

SEQ ID NO: 463737 - protein, 12 aa, Homo sapiens
  CDR3 for alpha chain variable domain of TCR clone 231869 (TRAV8-3, TRAJ26)
CAGDNYGQNFVF

SEQ ID NO: 463738 - protein, 14 aa, Homo sapiens
  CDR3 for beta chain variable domain of TCR clone 231869 (TRBV20-1, TRBJ2-7)
CSAKRGRSSYEQYF

SEQ ID NO: 463739 - protein, 11 aa, Homo sapiens
  CDR3 for alpha chain variable domain of TCR clone 231870 (TRAV1-1, TRAJ23)
CAVRQGGKLIF

SEQ ID NO: 463740 - protein, 14 aa, Homo sapiens
  CDR3 for beta chain variable domain of TCR clone 231870 (TRBV4-2, TRBJ2-7)
CASSQDGRKGEQYF

SEQ ID NO: 463741 - protein, 15 aa, Homo sapiens
  CDR3 for alpha chain variable domain of TCR clone 231871 (TRAV8-3, TRAJ45)
CASSYSGGGAEGLTF

SEQ ID NO: 463742 - protein, 13 aa, Homo sapiens
  CDR3 for beta chain variable domain of TCR clone 231871 (TRBV7-9, TRBJ2-7)
CASSFAGAYEQYF

SEQ ID NO: 463743 - protein, 22 aa, Homo sapiens
  CDR3 for alpha chain variable domain of TCR clone 231872 (TRAV2, TRAJ38)
CAVEDFPNAGNNHIHNPDPAVY

SEQ ID NO: 463744 - protein, 14 aa, Homo sapiens
  CDR3 for beta chain variable domain of TCR clone 231872 (TRBV29-1, TRBJ1-4)
CSVSGRQGGEKLFF

SEQ ID NO: 463745 - protein, 12 aa, Homo sapiens
  CDR3 for alpha chain variable domain of TCR clone 231873 (TRAV23/DV6, TRAJ24)
CAANDSWGKLQF

SEQ ID NO: 463746 - protein, 16 aa, Homo sapiens
  CDR3 for beta chain variable domain of TCR clone 231873 (TRBV12-4, TRBJ2-5)
CAISLSTSGGKETQYF

SEQ ID NO: 463747 - protein, 18 aa, Homo sapiens
  CDR3 for alpha chain variable domain of TCR clone 231874 (TRAV12-3, TRAJ52)
CAMSVGGAGGTSYGKLTF

SEQ ID NO: 463748 - protein, 17 aa, Homo sapiens
  CDR3 for beta chain variable domain of TCR clone 231874 (TRBV27, TRBJ2-6)
CASSLTGFASGANVLTF

SEQ ID NO: 463749 - protein, 11 aa, Homo sapiens
  CDR3 for alpha chain variable domain of TCR clone 231875 (TRAV16, TRAJ31)
CALFNNARLMF

SEQ ID NO: 463750 - protein, 18 aa, Homo sapiens
  CDR3 for beta chain variable domain of TCR clone 231875 (TRBV11-2, TRBJ2-3)
CASSLGGASRGAPNTQYF

SEQ ID NO: 463751 - protein, 13 aa, Homo sapiens
  CDR3 for alpha chain variable domain of TCR clone 231876 (TRAV13-1, TRAJ21)
CAASIYNFNKFYF

SEQ ID NO: 463752 - protein, 20 aa, Homo sapiens
  CDR3 for beta chain variable domain of TCR clone 231876 (TRBV7-8, TRBJ2-2)
CASSHLFPGQTIHITGELFF

SEQ ID NO: 463753 - protein, 17 aa, Homo sapiens
  CDR3 for alpha chain variable domain of TCR clone 231877 (TRAV21, TRAJ52)
CAVGTNAGGTSYGKLTF

SEQ ID NO: 463754 - protein, 13 aa, Homo sapiens
  CDR3 for beta chain variable domain of TCR clone 231877 (TRBV5-1, TRBJ1-2)
CASSFSGNIGYTF

SEQ ID NO: 463755 - protein, 14 aa, Homo sapiens
  CDR3 for alpha chain variable domain of TCR clone 231878 (TRAV13-1, TRAJ40)
CAASMTSGTYKYIF

SEQ ID NO: 463756 - protein, 16 aa, Homo sapiens
  CDR3 for beta chain variable domain of TCR clone 231878 (TRBV7-2, TRBJ1-2)
CASSSNQDKRGHGYTF

SEQ ID NO: 463757 - protein, 14 aa, Homo sapiens
  CDR3 for alpha chain variable domain of TCR clone 231879 (TRAV20, TRAJ20)
CAVRRGYNDYKLSF

SEQ ID NO: 463758 - protein, 13 aa, Homo sapiens
  CDR3 for beta chain variable domain of TCR clone 231879 (TRBV19, TRBJ2-5)
CASSETAPETQCF

SEQ ID NO: 463759 - protein, 11 aa, Homo sapiens
  CDR3 for alpha chain variable domain of TCR clone 231880 (TRAV3, TRAJ17)
PRGAAGNKLTF

SEQ ID NO: 463760 - protein, 16 aa, Homo sapiens
  CDR3 for beta chain variable domain of TCR clone 231880 (TRBV7-9, TRBJ1-2)
CASSLGFSSGEDGYTF

SEQ ID NO: 463761 - protein, 13 aa, Homo sapiens
  CDR3 for alpha chain variable domain of TCR clone 231881 (TRAV27, TRAJ49)
CAPRPYTGNQFYF

SEQ ID NO: 463762 - protein, 18 aa, Homo sapiens
  CDR3 for beta chain variable domain of TCR clone 231881 (TRBV7-3, TRBJ2-5)
CASSLGGAAQGRWETPYF

SEQ ID NO: 463763 - protein, 13 aa, Homo sapiens
  CDR3 for alpha chain variable domain of TCR clone 231882 (TRAV23/DV6, TRAJ22)
CAPYSGSARQLTF

SEQ ID NO: 463764 - protein, 15 aa, Homo sapiens
  CDR3 for beta chain variable domain of TCR clone 231882 (TRBV7-9, TRBJ2-2)
CASSPETGAGGELFF

SEQ ID NO: 463765 - protein, 13 aa, Homo sapiens
  CDR3 for alpha chain variable domain of TCR clone 231883 (TRAV8-4, TRAJ9)
CAVSETGGFKTIF

SEQ ID NO: 463766 - protein, 14 aa, Homo sapiens
  CDR3 for beta chain variable domain of TCR clone 231883 (TRBV7-2, TRBJ2-7)
CASSPKTSFYEQYF

SEQ ID NO: 463767 - protein, 15 aa, Homo sapiens
  CDR3 for alpha chain variable domain of TCR clone 231884 (TRAV8-1, TRAJ4)
CAVIDVSGGYNKLIF

SEQ ID NO: 463768 - protein, 15 aa, Homo sapiens
  CDR3 for beta chain variable domain of TCR clone 231884 (TRBV9, TRBJ1-6)
CASSVAGTGDSPLHF

SEQ ID NO: 463769 - protein, 14 aa, Homo sapiens
  CDR3 for alpha chain variable domain of TCR clone 231885 (TRAV23/DV6, TRAJ39)
CAASIGHAGNMLTF

SEQ ID NO: 463770 - protein, 12 aa, Homo sapiens
  CDR3 for beta chain variable domain of TCR clone 231885 (TRBV20-1, TRBJ2-5)
CSVGTGSETQYF

SEQ ID NO: 463771 - protein, 13 aa, Homo sapiens
  CDR3 for alpha chain variable domain of TCR clone 231886 (TRAV38-2/DV8, TRAJ34)
CAYRNYNTDKLIF

SEQ ID NO: 463772 - protein, 15 aa, Homo sapiens
  CDR3 for beta chain variable domain of TCR clone 231886 (TRBV20-1, TRBJ1-6)
CSARAASSYNSPLHF

SEQ ID NO: 463773 - protein, 13 aa, Homo sapiens
  CDR3 for alpha chain variable domain of TCR clone 231887 (TRAV3, TRAJ8)
CAVRFTGFQKLVF

SEQ ID NO: 463774 - protein, 12 aa, Homo sapiens
  CDR3 for beta chain variable domain of TCR clone 231887 (TRBV2, TRBJ1-2)
CASIGQTYGYTF

SEQ ID NO: 463775 - protein, 15 aa, Homo sapiens
  CDR3 for alpha chain variable domain of TCR clone 231888 (TRAV12-3, TRAJ44)
CVVFVNTGTASKLTF

SEQ ID NO: 463776 - protein, 17 aa, Homo sapiens
  CDR3 for beta chain variable domain of TCR clone 231888 (TRBV7-8, TRBJ2-6)
CASSAGTGGAGANVLTV

SEQ ID NO: 463777 - protein, 12 aa, Homo sapiens
  CDR3 for alpha chain variable domain of TCR clone 231889 (TRAV8-3, TRAJ20)
CAVDFNDYKLSF

SEQ ID NO: 463778 - protein, 16 aa, Homo sapiens
  CDR3 for beta chain variable domain of TCR clone 231889 (TRBV29-1, TRBJ2-7)
CSVEVVGTSGSYEQYF

SEQ ID NO: 463779 - protein, 17 aa, Homo sapiens
  CDR3 for alpha chain variable domain of TCR clone 231890 (TRAV3, TRAJ42)
CAVRDRDYGGSQGNLIF

SEQ ID NO: 463780 - protein, 15 aa, Homo sapiens
  CDR3 for beta chain variable domain of TCR clone 231890 (TRBV4-3, TRBJ2-3)
CASSPSLLSTDTQYF

SEQ ID NO: 463781 - protein, 14 aa, Homo sapiens
  CDR3 for alpha chain variable domain of TCR clone 231891 (TRAV8-2, TRAJ4)
CVVSPSGGDNKLIF

SEQ ID NO: 463782 - protein, 13 aa, Homo sapiens
  CDR3 for beta chain variable domain of TCR clone 231891 (TRBV10-3, TRBJ2-7)
CASKLAVNYEQYF

SEQ ID NO: 463783 - protein, 14 aa, Homo sapiens
  CDR3 for alpha chain variable domain of TCR clone 231892 (TRAV2, TRAJ9)
CAVEDRSGGFKTIF

SEQ ID NO: 463784 - protein, 17 aa, Homo sapiens
  CDR3 for beta chain variable domain of TCR clone 231892 (TRBV4-3, TRBJ2-1)
CASSQFSSGRASGEQFF

SEQ ID NO: 463785 - protein, 13 aa, Homo sapiens
  CDR3 for alpha chain variable domain of TCR clone 231893 (TRAV1-2, TRAJ33)
CAVSVDSNYQLIW

SEQ ID NO: 463786 - protein, 16 aa, Homo sapiens
  CDR3 for beta chain variable domain of TCR clone 231893 (TRBV4-2, TRBJ2-7)
CASSQDGVERGYEQYF

SEQ ID NO: 463787 - protein, 18 aa, Homo sapiens
  CDR3 for alpha chain variable domain of TCR clone 231894 (TRAV12-3, TRAJ52)
CVMSVGGAGGASYGKLTF

SEQ ID NO: 463788 - protein, 15 aa, Homo sapiens
  CDR3 for beta chain variable domain of TCR clone 231894 (TRBV27, TRBJ1-6)
CASSFDRGLGSPLHF

SEQ ID NO: 463789 - protein, 13 aa, Homo sapiens
  CDR3 for alpha chain variable domain of TCR clone 231895 (TRAV17, TRAJ26)
CATVDNYGQNFVF

SEQ ID NO: 463790 - protein, 16 aa, Homo sapiens
  CDR3 for beta chain variable domain of TCR clone 231895 (TRBV2, TRBJ2-3)
CANSTSVEGVTDTQYF

SEQ ID NO: 463791 - protein, 15 aa, Homo sapiens
  CDR3 for alpha chain variable domain of TCR clone 231896 (TRAV38-2/DV8, TRAJ28)
CAYRTSGAGSYQLTF

SEQ ID NO: 463792 - protein, 13 aa, Homo sapiens
  CDR3 for beta chain variable domain of TCR clone 231896 (TRBV5-1, TRBJ1-5)
CASSLAQDQAQHF

SEQ ID NO: 463793 - protein, 16 aa, Homo sapiens
  CDR3 for alpha chain variable domain of TCR clone 231897 (TRAV3, TRAJ37)
CAVRPHGSGNTGKLIF

SEQ ID NO: 463794 - protein, 16 aa, Homo sapiens
  CDR3 for beta chain variable domain of TCR clone 231897 (TRBV9, TRBJ1-2)
CASSGEEKGSPYGYTF

SEQ ID NO: 463795 - protein, 13 aa, Homo sapiens
  CDR3 for alpha chain variable domain of TCR clone 231898 (TRAV27, TRAJ6)
CAGGTRGSYIPTF

SEQ ID NO: 463796 - protein, 15 aa, Homo sapiens
  CDR3 for beta chain variable domain of TCR clone 231898 (TRBV5-5, TRBJ1-1)
CASSLVGKDNTEAFF

SEQ ID NO: 463797 - protein, 14 aa, Homo sapiens
  CDR3 for alpha chain variable domain of TCR clone 231899 (TRAV16, TRAJ32)
CALKSGGATNKLIL

SEQ ID NO: 463798 - protein, 13 aa, Homo sapiens
  CDR3 for beta chain variable domain of TCR clone 231899 (TRBV15, TRBJ1-6)
CATSGGLNSPLHF

SEQ ID NO: 463799 - protein, 15 aa, Homo sapiens
  CDR3 for alpha chain variable domain of TCR clone 231900 (TRAV1-2, TRAJ20)
CAVRDNVANDYKLSF

SEQ ID NO: 463800 - protein, 13 aa, Homo sapiens
  CDR3 for beta chain variable domain of TCR clone 231900 (TRBV4-1, TRBJ2-2)
CASSQENTGELFF

SEQ ID NO: 463801 - protein, 15 aa, Homo sapiens
  CDR3 for alpha chain variable domain of TCR clone 231901 (TRAV12-1, TRAJ45)
CVVLSGGGGADGLTF

SEQ ID NO: 463802 - protein, 15 aa, Homo sapiens
  CDR3 for beta chain variable domain of TCR clone 231901 (TRBV11-2, TRBJ2-1)
CASSPAGQSLNEQFF

SEQ ID NO: 463803 - protein, 18 aa, Homo sapiens
  CDR3 for alpha chain variable domain of TCR clone 231902 (TRAV21, TRAJ52)
CAVRPSPAGGTSYGKLTF

SEQ ID NO: 463804 - protein, 19 aa, Homo sapiens
  CDR3 for beta chain variable domain of TCR clone 231902 (TRBV12-4, TRBJ2-1)
CASTLAFDPRDKEANEQFF

SEQ ID NO: 463805 - protein, 15 aa, Homo sapiens
  CDR3 for alpha chain variable domain of TCR clone 231903 (TRAV8-2, TRAJ40)
CVVLGTTSGTYKYIF

SEQ ID NO: 463806 - protein, 16 aa, Homo sapiens
  CDR3 for beta chain variable domain of TCR clone 231903 (TRBV13, TRBJ2-2)
CASSPRTGEHTGELFF

SEQ ID NO: 463807 - protein, 13 aa, Homo sapiens
  CDR3 for alpha chain variable domain of TCR clone 231904 (TRAV2, TRAJ29)
CAVEPSGNTPLVF

SEQ ID NO: 463808 - protein, 15 aa, Homo sapiens
  CDR3 for beta chain variable domain of TCR clone 231904 (TRBV29-1, TRBJ2-7)
CSVEFFDRGSYEQYF

SEQ ID NO: 463809 - protein, 14 aa, Homo sapiens
  CDR3 for alpha chain variable domain of TCR clone 231905 (TRAV9-2, TRAJ39)
CALYTYNAGNMLTF

SEQ ID NO: 463810 - protein, 17 aa, Homo sapiens
  CDR3 for beta chain variable domain of TCR clone 231905 (TRBV25-1, TRBJ2-7)
CASSDARVVFSSYEQYF

SEQ ID NO: 463811 - protein, 16 aa, Homo sapiens
  CDR3 for alpha chain variable domain of TCR clone 231906 (TRAV3, TRAJ10)
CAVRDMRAGGGNKLTF

SEQ ID NO: 463812 - protein, 17 aa, Homo sapiens
  CDR3 for beta chain variable domain of TCR clone 231906 (TRBV20-1, TRBJ2-2)
CSTSGSGQGGLTGELFF

SEQ ID NO: 463813 - protein, 15 aa, Homo sapiens
  CDR3 for alpha chain variable domain of TCR clone 231907 (TRAV3, TRAJ10)
CCERHEGGRRNKLTF

SEQ ID NO: 463814 - protein, 15 aa, Homo sapiens
  CDR3 for beta chain variable domain of TCR clone 231907 (TRBV11-2, TRBJ1-6)
CASTGFGTAVSPLHF

SEQ ID NO: 463815 - protein, 14 aa, Homo sapiens
  CDR3 for alpha chain variable domain of TCR clone 231908 (TRAV1-2, TRAJ16)
CAVNRFSDGQKLLF

SEQ ID NO: 463816 - protein, 15 aa, Homo sapiens
  CDR3 for beta chain variable domain of TCR clone 231908 (TRBV9, TRBJ1-6)
CASSVAGTGYSHLHF

SEQ ID NO: 463817 - protein, 13 aa, Homo sapiens
  CDR3 for alpha chain variable domain of TCR clone 231909 (TRAV21, TRAJ57)
CAVTQGGSEKLAF

SEQ ID NO: 463818 - protein, 16 aa, Homo sapiens
  CDR3 for beta chain variable domain of TCR clone 231909 (TRBV29-1, TRBJ2-7)
CSVEDAEDGTAYEQDF

SEQ ID NO: 463819 - protein, 15 aa, Homo sapiens
  CDR3 for alpha chain variable domain of TCR clone 231910 (TRAV12-3, TRAJ6)
CAMSATTGGSYIPTF

SEQ ID NO: 463820 - protein, 12 aa, Homo sapiens
  CDR3 for beta chain variable domain of TCR clone 231910 (TRBV24-1, TRBJ2-2)
CHQYWSTGELFF

SEQ ID NO: 463821 - protein, 12 aa, Homo sapiens
  CDR3 for alpha chain variable domain of TCR clone 231911 (TRAV27, TRAJ35)
CAGADVGNVLHC

SEQ ID NO: 463822 - protein, 12 aa, Homo sapiens
  CDR3 for beta chain variable domain of TCR clone 231911 (TRBV2, TRBJ2-1)
CASSERFREQFF

SEQ ID NO: 463823 - protein, 19 aa, Homo sapiens
  CDR3 for alpha chain variable domain of TCR clone 231912 (TRAV16, )
CALSRDIQNPDPAVYQLRD

SEQ ID NO: 463824 - protein, 16 aa, Homo sapiens
  CDR3 for beta chain variable domain of TCR clone 231912 (TRBV12-5, TRBJ2-5)
CASGPRTSGNQETQYF

SEQ ID NO: 463825 - protein, 11 aa, Homo sapiens
  CDR3 for alpha chain variable domain of TCR clone 231913 (TRAV12-2, TRAJ49)
CALQGGNQFYF

SEQ ID NO: 463826 - protein, 11 aa, Homo sapiens
  CDR3 for beta chain variable domain of TCR clone 231913 (TRBV20-1, TRBJ1-5)
CSAQGDQPQHF

SEQ ID NO: 463827 - protein, 12 aa, Homo sapiens
  CDR3 for alpha chain variable domain of TCR clone 231914 (TRAV4, TRAJ26)
CLVGDYGQNFVF

SEQ ID NO: 463828 - protein, 14 aa, Homo sapiens
  CDR3 for beta chain variable domain of TCR clone 231914 (TRBV5-1, TRBJ2-7)
CASSRGESLYEQYF

SEQ ID NO: 463829 - protein, 11 aa, Homo sapiens
  CDR3 for alpha chain variable domain of TCR clone 231915 (TRAV12-2, TRAJ49)
CAVNTGNQFNL

SEQ ID NO: 463830 - protein, 12 aa, Homo sapiens
  CDR3 for beta chain variable domain of TCR clone 231915 (TRBV2, TRBJ2-3)
CASSGRFDTQYF

SEQ ID NO: 463831 - protein, 16 aa, Homo sapiens
  CDR3 for alpha chain variable domain of TCR clone 231916 (TRAV30, TRAJ24)
CGTEIVDADSWGKFQF

SEQ ID NO: 463832 - protein, 16 aa, Homo sapiens
  CDR3 for beta chain variable domain of TCR clone 231916 (TRBV2, TRBJ1-5)
CASSESPQGLNQPQHF

SEQ ID NO: 463833 - protein, 16 aa, Homo sapiens
  CDR3 for alpha chain variable domain of TCR clone 231917 (TRAV13-1, TRAJ37)
CAASSLGSSNTGKLIF

SEQ ID NO: 463834 - protein, 12 aa, Homo sapiens
  CDR3 for beta chain variable domain of TCR clone 231917 (TRBV6-1, TRBJ2-5)
CARGEGRETQYF

SEQ ID NO: 463835 - protein, 15 aa, Homo sapiens
  CDR3 for alpha chain variable domain of TCR clone 231918 (TRAV3, TRAJ3)
CAVRDGHSRASKINF

SEQ ID NO: 463836 - protein, 17 aa, Homo sapiens
  CDR3 for beta chain variable domain of TCR clone 231918 (TRBV25-1, TRBJ2-7)
CASSDARVVFSSYEQYF

SEQ ID NO: 463837 - protein, 15 aa, Homo sapiens
  CDR3 for alpha chain variable domain of TCR clone 231919 (TRAV10, TRAJ44)
CLVSGATDTASKLTF

SEQ ID NO: 463838 - protein, 15 aa, Homo sapiens
  CDR3 for beta chain variable domain of TCR clone 231919 (TRBV12-4, TRBJ1-5)
CASTRQGSGNQPQHF

SEQ ID NO: 463839 - protein, 16 aa, Homo sapiens
  CDR3 for alpha chain variable domain of TCR clone 231920 (TRAV1-1, TRAJ29)
CAVRSTRNSGNTPLVF

SEQ ID NO: 463840 - protein, 14 aa, Homo sapiens
  CDR3 for beta chain variable domain of TCR clone 231920 (TRBV7-2, TRBJ2-7)
RASSPKTSFYEQYF

SEQ ID NO: 463841 - protein, 16 aa, Homo sapiens
  CDR3 for alpha chain variable domain of TCR clone 231921 (TRAV3, TRAJ21)
CAVRDIERGNFNKFYF

SEQ ID NO: 463842 - protein, 16 aa, Homo sapiens
  CDR3 for beta chain variable domain of TCR clone 231921 (TRBV12-4, TRBJ1-5)
CASSRPVGGSNQPQLF

SEQ ID NO: 463843 - protein, 17 aa, Homo sapiens
  CDR3 for alpha chain variable domain of TCR clone 231922 (TRAV17, TRAJ7)
CATMGRLAFGKGNQVVV

SEQ ID NO: 463844 - protein, 13 aa, Homo sapiens
  CDR3 for beta chain variable domain of TCR clone 231922 (TRBV12-4, TRBJ2-7)
CASSLERVREQYF

SEQ ID NO: 463845 - protein, 17 aa, Homo sapiens
  CDR3 for alpha chain variable domain of TCR clone 231923 (TRAV26-1, TRAJ37)
CIVRVITVSSNAGKLIF

SEQ ID NO: 463846 - protein, 17 aa, Homo sapiens
  CDR3 for beta chain variable domain of TCR clone 231923 (TRBV6-3, TRBJ2-1)
CASSYSSGTRGLDEQFF

SEQ ID NO: 463847 - protein, 15 aa, Homo sapiens
  CDR3 for alpha chain variable domain of TCR clone 231924 (TRAV38-1, TRAJ37)
CAFIFGSGNTGKLIF

SEQ ID NO: 463848 - protein, 15 aa, Homo sapiens
  CDR3 for beta chain variable domain of TCR clone 231924 (TRBV7-3, TRBJ2-3)
CASSLGLTLGDTQYF

SEQ ID NO: 463849 - protein, 12 aa, Homo sapiens
  CDR3 for alpha chain variable domain of TCR clone 231925 (TRAV23/DV6, TRAJ53)
CAASKLGSGGSN

SEQ ID NO: 463850 - protein, 14 aa, Homo sapiens
  CDR3 for beta chain variable domain of TCR clone 231925 (TRBV4-1, TRBJ2-2)
CASSQAVNTGELFF

SEQ ID NO: 463851 - protein, 17 aa, Homo sapiens
  CDR3 for alpha chain variable domain of TCR clone 231926 (TRAV13-1, TRAJ31)
CAPRDRRMFGDGTQLVV

SEQ ID NO: 463852 - protein, 12 aa, Homo sapiens
  CDR3 for beta chain variable domain of TCR clone 231926 (TRBV7-9, TRBJ2-7)
CASSVEGYEQYF

SEQ ID NO: 463853 - protein, 23 aa, Homo sapiens
  CDR3 for alpha chain variable domain of TCR clone 231927 (TRAV26-1, TRAJ38)
CIADNAGNNHIQNPDPAVYQLRD

SEQ ID NO: 463854 - protein, 13 aa, Homo sapiens
  CDR3 for beta chain variable domain of TCR clone 231927 (TRBV2, TRBJ2-1)
CASISGGNNEQFF

SEQ ID NO: 463855 - protein, 13 aa, Homo sapiens
  CDR3 for alpha chain variable domain of TCR clone 231928 (TRAV12-2, TRAJ15)
CAVFNQAGTALIF

SEQ ID NO: 463856 - protein, 15 aa, Homo sapiens
  CDR3 for beta chain variable domain of TCR clone 231928 (TRBV7-8, TRBJ1-5)
CASSRGWGAGQPQHF

SEQ ID NO: 463857 - protein, 12 aa, Homo sapiens
  CDR3 for alpha chain variable domain of TCR clone 231929 (TRAV12-3, TRAJ17)
CAMTLTGNKLTF

SEQ ID NO: 463858 - protein, 13 aa, Homo sapiens
  CDR3 for beta chain variable domain of TCR clone 231929 (TRBV19, TRBJ2-5)
CASSGRAGETQYF

SEQ ID NO: 463859 - protein, 14 aa, Homo sapiens
  CDR3 for alpha chain variable domain of TCR clone 231930 (TRAV12-2, TRAJ38)
CAPQTAGNNRKLIW

SEQ ID NO: 463860 - protein, 18 aa, Homo sapiens
  CDR3 for beta chain variable domain of TCR clone 231930 (TRBV28, TRBJ1-3)
CASKTPVGQIGSGNTIYC

SEQ ID NO: 463861 - protein, 14 aa, Homo sapiens
  CDR3 for alpha chain variable domain of TCR clone 231931 (TRAV1-2, TRAJ16)
CAVNRFSDGQKLLF

SEQ ID NO: 463862 - protein, 15 aa, Homo sapiens
  CDR3 for beta chain variable domain of TCR clone 231931 (TRBV4-1, TRBJ2-1)
CASSQDPGNYNEQFF

SEQ ID NO: 463863 - protein, 13 aa, Homo sapiens
  CDR3 for alpha chain variable domain of TCR clone 231932 (TRAV13-1, TRAJ10)
CAATAGGGNKLTF

SEQ ID NO: 463864 - protein, 13 aa, Homo sapiens
  CDR3 for beta chain variable domain of TCR clone 231932 (TRBV7-3, TRBJ1-6)
CATSGGLNSPLHF

SEQ ID NO: 463865 - protein, 14 aa, Homo sapiens
  CDR3 for alpha chain variable domain of TCR clone 231933 (TRAV12-2, TRAJ13)
CAVKKIGGYQKVTF

SEQ ID NO: 463866 - protein, 16 aa, Homo sapiens
  CDR3 for beta chain variable domain of TCR clone 231933 (TRBV12-5, TRBJ2-5)
CASGPRTSGNQETQYF

SEQ ID NO: 463867 - protein, 13 aa, Homo sapiens
  CDR3 for alpha chain variable domain of TCR clone 231934 (TRAV30, TRAJ6)
CGFTEGGSYIPTF

SEQ ID NO: 463868 - protein, 13 aa, Homo sapiens
  CDR3 for beta chain variable domain of TCR clone 231934 (TRBV5-4, TRBJ2-5)
CASSPVSQETQYF

SEQ ID NO: 463869 - protein, 14 aa, Homo sapiens
  CDR3 for alpha chain variable domain of TCR clone 231935 (TRAV1-2, TRAJ16)
CDVNRFSDGQKLLF

SEQ ID NO: 463870 - protein, 17 aa, Homo sapiens
  CDR3 for beta chain variable domain of TCR clone 231935 (TRBV20-1, TRBJ2-1)
CSASSSGLAGSYNEQFF

SEQ ID NO: 463871 - protein, 16 aa, Homo sapiens
  CDR3 for alpha chain variable domain of TCR clone 231936 (TRAV12-3, TRAJ53)
CAMSAGSGGSNYKLTF

SEQ ID NO: 463872 - protein, 14 aa, Homo sapiens
  CDR3 for beta chain variable domain of TCR clone 231936 (TRBV28, TRBJ2-3)
CASSWRGRADTQYF

SEQ ID NO: 463873 - protein, 13 aa, Homo sapiens
  CDR3 for alpha chain variable domain of TCR clone 231937 (TRAV3, TRAJ21)
CAVATSTNFTLDL

SEQ ID NO: 463874 - protein, 15 aa, Homo sapiens
  CDR3 for beta chain variable domain of TCR clone 231937 (TRBV6-5, TRBJ2-1)
CASSYYAGAGNEQFF

SEQ ID NO: 463875 - protein, 18 aa, Homo sapiens
  CDR3 for alpha chain variable domain of TCR clone 231938 (TRAV26-1, TRAJ23)
CIVRVRLEVWNQGGKLIF

SEQ ID NO: 463876 - protein, 14 aa, Homo sapiens
  CDR3 for beta chain variable domain of TCR clone 231938 (TRBV7-6, TRBJ2-3)
CASSLGTVTDTQYF

SEQ ID NO: 463877 - protein, 15 aa, Homo sapiens
  CDR3 for alpha chain variable domain of TCR clone 231939 (TRAV26-1, TRAJ29)
CIVRVEGSGNNPLVF

SEQ ID NO: 463878 - protein, 20 aa, Homo sapiens
  CDR3 for beta chain variable domain of TCR clone 231939 (TRBV19, TRBJ2-1)
CASSISRTVTSTRLNNEQFF

SEQ ID NO: 463879 - protein, 11 aa, Homo sapiens
  CDR3 for alpha chain variable domain of TCR clone 231940 (TRAV1-2, TRAJ40)
CAVPGTYKYIF

SEQ ID NO: 463880 - protein, 16 aa, Homo sapiens
  CDR3 for beta chain variable domain of TCR clone 231940 (TRBV29-1, TRBJ2-7)
CSVYVVGTSGSYEQYF

SEQ ID NO: 463881 - protein, 14 aa, Homo sapiens
  CDR3 for alpha chain variable domain of TCR clone 231941 (TRAV36/DV7, TRAJ44)
CCGANTGTASKLTF

SEQ ID NO: 463882 - protein, 18 aa, Homo sapiens
  CDR3 for beta chain variable domain of TCR clone 231941 (TRBV11-2, TRBJ2-3)
CASSLGGASRGAPNTQYF

SEQ ID NO: 463883 - protein, 10 aa, Homo sapiens
  CDR3 for alpha chain variable domain of TCR clone 231942 (TRAV13-1, TRAJ7)
LIGWNNRLAF

SEQ ID NO: 463884 - protein, 16 aa, Homo sapiens
  CDR3 for beta chain variable domain of TCR clone 231942 (TRBV4-1, TRBJ1-2)
CASSQDAGQVLYGYTF

SEQ ID NO: 463885 - protein, 10 aa, Homo sapiens
  CDR3 for alpha chain variable domain of TCR clone 231943 (TRAV13-1, TRAJ43)
CSASKNDMRF

SEQ ID NO: 463886 - protein, 13 aa, Homo sapiens
  CDR3 for beta chain variable domain of TCR clone 231943 (TRBV20-1, TRBJ1-5)
CSARTGVNQPQHF

SEQ ID NO: 463887 - protein, 15 aa, Homo sapiens
  CDR3 for alpha chain variable domain of TCR clone 231944 (TRAV39, TRAJ42)
CAVVNYGGSQGNLIF

SEQ ID NO: 463888 - protein, 12 aa, Homo sapiens
  CDR3 for beta chain variable domain of TCR clone 231944 (TRBV11-2, TRBJ2-1)
CASSPGNNEQFF

SEQ ID NO: 463889 - protein, 12 aa, Homo sapiens
  CDR3 for alpha chain variable domain of TCR clone 231945 (TRAV2, TRAJ33)
CAVEDSNYQLIW

SEQ ID NO: 463890 - protein, 16 aa, Homo sapiens
  CDR3 for beta chain variable domain of TCR clone 231945 (TRBV19, TRBJ2-1)
CASSKAGPSSYNEQFF

SEQ ID NO: 463891 - protein, 13 aa, Homo sapiens
  CDR3 for alpha chain variable domain of TCR clone 231946 (TRAV13-1, TRAJ5)
CAARGTGRRALTS

SEQ ID NO: 463892 - protein, 15 aa, Homo sapiens
  CDR3 for beta chain variable domain of TCR clone 231946 (TRBV7-9, TRBJ2-7)
CASSPGGGLTYEQYF

SEQ ID NO: 463893 - protein, 14 aa, Homo sapiens
  CDR3 for alpha chain variable domain of TCR clone 231947 (TRAV17, TRAJ56)
CATVPAGANSKLTF

SEQ ID NO: 463894 - protein, 14 aa, Homo sapiens
  CDR3 for beta chain variable domain of TCR clone 231947 (TRBV20-1, TRBJ2-7)
CSAKRGRSSYEQYF

SEQ ID NO: 463895 - protein, 14 aa, Homo sapiens
  CDR3 for alpha chain variable domain of TCR clone 231948 (TRAV29/DV5, TRAJ34)
CATSASRETDKLIF

SEQ ID NO: 463896 - protein, 15 aa, Homo sapiens
  CDR3 for beta chain variable domain of TCR clone 231948 (TRBV7-8, TRBJ2-7)
CASSLERAGSYEQYF

SEQ ID NO: 463897 - protein, 15 aa, Homo sapiens
  CDR3 for alpha chain variable domain of TCR clone 231949 (TRAV1-2, TRAJ32)
CAVRGYGGATNKIIF

SEQ ID NO: 463898 - protein, 15 aa, Homo sapiens
  CDR3 for beta chain variable domain of TCR clone 231949 (TRBV25-1, TRBJ2-5)
CASSDTGTHQETQYF

SEQ ID NO: 463899 - protein, 13 aa, Homo sapiens
  CDR3 for alpha chain variable domain of TCR clone 231950 (TRAV2, TRAJ15)
CAVEAQAGTALIF

SEQ ID NO: 463900 - protein, 15 aa, Homo sapiens
  CDR3 for beta chain variable domain of TCR clone 231950 (TRBV5-1, TRBJ2-7)
CASSLNGGPAREQYF

SEQ ID NO: 463901 - protein, 14 aa, Homo sapiens
  CDR3 for alpha chain variable domain of TCR clone 231951 (TRAV8-4, TRAJ43)
CAVSGPRNNNDMRF

SEQ ID NO: 463902 - protein, 15 aa, Homo sapiens
  CDR3 for beta chain variable domain of TCR clone 231951 (TRBV4-2, TRBJ1-2)
CASSQRTGGRDGYTF

SEQ ID NO: 463903 - protein, 12 aa, Homo sapiens
  CDR3 for alpha chain variable domain of TCR clone 231952 (TRAV12-1, TRAJ40)
CVFYSGTYKDIF

SEQ ID NO: 463904 - protein, 10 aa, Homo sapiens
  CDR3 for beta chain variable domain of TCR clone 231952 (TRBV12-4, TRBJ2-2)
CASSLVAGTR

SEQ ID NO: 463905 - protein, 14 aa, Homo sapiens
  CDR3 for alpha chain variable domain of TCR clone 231953 (TRAV12-3, TRAJ56)
CAMSVTGANSKLTF

SEQ ID NO: 463906 - protein, 17 aa, Homo sapiens
  CDR3 for beta chain variable domain of TCR clone 231953 (TRBV20-1, TRBJ2-3)
CSASLLGRGGSADTQYF

SEQ ID NO: 463907 - protein, 12 aa, Homo sapiens
  CDR3 for alpha chain variable domain of TCR clone 231954 (TRAV12-1, TRAJ40)
CVFYSGTYKYLF

SEQ ID NO: 463908 - protein, 18 aa, Homo sapiens
  CDR3 for beta chain variable domain of TCR clone 231954 (TRBV12-4, TRBJ2-2)
CASSLVAGTRGRTGELFF

SEQ ID NO: 463909 - protein, 10 aa, Homo sapiens
  CDR3 for alpha chain variable domain of TCR clone 231955 (TRAV12-3, TRAJ49)
CAMNDDQFYF

SEQ ID NO: 463910 - protein, 13 aa, Homo sapiens
  CDR3 for beta chain variable domain of TCR clone 231955 (TRBV12-4, TRBJ1-1)
CASSSGTGFEAFL

SEQ ID NO: 463911 - protein, 14 aa, Homo sapiens
  CDR3 for alpha chain variable domain of TCR clone 231956 (TRAV9-2, TRAJ39)
CALYIYNAGNMLTF

SEQ ID NO: 463912 - protein, 15 aa, Homo sapiens
  CDR3 for beta chain variable domain of TCR clone 231956 (TRBV7-2, TRBJ2-7)
CASSLKGALTYEQYF

SEQ ID NO: 463913 - protein, 15 aa, Homo sapiens
  CDR3 for alpha chain variable domain of TCR clone 231957 (TRAV3, TRAJ29)
CAVRDLYSGNTPLVF

SEQ ID NO: 463914 - protein, 17 aa, Homo sapiens
  CDR3 for beta chain variable domain of TCR clone 231957 (TRBV20-1, TRBJ2-1)
CSARGPLAGVWDNEQFF

SEQ ID NO: 463915 - protein, 15 aa, Homo sapiens
  CDR3 for alpha chain variable domain of TCR clone 231958 (TRAV25, TRAJ53)
CAATGGGGSNYKLTI

SEQ ID NO: 463916 - protein, 12 aa, Homo sapiens
  CDR3 for beta chain variable domain of TCR clone 231958 (TRBV7-8, TRBJ2-7)
CASSLGDREQYF

SEQ ID NO: 463917 - protein, 15 aa, Homo sapiens
  CDR3 for alpha chain variable domain of TCR clone 231959 (TRAV17, TRAJ52)
CATEAGGTSYGKLTC

SEQ ID NO: 463918 - protein, 14 aa, Homo sapiens
  CDR3 for beta chain variable domain of TCR clone 231959 (TRBV28, TRBJ1-5)
CASSLGVLVKPQHF

SEQ ID NO: 463919 - protein, 13 aa, Homo sapiens
  CDR3 for alpha chain variable domain of TCR clone 231960 (TRAV2, TRAJ15)
CAVASQAGTALIF

SEQ ID NO: 463920 - protein, 14 aa, Homo sapiens
  CDR3 for beta chain variable domain of TCR clone 231960 (TRBV5-1, TRBJ1-5)
CASSQGLDGSPQHF

SEQ ID NO: 463921 - protein, 16 aa, Homo sapiens
  CDR3 for alpha chain variable domain of TCR clone 231961 (TRAV12-1, TRAJ53)
CVVTSVAGGSNYKLTF

SEQ ID NO: 463922 - protein, 14 aa, Homo sapiens
  CDR3 for beta chain variable domain of TCR clone 231961 (TRBV5-4, TRBJ2-1)
CASSLDQGLKEQFF

SEQ ID NO: 463923 - protein, 10 aa, Homo sapiens
  CDR3 for alpha chain variable domain of TCR clone 231962 (TRAV12-2, TRAJ20)
CAVYLYKLSF

SEQ ID NO: 463924 - protein, 14 aa, Homo sapiens
  CDR3 for beta chain variable domain of TCR clone 231962 (TRBV10-3, TRBJ2-2)
CAISEVSHYGELFF

SEQ ID NO: 463925 - protein, 13 aa, Homo sapiens
  CDR3 for alpha chain variable domain of TCR clone 231963 (TRAV3, TRAJ27)
CAVRPLGAGKSTF

SEQ ID NO: 463926 - protein, 13 aa, Homo sapiens
  CDR3 for beta chain variable domain of TCR clone 231963 (TRBV7-9, TRBJ2-3)
CPSSPGSTDTQYF

SEQ ID NO: 463927 - protein, 15 aa, Homo sapiens
  CDR3 for alpha chain variable domain of TCR clone 231964 (TRAV14/DV4, TRAJ33)
CAMREGRDSNYQLIW

SEQ ID NO: 463928 - protein, 15 aa, Homo sapiens
  CDR3 for beta chain variable domain of TCR clone 231964 (TRBV5-5, TRBJ1-5)
CASSSTPGSNQPHHF

SEQ ID NO: 463929 - protein, 19 aa, Homo sapiens
  CDR3 for alpha chain variable domain of TCR clone 231965 (TRAV39, TRAJ43)
PCMTSLPPPSVPWANDMRF

SEQ ID NO: 463930 - protein, 15 aa, Homo sapiens
  CDR3 for beta chain variable domain of TCR clone 231965 (TRBV12-4, TRBJ2-5)
CASSPPTGLQETQYF

SEQ ID NO: 463931 - protein, 12 aa, Homo sapiens
  CDR3 for alpha chain variable domain of TCR clone 231966 (TRAV1-1, TRAJ39)
CAVPVVGNMLTF

SEQ ID NO: 463932 - protein, 13 aa, Homo sapiens
  CDR3 for beta chain variable domain of TCR clone 231966 (TRBV4-1, TRBJ1-1)
CASTRKMNTEAFF

SEQ ID NO: 463933 - protein, 10 aa, Homo sapiens
  CDR3 for alpha chain variable domain of TCR clone 231967 (TRAV1-2, TRAJ20)
CAVTDYKPSF

SEQ ID NO: 463934 - protein, 15 aa, Homo sapiens
  CDR3 for beta chain variable domain of TCR clone 231967 (TRBV7-2, TRBJ2-7)
CASSLVSSGSYEQYF

SEQ ID NO: 463935 - protein, 15 aa, Homo sapiens
  CDR3 for alpha chain variable domain of TCR clone 231968 (TRAV12-2, TRAJ53)
CAVNGGGGCNYKLTF

SEQ ID NO: 463936 - protein, 12 aa, Homo sapiens
  CDR3 for beta chain variable domain of TCR clone 231968 (TRBV7-6, TRBJ2-5)
CASSLSQETQYF

SEQ ID NO: 463937 - protein, 16 aa, Homo sapiens
  CDR3 for alpha chain variable domain of TCR clone 231969 (TRAV13-1, TRAJ17)
CAASKGVKAAGTKLTF

SEQ ID NO: 463938 - protein, 15 aa, Homo sapiens
  CDR3 for beta chain variable domain of TCR clone 231969 (TRBV20-1, TRBJ1-5)
CSAREGGYSNQPQHF

SEQ ID NO: 463939 - protein, 13 aa, Homo sapiens
  CDR3 for alpha chain variable domain of TCR clone 231970 (TRAV13-1, TRAJ37)
YAAVSGNTGKLIF

SEQ ID NO: 463940 - protein, 17 aa, Homo sapiens
  CDR3 for beta chain variable domain of TCR clone 231970 (TRBV10-2, TRBJ1-6)
CASSENRGSSYNSPLHF

SEQ ID NO: 463941 - protein, 16 aa, Homo sapiens
  CDR3 for alpha chain variable domain of TCR clone 231971 (TRAV17, TRAJ52)
CATDGAGGTSYGKLTF

SEQ ID NO: 463942 - protein, 16 aa, Homo sapiens
  CDR3 for beta chain variable domain of TCR clone 231971 (TRBV19, TRBJ2-2)
CASRSPGTGATGELFF

SEQ ID NO: 463943 - protein, 15 aa, Homo sapiens
  CDR3 for alpha chain variable domain of TCR clone 231972 (TRAV26-1, TRAJ9)
CIVRVPNTGGFKTIF

SEQ ID NO: 463944 - protein, 15 aa, Homo sapiens
  CDR3 for beta chain variable domain of TCR clone 231972 (TRBV7-9, TRBJ2-7)
CASSLALAEAYEQYL

SEQ ID NO: 463945 - protein, 13 aa, Homo sapiens
  CDR3 for alpha chain variable domain of TCR clone 231973 (TRAV8-3, TRAJ21)
CAVGAYNFNEFYF

SEQ ID NO: 463946 - protein, 16 aa, Homo sapiens
  CDR3 for beta chain variable domain of TCR clone 231973 (TRBV19, TRBJ2-1)
CASSRGGGSSYNEQFF

SEQ ID NO: 463947 - protein, 14 aa, Homo sapiens
  CDR3 for alpha chain variable domain of TCR clone 231974 (TRAV12-1, TRAJ9)
CVVTGYTGGFKTIF

SEQ ID NO: 463948 - protein, 14 aa, Homo sapiens
  CDR3 for beta chain variable domain of TCR clone 231974 (TRBV7-9, TRBJ1-1)
CASTPLQSYTEAFF

SEQ ID NO: 463949 - protein, 14 aa, Homo sapiens
  CDR3 for alpha chain variable domain of TCR clone 231975 (TRAV8-4, TRAJ39)
CAVSEGNAGNMLTF

SEQ ID NO: 463950 - protein, 12 aa, Homo sapiens
  CDR3 for beta chain variable domain of TCR clone 231975 (TRBV11-2, TRBJ2-2)
CASSLGGGELFF

SEQ ID NO: 463951 - protein, 16 aa, Homo sapiens
  CDR3 for alpha chain variable domain of TCR clone 231976 (TRAV38-1, TRAJ45)
CAFMNGSGGGADGLTF

SEQ ID NO: 463952 - protein, 15 aa, Homo sapiens
  CDR3 for beta chain variable domain of TCR clone 231976 (TRBV20-1, TRBJ2-7)
CSAREGRDSLYEQYF

SEQ ID NO: 463953 - protein, 15 aa, Homo sapiens
  CDR3 for alpha chain variable domain of TCR clone 231977 (TRAV27, TRAJ50)
CAGVGRGTCYDKVIF

SEQ ID NO: 463954 - protein, 14 aa, Homo sapiens
  CDR3 for beta chain variable domain of TCR clone 231977 (TRBV7-2, TRBJ1-1)
CASSFYDLNTEAFF

SEQ ID NO: 463955 - protein, 14 aa, Homo sapiens
  CDR3 for alpha chain variable domain of TCR clone 231978 (TRAV8-3, TRAJ20)
GAVGPRGNDYKLSF

SEQ ID NO: 463956 - protein, 11 aa, Homo sapiens
  CDR3 for beta chain variable domain of TCR clone 231978 (TRBV10-3, TRBJ2-2)
CATKGTGELFF

SEQ ID NO: 463957 - protein, 13 aa, Homo sapiens
  CDR3 for alpha chain variable domain of TCR clone 231979 (TRAV26-1, TRAJ30)
CIVRVESNDKIIF

SEQ ID NO: 463958 - protein, 17 aa, Homo sapiens
  CDR3 for beta chain variable domain of TCR clone 231979 (TRBV13, TRBJ2-3)
CASSLSRVAGGRDTQYF

SEQ ID NO: 463959 - protein, 14 aa, Homo sapiens
  CDR3 for alpha chain variable domain of TCR clone 231980 (TRAV1-2, TRAJ16)
CAVNRFSDGQKLLF

SEQ ID NO: 463960 - protein, 21 aa, Homo sapiens
  CDR3 for beta chain variable domain of TCR clone 231980 (TRBV28, TRBJ2-5)
CASSRQGGLAGAETSTSGQAR

SEQ ID NO: 463961 - protein, 13 aa, Homo sapiens
  CDR3 for alpha chain variable domain of TCR clone 231981 (TRAV13-1, TRAJ5)
CAARVTCRRALTF

SEQ ID NO: 463962 - protein, 12 aa, Homo sapiens
  CDR3 for beta chain variable domain of TCR clone 231981 (TRBV3-1, TRBJ2-5)
CASSQRGETQYF

SEQ ID NO: 463963 - protein, 15 aa, Homo sapiens
  CDR3 for alpha chain variable domain of TCR clone 231982 (TRAV21, TRAJ53)
CATLNSGGSNYKLTF

SEQ ID NO: 463964 - protein, 14 aa, Homo sapiens
  CDR3 for beta chain variable domain of TCR clone 231982 (TRBV7-9, TRBJ2-2)
CASSLGHRTGELFF

SEQ ID NO: 463965 - protein, 15 aa, Homo sapiens
  CDR3 for alpha chain variable domain of TCR clone 231983 (TRAV3, TRAJ5)
CAVRDLDTGRRALTF

SEQ ID NO: 463966 - protein, 15 aa, Homo sapiens
  CDR3 for beta chain variable domain of TCR clone 231983 (TRBV20-1, TRBJ2-1)
CSARGIGGTYNEQFF

SEQ ID NO: 463967 - protein, 13 aa, Homo sapiens
  CDR3 for alpha chain variable domain of TCR clone 231984 (TRAV12-3, TRAJ13)
CAMSSGGYQKVTF

SEQ ID NO: 463968 - protein, 16 aa, Homo sapiens
  CDR3 for beta chain variable domain of TCR clone 231984 (TRBV4-1, TRBJ2-7)
CASSRGDILNSYEQYV

SEQ ID NO: 463969 - protein, 13 aa, Homo sapiens
  CDR3 for alpha chain variable domain of TCR clone 231985 (TRAV29/DV5, TRAJ33)
CAASVESNYQLIW

SEQ ID NO: 463970 - protein, 16 aa, Homo sapiens
  CDR3 for beta chain variable domain of TCR clone 231985 (TRBV13, TRBJ2-2)
CASSPRTGEHTGELFF

SEQ ID NO: 463971 - protein, 12 aa, Homo sapiens
  CDR3 for alpha chain variable domain of TCR clone 231986 (TRAV12-1, TRAJ34)
CVVTFNTDKLIF

SEQ ID NO: 463972 - protein, 14 aa, Homo sapiens
  CDR3 for beta chain variable domain of TCR clone 231986 (TRBV19, TRBJ1-1)
CASLRTGINTEAFV

SEQ ID NO: 463973 - protein, 11 aa, Homo sapiens
  CDR3 for alpha chain variable domain of TCR clone 231987 (TRAV1-2, TRAJ31)
CAVNNNARLMF

SEQ ID NO: 463974 - protein, 12 aa, Homo sapiens
  CDR3 for beta chain variable domain of TCR clone 231987 (TRBV7-9, TRBJ2-7)
CASSIKREEQYF

SEQ ID NO: 463975 - protein, 13 aa, Homo sapiens
  CDR3 for alpha chain variable domain of TCR clone 231988 (TRAV12-2, TRAJ39)
CAVNNNAGNMLTF

SEQ ID NO: 463976 - protein, 13 aa, Homo sapiens
  CDR3 for beta chain variable domain of TCR clone 231988 (TRBV2, TRBJ1-5)
CATAGPVNQPQHF

SEQ ID NO: 463977 - protein, 16 aa, Homo sapiens
  CDR3 for alpha chain variable domain of TCR clone 231989 (TRAV12-3, TRAJ53)
CAMSPGSGGSNYKLTF

SEQ ID NO: 463978 - protein, 14 aa, Homo sapiens
  CDR3 for beta chain variable domain of TCR clone 231989 (TRBV12-4, TRBJ2-3)
CASTIAGWGDTQYF

SEQ ID NO: 463979 - protein, 14 aa, Homo sapiens
  CDR3 for alpha chain variable domain of TCR clone 231990 (TRAV12-3, TRAJ10)
SHLPLTGGGNKLTF

SEQ ID NO: 463980 - protein, 15 aa, Homo sapiens
  CDR3 for beta chain variable domain of TCR clone 231990 (TRBV25-1, TRBJ2-4)
CASSETESAKNIQYV

SEQ ID NO: 463981 - protein, 14 aa, Homo sapiens
  CDR3 for alpha chain variable domain of TCR clone 231991 (TRAV12-3, TRAJ10)
SHLPLTEGGNKLTF

SEQ ID NO: 463982 - protein, 12 aa, Homo sapiens
  CDR3 for beta chain variable domain of TCR clone 231991 (TRBV7-9, TRBJ2-7)
CATRTDAYEQYF

SEQ ID NO: 463983 - protein, 18 aa, Homo sapiens
  CDR3 for alpha chain variable domain of TCR clone 231992 (TRAV12-3, TRAJ52)
CAMSVGGAGGTSYGKLTF

SEQ ID NO: 463984 - protein, 15 aa, Homo sapiens
  CDR3 for beta chain variable domain of TCR clone 231992 (TRBV18, TRBJ2-1)
CASSPPSASYNDQFF

SEQ ID NO: 463985 - protein, 15 aa, Homo sapiens
  CDR3 for alpha chain variable domain of TCR clone 231993 (TRAV17, TRAJ45)
CATAYSGGGADGLTF

SEQ ID NO: 463986 - protein, 15 aa, Homo sapiens
  CDR3 for beta chain variable domain of TCR clone 231993 (TRBV7-8, TRBJ2-7)
CASSLSLAVLRAGHQ

SEQ ID NO: 463987 - protein, 14 aa, Homo sapiens
  CDR3 for alpha chain variable domain of TCR clone 231994 (TRAV17, TRAJ12)
CATDEKDSSYKLIF

SEQ ID NO: 463988 - protein, 18 aa, Homo sapiens
  CDR3 for beta chain variable domain of TCR clone 231994 (TRBV25-1, TRBJ1-2)
CASSGRQNGQGLIFGYTF

SEQ ID NO: 463989 - protein, 13 aa, Homo sapiens
  CDR3 for alpha chain variable domain of TCR clone 231995 (TRAV25, TRAJ16)
CAGRTARSCSLQG

SEQ ID NO: 463990 - protein, 16 aa, Homo sapiens
  CDR3 for beta chain variable domain of TCR clone 231995 (TRBV7-3, TRBJ2-2)
CASSLKRGTLSGELFF

SEQ ID NO: 463991 - protein, 14 aa, Homo sapiens
  CDR3 for alpha chain variable domain of TCR clone 231996 (TRAV3, TRAJ34)
CAVRDIHNTDKLIF

SEQ ID NO: 463992 - protein, 15 aa, Homo sapiens
  CDR3 for beta chain variable domain of TCR clone 231996 (TRBV20-1, TRBJ2-7)
CSARDRVSGMDEQYF

SEQ ID NO: 463993 - protein, 14 aa, Homo sapiens
  CDR3 for alpha chain variable domain of TCR clone 231997 (TRAV23/DV6, TRAJ37)
CAASTSSNIGKLIF

SEQ ID NO: 463994 - protein, 13 aa, Homo sapiens
  CDR3 for beta chain variable domain of TCR clone 231997 (TRBV18, TRBJ2-5)
CASSPIPGETQYF

SEQ ID NO: 463995 - protein, 15 aa, Homo sapiens
  CDR3 for alpha chain variable domain of TCR clone 231998 (TRAV26-1, TRAJ29)
CIARVEGSGNTPLVF

SEQ ID NO: 463996 - protein, 15 aa, Homo sapiens
  CDR3 for beta chain variable domain of TCR clone 231998 (TRBV7-9, TRBJ1-5)
CASSQGHQPNQPQNF

SEQ ID NO: 463997 - protein, 15 aa, Homo sapiens
  CDR3 for alpha chain variable domain of TCR clone 231999 (TRAV13-1, TRAJ5)
CAVYIRDTSRRALTF

SEQ ID NO: 463998 - protein, 16 aa, Homo sapiens
  CDR3 for beta chain variable domain of TCR clone 231999 (TRBV12-4, TRBJ2-1)
CASTEQGMDRSNEQFF

SEQ ID NO: 463999 - protein, 11 aa, Homo sapiens
  CDR3 for alpha chain variable domain of TCR clone 232000 (TRAV23/DV6, TRAJ9)
CFHTGGFKTIF

SEQ ID NO: 464000 - protein, 15 aa, Homo sapiens
  CDR3 for beta chain variable domain of TCR clone 232000 (TRBV7-9, TRBJ1-6)
CASSSPGRGNSPLHF

SEQ ID NO: 464001 - protein, 12 aa, Homo sapiens
  CDR3 for alpha chain variable domain of TCR clone 232001 (TRAV36/DV7, TRAJ54)
CAVVRGAQKLVF

SEQ ID NO: 464002 - protein, 15 aa, Homo sapiens
  CDR3 for beta chain variable domain of TCR clone 232001 (TRBV7-9, TRBJ1-6)
CASSSPGRGNSPLHF

SEQ ID NO: 464003 - protein, 14 aa, Homo sapiens
  CDR3 for alpha chain variable domain of TCR clone 232002 (TRAV27, TRAJ22)
CAGVVPGSARQLTF

SEQ ID NO: 464004 - protein, 14 aa, Homo sapiens
  CDR3 for beta chain variable domain of TCR clone 232002 (TRBV7-2, TRBJ2-7)
CASRSQGAAYEQYF

SEQ ID NO: 464005 - protein, 22 aa, Homo sapiens
  CDR3 for alpha chain variable domain of TCR clone 232003 (TRAV27, TRAJ41)
CAVRTQIPDIQNPDPAVYQLRD

SEQ ID NO: 464006 - protein, 15 aa, Homo sapiens
  CDR3 for beta chain variable domain of TCR clone 232003 (TRBV5-5, TRBJ1-1)
CASSLVGKDNTEAFF

SEQ ID NO: 464007 - protein, 15 aa, Homo sapiens
  CDR3 for alpha chain variable domain of TCR clone 232004 (TRAV25, TRAJ52)
CAGTSGGTSYGKLTF

SEQ ID NO: 464008 - protein, 13 aa, Homo sapiens
  CDR3 for beta chain variable domain of TCR clone 232004 (TRBV10-3, TRBJ2-7)
CASKLAVNYEQYF

SEQ ID NO: 464009 - protein, 13 aa, Homo sapiens
  CDR3 for alpha chain variable domain of TCR clone 232005 (TRAV8-3, TRAJ43)
CAVVPDNNNDIRF

SEQ ID NO: 464010 - protein, 14 aa, Homo sapiens
  CDR3 for beta chain variable domain of TCR clone 232005 (TRBV19, TRBJ2-1)
CASPTFVLSGEQFF

SEQ ID NO: 464011 - protein, 13 aa, Homo sapiens
  CDR3 for alpha chain variable domain of TCR clone 232006 (TRAV12-2, TRAJ15)
CPPHRPAGTALIF

SEQ ID NO: 464012 - protein, 17 aa, Homo sapiens
  CDR3 for beta chain variable domain of TCR clone 232006 (TRBV5-5, TRBJ1-2)
CASSLGSLDGQSEGYTF

SEQ ID NO: 464013 - protein, 11 aa, Homo sapiens
  CDR3 for alpha chain variable domain of TCR clone 232007 (TRAV12-2, TRAJ49)
CAVTGGNKFYF

SEQ ID NO: 464014 - protein, 14 aa, Homo sapiens
  CDR3 for beta chain variable domain of TCR clone 232007 (TRBV20-1, TRBJ1-1)
CSAQTRIGGTEAFF

SEQ ID NO: 464015 - protein, 12 aa, Homo sapiens
  CDR3 for alpha chain variable domain of TCR clone 232008 (TRAV16, TRAJ26)
CALRSYGQNFVF

SEQ ID NO: 464016 - protein, 13 aa, Homo sapiens
  CDR3 for beta chain variable domain of TCR clone 232008 (TRBV28, TRBJ2-7)
CAGAQQGLDEQYF

SEQ ID NO: 464017 - protein, 14 aa, Homo sapiens
  CDR3 for alpha chain variable domain of TCR clone 232009 (TRAV3, TRAJ36)
CAVRDGTGANNLFF

SEQ ID NO: 464018 - protein, 15 aa, Homo sapiens
  CDR3 for beta chain variable domain of TCR clone 232009 (TRBV11-1, TRBJ2-3)
CASSLLAGRTDTQYF

SEQ ID NO: 464019 - protein, 16 aa, Homo sapiens
  CDR3 for alpha chain variable domain of TCR clone 232010 (TRAV26-1, TRAJ36)
CIVRAIGRSGANNLFF

SEQ ID NO: 464020 - protein, 14 aa, Homo sapiens
  CDR3 for beta chain variable domain of TCR clone 232010 (TRBV25-1, TRBJ2-1)
CASSKTRGYNEQFF

SEQ ID NO: 464021 - protein, 14 aa, Homo sapiens
  CDR3 for alpha chain variable domain of TCR clone 232011 (TRAV8-6, TRAJ34)
CAVSDQGNTDKLIF

SEQ ID NO: 464022 - protein, 15 aa, Homo sapiens
  CDR3 for beta chain variable domain of TCR clone 232011 (TRBV11-3, TRBJ2-3)
CASLKDGREGDTQYF

SEQ ID NO: 464023 - protein, 15 aa, Homo sapiens
  CDR3 for alpha chain variable domain of TCR clone 232012 (TRAV13-2, TRAJ5)
CAENPHWTGRRALTF

SEQ ID NO: 464024 - protein, 14 aa, Homo sapiens
  CDR3 for beta chain variable domain of TCR clone 232012 (TRBV5-7, TRBJ2-7)
CASSFKEATGEQYF

SEQ ID NO: 464025 - protein, 14 aa, Homo sapiens
  CDR3 for alpha chain variable domain of TCR clone 232013 (TRAV25, TRAJ22)
CAVRSSGSARRLTF

SEQ ID NO: 464026 - protein, 16 aa, Homo sapiens
  CDR3 for beta chain variable domain of TCR clone 232013 (TRBV4-2, TRBJ1-1)
CASSPSSGRAAPEAFF

SEQ ID NO: 464027 - protein, 16 aa, Homo sapiens
  CDR3 for alpha chain variable domain of TCR clone 232014 (TRAV17, TRAJ35)
CATAEGGIGFGNVLHC

SEQ ID NO: 464028 - protein, 16 aa, Homo sapiens
  CDR3 for beta chain variable domain of TCR clone 232014 (TRBV6-5, TRBJ2-7)
CASSSDPTSGFYELYF

SEQ ID NO: 464029 - protein, 16 aa, Homo sapiens
  CDR3 for alpha chain variable domain of TCR clone 232015 (TRAV26-1, TRAJ37)
CIVRGDGSGNTGKLIF

SEQ ID NO: 464030 - protein, 13 aa, Homo sapiens
  CDR3 for beta chain variable domain of TCR clone 232015 (TRBV4-1, TRBJ1-1)
CASSRQGNTEAFF

SEQ ID NO: 464031 - protein, 12 aa, Homo sapiens
  CDR3 for alpha chain variable domain of TCR clone 232016 (TRAV13-1, TRAJ21)
CAAKEGFNKFYF

SEQ ID NO: 464032 - protein, 14 aa, Homo sapiens
  CDR3 for beta chain variable domain of TCR clone 232016 (TRBV23-1, TRBJ2-5)
RASSFLRSQETQYL

SEQ ID NO: 464033 - protein, 15 aa, Homo sapiens
  CDR3 for alpha chain variable domain of TCR clone 232017 (TRAV20, TRAJ52)
CAVQAGGTSYVKLTF

SEQ ID NO: 464034 - protein, 14 aa, Homo sapiens
  CDR3 for beta chain variable domain of TCR clone 232017 (TRBV7-3, TRBJ1-1)
CASSLGTGYTEAFF

SEQ ID NO: 464035 - protein, 14 aa, Homo sapiens
  CDR3 for alpha chain variable domain of TCR clone 232018 (TRAV12-2, TRAJ13)
CAVKKTGGYQKFTF

SEQ ID NO: 464036 - protein, 11 aa, Homo sapiens
  CDR3 for beta chain variable domain of TCR clone 232018 (TRBV29-1, TRBJ2-5)
CSEDRTGTQYF

SEQ ID NO: 464037 - protein, 12 aa, Homo sapiens
  CDR3 for alpha chain variable domain of TCR clone 232019 (TRAV8-3, TRAJ20)
CAVGANEYKLSF

SEQ ID NO: 464038 - protein, 16 aa, Homo sapiens
  CDR3 for beta chain variable domain of TCR clone 232019 (TRBV19, TRBJ2-2)
CASRSHGTGATGELFF

SEQ ID NO: 464039 - protein, 11 aa, Homo sapiens
  CDR3 for alpha chain variable domain of TCR clone 232020 (TRAV22, TRAJ30)
CAGNRDDKIIF

SEQ ID NO: 464040 - protein, 15 aa, Homo sapiens
  CDR3 for beta chain variable domain of TCR clone 232020 (TRBV20-1, TRBJ2-7)
CSAESGTSGAYEQYF

SEQ ID NO: 464041 - protein, 15 aa, Homo sapiens
  CDR3 for alpha chain variable domain of TCR clone 232021 (TRAV12-1, TRAJ4)
CVVNPFSGGYNKLIF

SEQ ID NO: 464042 - protein, 16 aa, Homo sapiens
  CDR3 for beta chain variable domain of TCR clone 232021 (TRBV5-1, TRBJ1-1)
CASSKTGTELGTEAFF

SEQ ID NO: 464043 - protein, 14 aa, Homo sapiens
  CDR3 for alpha chain variable domain of TCR clone 232022 (TRAV8-1, TRAJ36)
CAVDSPTGAYNLFF

SEQ ID NO: 464044 - protein, 15 aa, Homo sapiens
  CDR3 for beta chain variable domain of TCR clone 232022 (TRBV7-2, TRBJ2-3)
CASSLEQGGTDTQYF

SEQ ID NO: 464045 - protein, 13 aa, Homo sapiens
  CDR3 for alpha chain variable domain of TCR clone 232023 (TRAV21, TRAJ15)
CAVRNQAGTALIF

SEQ ID NO: 464046 - protein, 16 aa, Homo sapiens
  CDR3 for beta chain variable domain of TCR clone 232023 (TRBV20-1, TRBJ2-5)
CSPGGTSGGYVETQYF

SEQ ID NO: 464047 - protein, 11 aa, Homo sapiens
  CDR3 for alpha chain variable domain of TCR clone 232024 (TRAV26-1, TRAJ37)
CIVRVGRKLIF

SEQ ID NO: 464048 - protein, 16 aa, Homo sapiens
  CDR3 for beta chain variable domain of TCR clone 232024 (TRBV7-3, TRBJ2-6)
CASSLTLAGGANVLNF

SEQ ID NO: 464049 - protein, 16 aa, Homo sapiens
  CDR3 for alpha chain variable domain of TCR clone 232025 (TRAV3, TRAJ37)
CAVRGKGSGNTGKLIF

SEQ ID NO: 464050 - protein, 14 aa, Homo sapiens
  CDR3 for beta chain variable domain of TCR clone 232025 (TRBV6-1, TRBJ1-3)
YASVQGGGGNTIYF

SEQ ID NO: 464051 - protein, 18 aa, Homo sapiens
  CDR3 for alpha chain variable domain of TCR clone 232026 (TRAV12-3, TRAJ52)
CAMSRTNAGGTSYGKLTF

SEQ ID NO: 464052 - protein, 16 aa, Homo sapiens
  CDR3 for beta chain variable domain of TCR clone 232026 (TRBV13, TRBJ2-3)
CKQPLQGSGGRNTQYF

SEQ ID NO: 464053 - protein, 15 aa, Homo sapiens
  CDR3 for alpha chain variable domain of TCR clone 232027 (TRAV3, TRAJ5)
CAVRDLDTGRRALTF

SEQ ID NO: 464054 - protein, 20 aa, Homo sapiens
  CDR3 for beta chain variable domain of TCR clone 232027 (TRBV7-3, TRBJ2-7)
CASSPRGLAGMVAVLRAGHQ

SEQ ID NO: 464055 - protein, 15 aa, Homo sapiens
  CDR3 for alpha chain variable domain of TCR clone 232028 (TRAV26-1, TRAJ29)
CTIRVEGSGNTPPVF

SEQ ID NO: 464056 - protein, 15 aa, Homo sapiens
  CDR3 for beta chain variable domain of TCR clone 232028 (TRBV7-9, TRBJ1-5)
CASSQGHQPNQPQHF

SEQ ID NO: 464057 - protein, 14 aa, Homo sapiens
  CDR3 for alpha chain variable domain of TCR clone 232029 (TRAV35, TRAJ22)
CAGLRPGSARQLTF

SEQ ID NO: 464058 - protein, 17 aa, Homo sapiens
  CDR3 for beta chain variable domain of TCR clone 232029 (TRBV12-4, TRBJ2-5)
CACSTPEGDALQETQYL

SEQ ID NO: 464059 - protein, 12 aa, Homo sapiens
  CDR3 for alpha chain variable domain of TCR clone 232030 (TRAV1-1, TRAJ39)
CAVPVLGNMLTF

SEQ ID NO: 464060 - protein, 15 aa, Homo sapiens
  CDR3 for beta chain variable domain of TCR clone 232030 (TRBV7-3, TRBJ2-2)
CASSETGQGTGELFF

SEQ ID NO: 464061 - protein, 17 aa, Homo sapiens
  CDR3 for alpha chain variable domain of TCR clone 232031 (TRAV8-6, TRAJ58)
FAVSSWVGETSGSRLTF

SEQ ID NO: 464062 - protein, 14 aa, Homo sapiens
  CDR3 for beta chain variable domain of TCR clone 232031 (TRBV4-3, TRBJ2-1)
YASGLDRAYNEQFF

SEQ ID NO: 464063 - protein, 14 aa, Homo sapiens
  CDR3 for alpha chain variable domain of TCR clone 232032 (TRAV20, TRAJ20)
CAVRRGYNDYKLSF

SEQ ID NO: 464064 - protein, 13 aa, Homo sapiens
  CDR3 for beta chain variable domain of TCR clone 232032 (TRBV19, TRBJ2-5)
CDSSETAPETQYF

SEQ ID NO: 464065 - protein, 12 aa, Homo sapiens
  CDR3 for alpha chain variable domain of TCR clone 232033 (TRAV2, TRAJ31)
CAVDDDNARLMF

SEQ ID NO: 464066 - protein, 16 aa, Homo sapiens
  CDR3 for beta chain variable domain of TCR clone 232033 (TRBV10-3, TRBJ2-1)
CAISGVGDGGGGEQFF

SEQ ID NO: 464067 - protein, 12 aa, Homo sapiens
  CDR3 for alpha chain variable domain of TCR clone 232034 (TRAV27, TRAJ42)
CSGGGSQGNPIF

SEQ ID NO: 464068 - protein, 13 aa, Homo sapiens
  CDR3 for beta chain variable domain of TCR clone 232034 (TRBV19, TRBJ2-7)
CASSIRSSYEQYF

SEQ ID NO: 464069 - protein, 16 aa, Homo sapiens
  CDR3 for alpha chain variable domain of TCR clone 232035 (TRAV3, TRAJ10)
CAVRDMRAGGGNKPTF

SEQ ID NO: 464070 - protein, 19 aa, Homo sapiens
  CDR3 for beta chain variable domain of TCR clone 232035 (TRBV6-3, TRBJ1-2)
CASSYSKGRTGPPNYGDTF

SEQ ID NO: 464071 - protein, 15 aa, Homo sapiens
  CDR3 for alpha chain variable domain of TCR clone 232036 (TRAV17, TRAJ57)
CATGPSQGGSEKLVL

SEQ ID NO: 464072 - protein, 14 aa, Homo sapiens
  CDR3 for beta chain variable domain of TCR clone 232036 (TRBV4-2, TRBJ2-1)
CASGLDRAYNEQFF

SEQ ID NO: 464073 - protein, 16 aa, Homo sapiens
  CDR3 for alpha chain variable domain of TCR clone 232037 (TRAV21, TRAJ52)
CAVTNAGGTSYGKLTF

SEQ ID NO: 464074 - protein, 13 aa, Homo sapiens
  CDR3 for beta chain variable domain of TCR clone 232037 (TRBV7-9, TRBJ1-2)
CASSLKQNYGYNF

SEQ ID NO: 464075 - protein, 13 aa, Homo sapiens
  CDR3 for alpha chain variable domain of TCR clone 232038 (TRAV13-1, TRAJ21)
CAASIYNFNKFYF

SEQ ID NO: 464076 - protein, 14 aa, Homo sapiens
  CDR3 for beta chain variable domain of TCR clone 232038 (TRBV20-1, TRBJ2-1)
CSALDRGTYHEQFF

SEQ ID NO: 464077 - protein, 12 aa, Homo sapiens
  CDR3 for alpha chain variable domain of TCR clone 232039 (TRAV12-2, TRAJ4)
GWPEGGYNKLIF

SEQ ID NO: 464078 - protein, 16 aa, Homo sapiens
  CDR3 for beta chain variable domain of TCR clone 232039 (TRBV6-1, TRBJ2-5)
CASSETLYRGAETQYF

SEQ ID NO: 464079 - protein, 14 aa, Homo sapiens
  CDR3 for alpha chain variable domain of TCR clone 232040 (TRAV17, TRAJ12)
CAILPMDSSYKLIF

SEQ ID NO: 464080 - protein, 11 aa, Homo sapiens
  CDR3 for beta chain variable domain of TCR clone 232040 (TRBV19, TRBJ1-1)
CASSIGSEACF

SEQ ID NO: 464081 - protein, 14 aa, Homo sapiens
  CDR3 for alpha chain variable domain of TCR clone 232041 (TRAV1-2, TRAJ8)
CAVREDKGFQKLVF

SEQ ID NO: 464082 - protein, 14 aa, Homo sapiens
  CDR3 for beta chain variable domain of TCR clone 232041 (TRBV7-3, TRBJ2-2)
CASSSGGYTGELFF

SEQ ID NO: 464083 - protein, 15 aa, Homo sapiens
  CDR3 for alpha chain variable domain of TCR clone 232042 (TRAV23/DV6, TRAJ10)
CAAGGLTGGGNKLTF

SEQ ID NO: 464084 - protein, 15 aa, Homo sapiens
  CDR3 for beta chain variable domain of TCR clone 232042 (TRBV20-1, TRBJ2-7)
CSARDPTEVGHEQYF

SEQ ID NO: 464085 - protein, 15 aa, Homo sapiens
  CDR3 for alpha chain variable domain of TCR clone 232043 (TRAV13-1, TRAJ32)
CAASIYGGATNKRIF

SEQ ID NO: 464086 - protein, 14 aa, Homo sapiens
  CDR3 for beta chain variable domain of TCR clone 232043 (TRBV7-9, TRBJ2-1)
CASSLASGGNEQFF

SEQ ID NO: 464087 - protein, 13 aa, Homo sapiens
  CDR3 for alpha chain variable domain of TCR clone 232044 (TRAV23/DV6, TRAJ24)
CAASEDSWGKLQF

SEQ ID NO: 464088 - protein, 12 aa, Homo sapiens
  CDR3 for beta chain variable domain of TCR clone 232044 (TRBV5-1, TRBJ2-7)
CASSDSTYAQYF

SEQ ID NO: 464089 - protein, 15 aa, Homo sapiens
  CDR3 for alpha chain variable domain of TCR clone 232045 (TRAV12-3, TRAJ6)
CAMSATTGGSYIPTF

SEQ ID NO: 464090 - protein, 13 aa, Homo sapiens
  CDR3 for beta chain variable domain of TCR clone 232045 (TRBV15, TRBJ1-4)
CHSGQGRDEKLFF

SEQ ID NO: 464091 - protein, 14 aa, Homo sapiens
  CDR3 for alpha chain variable domain of TCR clone 232046 (TRAV20, TRAJ56)
CAVQFGGANSKLTF

SEQ ID NO: 464092 - protein, 14 aa, Homo sapiens
  CDR3 for beta chain variable domain of TCR clone 232046 (TRBV20-1, TRBJ2-7)
CSAKRGRSTYEQYL

SEQ ID NO: 464093 - protein, 13 aa, Homo sapiens
  CDR3 for alpha chain variable domain of TCR clone 232047 (TRAV26-1, TRAJ34)
CIVRPWITDKLIF

SEQ ID NO: 464094 - protein, 13 aa, Homo sapiens
  CDR3 for beta chain variable domain of TCR clone 232047 (TRBV7-9, TRBJ1-2)
CASSLKQNYGYTF

SEQ ID NO: 464095 - protein, 18 aa, Homo sapiens
  CDR3 for alpha chain variable domain of TCR clone 232048 (TRAV13-1, TRAJ52)
CAAKDPNAGGTSYGKLTF

SEQ ID NO: 464096 - protein, 18 aa, Homo sapiens
  CDR3 for beta chain variable domain of TCR clone 232048 (TRBV4-1, TRBJ1-4)
CASSPRTGGAWTNENLFF

SEQ ID NO: 464097 - protein, 15 aa, Homo sapiens
  CDR3 for alpha chain variable domain of TCR clone 232049 (TRAV30, TRAJ32)
CGTEILGGATNKLIF

SEQ ID NO: 464098 - protein, 13 aa, Homo sapiens
  CDR3 for beta chain variable domain of TCR clone 232049 (TRBV6-3, TRBJ2-7)
CDSSFSGGYEQYF

SEQ ID NO: 464099 - protein, 18 aa, Homo sapiens
  CDR3 for alpha chain variable domain of TCR clone 232050 (TRAV29/DV5, TRAJ52)
CAAGFRGAGGTSYGKLTF

SEQ ID NO: 464100 - protein, 16 aa, Homo sapiens
  CDR3 for beta chain variable domain of TCR clone 232050 (TRBV11-2, TRBJ2-1)
CASSLERDGVDNEQFF

SEQ ID NO: 464101 - protein, 14 aa, Homo sapiens
  CDR3 for alpha chain variable domain of TCR clone 232051 (TRAV14/DV4, TRAJ49)
CAMREGVNGNQFYF

SEQ ID NO: 464102 - protein, 13 aa, Homo sapiens
  CDR3 for beta chain variable domain of TCR clone 232051 (TRBV19, TRBJ2-7)
CASSTRGSYEQYF

SEQ ID NO: 464103 - protein, 13 aa, Homo sapiens
  CDR3 for alpha chain variable domain of TCR clone 232052 (TRAV26-1, TRAJ30)
CIVNMNRDDKIIF

SEQ ID NO: 464104 - protein, 16 aa, Homo sapiens
  CDR3 for beta chain variable domain of TCR clone 232052 (TRBV16, TRBJ2-7)
CASSRPAGGTSYEQYF

SEQ ID NO: 464105 - protein, 14 aa, Homo sapiens
  CDR3 for alpha chain variable domain of TCR clone 232053 (TRAV1-2, TRAJ16)
CAVNRFSNGQKLLF

SEQ ID NO: 464106 - protein, 14 aa, Homo sapiens
  CDR3 for beta chain variable domain of TCR clone 232053 (TRBV11-3, TRBJ2-7)
CASSPDRNTYEQYF

SEQ ID NO: 464107 - protein, 13 aa, Homo sapiens
  CDR3 for alpha chain variable domain of TCR clone 232054 (TRAV26-1, TRAJ30)
CIVNMNGDNKIIF

SEQ ID NO: 464108 - protein, 16 aa, Homo sapiens
  CDR3 for beta chain variable domain of TCR clone 232054 (TRBV16, TRBJ2-7)
CASSRPAGGSSYEQYF

SEQ ID NO: 464109 - protein, 13 aa, Homo sapiens
  CDR3 for alpha chain variable domain of TCR clone 232055 (TRAV13-2, TRAJ21)
CAENLYNFNKFYF

SEQ ID NO: 464110 - protein, 16 aa, Homo sapiens
  CDR3 for beta chain variable domain of TCR clone 232055 (TRBV28, TRBJ1-1)
CASSSGGQPVATEAFF

SEQ ID NO: 464111 - protein, 13 aa, Homo sapiens
  CDR3 for alpha chain variable domain of TCR clone 232056 (TRAV3, TRAJ20)
CAVRDTPRYKLSF

SEQ ID NO: 464112 - protein, 15 aa, Homo sapiens
  CDR3 for beta chain variable domain of TCR clone 232056 (TRBV9, TRBJ1-6)
CASSVAGTGDSPLHF

SEQ ID NO: 464113 - protein, 15 aa, Homo sapiens
  CDR3 for alpha chain variable domain of TCR clone 232057 (TRAV8-3, TRAJ6)
RAVGEDRGGSYIPTF

SEQ ID NO: 464114 - protein, 14 aa, Homo sapiens
  CDR3 for beta chain variable domain of TCR clone 232057 (TRBV27, TRBJ2-2)
CASLRSPPGGELFF

SEQ ID NO: 464115 - protein, 15 aa, Homo sapiens
  CDR3 for alpha chain variable domain of TCR clone 232058 (TRAV8-6, TRAJ26)
CAVSDQSPGGQNFVV

SEQ ID NO: 464116 - protein, 13 aa, Homo sapiens
  CDR3 for beta chain variable domain of TCR clone 232058 (TRBV27, TRBJ2-7)
CASSLRHRYEQYF

SEQ ID NO: 464117 - protein, 11 aa, Homo sapiens
  CDR3 for alpha chain variable domain of TCR clone 232059 (TRAV12-3, TRAJ49)
CAMSSGNQFYF

SEQ ID NO: 464118 - protein, 14 aa, Homo sapiens
  CDR3 for beta chain variable domain of TCR clone 232059 (TRBV5-7, TRBJ2-1)
CASPTFVLSGEQFF

SEQ ID NO: 464119 - protein, 14 aa, Homo sapiens
  CDR3 for alpha chain variable domain of TCR clone 232060 (TRAV3, TRAJ8)
CAVSLNTGFQKLVF

SEQ ID NO: 464120 - protein, 16 aa, Homo sapiens
  CDR3 for beta chain variable domain of TCR clone 232060 (TRBV28, TRBJ2-7)
CASSPWVATGDLSQYF

SEQ ID NO: 464121 - protein, 13 aa, Homo sapiens
  CDR3 for alpha chain variable domain of TCR clone 232061 (TRAV17, TRAJ26)
CATVDNYGQNSVF

SEQ ID NO: 464122 - protein, 14 aa, Homo sapiens
  CDR3 for beta chain variable domain of TCR clone 232061 (TRBV6-1, TRBJ1-3)
CASVQGGGGNTIYF

SEQ ID NO: 464123 - protein, 14 aa, Homo sapiens
  CDR3 for alpha chain variable domain of TCR clone 232062 (TRAV8-4, TRAJ17)
CAVREGAEGNKLTF

SEQ ID NO: 464124 - protein, 13 aa, Homo sapiens
  CDR3 for beta chain variable domain of TCR clone 232062 (TRBV19, TRBJ2-1)
CASSMYRVNEQFF

SEQ ID NO: 464125 - protein, 12 aa, Homo sapiens
  CDR3 for alpha chain variable domain of TCR clone 232063 (TRAV12-1, TRAJ23)
RVVNIPGGKLIF

SEQ ID NO: 464126 - protein, 15 aa, Homo sapiens
  CDR3 for beta chain variable domain of TCR clone 232063 (TRBV6-3, TRBJ2-7)
CASSSPGTVFYEQYF

SEQ ID NO: 464127 - protein, 11 aa, Homo sapiens
  CDR3 for alpha chain variable domain of TCR clone 232064 (TRAV2, TRAJ33)
CAVESNYQLIW

SEQ ID NO: 464128 - protein, 13 aa, Homo sapiens
  CDR3 for beta chain variable domain of TCR clone 232064 (TRBV12-4, TRBJ2-2)
CASSITGSGELFF

SEQ ID NO: 464129 - protein, 14 aa, Homo sapiens
  CDR3 for alpha chain variable domain of TCR clone 232065 (TRAV3, TRAJ21)
CAVESQANFNKFYF

SEQ ID NO: 464130 - protein, 15 aa, Homo sapiens
  CDR3 for beta chain variable domain of TCR clone 232065 (TRBV27, TRBJ2-5)
CASSLYPRGGETQYF

SEQ ID NO: 464131 - protein, 16 aa, Homo sapiens
  CDR3 for alpha chain variable domain of TCR clone 232066 (TRAV4, TRAJ22)
CLVGDLYSGSARQLSF

SEQ ID NO: 464132 - protein, 16 aa, Homo sapiens
  CDR3 for beta chain variable domain of TCR clone 232066 (TRBV7-9, TRBJ2-1)
CASSDVAGGSYNEQFF

SEQ ID NO: 464133 - protein, 15 aa, Homo sapiens
  CDR3 for alpha chain variable domain of TCR clone 232067 (TRAV16, TRAJ12)
CSKWPLRDSSYKLVF

SEQ ID NO: 464134 - protein, 14 aa, Homo sapiens
  CDR3 for beta chain variable domain of TCR clone 232067 (TRBV25-1, TRBJ1-2)
CASSEATGPYGYTF

SEQ ID NO: 464135 - protein, 13 aa, Homo sapiens
  CDR3 for alpha chain variable domain of TCR clone 232068 (TRAV2, TRAJ40)
CAVFTSGTYKYIF

SEQ ID NO: 464136 - protein, 11 aa, Homo sapiens
  CDR3 for beta chain variable domain of TCR clone 232068 (TRBV11-2, TRBJ2-2)
CASSLPGELFF

SEQ ID NO: 464137 - protein, 12 aa, Homo sapiens
  CDR3 for alpha chain variable domain of TCR clone 232069 (TRAV12-3, TRAJ21)
CAMFNNFNKFYF

SEQ ID NO: 464138 - protein, 17 aa, Homo sapiens
  CDR3 for beta chain variable domain of TCR clone 232069 (TRBV7-3, TRBJ2-5)
CASSLGSGRSGSETQYF

SEQ ID NO: 464139 - protein, 16 aa, Homo sapiens
  CDR3 for alpha chain variable domain of TCR clone 232070 (TRAV30, TRAJ24)
CGTEIVDADSWGKFQC

SEQ ID NO: 464140 - protein, 12 aa, Homo sapiens
  CDR3 for beta chain variable domain of TCR clone 232070 (TRBV11-2, TRBJ2-1)
CASSPGNNEQFF

SEQ ID NO: 464141 - protein, 17 aa, Homo sapiens
  CDR3 for alpha chain variable domain of TCR clone 232071 (TRAV26-1, TRAJ53)
CIVRVDDSGGSNYKLTF

SEQ ID NO: 464142 - protein, 14 aa, Homo sapiens
  CDR3 for beta chain variable domain of TCR clone 232071 (TRBV18, TRBJ2-7)
CASSPRGGAYEQYF

SEQ ID NO: 464143 - protein, 14 aa, Homo sapiens
  CDR3 for alpha chain variable domain of TCR clone 232072 (TRAV12-3, TRAJ58)
CAMSTETSGSRLIF

SEQ ID NO: 464144 - protein, 13 aa, Homo sapiens
  CDR3 for beta chain variable domain of TCR clone 232072 (TRBV27, TRBJ2-3)
CASSWGRTDTQYF

SEQ ID NO: 464145 - protein, 22 aa, Homo sapiens
  CDR3 for alpha chain variable domain of TCR clone 232073 (TRAV4, TRAJ26)
PAYRKSSTLSLPRVYYGQNFVF

SEQ ID NO: 464146 - protein, 16 aa, Homo sapiens
  CDR3 for beta chain variable domain of TCR clone 232073 (TRBV7-2, TRBJ1-2)
CASSSNQDRRGHGYTF

SEQ ID NO: 464147 - protein, 18 aa, Homo sapiens
  CDR3 for alpha chain variable domain of TCR clone 232074 (TRAV9-2, TRAJ52)
CALSRHNAGGTSYGKLTF

SEQ ID NO: 464148 - protein, 16 aa, Homo sapiens
  CDR3 for beta chain variable domain of TCR clone 232074 (TRBV6-6, TRBJ2-1)
CASSYSFSGSYNEQFF

SEQ ID NO: 464149 - protein, 15 aa, Homo sapiens
  CDR3 for alpha chain variable domain of TCR clone 232075 (TRAV2, TRAJ9)
CAVEDRSTGGFKTIF

SEQ ID NO: 464150 - protein, 16 aa, Homo sapiens
  CDR3 for beta chain variable domain of TCR clone 232075 (TRBV24-1, TRBJ2-3)
CATSDPGTGATVTQYF

SEQ ID NO: 464151 - protein, 14 aa, Homo sapiens
  CDR3 for alpha chain variable domain of TCR clone 232076 (TRAV26-1, TRAJ21)
CIVRPPYNFNKFYF

SEQ ID NO: 464152 - protein, 13 aa, Homo sapiens
  CDR3 for beta chain variable domain of TCR clone 232076 (TRBV19, TRBJ1-2)
CASSVPGQDGYTF

SEQ ID NO: 464153 - protein, 13 aa, Homo sapiens
  CDR3 for alpha chain variable domain of TCR clone 232077 (TRAV10, TRAJ15)
CVVRGQAGTALIF

SEQ ID NO: 464154 - protein, 13 aa, Homo sapiens
  CDR3 for beta chain variable domain of TCR clone 232077 (TRBV12-4, TRBJ1-2)
CASSLRQGKGYTF

SEQ ID NO: 464155 - protein, 15 aa, Homo sapiens
  CDR3 for alpha chain variable domain of TCR clone 232078 (TRAV12-2, TRAJ53)
CAVNGGGGSNYKLTF

SEQ ID NO: 464156 - protein, 16 aa, Homo sapiens
  CDR3 for beta chain variable domain of TCR clone 232078 (TRBV4-3, TRBJ2-7)
CASSPRTSGRSYEQYF

SEQ ID NO: 464157 - protein, 13 aa, Homo sapiens
  CDR3 for alpha chain variable domain of TCR clone 232079 (TRAV21, TRAJ57)
CAVTQGGSEKLVF

SEQ ID NO: 464158 - protein, 14 aa, Homo sapiens
  CDR3 for beta chain variable domain of TCR clone 232079 (TRBV7-8, TRBJ1-2)
CASSPDSLSYGYTF

SEQ ID NO: 464159 - protein, 13 aa, Homo sapiens
  CDR3 for alpha chain variable domain of TCR clone 232080 (TRAV2, TRAJ15)
CAVASQAGTALIF

SEQ ID NO: 464160 - protein, 16 aa, Homo sapiens
  CDR3 for beta chain variable domain of TCR clone 232080 (TRBV6-1, TRBJ2-7)
CASTAPGGGISYEQYF

SEQ ID NO: 464161 - protein, 13 aa, Homo sapiens
  CDR3 for alpha chain variable domain of TCR clone 232081 (TRAV21, TRAJ20)
CAVGLRVDYKLSF

SEQ ID NO: 464162 - protein, 13 aa, Homo sapiens
  CDR3 for beta chain variable domain of TCR clone 232081 (TRBV13, TRBJ2-2)
CASSPGLTGELFF

SEQ ID NO: 464163 - protein, 19 aa, Homo sapiens
  CDR3 for alpha chain variable domain of TCR clone 232082 (TRAV1-2, TRAJ26)
CLLPLCCERPDNYGQNFVF

SEQ ID NO: 464164 - protein, 15 aa, Homo sapiens
  CDR3 for beta chain variable domain of TCR clone 232082 (TRBV11-2, TRBJ1-6)
CASSLDPWAVSPLHF

SEQ ID NO: 464165 - protein, 14 aa, Homo sapiens
  CDR3 for alpha chain variable domain of TCR clone 232083 (TRAV8-2, TRAJ6)
CVVISAGGSYIPTF

SEQ ID NO: 464166 - protein, 12 aa, Homo sapiens
  CDR3 for beta chain variable domain of TCR clone 232083 (TRBV7-9, TRBJ2-7)
CANSFGSYEQYF

SEQ ID NO: 464167 - protein, 13 aa, Homo sapiens
  CDR3 for alpha chain variable domain of TCR clone 232084 (TRAV8-1, TRAJ28)
CAVSGDGSYQLTF

SEQ ID NO: 464168 - protein, 14 aa, Homo sapiens
  CDR3 for beta chain variable domain of TCR clone 232084 (TRBV19, TRBJ2-5)
CASSMTGQQETQYF

SEQ ID NO: 464169 - protein, 12 aa, Homo sapiens
  CDR3 for alpha chain variable domain of TCR clone 232085 (TRAV3, TRAJ43)
CAVRDPNNDMRF

SEQ ID NO: 464170 - protein, 15 aa, Homo sapiens
  CDR3 for beta chain variable domain of TCR clone 232085 (TRBV28, TRBJ2-6)
CASSLAGSGANVLTF

SEQ ID NO: 464171 - protein, 14 aa, Homo sapiens
  CDR3 for alpha chain variable domain of TCR clone 232086 (TRAV12-3, TRAJ9)
CAMSPNTGGFKTIF

SEQ ID NO: 464172 - protein, 15 aa, Homo sapiens
  CDR3 for beta chain variable domain of TCR clone 232086 (TRBV7-9, TRBJ1-6)
CASSSTGRGNSPLHF

SEQ ID NO: 464173 - protein, 13 aa, Homo sapiens
  CDR3 for alpha chain variable domain of TCR clone 232087 (TRAV1-2, TRAJ9)
CASLNTGGFKTIF

SEQ ID NO: 464174 - protein, 15 aa, Homo sapiens
  CDR3 for beta chain variable domain of TCR clone 232087 (TRBV6-3, TRBJ2-7)
CASSSPGTVFYEQYF

SEQ ID NO: 464175 - protein, 13 aa, Homo sapiens
  CDR3 for alpha chain variable domain of TCR clone 232088 (TRAV8-3, TRAJ44)
CAVVPGTASKLSF

SEQ ID NO: 464176 - protein, 14 aa, Homo sapiens
  CDR3 for beta chain variable domain of TCR clone 232088 (TRBV11-2, TRBJ2-3)
CASSRLARTDTQHF

SEQ ID NO: 464177 - protein, 16 aa, Homo sapiens
  CDR3 for alpha chain variable domain of TCR clone 232089 (TRAV20, TRAJ22)
CAVQASSSGSARQLTF

SEQ ID NO: 464178 - protein, 13 aa, Homo sapiens
  CDR3 for beta chain variable domain of TCR clone 232089 (TRBV7-2, TRBJ2-5)
CASSQTSVDAQYF

SEQ ID NO: 464179 - protein, 12 aa, Homo sapiens
  CDR3 for alpha chain variable domain of TCR clone 232090 (TRAV26-1, TRAJ53)
CIEGGSNYKLTF

SEQ ID NO: 464180 - protein, 15 aa, Homo sapiens
  CDR3 for beta chain variable domain of TCR clone 232090 (TRBV5-1, TRBJ2-2)
CASSLLQGRPGELFY

SEQ ID NO: 464181 - protein, 12 aa, Homo sapiens
  CDR3 for alpha chain variable domain of TCR clone 232091 (TRAV8-3, TRAJ20)
CAVDFNDYKLSF

SEQ ID NO: 464182 - protein, 15 aa, Homo sapiens
  CDR3 for beta chain variable domain of TCR clone 232091 (TRBV2, TRBJ2-1)
CASSELAGSYNEQFF

SEQ ID NO: 464183 - protein, 16 aa, Homo sapiens
  CDR3 for alpha chain variable domain of TCR clone 232092 (TRAV14/DV4, TRAJ53)
CAMREGGGGSNYKLTF

SEQ ID NO: 464184 - protein, 15 aa, Homo sapiens
  CDR3 for beta chain variable domain of TCR clone 232092 (TRBV15, TRBJ1-3)
CATSRDRGPGNTIYF

SEQ ID NO: 464185 - protein, 11 aa, Homo sapiens
  CDR3 for alpha chain variable domain of TCR clone 232093 (TRAV3, TRAJ21)
CAVGNFNKFYF

SEQ ID NO: 464186 - protein, 14 aa, Homo sapiens
  CDR3 for beta chain variable domain of TCR clone 232093 (TRBV25-1, TRBJ1-1)
CASTQLGGNTEAFF

SEQ ID NO: 464187 - protein, 16 aa, Homo sapiens
  CDR3 for alpha chain variable domain of TCR clone 232094 (TRAV29/DV5, TRAJ22)
CAACSRDSGSARQLTF

SEQ ID NO: 464188 - protein, 15 aa, Homo sapiens
  CDR3 for beta chain variable domain of TCR clone 232094 (TRBV12-4, TRBJ2-5)
CASSPPTGLQETQYF

SEQ ID NO: 464189 - protein, 14 aa, Homo sapiens
  CDR3 for alpha chain variable domain of TCR clone 232095 (TRAV17, TRAJ12)
CAILPLDSSYKLIF

SEQ ID NO: 464190 - protein, 13 aa, Homo sapiens
  CDR3 for beta chain variable domain of TCR clone 232095 (TRBV4-1, TRBJ2-2)
CASSQENTGELFF

SEQ ID NO: 464191 - protein, 14 aa, Homo sapiens
  CDR3 for alpha chain variable domain of TCR clone 232096 (TRAV1-2, TRAJ8)
CAVREDTGFQKLVF

SEQ ID NO: 464192 - protein, 17 aa, Homo sapiens
  CDR3 for beta chain variable domain of TCR clone 232096 (TRBV20-1, TRBJ2-1)
CSASSSGRAGSYNEQFF

SEQ ID NO: 464193 - protein, 15 aa, Homo sapiens
  CDR3 for alpha chain variable domain of TCR clone 232097 (TRAV12-3, TRAJ6)
CAMSATSGGSYIPTF

SEQ ID NO: 464194 - protein, 12 aa, Homo sapiens
  CDR3 for beta chain variable domain of TCR clone 232097 (TRBV7-8, TRBJ2-7)
CASSLGDREQYF

SEQ ID NO: 464195 - protein, 12 aa, Homo sapiens
  CDR3 for alpha chain variable domain of TCR clone 232098 (TRAV21, TRAJ13)
PGPSGGYHKVTF

SEQ ID NO: 464196 - protein, 14 aa, Homo sapiens
  CDR3 for beta chain variable domain of TCR clone 232098 (TRBV20-1, TRBJ2-7)
CSAKDRKGAYEQYF

SEQ ID NO: 464197 - protein, 16 aa, Homo sapiens
  CDR3 for alpha chain variable domain of TCR clone 232099 (TRAV30, TRAJ24)
CGTEIVDADSWGKFQF

SEQ ID NO: 464198 - protein, 16 aa, Homo sapiens
  CDR3 for beta chain variable domain of TCR clone 232099 (TRBV11-2, TRBJ2-1)
CASSLLLLSSYNEQFF

SEQ ID NO: 464199 - protein, 12 aa, Homo sapiens
  CDR3 for alpha chain variable domain of TCR clone 232100 (TRAV1-1, TRAJ8)
CAGGTGFQKLVF

SEQ ID NO: 464200 - protein, 15 aa, Homo sapiens
  CDR3 for beta chain variable domain of TCR clone 232100 (TRBV7-9, TRBJ1-4)
CASNRTGGFNEKLFF

SEQ ID NO: 464201 - protein, 13 aa, Homo sapiens
  CDR3 for alpha chain variable domain of TCR clone 232101 (TRAV8-4, TRAJ26)
CAVSSSMVRILSL

SEQ ID NO: 464202 - protein, 17 aa, Homo sapiens
  CDR3 for beta chain variable domain of TCR clone 232101 (TRBV13, TRBJ2-3)
CASSLSRVAGGRNTQYF

SEQ ID NO: 464203 - protein, 14 aa, Homo sapiens
  CDR3 for alpha chain variable domain of TCR clone 232102 (TRAV21, TRAJ35)
CAVMPIGFGNVLHC

SEQ ID NO: 464204 - protein, 11 aa, Homo sapiens
  CDR3 for beta chain variable domain of TCR clone 232102 (TRBV7-9, TRBJ2-7)
CSSIKREEQYF

SEQ ID NO: 464205 - protein, 16 aa, Homo sapiens
  CDR3 for alpha chain variable domain of TCR clone 232103 (TRAV13-2, TRAJ32)
CAENMNYGGATNMLIF

SEQ ID NO: 464206 - protein, 14 aa, Homo sapiens
  CDR3 for beta chain variable domain of TCR clone 232103 (TRBV4-3, TRBJ2-7)
CASSQEVAGGEQYF

SEQ ID NO: 464207 - protein, 15 aa, Homo sapiens
  CDR3 for alpha chain variable domain of TCR clone 232104 (TRAV12-2, TRAJ53)
CAVNGGGGSNYKLTF

SEQ ID NO: 464208 - protein, 17 aa, Homo sapiens
  CDR3 for beta chain variable domain of TCR clone 232104 (TRBV7-3, TRBJ2-3)
RAGSLMKRRRGADTQYF

SEQ ID NO: 464209 - protein, 14 aa, Homo sapiens
  CDR3 for alpha chain variable domain of TCR clone 232105 (TRAV1-2, TRAJ16)
CAVNRFSDGQKLLF

SEQ ID NO: 464210 - protein, 13 aa, Homo sapiens
  CDR3 for beta chain variable domain of TCR clone 232105 (TRBV15, TRBJ2-3)
CATSGTGTDTQYF

SEQ ID NO: 464211 - protein, 13 aa, Homo sapiens
  CDR3 for alpha chain variable domain of TCR clone 232106 (TRAV2, TRAJ40)
CAVVTSGTYKYIF

SEQ ID NO: 464212 - protein, 16 aa, Homo sapiens
  CDR3 for beta chain variable domain of TCR clone 232106 (TRBV29-1, TRBJ1-2)
CSVEANRDIANYGYSV

SEQ ID NO: 464213 - protein, 12 aa, Homo sapiens
  CDR3 for alpha chain variable domain of TCR clone 232107 (TRAV1-2, TRAJ29)
CAVPSGNTPLVF

SEQ ID NO: 464214 - protein, 14 aa, Homo sapiens
  CDR3 for beta chain variable domain of TCR clone 232107 (TRBV13, TRBJ2-5)
CASSLERVGETQYF

SEQ ID NO: 464215 - protein, 17 aa, Homo sapiens
  CDR3 for alpha chain variable domain of TCR clone 232108 (TRAV1-2, TRAJ8)
CAVRDPDENTGFQKLVF

SEQ ID NO: 464216 - protein, 16 aa, Homo sapiens
  CDR3 for beta chain variable domain of TCR clone 232108 (TRBV7-9, TRBJ2-2)
CASSGFGGVNTGELFS

SEQ ID NO: 464217 - protein, 14 aa, Homo sapiens
  CDR3 for alpha chain variable domain of TCR clone 232109 (TRAV1-2, TRAJ16)
CAVNRFSDGQKLLF

SEQ ID NO: 464218 - protein, 15 aa, Homo sapiens
  CDR3 for beta chain variable domain of TCR clone 232109 (TRBV5-1, TRBJ2-2)
CASSSPGGNTGELFF

SEQ ID NO: 464219 - protein, 11 aa, Homo sapiens
  CDR3 for alpha chain variable domain of TCR clone 232110 (TRAV12-3, TRAJ49)
CAANTGNQFYF

SEQ ID NO: 464220 - protein, 14 aa, Homo sapiens
  CDR3 for beta chain variable domain of TCR clone 232110 (TRBV7-9, TRBJ2-3)
CASSLEDGTDTQYF

SEQ ID NO: 464221 - protein, 16 aa, Homo sapiens
  CDR3 for alpha chain variable domain of TCR clone 232111 (TRAV20, TRAJ38)
CAVQASNAGNNRKLIL

SEQ ID NO: 464222 - protein, 16 aa, Homo sapiens
  CDR3 for beta chain variable domain of TCR clone 232111 (TRBV7-8, TRBJ2-6)
CASRVGDSSGANVLTF

SEQ ID NO: 464223 - protein, 14 aa, Homo sapiens
  CDR3 for alpha chain variable domain of TCR clone 232112 (TRAV1-2, TRAJ8)
CAVREDTGFQKLVF

SEQ ID NO: 464224 - protein, 15 aa, Homo sapiens
  CDR3 for beta chain variable domain of TCR clone 232112 (TRBV12-4, TRBJ2-5)
CASSPPTGLQATQYF

SEQ ID NO: 464225 - protein, 16 aa, Homo sapiens
  CDR3 for alpha chain variable domain of TCR clone 232113 (TRAV30, TRAJ24)
CGTEIVDADSWWKFQF

SEQ ID NO: 464226 - protein, 14 aa, Homo sapiens
  CDR3 for beta chain variable domain of TCR clone 232113 (TRBV18, TRBJ2-7)
CASSPRGGAYEQYF

SEQ ID NO: 464227 - protein, 13 aa, Homo sapiens
  CDR3 for alpha chain variable domain of TCR clone 232114 (TRAV20, TRAJ31)
CAVQAWNNARLMF

SEQ ID NO: 464228 - protein, 13 aa, Homo sapiens
  CDR3 for beta chain variable domain of TCR clone 232114 (TRBV7-2, TRBJ2-2)
CASSLAVTGELFF

SEQ ID NO: 464229 - protein, 12 aa, Homo sapiens
  CDR3 for alpha chain variable domain of TCR clone 232115 (TRAV41, TRAJ58)
CAVETSGSRLTF

SEQ ID NO: 464230 - protein, 14 aa, Homo sapiens
  CDR3 for beta chain variable domain of TCR clone 232115 (TRBV7-9, TRBJ2-5)
CASSLDTAQETQYF

SEQ ID NO: 464231 - protein, 16 aa, Homo sapiens
  CDR3 for alpha chain variable domain of TCR clone 232116 (TRAV8-6, TRAJ32)
CAVSDPYGGATNKLIF

SEQ ID NO: 464232 - protein, 18 aa, Homo sapiens
  CDR3 for beta chain variable domain of TCR clone 232116 (TRBV4-2, TRBJ2-6)
CASSQVQGVLTGANDLTF

SEQ ID NO: 464233 - protein, 14 aa, Homo sapiens
  CDR3 for alpha chain variable domain of TCR clone 232117 (TRAV1-2, TRAJ16)
CAVNRFSDGQKLLF

SEQ ID NO: 464234 - protein, 14 aa, Homo sapiens
  CDR3 for beta chain variable domain of TCR clone 232117 (TRBV6-1, TRBJ2-7)
CASSVPGTTDEQYF

SEQ ID NO: 464235 - protein, 17 aa, Homo sapiens
  CDR3 for alpha chain variable domain of TCR clone 232118 (TRAV13-1, TRAJ52)
CAASSGAGGTSYGKLTF

SEQ ID NO: 464236 - protein, 15 aa, Homo sapiens
  CDR3 for beta chain variable domain of TCR clone 232118 (TRBV2, TRBJ2-1)
CASSELAGSYNEQYF

SEQ ID NO: 464237 - protein, 14 aa, Homo sapiens
  CDR3 for alpha chain variable domain of TCR clone 232119 (TRAV12-2, TRAJ24)
CDVTPADSWGKLQF

SEQ ID NO: 464238 - protein, 12 aa, Homo sapiens
  CDR3 for beta chain variable domain of TCR clone 232119 (TRBV3-1, TRBJ2-1)
SASSQGSSGQFF

SEQ ID NO: 464239 - protein, 17 aa, Homo sapiens
  CDR3 for alpha chain variable domain of TCR clone 232120 (TRAV13-1, TRAJ52)
CAASSGAGGTSYGKLTF

SEQ ID NO: 464240 - protein, 15 aa, Homo sapiens
  CDR3 for beta chain variable domain of TCR clone 232120 (TRBV2, TRBJ2-7)
CASSELAGSYNEQYF

SEQ ID NO: 464241 - protein, 15 aa, Homo sapiens
  CDR3 for alpha chain variable domain of TCR clone 232121 (TRAV8-3, TRAJ45)
CASSYSGGGADGLTC

SEQ ID NO: 464242 - protein, 13 aa, Homo sapiens
  CDR3 for beta chain variable domain of TCR clone 232121 (TRBV10-3, TRBJ2-7)
CASKLAVSYEQYF

SEQ ID NO: 464243 - protein, 14 aa, Homo sapiens
  CDR3 for alpha chain variable domain of TCR clone 232122 (TRAV1-2, TRAJ8)
CAVREDTGFQQLVF

SEQ ID NO: 464244 - protein, 14 aa, Homo sapiens
  CDR3 for beta chain variable domain of TCR clone 232122 (TRBV7-9, TRBJ1-1)
CASSLGGANTEAFF

SEQ ID NO: 464245 - protein, 17 aa, Homo sapiens
  CDR3 for alpha chain variable domain of TCR clone 232123 (TRAV17, TRAJ28)
CATDPRRGGAGSYQLTF

SEQ ID NO: 464246 - protein, 16 aa, Homo sapiens
  CDR3 for beta chain variable domain of TCR clone 232123 (TRBV25-1, TRBJ1-1)
CASSGDRDKGRIEAFF

SEQ ID NO: 464247 - protein, 12 aa, Homo sapiens
  CDR3 for alpha chain variable domain of TCR clone 232124 (TRAV13-1, TRAJ49)
CAASPMGNQFYF

SEQ ID NO: 464248 - protein, 15 aa, Homo sapiens
  CDR3 for beta chain variable domain of TCR clone 232124 (TRBV12-4, TRBJ2-5)
CASSPPTGLQETQYF

SEQ ID NO: 464249 - protein, 14 aa, Homo sapiens
  CDR3 for alpha chain variable domain of TCR clone 232125 (TRAV12-1, TRAJ30)
CVVNIGGRDDKIIF

SEQ ID NO: 464250 - protein, 15 aa, Homo sapiens
  CDR3 for beta chain variable domain of TCR clone 232125 (TRBV18, TRBJ1-2)
CASSPSNTPNYGYTV

SEQ ID NO: 464251 - protein, 14 aa, Homo sapiens
  CDR3 for alpha chain variable domain of TCR clone 232126 (TRAV1-2, TRAJ16)
CGVNRFSDGQKLLF

SEQ ID NO: 464252 - protein, 14 aa, Homo sapiens
  CDR3 for beta chain variable domain of TCR clone 232126 (TRBV7-9, TRBJ2-3)
CASSLEDGTDTQYF

SEQ ID NO: 464253 - protein, 14 aa, Homo sapiens
  CDR3 for alpha chain variable domain of TCR clone 232127 (TRAV8-3, TRAJ21)
CAVDARDNFNKFYF

SEQ ID NO: 464254 - protein, 16 aa, Homo sapiens
  CDR3 for beta chain variable domain of TCR clone 232127 (TRBV20-1, TRBJ2-1)
CSARDLAGHSYNERFF

SEQ ID NO: 464255 - protein, 12 aa, Homo sapiens
  CDR3 for alpha chain variable domain of TCR clone 232128 (TRAV17, TRAJ9)
CAPNTGGFKTIF

SEQ ID NO: 464256 - protein, 15 aa, Homo sapiens
  CDR3 for beta chain variable domain of TCR clone 232128 (TRBV20-1, TRBJ1-1)
CSARGQGRSDTEAFF

SEQ ID NO: 464257 - protein, 12 aa, Homo sapiens
  CDR3 for alpha chain variable domain of TCR clone 232129 (TRAV12-3, TRAJ32)
CAGGGATNKLIF

SEQ ID NO: 464258 - protein, 15 aa, Homo sapiens
  CDR3 for beta chain variable domain of TCR clone 232129 (TRBV4-3, TRBJ2-1)
CASSQESPIYNEQFF

SEQ ID NO: 464259 - protein, 13 aa, Homo sapiens
  CDR3 for alpha chain variable domain of TCR clone 232130 (TRAV8-4, TRAJ36)
CAVRKSWTGQTTS

SEQ ID NO: 464260 - protein, 17 aa, Homo sapiens
  CDR3 for beta chain variable domain of TCR clone 232130 (TRBV3-1, TRBJ2-2)
CASSQDSQGPNTGELFF

SEQ ID NO: 464261 - protein, 14 aa, Homo sapiens
  CDR3 for alpha chain variable domain of TCR clone 232131 (TRAV1-2, TRAJ8)
CAVREDRGFQKLVF

SEQ ID NO: 464262 - protein, 16 aa, Homo sapiens
  CDR3 for beta chain variable domain of TCR clone 232131 (TRBV7-3, TRBJ2-2)
CASSLKRGTLSGELFF

SEQ ID NO: 464263 - protein, 13 aa, Homo sapiens
  CDR3 for alpha chain variable domain of TCR clone 232132 (TRAV17, TRAJ5)
CAPMDTGRRAFTF

SEQ ID NO: 464264 - protein, 14 aa, Homo sapiens
  CDR3 for beta chain variable domain of TCR clone 232132 (TRBV29-1, TRBJ2-7)
CSVDQRQASYEQYF

SEQ ID NO: 464265 - protein, 17 aa, Homo sapiens
  CDR3 for alpha chain variable domain of TCR clone 232133 (TRAV3, TRAJ6)
CAVRDGPRAGGSYIPTF

SEQ ID NO: 464266 - protein, 17 aa, Homo sapiens
  CDR3 for beta chain variable domain of TCR clone 232133 (TRBV7-8, TRBJ2-7)
CASSFTSGRPPSYEQYF

SEQ ID NO: 464267 - protein, 14 aa, Homo sapiens
  CDR3 for alpha chain variable domain of TCR clone 232134 (TRAV26-1, TRAJ44)
CIVRPTGTASKLTF

SEQ ID NO: 464268 - protein, 13 aa, Homo sapiens
  CDR3 for beta chain variable domain of TCR clone 232134 (TRBV20-1, TRBJ1-6)
CSAPLGVGSPLHF

SEQ ID NO: 464269 - protein, 14 aa, Homo sapiens
  CDR3 for alpha chain variable domain of TCR clone 232135 (TRAV3, TRAJ32)
CCERRAGATNKLIF

SEQ ID NO: 464270 - protein, 14 aa, Homo sapiens
  CDR3 for beta chain variable domain of TCR clone 232135 (TRBV18, TRBJ2-5)
CASSPGVSQETQYF

SEQ ID NO: 464271 - protein, 16 aa, Homo sapiens
  CDR3 for alpha chain variable domain of TCR clone 232136 (TRAV26-1, TRAJ33)
CIVPFWGEDSNYQLIW

SEQ ID NO: 464272 - protein, 13 aa, Homo sapiens
  CDR3 for beta chain variable domain of TCR clone 232136 (TRBV12-5, TRBJ2-3)
CASGDRQSDTQYF

SEQ ID NO: 464273 - protein, 15 aa, Homo sapiens
  CDR3 for alpha chain variable domain of TCR clone 232137 (TRAV12-3, TRAJ49)
CAMAVTPNTGNQFYF

SEQ ID NO: 464274 - protein, 18 aa, Homo sapiens
  CDR3 for beta chain variable domain of TCR clone 232137 (TRBV4-1, TRBJ1-5)
CAGSQDPRGQGLNQPQHF

SEQ ID NO: 464275 - protein, 13 aa, Homo sapiens
  CDR3 for alpha chain variable domain of TCR clone 232138 (TRAV20, TRAJ54)
CDVQAGGAQKLVF

SEQ ID NO: 464276 - protein, 14 aa, Homo sapiens
  CDR3 for beta chain variable domain of TCR clone 232138 (TRBV20-1, TRBJ2-7)
CSAKTGTGGYEQYF

SEQ ID NO: 464277 - protein, 10 aa, Homo sapiens
  CDR3 for alpha chain variable domain of TCR clone 232139 (TRAV4, TRAJ15)
CLPFWTALSF

SEQ ID NO: 464278 - protein, 15 aa, Homo sapiens
  CDR3 for beta chain variable domain of TCR clone 232139 (TRBV5-1, TRBJ2-1)
CASSFSGTGYNEQFF

SEQ ID NO: 464279 - protein, 13 aa, Homo sapiens
  CDR3 for alpha chain variable domain of TCR clone 232140 (TRAV3, TRAJ27)
CAVSPLGAGKSTF

SEQ ID NO: 464280 - protein, 14 aa, Homo sapiens
  CDR3 for beta chain variable domain of TCR clone 232140 (TRBV19, TRBJ2-1)
CASPTFVLSGEQFF

SEQ ID NO: 464281 - protein, 14 aa, Homo sapiens
  CDR3 for alpha chain variable domain of TCR clone 232141 (TRAV26-1, TRAJ38)
CIADNAGNNRKLLW

SEQ ID NO: 464282 - protein, 13 aa, Homo sapiens
  CDR3 for beta chain variable domain of TCR clone 232141 (TRBV20-1, TRBJ1-1)
CSARGGGNTEAFF

SEQ ID NO: 464283 - protein, 13 aa, Homo sapiens
  CDR3 for alpha chain variable domain of TCR clone 232142 (TRAV38-1, TRAJ42)
CARWGGSQGNLIF

SEQ ID NO: 464284 - protein, 16 aa, Homo sapiens
  CDR3 for beta chain variable domain of TCR clone 232142 (TRBV7-3, TRBJ2-2)
CASSLKRGTLSGELFF

SEQ ID NO: 464285 - protein, 12 aa, Homo sapiens
  CDR3 for alpha chain variable domain of TCR clone 232143 (TRAV12-3, TRAJ42)
CAPGGSQGDLIF

SEQ ID NO: 464286 - protein, 13 aa, Homo sapiens
  CDR3 for beta chain variable domain of TCR clone 232143 (TRBV5-7, TRBJ2-6)
CASTSGGANVLTF

SEQ ID NO: 464287 - protein, 11 aa, Homo sapiens
  CDR3 for alpha chain variable domain of TCR clone 232144 (TRAV2, TRAJ13)
CASGGYQKVTF

SEQ ID NO: 464288 - protein, 16 aa, Homo sapiens
  CDR3 for beta chain variable domain of TCR clone 232144 (TRBV6-1, TRBJ2-5)
CASSEILDRGAETQYF

SEQ ID NO: 464289 - protein, 16 aa, Homo sapiens
  CDR3 for alpha chain variable domain of TCR clone 232145 (TRAV30, TRAJ24)
CGTEIVDADSWGKFQF

SEQ ID NO: 464290 - protein, 15 aa, Homo sapiens
  CDR3 for beta chain variable domain of TCR clone 232145 (TRBV18, TRBJ2-1)
CASLPDRGRDNEQSF

SEQ ID NO: 464291 - protein, 11 aa, Homo sapiens
  CDR3 for alpha chain variable domain of TCR clone 232146 (TRAV2, TRAJ13)
CASGGYQKVTL

SEQ ID NO: 464292 - protein, 14 aa, Homo sapiens
  CDR3 for beta chain variable domain of TCR clone 232146 (TRBV20-1, TRBJ2-1)
QCCDRTGTYNEQFF

SEQ ID NO: 464293 - protein, 17 aa, Homo sapiens
  CDR3 for alpha chain variable domain of TCR clone 232147 (TRAV3, TRAJ6)
CAVRDGPRAGGSYIPTF

SEQ ID NO: 464294 - protein, 13 aa, Homo sapiens
  CDR3 for beta chain variable domain of TCR clone 232147 (TRBV29-1, TRBJ2-5)
CSVTIASEETQYF

SEQ ID NO: 464295 - protein, 13 aa, Homo sapiens
  CDR3 for alpha chain variable domain of TCR clone 232148 (TRAV17, TRAJ54)
CATSWGGAQKLIF

SEQ ID NO: 464296 - protein, 15 aa, Homo sapiens
  CDR3 for beta chain variable domain of TCR clone 232148 (TRBV4-3, TRBJ2-3)
CASSPSLLSTDTQYF

SEQ ID NO: 464297 - protein, 13 aa, Homo sapiens
  CDR3 for alpha chain variable domain of TCR clone 232149 (TRAV21, TRAJ37)
CAVSSGNTGKLIF

SEQ ID NO: 464298 - protein, 11 aa, Homo sapiens
  CDR3 for beta chain variable domain of TCR clone 232149 (TRBV29-1, TRBJ2-5)
CSEDRTGTQYF

SEQ ID NO: 464299 - protein, 14 aa, Homo sapiens
  CDR3 for alpha chain variable domain of TCR clone 232150 (TRAV13-1, TRAJ9)
CAASALTGGFKTIF

SEQ ID NO: 464300 - protein, 16 aa, Homo sapiens
  CDR3 for beta chain variable domain of TCR clone 232150 (TRBV5-1, TRBJ1-2)
CASSLDVNRGSYGYTF

SEQ ID NO: 464301 - protein, 14 aa, Homo sapiens
  CDR3 for alpha chain variable domain of TCR clone 232151 (TRAV12-2, TRAJ13)
CAVKKTGGYQKVTF

SEQ ID NO: 464302 - protein, 15 aa, Homo sapiens
  CDR3 for beta chain variable domain of TCR clone 232151 (TRBV7-3, TRBJ2-7)
CASSPEEGSSYEQYF

SEQ ID NO: 464303 - protein, 14 aa, Homo sapiens
  CDR3 for alpha chain variable domain of TCR clone 232152 (TRAV1-1, TRAJ28)
CAAPSGAGSYQLTF

SEQ ID NO: 464304 - protein, 13 aa, Homo sapiens
  CDR3 for beta chain variable domain of TCR clone 232152 (TRBV7-9, TRBJ2-5)
CASLPSGRETQYF

SEQ ID NO: 464305 - protein, 13 aa, Homo sapiens
  CDR3 for alpha chain variable domain of TCR clone 232153 (TRAV27, TRAJ41)
CAGEGNSGYALNF

SEQ ID NO: 464306 - protein, 15 aa, Homo sapiens
  CDR3 for beta chain variable domain of TCR clone 232153 (TRBV6-3, TRBJ2-7)
CASGSPGTVFYEQYF

SEQ ID NO: 464307 - protein, 14 aa, Homo sapiens
  CDR3 for alpha chain variable domain of TCR clone 232154 (TRAV21, TRAJ45)
CAVSSGGGADGLTF

SEQ ID NO: 464308 - protein, 16 aa, Homo sapiens
  CDR3 for beta chain variable domain of TCR clone 232154 (TRBV5-1, TRBJ2-7)
CASSLEGLAGLYEQYF

SEQ ID NO: 464309 - protein, 14 aa, Homo sapiens
  CDR3 for alpha chain variable domain of TCR clone 232155 (TRAV12-2, TRAJ13)
CSVKKTGGYQKVTF

SEQ ID NO: 464310 - protein, 15 aa, Homo sapiens
  CDR3 for beta chain variable domain of TCR clone 232155 (TRBV7-2, TRBJ2-1)
CASSSGLAGGNEQFF

SEQ ID NO: 464311 - protein, 14 aa, Homo sapiens
  CDR3 for alpha chain variable domain of TCR clone 232156 (TRAV17, TRAJ56)
CATVPAGANSKMTF

SEQ ID NO: 464312 - protein, 12 aa, Homo sapiens
  CDR3 for beta chain variable domain of TCR clone 232156 (TRBV12-4, TRBJ2-2)
CQQYYRVRGAVF

SEQ ID NO: 464313 - protein, 14 aa, Homo sapiens
  CDR3 for alpha chain variable domain of TCR clone 232157 (TRAV27, TRAJ23)
FAGLSYNQGGKLIF

SEQ ID NO: 464314 - protein, 15 aa, Homo sapiens
  CDR3 for beta chain variable domain of TCR clone 232157 (TRBV19, TRBJ2-2)
CASSLNRGVTGELFF

SEQ ID NO: 464315 - protein, 12 aa, Homo sapiens
  CDR3 for alpha chain variable domain of TCR clone 232158 (TRAV13-1, TRAJ21)
CAAKEGCNKFYF

SEQ ID NO: 464316 - protein, 14 aa, Homo sapiens
  CDR3 for beta chain variable domain of TCR clone 232158 (TRBV7-2, TRBJ2-7)
CASSPKTSFYEQYF

SEQ ID NO: 464317 - protein, 10 aa, Homo sapiens
  CDR3 for alpha chain variable domain of TCR clone 232159 (TRAV17, TRAJ52)
SATSYGKLTF

SEQ ID NO: 464318 - protein, 13 aa, Homo sapiens
  CDR3 for beta chain variable domain of TCR clone 232159 (TRBV29-1, TRBJ2-5)
CSVGGTSVETQYF

SEQ ID NO: 464319 - protein, 14 aa, Homo sapiens
  CDR3 for alpha chain variable domain of TCR clone 232160 (TRAV26-1, TRAJ34)
CIVRVAYNTDKLIF

SEQ ID NO: 464320 - protein, 15 aa, Homo sapiens
  CDR3 for beta chain variable domain of TCR clone 232160 (TRBV20-1, TRBJ2-7)
CSARVPAANFYEQYF

SEQ ID NO: 464321 - protein, 14 aa, Homo sapiens
  CDR3 for alpha chain variable domain of TCR clone 232161 (TRAV13-2, TRAJ43)
CAEIPTYNNYDMRF

SEQ ID NO: 464322 - protein, 15 aa, Homo sapiens
  CDR3 for beta chain variable domain of TCR clone 232161 (TRBV7-9, TRBJ2-2)
CASGPLDTFPGELFF

SEQ ID NO: 464323 - protein, 12 aa, Homo sapiens
  CDR3 for alpha chain variable domain of TCR clone 232162 (TRAV2, TRAJ10)
CASTGGGNKLTF

SEQ ID NO: 464324 - protein, 16 aa, Homo sapiens
  CDR3 for beta chain variable domain of TCR clone 232162 (TRBV4-2, TRBJ2-1)
CASSQGEGRTVNEQFF

SEQ ID NO: 464325 - protein, 12 aa, Homo sapiens
  CDR3 for alpha chain variable domain of TCR clone 232163 (TRAV3, TRAJ43)
CAVRDPNNDMRF

SEQ ID NO: 464326 - protein, 15 aa, Homo sapiens
  CDR3 for beta chain variable domain of TCR clone 232163 (TRBV27, TRBJ1-5)
CASSLGTGCGQPQHF

SEQ ID NO: 464327 - protein, 12 aa, Homo sapiens
  CDR3 for alpha chain variable domain of TCR clone 232164 (TRAV12-3, TRAJ17)
CAMTLTGNKLNF

SEQ ID NO: 464328 - protein, 14 aa, Homo sapiens
  CDR3 for beta chain variable domain of TCR clone 232164 (TRBV4-1, TRBJ2-2)
CASSQAVNTGELFF

SEQ ID NO: 464329 - protein, 13 aa, Homo sapiens
  CDR3 for alpha chain variable domain of TCR clone 232165 (TRAV1-2, TRAJ12)
CAVSMDSSYKLIF

SEQ ID NO: 464330 - protein, 14 aa, Homo sapiens
  CDR3 for beta chain variable domain of TCR clone 232165 (TRBV7-2, TRBJ2-7)
CASSPKTSVYEQYF

SEQ ID NO: 464331 - protein, 14 aa, Homo sapiens
  CDR3 for alpha chain variable domain of TCR clone 232166 (TRAV14/DV4, TRAJ42)
CPRGSLRSQGNLIF

SEQ ID NO: 464332 - protein, 14 aa, Homo sapiens
  CDR3 for beta chain variable domain of TCR clone 232166 (TRBV15, TRBJ2-5)
CATSIGGLGETQYF

SEQ ID NO: 464333 - protein, 15 aa, Homo sapiens
  CDR3 for alpha chain variable domain of TCR clone 232167 (TRAV8-3, TRAJ45)
CASSYSGGGADGLTC

SEQ ID NO: 464334 - protein, 16 aa, Homo sapiens
  CDR3 for beta chain variable domain of TCR clone 232167 (TRBV7-9, TRBJ2-2)
CASSGFGGANTGELFF

SEQ ID NO: 464335 - protein, 12 aa, Homo sapiens
  CDR3 for alpha chain variable domain of TCR clone 232168 (TRAV21, TRAJ29)
CAVTSGNTPLVF

SEQ ID NO: 464336 - protein, 15 aa, Homo sapiens
  CDR3 for beta chain variable domain of TCR clone 232168 (TRBV12-4, TRBJ1-2)
CASRFGVAGNYGYTF

SEQ ID NO: 464337 - protein, 14 aa, Homo sapiens
  CDR3 for alpha chain variable domain of TCR clone 232169 (TRAV20, TRAJ29)
CAVQAWVGNTPLVF

SEQ ID NO: 464338 - protein, 16 aa, Homo sapiens
  CDR3 for beta chain variable domain of TCR clone 232169 (TRBV2, TRBJ2-1)
CASRSPAGGKYNEQFF

SEQ ID NO: 464339 - protein, 12 aa, Homo sapiens
  CDR3 for alpha chain variable domain of TCR clone 232170 (TRAV12-3, TRAJ17)
CAMTLTGNKLTF

SEQ ID NO: 464340 - protein, 13 aa, Homo sapiens
  CDR3 for beta chain variable domain of TCR clone 232170 (TRBV7-3, TRBJ2-7)
CASSSGANYEQYF

SEQ ID NO: 464341 - protein, 11 aa, Homo sapiens
  CDR3 for alpha chain variable domain of TCR clone 232171 (TRAV2, TRAJ13)
CASGGYQKVTF

SEQ ID NO: 464342 - protein, 17 aa, Homo sapiens
  CDR3 for beta chain variable domain of TCR clone 232171 (TRBV11-2, TRBJ2-3)
CQQLKGGLAGAPNTQYF

SEQ ID NO: 464343 - protein, 14 aa, Homo sapiens
  CDR3 for alpha chain variable domain of TCR clone 232172 (TRAV1-2, TRAJ8)
CAVREDTGFQKLVF

SEQ ID NO: 464344 - protein, 15 aa, Homo sapiens
  CDR3 for beta chain variable domain of TCR clone 232172 (TRBV14, TRBJ2-5)
CASSQGDRDQETQYF

SEQ ID NO: 464345 - protein, 13 aa, Homo sapiens
  CDR3 for alpha chain variable domain of TCR clone 232173 (TRAV3, TRAJ21)
CAVREPDFNKFYF

SEQ ID NO: 464346 - protein, 16 aa, Homo sapiens
  CDR3 for beta chain variable domain of TCR clone 232173 (TRBV5-1, TRBJ2-3)
CASSLGLAVFTDTQYF

SEQ ID NO: 464347 - protein, 17 aa, Homo sapiens
  CDR3 for alpha chain variable domain of TCR clone 232174 (TRAV3, TRAJ6)
CAVRDGPRAGGSYIPTF

SEQ ID NO: 464348 - protein, 20 aa, Homo sapiens
  CDR3 for beta chain variable domain of TCR clone 232174 (TRBV28, TRBJ2-1)
CARTPIGRSPGLAGGNEQFL

SEQ ID NO: 464349 - protein, 15 aa, Homo sapiens
  CDR3 for alpha chain variable domain of TCR clone 232175 (TRAV17, TRAJ56)
CSTDANTGANSKLTF

SEQ ID NO: 464350 - protein, 14 aa, Homo sapiens
  CDR3 for beta chain variable domain of TCR clone 232175 (TRBV19, TRBJ1-5)
CASSLGTGGQPQHF

SEQ ID NO: 464351 - protein, 14 aa, Homo sapiens
  CDR3 for alpha chain variable domain of TCR clone 232176 (TRAV12-2, TRAJ13)
CAVKKTGGYQKVTF

SEQ ID NO: 464352 - protein, 15 aa, Homo sapiens
  CDR3 for beta chain variable domain of TCR clone 232176 (TRBV2, TRBJ2-1)
CASSEEREGDNEQYF

SEQ ID NO: 464353 - protein, 16 aa, Homo sapiens
  CDR3 for alpha chain variable domain of TCR clone 232177 (TRAV30, TRAJ24)
CGTEIVYADSWGKFQF

SEQ ID NO: 464354 - protein, 14 aa, Homo sapiens
  CDR3 for beta chain variable domain of TCR clone 232177 (TRBV12-5, TRBJ2-5)
CASGSRTHQETQYF

SEQ ID NO: 464355 - protein, 13 aa, Homo sapiens
  CDR3 for alpha chain variable domain of TCR clone 232178 (TRAV30, TRAJ24)
CGTVTDSWVKLQF

SEQ ID NO: 464356 - protein, 14 aa, Homo sapiens
  CDR3 for beta chain variable domain of TCR clone 232178 (TRBV6-3, TRBJ2-2)
CASTYTPDTGELFF

SEQ ID NO: 464357 - protein, 15 aa, Homo sapiens
  CDR3 for alpha chain variable domain of TCR clone 232179 (TRAV12-2, TRAJ8)
CAVREENTGFQKLVF

SEQ ID NO: 464358 - protein, 16 aa, Homo sapiens
  CDR3 for beta chain variable domain of TCR clone 232179 (TRBV7-3, TRBJ2-2)
CASSLKLGTLSGELFF

SEQ ID NO: 464359 - protein, 11 aa, Homo sapiens
  CDR3 for alpha chain variable domain of TCR clone 232180 (TRAV3, TRAJ21)
CAVGNFNKFYF

SEQ ID NO: 464360 - protein, 14 aa, Homo sapiens
  CDR3 for beta chain variable domain of TCR clone 232180 (TRBV19, TRBJ2-1)
CASPTVVLSGEQFF

SEQ ID NO: 464361 - protein, 13 aa, Homo sapiens
  CDR3 for alpha chain variable domain of TCR clone 232181 (TRAV36/DV7, TRAJ37)
CAVFSSNTGKLIF

SEQ ID NO: 464362 - protein, 16 aa, Homo sapiens
  CDR3 for beta chain variable domain of TCR clone 232181 (TRBV7-2, TRBJ2-5)
CASSLAVSGRGETQYF

SEQ ID NO: 464363 - protein, 13 aa, Homo sapiens
  CDR3 for alpha chain variable domain of TCR clone 232182 (TRAV27, TRAJ56)
CAGKPGANSKLTF

SEQ ID NO: 464364 - protein, 17 aa, Homo sapiens
  CDR3 for beta chain variable domain of TCR clone 232182 (TRBV11-2, TRBJ2-3)
CQQLGGASRGAPNTQYF

SEQ ID NO: 464365 - protein, 16 aa, Homo sapiens
  CDR3 for alpha chain variable domain of TCR clone 232183 (TRAV8-6, TRAJ53)
CAVTSNSGGSNYKLTF

SEQ ID NO: 464366 - protein, 15 aa, Homo sapiens
  CDR3 for beta chain variable domain of TCR clone 232183 (TRBV20-1, TRBJ2-7)
CSARDRVSGMDEQYF

SEQ ID NO: 464367 - protein, 15 aa, Homo sapiens
  CDR3 for alpha chain variable domain of TCR clone 232184 (TRAV8-6, TRAJ23)
CAVREFYNQGGKLIF

SEQ ID NO: 464368 - protein, 15 aa, Homo sapiens
  CDR3 for beta chain variable domain of TCR clone 232184 (TRBV20-1, TRBJ2-1)
CSAISGTSGSNEQFF

SEQ ID NO: 464369 - protein, 18 aa, Homo sapiens
  CDR3 for alpha chain variable domain of TCR clone 232185 (TRAV26-2, TRAJ45)
CILRLWGYSGGGADGLTF

SEQ ID NO: 464370 - protein, 17 aa, Homo sapiens
  CDR3 for beta chain variable domain of TCR clone 232185 (TRBV28, TRBJ2-3)
CASSPTPAGGRVETQYF

SEQ ID NO: 464371 - protein, 14 aa, Homo sapiens
  CDR3 for alpha chain variable domain of TCR clone 232186 (TRAV12-2, TRAJ13)
CAVKKTGGYQKVPF

SEQ ID NO: 464372 - protein, 17 aa, Homo sapiens
  CDR3 for beta chain variable domain of TCR clone 232186 (TRBV20-1, TRBJ2-2)
CSASGSGQGGLTGELFF

SEQ ID NO: 464373 - protein, 14 aa, Homo sapiens
  CDR3 for alpha chain variable domain of TCR clone 232187 (TRAV21, TRAJ35)
CAVMPIGFGNVLHC

SEQ ID NO: 464374 - protein, 11 aa, Homo sapiens
  CDR3 for beta chain variable domain of TCR clone 232187 (TRBV7-9, TRBJ2-3)
CASSPPDTQYF

SEQ ID NO: 464375 - protein, 18 aa, Homo sapiens
  CDR3 for alpha chain variable domain of TCR clone 232188 (TRAV21, TRAJ52)
CAVRPSPAGCTSYGKLPF

SEQ ID NO: 464376 - protein, 17 aa, Homo sapiens
  CDR3 for beta chain variable domain of TCR clone 232188 (TRBV13, TRBJ2-3)
CASSLSRVAGGRNTQYF

SEQ ID NO: 464377 - protein, 13 aa, Homo sapiens
  CDR3 for alpha chain variable domain of TCR clone 232189 (TRAV20, TRAJ37)
CAGCSSNTDKLIF

SEQ ID NO: 464378 - protein, 14 aa, Homo sapiens
  CDR3 for beta chain variable domain of TCR clone 232189 (TRBV20-1, TRBJ2-5)
CSARDGRAGETQYF

SEQ ID NO: 464379 - protein, 13 aa, Homo sapiens
  CDR3 for alpha chain variable domain of TCR clone 232190 (TRAV12-3, TRAJ56)
CALATGANSKLTF

SEQ ID NO: 464380 - protein, 12 aa, Homo sapiens
  CDR3 for beta chain variable domain of TCR clone 232190 (TRBV10-2, TRBJ2-3)
CASSPELDTQYF

SEQ ID NO: 464381 - protein, 14 aa, Homo sapiens
  CDR3 for alpha chain variable domain of TCR clone 232191 (TRAV4, TRAJ26)
CLVGPHNYGQNFVF

SEQ ID NO: 464382 - protein, 17 aa, Homo sapiens
  CDR3 for beta chain variable domain of TCR clone 232191 (TRBV24-1, TRBJ2-1)
CATSDVSTCGTYNEQFF

SEQ ID NO: 464383 - protein, 15 aa, Homo sapiens
  CDR3 for alpha chain variable domain of TCR clone 232192 (TRAV25, TRAJ52)
CEGTSGGTSYGKLTF

SEQ ID NO: 464384 - protein, 16 aa, Homo sapiens
  CDR3 for beta chain variable domain of TCR clone 232192 (TRBV15, TRBJ1-2)
CATSRGPRTGGGGYTF

SEQ ID NO: 464385 - protein, 14 aa, Homo sapiens
  CDR3 for alpha chain variable domain of TCR clone 232193 (TRAV14/DV4, TRAJ34)
CAMREGRPHRQAHL

SEQ ID NO: 464386 - protein, 15 aa, Homo sapiens
  CDR3 for beta chain variable domain of TCR clone 232193 (TRBV6-3, TRBJ2-7)
CASSSPGTVFYEQYF

SEQ ID NO: 464387 - protein, 15 aa, Homo sapiens
  CDR3 for alpha chain variable domain of TCR clone 232194 (TRAV2, TRAJ9)
CAVAALNTGGFKTIF

SEQ ID NO: 464388 - protein, 20 aa, Homo sapiens
  CDR3 for beta chain variable domain of TCR clone 232194 (TRBV7-8, TRBJ2-2)
CASSHLFPGPTTHITGELFF

SEQ ID NO: 464389 - protein, 13 aa, Homo sapiens
  CDR3 for alpha chain variable domain of TCR clone 232195 (TRAV13-1, TRAJ39)
CSKYSNAGNMLTF

SEQ ID NO: 464390 - protein, 13 aa, Homo sapiens
  CDR3 for beta chain variable domain of TCR clone 232195 (TRBV19, TRBJ1-2)
CASSQGQVYGYTF

SEQ ID NO: 464391 - protein, 12 aa, Homo sapiens
  CDR3 for alpha chain variable domain of TCR clone 232196 (TRAV3, TRAJ43)
CAVRDPNNDMRF

SEQ ID NO: 464392 - protein, 17 aa, Homo sapiens
  CDR3 for beta chain variable domain of TCR clone 232196 (TRBV7-3, TRBJ2-3)
CASSLMNRMRGADTQYF

SEQ ID NO: 464393 - protein, 16 aa, Homo sapiens
  CDR3 for alpha chain variable domain of TCR clone 232197 (TRAV30, TRAJ24)
CGTEIVDADSWGRLQF

SEQ ID NO: 464394 - protein, 18 aa, Homo sapiens
  CDR3 for beta chain variable domain of TCR clone 232197 (TRBV12-4, TRBJ2-2)
CASSLVAGTRGRTGELFF

SEQ ID NO: 464395 - protein, 11 aa, Homo sapiens
  CDR3 for alpha chain variable domain of TCR clone 232198 (TRAV35, TRAJ30)
CAPGGDDKIIF

SEQ ID NO: 464396 - protein, 15 aa, Homo sapiens
  CDR3 for beta chain variable domain of TCR clone 232198 (TRBV9, TRBJ1-6)
CASSVAGTGDSPLLF

SEQ ID NO: 464397 - protein, 16 aa, Homo sapiens
  CDR3 for alpha chain variable domain of TCR clone 232199 (TRAV30, TRAJ24)
CGTEIVDADSWGIFQF

SEQ ID NO: 464398 - protein, 15 aa, Homo sapiens
  CDR3 for beta chain variable domain of TCR clone 232199 (TRBV7-9, TRBJ1-4)
CASSARTGGNEKLFF

SEQ ID NO: 464399 - protein, 14 aa, Homo sapiens
  CDR3 for alpha chain variable domain of TCR clone 232200 (TRAV12-2, TRAJ13)
CAVKKTGGYQKGNF

SEQ ID NO: 464400 - protein, 12 aa, Homo sapiens
  CDR3 for beta chain variable domain of TCR clone 232200 (TRBV12-4, TRBJ1-2)
CASSFIWLHLRF

SEQ ID NO: 464401 - protein, 14 aa, Homo sapiens
  CDR3 for alpha chain variable domain of TCR clone 232201 (TRAV1-2, TRAJ16)
CAVNRFSDGQKLLF

SEQ ID NO: 464402 - protein, 16 aa, Homo sapiens
  CDR3 for beta chain variable domain of TCR clone 232201 (TRBV12-4, TRBJ2-5)
CASSFSVRGRQETQYF

SEQ ID NO: 464403 - protein, 13 aa, Homo sapiens
  CDR3 for alpha chain variable domain of TCR clone 232202 (TRAV13-1, TRAJ49)
CAASIGTGNQFYF

SEQ ID NO: 464404 - protein, 15 aa, Homo sapiens
  CDR3 for beta chain variable domain of TCR clone 232202 (TRBV27, TRBJ2-1)
CASSNGGGSSNEQFF

SEQ ID NO: 464405 - protein, 12 aa, Homo sapiens
  CDR3 for alpha chain variable domain of TCR clone 232203 (TRAV13-2, TRAJ23)
CAERHRGGKLIF

SEQ ID NO: 464406 - protein, 13 aa, Homo sapiens
  CDR3 for beta chain variable domain of TCR clone 232203 (TRBV6-3, TRBJ2-1)
CASSYDNYNEQFF

SEQ ID NO: 464407 - protein, 13 aa, Homo sapiens
  CDR3 for alpha chain variable domain of TCR clone 232204 (TRAV12-2, TRAJ6)
CAARGGGSYIPTF

SEQ ID NO: 464408 - protein, 12 aa, Homo sapiens
  CDR3 for beta chain variable domain of TCR clone 232204 (TRBV29-1, TRBJ2-3)
CSVTGGADTQYF

SEQ ID NO: 464409 - protein, 11 aa, Homo sapiens
  CDR3 for alpha chain variable domain of TCR clone 232205 (TRAV2, TRAJ13)
CASGGYQKVTF

SEQ ID NO: 464410 - protein, 13 aa, Homo sapiens
  CDR3 for beta chain variable domain of TCR clone 232205 (TRBV6-9, TRBJ2-5)
CASKGDGRRTQYF

SEQ ID NO: 464411 - protein, 14 aa, Homo sapiens
  CDR3 for alpha chain variable domain of TCR clone 232206 (TRAV12-2, TRAJ3)
CAVSLYSSASKIIF

SEQ ID NO: 464412 - protein, 15 aa, Homo sapiens
  CDR3 for beta chain variable domain of TCR clone 232206 (TRBV19, TRBJ2-1)
CASSIGLAGWDEQFF

SEQ ID NO: 464413 - protein, 14 aa, Homo sapiens
  CDR3 for alpha chain variable domain of TCR clone 232207 (TRAV17, TRAJ15)
CATDRGQAGTALIF

SEQ ID NO: 464414 - protein, 17 aa, Homo sapiens
  CDR3 for beta chain variable domain of TCR clone 232207 (TRBV29-1, TRBJ2-1)
CSVVGLAGAYSYNEQFF

SEQ ID NO: 464415 - protein, 13 aa, Homo sapiens
  CDR3 for alpha chain variable domain of TCR clone 232208 (TRAV13-1, TRAJ43)
CAASLSNNNDMRF

SEQ ID NO: 464416 - protein, 17 aa, Homo sapiens
  CDR3 for beta chain variable domain of TCR clone 232208 (TRBV7-3, TRBJ2-3)
RASSLMKRMRGADTQYF

SEQ ID NO: 464417 - protein, 19 aa, Homo sapiens
  CDR3 for alpha chain variable domain of TCR clone 232209 (TRAV26-1, TRAJ52)
CIVRAQRNAGGTSYGKLTF

SEQ ID NO: 464418 - protein, 15 aa, Homo sapiens
  CDR3 for beta chain variable domain of TCR clone 232209 (TRBV29-1, TRBJ2-1)
CSGRDRKSSYNEQFF

SEQ ID NO: 464419 - protein, 15 aa, Homo sapiens
  CDR3 for alpha chain variable domain of TCR clone 232210 (TRAV12-2, TRAJ9)
CAVNNEGTGGFKTIF

SEQ ID NO: 464420 - protein, 14 aa, Homo sapiens
  CDR3 for beta chain variable domain of TCR clone 232210 (TRBV4-1, TRBJ1-4)
CASSQERKNEKLFF

SEQ ID NO: 464421 - protein, 17 aa, Homo sapiens
  CDR3 for alpha chain variable domain of TCR clone 232211 (TRAV3, TRAJ38)
CAVRDCLNAGNNRKLIW

SEQ ID NO: 464422 - protein, 15 aa, Homo sapiens
  CDR3 for beta chain variable domain of TCR clone 232211 (TRBV6-5, TRBJ2-1)
CASSYDAGAGNEQFF

SEQ ID NO: 464423 - protein, 13 aa, Homo sapiens
  CDR3 for alpha chain variable domain of TCR clone 232212 (TRAV1-1, TRAJ9)
CAVKNTGGFKTIF

SEQ ID NO: 464424 - protein, 14 aa, Homo sapiens
  CDR3 for beta chain variable domain of TCR clone 232212 (TRBV12-5, TRBJ2-5)
CASGSRTHQETQYF

SEQ ID NO: 464425 - protein, 15 aa, Homo sapiens
  CDR3 for alpha chain variable domain of TCR clone 232213 (TRAV3, TRAJ22)
CAVRDRGGSARQLTF

SEQ ID NO: 464426 - protein, 15 aa, Homo sapiens
  CDR3 for beta chain variable domain of TCR clone 232213 (TRBV11-2, TRBJ2-1)
CASSKNRGLIYEQFF

SEQ ID NO: 464427 - protein, 10 aa, Homo sapiens
  CDR3 for alpha chain variable domain of TCR clone 232214 (TRAV1-2, TRAJ34)
CAVNTDKLIF

SEQ ID NO: 464428 - protein, 15 aa, Homo sapiens
  CDR3 for beta chain variable domain of TCR clone 232214 (TRBV27, TRBJ2-1)
CASSNGGGSSNEQFF

SEQ ID NO: 464429 - protein, 18 aa, Homo sapiens
  CDR3 for alpha chain variable domain of TCR clone 232215 (TRAV36/DV7, )
CALTDIQNPDPAVYQLRD

SEQ ID NO: 464430 - protein, 15 aa, Homo sapiens
  CDR3 for beta chain variable domain of TCR clone 232215 (TRBV11-2, TRBJ2-1)
CASSLGTSGLNEQFF

SEQ ID NO: 464431 - protein, 14 aa, Homo sapiens
  CDR3 for alpha chain variable domain of TCR clone 232216 (TRAV1-2, TRAJ16)
CAVNRFSDGQKLLF

SEQ ID NO: 464432 - protein, 15 aa, Homo sapiens
  CDR3 for beta chain variable domain of TCR clone 232216 (TRBV28, TRBJ1-3)
CASGATENSGNTIYF

SEQ ID NO: 464433 - protein, 12 aa, Homo sapiens
  CDR3 for alpha chain variable domain of TCR clone 232217 (TRAV12-3, TRAJ40)
CAMSSGTYKYIF

SEQ ID NO: 464434 - protein, 16 aa, Homo sapiens
  CDR3 for beta chain variable domain of TCR clone 232217 (TRBV12-4, TRBJ1-5)
CASSRPVGGSNQPQHF

SEQ ID NO: 464435 - protein, 13 aa, Homo sapiens
  CDR3 for alpha chain variable domain of TCR clone 232218 (TRAV35, TRAJ33)
CAGQLYGVYQLIW

SEQ ID NO: 464436 - protein, 11 aa, Homo sapiens
  CDR3 for beta chain variable domain of TCR clone 232218 (TRBV11-2, TRBJ2-2)
CASSLPGELFF

SEQ ID NO: 464437 - protein, 14 aa, Homo sapiens
  CDR3 for alpha chain variable domain of TCR clone 232219 (TRAV26-1, TRAJ49)
CIVRLTNTGNQFYF

SEQ ID NO: 464438 - protein, 14 aa, Homo sapiens
  CDR3 for beta chain variable domain of TCR clone 232219 (TRBV7-9, TRBJ2-3)
CASSLSTSTDTQYF

SEQ ID NO: 464439 - protein, 13 aa, Homo sapiens
  CDR3 for alpha chain variable domain of TCR clone 232220 (TRAV20, TRAJ49)
CAVQARTGNEFYF

SEQ ID NO: 464440 - protein, 11 aa, Homo sapiens
  CDR3 for beta chain variable domain of TCR clone 232220 (TRBV11-2, TRBJ1-1)
CASSINTEAFF

SEQ ID NO: 464441 - protein, 19 aa, Homo sapiens
  CDR3 for alpha chain variable domain of TCR clone 232221 (TRAV26-1, TRAJ52)
CIVRAHRNAGGTSYGKLTF

SEQ ID NO: 464442 - protein, 15 aa, Homo sapiens
  CDR3 for beta chain variable domain of TCR clone 232221 (TRBV29-1, TRBJ2-1)
CSGRHRKSSYNEQFF

SEQ ID NO: 464443 - protein, 15 aa, Homo sapiens
  CDR3 for alpha chain variable domain of TCR clone 232222 (TRAV8-3, TRAJ23)
CAVGDRYNQGGKLIF

SEQ ID NO: 464444 - protein, 12 aa, Homo sapiens
  CDR3 for beta chain variable domain of TCR clone 232222 (TRBV12-4, TRBJ2-7)
CASSLGGYEQYF

SEQ ID NO: 464445 - protein, 11 aa, Homo sapiens
  CDR3 for alpha chain variable domain of TCR clone 232223 (TRAV1-2, TRAJ20)
CAVSNEYKLSF

SEQ ID NO: 464446 - protein, 18 aa, Homo sapiens
  CDR3 for beta chain variable domain of TCR clone 232223 (TRBV20-1, TRBJ2-6)
CSAETTPTHGSGANVLTF

SEQ ID NO: 464447 - protein, 13 aa, Homo sapiens
  CDR3 for alpha chain variable domain of TCR clone 232224 (TRAV13-1, TRAJ49)
CAAMLYTGNQFYF

SEQ ID NO: 464448 - protein, 15 aa, Homo sapiens
  CDR3 for beta chain variable domain of TCR clone 232224 (TRBV12-4, TRBJ1-5)
CASTRGSVFGQPQHF

SEQ ID NO: 464449 - protein, 14 aa, Homo sapiens
  CDR3 for alpha chain variable domain of TCR clone 232225 (TRAV2, TRAJ3)
CAVRPYSSASKIIF

SEQ ID NO: 464450 - protein, 13 aa, Homo sapiens
  CDR3 for beta chain variable domain of TCR clone 232225 (TRBV11-3, TRBJ1-1)
CASSLGGNTEAFF

SEQ ID NO: 464451 - protein, 13 aa, Homo sapiens
  CDR3 for alpha chain variable domain of TCR clone 232226 (TRAV27, TRAJ13)
QELEFWGYQKVTF

SEQ ID NO: 464452 - protein, 12 aa, Homo sapiens
  CDR3 for beta chain variable domain of TCR clone 232226 (TRBV14, TRBJ2-5)
CASSQLKETQYF

SEQ ID NO: 464453 - protein, 14 aa, Homo sapiens
  CDR3 for alpha chain variable domain of TCR clone 232227 (TRAV12-2, TRAJ17)
CAVLFKAAGNKLTF

SEQ ID NO: 464454 - protein, 15 aa, Homo sapiens
  CDR3 for beta chain variable domain of TCR clone 232227 (TRBV5-5, TRBJ2-4)
CASSLETSFGNIQYF

SEQ ID NO: 464455 - protein, 14 aa, Homo sapiens
  CDR3 for alpha chain variable domain of TCR clone 232228 (TRAV1-2, TRAJ16)
CAVNRFSDGQKLLF

SEQ ID NO: 464456 - protein, 15 aa, Homo sapiens
  CDR3 for beta chain variable domain of TCR clone 232228 (TRBV28, TRBJ2-1)
CVSSLGTRLYNEQFF

SEQ ID NO: 464457 - protein, 12 aa, Homo sapiens
  CDR3 for alpha chain variable domain of TCR clone 232229 (TRAV12-3, TRAJ17)
CAMTLTGNKLTF

SEQ ID NO: 464458 - protein, 15 aa, Homo sapiens
  CDR3 for beta chain variable domain of TCR clone 232229 (TRBV19, TRBJ1-4)
CASSQYRETNEKLFF

SEQ ID NO: 464459 - protein, 14 aa, Homo sapiens
  CDR3 for alpha chain variable domain of TCR clone 232230 (TRAV8-1, TRAJ47)
CAVNAVGDGNKLVF

SEQ ID NO: 464460 - protein, 15 aa, Homo sapiens
  CDR3 for beta chain variable domain of TCR clone 232230 (TRBV3-1, TRBJ2-2)
CASSTTTGPTGELFF

SEQ ID NO: 464461 - protein, 14 aa, Homo sapiens
  CDR3 for alpha chain variable domain of TCR clone 232231 (TRAV12-3, TRAJ6)
CAMSATGGSYIPTF

SEQ ID NO: 464462 - protein, 16 aa, Homo sapiens
  CDR3 for beta chain variable domain of TCR clone 232231 (TRBV4-2, TRBJ2-1)
CASSPRAGRGANEQFC

SEQ ID NO: 464463 - protein, 15 aa, Homo sapiens
  CDR3 for alpha chain variable domain of TCR clone 232232 (TRAV26-1, TRAJ29)
CIVRVEGSGNTPLVF

SEQ ID NO: 464464 - protein, 15 aa, Homo sapiens
  CDR3 for beta chain variable domain of TCR clone 232232 (TRBV7-9, TRBJ1-5)
CASSQGHQPNQTQYF

SEQ ID NO: 464465 - protein, 13 aa, Homo sapiens
  CDR3 for alpha chain variable domain of TCR clone 232233 (TRAV13-2, TRAJ5)
CAESDTGRRALTF

SEQ ID NO: 464466 - protein, 14 aa, Homo sapiens
  CDR3 for beta chain variable domain of TCR clone 232233 (TRBV2, TRBJ1-1)
CASTKVGENTEAFF

SEQ ID NO: 464467 - protein, 12 aa, Homo sapiens
  CDR3 for alpha chain variable domain of TCR clone 232234 (TRAV2, TRAJ26)
CAGSPGRLWSEF

SEQ ID NO: 464468 - protein, 13 aa, Homo sapiens
  CDR3 for beta chain variable domain of TCR clone 232234 (TRBV7-9, TRBJ1-2)
CASSLKQNYGYTS

SEQ ID NO: 464469 - protein, 14 aa, Homo sapiens
  CDR3 for alpha chain variable domain of TCR clone 232235 (TRAV29/DV5, TRAJ28)
CAARAGAGSYQLTF

SEQ ID NO: 464470 - protein, 13 aa, Homo sapiens
  CDR3 for beta chain variable domain of TCR clone 232235 (TRBV7-2, TRBJ1-5)
CASSFARKQPQHF

SEQ ID NO: 464471 - protein, 14 aa, Homo sapiens
  CDR3 for alpha chain variable domain of TCR clone 232236 (TRAV13-1, TRAJ44)
CAAKATGTASKLTF

SEQ ID NO: 464472 - protein, 15 aa, Homo sapiens
  CDR3 for beta chain variable domain of TCR clone 232236 (TRBV7-6, TRBJ1-5)
CASSQSSGINQPQHF

SEQ ID NO: 464473 - protein, 16 aa, Homo sapiens
  CDR3 for alpha chain variable domain of TCR clone 232237 (TRAV3, TRAJ10)
CAVRDMRAGGGNKLTF

SEQ ID NO: 464474 - protein, 16 aa, Homo sapiens
  CDR3 for beta chain variable domain of TCR clone 232237 (TRBV12-4, TRBJ1-5)
CASSRPVRGSNQPQHF

SEQ ID NO: 464475 - protein, 17 aa, Homo sapiens
  CDR3 for alpha chain variable domain of TCR clone 232238 (TRAV12-2, TRAJ52)
CAVNPYAGGTSYGKLTF

SEQ ID NO: 464476 - protein, 15 aa, Homo sapiens
  CDR3 for beta chain variable domain of TCR clone 232238 (TRBV7-2, TRBJ2-1)
CASSSGLAGGNEQFF

SEQ ID NO: 464477 - protein, 18 aa, Homo sapiens
  CDR3 for alpha chain variable domain of TCR clone 232239 (TRAV26-1, TRAJ23)
CIVRVGLEVWNQAGKLIF

SEQ ID NO: 464478 - protein, 16 aa, Homo sapiens
  CDR3 for beta chain variable domain of TCR clone 232239 (TRBV12-4, TRBJ2-5)
CASSFFVRGRQETQYF

SEQ ID NO: 464479 - protein, 14 aa, Homo sapiens
  CDR3 for alpha chain variable domain of TCR clone 232240 (TRAV13-1, TRAJ40)
CAASMTSGTYKYIF

SEQ ID NO: 464480 - protein, 15 aa, Homo sapiens
  CDR3 for beta chain variable domain of TCR clone 232240 (TRBV7-3, TRBJ2-1)
CASSPTGGGEVVQFF

SEQ ID NO: 464481 - protein, 13 aa, Homo sapiens
  CDR3 for alpha chain variable domain of TCR clone 232241 (TRAV27, TRAJ49)
CAPRPYTGNQFYF

SEQ ID NO: 464482 - protein, 16 aa, Homo sapiens
  CDR3 for beta chain variable domain of TCR clone 232241 (TRBV4-1, TRBJ1-2)
CSSSHDAGQVLYGYTF

SEQ ID NO: 464483 - protein, 15 aa, Homo sapiens
  CDR3 for alpha chain variable domain of TCR clone 232242 (TRAV26-1, TRAJ44)
RIVRIGTGTASKLTF

SEQ ID NO: 464484 - protein, 15 aa, Homo sapiens
  CDR3 for beta chain variable domain of TCR clone 232242 (TRBV7-6, TRBJ2-1)
CASGSLAGEGNEQFF

SEQ ID NO: 464485 - protein, 13 aa, Homo sapiens
  CDR3 for alpha chain variable domain of TCR clone 232243 (TRAV12-1, TRAJ29)
CVVRNSGNTPHVF

SEQ ID NO: 464486 - protein, 14 aa, Homo sapiens
  CDR3 for beta chain variable domain of TCR clone 232243 (TRBV7-2, TRBJ2-7)
CASRSQGAAYEQYF

SEQ ID NO: 464487 - protein, 15 aa, Homo sapiens
  CDR3 for alpha chain variable domain of TCR clone 232244 (TRAV3, TRAJ5)
CAVRDFDTGRRALTF

SEQ ID NO: 464488 - protein, 13 aa, Homo sapiens
  CDR3 for beta chain variable domain of TCR clone 232244 (TRBV12-4, TRBJ2-7)
CASSPAETYEQYF

SEQ ID NO: 464489 - protein, 15 aa, Homo sapiens
  CDR3 for alpha chain variable domain of TCR clone 232245 (TRAV13-1, TRAJ17)
CAASIERAAGNKLTF

SEQ ID NO: 464490 - protein, 18 aa, Homo sapiens
  CDR3 for beta chain variable domain of TCR clone 232245 (TRBV7-3, TRBJ2-1)
CASSLTLASGRAMVSSSS

SEQ ID NO: 464491 - protein, 14 aa, Homo sapiens
  CDR3 for alpha chain variable domain of TCR clone 232246 (TRAV13-1, TRAJ40)
CAASRASGTYEYIF

SEQ ID NO: 464492 - protein, 13 aa, Homo sapiens
  CDR3 for beta chain variable domain of TCR clone 232246 (TRBV29-1, TRBJ2-7)
CSVGRTGGYEQYF

SEQ ID NO: 464493 - protein, 16 aa, Homo sapiens
  CDR3 for alpha chain variable domain of TCR clone 232247 (TRAV17, TRAJ22)
CATDAISSGSAMQLTF

SEQ ID NO: 464494 - protein, 15 aa, Homo sapiens
  CDR3 for beta chain variable domain of TCR clone 232247 (TRBV5-1, TRBJ2-1)
CASSPPRAPYNEQFF

SEQ ID NO: 464495 - protein, 14 aa, Homo sapiens
  CDR3 for alpha chain variable domain of TCR clone 232248 (TRAV1-2, TRAJ8)
CAVREDTGFQKLVF

SEQ ID NO: 464496 - protein, 15 aa, Homo sapiens
  CDR3 for beta chain variable domain of TCR clone 232248 (TRBV5-7, TRBJ2-7)
CASSLPGQVFYEQYF

SEQ ID NO: 464497 - protein, 16 aa, Homo sapiens
  CDR3 for alpha chain variable domain of TCR clone 232249 (TRAV30, TRAJ24)
CGTEIVDADSCGKFPF

SEQ ID NO: 464498 - protein, 19 aa, Homo sapiens
  CDR3 for beta chain variable domain of TCR clone 232249 (TRBV25-1, TRBJ2-2)
CAILVYRVDRGRKTGELFF

SEQ ID NO: 464499 - protein, 15 aa, Homo sapiens
  CDR3 for alpha chain variable domain of TCR clone 232250 (TRAV23/DV6, TRAJ37)
CAAGEGSSNTGKLCF

SEQ ID NO: 464500 - protein, 17 aa, Homo sapiens
  CDR3 for beta chain variable domain of TCR clone 232250 (TRBV20-1, TRBJ2-7)
CSATRAGGVAGVEEQYF

SEQ ID NO: 464501 - protein, 14 aa, Homo sapiens
  CDR3 for alpha chain variable domain of TCR clone 232251 (TRAV12-2, TRAJ45)
CAVNIGGGADGLTF

SEQ ID NO: 464502 - protein, 13 aa, Homo sapiens
  CDR3 for beta chain variable domain of TCR clone 232251 (TRBV19, TRBJ2-2)
CASGIRSTGELFF

SEQ ID NO: 464503 - protein, 14 aa, Homo sapiens
  CDR3 for alpha chain variable domain of TCR clone 232252 (TRAV30, TRAJ33)
CGTERRISNYQLIW

SEQ ID NO: 464504 - protein, 16 aa, Homo sapiens
  CDR3 for beta chain variable domain of TCR clone 232252 (TRBV7-3, TRBJ2-2)
CASSLKRGTLSGELFF

SEQ ID NO: 464505 - protein, 15 aa, Homo sapiens
  CDR3 for alpha chain variable domain of TCR clone 232253 (TRAV12-1, TRAJ44)
CVVDTPPGTASKLTF

SEQ ID NO: 464506 - protein, 14 aa, Homo sapiens
  CDR3 for beta chain variable domain of TCR clone 232253 (TRBV7-9, TRBJ2-1)
CASSPRDSLYEQFF

SEQ ID NO: 464507 - protein, 14 aa, Homo sapiens
  CDR3 for alpha chain variable domain of TCR clone 232254 (TRAV8-4, TRAJ9)
CAVRINTGGFKTIF

SEQ ID NO: 464508 - protein, 15 aa, Homo sapiens
  CDR3 for beta chain variable domain of TCR clone 232254 (TRBV10-2, TRBJ2-6)
CASSEQGTGAYVLTF

SEQ ID NO: 464509 - protein, 18 aa, Homo sapiens
  CDR3 for alpha chain variable domain of TCR clone 232255 (TRAV29/DV5, TRAJ37)
CSVLLCSEGSGNTGKLIF

SEQ ID NO: 464510 - protein, 14 aa, Homo sapiens
  CDR3 for beta chain variable domain of TCR clone 232255 (TRBV5-1, TRBJ1-1)
CASSLAVGIGEAFF

SEQ ID NO: 464511 - protein, 13 aa, Homo sapiens
  CDR3 for alpha chain variable domain of TCR clone 232256 (TRAV21, TRAJ27)
CAARPGNAGKSTF

SEQ ID NO: 464512 - protein, 13 aa, Homo sapiens
  CDR3 for beta chain variable domain of TCR clone 232256 (TRBV18, TRBJ2-7)
CASQSGGGYEQYY

SEQ ID NO: 464513 - protein, 15 aa, Homo sapiens
  CDR3 for alpha chain variable domain of TCR clone 232257 (TRAV13-1, TRAJ32)
CAASIYGGATNKLIF

SEQ ID NO: 464514 - protein, 16 aa, Homo sapiens
  CDR3 for beta chain variable domain of TCR clone 232257 (TRBV6-1, TRBJ2-1)
CASILRQGSSYNEQFF

SEQ ID NO: 464515 - protein, 13 aa, Homo sapiens
  CDR3 for alpha chain variable domain of TCR clone 232258 (TRAV12-3, TRAJ33)
CAMSVNSNYQLIW

SEQ ID NO: 464516 - protein, 12 aa, Homo sapiens
  CDR3 for beta chain variable domain of TCR clone 232258 (TRBV11-2, TRBJ2-4)
CASSSASGSEYF

SEQ ID NO: 464517 - protein, 14 aa, Homo sapiens
  CDR3 for alpha chain variable domain of TCR clone 232259 (TRAV1-2, TRAJ8)
CAVREDTGFQKLVF

SEQ ID NO: 464518 - protein, 13 aa, Homo sapiens
  CDR3 for beta chain variable domain of TCR clone 232259 (TRBV24-1, TRBJ2-2)
CATSEWSTGELFF

SEQ ID NO: 464519 - protein, 12 aa, Homo sapiens
  CDR3 for alpha chain variable domain of TCR clone 232260 (TRAV27, TRAJ58)
WAGARDTSRLTF

SEQ ID NO: 464520 - protein, 14 aa, Homo sapiens
  CDR3 for beta chain variable domain of TCR clone 232260 (TRBV7-3, TRBJ2-1)
CASSLGTSANEQFF

SEQ ID NO: 464521 - protein, 15 aa, Homo sapiens
  CDR3 for alpha chain variable domain of TCR clone 232261 (TRAV14/DV4, TRAJ10)
CAMRELTGGGNKLTF

SEQ ID NO: 464522 - protein, 16 aa, Homo sapiens
  CDR3 for beta chain variable domain of TCR clone 232261 (TRBV20-1, TRBJ1-1)
CSARALTQGMNTEAFF

SEQ ID NO: 464523 - protein, 12 aa, Homo sapiens
  CDR3 for alpha chain variable domain of TCR clone 232262 (TRAV29/DV5, TRAJ34)
CAARHNTDKLIL

SEQ ID NO: 464524 - protein, 13 aa, Homo sapiens
  CDR3 for beta chain variable domain of TCR clone 232262 (TRBV10-2, TRBJ2-7)
CASGASGGYEQYF

SEQ ID NO: 464525 - protein, 16 aa, Homo sapiens
  CDR3 for alpha chain variable domain of TCR clone 232263 (TRAV12-3, TRAJ53)
CAMSPGSGGSNYKLNF

SEQ ID NO: 464526 - protein, 11 aa, Homo sapiens
  CDR3 for beta chain variable domain of TCR clone 232263 (TRBV29-1, TRBJ2-5)
GSEDRTGTQYF

SEQ ID NO: 464527 - protein, 13 aa, Homo sapiens
  CDR3 for alpha chain variable domain of TCR clone 232264 (TRAV3, TRAJ20)
CAVRPLNDYKLSF

SEQ ID NO: 464528 - protein, 12 aa, Homo sapiens
  CDR3 for beta chain variable domain of TCR clone 232264 (TRBV12-4, TRBJ2-3)
CASSTLPDTQYF

SEQ ID NO: 464529 - protein, 12 aa, Homo sapiens
  CDR3 for alpha chain variable domain of TCR clone 232265 (TRAV12-2, TRAJ9)
CAVNTGGFKTIF

SEQ ID NO: 464530 - protein, 16 aa, Homo sapiens
  CDR3 for beta chain variable domain of TCR clone 232265 (TRBV12-5, TRBJ2-5)
YASGPRTSGNQETQYF

SEQ ID NO: 464531 - protein, 12 aa, Homo sapiens
  CDR3 for alpha chain variable domain of TCR clone 232266 (TRAV3, TRAJ20)
CAVRDPDYKLIF

SEQ ID NO: 464532 - protein, 13 aa, Homo sapiens
  CDR3 for beta chain variable domain of TCR clone 232266 (TRBV9, TRBJ2-1)
CASSVGQGGEQFF

SEQ ID NO: 464533 - protein, 14 aa, Homo sapiens
  CDR3 for alpha chain variable domain of TCR clone 232267 (TRAV1-1, TRAJ23)
CAVKAYNQGGKLIF

SEQ ID NO: 464534 - protein, 15 aa, Homo sapiens
  CDR3 for beta chain variable domain of TCR clone 232267 (TRBV5-1, TRBJ2-1)
CASSPPRAPYNEQFF

SEQ ID NO: 464535 - protein, 13 aa, Homo sapiens
  CDR3 for alpha chain variable domain of TCR clone 232268 (TRAV21, TRAJ27)
CAARPGSAGKSTF

SEQ ID NO: 464536 - protein, 14 aa, Homo sapiens
  CDR3 for beta chain variable domain of TCR clone 232268 (TRBV7-6, TRBJ2-3)
CASSLGTVTDMQYF

SEQ ID NO: 464537 - protein, 15 aa, Homo sapiens
  CDR3 for alpha chain variable domain of TCR clone 232269 (TRAV38-1, TRAJ57)
CAFMDSQGGSEKLVF

SEQ ID NO: 464538 - protein, 12 aa, Homo sapiens
  CDR3 for beta chain variable domain of TCR clone 232269 (TRBV7-9, TRBJ1-4)
CASSTDREKLFF

SEQ ID NO: 464539 - protein, 13 aa, Homo sapiens
  CDR3 for alpha chain variable domain of TCR clone 232270 (TRAV3, TRAJ27)
CAVRPLGAGKSTV

SEQ ID NO: 464540 - protein, 13 aa, Homo sapiens
  CDR3 for beta chain variable domain of TCR clone 232270 (TRBV7-9, TRBJ2-3)
CASSPGYTDTQYF

SEQ ID NO: 464541 - protein, 14 aa, Homo sapiens
  CDR3 for alpha chain variable domain of TCR clone 232271 (TRAV12-3, TRAJ10)
SHLPLTGGGNKLIF

SEQ ID NO: 464542 - protein, 11 aa, Homo sapiens
  CDR3 for beta chain variable domain of TCR clone 232271 (TRBV7-8, TRBJ2-7)
CASSLSLEQYF

SEQ ID NO: 464543 - protein, 15 aa, Homo sapiens
  CDR3 for alpha chain variable domain of TCR clone 232272 (TRAV13-1, TRAJ48)
CAASGANFGNEKLTF

SEQ ID NO: 464544 - protein, 13 aa, Homo sapiens
  CDR3 for beta chain variable domain of TCR clone 232272 (TRBV12-4, TRBJ2-2)
CASSITGSGELFF

SEQ ID NO: 464545 - protein, 16 aa, Homo sapiens
  CDR3 for alpha chain variable domain of TCR clone 232273 (TRAV17, TRAJ17)
CATALQEEAAGNKLTL

SEQ ID NO: 464546 - protein, 12 aa, Homo sapiens
  CDR3 for beta chain variable domain of TCR clone 232273 (TRBV4-2, TRBJ2-5)
CASGGAQETQYF

SEQ ID NO: 464547 - protein, 12 aa, Homo sapiens
  CDR3 for alpha chain variable domain of TCR clone 232274 (TRAV3, TRAJ43)
CAVRDPNNDMRF

SEQ ID NO: 464548 - protein, 13 aa, Homo sapiens
  CDR3 for beta chain variable domain of TCR clone 232274 (TRBV19, TRBJ1-2)
CASSVPGQDVYTF

SEQ ID NO: 464549 - protein, 17 aa, Homo sapiens
  CDR3 for alpha chain variable domain of TCR clone 232275 (TRAV1-1, TRAJ28)
CAVDTAYSGAGSYQLTF

SEQ ID NO: 464550 - protein, 14 aa, Homo sapiens
  CDR3 for beta chain variable domain of TCR clone 232275 (TRBV19, TRBJ2-1)
CASPTFVLSGEQFF

SEQ ID NO: 464551 - protein, 13 aa, Homo sapiens
  CDR3 for alpha chain variable domain of TCR clone 232276 (TRAV8-6, TRAJ50)
CAVIKTSYDKVIF

SEQ ID NO: 464552 - protein, 15 aa, Homo sapiens
  CDR3 for beta chain variable domain of TCR clone 232276 (TRBV7-2, TRBJ2-2)
CASRRPGQNTGELFC

SEQ ID NO: 464553 - protein, 13 aa, Homo sapiens
  CDR3 for alpha chain variable domain of TCR clone 232277 (TRAV13-1, TRAJ21)
CAASIYNFNKFYF

SEQ ID NO: 464554 - protein, 13 aa, Homo sapiens
  CDR3 for beta chain variable domain of TCR clone 232277 (TRBV20-1, TRBJ1-6)
CSAPLGVGSPLHF

SEQ ID NO: 464555 - protein, 12 aa, Homo sapiens
  CDR3 for alpha chain variable domain of TCR clone 232278 (TRAV16, TRAJ10)
CSRTGGGNKLTF

SEQ ID NO: 464556 - protein, 13 aa, Homo sapiens
  CDR3 for beta chain variable domain of TCR clone 232278 (TRBV7-3, TRBJ1-1)
CSSSQDWGAEAFF

SEQ ID NO: 464557 - protein, 14 aa, Homo sapiens
  CDR3 for alpha chain variable domain of TCR clone 232279 (TRAV29/DV5, TRAJ48)
CAAMAIFGNEKLTF

SEQ ID NO: 464558 - protein, 15 aa, Homo sapiens
  CDR3 for beta chain variable domain of TCR clone 232279 (TRBV7-2, TRBJ2-1)
CASTHGTGIYNEQFF

SEQ ID NO: 464559 - protein, 14 aa, Homo sapiens
  CDR3 for alpha chain variable domain of TCR clone 232280 (TRAV8-3, TRAJ7)
CAAIELYQNNRLAF

SEQ ID NO: 464560 - protein, 15 aa, Homo sapiens
  CDR3 for beta chain variable domain of TCR clone 232280 (TRBV3-1, TRBJ2-1)
CASSTGDTNYNEQFF

SEQ ID NO: 464561 - protein, 12 aa, Homo sapiens
  CDR3 for alpha chain variable domain of TCR clone 232281 (TRAV13-1, TRAJ9)
CASHTGGSKTIF

SEQ ID NO: 464562 - protein, 13 aa, Homo sapiens
  CDR3 for beta chain variable domain of TCR clone 232281 (TRBV12-4, TRBJ1-2)
CASSSGSKDGYTF

SEQ ID NO: 464563 - protein, 14 aa, Homo sapiens
  CDR3 for alpha chain variable domain of TCR clone 232282 (TRAV12-2, TRAJ44)
CAVNPAGTASKLTF

SEQ ID NO: 464564 - protein, 14 aa, Homo sapiens
  CDR3 for beta chain variable domain of TCR clone 232282 (TRBV20-1, TRBJ2-1)
CSAQIGGSANEQFF

SEQ ID NO: 464565 - protein, 14 aa, Homo sapiens
  CDR3 for alpha chain variable domain of TCR clone 232283 (TRAV12-2, TRAJ13)
CAVKKTGGYQKVIF

SEQ ID NO: 464566 - protein, 13 aa, Homo sapiens
  CDR3 for beta chain variable domain of TCR clone 232283 (TRBV4-2, TRBJ1-1)
CASSQAGNTEAFF

SEQ ID NO: 464567 - protein, 14 aa, Homo sapiens
  CDR3 for alpha chain variable domain of TCR clone 232284 (TRAV23/DV6, TRAJ4)
CAANLSGGYNKLLF

SEQ ID NO: 464568 - protein, 14 aa, Homo sapiens
  CDR3 for beta chain variable domain of TCR clone 232284 (TRBV2, TRBJ2-5)
CASSEVLAQETQYF

SEQ ID NO: 464569 - protein, 16 aa, Homo sapiens
  CDR3 for alpha chain variable domain of TCR clone 232285 (TRAV14/DV4, TRAJ15)
CAMREGPARAGTALIF

SEQ ID NO: 464570 - protein, 12 aa, Homo sapiens
  CDR3 for beta chain variable domain of TCR clone 232285 (TRBV28, TRBJ2-6)
CAIQAGANVLTF

SEQ ID NO: 464571 - protein, 23 aa, Homo sapiens
  CDR3 for alpha chain variable domain of TCR clone 232286 (TRAV12-2, TRAJ36)
SLLIRDSQPSDSATLERANNLFF

SEQ ID NO: 464572 - protein, 14 aa, Homo sapiens
  CDR3 for beta chain variable domain of TCR clone 232286 (TRBV2, TRBJ2-3)
CASSEGQNTDTQYF

SEQ ID NO: 464573 - protein, 15 aa, Homo sapiens
  CDR3 for alpha chain variable domain of TCR clone 232287 (TRAV38-1, TRAJ37)
CAFIHGSGNTGKLIF

SEQ ID NO: 464574 - protein, 15 aa, Homo sapiens
  CDR3 for beta chain variable domain of TCR clone 232287 (TRBV20-1, TRBJ1-1)
CSASRGVTGNTEAFF

SEQ ID NO: 464575 - protein, 15 aa, Homo sapiens
  CDR3 for alpha chain variable domain of TCR clone 232288 (TRAV12-1, TRAJ4)
CVVNPFSGGYNKLIC

SEQ ID NO: 464576 - protein, 13 aa, Homo sapiens
  CDR3 for beta chain variable domain of TCR clone 232288 (TRBV20-1, TRBJ1-2)
CSARGTADYGYTF

SEQ ID NO: 464577 - protein, 12 aa, Homo sapiens
  CDR3 for alpha chain variable domain of TCR clone 232289 (TRAV12-1, TRAJ23)
CVVNNQGGKLIF

SEQ ID NO: 464578 - protein, 16 aa, Homo sapiens
  CDR3 for beta chain variable domain of TCR clone 232289 (TRBV5-1, TRBJ2-5)
CASSLRRTSGQETQYF

SEQ ID NO: 464579 - protein, 15 aa, Homo sapiens
  CDR3 for alpha chain variable domain of TCR clone 232290 (TRAV8-2, TRAJ24)
CVVSDRTDSWGKLQF

SEQ ID NO: 464580 - protein, 15 aa, Homo sapiens
  CDR3 for beta chain variable domain of TCR clone 232290 (TRBV29-1, TRBJ2-7)
CSVEFCDRGSYEQYF

SEQ ID NO: 464581 - protein, 14 aa, Homo sapiens
  CDR3 for alpha chain variable domain of TCR clone 232291 (TRAV8-1, TRAJ29)
CAVNAGSGNTPLVF

SEQ ID NO: 464582 - protein, 14 aa, Homo sapiens
  CDR3 for beta chain variable domain of TCR clone 232291 (TRBV4-1, TRBJ2-2)
CASSQAVNTGELFF

SEQ ID NO: 464583 - protein, 15 aa, Homo sapiens
  CDR3 for alpha chain variable domain of TCR clone 232292 (TRAV17, TRAJ56)
CATEPFTGANSKLTV

SEQ ID NO: 464584 - protein, 15 aa, Homo sapiens
  CDR3 for beta chain variable domain of TCR clone 232292 (TRBV28, TRBJ1-5)
CASSRTGGYVQPQHF

SEQ ID NO: 464585 - protein, 14 aa, Homo sapiens
  CDR3 for alpha chain variable domain of TCR clone 232293 (TRAV12-2, TRAJ9)
CAMTPNTGGFKTIF

SEQ ID NO: 464586 - protein, 12 aa, Homo sapiens
  CDR3 for beta chain variable domain of TCR clone 232293 (TRBV19, TRBJ1-5)
CASSIAQQPQHF

SEQ ID NO: 464587 - protein, 15 aa, Homo sapiens
  CDR3 for alpha chain variable domain of TCR clone 232294 (TRAV8-2, TRAJ32)
CVVTRSSGATNKLIF

SEQ ID NO: 464588 - protein, 13 aa, Homo sapiens
  CDR3 for beta chain variable domain of TCR clone 232294 (TRBV4-1, TRBJ2-1)
CASSQAGGDEQFF

SEQ ID NO: 464589 - protein, 14 aa, Homo sapiens
  CDR3 for alpha chain variable domain of TCR clone 232295 (TRAV26-1, TRAJ22)
CIVRVSGSARQLAF

SEQ ID NO: 464590 - protein, 15 aa, Homo sapiens
  CDR3 for beta chain variable domain of TCR clone 232295 (TRBV27, TRBJ2-7)
CASSTAGTGSYEQYF

SEQ ID NO: 464591 - protein, 13 aa, Homo sapiens
  CDR3 for alpha chain variable domain of TCR clone 232296 (TRAV2, TRAJ40)
CAVVTSGTYKYIF

SEQ ID NO: 464592 - protein, 15 aa, Homo sapiens
  CDR3 for beta chain variable domain of TCR clone 232296 (TRBV28, TRBJ2-5)
CASSPPWSYQETQYF

SEQ ID NO: 464593 - protein, 12 aa, Homo sapiens
  CDR3 for alpha chain variable domain of TCR clone 232297 (TRAV21, TRAJ49)
CAVNGGGNQFYF

SEQ ID NO: 464594 - protein, 14 aa, Homo sapiens
  CDR3 for beta chain variable domain of TCR clone 232297 (TRBV18, TRBJ2-7)
CASSPRGGSYEQYF

SEQ ID NO: 464595 - protein, 11 aa, Homo sapiens
  CDR3 for alpha chain variable domain of TCR clone 232298 (TRAV2, TRAJ13)
CASGGYQKVTF

SEQ ID NO: 464596 - protein, 13 aa, Homo sapiens
  CDR3 for beta chain variable domain of TCR clone 232298 (TRBV19, TRBJ1-2)
CASSVPGQDGYTV

SEQ ID NO: 464597 - protein, 11 aa, Homo sapiens
  CDR3 for alpha chain variable domain of TCR clone 232299 (TRAV21, TRAJ34)
CAVTNTDKLVF

SEQ ID NO: 464598 - protein, 16 aa, Homo sapiens
  CDR3 for beta chain variable domain of TCR clone 232299 (TRBV18, TRBJ1-1)
CASSPGVGGRGGEAFF

SEQ ID NO: 464599 - protein, 15 aa, Homo sapiens
  CDR3 for alpha chain variable domain of TCR clone 232300 (TRAV3, TRAJ20)
CAVRDRKLSDYKLSF

SEQ ID NO: 464600 - protein, 15 aa, Homo sapiens
  CDR3 for beta chain variable domain of TCR clone 232300 (TRBV7-9, TRBJ1-6)
CASSSPGRGNSPLHF

SEQ ID NO: 464601 - protein, 17 aa, Homo sapiens
  CDR3 for alpha chain variable domain of TCR clone 232301 (TRAV3, TRAJ6)
CAVRDGPRAGGSYIPTF

SEQ ID NO: 464602 - protein, 13 aa, Homo sapiens
  CDR3 for beta chain variable domain of TCR clone 232301 (TRBV6-4, TRBJ2-1)
CASSVEREEEQFF

SEQ ID NO: 464603 - protein, 14 aa, Homo sapiens
  CDR3 for alpha chain variable domain of TCR clone 232302 (TRAV8-4, TRAJ47)
CAVSIMEYGNKLVF

SEQ ID NO: 464604 - protein, 16 aa, Homo sapiens
  CDR3 for beta chain variable domain of TCR clone 232302 (TRBV14, TRBJ1-2)
CASSQVPTTANYGYTF

SEQ ID NO: 464605 - protein, 14 aa, Homo sapiens
  CDR3 for alpha chain variable domain of TCR clone 232303 (TRAV38-1, TRAJ40)
CALRPASGTYKYIF

SEQ ID NO: 464606 - protein, 13 aa, Homo sapiens
  CDR3 for beta chain variable domain of TCR clone 232303 (TRBV10-3, TRBJ2-7)
CASKLAVNYEQYF

SEQ ID NO: 464607 - protein, 13 aa, Homo sapiens
  CDR3 for alpha chain variable domain of TCR clone 232304 (TRAV1-2, TRAJ9)
CAVLNTGCFKTIF

SEQ ID NO: 464608 - protein, 14 aa, Homo sapiens
  CDR3 for beta chain variable domain of TCR clone 232304 (TRBV5-1, TRBJ2-2)
CASSLGGGSGELFF

SEQ ID NO: 464609 - protein, 14 aa, Homo sapiens
  CDR3 for alpha chain variable domain of TCR clone 232305 (TRAV1-2, TRAJ16)
CAVNRFSDGQKLLF

SEQ ID NO: 464610 - protein, 14 aa, Homo sapiens
  CDR3 for beta chain variable domain of TCR clone 232305 (TRBV7-9, TRBJ1-4)
CATTEGEANEKLFF

SEQ ID NO: 464611 - protein, 17 aa, Homo sapiens
  CDR3 for alpha chain variable domain of TCR clone 232306 (TRAV3, TRAJ6)
CAVRDGPRAGGSYIPTF

SEQ ID NO: 464612 - protein, 14 aa, Homo sapiens
  CDR3 for beta chain variable domain of TCR clone 232306 (TRBV7-2, TRBJ2-7)
CASSPTTSFYEQYF

SEQ ID NO: 464613 - protein, 14 aa, Homo sapiens
  CDR3 for alpha chain variable domain of TCR clone 232307 (TRAV17, TRAJ9)
CATVTLGGGFKTIF

SEQ ID NO: 464614 - protein, 17 aa, Homo sapiens
  CDR3 for beta chain variable domain of TCR clone 232307 (TRBV7-2, TRBJ2-7)
CASSLGTGTSGRYEQYF

SEQ ID NO: 464615 - protein, 11 aa, Homo sapiens
  CDR3 for alpha chain variable domain of TCR clone 232308 (TRAV8-6, TRAJ34)
CAVWNTDKLIF

SEQ ID NO: 464616 - protein, 16 aa, Homo sapiens
  CDR3 for beta chain variable domain of TCR clone 232308 (TRBV5-1, TRBJ2-7)
CVSSYASTSSGGEQYF

SEQ ID NO: 464617 - protein, 13 aa, Homo sapiens
  CDR3 for alpha chain variable domain of TCR clone 232309 (TRAV17, TRAJ5)
CAPMDTGRRALTF

SEQ ID NO: 464618 - protein, 14 aa, Homo sapiens
  CDR3 for beta chain variable domain of TCR clone 232309 (TRBV19, TRBJ2-1)
CASPTFVVSGEQFF

SEQ ID NO: 464619 - protein, 16 aa, Homo sapiens
  CDR3 for alpha chain variable domain of TCR clone 232310 (TRAV14/DV4, TRAJ48)
CAMREGGNFGNEKLTF

SEQ ID NO: 464620 - protein, 13 aa, Homo sapiens
  CDR3 for beta chain variable domain of TCR clone 232310 (TRBV7-8, TRBJ2-7)
CASSLTGGREQYF

SEQ ID NO: 464621 - protein, 14 aa, Homo sapiens
  CDR3 for alpha chain variable domain of TCR clone 232311 (TRAV16, TRAJ58)
CALSLETSGSRLTF

SEQ ID NO: 464622 - protein, 15 aa, Homo sapiens
  CDR3 for beta chain variable domain of TCR clone 232311 (TRBV27, TRBJ2-1)
CASSLRAGIPGEQFF

SEQ ID NO: 464623 - protein, 12 aa, Homo sapiens
  CDR3 for alpha chain variable domain of TCR clone 232312 (TRAV12-3, TRAJ17)
CAMTLAGNKLTF

SEQ ID NO: 464624 - protein, 12 aa, Homo sapiens
  CDR3 for beta chain variable domain of TCR clone 232312 (TRBV28, TRBJ2-3)
CASSLYRDTQYF

SEQ ID NO: 464625 - protein, 13 aa, Homo sapiens
  CDR3 for alpha chain variable domain of TCR clone 232313 (TRAV13-1, TRAJ44)
CSKGDRTASKLTF

SEQ ID NO: 464626 - protein, 17 aa, Homo sapiens
  CDR3 for beta chain variable domain of TCR clone 232313 (TRBV7-3, TRBJ2-3)
RASSLMKRMRGADTQYF

SEQ ID NO: 464627 - protein, 14 aa, Homo sapiens
  CDR3 for alpha chain variable domain of TCR clone 232314 (TRAV13-1, TRAJ39)
CAASKNNAGNMLTF

SEQ ID NO: 464628 - protein, 15 aa, Homo sapiens
  CDR3 for beta chain variable domain of TCR clone 232314 (TRBV7-9, TRBJ1-6)
CASSSPGRGNSPLYF

SEQ ID NO: 464629 - protein, 15 aa, Homo sapiens
  CDR3 for alpha chain variable domain of TCR clone 232315 (TRAV3, TRAJ3)
CAVRDMSSSASKIIF

SEQ ID NO: 464630 - protein, 14 aa, Homo sapiens
  CDR3 for beta chain variable domain of TCR clone 232315 (TRBV19, TRBJ2-1)
CASPTFVLSCEQFF

SEQ ID NO: 464631 - protein, 16 aa, Homo sapiens
  CDR3 for alpha chain variable domain of TCR clone 232316 (TRAV27, TRAJ13)
CAGAKSDSWGYQTVTF

SEQ ID NO: 464632 - protein, 15 aa, Homo sapiens
  CDR3 for beta chain variable domain of TCR clone 232316 (TRBV29-1, TRBJ2-1)
CSVGRHALFYNEQFF

SEQ ID NO: 464633 - protein, 13 aa, Homo sapiens
  CDR3 for alpha chain variable domain of TCR clone 232317 (TRAV16, TRAJ34)
CALTCYNTDKLIF

SEQ ID NO: 464634 - protein, 13 aa, Homo sapiens
  CDR3 for beta chain variable domain of TCR clone 232317 (TRBV6-1, TRBJ2-1)
CASREDGGHEQFF

SEQ ID NO: 464635 - protein, 16 aa, Homo sapiens
  CDR3 for alpha chain variable domain of TCR clone 232318 (TRAV8-3, TRAJ8)
CAVPRDGNTGFQNLVF

SEQ ID NO: 464636 - protein, 14 aa, Homo sapiens
  CDR3 for beta chain variable domain of TCR clone 232318 (TRBV4-1, TRBJ2-2)
CASSQAVNTGELFF

SEQ ID NO: 464637 - protein, 15 aa, Homo sapiens
  CDR3 for alpha chain variable domain of TCR clone 232319 (TRAV17, TRAJ57)
CATGPSQGGSEKLVF

SEQ ID NO: 464638 - protein, 15 aa, Homo sapiens
  CDR3 for beta chain variable domain of TCR clone 232319 (TRBV9, TRBJ1-6)
CASSVAGTGDSPLHV

SEQ ID NO: 464639 - protein, 12 aa, Homo sapiens
  CDR3 for alpha chain variable domain of TCR clone 232320 (TRAV12-3, TRAJ40)
CAMSSGTYKYIF

SEQ ID NO: 464640 - protein, 14 aa, Homo sapiens
  CDR3 for beta chain variable domain of TCR clone 232320 (TRBV18, TRBJ2-1)
CASSPGTSETEQFF

SEQ ID NO: 464641 - protein, 16 aa, Homo sapiens
  CDR3 for alpha chain variable domain of TCR clone 232321 (TRAV3, TRAJ10)
CAVRDMRAGGGNKLTF

SEQ ID NO: 464642 - protein, 15 aa, Homo sapiens
  CDR3 for beta chain variable domain of TCR clone 232321 (TRBV11-2, TRBJ1-6)
CASTGFGTAVSPPHF

SEQ ID NO: 464643 - protein, 14 aa, Homo sapiens
  CDR3 for alpha chain variable domain of TCR clone 232322 (TRAV8-3, TRAJ6)
CAVGASGGSSIPTF

SEQ ID NO: 464644 - protein, 17 aa, Homo sapiens
  CDR3 for beta chain variable domain of TCR clone 232322 (TRBV18, TRBJ2-2)
CASSPSDPWQNTGELFF

SEQ ID NO: 464645 - protein, 12 aa, Homo sapiens
  CDR3 for alpha chain variable domain of TCR clone 232323 (TRAV13-2, TRAJ23)
CAERHRGGKLIF

SEQ ID NO: 464646 - protein, 13 aa, Homo sapiens
  CDR3 for beta chain variable domain of TCR clone 232323 (TRBV20-1, TRBJ2-2)
CSALSGGAGELFC

SEQ ID NO: 464647 - protein, 15 aa, Homo sapiens
  CDR3 for alpha chain variable domain of TCR clone 232324 (TRAV16, TRAJ16)
CALRGGGSDGQKLPF

SEQ ID NO: 464648 - protein, 15 aa, Homo sapiens
  CDR3 for beta chain variable domain of TCR clone 232324 (TRBV20-1, TRBJ2-7)
CSARDRVSGMDEQYF

SEQ ID NO: 464649 - protein, 18 aa, Homo sapiens
  CDR3 for alpha chain variable domain of TCR clone 232325 (TRAV8-6, TRAJ52)
CAVSRANACGTSYGKLTF

SEQ ID NO: 464650 - protein, 12 aa, Homo sapiens
  CDR3 for beta chain variable domain of TCR clone 232325 (TRBV14, TRBJ2-7)
CASSRLKGEQYF

SEQ ID NO: 464651 - protein, 11 aa, Homo sapiens
  CDR3 for alpha chain variable domain of TCR clone 232326 (TRAV26-2, TRAJ8)
CILTGFQKLVF

SEQ ID NO: 464652 - protein, 19 aa, Homo sapiens
  CDR3 for beta chain variable domain of TCR clone 232326 (TRBV20-1, TRBJ2-1)
CSARGETSGKSPQIDEQFF

SEQ ID NO: 464653 - protein, 14 aa, Homo sapiens
  CDR3 for alpha chain variable domain of TCR clone 232327 (TRAV1-2, TRAJ8)
CAVREVTGFQKLVF

SEQ ID NO: 464654 - protein, 13 aa, Homo sapiens
  CDR3 for beta chain variable domain of TCR clone 232327 (TRBV10-3, TRBJ1-2)
CAISERDSYGYTF

SEQ ID NO: 464655 - protein, 11 aa, Homo sapiens
  CDR3 for alpha chain variable domain of TCR clone 232328 (TRAV8-4, TRAJ34)
CAVSWTDKLIF

SEQ ID NO: 464656 - protein, 15 aa, Homo sapiens
  CDR3 for beta chain variable domain of TCR clone 232328 (TRBV11-2, TRBJ2-1)
CASSLTSGGYNEQFF

SEQ ID NO: 464657 - protein, 13 aa, Homo sapiens
  CDR3 for alpha chain variable domain of TCR clone 232329 (TRAV29/DV5, TRAJ31)
CAASRNNTARLRF

SEQ ID NO: 464658 - protein, 12 aa, Homo sapiens
  CDR3 for beta chain variable domain of TCR clone 232329 (TRBV14, TRBJ2-5)
CASSQLKETQYF

SEQ ID NO: 464659 - protein, 16 aa, Homo sapiens
  CDR3 for alpha chain variable domain of TCR clone 232330 (TRAV3, TRAJ37)
CAVRGKGSGNTGKLIF

SEQ ID NO: 464660 - protein, 16 aa, Homo sapiens
  CDR3 for beta chain variable domain of TCR clone 232330 (TRBV5-1, TRBJ2-3)
CASSLQGRVGADTQYF

SEQ ID NO: 464661 - protein, 16 aa, Homo sapiens
  CDR3 for alpha chain variable domain of TCR clone 232331 (TRAV3, TRAJ10)
CAVRDMRAGGGNKLAF

SEQ ID NO: 464662 - protein, 14 aa, Homo sapiens
  CDR3 for beta chain variable domain of TCR clone 232331 (TRBV25-1, TRBJ1-1)
CASTHLGGNTEAFF

SEQ ID NO: 464663 - protein, 15 aa, Homo sapiens
  CDR3 for alpha chain variable domain of TCR clone 232332 (TRAV26-1, TRAJ40)
CIVRAVPSGTYKYIF

SEQ ID NO: 464664 - protein, 14 aa, Homo sapiens
  CDR3 for beta chain variable domain of TCR clone 232332 (TRBV19, TRBJ2-1)
CASKGPGLANEQFF

SEQ ID NO: 464665 - protein, 15 aa, Homo sapiens
  CDR3 for alpha chain variable domain of TCR clone 232333 (TRAV12-3, TRAJ53)
CAVNGGGGSNYKLTF

SEQ ID NO: 464666 - protein, 14 aa, Homo sapiens
  CDR3 for beta chain variable domain of TCR clone 232333 (TRBV19, TRBJ2-2)
CASSTLHRSGELFF

SEQ ID NO: 464667 - protein, 11 aa, Homo sapiens
  CDR3 for alpha chain variable domain of TCR clone 232334 (TRAV2, TRAJ13)
CASGGYQKVTF

SEQ ID NO: 464668 - protein, 14 aa, Homo sapiens
  CDR3 for beta chain variable domain of TCR clone 232334 (TRBV18, TRBJ1-2)
CASSPDRVVYCYTF

SEQ ID NO: 464669 - protein, 15 aa, Homo sapiens
  CDR3 for alpha chain variable domain of TCR clone 232335 (TRAV2, TRAJ9)
CAVAALNTGGFKTIF

SEQ ID NO: 464670 - protein, 14 aa, Homo sapiens
  CDR3 for beta chain variable domain of TCR clone 232335 (TRBV7-8, TRBJ2-5)
CASSAAGGQETQYF

SEQ ID NO: 464671 - protein, 14 aa, Homo sapiens
  CDR3 for alpha chain variable domain of TCR clone 232336 (TRAV16, TRAJ33)
CALSAMDSNYQLIW

SEQ ID NO: 464672 - protein, 15 aa, Homo sapiens
  CDR3 for beta chain variable domain of TCR clone 232336 (TRBV6-3, TRBJ2-2)
CASSFLATLTGELFF

SEQ ID NO: 464673 - protein, 15 aa, Homo sapiens
  CDR3 for alpha chain variable domain of TCR clone 232337 (TRAV2, TRAJ22)
CAVPSRGGSARQLTF

SEQ ID NO: 464674 - protein, 14 aa, Homo sapiens
  CDR3 for beta chain variable domain of TCR clone 232337 (TRBV7-6, TRBJ2-3)
CASSVGTVTDTQYF

SEQ ID NO: 464675 - protein, 14 aa, Homo sapiens
  CDR3 for alpha chain variable domain of TCR clone 232338 (TRAV23/DV6, TRAJ27)
CAASRDTNAGKSTF

SEQ ID NO: 464676 - protein, 12 aa, Homo sapiens
  CDR3 for beta chain variable domain of TCR clone 232338 (TRBV5-1, TRBJ2-7)
CASSLDSYEQYF

SEQ ID NO: 464677 - protein, 12 aa, Homo sapiens
  CDR3 for alpha chain variable domain of TCR clone 232339 (TRAV3, TRAJ20)
CAVRDGDYKLSF

SEQ ID NO: 464678 - protein, 16 aa, Homo sapiens
  CDR3 for beta chain variable domain of TCR clone 232339 (TRBV15, TRBJ2-7)
CATSRDRGRRRGEQYF

SEQ ID NO: 464679 - protein, 13 aa, Homo sapiens
  CDR3 for alpha chain variable domain of TCR clone 232340 (TRAV36/DV7, TRAJ49)
CAGDSNTGKQFYF

SEQ ID NO: 464680 - protein, 12 aa, Homo sapiens
  CDR3 for beta chain variable domain of TCR clone 232340 (TRBV11-2, TRBJ2-2)
CASSLGGGELFF

SEQ ID NO: 464681 - protein, 14 aa, Homo sapiens
  CDR3 for alpha chain variable domain of TCR clone 232341 (TRAV12-2, TRAJ17)
CAVLFKAAGNKLTF

SEQ ID NO: 464682 - protein, 16 aa, Homo sapiens
  CDR3 for beta chain variable domain of TCR clone 232341 (TRBV5-1, TRBJ2-7)
CASSVTSGSSTYEQYF

SEQ ID NO: 464683 - protein, 18 aa, Homo sapiens
  CDR3 for alpha chain variable domain of TCR clone 232342 (TRAV3, TRAJ17)
CAVRARRGGRSCRQQANF

SEQ ID NO: 464684 - protein, 14 aa, Homo sapiens
  CDR3 for beta chain variable domain of TCR clone 232342 (TRBV4-1, TRBJ2-2)
CASSQAVNIGELFF

SEQ ID NO: 464685 - protein, 18 aa, Homo sapiens
  CDR3 for alpha chain variable domain of TCR clone 232343 (TRAV13-1, TRAJ52)
CAASKRSAGGTSYGKLTF

SEQ ID NO: 464686 - protein, 15 aa, Homo sapiens
  CDR3 for beta chain variable domain of TCR clone 232343 (TRBV7-2, TRBJ1-2)
CASSPRAGWNYGDTF

SEQ ID NO: 464687 - protein, 13 aa, Homo sapiens
  CDR3 for alpha chain variable domain of TCR clone 232344 (TRAV26-1, TRAJ36)
CIAVRRGANNLFF

SEQ ID NO: 464688 - protein, 15 aa, Homo sapiens
  CDR3 for beta chain variable domain of TCR clone 232344 (TRBV25-1, TRBJ2-5)
CASSEPTPTWETQYF

SEQ ID NO: 464689 - protein, 13 aa, Homo sapiens
  CDR3 for alpha chain variable domain of TCR clone 232345 (TRAV2, TRAJ40)
CAVVASGTYKYIF

SEQ ID NO: 464690 - protein, 14 aa, Homo sapiens
  CDR3 for beta chain variable domain of TCR clone 232345 (TRBV19, TRBJ2-1)
CASPTFVLRGEQFF

SEQ ID NO: 464691 - protein, 17 aa, Homo sapiens
  CDR3 for alpha chain variable domain of TCR clone 232346 (TRAV38-1, TRAJ45)
CAVMKHYMGGGADGLTF

SEQ ID NO: 464692 - protein, 13 aa, Homo sapiens
  CDR3 for beta chain variable domain of TCR clone 232346 (TRBV2, TRBJ1-4)
CASSERAGGKLFF

SEQ ID NO: 464693 - protein, 14 aa, Homo sapiens
  CDR3 for alpha chain variable domain of TCR clone 232347 (TRAV12-3, TRAJ10)
SHLPLTGGGNKLTF

SEQ ID NO: 464694 - protein, 14 aa, Homo sapiens
  CDR3 for beta chain variable domain of TCR clone 232347 (TRBV4-2, TRBJ2-5)
CASSQDRGRETQYF

SEQ ID NO: 464695 - protein, 14 aa, Homo sapiens
  CDR3 for alpha chain variable domain of TCR clone 232348 (TRAV9-2, TRAJ39)
CALYIYHAGNMLTF

SEQ ID NO: 464696 - protein, 15 aa, Homo sapiens
  CDR3 for beta chain variable domain of TCR clone 232348 (TRBV27, TRBJ1-5)
CASSLGTGFDQPQHF

SEQ ID NO: 464697 - protein, 13 aa, Homo sapiens
  CDR3 for alpha chain variable domain of TCR clone 232349 (TRAV26-1, TRAJ48)
CIVRVVGDENLTF

SEQ ID NO: 464698 - protein, 14 aa, Homo sapiens
  CDR3 for beta chain variable domain of TCR clone 232349 (TRBV12-5, TRBJ2-5)
CASGSRTHQETQYF

SEQ ID NO: 464699 - protein, 13 aa, Homo sapiens
  CDR3 for alpha chain variable domain of TCR clone 232350 (TRAV17, TRAJ22)
CAGRRGSASQLTF

SEQ ID NO: 464700 - protein, 14 aa, Homo sapiens
  CDR3 for beta chain variable domain of TCR clone 232350 (TRBV19, TRBJ1-1)
CASSITGWETEAFF

SEQ ID NO: 464701 - protein, 14 aa, Homo sapiens
  CDR3 for alpha chain variable domain of TCR clone 232351 (TRAV17, TRAJ53)
CATDAGGSNYKLTF

SEQ ID NO: 464702 - protein, 16 aa, Homo sapiens
  CDR3 for beta chain variable domain of TCR clone 232351 (TRBV4-1, TRBJ1-1)
CASSQDAGMGNTEACF

SEQ ID NO: 464703 - protein, 14 aa, Homo sapiens
  CDR3 for alpha chain variable domain of TCR clone 232352 (TRAV8-3, TRAJ47)
CAVGAQGRGNKLVF

SEQ ID NO: 464704 - protein, 15 aa, Homo sapiens
  CDR3 for beta chain variable domain of TCR clone 232352 (TRBV7-2, TRBJ1-1)
CASRSATGWNTKAFF

SEQ ID NO: 464705 - protein, 15 aa, Homo sapiens
  CDR3 for alpha chain variable domain of TCR clone 232353 (TRAV8-3, TRAJ11)
CAVGLLNSGYSTRTF

SEQ ID NO: 464706 - protein, 14 aa, Homo sapiens
  CDR3 for beta chain variable domain of TCR clone 232353 (TRBV4-1, TRBJ2-5)
CASSRSGSGETQYF

SEQ ID NO: 464707 - protein, 18 aa, Homo sapiens
  CDR3 for alpha chain variable domain of TCR clone 232354 (TRAV13-1, TRAJ52)
CAAKNPNAGGTSYGKLTF

SEQ ID NO: 464708 - protein, 12 aa, Homo sapiens
  CDR3 for beta chain variable domain of TCR clone 232354 (TRBV7-9, TRBJ2-7)
CATRTDAYEQYF

SEQ ID NO: 464709 - protein, 16 aa, Homo sapiens
  CDR3 for alpha chain variable domain of TCR clone 232355 (TRAV26-1, TRAJ23)
CIVRVHPCNQGGKLIF

SEQ ID NO: 464710 - protein, 15 aa, Homo sapiens
  CDR3 for beta chain variable domain of TCR clone 232355 (TRBV5-7, TRBJ2-7)
CASSPYCEGSYEQHF

SEQ ID NO: 464711 - protein, 12 aa, Homo sapiens
  CDR3 for alpha chain variable domain of TCR clone 232356 (TRAV27, TRAJ42)
CAGGGSQGNLIF

SEQ ID NO: 464712 - protein, 14 aa, Homo sapiens
  CDR3 for beta chain variable domain of TCR clone 232356 (TRBV7-3, TRBJ2-1)
CASSLAGGTNEQFF

SEQ ID NO: 464713 - protein, 12 aa, Homo sapiens
  CDR3 for alpha chain variable domain of TCR clone 232357 (TRAV12-3, TRAJ20)
CAMVRGDYKLSF

SEQ ID NO: 464714 - protein, 16 aa, Homo sapiens
  CDR3 for beta chain variable domain of TCR clone 232357 (TRBV5-1, TRBJ2-3)
CASSLGLAVCTDTQYL

SEQ ID NO: 464715 - protein, 11 aa, Homo sapiens
  CDR3 for alpha chain variable domain of TCR clone 232358 (TRAV8-6, TRAJ20)
CAVSYDNKLSF

SEQ ID NO: 464716 - protein, 14 aa, Homo sapiens
  CDR3 for beta chain variable domain of TCR clone 232358 (TRBV10-2, TRBJ2-2)
CASSERSNTGELFF

SEQ ID NO: 464717 - protein, 13 aa, Homo sapiens
  CDR3 for alpha chain variable domain of TCR clone 232359 (TRAV26-1, TRAJ34)
CIVRGHNTDKLIF

SEQ ID NO: 464718 - protein, 15 aa, Homo sapiens
  CDR3 for beta chain variable domain of TCR clone 232359 (TRBV4-1, TRBJ2-7)
CASSQEGGPSYEQYF

SEQ ID NO: 464719 - protein, 16 aa, Homo sapiens
  CDR3 for alpha chain variable domain of TCR clone 232360 (TRAV1-2, TRAJ6)
CAVRDQGTGGSYIPTF

SEQ ID NO: 464720 - protein, 18 aa, Homo sapiens
  CDR3 for beta chain variable domain of TCR clone 232360 (TRBV13, TRBJ2-4)
CAIIDQKHSVLRRRDPAL

SEQ ID NO: 464721 - protein, 13 aa, Homo sapiens
  CDR3 for alpha chain variable domain of TCR clone 232361 (TRAV1-1, TRAJ13)
CAVNSGGYQKVTF

SEQ ID NO: 464722 - protein, 12 aa, Homo sapiens
  CDR3 for beta chain variable domain of TCR clone 232361 (TRBV28, TRBJ2-1)
CASSVQINEQFI

SEQ ID NO: 464723 - protein, 11 aa, Homo sapiens
  CDR3 for alpha chain variable domain of TCR clone 232362 (TRAV1-2, TRAJ11)
CAVRGYSTLTF

SEQ ID NO: 464724 - protein, 16 aa, Homo sapiens
  CDR3 for beta chain variable domain of TCR clone 232362 (TRBV20-1, TRBJ1-4)
CSAPGQGLLTNEKLFF

SEQ ID NO: 464725 - protein, 14 aa, Homo sapiens
  CDR3 for alpha chain variable domain of TCR clone 232363 (TRAV12-1, TRAJ33)
CVVNMPDSNYQLIW

SEQ ID NO: 464726 - protein, 11 aa, Homo sapiens
  CDR3 for beta chain variable domain of TCR clone 232363 (TRBV19, TRBJ2-7)
CASSILGEQYF

SEQ ID NO: 464727 - protein, 11 aa, Homo sapiens
  CDR3 for alpha chain variable domain of TCR clone 232364 (TRAV2, TRAJ33)
CAVESNYQLIW

SEQ ID NO: 464728 - protein, 11 aa, Homo sapiens
  CDR3 for beta chain variable domain of TCR clone 232364 (TRBV6-3, TRBJ2-3)
CATGQADTQYF

SEQ ID NO: 464729 - protein, 12 aa, Homo sapiens
  CDR3 for alpha chain variable domain of TCR clone 232365 (TRAV16, TRAJ34)
CAHSYNTDKLIF

SEQ ID NO: 464730 - protein, 13 aa, Homo sapiens
  CDR3 for beta chain variable domain of TCR clone 232365 (TRBV7-8, TRBJ2-1)
CASSLMAYNEQFF

SEQ ID NO: 464731 - protein, 18 aa, Homo sapiens
  CDR3 for alpha chain variable domain of TCR clone 232366 (TRAV9-2, TRAJ52)
CALSRHNAGGTSYGKLTF

SEQ ID NO: 464732 - protein, 17 aa, Homo sapiens
  CDR3 for beta chain variable domain of TCR clone 232366 (TRBV28, TRBJ2-5)
CASSRQGGLAGAETQYF

SEQ ID NO: 464733 - protein, 11 aa, Homo sapiens
  CDR3 for alpha chain variable domain of TCR clone 232367 (TRAV21, TRAJ20)
CCRVNNYKLSF

SEQ ID NO: 464734 - protein, 15 aa, Homo sapiens
  CDR3 for beta chain variable domain of TCR clone 232367 (TRBV2, TRBJ2-2)
CASSRQGPNTGELFF

SEQ ID NO: 464735 - protein, 16 aa, Homo sapiens
  CDR3 for alpha chain variable domain of TCR clone 232368 (TRAV26-2, TRAJ45)
CTTASPIGGGADGLTF

SEQ ID NO: 464736 - protein, 20 aa, Homo sapiens
  CDR3 for beta chain variable domain of TCR clone 232368 (TRBV28, TRBJ2-1)
CASTPIGRSTGLAGGNEQFF

SEQ ID NO: 464737 - protein, 14 aa, Homo sapiens
  CDR3 for alpha chain variable domain of TCR clone 232369 (TRAV1-2, TRAJ8)
CAVREDTGFQKLVF

SEQ ID NO: 464738 - protein, 14 aa, Homo sapiens
  CDR3 for beta chain variable domain of TCR clone 232369 (TRBV18, TRBJ2-3)
CASSLGTSVDTQYF

SEQ ID NO: 464739 - protein, 18 aa, Homo sapiens
  CDR3 for alpha chain variable domain of TCR clone 232370 (TRAV12-3, TRAJ52)
CAMSRTNAGGTSYGKLTF

SEQ ID NO: 464740 - protein, 15 aa, Homo sapiens
  CDR3 for beta chain variable domain of TCR clone 232370 (TRBV5-5, TRBJ1-1)
CASSLVGKDNTEAFF

SEQ ID NO: 464741 - protein, 14 aa, Homo sapiens
  CDR3 for alpha chain variable domain of TCR clone 232371 (TRAV17, TRAJ28)
CAIYSGAGSYQLTF

SEQ ID NO: 464742 - protein, 16 aa, Homo sapiens
  CDR3 for beta chain variable domain of TCR clone 232371 (TRBV4-2, TRBJ2-1)
CASSPRAGQGANEQFF

SEQ ID NO: 464743 - protein, 12 aa, Homo sapiens
  CDR3 for alpha chain variable domain of TCR clone 232372 (TRAV13-2, TRAJ23)
CAERHRGGKIIF

SEQ ID NO: 464744 - protein, 15 aa, Homo sapiens
  CDR3 for beta chain variable domain of TCR clone 232372 (TRBV15, TRBJ2-1)
CATSRPGQGLHEQFL

SEQ ID NO: 464745 - protein, 14 aa, Homo sapiens
  CDR3 for alpha chain variable domain of TCR clone 232373 (TRAV17, TRAJ23)
CATALGGQGGKLIF

SEQ ID NO: 464746 - protein, 12 aa, Homo sapiens
  CDR3 for beta chain variable domain of TCR clone 232373 (TRBV7-8, TRBJ2-7)
CASSLGDREQYF

SEQ ID NO: 464747 - protein, 15 aa, Homo sapiens
  CDR3 for alpha chain variable domain of TCR clone 232374 (TRAV3, TRAJ29)
CAVRDINSGNTPLVF

SEQ ID NO: 464748 - protein, 11 aa, Homo sapiens
  CDR3 for beta chain variable domain of TCR clone 232374 (TRBV7-2, TRBJ2-3)
CASSLGDTQYF

SEQ ID NO: 464749 - protein, 13 aa, Homo sapiens
  CDR3 for alpha chain variable domain of TCR clone 232375 (TRAV17, TRAJ54)
CATSWGGAQKLVF

SEQ ID NO: 464750 - protein, 15 aa, Homo sapiens
  CDR3 for beta chain variable domain of TCR clone 232375 (TRBV4-3, TRBJ2-3)
CASSPSRRATDTQYF

SEQ ID NO: 464751 - protein, 14 aa, Homo sapiens
  CDR3 for alpha chain variable domain of TCR clone 232376 (TRAV8-3, TRAJ35)
CAVVPQGFGYVLHC

SEQ ID NO: 464752 - protein, 15 aa, Homo sapiens
  CDR3 for beta chain variable domain of TCR clone 232376 (TRBV27, TRBJ2-1)
CASGNGGGSSNEQFF

SEQ ID NO: 464753 - protein, 13 aa, Homo sapiens
  CDR3 for alpha chain variable domain of TCR clone 232377 (TRAV9-2, TRAJ9)
CALSKAGGFKTIF

SEQ ID NO: 464754 - protein, 14 aa, Homo sapiens
  CDR3 for beta chain variable domain of TCR clone 232377 (TRBV19, TRBJ1-2)
CASSLQGQAYGYTF

SEQ ID NO: 464755 - protein, 15 aa, Homo sapiens
  CDR3 for alpha chain variable domain of TCR clone 232378 (TRAV17, TRAJ45)
TSVLRTGGGADGLTF

SEQ ID NO: 464756 - protein, 17 aa, Homo sapiens
  CDR3 for beta chain variable domain of TCR clone 232378 (TRBV5-7, TRBJ1-5)
CASSYGKLWDQPSILVM

SEQ ID NO: 464757 - protein, 14 aa, Homo sapiens
  CDR3 for alpha chain variable domain of TCR clone 232379 (TRAV1-2, TRAJ16)
CAVNRLSYGQKLLF

SEQ ID NO: 464758 - protein, 14 aa, Homo sapiens
  CDR3 for beta chain variable domain of TCR clone 232379 (TRBV25-1, TRBJ1-1)
CASTHLGGNTEAFF

SEQ ID NO: 464759 - protein, 10 aa, Homo sapiens
  CDR3 for alpha chain variable domain of TCR clone 232380 (TRAV30, TRAJ48)
CGIGNEKLTF

SEQ ID NO: 464760 - protein, 14 aa, Homo sapiens
  CDR3 for beta chain variable domain of TCR clone 232380 (TRBV7-2, TRBJ1-1)
CASSFLTGTTEAFF

SEQ ID NO: 464761 - protein, 11 aa, Homo sapiens
  CDR3 for alpha chain variable domain of TCR clone 232381 (TRAV12-3, TRAJ43)
CAMSVSNAMRF

SEQ ID NO: 464762 - protein, 15 aa, Homo sapiens
  CDR3 for beta chain variable domain of TCR clone 232381 (TRBV20-1, TRBJ2-7)
CSARDRVSGMDEQYF

SEQ ID NO: 464763 - protein, 14 aa, Homo sapiens
  CDR3 for alpha chain variable domain of TCR clone 232382 (TRAV2, TRAJ20)
CAVEDGTNDYKLSF

SEQ ID NO: 464764 - protein, 13 aa, Homo sapiens
  CDR3 for beta chain variable domain of TCR clone 232382 (TRBV28, TRBJ1-1)
CASSKQGWTEAFF

SEQ ID NO: 464765 - protein, 11 aa, Homo sapiens
  CDR3 for alpha chain variable domain of TCR clone 232383 (TRAV1-2, TRAJ11)
CAVRGYSTLTF

SEQ ID NO: 464766 - protein, 14 aa, Homo sapiens
  CDR3 for beta chain variable domain of TCR clone 232383 (TRBV4-1, TRBJ2-2)
CASSQAVNTGELFF

SEQ ID NO: 464767 - protein, 15 aa, Homo sapiens
  CDR3 for alpha chain variable domain of TCR clone 232384 (TRAV29/DV5, TRAJ40)
CAASAQGSGTYKYII

SEQ ID NO: 464768 - protein, 11 aa, Homo sapiens
  CDR3 for beta chain variable domain of TCR clone 232384 (TRBV29-1, TRBJ2-5)
CSEDRTGTQYF

SEQ ID NO: 464769 - protein, 14 aa, Homo sapiens
  CDR3 for alpha chain variable domain of TCR clone 232385 (TRAV1-2, TRAJ8)
CAVREDTGFQKLVF

SEQ ID NO: 464770 - protein, 13 aa, Homo sapiens
  CDR3 for beta chain variable domain of TCR clone 232385 (TRBV4-2, TRBJ2-2)
CACEDRGTGELFF

SEQ ID NO: 464771 - protein, 14 aa, Homo sapiens
  CDR3 for alpha chain variable domain of TCR clone 232386 (TRAV26-1, TRAJ38)
CIADNAGNNRKLIW

SEQ ID NO: 464772 - protein, 16 aa, Homo sapiens
  CDR3 for beta chain variable domain of TCR clone 232386 (TRBV20-1, TRBJ2-3)
CSAIFPIGGLTDTQYF

SEQ ID NO: 464773 - protein, 13 aa, Homo sapiens
  CDR3 for alpha chain variable domain of TCR clone 232387 (TRAV8-6, TRAJ9)
CAVWDTGGFKTIF

SEQ ID NO: 464774 - protein, 16 aa, Homo sapiens
  CDR3 for beta chain variable domain of TCR clone 232387 (TRBV7-7, TRBJ2-1)
CASSLASGTSYNEQFF

SEQ ID NO: 464775 - protein, 13 aa, Homo sapiens
  CDR3 for alpha chain variable domain of TCR clone 232388 (TRAV8-3, TRAJ54)
CAVSIQGAQKLVF

SEQ ID NO: 464776 - protein, 15 aa, Homo sapiens
  CDR3 for beta chain variable domain of TCR clone 232388 (TRBV20-1, TRBJ2-5)
CSAEGTGGLQETQYF

SEQ ID NO: 464777 - protein, 13 aa, Homo sapiens
  CDR3 for alpha chain variable domain of TCR clone 232389 (TRAV21, TRAJ20)
CAVSRLGDYKLSF

SEQ ID NO: 464778 - protein, 13 aa, Homo sapiens
  CDR3 for beta chain variable domain of TCR clone 232389 (TRBV7-3, TRBJ1-1)
CASSPAGGLEAIF

SEQ ID NO: 464779 - protein, 11 aa, Homo sapiens
  CDR3 for alpha chain variable domain of TCR clone 232390 (TRAV12-1, TRAJ43)
CVAYDNNDMRF

SEQ ID NO: 464780 - protein, 16 aa, Homo sapiens
  CDR3 for beta chain variable domain of TCR clone 232390 (TRBV5-4, TRBJ2-1)
CASSLVGSGQDNEQFF

SEQ ID NO: 464781 - protein, 18 aa, Homo sapiens
  CDR3 for alpha chain variable domain of TCR clone 232391 (TRAV26-2, TRAJ45)
CILRVDKYSGGGADGLTF

SEQ ID NO: 464782 - protein, 14 aa, Homo sapiens
  CDR3 for beta chain variable domain of TCR clone 232391 (TRBV7-2, TRBJ2-7)
CAIRSQGAAYEQYF

SEQ ID NO: 464783 - protein, 22 aa, Homo sapiens
  CDR3 for alpha chain variable domain of TCR clone 232392 (TRAV8-2, TRAJ45)
HLTKPSAHMSDAAEYSADGLTF

SEQ ID NO: 464784 - protein, 13 aa, Homo sapiens
  CDR3 for beta chain variable domain of TCR clone 232392 (TRBV7-3, TRBJ2-1)
RASSPVAYNEQFF

SEQ ID NO: 464785 - protein, 23 aa, Homo sapiens
  CDR3 for alpha chain variable domain of TCR clone 232393 (TRAV26-1, TRAJ38)
CIVRPLNAGNNHIQNPDPAVYQL

SEQ ID NO: 464786 - protein, 13 aa, Homo sapiens
  CDR3 for beta chain variable domain of TCR clone 232393 (TRBV18, TRBJ1-1)
CASAPNGDTEAFF

SEQ ID NO: 464787 - protein, 16 aa, Homo sapiens
  CDR3 for alpha chain variable domain of TCR clone 232394 (TRAV21, TRAJ52)
CAVTNAGGTSYGKLTF

SEQ ID NO: 464788 - protein, 17 aa, Homo sapiens
  CDR3 for beta chain variable domain of TCR clone 232394 (TRBV28, TRBJ2-5)
CASSRQGGLAGAETQDF

SEQ ID NO: 464789 - protein, 14 aa, Homo sapiens
  CDR3 for alpha chain variable domain of TCR clone 232395 (TRAV12-3, TRAJ9)
CAMSPNTGGFKTIF

SEQ ID NO: 464790 - protein, 16 aa, Homo sapiens
  CDR3 for beta chain variable domain of TCR clone 232395 (TRBV11-2, TRBJ2-2)
CASSLRTGNLIGELFF

SEQ ID NO: 464791 - protein, 15 aa, Homo sapiens
  CDR3 for alpha chain variable domain of TCR clone 232396 (TRAV12-1, TRAJ44)
CVADLPTGTASKLTF

SEQ ID NO: 464792 - protein, 16 aa, Homo sapiens
  CDR3 for beta chain variable domain of TCR clone 232396 (TRBV12-4, TRBJ2-5)
CASSFFVRGHQETQYF

SEQ ID NO: 464793 - protein, 14 aa, Homo sapiens
  CDR3 for alpha chain variable domain of TCR clone 232397 (TRAV12-2, TRAJ13)
CAVKKTGGYQKVTF

SEQ ID NO: 464794 - protein, 16 aa, Homo sapiens
  CDR3 for beta chain variable domain of TCR clone 232397 (TRBV11-1, TRBJ2-2)
CASSAEGLKNTGELFF

SEQ ID NO: 464795 - protein, 13 aa, Homo sapiens
  CDR3 for alpha chain variable domain of TCR clone 232398 (TRAV1-2, TRAJ9)
CAALNTGGFKTIF

SEQ ID NO: 464796 - protein, 17 aa, Homo sapiens
  CDR3 for beta chain variable domain of TCR clone 232398 (TRBV20-1, TRBJ1-5)
CSARVGGERQGNQPQHF

SEQ ID NO: 464797 - protein, 13 aa, Homo sapiens
  CDR3 for alpha chain variable domain of TCR clone 232399 (TRAV13-1, TRAJ4)
CAASIGGYNKLIF

SEQ ID NO: 464798 - protein, 16 aa, Homo sapiens
  CDR3 for beta chain variable domain of TCR clone 232399 (TRBV20-1, TRBJ2-1)
CSDPGLAGSYSDEQFF

SEQ ID NO: 464799 - protein, 13 aa, Homo sapiens
  CDR3 for alpha chain variable domain of TCR clone 232400 (TRAV13-1, TRAJ11)
CAAVLAGYSTLTF

SEQ ID NO: 464800 - protein, 14 aa, Homo sapiens
  CDR3 for beta chain variable domain of TCR clone 232400 (TRBV7-2, TRBJ2-2)
CASRGQGAAGELFF

SEQ ID NO: 464801 - protein, 11 aa, Homo sapiens
  CDR3 for alpha chain variable domain of TCR clone 232401 (TRAV3, TRAJ21)
CAVGNFNKFYF

SEQ ID NO: 464802 - protein, 16 aa, Homo sapiens
  CDR3 for beta chain variable domain of TCR clone 232401 (TRBV19, TRBJ2-1)
CASSKAGPSSNNEQFS

SEQ ID NO: 464803 - protein, 17 aa, Homo sapiens
  CDR3 for alpha chain variable domain of TCR clone 232402 (TRAV14/DV4, TRAJ53)
CNERGPSSGGSNYKLTF

SEQ ID NO: 464804 - protein, 15 aa, Homo sapiens
  CDR3 for beta chain variable domain of TCR clone 232402 (TRBV6-4, TRBJ2-2)
CASSPGGGWTGELFF

SEQ ID NO: 464805 - protein, 14 aa, Homo sapiens
  CDR3 for alpha chain variable domain of TCR clone 232403 (TRAV12-2, TRAJ40)
CAVKIPAGTYKYIF

SEQ ID NO: 464806 - protein, 16 aa, Homo sapiens
  CDR3 for beta chain variable domain of TCR clone 232403 (TRBV28, TRBJ2-5)
CASSFSPAGGWETQYF

SEQ ID NO: 464807 - protein, 19 aa, Homo sapiens
  CDR3 for alpha chain variable domain of TCR clone 232404 (TRAV1-2, TRAJ26)
CLLPLCCERPDNYGQNFVF

SEQ ID NO: 464808 - protein, 15 aa, Homo sapiens
  CDR3 for beta chain variable domain of TCR clone 232404 (TRBV20-1, TRBJ2-7)
CSARVPAAYFYEQYF

SEQ ID NO: 464809 - protein, 12 aa, Homo sapiens
  CDR3 for alpha chain variable domain of TCR clone 232405 (TRAV3, TRAJ20)
CAVRDTDYKLSF

SEQ ID NO: 464810 - protein, 12 aa, Homo sapiens
  CDR3 for beta chain variable domain of TCR clone 232405 (TRBV11-2, TRBJ2-2)
CASSLPTGELFF

SEQ ID NO: 464811 - protein, 13 aa, Homo sapiens
  CDR3 for alpha chain variable domain of TCR clone 232406 (TRAV29/DV5, TRAJ31)
CAASRNNNARLMF

SEQ ID NO: 464812 - protein, 18 aa, Homo sapiens
  CDR3 for beta chain variable domain of TCR clone 232406 (TRBV11-2, TRBJ2-6)
CASSLNPFLGTGANVLTF

SEQ ID NO: 464813 - protein, 16 aa, Homo sapiens
  CDR3 for alpha chain variable domain of TCR clone 232407 (TRAV30, TRAJ24)
CGTEIVDADSWGKFQF

SEQ ID NO: 464814 - protein, 17 aa, Homo sapiens
  CDR3 for beta chain variable domain of TCR clone 232407 (TRBV20-1, TRBJ2-1)
CSARDSLAGVWDNEQFF

SEQ ID NO: 464815 - protein, 12 aa, Homo sapiens
  CDR3 for alpha chain variable domain of TCR clone 232408 (TRAV23/DV6, TRAJ27)
CAASKSAGKSTF

SEQ ID NO: 464816 - protein, 18 aa, Homo sapiens
  CDR3 for beta chain variable domain of TCR clone 232408 (TRBV12-4, TRBJ2-2)
CASSRSGGAIPNTGELFF

SEQ ID NO: 464817 - protein, 15 aa, Homo sapiens
  CDR3 for alpha chain variable domain of TCR clone 232409 (TRAV2, TRAJ15)
CAVEDREQAGTALIF

SEQ ID NO: 464818 - protein, 16 aa, Homo sapiens
  CDR3 for beta chain variable domain of TCR clone 232409 (TRBV6-1, TRBJ2-5)
CASSETLDRGAETQYF

SEQ ID NO: 464819 - protein, 13 aa, Homo sapiens
  CDR3 for alpha chain variable domain of TCR clone 232410 (TRAV13-2, TRAJ48)
CAEMDFGNEKLTF

SEQ ID NO: 464820 - protein, 15 aa, Homo sapiens
  CDR3 for beta chain variable domain of TCR clone 232410 (TRBV7-9, TRBJ1-6)
FASSSPGRGNSTLLF

SEQ ID NO: 464821 - protein, 13 aa, Homo sapiens
  CDR3 for alpha chain variable domain of TCR clone 232411 (TRAV12-3, TRAJ4)
CAMTERGYNKLIF

SEQ ID NO: 464822 - protein, 17 aa, Homo sapiens
  CDR3 for beta chain variable domain of TCR clone 232411 (TRBV28, TRBJ2-3)
CASSLPVGPASTDTQYF

SEQ ID NO: 464823 - protein, 13 aa, Homo sapiens
  CDR3 for alpha chain variable domain of TCR clone 232412 (TRAV29/DV5, TRAJ31)
CAASRNNNARLRF

SEQ ID NO: 464824 - protein, 15 aa, Homo sapiens
  CDR3 for beta chain variable domain of TCR clone 232412 (TRBV27, TRBJ2-1)
CASSNGGGSSNEQFF

SEQ ID NO: 464825 - protein, 17 aa, Homo sapiens
  CDR3 for alpha chain variable domain of TCR clone 232413 (TRAV4, TRAJ18)
CLVGERSVGSTLGRLYF

SEQ ID NO: 464826 - protein, 16 aa, Homo sapiens
  CDR3 for beta chain variable domain of TCR clone 232413 (TRBV19, TRBJ2-1)
CASSKAGPSSYNEHFF

SEQ ID NO: 464827 - protein, 11 aa, Homo sapiens
  CDR3 for alpha chain variable domain of TCR clone 232414 (TRAV21, TRAJ11)
CAVNGYSTLTF

SEQ ID NO: 464828 - protein, 14 aa, Homo sapiens
  CDR3 for beta chain variable domain of TCR clone 232414 (TRBV20-1, TRBJ2-1)
CSAQIGGSANEQFF

SEQ ID NO: 464829 - protein, 11 aa, Homo sapiens
  CDR3 for alpha chain variable domain of TCR clone 232415 (TRAV12-1, TRAJ21)
CVVNNFNKFYF

SEQ ID NO: 464830 - protein, 16 aa, Homo sapiens
  CDR3 for beta chain variable domain of TCR clone 232415 (TRBV4-2, TRBJ1-5)
CASSQGQGASNQPQHF

SEQ ID NO: 464831 - protein, 14 aa, Homo sapiens
  CDR3 for alpha chain variable domain of TCR clone 232416 (TRAV2, TRAJ37)
CAVDFTSNTGKLIF

SEQ ID NO: 464832 - protein, 13 aa, Homo sapiens
  CDR3 for beta chain variable domain of TCR clone 232416 (TRBV2, TRBJ2-2)
CASRAWRTGELFF

SEQ ID NO: 464833 - protein, 10 aa, Homo sapiens
  CDR3 for alpha chain variable domain of TCR clone 232417 (TRAV26-1, TRAJ22)
CIVSLNFFWF

SEQ ID NO: 464834 - protein, 15 aa, Homo sapiens
  CDR3 for beta chain variable domain of TCR clone 232417 (TRBV4-2, TRBJ1-2)
CASGQRTGGRDGYTF

SEQ ID NO: 464835 - protein, 15 aa, Homo sapiens
  CDR3 for alpha chain variable domain of TCR clone 232418 (TRAV12-2, TRAJ53)
CAVNGGGGSNYKLTF

SEQ ID NO: 464836 - protein, 14 aa, Homo sapiens
  CDR3 for beta chain variable domain of TCR clone 232418 (TRBV11-2, TRBJ2-5)
CASSRTGGIETQYV

SEQ ID NO: 464837 - protein, 19 aa, Homo sapiens
  CDR3 for alpha chain variable domain of TCR clone 232419 (TRAV20, TRAJ32)
CAVDGMVVLQTSSSLELAF

SEQ ID NO: 464838 - protein, 16 aa, Homo sapiens
  CDR3 for beta chain variable domain of TCR clone 232419 (TRBV19, TRBJ2-2)
CASRSPGTGATGELFF

SEQ ID NO: 464839 - protein, 12 aa, Homo sapiens
  CDR3 for alpha chain variable domain of TCR clone 232420 (TRAV21, TRAJ39)
CAADNAGNMLTF

SEQ ID NO: 464840 - protein, 13 aa, Homo sapiens
  CDR3 for beta chain variable domain of TCR clone 232420 (TRBV12-4, TRBJ1-1)
CASSPGTGFEAFF

SEQ ID NO: 464841 - protein, 15 aa, Homo sapiens
  CDR3 for alpha chain variable domain of TCR clone 232421 (TRAV8-6, TRAJ10)
CPVSDQAGGGNKLTF

SEQ ID NO: 464842 - protein, 15 aa, Homo sapiens
  CDR3 for beta chain variable domain of TCR clone 232421 (TRBV3-1, TRBJ2-5)
CASSANLGGPETQYF

SEQ ID NO: 464843 - protein, 13 aa, Homo sapiens
  CDR3 for alpha chain variable domain of TCR clone 232422 (TRAV17, TRAJ5)
CALRGTGRRALTF

SEQ ID NO: 464844 - protein, 13 aa, Homo sapiens
  CDR3 for beta chain variable domain of TCR clone 232422 (TRBV6-1, TRBJ1-1)
CASSRQGNTGAFF

SEQ ID NO: 464845 - protein, 11 aa, Homo sapiens
  CDR3 for alpha chain variable domain of TCR clone 232423 (TRAV12-3, TRAJ43)
CAMSVSNDMRF

SEQ ID NO: 464846 - protein, 13 aa, Homo sapiens
  CDR3 for beta chain variable domain of TCR clone 232423 (TRBV20-1, TRBJ1-1)
CSAPLGGGTVAFF

SEQ ID NO: 464847 - protein, 15 aa, Homo sapiens
  CDR3 for alpha chain variable domain of TCR clone 232424 (TRAV12-2, TRAJ43)
CAFDMHFGAGTRLTG

SEQ ID NO: 464848 - protein, 18 aa, Homo sapiens
  CDR3 for beta chain variable domain of TCR clone 232424 (TRBV20-1, TRBJ2-3)
CSASGLAGGPGTTDTQYF

SEQ ID NO: 464849 - protein, 15 aa, Homo sapiens
  CDR3 for alpha chain variable domain of TCR clone 232425 (TRAV29/DV5, TRAJ40)
CAASEGTSGIYKYIF

SEQ ID NO: 464850 - protein, 15 aa, Homo sapiens
  CDR3 for beta chain variable domain of TCR clone 232425 (TRBV27, TRBJ1-5)
CASKIQGAGNQPQHF

SEQ ID NO: 464851 - protein, 13 aa, Homo sapiens
  CDR3 for alpha chain variable domain of TCR clone 232426 (TRAV1-2, TRAJ12)
CAVSMDSSYKLIF

SEQ ID NO: 464852 - protein, 14 aa, Homo sapiens
  CDR3 for beta chain variable domain of TCR clone 232426 (TRBV19, TRBJ2-1)
CAGGGGGGGEEQVG

SEQ ID NO: 464853 - protein, 14 aa, Homo sapiens
  CDR3 for alpha chain variable domain of TCR clone 232427 (TRAV23/DV6, TRAJ50)
CAADMKTSYDKVIF

SEQ ID NO: 464854 - protein, 14 aa, Homo sapiens
  CDR3 for beta chain variable domain of TCR clone 232427 (TRBV7-2, TRBJ2-7)
CASSPKTSFYEQYF

SEQ ID NO: 464855 - protein, 17 aa, Homo sapiens
  CDR3 for alpha chain variable domain of TCR clone 232428 (TRAV3, TRAJ38)
CAVRDCLNAGNNRKLIW

SEQ ID NO: 464856 - protein, 16 aa, Homo sapiens
  CDR3 for beta chain variable domain of TCR clone 232428 (TRBV12-4, TRBJ1-5)
CASRQPVEGSNQPQHF

SEQ ID NO: 464857 - protein, 14 aa, Homo sapiens
  CDR3 for alpha chain variable domain of TCR clone 232429 (TRAV21, TRAJ32)
CCGDYGGATNKLIF

SEQ ID NO: 464858 - protein, 13 aa, Homo sapiens
  CDR3 for beta chain variable domain of TCR clone 232429 (TRBV2, TRBJ1-6)
CASGRGGISRLHF

SEQ ID NO: 464859 - protein, 14 aa, Homo sapiens
  CDR3 for alpha chain variable domain of TCR clone 232430 (TRAV23/DV6, TRAJ57)
CAASNQGGPQKLVF

SEQ ID NO: 464860 - protein, 13 aa, Homo sapiens
  CDR3 for beta chain variable domain of TCR clone 232430 (TRBV11-2, TRBJ2-7)
CASSSYPSYEQYF

SEQ ID NO: 464861 - protein, 13 aa, Homo sapiens
  CDR3 for alpha chain variable domain of TCR clone 232431 (TRAV38-1, TRAJ42)
CARWGGSQGNLIF

SEQ ID NO: 464862 - protein, 15 aa, Homo sapiens
  CDR3 for beta chain variable domain of TCR clone 232431 (TRBV7-6, TRBJ2-5)
CASSKPTGPQETQYF

SEQ ID NO: 464863 - protein, 12 aa, Homo sapiens
  CDR3 for alpha chain variable domain of TCR clone 232432 (TRAV16, TRAJ22)
CALELSARQLTF

SEQ ID NO: 464864 - protein, 14 aa, Homo sapiens
  CDR3 for beta chain variable domain of TCR clone 232432 (TRBV11-2, TRBJ2-3)
CASSSIASTDTQYL

SEQ ID NO: 464865 - protein, 14 aa, Homo sapiens
  CDR3 for alpha chain variable domain of TCR clone 232433 (TRAV13-2, TRAJ11)
CAEAGNSGYSTLTF

SEQ ID NO: 464866 - protein, 11 aa, Homo sapiens
  CDR3 for beta chain variable domain of TCR clone 232433 (TRBV10-3, TRBJ2-7)
CAISEGLEQYF

SEQ ID NO: 464867 - protein, 12 aa, Homo sapiens
  CDR3 for alpha chain variable domain of TCR clone 232434 (TRAV36/DV7, TRAJ54)
CAVVRGAQKLVF

SEQ ID NO: 464868 - protein, 14 aa, Homo sapiens
  CDR3 for beta chain variable domain of TCR clone 232434 (TRBV7-3, TRBJ1-1)
CASSLKGGNTAAFF

SEQ ID NO: 464869 - protein, 14 aa, Homo sapiens
  CDR3 for alpha chain variable domain of TCR clone 232435 (TRAV12-1, TRAJ24)
CVVRSTDSWGKFQV

SEQ ID NO: 464870 - protein, 13 aa, Homo sapiens
  CDR3 for beta chain variable domain of TCR clone 232435 (TRBV2, TRBJ2-3)
CASILAGGQGQYF

SEQ ID NO: 464871 - protein, 13 aa, Homo sapiens
  CDR3 for alpha chain variable domain of TCR clone 232436 (TRAV12-3, TRAJ13)
CAMSSGGYQKVPF

SEQ ID NO: 464872 - protein, 17 aa, Homo sapiens
  CDR3 for beta chain variable domain of TCR clone 232436 (TRBV4-1, TRBJ1-4)
CASSQEGPRGVEEKLFF

SEQ ID NO: 464873 - protein, 15 aa, Homo sapiens
  CDR3 for alpha chain variable domain of TCR clone 232437 (TRAV8-2, TRAJ44)
CVVSPNTGTASKLTF

SEQ ID NO: 464874 - protein, 12 aa, Homo sapiens
  CDR3 for beta chain variable domain of TCR clone 232437 (TRBV11-2, TRBJ2-2)
CAVPRNTGGLFF

SEQ ID NO: 464875 - protein, 13 aa, Homo sapiens
  CDR3 for alpha chain variable domain of TCR clone 232438 (TRAV27, TRAJ29)
CAGAHSGNTPLVF

SEQ ID NO: 464876 - protein, 14 aa, Homo sapiens
  CDR3 for beta chain variable domain of TCR clone 232438 (TRBV7-9, TRBJ2-7)
CASSIGQGAGEQSF

SEQ ID NO: 464877 - protein, 18 aa, Homo sapiens
  CDR3 for alpha chain variable domain of TCR clone 232439 (TRAV21, TRAJ52)
CAVRPSPAGGTSYGKLTF

SEQ ID NO: 464878 - protein, 15 aa, Homo sapiens
  CDR3 for beta chain variable domain of TCR clone 232439 (TRBV10-3, TRBJ2-7)
CATREQGLRSYEQYF

SEQ ID NO: 464879 - protein, 11 aa, Homo sapiens
  CDR3 for alpha chain variable domain of TCR clone 232440 (TRAV21, TRAJ27)
CAVRMQANQPL

SEQ ID NO: 464880 - protein, 15 aa, Homo sapiens
  CDR3 for beta chain variable domain of TCR clone 232440 (TRBV11-2, TRBJ2-1)
CASCTGTSGYNEQFF

SEQ ID NO: 464881 - protein, 16 aa, Homo sapiens
  CDR3 for alpha chain variable domain of TCR clone 232441 (TRAV4, TRAJ22)
CLVGDLYSGSARQLTF

SEQ ID NO: 464882 - protein, 16 aa, Homo sapiens
  CDR3 for beta chain variable domain of TCR clone 232441 (TRBV7-9, TRBJ2-1)
CSSSDVAGGSYNEQFF

SEQ ID NO: 464883 - protein, 12 aa, Homo sapiens
  CDR3 for alpha chain variable domain of TCR clone 232442 (TRAV23/DV6, TRAJ30)
CAASKWDDKIIF

SEQ ID NO: 464884 - protein, 15 aa, Homo sapiens
  CDR3 for beta chain variable domain of TCR clone 232442 (TRBV20-1, TRBJ2-7)
CSARDRVSGMDEQYF

SEQ ID NO: 464885 - protein, 14 aa, Homo sapiens
  CDR3 for alpha chain variable domain of TCR clone 232443 (TRAV2, TRAJ9)
CAVEDRSGGFKTIF

SEQ ID NO: 464886 - protein, 13 aa, Homo sapiens
  CDR3 for beta chain variable domain of TCR clone 232443 (TRBV20-1, TRBJ2-7)
CSATHTSGYEQYF

SEQ ID NO: 464887 - protein, 14 aa, Homo sapiens
  CDR3 for alpha chain variable domain of TCR clone 232444 (TRAV12-1, TRAJ26)
CVVKGSNYGQNFAF

SEQ ID NO: 464888 - protein, 15 aa, Homo sapiens
  CDR3 for beta chain variable domain of TCR clone 232444 (TRBV10-2, TRBJ2-6)
CASSEQGTGANVLTF

SEQ ID NO: 464889 - protein, 18 aa, Homo sapiens
  CDR3 for alpha chain variable domain of TCR clone 232445 (TRAV9-2, TRAJ52)
CALRRHNAGGTRYGKMTF

SEQ ID NO: 464890 - protein, 13 aa, Homo sapiens
  CDR3 for beta chain variable domain of TCR clone 232445 (TRBV7-9, TRBJ1-2)
CASSLKQNYGYTF

SEQ ID NO: 464891 - protein, 17 aa, Homo sapiens
  CDR3 for alpha chain variable domain of TCR clone 232446 (TRAV35, TRAJ47)
GRLDCRTHTECGNKLVF

SEQ ID NO: 464892 - protein, 11 aa, Homo sapiens
  CDR3 for beta chain variable domain of TCR clone 232446 (TRBV29-1, TRBJ1-1)
CSVEVGTRTFF

SEQ ID NO: 464893 - protein, 22 aa, Homo sapiens
  CDR3 for alpha chain variable domain of TCR clone 232447 (TRAV2, TRAJ10)
ILQVREADAAVYYTGGGNKLTF

SEQ ID NO: 464894 - protein, 19 aa, Homo sapiens
  CDR3 for beta chain variable domain of TCR clone 232447 (TRBV25-1, TRBJ2-2)
CAILVYRVDRGRKTGELFF

SEQ ID NO: 464895 - protein, 13 aa, Homo sapiens
  CDR3 for alpha chain variable domain of TCR clone 232448 (TRAV2, TRAJ40)
CAVVTSGTYKYIL

SEQ ID NO: 464896 - protein, 15 aa, Homo sapiens
  CDR3 for beta chain variable domain of TCR clone 232448 (TRBV11-3, TRBJ2-3)
CASLKDGREGDRQYF

SEQ ID NO: 464897 - protein, 13 aa, Homo sapiens
  CDR3 for alpha chain variable domain of TCR clone 232449 (TRAV8-1, TRAJ34)
CAVNAGNTDKLIF

SEQ ID NO: 464898 - protein, 13 aa, Homo sapiens
  CDR3 for beta chain variable domain of TCR clone 232449 (TRBV20-1, TRBJ2-1)
CSAGAGTYHEQFF

SEQ ID NO: 464899 - protein, 14 aa, Homo sapiens
  CDR3 for alpha chain variable domain of TCR clone 232450 (TRAV38-1, TRAJ45)
CVYYLGGGADGLTF

SEQ ID NO: 464900 - protein, 20 aa, Homo sapiens
  CDR3 for beta chain variable domain of TCR clone 232450 (TRBV28, TRBJ2-1)
CASTPIGRSPGLAGGNEQFF

SEQ ID NO: 464901 - protein, 13 aa, Homo sapiens
  CDR3 for alpha chain variable domain of TCR clone 232451 (TRAV21, TRAJ20)
CAVGLRVDYKLSF

SEQ ID NO: 464902 - protein, 17 aa, Homo sapiens
  CDR3 for beta chain variable domain of TCR clone 232451 (TRBV9, TRBJ2-3)
CASNLAPGGASTDTQYF

SEQ ID NO: 464903 - protein, 14 aa, Homo sapiens
  CDR3 for alpha chain variable domain of TCR clone 232452 (TRAV1-2, TRAJ16)
CAVNRFSDGQKLLF

SEQ ID NO: 464904 - protein, 13 aa, Homo sapiens
  CDR3 for beta chain variable domain of TCR clone 232452 (TRBV18, TRBJ2-5)
CASSPARKETQYF

SEQ ID NO: 464905 - protein, 23 aa, Homo sapiens
  CDR3 for alpha chain variable domain of TCR clone 232453 (TRAV12-2, TRAJ36)
SLLIRDSQPSDSATLERANNLFF

SEQ ID NO: 464906 - protein, 15 aa, Homo sapiens
  CDR3 for beta chain variable domain of TCR clone 232453 (TRBV7-9, TRBJ1-1)
CASSLLEQGGTEAFF

SEQ ID NO: 464907 - protein, 12 aa, Homo sapiens
  CDR3 for alpha chain variable domain of TCR clone 232454 (TRAV1-2, TRAJ39)
TSLLYAGNMLTF

SEQ ID NO: 464908 - protein, 16 aa, Homo sapiens
  CDR3 for beta chain variable domain of TCR clone 232454 (TRBV11-2, TRBJ2-1)
CASSLLLLSSYNEQFL

SEQ ID NO: 464909 - protein, 12 aa, Homo sapiens
  CDR3 for alpha chain variable domain of TCR clone 232455 (TRAV36/DV7, TRAJ54)
CAVVRGAQKLVF

SEQ ID NO: 464910 - protein, 14 aa, Homo sapiens
  CDR3 for beta chain variable domain of TCR clone 232455 (TRBV7-3, TRBJ1-1)
CASSLKGGNTEAFC

SEQ ID NO: 464911 - protein, 14 aa, Homo sapiens
  CDR3 for alpha chain variable domain of TCR clone 232456 (TRAV21, TRAJ58)
CAVKRETSGSRLTF

SEQ ID NO: 464912 - protein, 15 aa, Homo sapiens
  CDR3 for beta chain variable domain of TCR clone 232456 (TRBV9, TRBJ1-6)
CASSVAGTGDSPLHF

SEQ ID NO: 464913 - protein, 12 aa, Homo sapiens
  CDR3 for alpha chain variable domain of TCR clone 232457 (TRAV1-1, TRAJ8)
CAGGTGFQKLVF

SEQ ID NO: 464914 - protein, 14 aa, Homo sapiens
  CDR3 for beta chain variable domain of TCR clone 232457 (TRBV7-8, TRBJ1-5)
CASSLGAFNQTQHF

SEQ ID NO: 464915 - protein, 13 aa, Homo sapiens
  CDR3 for alpha chain variable domain of TCR clone 232458 (TRAV13-1, TRAJ21)
CAASIYNFNKFYF

SEQ ID NO: 464916 - protein, 13 aa, Homo sapiens
  CDR3 for beta chain variable domain of TCR clone 232458 (TRBV27, TRBJ1-4)
CASSLMGDAKLFF

SEQ ID NO: 464917 - protein, 12 aa, Homo sapiens
  CDR3 for alpha chain variable domain of TCR clone 232459 (TRAV3, TRAJ39)
CALIEWSNMLTF

SEQ ID NO: 464918 - protein, 14 aa, Homo sapiens
  CDR3 for beta chain variable domain of TCR clone 232459 (TRBV7-8, TRBJ2-3)
CASSFPDGQDTQYF

SEQ ID NO: 464919 - protein, 13 aa, Homo sapiens
  CDR3 for alpha chain variable domain of TCR clone 232460 (TRAV27, TRAJ6)
CAGGTRGSYIPTF

SEQ ID NO: 464920 - protein, 15 aa, Homo sapiens
  CDR3 for beta chain variable domain of TCR clone 232460 (TRBV20-1, TRBJ2-4)
SAVLAEGVGENIQYF

SEQ ID NO: 464921 - protein, 10 aa, Homo sapiens
  CDR3 for alpha chain variable domain of TCR clone 232461 (TRAV1-2, TRAJ31)
CAFFDARLMF

SEQ ID NO: 464922 - protein, 16 aa, Homo sapiens
  CDR3 for beta chain variable domain of TCR clone 232461 (TRBV5-4, TRBJ2-3)
CASQQPGAGGADTQYF

SEQ ID NO: 464923 - protein, 11 aa, Homo sapiens
  CDR3 for alpha chain variable domain of TCR clone 232462 (TRAV1-1, TRAJ16)
CAAGDVQKLLF

SEQ ID NO: 464924 - protein, 15 aa, Homo sapiens
  CDR3 for beta chain variable domain of TCR clone 232462 (TRBV28, TRBJ1-2)
CASIPQGSDDYGYTF

SEQ ID NO: 464925 - protein, 18 aa, Homo sapiens
  CDR3 for alpha chain variable domain of TCR clone 232463 (TRAV12-3, TRAJ52)
CAMSVGGAGGTSYGKLTF

SEQ ID NO: 464926 - protein, 12 aa, Homo sapiens
  CDR3 for beta chain variable domain of TCR clone 232463 (TRBV7-3, TRBJ1-2)
CASSKKGVPVTF

SEQ ID NO: 464927 - protein, 18 aa, Homo sapiens
  CDR3 for alpha chain variable domain of TCR clone 232464 (TRAV3, TRAJ32)
CAVRDIRGYGGAANKLIF

SEQ ID NO: 464928 - protein, 10 aa, Homo sapiens
  CDR3 for beta chain variable domain of TCR clone 232464 (TRBV12-4, TRBJ2-2)
CASSLGVRHT

SEQ ID NO: 464929 - protein, 15 aa, Homo sapiens
  CDR3 for alpha chain variable domain of TCR clone 232465 (TRAV16, TRAJ4)
CALEDPSGGYNKLIF

SEQ ID NO: 464930 - protein, 13 aa, Homo sapiens
  CDR3 for beta chain variable domain of TCR clone 232465 (TRBV7-7, TRBJ1-1)
CASSLGANTEAFF

SEQ ID NO: 464931 - protein, 18 aa, Homo sapiens
  CDR3 for alpha chain variable domain of TCR clone 232466 (TRAV21, TRAJ52)
CAVRPSPEGGTSYGKLTF

SEQ ID NO: 464932 - protein, 17 aa, Homo sapiens
  CDR3 for beta chain variable domain of TCR clone 232466 (TRBV13, TRBJ2-3)
CASILSRVAGGRNTQYF

SEQ ID NO: 464933 - protein, 11 aa, Homo sapiens
  CDR3 for alpha chain variable domain of TCR clone 232467 (TRAV2, TRAJ33)
CAVDSNYQLVW

SEQ ID NO: 464934 - protein, 15 aa, Homo sapiens
  CDR3 for beta chain variable domain of TCR clone 232467 (TRBV19, TRBJ1-2)
CASSVGQVLNYGYTF

SEQ ID NO: 464935 - protein, 14 aa, Homo sapiens
  CDR3 for alpha chain variable domain of TCR clone 232468 (TRAV3, TRAJ27)
CAVRDDTTAGKSTF

SEQ ID NO: 464936 - protein, 15 aa, Homo sapiens
  CDR3 for beta chain variable domain of TCR clone 232468 (TRBV7-7, TRBJ2-2)
CATSKLAKNTGELFF

SEQ ID NO: 464937 - protein, 12 aa, Homo sapiens
  CDR3 for alpha chain variable domain of TCR clone 232469 (TRAV25, TRAJ10)
TILTGGGNKLTF

SEQ ID NO: 464938 - protein, 15 aa, Homo sapiens
  CDR3 for beta chain variable domain of TCR clone 232469 (TRBV7-3, TRBJ2-1)
CASSPTGGSRNEQFF

SEQ ID NO: 464939 - protein, 15 aa, Homo sapiens
  CDR3 for alpha chain variable domain of TCR clone 232470 (TRAV12-2, TRAJ53)
CAVNGGGGSNYKLTF

SEQ ID NO: 464940 - protein, 15 aa, Homo sapiens
  CDR3 for beta chain variable domain of TCR clone 232470 (TRBV19, TRBJ1-1)
CASTSGQIQNTEVFF

SEQ ID NO: 464941 - protein, 16 aa, Homo sapiens
  CDR3 for alpha chain variable domain of TCR clone 232471 (TRAV12-2, TRAJ18)
CAVTTDRCSTLGRLYF

SEQ ID NO: 464942 - protein, 15 aa, Homo sapiens
  CDR3 for beta chain variable domain of TCR clone 232471 (TRBV9, TRBJ1-6)
CASSVAGTGDSPLHF

SEQ ID NO: 464943 - protein, 12 aa, Homo sapiens
  CDR3 for alpha chain variable domain of TCR clone 232472 (TRAV21, TRAJ33)
CAKMDSNYQLIW

SEQ ID NO: 464944 - protein, 17 aa, Homo sapiens
  CDR3 for beta chain variable domain of TCR clone 232472 (TRBV20-1, TRBJ2-1)
CSAPPRLAGTRYNEQFF

SEQ ID NO: 464945 - protein, 16 aa, Homo sapiens
  CDR3 for alpha chain variable domain of TCR clone 232473 (TRAV3, TRAJ37)
CAVRPHGSGNTGKLIF

SEQ ID NO: 464946 - protein, 16 aa, Homo sapiens
  CDR3 for beta chain variable domain of TCR clone 232473 (TRBV28, TRBJ1-4)
CASSPPYRGRSEKLFF

SEQ ID NO: 464947 - protein, 16 aa, Homo sapiens
  CDR3 for alpha chain variable domain of TCR clone 232474 (TRAV21, TRAJ3)
CAVSRTAVLPRSSLDQ

SEQ ID NO: 464948 - protein, 15 aa, Homo sapiens
  CDR3 for beta chain variable domain of TCR clone 232474 (TRBV7-3, TRBJ2-1)
CASSPTGGGEVEQFF

SEQ ID NO: 464949 - protein, 13 aa, Homo sapiens
  CDR3 for alpha chain variable domain of TCR clone 232475 (TRAV35, TRAJ42)
CAGFPGSQGNLIF

SEQ ID NO: 464950 - protein, 15 aa, Homo sapiens
  CDR3 for beta chain variable domain of TCR clone 232475 (TRBV6-1, TRBJ1-1)
CASRRGEGQLSEAFF

SEQ ID NO: 464951 - protein, 16 aa, Homo sapiens
  CDR3 for alpha chain variable domain of TCR clone 232476 (TRAV12-3, TRAJ53)
CAMSQGRGGSNYKLTF

SEQ ID NO: 464952 - protein, 13 aa, Homo sapiens
  CDR3 for beta chain variable domain of TCR clone 232476 (TRBV7-3, TRBJ1-1)
CASSQDWGAEAFF

SEQ ID NO: 464953 - protein, 15 aa, Homo sapiens
  CDR3 for alpha chain variable domain of TCR clone 232477 (TRAV29/DV5, TRAJ44)
CAASAGTGTASNLTV

SEQ ID NO: 464954 - protein, 12 aa, Homo sapiens
  CDR3 for beta chain variable domain of TCR clone 232477 (TRBV11-2, TRBJ2-2)
CASSLGGGELFF

SEQ ID NO: 464955 - protein, 13 aa, Homo sapiens
  CDR3 for alpha chain variable domain of TCR clone 232478 (TRAV12-2, TRAJ23)
CAVMGNQGGKLIF

SEQ ID NO: 464956 - protein, 16 aa, Homo sapiens
  CDR3 for beta chain variable domain of TCR clone 232478 (TRBV19, TRBJ2-2)
CASRSPGTGATGELFF

SEQ ID NO: 464957 - protein, 14 aa, Homo sapiens
  CDR3 for alpha chain variable domain of TCR clone 232479 (TRAV1-2, TRAJ8)
CAVREDTGFQKLVF

SEQ ID NO: 464958 - protein, 14 aa, Homo sapiens
  CDR3 for beta chain variable domain of TCR clone 232479 (TRBV7-6, TRBJ2-7)
CASSLGDRGYEQYF

SEQ ID NO: 464959 - protein, 14 aa, Homo sapiens
  CDR3 for alpha chain variable domain of TCR clone 232480 (TRAV12-2, TRAJ5)
CAVNRSTGRRALTV

SEQ ID NO: 464960 - protein, 15 aa, Homo sapiens
  CDR3 for beta chain variable domain of TCR clone 232480 (TRBV15, TRBJ1-5)
CATSREQGGNQPQHF

SEQ ID NO: 464961 - protein, 14 aa, Homo sapiens
  CDR3 for alpha chain variable domain of TCR clone 232481 (TRAV8-3, TRAJ4)
CAVGAAGGYNKLIF

SEQ ID NO: 464962 - protein, 16 aa, Homo sapiens
  CDR3 for beta chain variable domain of TCR clone 232481 (TRBV19, TRBJ2-2)
CASCSPGTGATGELFF

SEQ ID NO: 464963 - protein, 13 aa, Homo sapiens
  CDR3 for alpha chain variable domain of TCR clone 232482 (TRAV27, TRAJ57)
CAGFQGGSEKLVF

SEQ ID NO: 464964 - protein, 14 aa, Homo sapiens
  CDR3 for beta chain variable domain of TCR clone 232482 (TRBV20-1, TRBJ1-2)
CSGRKDGRAYGYIF

SEQ ID NO: 464965 - protein, 14 aa, Homo sapiens
  CDR3 for alpha chain variable domain of TCR clone 232483 (TRAV1-2, TRAJ16)
CAVNRFSDGQKLPF

SEQ ID NO: 464966 - protein, 20 aa, Homo sapiens
  CDR3 for beta chain variable domain of TCR clone 232483 (TRBV12-5, TRBJ2-5)
CASGPRTSGNQETSTSGQAR

SEQ ID NO: 464967 - protein, 12 aa, Homo sapiens
  CDR3 for alpha chain variable domain of TCR clone 232484 (TRAV12-1, TRAJ40)
CVVYSGTYKYTF

SEQ ID NO: 464968 - protein, 18 aa, Homo sapiens
  CDR3 for beta chain variable domain of TCR clone 232484 (TRBV11-2, TRBJ2-3)
CASSLGGASRGAPNTQYL

SEQ ID NO: 464969 - protein, 16 aa, Homo sapiens
  CDR3 for alpha chain variable domain of TCR clone 232485 (TRAV12-3, TRAJ53)
CAMSPGSGGSNYKLTF

SEQ ID NO: 464970 - protein, 15 aa, Homo sapiens
  CDR3 for beta chain variable domain of TCR clone 232485 (TRBV7-3, TRBJ2-1)
CASSLAGAGADEQFF

SEQ ID NO: 464971 - protein, 19 aa, Homo sapiens
  CDR3 for alpha chain variable domain of TCR clone 232486 (TRAV21, TRAJ15)
AASQPGDSATNQAGTALIF

SEQ ID NO: 464972 - protein, 16 aa, Homo sapiens
  CDR3 for beta chain variable domain of TCR clone 232486 (TRBV4-1, TRBJ2-7)
CDSSRGDILNSYEQYF

SEQ ID NO: 464973 - protein, 22 aa, Homo sapiens
  CDR3 for alpha chain variable domain of TCR clone 232487 (TRAV21, )
CAVRQDAGNNHIQNPDPAVYQL

SEQ ID NO: 464974 - protein, 16 aa, Homo sapiens
  CDR3 for beta chain variable domain of TCR clone 232487 (TRBV4-2, TRBJ1-1)
CASSPLDGGGDTEAFF

SEQ ID NO: 464975 - protein, 12 aa, Homo sapiens
  CDR3 for alpha chain variable domain of TCR clone 232488 (TRAV25, TRAJ11)
CAGASGYSTLTF

SEQ ID NO: 464976 - protein, 13 aa, Homo sapiens
  CDR3 for beta chain variable domain of TCR clone 232488 (TRBV5-8, TRBJ2-3)
CSSLGQGTDTQYF

SEQ ID NO: 464977 - protein, 15 aa, Homo sapiens
  CDR3 for alpha chain variable domain of TCR clone 232489 (TRAV3, TRAJ27)
CAVRDPLTNAGKSPF

SEQ ID NO: 464978 - protein, 15 aa, Homo sapiens
  CDR3 for beta chain variable domain of TCR clone 232489 (TRBV28, TRBJ2-1)
CASSIIAGGRSEQFF

SEQ ID NO: 464979 - protein, 18 aa, Homo sapiens
  CDR3 for alpha chain variable domain of TCR clone 232490 (TRAV29/DV5, TRAJ52)
CAAGFRGAGGTSYGKLTF

SEQ ID NO: 464980 - protein, 13 aa, Homo sapiens
  CDR3 for beta chain variable domain of TCR clone 232490 (TRBV7-9, TRBJ1-2)
CAGSLKQNYGYTF

SEQ ID NO: 464981 - protein, 14 aa, Homo sapiens
  CDR3 for alpha chain variable domain of TCR clone 232491 (TRAV12-1, TRAJ17)
CVVNYKAAGNKLTF

SEQ ID NO: 464982 - protein, 13 aa, Homo sapiens
  CDR3 for beta chain variable domain of TCR clone 232491 (TRBV6-6, TRBJ2-7)
CASSPKHLAEQYF

SEQ ID NO: 464983 - protein, 14 aa, Homo sapiens
  CDR3 for alpha chain variable domain of TCR clone 232492 (TRAV12-2, TRAJ44)
CAVNPAGTASKLTF

SEQ ID NO: 464984 - protein, 15 aa, Homo sapiens
  CDR3 for beta chain variable domain of TCR clone 232492 (TRBV18, TRBJ2-3)
CASSPLAGETDTQYF

SEQ ID NO: 464985 - protein, 12 aa, Homo sapiens
  CDR3 for alpha chain variable domain of TCR clone 232493 (TRAV12-3, TRAJ17)
CAMTLTGNKLTF

SEQ ID NO: 464986 - protein, 13 aa, Homo sapiens
  CDR3 for beta chain variable domain of TCR clone 232493 (TRBV7-9, TRBJ2-1)
CASSWESYNEQFF

SEQ ID NO: 464987 - protein, 12 aa, Homo sapiens
  CDR3 for alpha chain variable domain of TCR clone 232494 (TRAV13-1, TRAJ17)
CAARTAGDKLTF

SEQ ID NO: 464988 - protein, 15 aa, Homo sapiens
  CDR3 for beta chain variable domain of TCR clone 232494 (TRBV7-6, TRBJ1-1)
CASSPQGGANTEAFF

SEQ ID NO: 464989 - protein, 14 aa, Homo sapiens
  CDR3 for alpha chain variable domain of TCR clone 232495 (TRAV38-1, TRAJ40)
CALRPTSVTYKYIF

SEQ ID NO: 464990 - protein, 15 aa, Homo sapiens
  CDR3 for beta chain variable domain of TCR clone 232495 (TRBV20-1, TRBJ2-7)
CSARDRVSGMDEQYF

SEQ ID NO: 464991 - protein, 15 aa, Homo sapiens
  CDR3 for alpha chain variable domain of TCR clone 232496 (TRAV35, TRAJ52)
CAELAGGTSYGKLTF

SEQ ID NO: 464992 - protein, 15 aa, Homo sapiens
  CDR3 for beta chain variable domain of TCR clone 232496 (TRBV7-9, TRBJ1-2)
CASSLDREPNYGYTF

SEQ ID NO: 464993 - protein, 12 aa, Homo sapiens
  CDR3 for alpha chain variable domain of TCR clone 232497 (TRAV21, TRAJ31)
CAVSPASGRLMF

SEQ ID NO: 464994 - protein, 14 aa, Homo sapiens
  CDR3 for beta chain variable domain of TCR clone 232497 (TRBV28, TRBJ2-7)
CASSLLRRSYEQYF

SEQ ID NO: 464995 - protein, 16 aa, Homo sapiens
  CDR3 for alpha chain variable domain of TCR clone 232498 (TRAV3, TRAJ10)
CAVRDMRAGGGNKLTF

SEQ ID NO: 464996 - protein, 16 aa, Homo sapiens
  CDR3 for beta chain variable domain of TCR clone 232498 (TRBV5-7, TRBJ1-5)
CASSLQQDREHQPQHF

SEQ ID NO: 464997 - protein, 11 aa, Homo sapiens
  CDR3 for alpha chain variable domain of TCR clone 232499 (TRAV12-1, TRAJ26)
CVVAYGQNFVF

SEQ ID NO: 464998 - protein, 15 aa, Homo sapiens
  CDR3 for beta chain variable domain of TCR clone 232499 (TRBV20-1, TRBJ2-7)
CSARDRVSGMDEQYF

SEQ ID NO: 464999 - protein, 16 aa, Homo sapiens
  CDR3 for alpha chain variable domain of TCR clone 232500 (TRAV3, TRAJ37)
CAVRGKGSGNTGKLIF

SEQ ID NO: 465000 - protein, 13 aa, Homo sapiens
  CDR3 for beta chain variable domain of TCR clone 232500 (TRBV14, TRBJ2-7)
CATSQDRRYEQYF

SEQ ID NO: 465001 - protein, 15 aa, Homo sapiens
  CDR3 for alpha chain variable domain of TCR clone 232501 (TRAV8-3, TRAJ23)
CAVGDRYNQGGKFIF

SEQ ID NO: 465002 - protein, 15 aa, Homo sapiens
  CDR3 for beta chain variable domain of TCR clone 232501 (TRBV29-1, TRBJ2-5)
EDSSIYLCSAGTQYF

SEQ ID NO: 465003 - protein, 11 aa, Homo sapiens
  CDR3 for alpha chain variable domain of TCR clone 232502 (TRAV13-1, TRAJ49)
CACVGGNQFYF

SEQ ID NO: 465004 - protein, 14 aa, Homo sapiens
  CDR3 for beta chain variable domain of TCR clone 232502 (TRBV11-2, TRBJ2-5)
CASSRTGGIETQYF

SEQ ID NO: 465005 - protein, 17 aa, Homo sapiens
  CDR3 for alpha chain variable domain of TCR clone 232503 (TRAV3, TRAJ42)
CAVRDRDYGGSQGNLIF

SEQ ID NO: 465006 - protein, 16 aa, Homo sapiens
  CDR3 for beta chain variable domain of TCR clone 232503 (TRBV4-2, TRBJ2-1)
CASSQGEGRTVNEQFF

SEQ ID NO: 465007 - protein, 11 aa, Homo sapiens
  CDR3 for alpha chain variable domain of TCR clone 232504 (TRAV3, TRAJ21)
CAVGNSNKFYF

SEQ ID NO: 465008 - protein, 16 aa, Homo sapiens
  CDR3 for beta chain variable domain of TCR clone 232504 (TRBV19, TRBJ2-1)
CASSKAGPSPYNEQFF

SEQ ID NO: 465009 - protein, 14 aa, Homo sapiens
  CDR3 for alpha chain variable domain of TCR clone 232505 (TRAV27, TRAJ23)
CAGAFDNQGGKLIS

SEQ ID NO: 465010 - protein, 15 aa, Homo sapiens
  CDR3 for beta chain variable domain of TCR clone 232505 (TRBV7-3, TRBJ2-7)
CASSLTGQGKYEQYF

SEQ ID NO: 465011 - protein, 12 aa, Homo sapiens
  CDR3 for alpha chain variable domain of TCR clone 232506 (TRAV13-2, TRAJ23)
CAESHRGGKLIF

SEQ ID NO: 465012 - protein, 16 aa, Homo sapiens
  CDR3 for beta chain variable domain of TCR clone 232506 (TRBV12-5, TRBJ2-5)
CASGPRTSGNQETQYF

SEQ ID NO: 465013 - protein, 12 aa, Homo sapiens
  CDR3 for alpha chain variable domain of TCR clone 232507 (TRAV12-3, TRAJ17)
CAWTLTGNKLTF

SEQ ID NO: 465014 - protein, 15 aa, Homo sapiens
  CDR3 for beta chain variable domain of TCR clone 232507 (TRBV20-1, TRBJ2-7)
CSARDRVSGMDEQYF

SEQ ID NO: 465015 - protein, 12 aa, Homo sapiens
  CDR3 for alpha chain variable domain of TCR clone 232508 (TRAV12-3, TRAJ17)
CAMTLTGNKLTF

SEQ ID NO: 465016 - protein, 15 aa, Homo sapiens
  CDR3 for beta chain variable domain of TCR clone 232508 (TRBV5-4, TRBJ2-6)
CASSSGRTGANVLTF

SEQ ID NO: 465017 - protein, 13 aa, Homo sapiens
  CDR3 for alpha chain variable domain of TCR clone 232509 (TRAV8-4, TRAJ10)
CAAFTGGGNKLTF

SEQ ID NO: 465018 - protein, 15 aa, Homo sapiens
  CDR3 for beta chain variable domain of TCR clone 232509 (TRBV2, TRBJ2-3)
CVSSDFEKATDTQYF

SEQ ID NO: 465019 - protein, 13 aa, Homo sapiens
  CDR3 for alpha chain variable domain of TCR clone 232510 (TRAV2, TRAJ40)
CSVVTSGTYKYIF

SEQ ID NO: 465020 - protein, 17 aa, Homo sapiens
  CDR3 for beta chain variable domain of TCR clone 232510 (TRBV15, TRBJ1-4)
CATSRYGTGDPNEKLFF

SEQ ID NO: 465021 - protein, 13 aa, Homo sapiens
  CDR3 for alpha chain variable domain of TCR clone 232511 (TRAV12-1, TRAJ49)
CVVILNTGNQFNF

SEQ ID NO: 465022 - protein, 13 aa, Homo sapiens
  CDR3 for beta chain variable domain of TCR clone 232511 (TRBV10-3, TRBJ2-7)
CASKLAVNYEQYF

SEQ ID NO: 465023 - protein, 13 aa, Homo sapiens
  CDR3 for alpha chain variable domain of TCR clone 232512 (TRAV14/DV4, TRAJ23)
CAMREVKGGKLIF

SEQ ID NO: 465024 - protein, 15 aa, Homo sapiens
  CDR3 for beta chain variable domain of TCR clone 232512 (TRBV27, TRBJ2-7)
CASSPIVTGAYEQYF

SEQ ID NO: 465025 - protein, 13 aa, Homo sapiens
  CDR3 for alpha chain variable domain of TCR clone 232513 (TRAV21, TRAJ27)
CAARPGTAGKSTF

SEQ ID NO: 465026 - protein, 14 aa, Homo sapiens
  CDR3 for beta chain variable domain of TCR clone 232513 (TRBV7-6, TRBJ2-3)
CASSLGTVSDTQYF

SEQ ID NO: 465027 - protein, 14 aa, Homo sapiens
  CDR3 for alpha chain variable domain of TCR clone 232514 (TRAV13-1, TRAJ17)
LSSRSKAAGNKLTF

SEQ ID NO: 465028 - protein, 13 aa, Homo sapiens
  CDR3 for beta chain variable domain of TCR clone 232514 (TRBV7-9, TRBJ1-2)
CASSLKQNYGYTF

SEQ ID NO: 465029 - protein, 14 aa, Homo sapiens
  CDR3 for alpha chain variable domain of TCR clone 232515 (TRAV12-2, TRAJ45)
CALPERGGADGLTF

SEQ ID NO: 465030 - protein, 16 aa, Homo sapiens
  CDR3 for beta chain variable domain of TCR clone 232515 (TRBV28, TRBJ2-1)
CASSLVLMREYNEQFF

SEQ ID NO: 465031 - protein, 13 aa, Homo sapiens
  CDR3 for alpha chain variable domain of TCR clone 232516 (TRAV12-3, TRAJ5)
CAMRPTGRRALTF

SEQ ID NO: 465032 - protein, 14 aa, Homo sapiens
  CDR3 for beta chain variable domain of TCR clone 232516 (TRBV6-3, TRBJ1-2)
CASSEGGGSYGYTF

SEQ ID NO: 465033 - protein, 12 aa, Homo sapiens
  CDR3 for alpha chain variable domain of TCR clone 232517 (TRAV21, TRAJ23)
CAVGPRGGKLIF

SEQ ID NO: 465034 - protein, 13 aa, Homo sapiens
  CDR3 for beta chain variable domain of TCR clone 232517 (TRBV20-1, TRBJ2-7)
CSARTGAGYEQCF

SEQ ID NO: 465035 - protein, 13 aa, Homo sapiens
  CDR3 for alpha chain variable domain of TCR clone 232518 (TRAV3, TRAJ27)
CAVSPLGAGKSTF

SEQ ID NO: 465036 - protein, 14 aa, Homo sapiens
  CDR3 for beta chain variable domain of TCR clone 232518 (TRBV11-2, TRBJ1-2)
CASSLGTANYGYTF

SEQ ID NO: 465037 - protein, 10 aa, Homo sapiens
  CDR3 for alpha chain variable domain of TCR clone 232519 (TRAV9-2, TRAJ49)
CALTGNQFYF

SEQ ID NO: 465038 - protein, 16 aa, Homo sapiens
  CDR3 for beta chain variable domain of TCR clone 232519 (TRBV19, TRBJ1-1)
CASRFGGPVTGTEAFF

SEQ ID NO: 465039 - protein, 16 aa, Homo sapiens
  CDR3 for alpha chain variable domain of TCR clone 232520 (TRAV17, TRAJ52)
CATGIIGGTSYGKLTV

SEQ ID NO: 465040 - protein, 12 aa, Homo sapiens
  CDR3 for beta chain variable domain of TCR clone 232520 (TRBV7-3, TRBJ2-1)
CASSFINNEQFF

SEQ ID NO: 465041 - protein, 13 aa, Homo sapiens
  CDR3 for alpha chain variable domain of TCR clone 232521 (TRAV27, TRAJ39)
CEGVNNAGNMLTF

SEQ ID NO: 465042 - protein, 19 aa, Homo sapiens
  CDR3 for beta chain variable domain of TCR clone 232521 (TRBV5-1, TRBJ2-3)
CASSLWLAGGITTTDTQYF

SEQ ID NO: 465043 - protein, 13 aa, Homo sapiens
  CDR3 for alpha chain variable domain of TCR clone 232522 (TRAV8-3, TRAJ31)
CAVGARNNARLMV

SEQ ID NO: 465044 - protein, 14 aa, Homo sapiens
  CDR3 for beta chain variable domain of TCR clone 232522 (TRBV12-5, TRBJ2-5)
CASGSRTHQETQYF

SEQ ID NO: 465045 - protein, 12 aa, Homo sapiens
  CDR3 for alpha chain variable domain of TCR clone 232523 (TRAV20, TRAJ39)
CAVGNAGNMLTF

SEQ ID NO: 465046 - protein, 17 aa, Homo sapiens
  CDR3 for beta chain variable domain of TCR clone 232523 (TRBV4-1, TRBJ2-3)
CASSQGDVSGGTDTQYF

SEQ ID NO: 465047 - protein, 16 aa, Homo sapiens
  CDR3 for alpha chain variable domain of TCR clone 232524 (TRAV3, TRAJ37)
CAVREKGSGNTGKLIF

SEQ ID NO: 465048 - protein, 21 aa, Homo sapiens
  CDR3 for beta chain variable domain of TCR clone 232524 (TRBV15, TRBJ2-1)
AWGTQPCTCVPPAEVDTARFF

SEQ ID NO: 465049 - protein, 15 aa, Homo sapiens
  CDR3 for alpha chain variable domain of TCR clone 232525 (TRAV26-1, TRAJ29)
CIVRVEGSGNTPLVF

SEQ ID NO: 465050 - protein, 18 aa, Homo sapiens
  CDR3 for beta chain variable domain of TCR clone 232525 (TRBV11-2, TRBJ2-3)
CASSVRTSGSKKTDTQYF

SEQ ID NO: 465051 - protein, 17 aa, Homo sapiens
  CDR3 for alpha chain variable domain of TCR clone 232526 (TRAV8-6, TRAJ8)
CAVKEGIENTGFQKLLF

SEQ ID NO: 465052 - protein, 12 aa, Homo sapiens
  CDR3 for beta chain variable domain of TCR clone 232526 (TRBV19, TRBJ1-4)
CASKDWPGGLFF

SEQ ID NO: 465053 - protein, 13 aa, Homo sapiens
  CDR3 for alpha chain variable domain of TCR clone 232527 (TRAV13-1, TRAJ6)
CAASRGGSYIPTF

SEQ ID NO: 465054 - protein, 15 aa, Homo sapiens
  CDR3 for beta chain variable domain of TCR clone 232527 (TRBV25-1, TRBJ2-5)
CASSDTGTHQETQFF

SEQ ID NO: 465055 - protein, 13 aa, Homo sapiens
  CDR3 for alpha chain variable domain of TCR clone 232528 (TRAV1-2, TRAJ9)
CAALNTGGFKTIF

SEQ ID NO: 465056 - protein, 14 aa, Homo sapiens
  CDR3 for beta chain variable domain of TCR clone 232528 (TRBV28, TRBJ2-3)
CASSWRGRADTQYF

SEQ ID NO: 465057 - protein, 14 aa, Homo sapiens
  CDR3 for alpha chain variable domain of TCR clone 232529 (TRAV12-2, TRAJ40)
CAVKIPSGTYKYIF

SEQ ID NO: 465058 - protein, 14 aa, Homo sapiens
  CDR3 for beta chain variable domain of TCR clone 232529 (TRBV20-1, TRBJ1-1)
CSAQTRIGGTETFF

SEQ ID NO: 465059 - protein, 11 aa, Homo sapiens
  CDR3 for alpha chain variable domain of TCR clone 232530 (TRAV1-2, TRAJ20)
CAVSNDYKLNF

SEQ ID NO: 465060 - protein, 16 aa, Homo sapiens
  CDR3 for beta chain variable domain of TCR clone 232530 (TRBV29-1, TRBJ2-6)
CSAEDITYSGANVLTF

SEQ ID NO: 465061 - protein, 16 aa, Homo sapiens
  CDR3 for alpha chain variable domain of TCR clone 232531 (TRAV26-1, TRAJ44)
CIVRVGNTGTASKLTF

SEQ ID NO: 465062 - protein, 14 aa, Homo sapiens
  CDR3 for beta chain variable domain of TCR clone 232531 (TRBV12-5, TRBJ2-5)
CASGSRTHQETQYF

SEQ ID NO: 465063 - protein, 16 aa, Homo sapiens
  CDR3 for alpha chain variable domain of TCR clone 232532 (TRAV23/DV6, TRAJ9)
CAASIGGNTGGFKTIF

SEQ ID NO: 465064 - protein, 13 aa, Homo sapiens
  CDR3 for beta chain variable domain of TCR clone 232532 (TRBV7-9, TRBJ2-2)
CASSLDPTGELFF

SEQ ID NO: 465065 - protein, 16 aa, Homo sapiens
  CDR3 for alpha chain variable domain of TCR clone 232533 (TRAV3, TRAJ37)
CAVRGKGSGHTGKLIF

SEQ ID NO: 465066 - protein, 15 aa, Homo sapiens
  CDR3 for beta chain variable domain of TCR clone 232533 (TRBV7-9, TRBJ2-2)
CASGPLDTFPGELFF

SEQ ID NO: 465067 - protein, 13 aa, Homo sapiens
  CDR3 for alpha chain variable domain of TCR clone 232534 (TRAV21, TRAJ57)
CAVTQGGSEKLVF

SEQ ID NO: 465068 - protein, 17 aa, Homo sapiens
  CDR3 for beta chain variable domain of TCR clone 232534 (TRBV13, TRBJ2-3)
CARSLSRVAGGRNTQYF

SEQ ID NO: 465069 - protein, 14 aa, Homo sapiens
  CDR3 for alpha chain variable domain of TCR clone 232535 (TRAV12-3, TRAJ5)
CAMTWDTGRRALTF

SEQ ID NO: 465070 - protein, 14 aa, Homo sapiens
  CDR3 for beta chain variable domain of TCR clone 232535 (TRBV10-2, TRBJ1-5)
CASSSTGRNQLQHF

SEQ ID NO: 465071 - protein, 14 aa, Homo sapiens
  CDR3 for alpha chain variable domain of TCR clone 232536 (TRAV12-2, TRAJ13)
CAVKKTGGYQKVTF

SEQ ID NO: 465072 - protein, 15 aa, Homo sapiens
  CDR3 for beta chain variable domain of TCR clone 232536 (TRBV7-3, TRBJ2-1)
CASSLTSGSYNEQFF

SEQ ID NO: 465073 - protein, 16 aa, Homo sapiens
  CDR3 for alpha chain variable domain of TCR clone 232537 (TRAV30, TRAJ24)
CGTEIVDADRWGKFQF

SEQ ID NO: 465074 - protein, 13 aa, Homo sapiens
  CDR3 for beta chain variable domain of TCR clone 232537 (TRBV12-4, TRBJ2-3)
CASSFPPRDTQYF

SEQ ID NO: 465075 - protein, 11 aa, Homo sapiens
  CDR3 for alpha chain variable domain of TCR clone 232538 (TRAV35, TRAJ30)
CAPGGDDKIIF

SEQ ID NO: 465076 - protein, 16 aa, Homo sapiens
  CDR3 for beta chain variable domain of TCR clone 232538 (TRBV7-6, TRBJ2-1)
CIAVQAAWGGADEQFF

SEQ ID NO: 465077 - protein, 12 aa, Homo sapiens
  CDR3 for alpha chain variable domain of TCR clone 232539 (TRAV12-1, TRAJ34)
CVVAGATDKLIF

SEQ ID NO: 465078 - protein, 16 aa, Homo sapiens
  CDR3 for beta chain variable domain of TCR clone 232539 (TRBV7-2, TRBJ1-2)
CASSSNQDRRGNGYTF

SEQ ID NO: 465079 - protein, 18 aa, Homo sapiens
  CDR3 for alpha chain variable domain of TCR clone 232540 (TRAV12-3, TRAJ52)
CAMSVGGAGGTSYGKLTF

SEQ ID NO: 465080 - protein, 17 aa, Homo sapiens
  CDR3 for beta chain variable domain of TCR clone 232540 (TRBV13, TRBJ2-3)
CASSLSRVAGGRNTQYL

SEQ ID NO: 465081 - protein, 13 aa, Homo sapiens
  CDR3 for alpha chain variable domain of TCR clone 232541 (TRAV1-1, TRAJ9)
CAAKNTGGFKTIF

SEQ ID NO: 465082 - protein, 14 aa, Homo sapiens
  CDR3 for beta chain variable domain of TCR clone 232541 (TRBV20-1, TRBJ2-1)
WSAQIGGSANEQFF

SEQ ID NO: 465083 - protein, 13 aa, Homo sapiens
  CDR3 for alpha chain variable domain of TCR clone 232542 (TRAV29/DV5, TRAJ31)
CAASRNNNARLMF

SEQ ID NO: 465084 - protein, 15 aa, Homo sapiens
  CDR3 for beta chain variable domain of TCR clone 232542 (TRBV7-2, TRBJ2-1)
CASSFQADEYNEQFF

SEQ ID NO: 465085 - protein, 13 aa, Homo sapiens
  CDR3 for alpha chain variable domain of TCR clone 232543 (TRAV12-2, TRAJ7)
CPGLIYGNNRLAF

SEQ ID NO: 465086 - protein, 14 aa, Homo sapiens
  CDR3 for beta chain variable domain of TCR clone 232543 (TRBV6-1, TRBJ2-1)
CATFTSGQNNEQFF

SEQ ID NO: 465087 - protein, 14 aa, Homo sapiens
  CDR3 for alpha chain variable domain of TCR clone 232544 (TRAV36/DV7, TRAJ40)
CAVATTSGTYKYIF

SEQ ID NO: 465088 - protein, 13 aa, Homo sapiens
  CDR3 for beta chain variable domain of TCR clone 232544 (TRBV10-3, TRBJ2-5)
CAMTSGAGETQYF

SEQ ID NO: 465089 - protein, 14 aa, Homo sapiens
  CDR3 for alpha chain variable domain of TCR clone 232545 (TRAV12-2, TRAJ17)
CAVLFKAAGNKLTF

SEQ ID NO: 465090 - protein, 15 aa, Homo sapiens
  CDR3 for beta chain variable domain of TCR clone 232545 (TRBV7-8, TRBJ1-5)
CASSLERRGLEPQHF

SEQ ID NO: 465091 - protein, 14 aa, Homo sapiens
  CDR3 for alpha chain variable domain of TCR clone 232546 (TRAV8-4, TRAJ54)
CAVSEVLGAQKLVF

SEQ ID NO: 465092 - protein, 15 aa, Homo sapiens
  CDR3 for beta chain variable domain of TCR clone 232546 (TRBV6-1, TRBJ2-6)
CASSSRPAGANVLTF

SEQ ID NO: 465093 - protein, 13 aa, Homo sapiens
  CDR3 for alpha chain variable domain of TCR clone 232547 (TRAV17, TRAJ54)
CATSWGGAQKLVF

SEQ ID NO: 465094 - protein, 15 aa, Homo sapiens
  CDR3 for beta chain variable domain of TCR clone 232547 (TRBV4-3, TRBJ2-3)
CASSPSPLSTDTQYF

SEQ ID NO: 465095 - protein, 12 aa, Homo sapiens
  CDR3 for alpha chain variable domain of TCR clone 232548 (TRAV4, TRAJ6)
CLAPGGSYIPTF

SEQ ID NO: 465096 - protein, 14 aa, Homo sapiens
  CDR3 for beta chain variable domain of TCR clone 232548 (TRBV7-3, TRBJ1-1)
CASSLKGGNTEAFF

SEQ ID NO: 465097 - protein, 14 aa, Homo sapiens
  CDR3 for alpha chain variable domain of TCR clone 232549 (TRAV23/DV6, TRAJ8)
CAASKATGFQKLSF

SEQ ID NO: 465098 - protein, 15 aa, Homo sapiens
  CDR3 for beta chain variable domain of TCR clone 232549 (TRBV28, TRBJ2-3)
CASSPDRQGANTQYF

SEQ ID NO: 465099 - protein, 14 aa, Homo sapiens
  CDR3 for alpha chain variable domain of TCR clone 232550 (TRAV3, TRAJ21)
CAVRDAYNFNKFYF

SEQ ID NO: 465100 - protein, 17 aa, Homo sapiens
  CDR3 for beta chain variable domain of TCR clone 232550 (TRBV20-1, TRBJ1-6)
CSARGGYTFSYNSPLHF

SEQ ID NO: 465101 - protein, 13 aa, Homo sapiens
  CDR3 for alpha chain variable domain of TCR clone 232551 (TRAV12-2, TRAJ50)
CAVIVTSYDKVIF

SEQ ID NO: 465102 - protein, 12 aa, Homo sapiens
  CDR3 for beta chain variable domain of TCR clone 232551 (TRBV7-8, TRBJ2-7)
CASSLGDREQYF

SEQ ID NO: 465103 - protein, 14 aa, Homo sapiens
  CDR3 for alpha chain variable domain of TCR clone 232552 (TRAV1-2, TRAJ29)
CAVRELTSATPLVF

SEQ ID NO: 465104 - protein, 13 aa, Homo sapiens
  CDR3 for beta chain variable domain of TCR clone 232552 (TRBV19, TRBJ2-5)
CASSMGGAGTQYF

SEQ ID NO: 465105 - protein, 17 aa, Homo sapiens
  CDR3 for alpha chain variable domain of TCR clone 232553 (TRAV3, TRAJ6)
CAVRDGPRAGGSYIPTF

SEQ ID NO: 465106 - protein, 12 aa, Homo sapiens
  CDR3 for beta chain variable domain of TCR clone 232553 (TRBV6-5, TRBJ2-3)
CASSDTTDTQYF

SEQ ID NO: 465107 - protein, 12 aa, Homo sapiens
  CDR3 for alpha chain variable domain of TCR clone 232554 (TRAV29/DV5, TRAJ43)
CAAPYNNNDMRF

SEQ ID NO: 465108 - protein, 17 aa, Homo sapiens
  CDR3 for beta chain variable domain of TCR clone 232554 (TRBV19, TRBJ2-6)
CASSTGQVVSGANVLTF

SEQ ID NO: 465109 - protein, 10 aa, Homo sapiens
  CDR3 for alpha chain variable domain of TCR clone 232555 (TRAV12-1, TRAJ37)
ARGNTGELII

SEQ ID NO: 465110 - protein, 15 aa, Homo sapiens
  CDR3 for beta chain variable domain of TCR clone 232555 (TRBV7-2, TRBJ2-3)
CASSLEQGGTDTQYF

SEQ ID NO: 465111 - protein, 13 aa, Homo sapiens
  CDR3 for alpha chain variable domain of TCR clone 232556 (TRAV27, TRAJ21)
CAGATHNFNNFYF

SEQ ID NO: 465112 - protein, 13 aa, Homo sapiens
  CDR3 for beta chain variable domain of TCR clone 232556 (TRBV2, TRBJ2-2)
CQQGRQGTGELFF

SEQ ID NO: 465113 - protein, 14 aa, Homo sapiens
  CDR3 for alpha chain variable domain of TCR clone 232557 (TRAV8-3, TRAJ4)
CAVGASGGYNKLIF

SEQ ID NO: 465114 - protein, 13 aa, Homo sapiens
  CDR3 for beta chain variable domain of TCR clone 232557 (TRBV4-1, TRBJ2-1)
CASSQEVQYEQFF

SEQ ID NO: 465115 - protein, 13 aa, Homo sapiens
  CDR3 for alpha chain variable domain of TCR clone 232558 (TRAV17, TRAJ31)
CATDENNNARLMF

SEQ ID NO: 465116 - protein, 11 aa, Homo sapiens
  CDR3 for beta chain variable domain of TCR clone 232558 (TRBV7-8, TRBJ2-7)
CASSLSREQYF

SEQ ID NO: 465117 - protein, 12 aa, Homo sapiens
  CDR3 for alpha chain variable domain of TCR clone 232559 (TRAV2, TRAJ3)
CAVRSSASKIIF

SEQ ID NO: 465118 - protein, 16 aa, Homo sapiens
  CDR3 for beta chain variable domain of TCR clone 232559 (TRBV23-1, TRBJ2-7)
TASLRQSPRFGYEQYF

SEQ ID NO: 465119 - protein, 15 aa, Homo sapiens
  CDR3 for alpha chain variable domain of TCR clone 232560 (TRAV17, TRAJ57)
CATGPSQGGSEKLVS

SEQ ID NO: 465120 - protein, 15 aa, Homo sapiens
  CDR3 for beta chain variable domain of TCR clone 232560 (TRBV12-4, TRBJ1-5)
CQQPTGRGVNQPQHF

SEQ ID NO: 465121 - protein, 11 aa, Homo sapiens
  CDR3 for alpha chain variable domain of TCR clone 232561 (TRAV16, TRAJ31)
CALFNNARLMF

SEQ ID NO: 465122 - protein, 15 aa, Homo sapiens
  CDR3 for beta chain variable domain of TCR clone 232561 (TRBV18, TRBJ1-1)
CASSPRQGENTESFF

SEQ ID NO: 465123 - protein, 14 aa, Homo sapiens
  CDR3 for alpha chain variable domain of TCR clone 232562 (TRAV12-2, TRAJ40)
CAVKIPSGTYKYIF

SEQ ID NO: 465124 - protein, 15 aa, Homo sapiens
  CDR3 for beta chain variable domain of TCR clone 232562 (TRBV5-1, TRBJ2-1)
CASSPPSAPYNEQFF

SEQ ID NO: 465125 - protein, 15 aa, Homo sapiens
  CDR3 for alpha chain variable domain of TCR clone 232563 (TRAV17, TRAJ57)
CATGPSQGGSEKLVC

SEQ ID NO: 465126 - protein, 16 aa, Homo sapiens
  CDR3 for beta chain variable domain of TCR clone 232563 (TRBV12-4, TRBJ1-5)
CASSRPVGGCNQPQHF

SEQ ID NO: 465127 - protein, 15 aa, Homo sapiens
  CDR3 for alpha chain variable domain of TCR clone 232564 (TRAV17, TRAJ57)
CATGPSQGGSEKLVF

SEQ ID NO: 465128 - protein, 10 aa, Homo sapiens
  CDR3 for beta chain variable domain of TCR clone 232564 (TRBV6-3, TRBJ2-7)
CASSSPGQFS

SEQ ID NO: 465129 - protein, 14 aa, Homo sapiens
  CDR3 for alpha chain variable domain of TCR clone 232565 (TRAV12-3, TRAJ10)
SHLPLTGGGNKLTF

SEQ ID NO: 465130 - protein, 13 aa, Homo sapiens
  CDR3 for beta chain variable domain of TCR clone 232565 (TRBV27, TRBJ2-7)
CASSLTTGYEQYF

SEQ ID NO: 465131 - protein, 17 aa, Homo sapiens
  CDR3 for alpha chain variable domain of TCR clone 232566 (TRAV3, TRAJ42)
CAVRGRDYGGSQGNLIF

SEQ ID NO: 465132 - protein, 14 aa, Homo sapiens
  CDR3 for beta chain variable domain of TCR clone 232566 (TRBV5-4, TRBJ1-1)
CASSLESRRDEAFF

SEQ ID NO: 465133 - protein, 15 aa, Homo sapiens
  CDR3 for alpha chain variable domain of TCR clone 232567 (TRAV26-1, TRAJ29)
CIVRVEGSGNTPPVF

SEQ ID NO: 465134 - protein, 15 aa, Homo sapiens
  CDR3 for beta chain variable domain of TCR clone 232567 (TRBV7-9, TRBJ1-5)
CASSQGHQPNQPQHF

SEQ ID NO: 465135 - protein, 14 aa, Homo sapiens
  CDR3 for alpha chain variable domain of TCR clone 232568 (TRAV21, TRAJ21)
CAVKGFGNFNKFYF

SEQ ID NO: 465136 - protein, 15 aa, Homo sapiens
  CDR3 for beta chain variable domain of TCR clone 232568 (TRBV19, TRBJ1-1)
CASTSGQIQNTEASF

SEQ ID NO: 465137 - protein, 11 aa, Homo sapiens
  CDR3 for alpha chain variable domain of TCR clone 232569 (TRAV2, TRAJ33)
CAVDSNYQLIW

SEQ ID NO: 465138 - protein, 15 aa, Homo sapiens
  CDR3 for beta chain variable domain of TCR clone 232569 (TRBV7-3, TRBJ2-2)
CASKANGANTGELFF

SEQ ID NO: 465139 - protein, 16 aa, Homo sapiens
  CDR3 for alpha chain variable domain of TCR clone 232570 (TRAV30, TRAJ24)
CGTEIVDADSWGKFQF

SEQ ID NO: 465140 - protein, 12 aa, Homo sapiens
  CDR3 for beta chain variable domain of TCR clone 232570 (TRBV11-2, TRBJ2-2)
CGSSLPTGELFF

SEQ ID NO: 465141 - protein, 15 aa, Homo sapiens
  CDR3 for alpha chain variable domain of TCR clone 232571 (TRAV27, TRAJ50)
CAGRERGTSYDKVIF

SEQ ID NO: 465142 - protein, 15 aa, Homo sapiens
  CDR3 for beta chain variable domain of TCR clone 232571 (TRBV20-1, TRBJ2-5)
CSAEGTGGLQETQYF

SEQ ID NO: 465143 - protein, 13 aa, Homo sapiens
  CDR3 for alpha chain variable domain of TCR clone 232572 (TRAV30, TRAJ49)
CGTESQPVTSSIL

SEQ ID NO: 465144 - protein, 17 aa, Homo sapiens
  CDR3 for beta chain variable domain of TCR clone 232572 (TRBV4-1, TRBJ2-3)
CASSQDPAGGPLDTQYF

SEQ ID NO: 465145 - protein, 16 aa, Homo sapiens
  CDR3 for alpha chain variable domain of TCR clone 232573 (TRAV16, TRAJ52)
CALSAAGGTSYGKLTF

SEQ ID NO: 465146 - protein, 12 aa, Homo sapiens
  CDR3 for beta chain variable domain of TCR clone 232573 (TRBV7-3, TRBJ1-1)
CASSHGGTEAFF

SEQ ID NO: 465147 - protein, 13 aa, Homo sapiens
  CDR3 for alpha chain variable domain of TCR clone 232574 (TRAV12-2, TRAJ7)
CAVNLYENNRLAF

SEQ ID NO: 465148 - protein, 14 aa, Homo sapiens
  CDR3 for beta chain variable domain of TCR clone 232574 (TRBV25-1, TRBJ1-2)
CASSEATGPYGYTF

SEQ ID NO: 465149 - protein, 15 aa, Homo sapiens
  CDR3 for alpha chain variable domain of TCR clone 232575 (TRAV3, TRAJ17)
CAVSPKEAAGNKLTF

SEQ ID NO: 465150 - protein, 12 aa, Homo sapiens
  CDR3 for beta chain variable domain of TCR clone 232575 (TRBV7-9, TRBJ1-6)
CASSLVTSHLHF

SEQ ID NO: 465151 - protein, 13 aa, Homo sapiens
  CDR3 for alpha chain variable domain of TCR clone 232576 (TRAV13-1, TRAJ12)
CAASPDSSYKLIF

SEQ ID NO: 465152 - protein, 16 aa, Homo sapiens
  CDR3 for beta chain variable domain of TCR clone 232576 (TRBV15, TRBJ2-1)
CATSRERPAGAYEQFF

SEQ ID NO: 465153 - protein, 12 aa, Homo sapiens
  CDR3 for alpha chain variable domain of TCR clone 232577 (TRAV8-4, TRAJ43)
CAVSVTNNDMGF

SEQ ID NO: 465154 - protein, 14 aa, Homo sapiens
  CDR3 for beta chain variable domain of TCR clone 232577 (TRBV11-2, TRBJ1-2)
CASSLGTANYGYTF

SEQ ID NO: 465155 - protein, 15 aa, Homo sapiens
  CDR3 for alpha chain variable domain of TCR clone 232578 (TRAV30, TRAJ57)
CGTAIPKGGSEKLVF

SEQ ID NO: 465156 - protein, 13 aa, Homo sapiens
  CDR3 for beta chain variable domain of TCR clone 232578 (TRBV7-9, TRBJ1-2)
CASSPSNFWGYTF

SEQ ID NO: 465157 - protein, 14 aa, Homo sapiens
  CDR3 for alpha chain variable domain of TCR clone 232579 (TRAV8-4, TRAJ16)
CAVSPVGRWPEAAL

SEQ ID NO: 465158 - protein, 14 aa, Homo sapiens
  CDR3 for beta chain variable domain of TCR clone 232579 (TRBV12-5, TRBJ2-5)
CASGSRTHQETQYF

SEQ ID NO: 465159 - protein, 12 aa, Homo sapiens
  CDR3 for alpha chain variable domain of TCR clone 232580 (TRAV13-1, TRAJ48)
CSARVGGEKLTF

SEQ ID NO: 465160 - protein, 14 aa, Homo sapiens
  CDR3 for beta chain variable domain of TCR clone 232580 (TRBV20-1, TRBJ2-7)
CSASSTSGTYEQYF

SEQ ID NO: 465161 - protein, 11 aa, Homo sapiens
  CDR3 for alpha chain variable domain of TCR clone 232581 (TRAV8-6, TRAJ42)
GGGGSQGNLIF

SEQ ID NO: 465162 - protein, 15 aa, Homo sapiens
  CDR3 for beta chain variable domain of TCR clone 232581 (TRBV7-9, TRBJ1-6)
CASSSPGRGNSPLHF

SEQ ID NO: 465163 - protein, 14 aa, Homo sapiens
  CDR3 for alpha chain variable domain of TCR clone 232582 (TRAV16, TRAJ40)
CALHESYYLRNLQI

SEQ ID NO: 465164 - protein, 13 aa, Homo sapiens
  CDR3 for beta chain variable domain of TCR clone 232582 (TRBV7-3, TRBJ1-1)
CASSQDWGAEAFF

SEQ ID NO: 465165 - protein, 13 aa, Homo sapiens
  CDR3 for alpha chain variable domain of TCR clone 232583 (TRAV17, TRAJ9)
CATDYTGGFKTIF

SEQ ID NO: 465166 - protein, 17 aa, Homo sapiens
  CDR3 for beta chain variable domain of TCR clone 232583 (TRBV19, TRBJ2-7)
CASSISFYDSYPYEQYF

SEQ ID NO: 465167 - protein, 14 aa, Homo sapiens
  CDR3 for alpha chain variable domain of TCR clone 232584 (TRAV12-3, TRAJ12)
CAMSEVDSSYKLIF

SEQ ID NO: 465168 - protein, 14 aa, Homo sapiens
  CDR3 for beta chain variable domain of TCR clone 232584 (TRBV19, TRBJ2-1)
CASPTFVLSGEQFF

SEQ ID NO: 465169 - protein, 13 aa, Homo sapiens
  CDR3 for alpha chain variable domain of TCR clone 232585 (TRAV16, TRAJ37)
CALRGSNTGKLIF

SEQ ID NO: 465170 - protein, 15 aa, Homo sapiens
  CDR3 for beta chain variable domain of TCR clone 232585 (TRBV5-1, TRBJ2-3)
CASSVTSGSTDTQYF

SEQ ID NO: 465171 - protein, 14 aa, Homo sapiens
  CDR3 for alpha chain variable domain of TCR clone 232586 (TRAV22, TRAJ6)
CAWVGPGGSYIPTF

SEQ ID NO: 465172 - protein, 11 aa, Homo sapiens
  CDR3 for beta chain variable domain of TCR clone 232586 (TRBV20-1, TRBJ2-1)
CSLSSGSEQFF

SEQ ID NO: 465173 - protein, 15 aa, Homo sapiens
  CDR3 for alpha chain variable domain of TCR clone 232587 (TRAV3, TRAJ5)
CAVRDLDTGRRALTF

SEQ ID NO: 465174 - protein, 16 aa, Homo sapiens
  CDR3 for beta chain variable domain of TCR clone 232587 (TRBV5-1, TRBJ2-3)
CASSSVGRRSTDTQYF

SEQ ID NO: 465175 - protein, 16 aa, Homo sapiens
  CDR3 for alpha chain variable domain of TCR clone 232588 (TRAV26-1, TRAJ37)
CIARGDDSGNTGKLIF

SEQ ID NO: 465176 - protein, 13 aa, Homo sapiens
  CDR3 for beta chain variable domain of TCR clone 232588 (TRBV4-1, TRBJ2-2)
CASSQENTGELFF

SEQ ID NO: 465177 - protein, 15 aa, Homo sapiens
  CDR3 for alpha chain variable domain of TCR clone 232589 (TRAV1-2, TRAJ16)
CAVRARSSDGQKLLF

SEQ ID NO: 465178 - protein, 19 aa, Homo sapiens
  CDR3 for beta chain variable domain of TCR clone 232589 (TRBV11-3, TRBJ2-3)
CASGFGTSGGPRGGGTQYF

SEQ ID NO: 465179 - protein, 14 aa, Homo sapiens
  CDR3 for alpha chain variable domain of TCR clone 232590 (TRAV38-1, TRAJ40)
CALRPTSGTYKYIF

SEQ ID NO: 465180 - protein, 15 aa, Homo sapiens
  CDR3 for beta chain variable domain of TCR clone 232590 (TRBV6-1, TRBJ2-7)
CASSEGVGNPYEQYF

SEQ ID NO: 465181 - protein, 16 aa, Homo sapiens
  CDR3 for alpha chain variable domain of TCR clone 232591 (TRAV26-1, TRAJ36)
CIVRVSYQTGANNPFF

SEQ ID NO: 465182 - protein, 14 aa, Homo sapiens
  CDR3 for beta chain variable domain of TCR clone 232591 (TRBV20-1, TRBJ2-3)
CSARSSGGTDTQYF

SEQ ID NO: 465183 - protein, 12 aa, Homo sapiens
  CDR3 for alpha chain variable domain of TCR clone 232592 (TRAV21, TRAJ13)
RGPSGGYQKVTF

SEQ ID NO: 465184 - protein, 15 aa, Homo sapiens
  CDR3 for beta chain variable domain of TCR clone 232592 (TRBV7-9, TRBJ1-6)
CASSSPGRGNSPLHF

SEQ ID NO: 465185 - protein, 13 aa, Homo sapiens
  CDR3 for alpha chain variable domain of TCR clone 232593 (TRAV3, TRAJ20)
CAVRDTPRYKLSF

SEQ ID NO: 465186 - protein, 11 aa, Homo sapiens
  CDR3 for beta chain variable domain of TCR clone 232593 (TRBV6-3, TRBJ2-3)
CATGQADTQYF

SEQ ID NO: 465187 - protein, 10 aa, Homo sapiens
  CDR3 for alpha chain variable domain of TCR clone 232594 (TRAV12-3, TRAJ18)
CAMSAEAQPW

SEQ ID NO: 465188 - protein, 14 aa, Homo sapiens
  CDR3 for beta chain variable domain of TCR clone 232594 (TRBV7-9, TRBJ2-5)
CASSLAPDQETQYF

SEQ ID NO: 465189 - protein, 15 aa, Homo sapiens
  CDR3 for alpha chain variable domain of TCR clone 232595 (TRAV20, TRAJ43)
CAVQAGKSSNNDMRF

SEQ ID NO: 465190 - protein, 16 aa, Homo sapiens
  CDR3 for beta chain variable domain of TCR clone 232595 (TRBV11-2, TRBJ1-2)
CASSLDTGGADYGYTF

SEQ ID NO: 465191 - protein, 14 aa, Homo sapiens
  CDR3 for alpha chain variable domain of TCR clone 232596 (TRAV9-2, TRAJ39)
CALYIYNAGNMLTF

SEQ ID NO: 465192 - protein, 14 aa, Homo sapiens
  CDR3 for beta chain variable domain of TCR clone 232596 (TRBV12-4, TRBJ1-1)
CASTWTGHDTEAFF

SEQ ID NO: 465193 - protein, 15 aa, Homo sapiens
  CDR3 for alpha chain variable domain of TCR clone 232597 (TRAV2, TRAJ9)
CSVEDRGTGGFKTIF

SEQ ID NO: 465194 - protein, 15 aa, Homo sapiens
  CDR3 for beta chain variable domain of TCR clone 232597 (TRBV6-5, TRBJ1-2)
CASSYSPPRFYGYTF

SEQ ID NO: 465195 - protein, 15 aa, Homo sapiens
  CDR3 for alpha chain variable domain of TCR clone 232598 (TRAV8-3, TRAJ40)
CAAPSLGSGTYKYIF

SEQ ID NO: 465196 - protein, 12 aa, Homo sapiens
  CDR3 for beta chain variable domain of TCR clone 232598 (TRBV12-4, TRBJ2-7)
CASSLGGYEQYF

SEQ ID NO: 465197 - protein, 16 aa, Homo sapiens
  CDR3 for alpha chain variable domain of TCR clone 232599 (TRAV21, TRAJ52)
CAVTNAGGTSYGKLTF

SEQ ID NO: 465198 - protein, 16 aa, Homo sapiens
  CDR3 for beta chain variable domain of TCR clone 232599 (TRBV9, TRBJ2-1)
CASSVGGGGNYNEQFF

SEQ ID NO: 465199 - protein, 11 aa, Homo sapiens
  CDR3 for alpha chain variable domain of TCR clone 232600 (TRAV21, TRAJ48)
CAVDGNDKLTF

SEQ ID NO: 465200 - protein, 16 aa, Homo sapiens
  CDR3 for beta chain variable domain of TCR clone 232600 (TRBV19, TRBJ2-1)
CASSSKGTRSYNEQFF

SEQ ID NO: 465201 - protein, 15 aa, Homo sapiens
  CDR3 for alpha chain variable domain of TCR clone 232601 (TRAV1-2, TRAJ30)
CAVRPHGNRDHKNIF

SEQ ID NO: 465202 - protein, 13 aa, Homo sapiens
  CDR3 for beta chain variable domain of TCR clone 232601 (TRBV4-1, TRBJ2-7)
CASSQGQAYEQYF

SEQ ID NO: 465203 - protein, 14 aa, Homo sapiens
  CDR3 for alpha chain variable domain of TCR clone 232602 (TRAV17, TRAJ34)
CATDSLEGTDKLIF

SEQ ID NO: 465204 - protein, 14 aa, Homo sapiens
  CDR3 for beta chain variable domain of TCR clone 232602 (TRBV28, TRBJ2-1)
CASSPGEGGNEQFF

SEQ ID NO: 465205 - protein, 13 aa, Homo sapiens
  CDR3 for alpha chain variable domain of TCR clone 232603 (TRAV8-3, TRAJ28)
CAVGAVGRYQLTF

SEQ ID NO: 465206 - protein, 15 aa, Homo sapiens
  CDR3 for beta chain variable domain of TCR clone 232603 (TRBV6-3, TRBJ2-7)
CASSSPGTVFYEQYF

SEQ ID NO: 465207 - protein, 18 aa, Homo sapiens
  CDR3 for alpha chain variable domain of TCR clone 232604 (TRAV9-2, TRAJ52)
CALSRHNAGGTSYGKLTF

SEQ ID NO: 465208 - protein, 13 aa, Homo sapiens
  CDR3 for beta chain variable domain of TCR clone 232604 (TRBV7-9, TRBJ1-2)
CANSLKQNYGYTF

SEQ ID NO: 465209 - protein, 15 aa, Homo sapiens
  CDR3 for alpha chain variable domain of TCR clone 232605 (TRAV17, TRAJ4)
CATGTWSGGFNKLIF

SEQ ID NO: 465210 - protein, 13 aa, Homo sapiens
  CDR3 for beta chain variable domain of TCR clone 232605 (TRBV6-6, TRBJ2-7)
CASSPKHLAEQYF

SEQ ID NO: 465211 - protein, 14 aa, Homo sapiens
  CDR3 for alpha chain variable domain of TCR clone 232606 (TRAV8-4, TRAJ8)
CAVSEDTGIQKLVF

SEQ ID NO: 465212 - protein, 12 aa, Homo sapiens
  CDR3 for beta chain variable domain of TCR clone 232606 (TRBV14, TRBJ1-1)
CASRPYETEAFF

SEQ ID NO: 465213 - protein, 13 aa, Homo sapiens
  CDR3 for alpha chain variable domain of TCR clone 232607 (TRAV17, TRAJ34)
CATVPYNTDKLIF

SEQ ID NO: 465214 - protein, 14 aa, Homo sapiens
  CDR3 for beta chain variable domain of TCR clone 232607 (TRBV9, TRBJ2-3)
CVSSAGGGPDTQYF

SEQ ID NO: 465215 - protein, 13 aa, Homo sapiens
  CDR3 for alpha chain variable domain of TCR clone 232608 (TRAV17, TRAJ34)
CATDLYNTDKLIF

SEQ ID NO: 465216 - protein, 15 aa, Homo sapiens
  CDR3 for beta chain variable domain of TCR clone 232608 (TRBV20-1, TRBJ2-3)
CSATGNSGFTDTQYF

SEQ ID NO: 465217 - protein, 10 aa, Homo sapiens
  CDR3 for alpha chain variable domain of TCR clone 232609 (TRAV38-2/DV8, TRAJ21)
CAYRRNKFYF

SEQ ID NO: 465218 - protein, 12 aa, Homo sapiens
  CDR3 for beta chain variable domain of TCR clone 232609 (TRBV11-3, TRBJ2-3)
CASSLWEDTQYF

SEQ ID NO: 465219 - protein, 14 aa, Homo sapiens
  CDR3 for alpha chain variable domain of TCR clone 232610 (TRAV21, TRAJ48)
CAVRSNFGNEKLTF

SEQ ID NO: 465220 - protein, 14 aa, Homo sapiens
  CDR3 for beta chain variable domain of TCR clone 232610 (TRBV19, TRBJ2-1)
CASPTFVLSGEQFF

SEQ ID NO: 465221 - protein, 14 aa, Homo sapiens
  CDR3 for alpha chain variable domain of TCR clone 232611 (TRAV2, TRAJ41)
CAVVPSNSGYALNF

SEQ ID NO: 465222 - protein, 13 aa, Homo sapiens
  CDR3 for beta chain variable domain of TCR clone 232611 (TRBV4-1, TRBJ2-1)
CASSQEVQYEQFF

SEQ ID NO: 465223 - protein, 10 aa, Homo sapiens
  CDR3 for alpha chain variable domain of TCR clone 232612 (TRAV13-1, TRAJ15)
INQAGTALIF

SEQ ID NO: 465224 - protein, 17 aa, Homo sapiens
  CDR3 for beta chain variable domain of TCR clone 232612 (TRBV7-3, TRBJ2-2)
CASSLSGTSGGTGELFF

SEQ ID NO: 465225 - protein, 14 aa, Homo sapiens
  CDR3 for alpha chain variable domain of TCR clone 232613 (TRAV12-1, TRAJ42)
CVVIYGGSQGHIIF

SEQ ID NO: 465226 - protein, 13 aa, Homo sapiens
  CDR3 for beta chain variable domain of TCR clone 232613 (TRBV18, TRBJ2-5)
CASSPPGKETQYF

SEQ ID NO: 465227 - protein, 16 aa, Homo sapiens
  CDR3 for alpha chain variable domain of TCR clone 232614 (TRAV4, TRAJ5)
CLVGPDHGHGQESAYF

SEQ ID NO: 465228 - protein, 13 aa, Homo sapiens
  CDR3 for beta chain variable domain of TCR clone 232614 (TRBV4-2, TRBJ1-2)
CASSLSASGGYTF

SEQ ID NO: 465229 - protein, 12 aa, Homo sapiens
  CDR3 for alpha chain variable domain of TCR clone 232615 (TRAV3, TRAJ20)
CAVRDGDYKLSF

SEQ ID NO: 465230 - protein, 11 aa, Homo sapiens
  CDR3 for beta chain variable domain of TCR clone 232615 (TRBV12-4, TRBJ2-2)
CASSLTGELFF

SEQ ID NO: 465231 - protein, 12 aa, Homo sapiens
  CDR3 for alpha chain variable domain of TCR clone 232616 (TRAV3, TRAJ20)
CAVRDPDYKLSF

SEQ ID NO: 465232 - protein, 16 aa, Homo sapiens
  CDR3 for beta chain variable domain of TCR clone 232616 (TRBV7-9, TRBJ2-1)
CASSDVAGGSYNEQFF

SEQ ID NO: 465233 - protein, 15 aa, Homo sapiens
  CDR3 for alpha chain variable domain of TCR clone 232617 (TRAV8-3, TRAJ23)
CAVGDRYNQEESLSS

SEQ ID NO: 465234 - protein, 17 aa, Homo sapiens
  CDR3 for beta chain variable domain of TCR clone 232617 (TRBV4-1, TRBJ1-4)
CASSQEGPRGVEEKLFF

SEQ ID NO: 465235 - protein, 12 aa, Homo sapiens
  CDR3 for alpha chain variable domain of TCR clone 232618 (TRAV38-2/DV8, TRAJ47)
CVLREYGNKLGF

SEQ ID NO: 465236 - protein, 14 aa, Homo sapiens
  CDR3 for beta chain variable domain of TCR clone 232618 (TRBV20-1, TRBJ1-5)
CSATDRGSNQPQHL

SEQ ID NO: 465237 - protein, 16 aa, Homo sapiens
  CDR3 for alpha chain variable domain of TCR clone 232619 (TRAV30, TRAJ24)
CGTEIVDADSWGKFQF

SEQ ID NO: 465238 - protein, 15 aa, Homo sapiens
  CDR3 for beta chain variable domain of TCR clone 232619 (TRBV7-3, TRBJ2-1)
CASSLGQGPFGEQFF

SEQ ID NO: 465239 - protein, 11 aa, Homo sapiens
  CDR3 for alpha chain variable domain of TCR clone 232620 (TRAV17, TRAJ21)
CATGNFNKLYF

SEQ ID NO: 465240 - protein, 16 aa, Homo sapiens
  CDR3 for beta chain variable domain of TCR clone 232620 (TRBV2, TRBJ2-1)
CASSANPRDWQAEQFF

SEQ ID NO: 465241 - protein, 16 aa, Homo sapiens
  CDR3 for alpha chain variable domain of TCR clone 232621 (TRAV8-4, TRAJ18)
CSVTANGGSTLGRLYV

SEQ ID NO: 465242 - protein, 14 aa, Homo sapiens
  CDR3 for beta chain variable domain of TCR clone 232621 (TRBV12-4, TRBJ1-2)
CASSSAGHIYGYTF

SEQ ID NO: 465243 - protein, 14 aa, Homo sapiens
  CDR3 for alpha chain variable domain of TCR clone 232622 (TRAV12-2, TRAJ40)
CAVKIPSGTYKYIF

SEQ ID NO: 465244 - protein, 17 aa, Homo sapiens
  CDR3 for beta chain variable domain of TCR clone 232622 (TRBV13, TRBJ2-3)
CASILSRVAGGRNTQYF

SEQ ID NO: 465245 - protein, 19 aa, Homo sapiens
  CDR3 for alpha chain variable domain of TCR clone 232623 (TRAV12-1, TRAJ31)
SLLIRDSKLSDSATPRLMF

SEQ ID NO: 465246 - protein, 14 aa, Homo sapiens
  CDR3 for beta chain variable domain of TCR clone 232623 (TRBV6-3, TRBJ2-1)
CAGSSGQFYNEQFF

SEQ ID NO: 465247 - protein, 14 aa, Homo sapiens
  CDR3 for alpha chain variable domain of TCR clone 232624 (TRAV12-1, TRAJ54)
CVVNIYQGAQKLVF

SEQ ID NO: 465248 - protein, 13 aa, Homo sapiens
  CDR3 for beta chain variable domain of TCR clone 232624 (TRBV10-3, TRBJ2-7)
CASKLAVNYEQYF

SEQ ID NO: 465249 - protein, 13 aa, Homo sapiens
  CDR3 for alpha chain variable domain of TCR clone 232625 (TRAV20, TRAJ31)
CAVQAWNNARLMF

SEQ ID NO: 465250 - protein, 13 aa, Homo sapiens
  CDR3 for beta chain variable domain of TCR clone 232625 (TRBV12-4, TRBJ1-2)
CASSLRQGKGYNF

SEQ ID NO: 465251 - protein, 16 aa, Homo sapiens
  CDR3 for alpha chain variable domain of TCR clone 232626 (TRAV8-3, TRAJ45)
CAVGLLFRRRCCRTHL

SEQ ID NO: 465252 - protein, 11 aa, Homo sapiens
  CDR3 for beta chain variable domain of TCR clone 232626 (TRBV20-1, TRBJ2-5)
CSADRAETQYF

SEQ ID NO: 465253 - protein, 14 aa, Homo sapiens
  CDR3 for alpha chain variable domain of TCR clone 232627 (TRAV1-2, TRAJ16)
CAVNRFSDGQKLLF

SEQ ID NO: 465254 - protein, 14 aa, Homo sapiens
  CDR3 for beta chain variable domain of TCR clone 232627 (TRBV12-5, TRBJ2-5)
CASGSRTHQENQYF

SEQ ID NO: 465255 - protein, 11 aa, Homo sapiens
  CDR3 for alpha chain variable domain of TCR clone 232628 (TRAV2, TRAJ37)
CAVDNTGKLIF

SEQ ID NO: 465256 - protein, 14 aa, Homo sapiens
  CDR3 for beta chain variable domain of TCR clone 232628 (TRBV20-1, TRBJ2-1)
CSATLAGGLGEQFL

SEQ ID NO: 465257 - protein, 12 aa, Homo sapiens
  CDR3 for alpha chain variable domain of TCR clone 232629 (TRAV13-2, TRAJ8)
CAPWPGFQKLVF

SEQ ID NO: 465258 - protein, 18 aa, Homo sapiens
  CDR3 for beta chain variable domain of TCR clone 232629 (TRBV11-2, TRBJ2-3)
CASSLGGASRGAPNTQYF

SEQ ID NO: 465259 - protein, 14 aa, Homo sapiens
  CDR3 for alpha chain variable domain of TCR clone 232630 (TRAV1-2, TRAJ16)
CAVNRFSDGQKLLF

SEQ ID NO: 465260 - protein, 14 aa, Homo sapiens
  CDR3 for beta chain variable domain of TCR clone 232630 (TRBV11-1, TRBJ2-7)
CASSCRQGSYEQYF

SEQ ID NO: 465261 - protein, 11 aa, Homo sapiens
  CDR3 for alpha chain variable domain of TCR clone 232631 (TRAV26-1, TRAJ37)
CIFRVGRKLIF

SEQ ID NO: 465262 - protein, 17 aa, Homo sapiens
  CDR3 for beta chain variable domain of TCR clone 232631 (TRBV20-1, TRBJ2-1)
CSARSPSGGPPTMSSSS

SEQ ID NO: 465263 - protein, 15 aa, Homo sapiens
  CDR3 for alpha chain variable domain of TCR clone 232632 (TRAV21, TRAJ53)
CAVRQSGGSNYKLTF

SEQ ID NO: 465264 - protein, 14 aa, Homo sapiens
  CDR3 for beta chain variable domain of TCR clone 232632 (TRBV18, TRBJ2-5)
CASSPGVSQEAQYF

SEQ ID NO: 465265 - protein, 13 aa, Homo sapiens
  CDR3 for alpha chain variable domain of TCR clone 232633 (TRAV30, TRAJ24)
CGTVTDSWGKLQF

SEQ ID NO: 465266 - protein, 17 aa, Homo sapiens
  CDR3 for beta chain variable domain of TCR clone 232633 (TRBV13, TRBJ2-3)
CASSLSRVAGGRNTQYF

SEQ ID NO: 465267 - protein, 13 aa, Homo sapiens
  CDR3 for alpha chain variable domain of TCR clone 232634 (TRAV12-2, TRAJ13)
CREEDWGFQKVTF

SEQ ID NO: 465268 - protein, 15 aa, Homo sapiens
  CDR3 for beta chain variable domain of TCR clone 232634 (TRBV27, TRBJ2-1)
CASSNGGGSSNEQFF

SEQ ID NO: 465269 - protein, 22 aa, Homo sapiens
  CDR3 for alpha chain variable domain of TCR clone 232635 (TRAV4, TRAJ37)
CLVGDGRLWQHRQANLWARDNF

SEQ ID NO: 465270 - protein, 15 aa, Homo sapiens
  CDR3 for beta chain variable domain of TCR clone 232635 (TRBV6-6, TRBJ1-1)
CASSYASGAGTEAFF

SEQ ID NO: 465271 - protein, 16 aa, Homo sapiens
  CDR3 for alpha chain variable domain of TCR clone 232636 (TRAV12-2, TRAJ6)
CAAPLAGSGGSYIPTF

SEQ ID NO: 465272 - protein, 14 aa, Homo sapiens
  CDR3 for beta chain variable domain of TCR clone 232636 (TRBV25-1, TRBJ1-1)
CASTHLGGNTEAFF

SEQ ID NO: 465273 - protein, 11 aa, Homo sapiens
  CDR3 for alpha chain variable domain of TCR clone 232637 (TRAV1-2, TRAJ11)
CAVRGYSTLTF

SEQ ID NO: 465274 - protein, 13 aa, Homo sapiens
  CDR3 for beta chain variable domain of TCR clone 232637 (TRBV24-1, TRBJ2-2)
CATSDWSTGELFF

SEQ ID NO: 465275 - protein, 13 aa, Homo sapiens
  CDR3 for alpha chain variable domain of TCR clone 232638 (TRAV21, TRAJ57)
CAVTQGGSEKLVF

SEQ ID NO: 465276 - protein, 16 aa, Homo sapiens
  CDR3 for beta chain variable domain of TCR clone 232638 (TRBV29-1, TRBJ2-7)
CSVEGAEDGTAYEQYF

SEQ ID NO: 465277 - protein, 15 aa, Homo sapiens
  CDR3 for alpha chain variable domain of TCR clone 232639 (TRAV3, TRAJ32)
CAVSSYGGATNKLIF

SEQ ID NO: 465278 - protein, 15 aa, Homo sapiens
  CDR3 for beta chain variable domain of TCR clone 232639 (TRBV5-1, TRBJ2-1)
CASSPPRAPYNEQFF

SEQ ID NO: 465279 - protein, 12 aa, Homo sapiens
  CDR3 for alpha chain variable domain of TCR clone 232640 (TRAV2, TRAJ37)
CAVTMNTGKLIF

SEQ ID NO: 465280 - protein, 15 aa, Homo sapiens
  CDR3 for beta chain variable domain of TCR clone 232640 (TRBV5-1, TRBJ2-5)
CASSFGGPPQETQFF

SEQ ID NO: 465281 - protein, 16 aa, Homo sapiens
  CDR3 for alpha chain variable domain of TCR clone 232641 (TRAV12-2, TRAJ10)
CAVNRVLTGGGNKLTF

SEQ ID NO: 465282 - protein, 12 aa, Homo sapiens
  CDR3 for beta chain variable domain of TCR clone 232641 (TRBV28, TRBJ2-7)
CASSFSSYEQYC

SEQ ID NO: 465283 - protein, 14 aa, Homo sapiens
  CDR3 for alpha chain variable domain of TCR clone 232642 (TRAV8-3, TRAJ4)
CAVGAAGGHNKLIF

SEQ ID NO: 465284 - protein, 15 aa, Homo sapiens
  CDR3 for beta chain variable domain of TCR clone 232642 (TRBV6-5, TRBJ2-1)
CVSSYDAGAGNEQFF

SEQ ID NO: 465285 - protein, 17 aa, Homo sapiens
  CDR3 for alpha chain variable domain of TCR clone 232643 (TRAV38-1, TRAJ28)
CAFMKPTSGAGSYQLTF

SEQ ID NO: 465286 - protein, 17 aa, Homo sapiens
  CDR3 for beta chain variable domain of TCR clone 232643 (TRBV13, TRBJ2-3)
CASSLSRVAGGRNTQYF

SEQ ID NO: 465287 - protein, 15 aa, Homo sapiens
  CDR3 for alpha chain variable domain of TCR clone 232644 (TRAV26-1, TRAJ29)
CIVRVEGSGNNPLVF

SEQ ID NO: 465288 - protein, 14 aa, Homo sapiens
  CDR3 for beta chain variable domain of TCR clone 232644 (TRBV25-1, TRBJ1-1)
CASTHLGGNTEAFF

SEQ ID NO: 465289 - protein, 15 aa, Homo sapiens
  CDR3 for alpha chain variable domain of TCR clone 232645 (TRAV12-1, TRAJ13)
CVVNGDSGGYQKVTF

SEQ ID NO: 465290 - protein, 14 aa, Homo sapiens
  CDR3 for beta chain variable domain of TCR clone 232645 (TRBV6-1, TRBJ1-3)
CASVQGGGGNTIYF

SEQ ID NO: 465291 - protein, 18 aa, Homo sapiens
  CDR3 for alpha chain variable domain of TCR clone 232646 (TRAV1-2, TRAJ10)
CAVRALTPVTGGGNKLTF

SEQ ID NO: 465292 - protein, 14 aa, Homo sapiens
  CDR3 for beta chain variable domain of TCR clone 232646 (TRBV4-1, TRBJ1-1)
CASRQQGNGNEAFF

SEQ ID NO: 465293 - protein, 13 aa, Homo sapiens
  CDR3 for alpha chain variable domain of TCR clone 232647 (TRAV26-1, TRAJ34)
CIVRPWITDKLIF

SEQ ID NO: 465294 - protein, 14 aa, Homo sapiens
  CDR3 for beta chain variable domain of TCR clone 232647 (TRBV7-2, TRBJ2-7)
CASRSQGAAYEQDF

SEQ ID NO: 465295 - protein, 16 aa, Homo sapiens
  CDR3 for alpha chain variable domain of TCR clone 232648 (TRAV16, TRAJ52)
CALSAAGGTSYGKLTF

SEQ ID NO: 465296 - protein, 12 aa, Homo sapiens
  CDR3 for beta chain variable domain of TCR clone 232648 (TRBV12-4, TRBJ1-3)
CASGFSGNTIYF

SEQ ID NO: 465297 - protein, 14 aa, Homo sapiens
  CDR3 for alpha chain variable domain of TCR clone 232649 (TRAV1-2, TRAJ16)
CAVNRFSDGQKQLF

SEQ ID NO: 465298 - protein, 16 aa, Homo sapiens
  CDR3 for beta chain variable domain of TCR clone 232649 (TRBV7-3, TRBJ2-2)
CASSLKRGTLSGELFF

SEQ ID NO: 465299 - protein, 14 aa, Homo sapiens
  CDR3 for alpha chain variable domain of TCR clone 232650 (TRAV3, TRAJ32)
CCERRAGATNKLIF

SEQ ID NO: 465300 - protein, 14 aa, Homo sapiens
  CDR3 for beta chain variable domain of TCR clone 232650 (TRBV7-2, TRBJ2-3)
CASSQTGSSYTQYF

SEQ ID NO: 465301 - protein, 13 aa, Homo sapiens
  CDR3 for alpha chain variable domain of TCR clone 232651 (TRAV30, TRAJ20)
CGTVVSNDYKLSF

SEQ ID NO: 465302 - protein, 15 aa, Homo sapiens
  CDR3 for beta chain variable domain of TCR clone 232651 (TRBV7-9, TRBJ2-2)
CASSPETGAGGELFF

SEQ ID NO: 465303 - protein, 12 aa, Homo sapiens
  CDR3 for alpha chain variable domain of TCR clone 232652 (TRAV35, TRAJ49)
CAGWNTGNTVYF

SEQ ID NO: 465304 - protein, 16 aa, Homo sapiens
  CDR3 for beta chain variable domain of TCR clone 232652 (TRBV5-1, TRBJ2-2)
CASSLWDTTNTGELFF

SEQ ID NO: 465305 - protein, 14 aa, Homo sapiens
  CDR3 for alpha chain variable domain of TCR clone 232653 (TRAV3, TRAJ5)
CAVRSDTGRRALTF

SEQ ID NO: 465306 - protein, 17 aa, Homo sapiens
  CDR3 for beta chain variable domain of TCR clone 232653 (TRBV13, TRBJ2-3)
CASSLSRVAGGRNTQYF

SEQ ID NO: 465307 - protein, 10 aa, Homo sapiens
  CDR3 for alpha chain variable domain of TCR clone 232654 (TRAV8-3, TRAJ44)
CAVGAVVYRH

SEQ ID NO: 465308 - protein, 12 aa, Homo sapiens
  CDR3 for beta chain variable domain of TCR clone 232654 (TRBV19, TRBJ1-5)
CASSIAQQPQHF

SEQ ID NO: 465309 - protein, 18 aa, Homo sapiens
  CDR3 for alpha chain variable domain of TCR clone 232655 (TRAV12-3, TRAJ52)
CAMSVGGAGGTSYGKLTF

SEQ ID NO: 465310 - protein, 14 aa, Homo sapiens
  CDR3 for beta chain variable domain of TCR clone 232655 (TRBV5-4, TRBJ1-1)
CASSLDSRRDEAFF

SEQ ID NO: 465311 - protein, 14 aa, Homo sapiens
  CDR3 for alpha chain variable domain of TCR clone 232656 (TRAV3, TRAJ21)
CAVESPANFNKFYF

SEQ ID NO: 465312 - protein, 12 aa, Homo sapiens
  CDR3 for beta chain variable domain of TCR clone 232656 (TRBV6-3, TRBJ2-7)
CASSLTPYEQYF

SEQ ID NO: 465313 - protein, 14 aa, Homo sapiens
  CDR3 for alpha chain variable domain of TCR clone 232657 (TRAV12-2, TRAJ44)
CAVNPAGTASKLTF

SEQ ID NO: 465314 - protein, 13 aa, Homo sapiens
  CDR3 for beta chain variable domain of TCR clone 232657 (TRBV20-1, TRBJ1-6)
CSAPLGVGPPLHF

SEQ ID NO: 465315 - protein, 12 aa, Homo sapiens
  CDR3 for alpha chain variable domain of TCR clone 232658 (TRAV12-2, TRAJ3)
CAVWSSASNIIF

SEQ ID NO: 465316 - protein, 12 aa, Homo sapiens
  CDR3 for beta chain variable domain of TCR clone 232658 (TRBV11-2, TRBJ2-1)
CASSPGNNEQFF

SEQ ID NO: 465317 - protein, 13 aa, Homo sapiens
  CDR3 for alpha chain variable domain of TCR clone 232659 (TRAV23/DV6, TRAJ47)
CAASSQYGNKLVF

SEQ ID NO: 465318 - protein, 15 aa, Homo sapiens
  CDR3 for beta chain variable domain of TCR clone 232659 (TRBV4-1, TRBJ1-2)
CASSQGQGAAYGYTF

SEQ ID NO: 465319 - protein, 15 aa, Homo sapiens
  CDR3 for alpha chain variable domain of TCR clone 232660 (TRAV26-1, TRAJ42)
CIVRAKGGSQGNLIF

SEQ ID NO: 465320 - protein, 14 aa, Homo sapiens
  CDR3 for beta chain variable domain of TCR clone 232660 (TRBV19, TRBJ2-2)
CATTGHANTGELFF

SEQ ID NO: 465321 - protein, 14 aa, Homo sapiens
  CDR3 for alpha chain variable domain of TCR clone 232661 (TRAV21, TRAJ35)
CAVMPIGFGNVLHC

SEQ ID NO: 465322 - protein, 12 aa, Homo sapiens
  CDR3 for beta chain variable domain of TCR clone 232661 (TRBV7-9, TRBJ2-7)
YASSSKREEQYF

SEQ ID NO: 465323 - protein, 16 aa, Homo sapiens
  CDR3 for alpha chain variable domain of TCR clone 232662 (TRAV13-2, TRAJ32)
CAENMNYGGATNKLIF

SEQ ID NO: 465324 - protein, 14 aa, Homo sapiens
  CDR3 for beta chain variable domain of TCR clone 232662 (TRBV15, TRBJ2-5)
CATSSTGYQENQYF

SEQ ID NO: 465325 - protein, 14 aa, Homo sapiens
  CDR3 for alpha chain variable domain of TCR clone 232663 (TRAV13-1, TRAJ29)
RAASSNSGNTPLVF

SEQ ID NO: 465326 - protein, 13 aa, Homo sapiens
  CDR3 for beta chain variable domain of TCR clone 232663 (TRBV10-2, TRBJ1-1)
CASNDQMNTEAFF

SEQ ID NO: 465327 - protein, 15 aa, Homo sapiens
  CDR3 for alpha chain variable domain of TCR clone 232664 (TRAV5, TRAJ33)
CAEAPAMDSNYQLIW

SEQ ID NO: 465328 - protein, 12 aa, Homo sapiens
  CDR3 for beta chain variable domain of TCR clone 232664 (TRBV12-4, TRBJ2-7)
CASSLGGYEQYF

SEQ ID NO: 465329 - protein, 18 aa, Homo sapiens
  CDR3 for alpha chain variable domain of TCR clone 232665 (TRAV9-2, TRAJ13)
CQTQRCTEPPGGYQKVTF

SEQ ID NO: 465330 - protein, 13 aa, Homo sapiens
  CDR3 for beta chain variable domain of TCR clone 232665 (TRBV5-7, TRBJ2-5)
CASRSSGGGTQYF

SEQ ID NO: 465331 - protein, 12 aa, Homo sapiens
  CDR3 for alpha chain variable domain of TCR clone 232666 (TRAV12-3, TRAJ17)
CAMTLTGNKLTF

SEQ ID NO: 465332 - protein, 15 aa, Homo sapiens
  CDR3 for beta chain variable domain of TCR clone 232666 (TRBV10-2, TRBJ2-6)
CASSEQVTGANVLTF

SEQ ID NO: 465333 - protein, 15 aa, Homo sapiens
  CDR3 for alpha chain variable domain of TCR clone 232667 (TRAV38-1, TRAJ37)
CAFIHGSGNTAKLIF

SEQ ID NO: 465334 - protein, 16 aa, Homo sapiens
  CDR3 for beta chain variable domain of TCR clone 232667 (TRBV12-5, TRBJ2-5)
CASGPRTSGNQETQYF

SEQ ID NO: 465335 - protein, 16 aa, Homo sapiens
  CDR3 for alpha chain variable domain of TCR clone 232668 (TRAV4, TRAJ9)
CLVGDPNRPGGFKTIF

SEQ ID NO: 465336 - protein, 13 aa, Homo sapiens
  CDR3 for beta chain variable domain of TCR clone 232668 (TRBV6-5, TRBJ2-5)
CATAPSPQETQYF

SEQ ID NO: 465337 - protein, 14 aa, Homo sapiens
  CDR3 for alpha chain variable domain of TCR clone 232669 (TRAV12-2, TRAJ13)
CAVKKTGGYQKVTF

SEQ ID NO: 465338 - protein, 13 aa, Homo sapiens
  CDR3 for beta chain variable domain of TCR clone 232669 (TRBV4-1, TRBJ2-7)
CASSWTGGYEQYF

SEQ ID NO: 465339 - protein, 13 aa, Homo sapiens
  CDR3 for alpha chain variable domain of TCR clone 232670 (TRAV16, TRAJ27)
SALRRTNAGKSTF

SEQ ID NO: 465340 - protein, 15 aa, Homo sapiens
  CDR3 for beta chain variable domain of TCR clone 232670 (TRBV18, TRBJ2-1)
CASSPPSASYNEQFF

SEQ ID NO: 465341 - protein, 13 aa, Homo sapiens
  CDR3 for alpha chain variable domain of TCR clone 232671 (TRAV2, TRAJ40)
CAVVTSGTYKYIF

SEQ ID NO: 465342 - protein, 16 aa, Homo sapiens
  CDR3 for beta chain variable domain of TCR clone 232671 (TRBV4-2, TRBJ1-1)
CASRPLDGGGDTEAFF

SEQ ID NO: 465343 - protein, 12 aa, Homo sapiens
  CDR3 for alpha chain variable domain of TCR clone 232672 (TRAV38-2/DV8, TRAJ48)
CALLSGNEKLTF

SEQ ID NO: 465344 - protein, 12 aa, Homo sapiens
  CDR3 for beta chain variable domain of TCR clone 232672 (TRBV7-8, TRBJ2-7)
CASSLGDREQYF

SEQ ID NO: 465345 - protein, 15 aa, Homo sapiens
  CDR3 for alpha chain variable domain of TCR clone 232673 (TRAV3, TRAJ45)
CAVRTPWGGADGPTF

SEQ ID NO: 465346 - protein, 16 aa, Homo sapiens
  CDR3 for beta chain variable domain of TCR clone 232673 (TRBV6-1, TRBJ2-2)
CASSFGQGANTGELFF

SEQ ID NO: 465347 - protein, 16 aa, Homo sapiens
  CDR3 for alpha chain variable domain of TCR clone 232674 (TRAV3, TRAJ37)
CAVRGKGSDNTGKLIF

SEQ ID NO: 465348 - protein, 13 aa, Homo sapiens
  CDR3 for beta chain variable domain of TCR clone 232674 (TRBV14, TRBJ2-7)
CASSQARRYEQYF

SEQ ID NO: 465349 - protein, 13 aa, Homo sapiens
  CDR3 for alpha chain variable domain of TCR clone 232675 (TRAV2, TRAJ29)
CAAQNSGNTPLVF

SEQ ID NO: 465350 - protein, 14 aa, Homo sapiens
  CDR3 for beta chain variable domain of TCR clone 232675 (TRBV7-9, TRBJ2-4)
CASILAMGGNIQYF

SEQ ID NO: 465351 - protein, 14 aa, Homo sapiens
  CDR3 for alpha chain variable domain of TCR clone 232676 (TRAV30, TRAJ26)
CGTEIVSYGQNFVF

SEQ ID NO: 465352 - protein, 13 aa, Homo sapiens
  CDR3 for beta chain variable domain of TCR clone 232676 (TRBV27, TRBJ2-1)
CASTPLAAGEQFF

SEQ ID NO: 465353 - protein, 15 aa, Homo sapiens
  CDR3 for alpha chain variable domain of TCR clone 232677 (TRAV13-2, TRAJ10)
CAERRDTGGGNKLTF

SEQ ID NO: 465354 - protein, 16 aa, Homo sapiens
  CDR3 for beta chain variable domain of TCR clone 232677 (TRBV2, TRBJ1-3)
CASSRTGGSTGNTIYF

SEQ ID NO: 465355 - protein, 13 aa, Homo sapiens
  CDR3 for alpha chain variable domain of TCR clone 232678 (TRAV27, TRAJ15)
CAGAGQAGTALIL

SEQ ID NO: 465356 - protein, 14 aa, Homo sapiens
  CDR3 for beta chain variable domain of TCR clone 232678 (TRBV19, TRBJ2-7)
CASSIFAGTYEQYF

SEQ ID NO: 465357 - protein, 14 aa, Homo sapiens
  CDR3 for alpha chain variable domain of TCR clone 232679 (TRAV26-1, TRAJ40)
CCVLLHSRNLKYIF

SEQ ID NO: 465358 - protein, 15 aa, Homo sapiens
  CDR3 for beta chain variable domain of TCR clone 232679 (TRBV19, TRBJ2-1)
CASSSPGVPLDEQFF

SEQ ID NO: 465359 - protein, 15 aa, Homo sapiens
  CDR3 for alpha chain variable domain of TCR clone 232680 (TRAV12-2, TRAJ37)
CAVRGGSSNTGKLIF

SEQ ID NO: 465360 - protein, 12 aa, Homo sapiens
  CDR3 for beta chain variable domain of TCR clone 232680 (TRBV12-4, TRBJ2-7)
CASSLGGYEQYF

SEQ ID NO: 465361 - protein, 13 aa, Homo sapiens
  CDR3 for alpha chain variable domain of TCR clone 232681 (TRAV21, TRAJ20)
CAVGLRVDYKLSF

SEQ ID NO: 465362 - protein, 15 aa, Homo sapiens
  CDR3 for beta chain variable domain of TCR clone 232681 (TRBV6-6, TRBJ1-1)
CASSPRGDVETEAFF

SEQ ID NO: 465363 - protein, 18 aa, Homo sapiens
  CDR3 for alpha chain variable domain of TCR clone 232682 (TRAV26-2, TRAJ54)
CILRDVEVGIQGAQKLVF

SEQ ID NO: 465364 - protein, 12 aa, Homo sapiens
  CDR3 for beta chain variable domain of TCR clone 232682 (TRBV5-1, TRBJ2-3)
CASSLAADTQYF

SEQ ID NO: 465365 - protein, 11 aa, Homo sapiens
  CDR3 for alpha chain variable domain of TCR clone 232683 (TRAV3, TRAJ21)
CAVGNFNKFHF

SEQ ID NO: 465366 - protein, 16 aa, Homo sapiens
  CDR3 for beta chain variable domain of TCR clone 232683 (TRBV19, TRBJ2-1)
CASSKAGPSPYNEQFF

SEQ ID NO: 465367 - protein, 11 aa, Homo sapiens
  CDR3 for alpha chain variable domain of TCR clone 232684 (TRAV12-1, TRAJ37)
CVVNTPGKLTF

SEQ ID NO: 465368 - protein, 13 aa, Homo sapiens
  CDR3 for beta chain variable domain of TCR clone 232684 (TRBV12-4, TRBJ1-5)
CASSPDRAQPQHF

SEQ ID NO: 465369 - protein, 15 aa, Homo sapiens
  CDR3 for alpha chain variable domain of TCR clone 232685 (TRAV12-3, TRAJ49)
CAMAVTPNTGNKFYL

SEQ ID NO: 465370 - protein, 14 aa, Homo sapiens
  CDR3 for beta chain variable domain of TCR clone 232685 (TRBV7-8, TRBJ2-3)
CASSLEAGTDTQYF

SEQ ID NO: 465371 - protein, 15 aa, Homo sapiens
  CDR3 for alpha chain variable domain of TCR clone 232686 (TRAV2, TRAJ24)
CAVVGLKNSWGKLQF

SEQ ID NO: 465372 - protein, 16 aa, Homo sapiens
  CDR3 for beta chain variable domain of TCR clone 232686 (TRBV7-7, TRBJ2-3)
CASSPGTSGSTDTQYF

SEQ ID NO: 465373 - protein, 20 aa, Homo sapiens
  CDR3 for alpha chain variable domain of TCR clone 232687 (TRAV21, TRAJ4)
AASQPGDSVTLAGGYNKLIF

SEQ ID NO: 465374 - protein, 19 aa, Homo sapiens
  CDR3 for beta chain variable domain of TCR clone 232687 (TRBV18, TRBJ1-3)
CASSPLSRTGMSSGNTIYF

SEQ ID NO: 465375 - protein, 16 aa, Homo sapiens
  CDR3 for alpha chain variable domain of TCR clone 232688 (TRAV3, TRAJ37)
CAVRPHGSGNTGKLIF

SEQ ID NO: 465376 - protein, 17 aa, Homo sapiens
  CDR3 for beta chain variable domain of TCR clone 232688 (TRBV20-1, TRBJ1-5)
CSARVGGERQGNQPQHF

SEQ ID NO: 465377 - protein, 13 aa, Homo sapiens
  CDR3 for alpha chain variable domain of TCR clone 232689 (TRAV1-2, TRAJ9)
CAALNTGGFKTIF

SEQ ID NO: 465378 - protein, 12 aa, Homo sapiens
  CDR3 for beta chain variable domain of TCR clone 232689 (TRBV14, TRBJ2-5)
CASSQLKETQYF

SEQ ID NO: 465379 - protein, 14 aa, Homo sapiens
  CDR3 for alpha chain variable domain of TCR clone 232690 (TRAV1-2, TRAJ6)
CAVRSSGGSYIPTF

SEQ ID NO: 465380 - protein, 16 aa, Homo sapiens
  CDR3 for beta chain variable domain of TCR clone 232690 (TRBV7-3, TRBJ2-2)
CASSLKRGTWSGELFF

SEQ ID NO: 465381 - protein, 11 aa, Homo sapiens
  CDR3 for alpha chain variable domain of TCR clone 232691 (TRAV1-2, TRAJ20)
CAVANDYKLSF

SEQ ID NO: 465382 - protein, 15 aa, Homo sapiens
  CDR3 for beta chain variable domain of TCR clone 232691 (TRBV10-3, TRBJ2-3)
CAISLTSGGTDTQYF

SEQ ID NO: 465383 - protein, 15 aa, Homo sapiens
  CDR3 for alpha chain variable domain of TCR clone 232692 (TRAV26-1, TRAJ44)
CIVRIGTGTATKLTF

SEQ ID NO: 465384 - protein, 15 aa, Homo sapiens
  CDR3 for beta chain variable domain of TCR clone 232692 (TRBV7-6, TRBJ2-1)
CASSSLAGEGNEQFF

SEQ ID NO: 465385 - protein, 16 aa, Homo sapiens
  CDR3 for alpha chain variable domain of TCR clone 232693 (TRAV26-1, TRAJ36)
CIVRVPDQTEANNLFF

SEQ ID NO: 465386 - protein, 12 aa, Homo sapiens
  CDR3 for beta chain variable domain of TCR clone 232693 (TRBV29-1, TRBJ2-3)
CSVTGGADTQYF

SEQ ID NO: 465387 - protein, 17 aa, Homo sapiens
  CDR3 for alpha chain variable domain of TCR clone 232694 (TRAV1-2, TRAJ27)
CAVRDKTGDTNAGKSTF

SEQ ID NO: 465388 - protein, 12 aa, Homo sapiens
  CDR3 for beta chain variable domain of TCR clone 232694 (TRBV12-4, TRBJ2-7)
CASSLGGYEQYF

SEQ ID NO: 465389 - protein, 12 aa, Homo sapiens
  CDR3 for alpha chain variable domain of TCR clone 232695 (TRAV21, TRAJ58)
CALSASGSRLNF

SEQ ID NO: 465390 - protein, 13 aa, Homo sapiens
  CDR3 for beta chain variable domain of TCR clone 232695 (TRBV5-7, TRBJ1-2)
CASSLGVFNGYTF

SEQ ID NO: 465391 - protein, 18 aa, Homo sapiens
  CDR3 for alpha chain variable domain of TCR clone 232696 (TRAV21, TRAJ52)
CAVRPSPAGGISYGKLTF

SEQ ID NO: 465392 - protein, 17 aa, Homo sapiens
  CDR3 for beta chain variable domain of TCR clone 232696 (TRBV25-1, TRBJ2-1)
CASSAYGQGRGVYEQFF

SEQ ID NO: 465393 - protein, 14 aa, Homo sapiens
  CDR3 for alpha chain variable domain of TCR clone 232697 (TRAV38-1, TRAJ45)
CAYYSGGGADGLTF

SEQ ID NO: 465394 - protein, 12 aa, Homo sapiens
  CDR3 for beta chain variable domain of TCR clone 232697 (TRBV11-2, TRBJ2-3)
GASRGAPNTQYF

SEQ ID NO: 465395 - protein, 12 aa, Homo sapiens
  CDR3 for alpha chain variable domain of TCR clone 232698 (TRAV8-4, TRAJ37)
CAVSGNTGQLIF

SEQ ID NO: 465396 - protein, 17 aa, Homo sapiens
  CDR3 for beta chain variable domain of TCR clone 232698 (TRBV7-2, TRBJ2-3)
CASSPQGRARVQDTQYF

SEQ ID NO: 465397 - protein, 14 aa, Homo sapiens
  CDR3 for alpha chain variable domain of TCR clone 232699 (TRAV27, TRAJ42)
CAGGDGGSQGNLIF

SEQ ID NO: 465398 - protein, 13 aa, Homo sapiens
  CDR3 for beta chain variable domain of TCR clone 232699 (TRBV19, TRBJ1-4)
CATTARPSEKLFF

SEQ ID NO: 465399 - protein, 16 aa, Homo sapiens
  CDR3 for alpha chain variable domain of TCR clone 232700 (TRAV30, TRAJ24)
CGTEIVDADSWGKFQF

SEQ ID NO: 465400 - protein, 18 aa, Homo sapiens
  CDR3 for beta chain variable domain of TCR clone 232700 (TRBV11-2, TRBJ2-3)
CASSLGGASRGAPNRQYF

SEQ ID NO: 465401 - protein, 10 aa, Homo sapiens
  CDR3 for alpha chain variable domain of TCR clone 232701 (TRAV12-3, TRAJ18)
CAMSAEAQPW

SEQ ID NO: 465402 - protein, 13 aa, Homo sapiens
  CDR3 for beta chain variable domain of TCR clone 232701 (TRBV15, TRBJ1-6)
CATSGGINSPLHF

SEQ ID NO: 465403 - protein, 14 aa, Homo sapiens
  CDR3 for alpha chain variable domain of TCR clone 232702 (TRAV1-2, TRAJ16)
CAVNRFSDGQKLLF

SEQ ID NO: 465404 - protein, 14 aa, Homo sapiens
  CDR3 for beta chain variable domain of TCR clone 232702 (TRBV25-1, TRBJ1-1)
CASTHPGGNTEAFF

SEQ ID NO: 465405 - protein, 14 aa, Homo sapiens
  CDR3 for alpha chain variable domain of TCR clone 232703 (TRAV17, TRAJ23)
CATALGGQGGKLIF

SEQ ID NO: 465406 - protein, 13 aa, Homo sapiens
  CDR3 for beta chain variable domain of TCR clone 232703 (TRBV3-1, TRBJ2-5)
CAGSPPAAETQYF

SEQ ID NO: 465407 - protein, 14 aa, Homo sapiens
  CDR3 for alpha chain variable domain of TCR clone 232704 (TRAV12-3, TRAJ22)
CAMSLFGSARQLTF

SEQ ID NO: 465408 - protein, 10 aa, Homo sapiens
  CDR3 for beta chain variable domain of TCR clone 232704 (TRBV12-4, TRBJ2-2)
CQQLRRELFF

SEQ ID NO: 465409 - protein, 14 aa, Homo sapiens
  CDR3 for alpha chain variable domain of TCR clone 232705 (TRAV8-3, TRAJ34)
CAVGPPHNTDKLIF

SEQ ID NO: 465410 - protein, 14 aa, Homo sapiens
  CDR3 for beta chain variable domain of TCR clone 232705 (TRBV19, TRBJ2-1)
CASPTFVLSGEQFF

SEQ ID NO: 465411 - protein, 14 aa, Homo sapiens
  CDR3 for alpha chain variable domain of TCR clone 232706 (TRAV13-1, TRAJ35)
CAASRGGFGNVLHC

SEQ ID NO: 465412 - protein, 13 aa, Homo sapiens
  CDR3 for beta chain variable domain of TCR clone 232706 (TRBV7-3, TRBJ1-1)
CASSQDWGAEASF

SEQ ID NO: 465413 - protein, 11 aa, Homo sapiens
  CDR3 for alpha chain variable domain of TCR clone 232707 (TRAV21, TRAJ34)
CAVDNTDKLIF

SEQ ID NO: 465414 - protein, 15 aa, Homo sapiens
  CDR3 for beta chain variable domain of TCR clone 232707 (TRBV7-8, TRBJ1-5)
CASSLERRGLEPQHF

SEQ ID NO: 465415 - protein, 14 aa, Homo sapiens
  CDR3 for alpha chain variable domain of TCR clone 232708 (TRAV12-2, TRAJ22)
CAVRFSGSARQLTF

SEQ ID NO: 465416 - protein, 13 aa, Homo sapiens
  CDR3 for beta chain variable domain of TCR clone 232708 (TRBV6-1, TRBJ2-1)
CASTGTGRNEQFF

SEQ ID NO: 465417 - protein, 14 aa, Homo sapiens
  CDR3 for alpha chain variable domain of TCR clone 232709 (TRAV26-1, TRAJ26)
CIVRATLLGQNFVF

SEQ ID NO: 465418 - protein, 16 aa, Homo sapiens
  CDR3 for beta chain variable domain of TCR clone 232709 (TRBV12-4, TRBJ2-7)
CASRSTGTGQSYEQYF

SEQ ID NO: 465419 - protein, 14 aa, Homo sapiens
  CDR3 for alpha chain variable domain of TCR clone 232710 (TRAV13-1, TRAJ44)
CAAKATGTASKLTF

SEQ ID NO: 465420 - protein, 16 aa, Homo sapiens
  CDR3 for beta chain variable domain of TCR clone 232710 (TRBV12-4, TRBJ1-5)
CASSSGPRGSNQPQHF

SEQ ID NO: 465421 - protein, 14 aa, Homo sapiens
  CDR3 for alpha chain variable domain of TCR clone 232711 (TRAV12-2, TRAJ13)
CAVKKTGGYQKVTF

SEQ ID NO: 465422 - protein, 13 aa, Homo sapiens
  CDR3 for beta chain variable domain of TCR clone 232711 (TRBV12-4, TRBJ1-2)
CASSFIWLHLRFW

SEQ ID NO: 465423 - protein, 11 aa, Homo sapiens
  CDR3 for alpha chain variable domain of TCR clone 232712 (TRAV17, TRAJ31)
CATDRTARLMV

SEQ ID NO: 465424 - protein, 14 aa, Homo sapiens
  CDR3 for beta chain variable domain of TCR clone 232712 (TRBV4-1, TRBJ2-2)
CASSQAVNPGELFF

SEQ ID NO: 465425 - protein, 13 aa, Homo sapiens
  CDR3 for alpha chain variable domain of TCR clone 232713 (TRAV3, TRAJ21)
CAVGEPDFNQFYF

SEQ ID NO: 465426 - protein, 19 aa, Homo sapiens
  CDR3 for beta chain variable domain of TCR clone 232713 (TRBV7-2, TRBJ2-3)
CASSFLSRNWGGGTDTQYF

SEQ ID NO: 465427 - protein, 14 aa, Homo sapiens
  CDR3 for alpha chain variable domain of TCR clone 232714 (TRAV12-2, TRAJ13)
CAVKKTGGYQKVTF

SEQ ID NO: 465428 - protein, 16 aa, Homo sapiens
  CDR3 for beta chain variable domain of TCR clone 232714 (TRBV4-2, TRBJ2-4)
CASSQERRRAKNIQYF

SEQ ID NO: 465429 - protein, 14 aa, Homo sapiens
  CDR3 for alpha chain variable domain of TCR clone 232715 (TRAV1-2, TRAJ8)
CAVREDTGFEKLVF

SEQ ID NO: 465430 - protein, 12 aa, Homo sapiens
  CDR3 for beta chain variable domain of TCR clone 232715 (TRBV7-8, TRBJ2-7)
CASSLGDREQYF

SEQ ID NO: 465431 - protein, 13 aa, Homo sapiens
  CDR3 for alpha chain variable domain of TCR clone 232716 (TRAV26-2, TRAJ43)
CILRAANNNDMRF

SEQ ID NO: 465432 - protein, 13 aa, Homo sapiens
  CDR3 for beta chain variable domain of TCR clone 232716 (TRBV14, TRBJ2-1)
CASSQDRRNEQFF

SEQ ID NO: 465433 - protein, 15 aa, Homo sapiens
  CDR3 for alpha chain variable domain of TCR clone 232717 (TRAV12-1, TRAJ44)
CVVDTPQGTASKLTF

SEQ ID NO: 465434 - protein, 15 aa, Homo sapiens
  CDR3 for beta chain variable domain of TCR clone 232717 (TRBV9, TRBJ2-1)
CASSLAGSSYNEQFF

SEQ ID NO: 465435 - protein, 10 aa, Homo sapiens
  CDR3 for alpha chain variable domain of TCR clone 232718 (TRAV8-6, TRAJ20)
CAALSPGLQA

SEQ ID NO: 465436 - protein, 13 aa, Homo sapiens
  CDR3 for beta chain variable domain of TCR clone 232718 (TRBV5-7, TRBJ2-3)
CASSLGRTDTQYF

SEQ ID NO: 465437 - protein, 12 aa, Homo sapiens
  CDR3 for alpha chain variable domain of TCR clone 232719 (TRAV29/DV5, TRAJ49)
CAATDTGNQFYF

SEQ ID NO: 465438 - protein, 19 aa, Homo sapiens
  CDR3 for beta chain variable domain of TCR clone 232719 (TRBV25-1, TRBJ2-2)
CTILVYRVDRGRKTGELFF

SEQ ID NO: 465439 - protein, 14 aa, Homo sapiens
  CDR3 for alpha chain variable domain of TCR clone 232720 (TRAV20, TRAJ47)
CAVTFGEYGNKLVF

SEQ ID NO: 465440 - protein, 16 aa, Homo sapiens
  CDR3 for beta chain variable domain of TCR clone 232720 (TRBV9, TRBJ2-1)
CASSVGGGGNYNEQFF

SEQ ID NO: 465441 - protein, 14 aa, Homo sapiens
  CDR3 for alpha chain variable domain of TCR clone 232721 (TRAV17, TRAJ12)
CAILPMDSSYKLIF

SEQ ID NO: 465442 - protein, 15 aa, Homo sapiens
  CDR3 for beta chain variable domain of TCR clone 232721 (TRBV5-1, TRBJ1-1)
CASSLGEGGNTEAFF

SEQ ID NO: 465443 - protein, 13 aa, Homo sapiens
  CDR3 for alpha chain variable domain of TCR clone 232722 (TRAV38-1, TRAJ42)
CARWGGSQGNHIF

SEQ ID NO: 465444 - protein, 17 aa, Homo sapiens
  CDR3 for beta chain variable domain of TCR clone 232722 (TRBV20-1, TRBJ2-1)
CSARDPLAGVWDNEQFF

SEQ ID NO: 465445 - protein, 17 aa, Homo sapiens
  CDR3 for alpha chain variable domain of TCR clone 232723 (TRAV13-1, TRAJ5)
CSNPSLSRDTGRRALTF

SEQ ID NO: 465446 - protein, 16 aa, Homo sapiens
  CDR3 for beta chain variable domain of TCR clone 232723 (TRBV12-5, TRBJ2-5)
CASGPRTSGNQETQYF

SEQ ID NO: 465447 - protein, 13 aa, Homo sapiens
  CDR3 for alpha chain variable domain of TCR clone 232724 (TRAV12-3, TRAJ13)
CAMTSGGYQKVTF

SEQ ID NO: 465448 - protein, 12 aa, Homo sapiens
  CDR3 for beta chain variable domain of TCR clone 232724 (TRBV14, TRBJ2-5)
CASSHLKETQYF

SEQ ID NO: 465449 - protein, 13 aa, Homo sapiens
  CDR3 for alpha chain variable domain of TCR clone 232725 (TRAV12-1, TRAJ22)
CVVPSGSARQLTF

SEQ ID NO: 465450 - protein, 14 aa, Homo sapiens
  CDR3 for beta chain variable domain of TCR clone 232725 (TRBV7-8, TRBJ2-3)
CASSLEAGTDTQYF

SEQ ID NO: 465451 - protein, 12 aa, Homo sapiens
  CDR3 for alpha chain variable domain of TCR clone 232726 (TRAV13-1, TRAJ15)
CAASQAGTALFF

SEQ ID NO: 465452 - protein, 14 aa, Homo sapiens
  CDR3 for beta chain variable domain of TCR clone 232726 (TRBV19, TRBJ2-2)
CASSTLHRSGELFF

SEQ ID NO: 465453 - protein, 18 aa, Homo sapiens
  CDR3 for alpha chain variable domain of TCR clone 232727 (TRAV21, TRAJ52)
CAVWPSPAGGTSYGKLTF

SEQ ID NO: 465454 - protein, 15 aa, Homo sapiens
  CDR3 for beta chain variable domain of TCR clone 232727 (TRBV7-9, TRBJ2-7)
CASSSSGLAVYEQYF

SEQ ID NO: 465455 - protein, 14 aa, Homo sapiens
  CDR3 for alpha chain variable domain of TCR clone 232728 (TRAV13-1, TRAJ44)
CAAKATGTASKLTF

SEQ ID NO: 465456 - protein, 16 aa, Homo sapiens
  CDR3 for beta chain variable domain of TCR clone 232728 (TRBV12-4, TRBJ2-5)
CASSWRPSGDLETQYF

SEQ ID NO: 465457 - protein, 14 aa, Homo sapiens
  CDR3 for alpha chain variable domain of TCR clone 232729 (TRAV25, TRAJ27)
CAGQGNTNAGKSTF

SEQ ID NO: 465458 - protein, 16 aa, Homo sapiens
  CDR3 for beta chain variable domain of TCR clone 232729 (TRBV4-1, TRBJ2-6)
CASSQDGGPGANVLTF

SEQ ID NO: 465459 - protein, 11 aa, Homo sapiens
  CDR3 for alpha chain variable domain of TCR clone 232730 (TRAV3, TRAJ21)
CAVGSFNKFYF

SEQ ID NO: 465460 - protein, 16 aa, Homo sapiens
  CDR3 for beta chain variable domain of TCR clone 232730 (TRBV19, TRBJ2-1)
CASSKAGRSSYNEQFF

SEQ ID NO: 465461 - protein, 13 aa, Homo sapiens
  CDR3 for alpha chain variable domain of TCR clone 232731 (TRAV21, TRAJ15)
CAVRNQAGTALNF

SEQ ID NO: 465462 - protein, 16 aa, Homo sapiens
  CDR3 for beta chain variable domain of TCR clone 232731 (TRBV20-1, TRBJ2-5)
CSPGGTSGGYMETQYF

SEQ ID NO: 465463 - protein, 12 aa, Homo sapiens
  CDR3 for alpha chain variable domain of TCR clone 232732 (TRAV1-1, TRAJ34)
CAPPKEAGKLIF

SEQ ID NO: 465464 - protein, 14 aa, Homo sapiens
  CDR3 for beta chain variable domain of TCR clone 232732 (TRBV25-1, TRBJ1-1)
CASTHLGGNTEAFF

SEQ ID NO: 465465 - protein, 16 aa, Homo sapiens
  CDR3 for alpha chain variable domain of TCR clone 232733 (TRAV30, TRAJ24)
CGTEIVDADSWGKFEF

SEQ ID NO: 465466 - protein, 15 aa, Homo sapiens
  CDR3 for beta chain variable domain of TCR clone 232733 (TRBV18, TRBJ2-1)
CASLPDRGRDNEQFF

SEQ ID NO: 465467 - protein, 14 aa, Homo sapiens
  CDR3 for alpha chain variable domain of TCR clone 232734 (TRAV3, TRAJ8)
CAALMNKGFQKLVF

SEQ ID NO: 465468 - protein, 15 aa, Homo sapiens
  CDR3 for beta chain variable domain of TCR clone 232734 (TRBV28, TRBJ2-5)
CASSLGLGNQETQYF

SEQ ID NO: 465469 - protein, 15 aa, Homo sapiens
  CDR3 for alpha chain variable domain of TCR clone 232735 (TRAV3, TRAJ4)
CAVRDGTGGYNKLIF

SEQ ID NO: 465470 - protein, 20 aa, Homo sapiens
  CDR3 for beta chain variable domain of TCR clone 232735 (TRBV19, TRBJ2-1)
CASSISRTVTSTRLNNEQFF

SEQ ID NO: 465471 - protein, 18 aa, Homo sapiens
  CDR3 for alpha chain variable domain of TCR clone 232736 (TRAV12-3, TRAJ52)
CAMSVGGAGGTSYGKLTF

SEQ ID NO: 465472 - protein, 18 aa, Homo sapiens
  CDR3 for beta chain variable domain of TCR clone 232736 (TRBV2, TRBJ2-1)
CASRGLAGGPRTYDEQFF

SEQ ID NO: 465473 - protein, 17 aa, Homo sapiens
  CDR3 for alpha chain variable domain of TCR clone 232737 (TRAV26-1, TRAJ37)
CIVRVITVSSNTGKLIF

SEQ ID NO: 465474 - protein, 13 aa, Homo sapiens
  CDR3 for beta chain variable domain of TCR clone 232737 (TRBV12-4, TRBJ1-5)
CASSPRQYQPQHF

SEQ ID NO: 465475 - protein, 14 aa, Homo sapiens
  CDR3 for alpha chain variable domain of TCR clone 232738 (TRAV13-1, TRAJ44)
CAAKATGTASKLTF

SEQ ID NO: 465476 - protein, 14 aa, Homo sapiens
  CDR3 for beta chain variable domain of TCR clone 232738 (TRBV27, TRBJ2-2)
CASRPGVNTGELFF

SEQ ID NO: 465477 - protein, 16 aa, Homo sapiens
  CDR3 for alpha chain variable domain of TCR clone 232739 (TRAV38-2/DV8, TRAJ47)
CAYRSAIMEYGNKLVF

SEQ ID NO: 465478 - protein, 14 aa, Homo sapiens
  CDR3 for beta chain variable domain of TCR clone 232739 (TRBV19, TRBJ2-7)
CAGSIFAGTYEQYF

SEQ ID NO: 465479 - protein, 15 aa, Homo sapiens
  CDR3 for alpha chain variable domain of TCR clone 232740 (TRAV8-3, TRAJ45)
CASSYSGGGADGLTF

SEQ ID NO: 465480 - protein, 11 aa, Homo sapiens
  CDR3 for beta chain variable domain of TCR clone 232740 (TRBV12-4, TRBJ2-2)
CASSSAGELFF

SEQ ID NO: 465481 - protein, 15 aa, Homo sapiens
  CDR3 for alpha chain variable domain of TCR clone 232741 (TRAV13-1, TRAJ17)
CAASIERAAGNKLTF

SEQ ID NO: 465482 - protein, 14 aa, Homo sapiens
  CDR3 for beta chain variable domain of TCR clone 232741 (TRBV6-1, TRBJ2-7)
CASTRTGDYYEQYF

SEQ ID NO: 465483 - protein, 15 aa, Homo sapiens
  CDR3 for alpha chain variable domain of TCR clone 232742 (TRAV17, TRAJ56)
CAPEPFTGANSKLTF

SEQ ID NO: 465484 - protein, 15 aa, Homo sapiens
  CDR3 for beta chain variable domain of TCR clone 232742 (TRBV28, TRBJ1-5)
CASSRTGGYVQPQHF

SEQ ID NO: 465485 - protein, 15 aa, Homo sapiens
  CDR3 for alpha chain variable domain of TCR clone 232743 (TRAV3, TRAJ22)
CAVRDRGGSARHLTF

SEQ ID NO: 465486 - protein, 14 aa, Homo sapiens
  CDR3 for beta chain variable domain of TCR clone 232743 (TRBV25-1, TRBJ1-1)
CASTHLGGNTEAFF

SEQ ID NO: 465487 - protein, 11 aa, Homo sapiens
  CDR3 for alpha chain variable domain of TCR clone 232744 (TRAV2, TRAJ13)
RASGGYQKVTF

SEQ ID NO: 465488 - protein, 14 aa, Homo sapiens
  CDR3 for beta chain variable domain of TCR clone 232744 (TRBV7-8, TRBJ1-2)
CASSPDSLSYGYTF

SEQ ID NO: 465489 - protein, 11 aa, Homo sapiens
  CDR3 for alpha chain variable domain of TCR clone 232745 (TRAV17, TRAJ9)
CGFTGGFKTIF

SEQ ID NO: 465490 - protein, 17 aa, Homo sapiens
  CDR3 for beta chain variable domain of TCR clone 232745 (TRBV20-1, TRBJ2-2)
CSASGSGQGGLTGELFF

SEQ ID NO: 465491 - protein, 14 aa, Homo sapiens
  CDR3 for alpha chain variable domain of TCR clone 232746 (TRAV8-4, TRAJ57)
CAVSTQGGSEKLVF

SEQ ID NO: 465492 - protein, 14 aa, Homo sapiens
  CDR3 for beta chain variable domain of TCR clone 232746 (TRBV10-1, TRBJ1-5)
CASRARGAIQPQHF

SEQ ID NO: 465493 - protein, 15 aa, Homo sapiens
  CDR3 for alpha chain variable domain of TCR clone 232747 (TRAV13-1, TRAJ32)
CAASNGWWCYKQAHL

SEQ ID NO: 465494 - protein, 15 aa, Homo sapiens
  CDR3 for beta chain variable domain of TCR clone 232747 (TRBV20-1, TRBJ2-7)
CSTRDRVSGMDEQYF

SEQ ID NO: 465495 - protein, 14 aa, Homo sapiens
  CDR3 for alpha chain variable domain of TCR clone 232748 (TRAV27, TRAJ37)
CAGERSSNTGKLIF

SEQ ID NO: 465496 - protein, 16 aa, Homo sapiens
  CDR3 for beta chain variable domain of TCR clone 232748 (TRBV19, TRBJ2-1)
CASSKAGPSSYNEQFF

SEQ ID NO: 465497 - protein, 12 aa, Homo sapiens
  CDR3 for alpha chain variable domain of TCR clone 232749 (TRAV13-1, TRAJ21)
CAAKEGFNKFYF

SEQ ID NO: 465498 - protein, 16 aa, Homo sapiens
  CDR3 for beta chain variable domain of TCR clone 232749 (TRBV20-1, TRBJ2-2)
SAVLGGGQGNTGELFF

SEQ ID NO: 465499 - protein, 13 aa, Homo sapiens
  CDR3 for alpha chain variable domain of TCR clone 232750 (TRAV2, TRAJ40)
CAVATSGTYKYIF

SEQ ID NO: 465500 - protein, 14 aa, Homo sapiens
  CDR3 for beta chain variable domain of TCR clone 232750 (TRBV28, TRBJ2-1)
CASSYYTAYNEQFF

SEQ ID NO: 465501 - protein, 12 aa, Homo sapiens
  CDR3 for alpha chain variable domain of TCR clone 232751 (TRAV27, TRAJ36)
CAGMTGANNLFF

SEQ ID NO: 465502 - protein, 15 aa, Homo sapiens
  CDR3 for beta chain variable domain of TCR clone 232751 (TRBV6-3, TRBJ2-7)
CASSSPGTVFYEQYF

SEQ ID NO: 465503 - protein, 21 aa, Homo sapiens
  CDR3 for alpha chain variable domain of TCR clone 232752 (TRAV13-1, TRAJ26)
SLHITETQPEDSAVYFCSIVF

SEQ ID NO: 465504 - protein, 15 aa, Homo sapiens
  CDR3 for beta chain variable domain of TCR clone 232752 (TRBV12-4, TRBJ2-1)
CASSLLGRTYNEQFF

SEQ ID NO: 465505 - protein, 17 aa, Homo sapiens
  CDR3 for alpha chain variable domain of TCR clone 232753 (TRAV21, TRAJ24)
CAGISLRSTDSRGKLQF

SEQ ID NO: 465506 - protein, 15 aa, Homo sapiens
  CDR3 for beta chain variable domain of TCR clone 232753 (TRBV7-2, TRBJ2-3)
CASSPRGLSTDTQYF

SEQ ID NO: 465507 - protein, 14 aa, Homo sapiens
  CDR3 for alpha chain variable domain of TCR clone 232754 (TRAV12-3, TRAJ43)
CAMSLGGAGTRLTV

SEQ ID NO: 465508 - protein, 14 aa, Homo sapiens
  CDR3 for beta chain variable domain of TCR clone 232754 (TRBV7-2, TRBJ2-7)
CASRSQGAAYEQYF

SEQ ID NO: 465509 - protein, 13 aa, Homo sapiens
  CDR3 for alpha chain variable domain of TCR clone 232755 (TRAV17, TRAJ5)
CALRGTGRRALTF

SEQ ID NO: 465510 - protein, 14 aa, Homo sapiens
  CDR3 for beta chain variable domain of TCR clone 232755 (TRBV12-4, TRBJ2-1)
CASSWGHSVDEQFF

SEQ ID NO: 465511 - protein, 15 aa, Homo sapiens
  CDR3 for alpha chain variable domain of TCR clone 232756 (TRAV21, TRAJ24)
CAARSSTDSWGKLQF

SEQ ID NO: 465512 - protein, 14 aa, Homo sapiens
  CDR3 for beta chain variable domain of TCR clone 232756 (TRBV3-1, TRBJ2-5)
CASSQGPDQETQYF

SEQ ID NO: 465513 - protein, 12 aa, Homo sapiens
  CDR3 for alpha chain variable domain of TCR clone 232757 (TRAV1-2, TRAJ26)
CAVRHYGQNFVF

SEQ ID NO: 465514 - protein, 18 aa, Homo sapiens
  CDR3 for beta chain variable domain of TCR clone 232757 (TRBV11-2, TRBJ2-3)
CASSLGGASRGAPNTQYF

SEQ ID NO: 465515 - protein, 18 aa, Homo sapiens
  CDR3 for alpha chain variable domain of TCR clone 232758 (TRAV35, TRAJ28)
CAGHNYPLSGAGSYQLPF

SEQ ID NO: 465516 - protein, 12 aa, Homo sapiens
  CDR3 for beta chain variable domain of TCR clone 232758 (TRBV7-9, TRBJ1-1)
CASSLEGTEAFF

SEQ ID NO: 465517 - protein, 15 aa, Homo sapiens
  CDR3 for alpha chain variable domain of TCR clone 232759 (TRAV12-1, TRAJ5)
CVVNMLETGRRALTF

SEQ ID NO: 465518 - protein, 13 aa, Homo sapiens
  CDR3 for beta chain variable domain of TCR clone 232759 (TRBV2, TRBJ1-4)
CASNRGTNEKLFF

SEQ ID NO: 465519 - protein, 16 aa, Homo sapiens
  CDR3 for alpha chain variable domain of TCR clone 232760 (TRAV26-1, TRAJ23)
CIVRVERYNQGGKIIF

SEQ ID NO: 465520 - protein, 15 aa, Homo sapiens
  CDR3 for beta chain variable domain of TCR clone 232760 (TRBV18, TRBJ2-7)
CASSPRGGKGYEQYF

SEQ ID NO: 465521 - protein, 17 aa, Homo sapiens
  CDR3 for alpha chain variable domain of TCR clone 232761 (TRAV8-6, TRAJ4)
CAVSEKMVFGAGTRLAV

SEQ ID NO: 465522 - protein, 13 aa, Homo sapiens
  CDR3 for beta chain variable domain of TCR clone 232761 (TRBV4-2, TRBJ1-1)
CASSQAGNTEAFF

SEQ ID NO: 465523 - protein, 13 aa, Homo sapiens
  CDR3 for alpha chain variable domain of TCR clone 232762 (TRAV8-1, TRAJ7)
CAVMPYGNNRLAF

SEQ ID NO: 465524 - protein, 12 aa, Homo sapiens
  CDR3 for beta chain variable domain of TCR clone 232762 (TRBV7-8, TRBJ2-7)
CASSLGDREQYF

SEQ ID NO: 465525 - protein, 13 aa, Homo sapiens
  CDR3 for alpha chain variable domain of TCR clone 232763 (TRAV38-2/DV8, TRAJ34)
CAYMTWNTDKLIF

SEQ ID NO: 465526 - protein, 14 aa, Homo sapiens
  CDR3 for beta chain variable domain of TCR clone 232763 (TRBV7-2, TRBJ1-1)
CASSFLTGTTEAFF

SEQ ID NO: 465527 - protein, 14 aa, Homo sapiens
  CDR3 for alpha chain variable domain of TCR clone 232764 (TRAV1-2, TRAJ16)
CAVNRFSDGQKLFF

SEQ ID NO: 465528 - protein, 15 aa, Homo sapiens
  CDR3 for beta chain variable domain of TCR clone 232764 (TRBV20-1, TRBJ2-7)
CSARKGLAESYEQYF

SEQ ID NO: 465529 - protein, 16 aa, Homo sapiens
  CDR3 for alpha chain variable domain of TCR clone 232765 (TRAV30, TRAJ49)
SAAQRVGPTTGNQFYF

SEQ ID NO: 465530 - protein, 15 aa, Homo sapiens
  CDR3 for beta chain variable domain of TCR clone 232765 (TRBV2, TRBJ2-1)
CASSELAGSYNEQFF

SEQ ID NO: 465531 - protein, 14 aa, Homo sapiens
  CDR3 for alpha chain variable domain of TCR clone 232766 (TRAV1-2, TRAJ16)
CAVNRFSDGQKLLF

SEQ ID NO: 465532 - protein, 16 aa, Homo sapiens
  CDR3 for beta chain variable domain of TCR clone 232766 (TRBV11-2, TRBJ1-1)
YASSLRQGGEHSKAFF

SEQ ID NO: 465533 - protein, 12 aa, Homo sapiens
  CDR3 for alpha chain variable domain of TCR clone 232767 (TRAV1-2, TRAJ26)
CAVSPYGQNFVF

SEQ ID NO: 465534 - protein, 14 aa, Homo sapiens
  CDR3 for beta chain variable domain of TCR clone 232767 (TRBV5-1, TRBJ2-7)
CASRFASGVNEQYF

SEQ ID NO: 465535 - protein, 17 aa, Homo sapiens
  CDR3 for alpha chain variable domain of TCR clone 232768 (TRAV3, TRAJ6)
CALRDGPRAGGSYIPTF

SEQ ID NO: 465536 - protein, 18 aa, Homo sapiens
  CDR3 for beta chain variable domain of TCR clone 232768 (TRBV25-1, TRBJ1-2)
CASSGLQNGQGLIFGYTF

SEQ ID NO: 465537 - protein, 16 aa, Homo sapiens
  CDR3 for alpha chain variable domain of TCR clone 232769 (TRAV12-2, TRAJ10)
CAVNRVLTGGGNKPTF

SEQ ID NO: 465538 - protein, 14 aa, Homo sapiens
  CDR3 for beta chain variable domain of TCR clone 232769 (TRBV7-2, TRBJ2-7)
CASSPKTSFYEQYF

SEQ ID NO: 465539 - protein, 14 aa, Homo sapiens
  CDR3 for alpha chain variable domain of TCR clone 232770 (TRAV35, TRAJ33)
CAGSSQDSNYQLSG

SEQ ID NO: 465540 - protein, 15 aa, Homo sapiens
  CDR3 for beta chain variable domain of TCR clone 232770 (TRBV20-1, TRBJ2-7)
CSAESGTSGAYEQYF

SEQ ID NO: 465541 - protein, 14 aa, Homo sapiens
  CDR3 for alpha chain variable domain of TCR clone 232771 (TRAV8-3, TRAJ39)
CAVGANNAGNMLTF

SEQ ID NO: 465542 - protein, 15 aa, Homo sapiens
  CDR3 for beta chain variable domain of TCR clone 232771 (TRBV4-3, TRBJ2-1)
CASSQESAIYNEQFF

SEQ ID NO: 465543 - protein, 14 aa, Homo sapiens
  CDR3 for alpha chain variable domain of TCR clone 232772 (TRAV12-2, TRAJ13)
CAVKKTGGYQKVTF

SEQ ID NO: 465544 - protein, 15 aa, Homo sapiens
  CDR3 for beta chain variable domain of TCR clone 232772 (TRBV11-2, TRBJ2-1)
CASNSPSTRYNEQFF

SEQ ID NO: 465545 - protein, 10 aa, Homo sapiens
  CDR3 for alpha chain variable domain of TCR clone 232773 (TRAV30, TRAJ16)
CGTGGQKLLF

SEQ ID NO: 465546 - protein, 16 aa, Homo sapiens
  CDR3 for beta chain variable domain of TCR clone 232773 (TRBV7-3, TRBJ2-1)
CASSLEGDRSYNEQFF

SEQ ID NO: 465547 - protein, 14 aa, Homo sapiens
  CDR3 for alpha chain variable domain of TCR clone 232774 (TRAV12-2, TRAJ45)
CAVNIGVGADGLTF

SEQ ID NO: 465548 - protein, 13 aa, Homo sapiens
  CDR3 for beta chain variable domain of TCR clone 232774 (TRBV19, TRBJ2-2)
CASSIWSTGELFF

SEQ ID NO: 465549 - protein, 14 aa, Homo sapiens
  CDR3 for alpha chain variable domain of TCR clone 232775 (TRAV12-3, TRAJ9)
CAMSPNTGGFKTIF

SEQ ID NO: 465550 - protein, 15 aa, Homo sapiens
  CDR3 for beta chain variable domain of TCR clone 232775 (TRBV27, TRBJ2-7)
CASSTAGTGSYEQYF

SEQ ID NO: 465551 - protein, 11 aa, Homo sapiens
  CDR3 for alpha chain variable domain of TCR clone 232776 (TRAV4, TRAJ28)
CLVGDNRAETL

SEQ ID NO: 465552 - protein, 13 aa, Homo sapiens
  CDR3 for beta chain variable domain of TCR clone 232776 (TRBV20-1, TRBJ2-7)
CSASHTSEYEQYF

SEQ ID NO: 465553 - protein, 15 aa, Homo sapiens
  CDR3 for alpha chain variable domain of TCR clone 232777 (TRAV26-1, TRAJ22)
CIVRVSFWFCKATDL

SEQ ID NO: 465554 - protein, 13 aa, Homo sapiens
  CDR3 for beta chain variable domain of TCR clone 232777 (TRBV7-9, TRBJ1-2)
CASSLKRNHGYTF

SEQ ID NO: 465555 - protein, 14 aa, Homo sapiens
  CDR3 for alpha chain variable domain of TCR clone 232778 (TRAV9-2, TRAJ39)
CALHIYNAGNMLTF

SEQ ID NO: 465556 - protein, 13 aa, Homo sapiens
  CDR3 for beta chain variable domain of TCR clone 232778 (TRBV20-1, TRBJ2-2)
CSASAAGTGELFF

SEQ ID NO: 465557 - protein, 16 aa, Homo sapiens
  CDR3 for alpha chain variable domain of TCR clone 232779 (TRAV14/DV4, TRAJ15)
CAMGECPAQAGTALIF

SEQ ID NO: 465558 - protein, 12 aa, Homo sapiens
  CDR3 for beta chain variable domain of TCR clone 232779 (TRBV28, TRBJ2-6)
CAIQAGANVLTF

SEQ ID NO: 465559 - protein, 16 aa, Homo sapiens
  CDR3 for alpha chain variable domain of TCR clone 232780 (TRAV1-2, TRAJ40)
CAVRGSRTSGTYKYIF

SEQ ID NO: 465560 - protein, 14 aa, Homo sapiens
  CDR3 for beta chain variable domain of TCR clone 232780 (TRBV4-1, TRBJ2-3)
CSSSQDSGTDTQYF

SEQ ID NO: 465561 - protein, 13 aa, Homo sapiens
  CDR3 for alpha chain variable domain of TCR clone 232781 (TRAV21, TRAJ3)
CCEPYSSASKIIF

SEQ ID NO: 465562 - protein, 15 aa, Homo sapiens
  CDR3 for beta chain variable domain of TCR clone 232781 (TRBV6-6, TRBJ2-7)
CASSYSYGGSYEQYF

SEQ ID NO: 465563 - protein, 14 aa, Homo sapiens
  CDR3 for alpha chain variable domain of TCR clone 232782 (TRAV8-4, TRAJ9)
CAARINTGGFKTIF

SEQ ID NO: 465564 - protein, 15 aa, Homo sapiens
  CDR3 for beta chain variable domain of TCR clone 232782 (TRBV10-2, TRBJ2-6)
CASSERGTGANVLTF

SEQ ID NO: 465565 - protein, 14 aa, Homo sapiens
  CDR3 for alpha chain variable domain of TCR clone 232783 (TRAV38-1, TRAJ45)
CASHSGGGADGLTF

SEQ ID NO: 465566 - protein, 14 aa, Homo sapiens
  CDR3 for beta chain variable domain of TCR clone 232783 (TRBV12-4, TRBJ2-3)
CASSGQGSTDTQYF

SEQ ID NO: 465567 - protein, 13 aa, Homo sapiens
  CDR3 for alpha chain variable domain of TCR clone 232784 (TRAV9-2, TRAJ10)
CALATGGGNKLTF

SEQ ID NO: 465568 - protein, 13 aa, Homo sapiens
  CDR3 for beta chain variable domain of TCR clone 232784 (TRBV4-1, TRBJ2-2)
CASSQENTGELFF

SEQ ID NO: 465569 - protein, 14 aa, Homo sapiens
  CDR3 for alpha chain variable domain of TCR clone 232785 (TRAV13-1, TRAJ35)
CAASKGGFGNVLHC

SEQ ID NO: 465570 - protein, 17 aa, Homo sapiens
  CDR3 for beta chain variable domain of TCR clone 232785 (TRBV28, TRBJ2-5)
CASSTPEGDALQETQYF

SEQ ID NO: 465571 - protein, 11 aa, Homo sapiens
  CDR3 for alpha chain variable domain of TCR clone 232786 (TRAV2, TRAJ13)
CASGGYQKVTI

SEQ ID NO: 465572 - protein, 14 aa, Homo sapiens
  CDR3 for beta chain variable domain of TCR clone 232786 (TRBV19, TRBJ2-1)
CASSKDRGQDEQFF

SEQ ID NO: 465573 - protein, 14 aa, Homo sapiens
  CDR3 for alpha chain variable domain of TCR clone 232787 (TRAV8-4, TRAJ27)
CAGSKGTNAGKSTF

SEQ ID NO: 465574 - protein, 16 aa, Homo sapiens
  CDR3 for beta chain variable domain of TCR clone 232787 (TRBV2, TRBJ2-7)
CASSSTRRGSSYEQYF

SEQ ID NO: 465575 - protein, 13 aa, Homo sapiens
  CDR3 for alpha chain variable domain of TCR clone 232788 (TRAV13-1, TRAJ39)
CAASIWAGNMPTF

SEQ ID NO: 465576 - protein, 15 aa, Homo sapiens
  CDR3 for beta chain variable domain of TCR clone 232788 (TRBV11-3, TRBJ2-3)
CASLKDGREGDTQYF

SEQ ID NO: 465577 - protein, 13 aa, Homo sapiens
  CDR3 for alpha chain variable domain of TCR clone 232789 (TRAV16, TRAJ52)
CALRGTSYGKLTF

SEQ ID NO: 465578 - protein, 18 aa, Homo sapiens
  CDR3 for beta chain variable domain of TCR clone 232789 (TRBV13, TRBJ2-6)
CASRPMTSGGSGANVLTF

SEQ ID NO: 465579 - protein, 13 aa, Homo sapiens
  CDR3 for alpha chain variable domain of TCR clone 232790 (TRAV29/DV5, TRAJ31)
CAASRNNNARLMF

SEQ ID NO: 465580 - protein, 11 aa, Homo sapiens
  CDR3 for beta chain variable domain of TCR clone 232790 (TRBV7-8, TRBJ2-7)
CASSLSLEQYF

SEQ ID NO: 465581 - protein, 11 aa, Homo sapiens
  CDR3 for alpha chain variable domain of TCR clone 232791 (TRAV2, TRAJ13)
CASGGYQKVTF

SEQ ID NO: 465582 - protein, 13 aa, Homo sapiens
  CDR3 for beta chain variable domain of TCR clone 232791 (TRBV24-1, TRBJ2-3)
CATSTGGTDTQHF

SEQ ID NO: 465583 - protein, 15 aa, Homo sapiens
  CDR3 for alpha chain variable domain of TCR clone 232792 (TRAV3, TRAJ42)
CAVRGGTGSQGNLIF

SEQ ID NO: 465584 - protein, 14 aa, Homo sapiens
  CDR3 for beta chain variable domain of TCR clone 232792 (TRBV19, TRBJ1-2)
CASSSLFARDAYTF

SEQ ID NO: 465585 - protein, 13 aa, Homo sapiens
  CDR3 for alpha chain variable domain of TCR clone 232793 (TRAV8-3, TRAJ4)
CCGSAGGYNKLIF

SEQ ID NO: 465586 - protein, 15 aa, Homo sapiens
  CDR3 for beta chain variable domain of TCR clone 232793 (TRBV20-1, TRBJ2-5)
CSAPPRTGFGETQYF

SEQ ID NO: 465587 - protein, 14 aa, Homo sapiens
  CDR3 for alpha chain variable domain of TCR clone 232794 (TRAV8-3, TRAJ9)
CAVVYNTGGFKTIF

SEQ ID NO: 465588 - protein, 11 aa, Homo sapiens
  CDR3 for beta chain variable domain of TCR clone 232794 (TRBV12-4, TRBJ2-2)
CASSSAGELFF

SEQ ID NO: 465589 - protein, 13 aa, Homo sapiens
  CDR3 for alpha chain variable domain of TCR clone 232795 (TRAV36/DV7, TRAJ53)
CALSGGSNYKLTF

SEQ ID NO: 465590 - protein, 15 aa, Homo sapiens
  CDR3 for beta chain variable domain of TCR clone 232795 (TRBV5-1, TRBJ2-7)
CASSLNGGPAREQYF

SEQ ID NO: 465591 - protein, 10 aa, Homo sapiens
  CDR3 for alpha chain variable domain of TCR clone 232796 (TRAV21, TRAJ43)
CAVRIGDMRF

SEQ ID NO: 465592 - protein, 13 aa, Homo sapiens
  CDR3 for beta chain variable domain of TCR clone 232796 (TRBV20-1, TRBJ2-7)
CSAPGLADYEQYV

SEQ ID NO: 465593 - protein, 11 aa, Homo sapiens
  CDR3 for alpha chain variable domain of TCR clone 232797 (TRAV12-2, TRAJ21)
CRSIQLQQILL

SEQ ID NO: 465594 - protein, 14 aa, Homo sapiens
  CDR3 for beta chain variable domain of TCR clone 232797 (TRBV28, TRBJ2-1)
CASSYYTAYNEQLF

SEQ ID NO: 465595 - protein, 14 aa, Homo sapiens
  CDR3 for alpha chain variable domain of TCR clone 232798 (TRAV13-2, TRAJ17)
CAENSKSCRQQANF

SEQ ID NO: 465596 - protein, 15 aa, Homo sapiens
  CDR3 for beta chain variable domain of TCR clone 232798 (TRBV27, TRBJ1-6)
CASSFDRGLGSPLHF

SEQ ID NO: 465597 - protein, 11 aa, Homo sapiens
  CDR3 for alpha chain variable domain of TCR clone 232799 (TRAV2, TRAJ33)
CAVESNYQLIW

SEQ ID NO: 465598 - protein, 12 aa, Homo sapiens
  CDR3 for beta chain variable domain of TCR clone 232799 (TRBV11-2, TRBJ2-5)
CASSLVGETQYF

SEQ ID NO: 465599 - protein, 15 aa, Homo sapiens
  CDR3 for alpha chain variable domain of TCR clone 232800 (TRAV8-3, TRAJ34)
CAVAPHGGNTDKLIF

SEQ ID NO: 465600 - protein, 14 aa, Homo sapiens
  CDR3 for beta chain variable domain of TCR clone 232800 (TRBV12-5, TRBJ2-5)
CASGSRTHQETQYF

SEQ ID NO: 465601 - protein, 16 aa, Homo sapiens
  CDR3 for alpha chain variable domain of TCR clone 232801 (TRAV12-2, TRAJ18)
CAVTTDRGSTLGRLYF

SEQ ID NO: 465602 - protein, 13 aa, Homo sapiens
  CDR3 for beta chain variable domain of TCR clone 232801 (TRBV20-1, TRBJ2-7)
CSARVRQGGEQYF

SEQ ID NO: 465603 - protein, 12 aa, Homo sapiens
  CDR3 for alpha chain variable domain of TCR clone 232802 (TRAV12-1, TRAJ16)
CVVFRDGQKLLF

SEQ ID NO: 465604 - protein, 16 aa, Homo sapiens
  CDR3 for beta chain variable domain of TCR clone 232802 (TRBV19, TRBJ2-1)
CASSKAGPSSYNEQFF

SEQ ID NO: 465605 - protein, 12 aa, Homo sapiens
  CDR3 for alpha chain variable domain of TCR clone 232803 (TRAV38-1, TRAJ47)
CAFETYGKKLVF

SEQ ID NO: 465606 - protein, 15 aa, Homo sapiens
  CDR3 for beta chain variable domain of TCR clone 232803 (TRBV5-7, TRBJ2-7)
CASSGGRPVPYEQYF

SEQ ID NO: 465607 - protein, 15 aa, Homo sapiens
  CDR3 for alpha chain variable domain of TCR clone 232804 (TRAV12-3, TRAJ11)
CAMSEENSGYSTLTF

SEQ ID NO: 465608 - protein, 13 aa, Homo sapiens
  CDR3 for beta chain variable domain of TCR clone 232804 (TRBV9, TRBJ2-7)
CASSVGTAYEQYF

SEQ ID NO: 465609 - protein, 13 aa, Homo sapiens
  CDR3 for alpha chain variable domain of TCR clone 232805 (TRAV8-6, TRAJ9)
CAVWDTRGFKTIF

SEQ ID NO: 465610 - protein, 14 aa, Homo sapiens
  CDR3 for beta chain variable domain of TCR clone 232805 (TRBV2, TRBJ2-1)
CASSEALIYNEQFF

SEQ ID NO: 465611 - protein, 14 aa, Homo sapiens
  CDR3 for alpha chain variable domain of TCR clone 232806 (TRAV35, TRAJ38)
CAGSNAGNNRKLIW

SEQ ID NO: 465612 - protein, 13 aa, Homo sapiens
  CDR3 for beta chain variable domain of TCR clone 232806 (TRBV7-8, TRBJ2-2)
CASSSSRTGELSF

SEQ ID NO: 465613 - protein, 14 aa, Homo sapiens
  CDR3 for alpha chain variable domain of TCR clone 232807 (TRAV8-3, TRAJ39)
CAVGANNAGNIPTF

SEQ ID NO: 465614 - protein, 15 aa, Homo sapiens
  CDR3 for beta chain variable domain of TCR clone 232807 (TRBV4-3, TRBJ1-1)
CASSQELGRGTEAFF

SEQ ID NO: 465615 - protein, 14 aa, Homo sapiens
  CDR3 for alpha chain variable domain of TCR clone 232808 (TRAV13-1, TRAJ26)
CAAPKGPDGQNFVF

SEQ ID NO: 465616 - protein, 15 aa, Homo sapiens
  CDR3 for beta chain variable domain of TCR clone 232808 (TRBV19, TRBJ2-7)
CASSPAGSGEALTYF

SEQ ID NO: 465617 - protein, 11 aa, Homo sapiens
  CDR3 for alpha chain variable domain of TCR clone 232809 (TRAV4, TRAJ20)
CLVGDKVTTTS

SEQ ID NO: 465618 - protein, 15 aa, Homo sapiens
  CDR3 for beta chain variable domain of TCR clone 232809 (TRBV18, TRBJ2-7)
RASSPSSTGNYEQYF

SEQ ID NO: 465619 - protein, 14 aa, Homo sapiens
  CDR3 for alpha chain variable domain of TCR clone 232810 (TRAV1-2, TRAJ8)
CAVREDTGFQKLVF

SEQ ID NO: 465620 - protein, 13 aa, Homo sapiens
  CDR3 for beta chain variable domain of TCR clone 232810 (TRBV11-2, TRBJ2-1)
CASSLGLAGGRFF

SEQ ID NO: 465621 - protein, 12 aa, Homo sapiens
  CDR3 for alpha chain variable domain of TCR clone 232811 (TRAV8-3, TRAJ34)
CAVLTNTDKLIF

SEQ ID NO: 465622 - protein, 17 aa, Homo sapiens
  CDR3 for beta chain variable domain of TCR clone 232811 (TRBV7-2, TRBJ2-7)
CASSLGIGNDTSSTSGR

SEQ ID NO: 465623 - protein, 14 aa, Homo sapiens
  CDR3 for alpha chain variable domain of TCR clone 232812 (TRAV13-1, TRAJ32)
CEARGSDATNKLIF

SEQ ID NO: 465624 - protein, 15 aa, Homo sapiens
  CDR3 for beta chain variable domain of TCR clone 232812 (TRBV5-5, TRBJ1-1)
CASSLVGKDNTEAFF

SEQ ID NO: 465625 - protein, 12 aa, Homo sapiens
  CDR3 for alpha chain variable domain of TCR clone 232813 (TRAV2, TRAJ10)
CACTGGGNKLTF

SEQ ID NO: 465626 - protein, 14 aa, Homo sapiens
  CDR3 for beta chain variable domain of TCR clone 232813 (TRBV7-2, TRBJ2-2)
CASRGQGAAGELFF

SEQ ID NO: 465627 - protein, 16 aa, Homo sapiens
  CDR3 for alpha chain variable domain of TCR clone 232814 (TRAV14/DV4, TRAJ53)
CAMREGGGGSNYKLTF

SEQ ID NO: 465628 - protein, 12 aa, Homo sapiens
  CDR3 for beta chain variable domain of TCR clone 232814 (TRBV5-1, TRBJ1-1)
CASSFGNTEAFF

SEQ ID NO: 465629 - protein, 13 aa, Homo sapiens
  CDR3 for alpha chain variable domain of TCR clone 232815 (TRAV27, TRAJ45)
CRSSGGGADGLTF

SEQ ID NO: 465630 - protein, 15 aa, Homo sapiens
  CDR3 for beta chain variable domain of TCR clone 232815 (TRBV11-2, TRBJ2-3)
CASLKDGREGDTQYF

SEQ ID NO: 465631 - protein, 14 aa, Homo sapiens
  CDR3 for alpha chain variable domain of TCR clone 232816 (TRAV8-6, TRAJ5)
CAVSLDTGRRALTF

SEQ ID NO: 465632 - protein, 11 aa, Homo sapiens
  CDR3 for beta chain variable domain of TCR clone 232816 (TRBV7-3, TRBJ2-5)
CASSLSETQYF

SEQ ID NO: 465633 - protein, 12 aa, Homo sapiens
  CDR3 for alpha chain variable domain of TCR clone 232817 (TRAV35, TRAJ39)
LAPTNAGNMLTF

SEQ ID NO: 465634 - protein, 13 aa, Homo sapiens
  CDR3 for beta chain variable domain of TCR clone 232817 (TRBV19, TRBJ1-3)
CASRLSLGNTIYF

SEQ ID NO: 465635 - protein, 16 aa, Homo sapiens
  CDR3 for alpha chain variable domain of TCR clone 232818 (TRAV8-3, TRAJ10)
CAVGPILTGGGNKLTF

SEQ ID NO: 465636 - protein, 16 aa, Homo sapiens
  CDR3 for beta chain variable domain of TCR clone 232818 (TRBV7-2, TRBJ2-5)
CASSSKWLSGQETQYL

SEQ ID NO: 465637 - protein, 14 aa, Homo sapiens
  CDR3 for alpha chain variable domain of TCR clone 232819 (TRAV12-3, TRAJ20)
CAMSARRGDYKLSF

SEQ ID NO: 465638 - protein, 14 aa, Homo sapiens
  CDR3 for beta chain variable domain of TCR clone 232819 (TRBV7-3, TRBJ2-3)
CASSPSARTDTQYC

SEQ ID NO: 465639 - protein, 15 aa, Homo sapiens
  CDR3 for alpha chain variable domain of TCR clone 232820 (TRAV17, TRAJ57)
CATGPSQGGSEKLVF

SEQ ID NO: 465640 - protein, 15 aa, Homo sapiens
  CDR3 for beta chain variable domain of TCR clone 232820 (TRBV7-2, TRBJ2-1)
CAGSSPGQYLGEQFF

SEQ ID NO: 465641 - protein, 14 aa, Homo sapiens
  CDR3 for alpha chain variable domain of TCR clone 232821 (TRAV16, TRAJ54)
CALSGVQGAQKLGF

SEQ ID NO: 465642 - protein, 15 aa, Homo sapiens
  CDR3 for beta chain variable domain of TCR clone 232821 (TRBV18, TRBJ2-2)
CASSTSGLHTGELFF

SEQ ID NO: 465643 - protein, 14 aa, Homo sapiens
  CDR3 for alpha chain variable domain of TCR clone 232822 (TRAV12-2, TRAJ5)
CSVNRSTGRRALTF

SEQ ID NO: 465644 - protein, 12 aa, Homo sapiens
  CDR3 for beta chain variable domain of TCR clone 232822 (TRBV19, TRBJ1-5)
CASSIAQQPRHF

SEQ ID NO: 465645 - protein, 15 aa, Homo sapiens
  CDR3 for alpha chain variable domain of TCR clone 232823 (TRAV8-2, TRAJ40)
CVVLGTTSGTYKYIF

SEQ ID NO: 465646 - protein, 20 aa, Homo sapiens
  CDR3 for beta chain variable domain of TCR clone 232823 (TRBV28, TRBJ2-1)
CASPPIGRSPGLAGGNEQFF

SEQ ID NO: 465647 - protein, 11 aa, Homo sapiens
  CDR3 for alpha chain variable domain of TCR clone 232824 (TRAV35, TRAJ34)
CWARNTDKLIF

SEQ ID NO: 465648 - protein, 16 aa, Homo sapiens
  CDR3 for beta chain variable domain of TCR clone 232824 (TRBV19, TRBJ2-2)
CASSFPGQGLAGELFF

SEQ ID NO: 465649 - protein, 13 aa, Homo sapiens
  CDR3 for alpha chain variable domain of TCR clone 232825 (TRAV12-2, TRAJ18)
CAVRGSTLGRPYF

SEQ ID NO: 465650 - protein, 18 aa, Homo sapiens
  CDR3 for beta chain variable domain of TCR clone 232825 (TRBV11-2, TRBJ2-3)
CASSLGGASRGAPNTQYF

SEQ ID NO: 465651 - protein, 13 aa, Homo sapiens
  CDR3 for alpha chain variable domain of TCR clone 232826 (TRAV23/DV6, TRAJ36)
CAAGQTGANNLFF

SEQ ID NO: 465652 - protein, 16 aa, Homo sapiens
  CDR3 for beta chain variable domain of TCR clone 232826 (TRBV15, TRBJ1-4)
CATSRDSPPGREKLFF

SEQ ID NO: 465653 - protein, 15 aa, Homo sapiens
  CDR3 for alpha chain variable domain of TCR clone 232827 (TRAV12-3, TRAJ6)
CAMSAASGGSYIPTF

SEQ ID NO: 465654 - protein, 13 aa, Homo sapiens
  CDR3 for beta chain variable domain of TCR clone 232827 (TRBV20-1, TRBJ1-2)
CSASTERIDGYTF

SEQ ID NO: 465655 - protein, 14 aa, Homo sapiens
  CDR3 for alpha chain variable domain of TCR clone 232828 (TRAV3, TRAJ22)
CAVRDRRFCKATDL

SEQ ID NO: 465656 - protein, 15 aa, Homo sapiens
  CDR3 for beta chain variable domain of TCR clone 232828 (TRBV20-1, TRBJ1-1)
CSASRGVTGNTEAFF

SEQ ID NO: 465657 - protein, 13 aa, Homo sapiens
  CDR3 for alpha chain variable domain of TCR clone 232829 (TRAV2, TRAJ40)
CAVVTSGTYKYIF

SEQ ID NO: 465658 - protein, 13 aa, Homo sapiens
  CDR3 for beta chain variable domain of TCR clone 232829 (TRBV19, TRBJ2-2)
CASSIWSTGGLFF

SEQ ID NO: 465659 - protein, 15 aa, Homo sapiens
  CDR3 for alpha chain variable domain of TCR clone 232830 (TRAV4, TRAJ39)
CLVGPNNNAGNMLTF

SEQ ID NO: 465660 - protein, 10 aa, Homo sapiens
  CDR3 for beta chain variable domain of TCR clone 232830 (TRBV7-2, TRBJ2-2)
CASRRPGQNT

SEQ ID NO: 465661 - protein, 15 aa, Homo sapiens
  CDR3 for alpha chain variable domain of TCR clone 232831 (TRAV8-3, TRAJ17)
CAVGAIKAAGNKLTF

SEQ ID NO: 465662 - protein, 16 aa, Homo sapiens
  CDR3 for beta chain variable domain of TCR clone 232831 (TRBV19, TRBJ2-1)
CASSIQAGGSYNEQFF

SEQ ID NO: 465663 - protein, 13 aa, Homo sapiens
  CDR3 for alpha chain variable domain of TCR clone 232832 (TRAV26-2, TRAJ43)
CILRAVNNNNMRF

SEQ ID NO: 465664 - protein, 14 aa, Homo sapiens
  CDR3 for beta chain variable domain of TCR clone 232832 (TRBV19, TRBJ2-1)
CASPTFVLSGEQFF

SEQ ID NO: 465665 - protein, 12 aa, Homo sapiens
  CDR3 for alpha chain variable domain of TCR clone 232833 (TRAV3, TRAJ43)
CAVRDPNNNMRF

SEQ ID NO: 465666 - protein, 15 aa, Homo sapiens
  CDR3 for beta chain variable domain of TCR clone 232833 (TRBV4-3, TRBJ2-7)
CASSQGDWGDYEQYF

SEQ ID NO: 465667 - protein, 14 aa, Homo sapiens
  CDR3 for alpha chain variable domain of TCR clone 232834 (TRAV13-1, TRAJ24)
CAASPADSWGKLQF

SEQ ID NO: 465668 - protein, 13 aa, Homo sapiens
  CDR3 for beta chain variable domain of TCR clone 232834 (TRBV19, TRBJ2-2)
CASSQRSTGELFF

SEQ ID NO: 465669 - protein, 11 aa, Homo sapiens
  CDR3 for alpha chain variable domain of TCR clone 232835 (TRAV17, TRAJ9)
CATTGGFKTIF

SEQ ID NO: 465670 - protein, 13 aa, Homo sapiens
  CDR3 for beta chain variable domain of TCR clone 232835 (TRBV19, TRBJ2-5)
CASSETAPETQYF

SEQ ID NO: 465671 - protein, 14 aa, Homo sapiens
  CDR3 for alpha chain variable domain of TCR clone 232836 (TRAV1-2, TRAJ16)
CAVNRVSDVQKLLF

SEQ ID NO: 465672 - protein, 15 aa, Homo sapiens
  CDR3 for beta chain variable domain of TCR clone 232836 (TRBV7-9, TRBJ1-6)
CASSSPGRGNSPLHF

SEQ ID NO: 465673 - protein, 12 aa, Homo sapiens
  CDR3 for alpha chain variable domain of TCR clone 232837 (TRAV8-3, TRAJ27)
CSVVAEAGKSTF

SEQ ID NO: 465674 - protein, 14 aa, Homo sapiens
  CDR3 for beta chain variable domain of TCR clone 232837 (TRBV2, TRBJ2-1)
CASRLIVGHDEQFF

SEQ ID NO: 465675 - protein, 12 aa, Homo sapiens
  CDR3 for alpha chain variable domain of TCR clone 232838 (TRAV12-3, TRAJ17)
CAMTLTGNKLTF

SEQ ID NO: 465676 - protein, 16 aa, Homo sapiens
  CDR3 for beta chain variable domain of TCR clone 232838 (TRBV18, TRBJ2-3)
CASSPGGLASTDTQYF

SEQ ID NO: 465677 - protein, 13 aa, Homo sapiens
  CDR3 for alpha chain variable domain of TCR clone 232839 (TRAV16, TRAJ11)
CALSGPSYSTLTF

SEQ ID NO: 465678 - protein, 15 aa, Homo sapiens
  CDR3 for beta chain variable domain of TCR clone 232839 (TRBV7-9, TRBJ1-6)
CASSSPGRGNSPLHF

SEQ ID NO: 465679 - protein, 13 aa, Homo sapiens
  CDR3 for alpha chain variable domain of TCR clone 232840 (TRAV17, TRAJ5)
RALRGTGRRALTF

SEQ ID NO: 465680 - protein, 15 aa, Homo sapiens
  CDR3 for beta chain variable domain of TCR clone 232840 (TRBV6-1, TRBJ1-5)
CASSELREGNQPQHF

SEQ ID NO: 465681 - protein, 15 aa, Homo sapiens
  CDR3 for alpha chain variable domain of TCR clone 232841 (TRAV3, TRAJ22)
CAVRDRRGSARQLTF

SEQ ID NO: 465682 - protein, 16 aa, Homo sapiens
  CDR3 for beta chain variable domain of TCR clone 232841 (TRBV5-4, TRBJ2-3)
CASKQPGAGGADTQYF

SEQ ID NO: 465683 - protein, 13 aa, Homo sapiens
  CDR3 for alpha chain variable domain of TCR clone 232842 (TRAV8-6, TRAJ9)
CAVSDTGGFKTIF

SEQ ID NO: 465684 - protein, 16 aa, Homo sapiens
  CDR3 for beta chain variable domain of TCR clone 232842 (TRBV19, TRBJ2-1)
CASSKAGPSSYNEQFF

SEQ ID NO: 465685 - protein, 18 aa, Homo sapiens
  CDR3 for alpha chain variable domain of TCR clone 232843 (TRAV26-1, TRAJ52)
CIVDPVGAGGTSYGKLTF

SEQ ID NO: 465686 - protein, 12 aa, Homo sapiens
  CDR3 for beta chain variable domain of TCR clone 232843 (TRBV12-4, TRBJ2-7)
CASSLGGYEQYF

SEQ ID NO: 465687 - protein, 12 aa, Homo sapiens
  CDR3 for alpha chain variable domain of TCR clone 232844 (TRAV13-1, TRAJ48)
CAANFGNEKLTF

SEQ ID NO: 465688 - protein, 15 aa, Homo sapiens
  CDR3 for beta chain variable domain of TCR clone 232844 (TRBV5-1, TRBJ1-1)
CASSSTTGTNTEAFF

SEQ ID NO: 465689 - protein, 11 aa, Homo sapiens
  CDR3 for alpha chain variable domain of TCR clone 232845 (TRAV13-2, TRAJ23)
CAESPRGKLIF

SEQ ID NO: 465690 - protein, 14 aa, Homo sapiens
  CDR3 for beta chain variable domain of TCR clone 232845 (TRBV27, TRBJ2-1)
CASSATGGYNEQFF

SEQ ID NO: 465691 - protein, 13 aa, Homo sapiens
  CDR3 for alpha chain variable domain of TCR clone 232846 (TRAV8-3, TRAJ30)
CAVCGWRDDKIIF

SEQ ID NO: 465692 - protein, 14 aa, Homo sapiens
  CDR3 for beta chain variable domain of TCR clone 232846 (TRBV20-1, TRBJ1-1)
CSAPPADMNTEAFF

SEQ ID NO: 465693 - protein, 12 aa, Homo sapiens
  CDR3 for alpha chain variable domain of TCR clone 232847 (TRAV26-1, TRAJ36)
CIVRVRADNLFF

SEQ ID NO: 465694 - protein, 16 aa, Homo sapiens
  CDR3 for beta chain variable domain of TCR clone 232847 (TRBV7-3, TRBJ2-2)
CASSLKRGTLSGELFF

SEQ ID NO: 465695 - protein, 13 aa, Homo sapiens
  CDR3 for alpha chain variable domain of TCR clone 232848 (TRAV1-1, TRAJ23)
CAVVARQGGKLIF

SEQ ID NO: 465696 - protein, 16 aa, Homo sapiens
  CDR3 for beta chain variable domain of TCR clone 232848 (TRBV5-5, TRBJ1-2)
CASSPTWGRGLYGYTC

SEQ ID NO: 465697 - protein, 18 aa, Homo sapiens
  CDR3 for alpha chain variable domain of TCR clone 232849 (TRAV21, TRAJ52)
CAVRPSPAGGTSYGKLTF

SEQ ID NO: 465698 - protein, 14 aa, Homo sapiens
  CDR3 for beta chain variable domain of TCR clone 232849 (TRBV7-2, TRBJ2-7)
CASSSISGFSEQYF

SEQ ID NO: 465699 - protein, 15 aa, Homo sapiens
  CDR3 for alpha chain variable domain of TCR clone 232850 (TRAV8-3, TRAJ11)
CAVGLLNSGYSTLTF

SEQ ID NO: 465700 - protein, 12 aa, Homo sapiens
  CDR3 for beta chain variable domain of TCR clone 232850 (TRBV7-8, TRBJ2-7)
CASEGGPHRQYF

SEQ ID NO: 465701 - protein, 15 aa, Homo sapiens
  CDR3 for alpha chain variable domain of TCR clone 232851 (TRAV17, TRAJ54)
CATTGSEQGAQKLVF

SEQ ID NO: 465702 - protein, 16 aa, Homo sapiens
  CDR3 for beta chain variable domain of TCR clone 232851 (TRBV12-4, TRBJ2-3)
CASSLRLAETTDTQYF

SEQ ID NO: 465703 - protein, 13 aa, Homo sapiens
  CDR3 for alpha chain variable domain of TCR clone 232852 (TRAV6, TRAJ23)
CALDQNQGGKLIF

SEQ ID NO: 465704 - protein, 15 aa, Homo sapiens
  CDR3 for beta chain variable domain of TCR clone 232852 (TRBV28, TRBJ1-2)
CASSGSEQRAFGYIF

SEQ ID NO: 465705 - protein, 11 aa, Homo sapiens
  CDR3 for alpha chain variable domain of TCR clone 232853 (TRAV12-1, TRAJ43)
CVVYDNNDMRF

SEQ ID NO: 465706 - protein, 15 aa, Homo sapiens
  CDR3 for beta chain variable domain of TCR clone 232853 (TRBV18, TRBJ2-5)
CASSPRASEAETQYF

SEQ ID NO: 465707 - protein, 14 aa, Homo sapiens
  CDR3 for alpha chain variable domain of TCR clone 232854 (TRAV12-1, TRAJ10)
CVVNSPGGGNKLTF

SEQ ID NO: 465708 - protein, 14 aa, Homo sapiens
  CDR3 for beta chain variable domain of TCR clone 232854 (TRBV12-4, TRBJ1-1)
CASSLGTGGTEAFF

SEQ ID NO: 465709 - protein, 13 aa, Homo sapiens
  CDR3 for alpha chain variable domain of TCR clone 232855 (TRAV2, TRAJ15)
CAVASQAGTALIF

SEQ ID NO: 465710 - protein, 14 aa, Homo sapiens
  CDR3 for beta chain variable domain of TCR clone 232855 (TRBV4-1, TRBJ2-2)
CASSQAVNTGELFF

SEQ ID NO: 465711 - protein, 15 aa, Homo sapiens
  CDR3 for alpha chain variable domain of TCR clone 232856 (TRAV12-1, TRAJ9)
CVVSFGDTGGFKAIF

SEQ ID NO: 465712 - protein, 14 aa, Homo sapiens
  CDR3 for beta chain variable domain of TCR clone 232856 (TRBV25-1, TRBJ1-1)
CASTHLGGNTEAFF

SEQ ID NO: 465713 - protein, 12 aa, Homo sapiens
  CDR3 for alpha chain variable domain of TCR clone 232857 (TRAV26-1, TRAJ13)
CIVSRGYQKVTF

SEQ ID NO: 465714 - protein, 14 aa, Homo sapiens
  CDR3 for beta chain variable domain of TCR clone 232857 (TRBV7-2, TRBJ2-7)
CASRSQGAAYEQYF

SEQ ID NO: 465715 - protein, 13 aa, Homo sapiens
  CDR3 for alpha chain variable domain of TCR clone 232858 (TRAV8-3, TRAJ28)
CAVGAVGSYHLTF

SEQ ID NO: 465716 - protein, 15 aa, Homo sapiens
  CDR3 for beta chain variable domain of TCR clone 232858 (TRBV7-9, TRBJ1-5)
CASSRGHQPNQPQHF

SEQ ID NO: 465717 - protein, 15 aa, Homo sapiens
  CDR3 for alpha chain variable domain of TCR clone 232859 (TRAV23/DV6, TRAJ18)
CAARYRGPTLGVLYF

SEQ ID NO: 465718 - protein, 13 aa, Homo sapiens
  CDR3 for beta chain variable domain of TCR clone 232859 (TRBV7-2, TRBJ2-7)
CASSSPSGSEQYF

SEQ ID NO: 465719 - protein, 14 aa, Homo sapiens
  CDR3 for alpha chain variable domain of TCR clone 232860 (TRAV3, TRAJ34)
CAVRDINNTDTLIF

SEQ ID NO: 465720 - protein, 14 aa, Homo sapiens
  CDR3 for beta chain variable domain of TCR clone 232860 (TRBV7-2, TRBJ2-2)
CASSLGQNTGELFF

SEQ ID NO: 465721 - protein, 16 aa, Homo sapiens
  CDR3 for alpha chain variable domain of TCR clone 232861 (TRAV3, TRAJ37)
CAVSGKGSGNTGKLIF

SEQ ID NO: 465722 - protein, 13 aa, Homo sapiens
  CDR3 for beta chain variable domain of TCR clone 232861 (TRBV4-2, TRBJ1-1)
CASSQAGNTEAFF

SEQ ID NO: 465723 - protein, 15 aa, Homo sapiens
  CDR3 for alpha chain variable domain of TCR clone 232862 (TRAV17, TRAJ57)
CATGPSQGGSEKLVF

SEQ ID NO: 465724 - protein, 19 aa, Homo sapiens
  CDR3 for beta chain variable domain of TCR clone 232862 (TRBV7-3, TRBJ1-2)
CASSFPQGNDGELWLHLRF

SEQ ID NO: 465725 - protein, 16 aa, Homo sapiens
  CDR3 for alpha chain variable domain of TCR clone 232863 (TRAV21, TRAJ37)
CAVRTAGPSNTGNLIF

SEQ ID NO: 465726 - protein, 13 aa, Homo sapiens
  CDR3 for beta chain variable domain of TCR clone 232863 (TRBV7-9, TRBJ2-5)
CASLPSGRETQYF

SEQ ID NO: 465727 - protein, 14 aa, Homo sapiens
  CDR3 for alpha chain variable domain of TCR clone 232864 (TRAV8-4, TRAJ37)
CAVSEPSNTGKLIF

SEQ ID NO: 465728 - protein, 14 aa, Homo sapiens
  CDR3 for beta chain variable domain of TCR clone 232864 (TRBV28, TRBJ2-1)
FAIHRTGARTEQFF

SEQ ID NO: 465729 - protein, 15 aa, Homo sapiens
  CDR3 for alpha chain variable domain of TCR clone 232865 (TRAV13-1, TRAJ17)
CAASIERAAGNKLTF

SEQ ID NO: 465730 - protein, 16 aa, Homo sapiens
  CDR3 for beta chain variable domain of TCR clone 232865 (TRBV29-1, TRBJ2-7)
CSVEVVGTSGSYEQYF

SEQ ID NO: 465731 - protein, 12 aa, Homo sapiens
  CDR3 for alpha chain variable domain of TCR clone 232866 (TRAV27, TRAJ9)
CAGESGGFKTIF

SEQ ID NO: 465732 - protein, 12 aa, Homo sapiens
  CDR3 for beta chain variable domain of TCR clone 232866 (TRBV4-1, TRBJ2-1)
CASSQPGQGQFF

SEQ ID NO: 465733 - protein, 14 aa, Homo sapiens
  CDR3 for alpha chain variable domain of TCR clone 232867 (TRAV1-2, TRAJ8)
CAVREDTGFQKLVF

SEQ ID NO: 465734 - protein, 12 aa, Homo sapiens
  CDR3 for beta chain variable domain of TCR clone 232867 (TRBV14, TRBJ2-5)
CASSQLNETQYF

SEQ ID NO: 465735 - protein, 14 aa, Homo sapiens
  CDR3 for alpha chain variable domain of TCR clone 232868 (TRAV21, TRAJ28)
CAVGSGAGSYQLTF

SEQ ID NO: 465736 - protein, 14 aa, Homo sapiens
  CDR3 for beta chain variable domain of TCR clone 232868 (TRBV18, TRBJ1-4)
CASSPGPSGEKLFF

SEQ ID NO: 465737 - protein, 11 aa, Homo sapiens
  CDR3 for alpha chain variable domain of TCR clone 232869 (TRAV21, TRAJ11)
CAVNGYSTLTF

SEQ ID NO: 465738 - protein, 16 aa, Homo sapiens
  CDR3 for beta chain variable domain of TCR clone 232869 (TRBV4-3, TRBJ2-1)
CASSPALDRGVNEQFF

SEQ ID NO: 465739 - protein, 13 aa, Homo sapiens
  CDR3 for alpha chain variable domain of TCR clone 232870 (TRAV39, TRAJ17)
CAAQFTAGNKLTF

SEQ ID NO: 465740 - protein, 17 aa, Homo sapiens
  CDR3 for beta chain variable domain of TCR clone 232870 (TRBV7-9, TRBJ2-6)
CASSFGAGYSGANVLTF

SEQ ID NO: 465741 - protein, 17 aa, Homo sapiens
  CDR3 for alpha chain variable domain of TCR clone 232871 (TRAV13-1, TRAJ52)
CAAGRNAGGTSYGKLTF

SEQ ID NO: 465742 - protein, 15 aa, Homo sapiens
  CDR3 for beta chain variable domain of TCR clone 232871 (TRBV19, TRBJ2-7)
CASSPAGSGEALRYF

SEQ ID NO: 465743 - protein, 12 aa, Homo sapiens
  CDR3 for alpha chain variable domain of TCR clone 232872 (TRAV8-3, TRAJ20)
CAVGANDYKLSS

SEQ ID NO: 465744 - protein, 14 aa, Homo sapiens
  CDR3 for beta chain variable domain of TCR clone 232872 (TRBV11-3, TRBJ2-1)
CASSATTSGSIQFF

SEQ ID NO: 465745 - protein, 13 aa, Homo sapiens
  CDR3 for alpha chain variable domain of TCR clone 232873 (TRAV8-3, TRAJ28)
CAVGAVGSYQLTF

SEQ ID NO: 465746 - protein, 12 aa, Homo sapiens
  CDR3 for beta chain variable domain of TCR clone 232873 (TRBV7-9, TRBJ1-4)
CASSTDREKLFF

SEQ ID NO: 465747 - protein, 14 aa, Homo sapiens
  CDR3 for alpha chain variable domain of TCR clone 232874 (TRAV13-1, TRAJ23)
CAASRLGRGGKLNF

SEQ ID NO: 465748 - protein, 15 aa, Homo sapiens
  CDR3 for beta chain variable domain of TCR clone 232874 (TRBV7-2, TRBJ2-1)
CASSLVAGRYNEQFF

SEQ ID NO: 465749 - protein, 11 aa, Homo sapiens
  CDR3 for alpha chain variable domain of TCR clone 232875 (TRAV3, TRAJ6)
CAVRDGPGQEE

SEQ ID NO: 465750 - protein, 14 aa, Homo sapiens
  CDR3 for beta chain variable domain of TCR clone 232875 (TRBV7-2, TRBJ2-7)
CASSPKTSFYEQYF

SEQ ID NO: 465751 - protein, 15 aa, Homo sapiens
  CDR3 for alpha chain variable domain of TCR clone 232876 (TRAV21, TRAJ13)
CAVRPTSGGYQKVTF

SEQ ID NO: 465752 - protein, 15 aa, Homo sapiens
  CDR3 for beta chain variable domain of TCR clone 232876 (TRBV28, TRBJ2-7)
YASSPGGRGFYEQYF

SEQ ID NO: 465753 - protein, 16 aa, Homo sapiens
  CDR3 for alpha chain variable domain of TCR clone 232877 (TRAV3, TRAJ21)
CAVRDIERGNFNKFYF

SEQ ID NO: 465754 - protein, 14 aa, Homo sapiens
  CDR3 for beta chain variable domain of TCR clone 232877 (TRBV11-2, TRBJ1-2)
CASSLGTANYGYTF

SEQ ID NO: 465755 - protein, 11 aa, Homo sapiens
  CDR3 for alpha chain variable domain of TCR clone 232878 (TRAV12-3, TRAJ27)
CAMANAGKSTF

SEQ ID NO: 465756 - protein, 12 aa, Homo sapiens
  CDR3 for beta chain variable domain of TCR clone 232878 (TRBV11-2, TRBJ2-2)
CASSLGGGELFL

SEQ ID NO: 465757 - protein, 13 aa, Homo sapiens
  CDR3 for alpha chain variable domain of TCR clone 232879 (TRAV8-6, TRAJ23)
CAVCEFQGGKLIF

SEQ ID NO: 465758 - protein, 16 aa, Homo sapiens
  CDR3 for beta chain variable domain of TCR clone 232879 (TRBV28, TRBJ1-1)
CASSLSGTGWNTEAFF

SEQ ID NO: 465759 - protein, 14 aa, Homo sapiens
  CDR3 for alpha chain variable domain of TCR clone 232880 (TRAV35, TRAJ22)
CAGLRPGSARQLTF

SEQ ID NO: 465760 - protein, 15 aa, Homo sapiens
  CDR3 for beta chain variable domain of TCR clone 232880 (TRBV27, TRBJ2-5)
CASSLYPRGGETQYF

SEQ ID NO: 465761 - protein, 14 aa, Homo sapiens
  CDR3 for alpha chain variable domain of TCR clone 232881 (TRAV13-1, TRAJ6)
CAASITGGSYIPTF

SEQ ID NO: 465762 - protein, 13 aa, Homo sapiens
  CDR3 for beta chain variable domain of TCR clone 232881 (TRBV19, TRBJ1-2)
CASSQGQVYGYTF

SEQ ID NO: 465763 - protein, 13 aa, Homo sapiens
  CDR3 for alpha chain variable domain of TCR clone 232882 (TRAV2, TRAJ15)
CAVASQAGTALIF

SEQ ID NO: 465764 - protein, 10 aa, Homo sapiens
  CDR3 for beta chain variable domain of TCR clone 232882 (TRBV7-9, TRBJ2-3)
CASSLDTQYF

SEQ ID NO: 465765 - protein, 15 aa, Homo sapiens
  CDR3 for alpha chain variable domain of TCR clone 232883 (TRAV12-3, TRAJ6)
CAMSATTGGSYIPTF

SEQ ID NO: 465766 - protein, 16 aa, Homo sapiens
  CDR3 for beta chain variable domain of TCR clone 232883 (TRBV12-5, TRBJ2-5)
CASGPRTSGNQETQDF

SEQ ID NO: 465767 - protein, 15 aa, Homo sapiens
  CDR3 for alpha chain variable domain of TCR clone 232884 (TRAV8-4, TRAJ45)
CAVIWTGGGADGLTF

SEQ ID NO: 465768 - protein, 15 aa, Homo sapiens
  CDR3 for beta chain variable domain of TCR clone 232884 (TRBV20-1, TRBJ2-7)
CSARDRVSGMDEQYF

SEQ ID NO: 465769 - protein, 10 aa, Homo sapiens
  CDR3 for alpha chain variable domain of TCR clone 232885 (TRAV3, TRAJ30)
CAVREIEIVF

SEQ ID NO: 465770 - protein, 14 aa, Homo sapiens
  CDR3 for beta chain variable domain of TCR clone 232885 (TRBV15, TRBJ2-3)
CATRSGTSTDTQYF

SEQ ID NO: 465771 - protein, 15 aa, Homo sapiens
  CDR3 for alpha chain variable domain of TCR clone 232886 (TRAV17, TRAJ3)
CATDGPHISASKIIF

SEQ ID NO: 465772 - protein, 14 aa, Homo sapiens
  CDR3 for beta chain variable domain of TCR clone 232886 (TRBV4-3, TRBJ1-4)
CASSQQPVGEKLFF

SEQ ID NO: 465773 - protein, 14 aa, Homo sapiens
  CDR3 for alpha chain variable domain of TCR clone 232887 (TRAV29/DV5, TRAJ44)
CAAFLVGTASKLTF

SEQ ID NO: 465774 - protein, 18 aa, Homo sapiens
  CDR3 for beta chain variable domain of TCR clone 232887 (TRBV4-2, TRBJ1-4)
CASSPTLDRTGKNEKLFF

SEQ ID NO: 465775 - protein, 17 aa, Homo sapiens
  CDR3 for alpha chain variable domain of TCR clone 232888 (TRAV17, TRAJ27)
CATSSLKKTPMQANQPL

SEQ ID NO: 465776 - protein, 15 aa, Homo sapiens
  CDR3 for beta chain variable domain of TCR clone 232888 (TRBV19, TRBJ2-1)
CASSIQATSYNEQFF

SEQ ID NO: 465777 - protein, 14 aa, Homo sapiens
  CDR3 for alpha chain variable domain of TCR clone 232889 (TRAV1-2, TRAJ28)
CVARSGAGSYQLTF

SEQ ID NO: 465778 - protein, 12 aa, Homo sapiens
  CDR3 for beta chain variable domain of TCR clone 232889 (TRBV7-2, TRBJ2-2)
CASSLPPGMLFF

SEQ ID NO: 465779 - protein, 16 aa, Homo sapiens
  CDR3 for alpha chain variable domain of TCR clone 232890 (TRAV12-3, TRAJ53)
CAMSPGSGGSNYKLTF

SEQ ID NO: 465780 - protein, 14 aa, Homo sapiens
  CDR3 for beta chain variable domain of TCR clone 232890 (TRBV7-2, TRBJ2-7)
CASSSISGFSEQYF

SEQ ID NO: 465781 - protein, 15 aa, Homo sapiens
  CDR3 for alpha chain variable domain of TCR clone 232891 (TRAV8-3, TRAJ27)
CAVGPSTTNAGKSTF

SEQ ID NO: 465782 - protein, 12 aa, Homo sapiens
  CDR3 for beta chain variable domain of TCR clone 232891 (TRBV11-2, TRBJ2-2)
CASSLGGGELFF

SEQ ID NO: 465783 - protein, 13 aa, Homo sapiens
  CDR3 for alpha chain variable domain of TCR clone 232892 (TRAV17, TRAJ22)
CAHHSGSASQLTF

SEQ ID NO: 465784 - protein, 14 aa, Homo sapiens
  CDR3 for beta chain variable domain of TCR clone 232892 (TRBV16, TRBJ1-1)
CASSQAGPNTEAFF

SEQ ID NO: 465785 - protein, 14 aa, Homo sapiens
  CDR3 for alpha chain variable domain of TCR clone 232893 (TRAV2, TRAJ37)
CAVDFTSNTGKLIF

SEQ ID NO: 465786 - protein, 14 aa, Homo sapiens
  CDR3 for beta chain variable domain of TCR clone 232893 (TRBV9, TRBJ2-7)
CASSVAGVPYEQYF

SEQ ID NO: 465787 - protein, 13 aa, Homo sapiens
  CDR3 for alpha chain variable domain of TCR clone 232894 (TRAV36/DV7, TRAJ7)
CAVERYGNNRLAF

SEQ ID NO: 465788 - protein, 13 aa, Homo sapiens
  CDR3 for beta chain variable domain of TCR clone 232894 (TRBV7-9, TRBJ1-2)
CASSLKQNYGYTF

SEQ ID NO: 465789 - protein, 11 aa, Homo sapiens
  CDR3 for alpha chain variable domain of TCR clone 232895 (TRAV13-1, TRAJ39)
CASHAGNMLTF

SEQ ID NO: 465790 - protein, 14 aa, Homo sapiens
  CDR3 for beta chain variable domain of TCR clone 232895 (TRBV7-2, TRBJ2-7)
CASGSISGFSEQYF

SEQ ID NO: 465791 - protein, 13 aa, Homo sapiens
  CDR3 for alpha chain variable domain of TCR clone 232896 (TRAV38-1, TRAJ20)
CAFMRDNDYKLSF

SEQ ID NO: 465792 - protein, 12 aa, Homo sapiens
  CDR3 for beta chain variable domain of TCR clone 232896 (TRBV18, TRBJ2-5)
CASAPSKETQYF

SEQ ID NO: 465793 - protein, 14 aa, Homo sapiens
  CDR3 for alpha chain variable domain of TCR clone 232897 (TRAV8-4, TRAJ15)
CAVTIREAGTALIF

SEQ ID NO: 465794 - protein, 13 aa, Homo sapiens
  CDR3 for beta chain variable domain of TCR clone 232897 (TRBV10-3, TRBJ2-7)
CASSEKGGDEQYF

SEQ ID NO: 465795 - protein, 14 aa, Homo sapiens
  CDR3 for alpha chain variable domain of TCR clone 232898 (TRAV20, TRAJ29)
CAVQAWVGNTPLVF

SEQ ID NO: 465796 - protein, 13 aa, Homo sapiens
  CDR3 for beta chain variable domain of TCR clone 232898 (TRBV11-2, TRBJ2-5)
CASSFSSQETQYF

SEQ ID NO: 465797 - protein, 15 aa, Homo sapiens
  CDR3 for alpha chain variable domain of TCR clone 232899 (TRAV12-1, TRAJ10)
CVVNKLTGRGNKLTF

SEQ ID NO: 465798 - protein, 17 aa, Homo sapiens
  CDR3 for beta chain variable domain of TCR clone 232899 (TRBV5-1, TRBJ1-6)
CASSPSLQGSDNSPLHF

SEQ ID NO: 465799 - protein, 17 aa, Homo sapiens
  CDR3 for alpha chain variable domain of TCR clone 232900 (TRAV8-6, TRAJ58)
CAVSSWVGETSGSGLTF

SEQ ID NO: 465800 - protein, 15 aa, Homo sapiens
  CDR3 for beta chain variable domain of TCR clone 232900 (TRBV20-1, TRBJ2-7)
CSARDRVSGMDEQYF

SEQ ID NO: 465801 - protein, 14 aa, Homo sapiens
  CDR3 for alpha chain variable domain of TCR clone 232901 (TRAV12-3, TRAJ5)
CAMSTYTGRRALTF

SEQ ID NO: 465802 - protein, 13 aa, Homo sapiens
  CDR3 for beta chain variable domain of TCR clone 232901 (TRBV28, TRBJ2-3)
CASSTGGGDTKYF

SEQ ID NO: 465803 - protein, 16 aa, Homo sapiens
  CDR3 for alpha chain variable domain of TCR clone 232902 (TRAV30, TRAJ24)
CGTEIVDADSWGTFQF

SEQ ID NO: 465804 - protein, 16 aa, Homo sapiens
  CDR3 for beta chain variable domain of TCR clone 232902 (TRBV13, TRBJ2-2)
CASSPRTGEHTGELFF

SEQ ID NO: 465805 - protein, 13 aa, Homo sapiens
  CDR3 for alpha chain variable domain of TCR clone 232903 (TRAV3, TRAJ20)
CCEAFCNDYKLSF

SEQ ID NO: 465806 - protein, 13 aa, Homo sapiens
  CDR3 for beta chain variable domain of TCR clone 232903 (TRBV12-4, TRBJ2-3)
CASSFPPRDTQYF

SEQ ID NO: 465807 - protein, 14 aa, Homo sapiens
  CDR3 for alpha chain variable domain of TCR clone 232904 (TRAV17, TRAJ57)
CATDPQGGSEKLVF

SEQ ID NO: 465808 - protein, 13 aa, Homo sapiens
  CDR3 for beta chain variable domain of TCR clone 232904 (TRBV20-1, TRBJ1-1)
CSARGGGNTEAFF

SEQ ID NO: 465809 - protein, 13 aa, Homo sapiens
  CDR3 for alpha chain variable domain of TCR clone 232905 (TRAV13-1, TRAJ6)
CAASKGGSYIPTF

SEQ ID NO: 465810 - protein, 14 aa, Homo sapiens
  CDR3 for beta chain variable domain of TCR clone 232905 (TRBV7-2, TRBJ2-1)
CANSLGVGYNEQFF

SEQ ID NO: 465811 - protein, 13 aa, Homo sapiens
  CDR3 for alpha chain variable domain of TCR clone 232906 (TRAV12-2, TRAJ40)
CAVKRTGTYKYIF

SEQ ID NO: 465812 - protein, 13 aa, Homo sapiens
  CDR3 for beta chain variable domain of TCR clone 232906 (TRBV7-7, TRBJ2-5)
CASSRSGQETQYF

SEQ ID NO: 465813 - protein, 12 aa, Homo sapiens
  CDR3 for alpha chain variable domain of TCR clone 232907 (TRAV1-1, TRAJ24)
CAVRGSWGNFQF

SEQ ID NO: 465814 - protein, 14 aa, Homo sapiens
  CDR3 for beta chain variable domain of TCR clone 232907 (TRBV7-2, TRBJ1-2)
CASSQTGSTYGYTF

SEQ ID NO: 465815 - protein, 14 aa, Homo sapiens
  CDR3 for alpha chain variable domain of TCR clone 232908 (TRAV12-2, TRAJ9)
CAVNALEGGFKTIF

SEQ ID NO: 465816 - protein, 14 aa, Homo sapiens
  CDR3 for beta chain variable domain of TCR clone 232908 (TRBV4-1, TRBJ2-2)
CASSQAVNTGELFF

SEQ ID NO: 465817 - protein, 14 aa, Homo sapiens
  CDR3 for alpha chain variable domain of TCR clone 232909 (TRAV12-1, TRAJ17)
WVVNYKAAGNKLTF

SEQ ID NO: 465818 - protein, 14 aa, Homo sapiens
  CDR3 for beta chain variable domain of TCR clone 232909 (TRBV7-2, TRBJ2-7)
CASRSQGAAYEQYF

SEQ ID NO: 465819 - protein, 10 aa, Homo sapiens
  CDR3 for alpha chain variable domain of TCR clone 232910 (TRAV27, TRAJ43)
CAGANNDIRF

SEQ ID NO: 465820 - protein, 20 aa, Homo sapiens
  CDR3 for beta chain variable domain of TCR clone 232910 (TRBV6-1, TRBJ1-4)
CASSESLAGGMRATNEKLFF

SEQ ID NO: 465821 - protein, 14 aa, Homo sapiens
  CDR3 for alpha chain variable domain of TCR clone 232911 (TRAV4, TRAJ9)
CLVGSGTGGFKTIF

SEQ ID NO: 465822 - protein, 14 aa, Homo sapiens
  CDR3 for beta chain variable domain of TCR clone 232911 (TRBV7-9, TRBJ2-7)
CASSLVPGRGEQYF

SEQ ID NO: 465823 - protein, 15 aa, Homo sapiens
  CDR3 for alpha chain variable domain of TCR clone 232912 (TRAV26-2, TRAJ42)
CILRDESRSQGNLIF

SEQ ID NO: 465824 - protein, 13 aa, Homo sapiens
  CDR3 for beta chain variable domain of TCR clone 232912 (TRBV27, TRBJ1-1)
CASSLSIGAEAFF

SEQ ID NO: 465825 - protein, 13 aa, Homo sapiens
  CDR3 for alpha chain variable domain of TCR clone 232913 (TRAV12-3, TRAJ7)
CAMTPYGNNRLAF

SEQ ID NO: 465826 - protein, 15 aa, Homo sapiens
  CDR3 for beta chain variable domain of TCR clone 232913 (TRBV29-1, TRBJ2-7)
CSVECFDRGPYEQYF

SEQ ID NO: 465827 - protein, 12 aa, Homo sapiens
  CDR3 for alpha chain variable domain of TCR clone 232914 (TRAV12-3, TRAJ40)
CAMSSGTYKYIF

SEQ ID NO: 465828 - protein, 13 aa, Homo sapiens
  CDR3 for beta chain variable domain of TCR clone 232914 (TRBV12-4, TRBJ1-1)
CASSRPGNTEAFF

SEQ ID NO: 465829 - protein, 11 aa, Homo sapiens
  CDR3 for alpha chain variable domain of TCR clone 232915 (TRAV21, TRAJ31)
CAVRNNARLMF

SEQ ID NO: 465830 - protein, 13 aa, Homo sapiens
  CDR3 for beta chain variable domain of TCR clone 232915 (TRBV4-2, TRBJ2-3)
CASSQDWQHTQYF

SEQ ID NO: 465831 - protein, 13 aa, Homo sapiens
  CDR3 for alpha chain variable domain of TCR clone 232916 (TRAV9-2, TRAJ39)
CALYIYNAGNMLT

SEQ ID NO: 465832 - protein, 14 aa, Homo sapiens
  CDR3 for beta chain variable domain of TCR clone 232916 (TRBV6-1, TRBJ1-3)
CASVQGGGGNTIYC

SEQ ID NO: 465833 - protein, 12 aa, Homo sapiens
  CDR3 for alpha chain variable domain of TCR clone 232917 (TRAV13-1, TRAJ49)
CAASIRSNQFYF

SEQ ID NO: 465834 - protein, 14 aa, Homo sapiens
  CDR3 for beta chain variable domain of TCR clone 232917 (TRBV7-2, TRBJ2-1)
CASSPGLGGNEQFF

SEQ ID NO: 465835 - protein, 14 aa, Homo sapiens
  CDR3 for alpha chain variable domain of TCR clone 232918 (TRAV13-1, TRAJ40)
CAASMTSGTYKYIF

SEQ ID NO: 465836 - protein, 15 aa, Homo sapiens
  CDR3 for beta chain variable domain of TCR clone 232918 (TRBV7-3, TRBJ2-1)
CASSLAGAGADEQFF

SEQ ID NO: 465837 - protein, 17 aa, Homo sapiens
  CDR3 for alpha chain variable domain of TCR clone 232919 (TRAV36/DV7, TRAJ52)
CAVAQRAGGTSYGKLTF

SEQ ID NO: 465838 - protein, 15 aa, Homo sapiens
  CDR3 for beta chain variable domain of TCR clone 232919 (TRBV15, TRBJ1-4)
CATSRDMGSYEKLFF

SEQ ID NO: 465839 - protein, 16 aa, Homo sapiens
  CDR3 for alpha chain variable domain of TCR clone 232920 (TRAV35, TRAJ28)
CAGQKYSGAGSYQLTF

SEQ ID NO: 465840 - protein, 13 aa, Homo sapiens
  CDR3 for beta chain variable domain of TCR clone 232920 (TRBV15, TRBJ1-6)
CATSGGLNSPLHF

SEQ ID NO: 465841 - protein, 13 aa, Homo sapiens
  CDR3 for alpha chain variable domain of TCR clone 232921 (TRAV3, TRAJ20)
CAVRDTGGYKLSF

SEQ ID NO: 465842 - protein, 15 aa, Homo sapiens
  CDR3 for beta chain variable domain of TCR clone 232921 (TRBV6-1, TRBJ2-7)
CASSEGGGVSYEQYF

SEQ ID NO: 465843 - protein, 14 aa, Homo sapiens
  CDR3 for alpha chain variable domain of TCR clone 232922 (TRAV25, TRAJ42)
CAGNYGGSQGNLIF

SEQ ID NO: 465844 - protein, 19 aa, Homo sapiens
  CDR3 for beta chain variable domain of TCR clone 232922 (TRBV25-1, TRBJ2-2)
CAILVYRVDRGRKTGELFF

SEQ ID NO: 465845 - protein, 13 aa, Homo sapiens
  CDR3 for alpha chain variable domain of TCR clone 232923 (TRAV8-6, TRAJ41)
CAVSENSGYALNF

SEQ ID NO: 465846 - protein, 15 aa, Homo sapiens
  CDR3 for beta chain variable domain of TCR clone 232923 (TRBV7-3, TRBJ2-2)
CASSETGQGTGELFF

SEQ ID NO: 465847 - protein, 13 aa, Homo sapiens
  CDR3 for alpha chain variable domain of TCR clone 232924 (TRAV35, TRAJ42)
SAGFPGSQGNLIF

SEQ ID NO: 465848 - protein, 13 aa, Homo sapiens
  CDR3 for beta chain variable domain of TCR clone 232924 (TRBV29-1, TRBJ2-1)
CSVEGGRVNEQFF

SEQ ID NO: 465849 - protein, 12 aa, Homo sapiens
  CDR3 for alpha chain variable domain of TCR clone 232925 (TRAV8-4, TRAJ43)
CAVSVNNNDMRF

SEQ ID NO: 465850 - protein, 18 aa, Homo sapiens
  CDR3 for beta chain variable domain of TCR clone 232925 (TRBV5-7, TRBJ2-2)
CASSLGASGGLNTVELFF

SEQ ID NO: 465851 - protein, 16 aa, Homo sapiens
  CDR3 for alpha chain variable domain of TCR clone 232926 (TRAV3, TRAJ5)
FAVRNLMDTGRRALNF

SEQ ID NO: 465852 - protein, 16 aa, Homo sapiens
  CDR3 for beta chain variable domain of TCR clone 232926 (TRBV4-3, TRBJ2-7)
CASSQEGLANSYEQYF

SEQ ID NO: 465853 - protein, 15 aa, Homo sapiens
  CDR3 for alpha chain variable domain of TCR clone 232927 (TRAV3, TRAJ4)
CAQNMFSGGYNKLIF

SEQ ID NO: 465854 - protein, 12 aa, Homo sapiens
  CDR3 for beta chain variable domain of TCR clone 232927 (TRBV7-8, TRBJ2-1)
CASSLGHNEQFF

SEQ ID NO: 465855 - protein, 14 aa, Homo sapiens
  CDR3 for alpha chain variable domain of TCR clone 232928 (TRAV4, TRAJ13)
CLVGPSGGYQKVTF

SEQ ID NO: 465856 - protein, 15 aa, Homo sapiens
  CDR3 for beta chain variable domain of TCR clone 232928 (TRBV11-2, TRBJ2-1)
CASSKNRGLIYEQFF

SEQ ID NO: 465857 - protein, 15 aa, Homo sapiens
  CDR3 for alpha chain variable domain of TCR clone 232929 (TRAV12-3, TRAJ52)
CNGGAGGTSYGKLTF

SEQ ID NO: 465858 - protein, 18 aa, Homo sapiens
  CDR3 for beta chain variable domain of TCR clone 232929 (TRBV20-1, TRBJ2-3)
CSASGLAGGPGTTDTQYF

SEQ ID NO: 465859 - protein, 17 aa, Homo sapiens
  CDR3 for alpha chain variable domain of TCR clone 232930 (TRAV3, TRAJ42)
CAVRDMDYGGSQGNLIF

SEQ ID NO: 465860 - protein, 13 aa, Homo sapiens
  CDR3 for beta chain variable domain of TCR clone 232930 (TRBV10-3, TRBJ2-7)
CAPKLAVNYEQYF

SEQ ID NO: 465861 - protein, 15 aa, Homo sapiens
  CDR3 for alpha chain variable domain of TCR clone 232931 (TRAV23/DV6, TRAJ45)
CAASARGGGADGLTF

SEQ ID NO: 465862 - protein, 16 aa, Homo sapiens
  CDR3 for beta chain variable domain of TCR clone 232931 (TRBV12-4, TRBJ1-5)
CASSRPVGGSNQPQHF

SEQ ID NO: 465863 - protein, 14 aa, Homo sapiens
  CDR3 for alpha chain variable domain of TCR clone 232932 (TRAV12-2, TRAJ3)
CAVKGYSSASKIIF

SEQ ID NO: 465864 - protein, 14 aa, Homo sapiens
  CDR3 for beta chain variable domain of TCR clone 232932 (TRBV6-3, TRBJ1-2)
CASSEGGCSYGYTF

SEQ ID NO: 465865 - protein, 14 aa, Homo sapiens
  CDR3 for alpha chain variable domain of TCR clone 232933 (TRAV4, TRAJ26)
CLVGPSNYGQNFVF

SEQ ID NO: 465866 - protein, 17 aa, Homo sapiens
  CDR3 for beta chain variable domain of TCR clone 232933 (TRBV24-1, TRBJ2-1)
CATSDVSTSGTYNEQFF

SEQ ID NO: 465867 - protein, 13 aa, Homo sapiens
  CDR3 for alpha chain variable domain of TCR clone 232934 (TRAV29/DV5, TRAJ33)
CAASVESNYPLLW

SEQ ID NO: 465868 - protein, 13 aa, Homo sapiens
  CDR3 for beta chain variable domain of TCR clone 232934 (TRBV5-1, TRBJ1-5)
CASSLGSNQPQHF

SEQ ID NO: 465869 - protein, 18 aa, Homo sapiens
  CDR3 for alpha chain variable domain of TCR clone 232935 (TRAV13-1, TRAJ52)
CAAKNPNAGGTSYGKLTF

SEQ ID NO: 465870 - protein, 14 aa, Homo sapiens
  CDR3 for beta chain variable domain of TCR clone 232935 (TRBV7-2, TRBJ1-1)
CAGSFLTGTTEAFF

SEQ ID NO: 465871 - protein, 15 aa, Homo sapiens
  CDR3 for alpha chain variable domain of TCR clone 232936 (TRAV3, TRAJ5)
CAVRDLDTGRRALTF

SEQ ID NO: 465872 - protein, 15 aa, Homo sapiens
  CDR3 for beta chain variable domain of TCR clone 232936 (TRBV20-1, TRBJ2-1)
CSARSQGGPGNEQFF

SEQ ID NO: 465873 - protein, 14 aa, Homo sapiens
  CDR3 for alpha chain variable domain of TCR clone 232937 (TRAV2, TRAJ23)
CAVGLRNQGGKLIF

SEQ ID NO: 465874 - protein, 16 aa, Homo sapiens
  CDR3 for beta chain variable domain of TCR clone 232937 (TRBV7-3, TRBJ2-2)
CASSLKRGTLSGELFF

SEQ ID NO: 465875 - protein, 13 aa, Homo sapiens
  CDR3 for alpha chain variable domain of TCR clone 232938 (TRAV12-2, TRAJ45)
CAARGGGADGLTF

SEQ ID NO: 465876 - protein, 13 aa, Homo sapiens
  CDR3 for beta chain variable domain of TCR clone 232938 (TRBV6-5, TRBJ2-5)
CASRTAGRATQYF

SEQ ID NO: 465877 - protein, 14 aa, Homo sapiens
  CDR3 for alpha chain variable domain of TCR clone 232939 (TRAV35, TRAJ13)
CAGSPSGGYQKVTF

SEQ ID NO: 465878 - protein, 12 aa, Homo sapiens
  CDR3 for beta chain variable domain of TCR clone 232939 (TRBV11-2, TRBJ2-2)
CASSLGGGELFF

SEQ ID NO: 465879 - protein, 13 aa, Homo sapiens
  CDR3 for alpha chain variable domain of TCR clone 232940 (TRAV12-1, TRAJ33)
CGGAPDSNYQLIW

SEQ ID NO: 465880 - protein, 14 aa, Homo sapiens
  CDR3 for beta chain variable domain of TCR clone 232940 (TRBV13, TRBJ2-7)
CASSLKGASYEQYF

SEQ ID NO: 465881 - protein, 11 aa, Homo sapiens
  CDR3 for alpha chain variable domain of TCR clone 232941 (TRAV35, TRAJ34)
CWARNTDKLIF

SEQ ID NO: 465882 - protein, 13 aa, Homo sapiens
  CDR3 for beta chain variable domain of TCR clone 232941 (TRBV7-9, TRBJ2-7)
CASSFAGAYEQYF

SEQ ID NO: 465883 - protein, 19 aa, Homo sapiens
  CDR3 for alpha chain variable domain of TCR clone 232942 (TRAV25, TRAJ20)
TATQTTDVGILPHDYKLSF

SEQ ID NO: 465884 - protein, 15 aa, Homo sapiens
  CDR3 for beta chain variable domain of TCR clone 232942 (TRBV20-1, TRBJ2-7)
CSARDRVSGMDEQYF

SEQ ID NO: 465885 - protein, 20 aa, Homo sapiens
  CDR3 for alpha chain variable domain of TCR clone 232943 (TRAV27, TRAJ10)
ASTSVPSRGILTGGGNKLTL

SEQ ID NO: 465886 - protein, 15 aa, Homo sapiens
  CDR3 for beta chain variable domain of TCR clone 232943 (TRBV9, TRBJ2-3)
CASSLEGGLTDTQYF

SEQ ID NO: 465887 - protein, 13 aa, Homo sapiens
  CDR3 for alpha chain variable domain of TCR clone 232944 (TRAV21, TRAJ27)
CAARPGNAGKSTF

SEQ ID NO: 465888 - protein, 14 aa, Homo sapiens
  CDR3 for beta chain variable domain of TCR clone 232944 (TRBV20-1, TRBJ2-3)
CSAYSGGRTDTQYF

SEQ ID NO: 465889 - protein, 13 aa, Homo sapiens
  CDR3 for alpha chain variable domain of TCR clone 232945 (TRAV26-1, TRAJ48)
CIVRVVGDEKLTF

SEQ ID NO: 465890 - protein, 13 aa, Homo sapiens
  CDR3 for beta chain variable domain of TCR clone 232945 (TRBV7-2, TRBJ1-1)
CASNLKGAKVAFF

SEQ ID NO: 465891 - protein, 15 aa, Homo sapiens
  CDR3 for alpha chain variable domain of TCR clone 232946 (TRAV21, TRAJ40)
CAVRPQTSGTDKYIF

SEQ ID NO: 465892 - protein, 13 aa, Homo sapiens
  CDR3 for beta chain variable domain of TCR clone 232946 (TRBV7-2, TRBJ2-2)
CASSSVRARELFF

SEQ ID NO: 465893 - protein, 13 aa, Homo sapiens
  CDR3 for alpha chain variable domain of TCR clone 232947 (TRAV13-2, TRAJ48)
CAEMDFGNEKLTF

SEQ ID NO: 465894 - protein, 15 aa, Homo sapiens
  CDR3 for beta chain variable domain of TCR clone 232947 (TRBV7-9, TRBJ1-6)
CASSSPGRGNSPLHF

SEQ ID NO: 465895 - protein, 15 aa, Homo sapiens
  CDR3 for alpha chain variable domain of TCR clone 232948 (TRAV17, TRAJ4)
CATGTWSGGYNKLIF

SEQ ID NO: 465896 - protein, 13 aa, Homo sapiens
  CDR3 for beta chain variable domain of TCR clone 232948 (TRBV12-5, TRBJ2-3)
CASGDRQSDTQYF

SEQ ID NO: 465897 - protein, 12 aa, Homo sapiens
  CDR3 for alpha chain variable domain of TCR clone 232949 (TRAV35, TRAJ39)
LAPNNAGNMLTF

SEQ ID NO: 465898 - protein, 13 aa, Homo sapiens
  CDR3 for beta chain variable domain of TCR clone 232949 (TRBV7-3, TRBJ1-2)
CASSLKRGYGYTF

SEQ ID NO: 465899 - protein, 17 aa, Homo sapiens
  CDR3 for alpha chain variable domain of TCR clone 232950 (TRAV1-2, TRAJ27)
CAVRDKTGDTNAGKSTF

SEQ ID NO: 465900 - protein, 17 aa, Homo sapiens
  CDR3 for beta chain variable domain of TCR clone 232950 (TRBV13, TRBJ2-3)
CASSLSRVAGGRNTQYF

SEQ ID NO: 465901 - protein, 15 aa, Homo sapiens
  CDR3 for alpha chain variable domain of TCR clone 232951 (TRAV26-1, TRAJ44)
CIARVPFGTASKLTF

SEQ ID NO: 465902 - protein, 17 aa, Homo sapiens
  CDR3 for beta chain variable domain of TCR clone 232951 (TRBV24-1, TRBJ2-4)
CATSEAEARGVRNIQYF

SEQ ID NO: 465903 - protein, 23 aa, Homo sapiens
  CDR3 for alpha chain variable domain of TCR clone 232952 (TRAV2, TRAJ13)
CASGGYQKVTLELEQSSKSSQIS

SEQ ID NO: 465904 - protein, 15 aa, Homo sapiens
  CDR3 for beta chain variable domain of TCR clone 232952 (TRBV20-1, TRBJ2-7)
CSARVPAAYFYEQYF

SEQ ID NO: 465905 - protein, 14 aa, Homo sapiens
  CDR3 for alpha chain variable domain of TCR clone 232953 (TRAV12-2, TRAJ5)
CAVNRSTGRRALTF

SEQ ID NO: 465906 - protein, 13 aa, Homo sapiens
  CDR3 for beta chain variable domain of TCR clone 232953 (TRBV28, TRBJ2-7)
CAGAQQGLDEQYF

SEQ ID NO: 465907 - protein, 14 aa, Homo sapiens
  CDR3 for alpha chain variable domain of TCR clone 232954 (TRAV12-2, TRAJ13)
CAEKKTGGYQKVTF

SEQ ID NO: 465908 - protein, 14 aa, Homo sapiens
  CDR3 for beta chain variable domain of TCR clone 232954 (TRBV25-1, TRBJ1-1)
CASTHLGGNTEAFF

SEQ ID NO: 465909 - protein, 10 aa, Homo sapiens
  CDR3 for alpha chain variable domain of TCR clone 232955 (TRAV12-1, TRAJ43)
CVVHNNDMRF

SEQ ID NO: 465910 - protein, 13 aa, Homo sapiens
  CDR3 for beta chain variable domain of TCR clone 232955 (TRBV12-4, TRBJ1-2)
CASSSGLTVISAF

SEQ ID NO: 465911 - protein, 14 aa, Homo sapiens
  CDR3 for alpha chain variable domain of TCR clone 232956 (TRAV3, TRAJ26)
CAVGDYNYGQNFVF

SEQ ID NO: 465912 - protein, 15 aa, Homo sapiens
  CDR3 for beta chain variable domain of TCR clone 232956 (TRBV20-1, TRBJ2-5)
CSANPPGRGGETQYF

SEQ ID NO: 465913 - protein, 12 aa, Homo sapiens
  CDR3 for alpha chain variable domain of TCR clone 232957 (TRAV2, TRAJ33)
CAVWGSNYQVIW

SEQ ID NO: 465914 - protein, 16 aa, Homo sapiens
  CDR3 for beta chain variable domain of TCR clone 232957 (TRBV20-1, TRBJ1-4)
CSAPGQGLLTNEKLFF

SEQ ID NO: 465915 - protein, 14 aa, Homo sapiens
  CDR3 for alpha chain variable domain of TCR clone 232958 (TRAV23/DV6, TRAJ21)
CAAYKSGPRDKFYF

SEQ ID NO: 465916 - protein, 15 aa, Homo sapiens
  CDR3 for beta chain variable domain of TCR clone 232958 (TRBV5-4, TRBJ2-2)
CASSLTSRGTGEPFF

SEQ ID NO: 465917 - protein, 13 aa, Homo sapiens
  CDR3 for alpha chain variable domain of TCR clone 232959 (TRAV26-1, TRAJ34)
CIVRPWITDKIIF

SEQ ID NO: 465918 - protein, 13 aa, Homo sapiens
  CDR3 for beta chain variable domain of TCR clone 232959 (TRBV5-1, TRBJ2-1)
CASSLGSYNEQFF

SEQ ID NO: 465919 - protein, 14 aa, Homo sapiens
  CDR3 for alpha chain variable domain of TCR clone 232960 (TRAV1-1, TRAJ27)
CAVIYNTNTGKSTF

SEQ ID NO: 465920 - protein, 15 aa, Homo sapiens
  CDR3 for beta chain variable domain of TCR clone 232960 (TRBV7-9, TRBJ1-4)
CASSRTGGFNEKLFF

SEQ ID NO: 465921 - protein, 12 aa, Homo sapiens
  CDR3 for alpha chain variable domain of TCR clone 232961 (TRAV21, TRAJ29)
CAVTSGNTPLVF

SEQ ID NO: 465922 - protein, 13 aa, Homo sapiens
  CDR3 for beta chain variable domain of TCR clone 232961 (TRBV11-2, TRBJ2-1)
CASSLDLVNEQFF

SEQ ID NO: 465923 - protein, 14 aa, Homo sapiens
  CDR3 for alpha chain variable domain of TCR clone 232962 (TRAV13-2, TRAJ16)
CAENNWEDGQKLLF

SEQ ID NO: 465924 - protein, 16 aa, Homo sapiens
  CDR3 for beta chain variable domain of TCR clone 232962 (TRBV7-3, TRBJ2-1)
CASSLEGYRSYNEQFF

SEQ ID NO: 465925 - protein, 13 aa, Homo sapiens
  CDR3 for alpha chain variable domain of TCR clone 232963 (TRAV36/DV7, TRAJ31)
CAVVRNNNARLMF

SEQ ID NO: 465926 - protein, 14 aa, Homo sapiens
  CDR3 for beta chain variable domain of TCR clone 232963 (TRBV28, TRBJ1-2)
CASRIQGANYGYTF

SEQ ID NO: 465927 - protein, 19 aa, Homo sapiens
  CDR3 for alpha chain variable domain of TCR clone 232964 (TRAV21, TRAJ45)
CAVEATRGDQEEVLTDSPF

SEQ ID NO: 465928 - protein, 12 aa, Homo sapiens
  CDR3 for beta chain variable domain of TCR clone 232964 (TRBV29-1, TRBJ1-3)
CSTRDSGNTIYF

SEQ ID NO: 465929 - protein, 11 aa, Homo sapiens
  CDR3 for alpha chain variable domain of TCR clone 232965 (TRAV23/DV6, TRAJ58)
CAARLLRGETS

SEQ ID NO: 465930 - protein, 15 aa, Homo sapiens
  CDR3 for beta chain variable domain of TCR clone 232965 (TRBV7-2, TRBJ2-3)
CASSLAGAFIDTQYF

SEQ ID NO: 465931 - protein, 13 aa, Homo sapiens
  CDR3 for alpha chain variable domain of TCR clone 232966 (TRAV26-1, TRAJ34)
CIVRHWITDKLIF

SEQ ID NO: 465932 - protein, 14 aa, Homo sapiens
  CDR3 for beta chain variable domain of TCR clone 232966 (TRBV7-2, TRBJ2-7)
CASRSQGAAYEQYF

SEQ ID NO: 465933 - protein, 14 aa, Homo sapiens
  CDR3 for alpha chain variable domain of TCR clone 232967 (TRAV13-1, TRAJ23)
CAASRLGRGGKLIF

SEQ ID NO: 465934 - protein, 14 aa, Homo sapiens
  CDR3 for beta chain variable domain of TCR clone 232967 (TRBV12-4, TRBJ2-5)
CASSFGASGGTQYF

SEQ ID NO: 465935 - protein, 17 aa, Homo sapiens
  CDR3 for alpha chain variable domain of TCR clone 232968 (TRAV36/DV7, TRAJ52)
CAVAQRAGGTSYGKLTF

SEQ ID NO: 465936 - protein, 15 aa, Homo sapiens
  CDR3 for beta chain variable domain of TCR clone 232968 (TRBV6-5, TRBJ1-2)
CASSYSQAVNYGYTF

SEQ ID NO: 465937 - protein, 14 aa, Homo sapiens
  CDR3 for alpha chain variable domain of TCR clone 232969 (TRAV38-1, TRAJ29)
CAIITPSGNTPLVF

SEQ ID NO: 465938 - protein, 14 aa, Homo sapiens
  CDR3 for beta chain variable domain of TCR clone 232969 (TRBV18, TRBJ2-7)
CASSPRGGAYEQYF

SEQ ID NO: 465939 - protein, 16 aa, Homo sapiens
  CDR3 for alpha chain variable domain of TCR clone 232970 (TRAV3, TRAJ21)
CAVRDIERGNFNKFYF

SEQ ID NO: 465940 - protein, 13 aa, Homo sapiens
  CDR3 for beta chain variable domain of TCR clone 232970 (TRBV28, TRBJ2-5)
CARSSRNHETQYF

SEQ ID NO: 465941 - protein, 14 aa, Homo sapiens
  CDR3 for alpha chain variable domain of TCR clone 232971 (TRAV1-2, TRAJ17)
CALRRGAAGNKLTF

SEQ ID NO: 465942 - protein, 12 aa, Homo sapiens
  CDR3 for beta chain variable domain of TCR clone 232971 (TRBV5-1, TRBJ2-7)
RASSLDSYEQYF

SEQ ID NO: 465943 - protein, 12 aa, Homo sapiens
  CDR3 for alpha chain variable domain of TCR clone 232972 (TRAV29/DV5, TRAJ15)
CASNQAGTALIF

SEQ ID NO: 465944 - protein, 15 aa, Homo sapiens
  CDR3 for beta chain variable domain of TCR clone 232972 (TRBV11-2, TRBJ2-2)
CASSSDRVNAGELVF

SEQ ID NO: 465945 - protein, 12 aa, Homo sapiens
  CDR3 for alpha chain variable domain of TCR clone 232973 (TRAV12-3, TRAJ41)
CAMSYSGYALNF

SEQ ID NO: 465946 - protein, 14 aa, Homo sapiens
  CDR3 for beta chain variable domain of TCR clone 232973 (TRBV7-2, TRBJ1-2)
CASSQTGSTYGYTF

SEQ ID NO: 465947 - protein, 19 aa, Homo sapiens
  CDR3 for alpha chain variable domain of TCR clone 232974 (TRAV17, TRAJ17)
CATDGRPGVIKAAGNKLTF

SEQ ID NO: 465948 - protein, 13 aa, Homo sapiens
  CDR3 for beta chain variable domain of TCR clone 232974 (TRBV12-4, TRBJ1-2)
CASSLRQGKGYTF

SEQ ID NO: 465949 - protein, 12 aa, Homo sapiens
  CDR3 for alpha chain variable domain of TCR clone 232975 (TRAV8-6, TRAJ8)
FAVTPGFQKLVF

SEQ ID NO: 465950 - protein, 16 aa, Homo sapiens
  CDR3 for beta chain variable domain of TCR clone 232975 (TRBV7-3, TRBJ2-2)
CASSLKRGTLSGELFF

SEQ ID NO: 465951 - protein, 16 aa, Homo sapiens
  CDR3 for alpha chain variable domain of TCR clone 232976 (TRAV12-3, TRAJ53)
CAMSPGRGGSNYKLTF

SEQ ID NO: 465952 - protein, 15 aa, Homo sapiens
  CDR3 for beta chain variable domain of TCR clone 232976 (TRBV7-3, TRBJ2-1)
CASSLGQGPFGEQFF

SEQ ID NO: 465953 - protein, 10 aa, Homo sapiens
  CDR3 for alpha chain variable domain of TCR clone 232977 (TRAV2, TRAJ34)
CAVVNVKLIF

SEQ ID NO: 465954 - protein, 16 aa, Homo sapiens
  CDR3 for beta chain variable domain of TCR clone 232977 (TRBV5-1, TRBJ2-3)
CASSLGLAVYTDTQYF

SEQ ID NO: 465955 - protein, 11 aa, Homo sapiens
  CDR3 for alpha chain variable domain of TCR clone 232978 (TRAV17, TRAJ36)
CAPTGANNLFF

SEQ ID NO: 465956 - protein, 15 aa, Homo sapiens
  CDR3 for beta chain variable domain of TCR clone 232978 (TRBV27, TRBJ2-1)
CASSNGGGSSNEQFF

SEQ ID NO: 465957 - protein, 17 aa, Homo sapiens
  CDR3 for alpha chain variable domain of TCR clone 232979 (TRAV2, TRAJ36)
CAVEARGNWGKQPLLGD

SEQ ID NO: 465958 - protein, 14 aa, Homo sapiens
  CDR3 for beta chain variable domain of TCR clone 232979 (TRBV7-9, TRBJ2-5)
CASSLDTAQETQYF

SEQ ID NO: 465959 - protein, 13 aa, Homo sapiens
  CDR3 for alpha chain variable domain of TCR clone 232980 (TRAV20, TRAJ40)
CAVPFSGTYKDIF

SEQ ID NO: 465960 - protein, 13 aa, Homo sapiens
  CDR3 for beta chain variable domain of TCR clone 232980 (TRBV15, TRBJ2-5)
CATSQIGEETQYF

SEQ ID NO: 465961 - protein, 12 aa, Homo sapiens
  CDR3 for alpha chain variable domain of TCR clone 232981 (TRAV12-3, TRAJ17)
CVMTLTGNKLTF

SEQ ID NO: 465962 - protein, 15 aa, Homo sapiens
  CDR3 for beta chain variable domain of TCR clone 232981 (TRBV20-1, TRBJ2-7)
CSARDWVSGMDEQYF

SEQ ID NO: 465963 - protein, 14 aa, Homo sapiens
  CDR3 for alpha chain variable domain of TCR clone 232982 (TRAV1-2, TRAJ16)
CAVNRFSDGQKLLF

SEQ ID NO: 465964 - protein, 12 aa, Homo sapiens
  CDR3 for beta chain variable domain of TCR clone 232982 (TRBV28, TRBJ1-6)
CASSLPGSPLHF

SEQ ID NO: 465965 - protein, 11 aa, Homo sapiens
  CDR3 for alpha chain variable domain of TCR clone 232983 (TRAV3, TRAJ21)
CAVGNFNKFYF

SEQ ID NO: 465966 - protein, 17 aa, Homo sapiens
  CDR3 for beta chain variable domain of TCR clone 232983 (TRBV24-1, TRBJ2-1)
CATSDVSTSGTYNEQFL

SEQ ID NO: 465967 - protein, 12 aa, Homo sapiens
  CDR3 for alpha chain variable domain of TCR clone 232984 (TRAV3, TRAJ26)
CAVRDYGQNFVF

SEQ ID NO: 465968 - protein, 16 aa, Homo sapiens
  CDR3 for beta chain variable domain of TCR clone 232984 (TRBV11-2, TRBJ1-2)
CAISPSGREANYGYTF

SEQ ID NO: 465969 - protein, 13 aa, Homo sapiens
  CDR3 for alpha chain variable domain of TCR clone 232985 (TRAV13-2, TRAJ53)
CAENMGSNYKLTL

SEQ ID NO: 465970 - protein, 13 aa, Homo sapiens
  CDR3 for beta chain variable domain of TCR clone 232985 (TRBV4-1, TRBJ2-2)
CASSQENTGDLFF

SEQ ID NO: 465971 - protein, 17 aa, Homo sapiens
  CDR3 for alpha chain variable domain of TCR clone 232986 (TRAV17, TRAJ52)
CATERPSGGTSYGKLTF

SEQ ID NO: 465972 - protein, 16 aa, Homo sapiens
  CDR3 for beta chain variable domain of TCR clone 232986 (TRBV2, TRBJ1-5)
CASSESPQGLNQPQHF

SEQ ID NO: 465973 - protein, 18 aa, Homo sapiens
  CDR3 for alpha chain variable domain of TCR clone 232987 (TRAV12-3, TRAJ52)
CGMSVGGAGGTSYGKLTF

SEQ ID NO: 465974 - protein, 15 aa, Homo sapiens
  CDR3 for beta chain variable domain of TCR clone 232987 (TRBV27, TRBJ1-6)
CASSFDRGLGSPLHF

SEQ ID NO: 465975 - protein, 16 aa, Homo sapiens
  CDR3 for alpha chain variable domain of TCR clone 232988 (TRAV30, TRAJ24)
CGTEIVDADSWVKFQF

SEQ ID NO: 465976 - protein, 14 aa, Homo sapiens
  CDR3 for beta chain variable domain of TCR clone 232988 (TRBV12-5, TRBJ2-5)
CASGSRTHKETQYF

SEQ ID NO: 465977 - protein, 13 aa, Homo sapiens
  CDR3 for alpha chain variable domain of TCR clone 232989 (TRAV13-1, TRAJ20)
CAARVSNDYKLSF

SEQ ID NO: 465978 - protein, 16 aa, Homo sapiens
  CDR3 for beta chain variable domain of TCR clone 232989 (TRBV11-1, TRBJ1-1)
CATNPRDRAFNTEAFC

SEQ ID NO: 465979 - protein, 13 aa, Homo sapiens
  CDR3 for alpha chain variable domain of TCR clone 232990 (TRAV12-3, TRAJ54)
CAMSVQGAQKLVF

SEQ ID NO: 465980 - protein, 16 aa, Homo sapiens
  CDR3 for beta chain variable domain of TCR clone 232990 (TRBV13, TRBJ2-2)
CASSPRTGEHTGELFF

SEQ ID NO: 465981 - protein, 19 aa, Homo sapiens
  CDR3 for alpha chain variable domain of TCR clone 232991 (TRAV13-1, )
CAASVDIQNPDPAVYQLRD

SEQ ID NO: 465982 - protein, 14 aa, Homo sapiens
  CDR3 for beta chain variable domain of TCR clone 232991 (TRBV7-9, TRBJ2-5)
CASSLAGLTETQYF

SEQ ID NO: 465983 - protein, 17 aa, Homo sapiens
  CDR3 for alpha chain variable domain of TCR clone 232992 (TRAV3, TRAJ42)
CAVRDRDYVVSQGNLIF

SEQ ID NO: 465984 - protein, 15 aa, Homo sapiens
  CDR3 for beta chain variable domain of TCR clone 232992 (TRBV6-6, TRBJ2-7)
CASSYSYGGSYEQYF

SEQ ID NO: 465985 - protein, 12 aa, Homo sapiens
  CDR3 for alpha chain variable domain of TCR clone 232993 (TRAV29/DV5, TRAJ49)
CAATDTGNHVYF

SEQ ID NO: 465986 - protein, 19 aa, Homo sapiens
  CDR3 for beta chain variable domain of TCR clone 232993 (TRBV25-1, TRBJ2-2)
CAILVYRVDRGRKTGELFF

SEQ ID NO: 465987 - protein, 19 aa, Homo sapiens
  CDR3 for alpha chain variable domain of TCR clone 232994 (TRAV13-1, TRAJ52)
CAASPYQNAGGTSYGKLTF

SEQ ID NO: 465988 - protein, 20 aa, Homo sapiens
  CDR3 for beta chain variable domain of TCR clone 232994 (TRBV28, TRBJ2-1)
CASTPIGRSPGLAGGNEQFF

SEQ ID NO: 465989 - protein, 13 aa, Homo sapiens
  CDR3 for alpha chain variable domain of TCR clone 232995 (TRAV3, TRAJ26)
CAVRGAEGQNFVF

SEQ ID NO: 465990 - protein, 15 aa, Homo sapiens
  CDR3 for beta chain variable domain of TCR clone 232995 (TRBV2, TRBJ1-5)
CASSPGPTGNQPQHC

SEQ ID NO: 465991 - protein, 16 aa, Homo sapiens
  CDR3 for alpha chain variable domain of TCR clone 232996 (TRAV12-3, TRAJ53)
CAMSPGSGGSNYKLTF

SEQ ID NO: 465992 - protein, 16 aa, Homo sapiens
  CDR3 for beta chain variable domain of TCR clone 232996 (TRBV7-2, TRBJ1-3)
CASSSGRVLSGNTIYF

SEQ ID NO: 465993 - protein, 16 aa, Homo sapiens
  CDR3 for alpha chain variable domain of TCR clone 232997 (TRAV12-3, TRAJ53)
CAMSPGSGGSNYKLTF

SEQ ID NO: 465994 - protein, 13 aa, Homo sapiens
  CDR3 for beta chain variable domain of TCR clone 232997 (TRBV19, TRBJ1-2)
CASSVPGQDGYTV

SEQ ID NO: 465995 - protein, 11 aa, Homo sapiens
  CDR3 for alpha chain variable domain of TCR clone 232998 (TRAV1-2, TRAJ20)
CAVANDYKLSF

SEQ ID NO: 465996 - protein, 17 aa, Homo sapiens
  CDR3 for beta chain variable domain of TCR clone 232998 (TRBV28, TRBJ2-3)
CASSPTPAGGRVDTQYF

SEQ ID NO: 465997 - protein, 15 aa, Homo sapiens
  CDR3 for alpha chain variable domain of TCR clone 232999 (TRAV3, TRAJ5)
CAVRDRKTGRRALTF

SEQ ID NO: 465998 - protein, 15 aa, Homo sapiens
  CDR3 for beta chain variable domain of TCR clone 232999 (TRBV7-2, TRBJ1-5)
CASSLVAGGNQPQHF

SEQ ID NO: 465999 - protein, 18 aa, Homo sapiens
  CDR3 for alpha chain variable domain of TCR clone 233000 (TRAV13-1, TRAJ52)
CAAKNPNTGGTSSGKLTF

SEQ ID NO: 466000 - protein, 14 aa, Homo sapiens
  CDR3 for beta chain variable domain of TCR clone 233000 (TRBV7-3, TRBJ2-1)
CASSLAGGTNEQFF

SEQ ID NO: 466001 - protein, 13 aa, Homo sapiens
  CDR3 for alpha chain variable domain of TCR clone 233001 (TRAV1-2, TRAJ9)
CAALNTGGFKTIF

SEQ ID NO: 466002 - protein, 14 aa, Homo sapiens
  CDR3 for beta chain variable domain of TCR clone 233001 (TRBV13, TRBJ2-3)
RARSSGSPTDTQYF

SEQ ID NO: 466003 - protein, 16 aa, Homo sapiens
  CDR3 for alpha chain variable domain of TCR clone 233002 (TRAV27, TRAJ53)
CAAPEGSGGSNYKLTF

SEQ ID NO: 466004 - protein, 15 aa, Homo sapiens
  CDR3 for beta chain variable domain of TCR clone 233002 (TRBV20-1, TRBJ1-1)
CCASRGVTGNTEAFF

SEQ ID NO: 466005 - protein, 14 aa, Homo sapiens
  CDR3 for alpha chain variable domain of TCR clone 233003 (TRAV13-1, TRAJ44)
CAAKATGTASKLTF

SEQ ID NO: 466006 - protein, 16 aa, Homo sapiens
  CDR3 for beta chain variable domain of TCR clone 233003 (TRBV3-1, TRBJ2-7)
CASSQGATGVAYEQYF

SEQ ID NO: 466007 - protein, 14 aa, Homo sapiens
  CDR3 for alpha chain variable domain of TCR clone 233004 (TRAV13-1, TRAJ44)
CAAKATGTASKLTF

SEQ ID NO: 466008 - protein, 17 aa, Homo sapiens
  CDR3 for beta chain variable domain of TCR clone 233004 (TRBV7-3, TRBJ2-3)
CASSLMKRTRGADTQYF

SEQ ID NO: 466009 - protein, 12 aa, Homo sapiens
  CDR3 for alpha chain variable domain of TCR clone 233005 (TRAV13-2, TRAJ23)
CAERHRGGKLIF

SEQ ID NO: 466010 - protein, 11 aa, Homo sapiens
  CDR3 for beta chain variable domain of TCR clone 233005 (TRBV20-1, TRBJ2-5)
CSADRAETQYF

SEQ ID NO: 466011 - protein, 14 aa, Homo sapiens
  CDR3 for alpha chain variable domain of TCR clone 233006 (TRAV1-2, TRAJ8)
CAVREDTGFQKLVF

SEQ ID NO: 466012 - protein, 17 aa, Homo sapiens
  CDR3 for beta chain variable domain of TCR clone 233006 (TRBV27, TRBJ2-6)
CASSLTGFASGANVLTF

SEQ ID NO: 466013 - protein, 13 aa, Homo sapiens
  CDR3 for alpha chain variable domain of TCR clone 233007 (TRAV1-2, TRAJ9)
CAALNTGGFNTIF

SEQ ID NO: 466014 - protein, 11 aa, Homo sapiens
  CDR3 for beta chain variable domain of TCR clone 233007 (TRBV6-3, TRBJ2-3)
CATGQADTQYF

SEQ ID NO: 466015 - protein, 11 aa, Homo sapiens
  CDR3 for alpha chain variable domain of TCR clone 233008 (TRAV13-1, TRAJ15)
CAATPGTALIF

SEQ ID NO: 466016 - protein, 16 aa, Homo sapiens
  CDR3 for beta chain variable domain of TCR clone 233008 (TRBV7-9, TRBJ2-2)
CASSGFGGANTGELFF

SEQ ID NO: 466017 - protein, 10 aa, Homo sapiens
  CDR3 for alpha chain variable domain of TCR clone 233009 (TRAV38-2/DV8, TRAJ40)
CASGTYKYIF

SEQ ID NO: 466018 - protein, 11 aa, Homo sapiens
  CDR3 for beta chain variable domain of TCR clone 233009 (TRBV19, TRBJ1-1)
CASSIGSEAFF

SEQ ID NO: 466019 - protein, 14 aa, Homo sapiens
  CDR3 for alpha chain variable domain of TCR clone 233010 (TRAV1-2, TRAJ16)
CAVNRFSDGQELLF

SEQ ID NO: 466020 - protein, 14 aa, Homo sapiens
  CDR3 for beta chain variable domain of TCR clone 233010 (TRBV7-2, TRBJ2-7)
CASRSQGAAYEQYF

SEQ ID NO: 466021 - protein, 11 aa, Homo sapiens
  CDR3 for alpha chain variable domain of TCR clone 233011 (TRAV2, TRAJ13)
CASGGYQKVTF

SEQ ID NO: 466022 - protein, 16 aa, Homo sapiens
  CDR3 for beta chain variable domain of TCR clone 233011 (TRBV19, TRBJ2-1)
CASSKAGRSSYNEQFF

SEQ ID NO: 466023 - protein, 16 aa, Homo sapiens
  CDR3 for alpha chain variable domain of TCR clone 233012 (TRAV30, TRAJ24)
CGTEIVDADSWGKFQL

SEQ ID NO: 466024 - protein, 12 aa, Homo sapiens
  CDR3 for beta chain variable domain of TCR clone 233012 (TRBV14, TRBJ2-5)
CASSQLKETQYF

SEQ ID NO: 466025 - protein, 11 aa, Homo sapiens
  CDR3 for alpha chain variable domain of TCR clone 233013 (TRAV17, TRAJ31)
CATDRTARLMF

SEQ ID NO: 466026 - protein, 14 aa, Homo sapiens
  CDR3 for beta chain variable domain of TCR clone 233013 (TRBV4-1, TRBJ2-2)
RASSQAVNTGELFF

SEQ ID NO: 466027 - protein, 21 aa, Homo sapiens
  CDR3 for alpha chain variable domain of TCR clone 233014 (TRAV8-3, TRAJ10)
CAVGHTHGRRKQTHLWDRQPA

SEQ ID NO: 466028 - protein, 10 aa, Homo sapiens
  CDR3 for beta chain variable domain of TCR clone 233014 (TRBV20-1, TRBJ2-5)
CSARFETQYF

SEQ ID NO: 466029 - protein, 16 aa, Homo sapiens
  CDR3 for alpha chain variable domain of TCR clone 233015 (TRAV30, TRAJ24)
CGTEIVDADSWGKFQF

SEQ ID NO: 466030 - protein, 14 aa, Homo sapiens
  CDR3 for beta chain variable domain of TCR clone 233015 (TRBV6-1, TRBJ1-1)
CASTPLQMNTEAFF

SEQ ID NO: 466031 - protein, 12 aa, Homo sapiens
  CDR3 for alpha chain variable domain of TCR clone 233016 (TRAV12-3, TRAJ41)
CAMSYSGYALNF

SEQ ID NO: 466032 - protein, 13 aa, Homo sapiens
  CDR3 for beta chain variable domain of TCR clone 233016 (TRBV7-3, TRBJ2-1)
CASSGDSYNEQFF

SEQ ID NO: 466033 - protein, 14 aa, Homo sapiens
  CDR3 for alpha chain variable domain of TCR clone 233017 (TRAV2, TRAJ9)
CAVEDRSGGFKTIF

SEQ ID NO: 466034 - protein, 13 aa, Homo sapiens
  CDR3 for beta chain variable domain of TCR clone 233017 (TRBV24-1, TRBJ2-2)
CATSDWSTGELFF

SEQ ID NO: 466035 - protein, 14 aa, Homo sapiens
  CDR3 for alpha chain variable domain of TCR clone 233018 (TRAV10, TRAJ36)
CVVKYEGGANNLFF

SEQ ID NO: 466036 - protein, 14 aa, Homo sapiens
  CDR3 for beta chain variable domain of TCR clone 233018 (TRBV7-7, TRBJ2-2)
CATRQDSDTGELFF

SEQ ID NO: 466037 - protein, 14 aa, Homo sapiens
  CDR3 for alpha chain variable domain of TCR clone 233019 (TRAV12-1, TRAJ45)
CVVNVGGGSDGLTF

SEQ ID NO: 466038 - protein, 14 aa, Homo sapiens
  CDR3 for beta chain variable domain of TCR clone 233019 (TRBV5-4, TRBJ1-1)
CASSLDSRRDEAFF

SEQ ID NO: 466039 - protein, 16 aa, Homo sapiens
  CDR3 for alpha chain variable domain of TCR clone 233020 (TRAV12-3, TRAJ53)
CAMSPGSGSSNYKLTF

SEQ ID NO: 466040 - protein, 14 aa, Homo sapiens
  CDR3 for beta chain variable domain of TCR clone 233020 (TRBV4-2, TRBJ2-1)
CASGLDRAYNEQFF

SEQ ID NO: 466041 - protein, 17 aa, Homo sapiens
  CDR3 for alpha chain variable domain of TCR clone 233021 (TRAV3, TRAJ6)
CAVRDGPWAGGSYIPTF

SEQ ID NO: 466042 - protein, 17 aa, Homo sapiens
  CDR3 for beta chain variable domain of TCR clone 233021 (TRBV20-1, TRBJ1-5)
CSASLSPGQGGNQPQHF

SEQ ID NO: 466043 - protein, 11 aa, Homo sapiens
  CDR3 for alpha chain variable domain of TCR clone 233022 (TRAV12-1, TRAJ30)
CVVNGQDKIIF

SEQ ID NO: 466044 - protein, 14 aa, Homo sapiens
  CDR3 for beta chain variable domain of TCR clone 233022 (TRBV19, TRBJ2-1)
CASRGDPTGNEQFF

SEQ ID NO: 466045 - protein, 21 aa, Homo sapiens
  CDR3 for alpha chain variable domain of TCR clone 233023 (TRAV1-1, TRAJ6)
CLLLLRCERLERAGGSYIPTF

SEQ ID NO: 466046 - protein, 13 aa, Homo sapiens
  CDR3 for beta chain variable domain of TCR clone 233023 (TRBV10-2, TRBJ2-7)
CSSGASGGYEQYF

SEQ ID NO: 466047 - protein, 12 aa, Homo sapiens
  CDR3 for alpha chain variable domain of TCR clone 233024 (TRAV8-3, TRAJ40)
CAVTSGTYKYIF

SEQ ID NO: 466048 - protein, 15 aa, Homo sapiens
  CDR3 for beta chain variable domain of TCR clone 233024 (TRBV19, TRBJ2-1)
CASSSPGVPLMSSSS

SEQ ID NO: 466049 - protein, 11 aa, Homo sapiens
  CDR3 for alpha chain variable domain of TCR clone 233025 (TRAV27, TRAJ47)
SIVEYGNKLVV

SEQ ID NO: 466050 - protein, 18 aa, Homo sapiens
  CDR3 for beta chain variable domain of TCR clone 233025 (TRBV2, TRBJ2-1)
CASRGLAGGPRTYNEQFF

SEQ ID NO: 466051 - protein, 18 aa, Homo sapiens
  CDR3 for alpha chain variable domain of TCR clone 233026 (TRAV13-1, TRAJ10)
CAARKGRAVTGGGNKLTF

SEQ ID NO: 466052 - protein, 14 aa, Homo sapiens
  CDR3 for beta chain variable domain of TCR clone 233026 (TRBV18, TRBJ2-7)
CASSPRGGAYEQYF

SEQ ID NO: 466053 - protein, 12 aa, Homo sapiens
  CDR3 for alpha chain variable domain of TCR clone 233027 (TRAV12-3, TRAJ17)
CAMTLTGNKLTF

SEQ ID NO: 466054 - protein, 15 aa, Homo sapiens
  CDR3 for beta chain variable domain of TCR clone 233027 (TRBV7-8, TRBJ2-5)
CASSDAAGSQETQYF

SEQ ID NO: 466055 - protein, 14 aa, Homo sapiens
  CDR3 for alpha chain variable domain of TCR clone 233028 (TRAV20, TRAJ17)
CAVQARAAGNKLTF

SEQ ID NO: 466056 - protein, 13 aa, Homo sapiens
  CDR3 for beta chain variable domain of TCR clone 233028 (TRBV19, TRBJ1-2)
RASSPTLNYGYTF

SEQ ID NO: 466057 - protein, 15 aa, Homo sapiens
  CDR3 for alpha chain variable domain of TCR clone 233029 (TRAV1-2, TRAJ18)
CAWEGRGATLGRLYF

SEQ ID NO: 466058 - protein, 14 aa, Homo sapiens
  CDR3 for beta chain variable domain of TCR clone 233029 (TRBV4-3, TRBJ2-7)
CASSQDGAGGEQYF

SEQ ID NO: 466059 - protein, 14 aa, Homo sapiens
  CDR3 for alpha chain variable domain of TCR clone 233030 (TRAV1-2, TRAJ16)
CAVNWFSDGQKLLF

SEQ ID NO: 466060 - protein, 15 aa, Homo sapiens
  CDR3 for beta chain variable domain of TCR clone 233030 (TRBV27, TRBJ1-1)
CASSPYADPYTEAFF

SEQ ID NO: 466061 - protein, 17 aa, Homo sapiens
  CDR3 for alpha chain variable domain of TCR clone 233031 (TRAV3, TRAJ6)
CAVRDGPRAGGSYIPTF

SEQ ID NO: 466062 - protein, 15 aa, Homo sapiens
  CDR3 for beta chain variable domain of TCR clone 233031 (TRBV3-1, TRBJ1-2)
CASSQEVRANYGYTF

SEQ ID NO: 466063 - protein, 14 aa, Homo sapiens
  CDR3 for alpha chain variable domain of TCR clone 233032 (TRAV1-2, TRAJ8)
CAVREDTGFQKLVF

SEQ ID NO: 466064 - protein, 13 aa, Homo sapiens
  CDR3 for beta chain variable domain of TCR clone 233032 (TRBV2, TRBJ1-1)
CARNQTGGFHAFF

SEQ ID NO: 466065 - protein, 16 aa, Homo sapiens
  CDR3 for alpha chain variable domain of TCR clone 233033 (TRAV3, TRAJ37)
CAVRGKGSGNTGKLIF

SEQ ID NO: 466066 - protein, 15 aa, Homo sapiens
  CDR3 for beta chain variable domain of TCR clone 233033 (TRBV7-2, TRBJ2-2)
CASSPTGANTGELFF

SEQ ID NO: 466067 - protein, 16 aa, Homo sapiens
  CDR3 for alpha chain variable domain of TCR clone 233034 (TRAV12-2, TRAJ45)
CAVIFLSGGGADGLTF

SEQ ID NO: 466068 - protein, 17 aa, Homo sapiens
  CDR3 for beta chain variable domain of TCR clone 233034 (TRBV11-2, TRBJ2-1)
CASSLYPPGVEYNEQFF

SEQ ID NO: 466069 - protein, 11 aa, Homo sapiens
  CDR3 for alpha chain variable domain of TCR clone 233035 (TRAV2, TRAJ21)
CAVFNFNKFYF

SEQ ID NO: 466070 - protein, 14 aa, Homo sapiens
  CDR3 for beta chain variable domain of TCR clone 233035 (TRBV15, TRBJ2-3)
CATRSGTSTHTQYF

SEQ ID NO: 466071 - protein, 13 aa, Homo sapiens
  CDR3 for alpha chain variable domain of TCR clone 233036 (TRAV9-2, TRAJ53)
CALSGGSNYKLTF

SEQ ID NO: 466072 - protein, 17 aa, Homo sapiens
  CDR3 for beta chain variable domain of TCR clone 233036 (TRBV20-1, TRBJ2-2)
CSASGSGQGGLTGELFF

SEQ ID NO: 466073 - protein, 14 aa, Homo sapiens
  CDR3 for alpha chain variable domain of TCR clone 233037 (TRAV34, TRAJ44)
CGADGTGTASKLTF

SEQ ID NO: 466074 - protein, 15 aa, Homo sapiens
  CDR3 for beta chain variable domain of TCR clone 233037 (TRBV5-1, TRBJ2-1)
CASSPARAPYNEQFF

SEQ ID NO: 466075 - protein, 14 aa, Homo sapiens
  CDR3 for alpha chain variable domain of TCR clone 233038 (TRAV12-3, TRAJ10)
SHLPLPGGGNKLTF

SEQ ID NO: 466076 - protein, 13 aa, Homo sapiens
  CDR3 for beta chain variable domain of TCR clone 233038 (TRBV20-1, TRBJ1-6)
CSAPLGVGSPLHF

SEQ ID NO: 466077 - protein, 14 aa, Homo sapiens
  CDR3 for alpha chain variable domain of TCR clone 233039 (TRAV21, TRAJ23)
CAIMIYNQGGKLIF

SEQ ID NO: 466078 - protein, 16 aa, Homo sapiens
  CDR3 for beta chain variable domain of TCR clone 233039 (TRBV12-5, TRBJ2-5)
CASGPRASGNQETQYF

SEQ ID NO: 466079 - protein, 14 aa, Homo sapiens
  CDR3 for alpha chain variable domain of TCR clone 233040 (TRAV12-2, TRAJ8)
CAVKENTGFQKLVF

SEQ ID NO: 466080 - protein, 13 aa, Homo sapiens
  CDR3 for beta chain variable domain of TCR clone 233040 (TRBV18, TRBJ1-2)
CASSASATESYTF

SEQ ID NO: 466081 - protein, 16 aa, Homo sapiens
  CDR3 for alpha chain variable domain of TCR clone 233041 (TRAV30, TRAJ24)
CGTEIVDADSWGKFQF

SEQ ID NO: 466082 - protein, 15 aa, Homo sapiens
  CDR3 for beta chain variable domain of TCR clone 233041 (TRBV28, TRBJ2-1)
CASSPPGLADHEQFF

SEQ ID NO: 466083 - protein, 15 aa, Homo sapiens
  CDR3 for alpha chain variable domain of TCR clone 233042 (TRAV26-1, TRAJ48)
FIARWSWCGNEKLTF

SEQ ID NO: 466084 - protein, 12 aa, Homo sapiens
  CDR3 for beta chain variable domain of TCR clone 233042 (TRBV19, TRBJ2-5)
CASSISEETQYF

SEQ ID NO: 466085 - protein, 14 aa, Homo sapiens
  CDR3 for alpha chain variable domain of TCR clone 233043 (TRAV1-2, TRAJ8)
CAVREDTGFQKLVF

SEQ ID NO: 466086 - protein, 12 aa, Homo sapiens
  CDR3 for beta chain variable domain of TCR clone 233043 (TRBV7-8, TRBJ2-7)
CASSLGDREQCF

SEQ ID NO: 466087 - protein, 15 aa, Homo sapiens
  CDR3 for alpha chain variable domain of TCR clone 233044 (TRAV14/DV4, TRAJ12)
CAMREERDGSYKLIF

SEQ ID NO: 466088 - protein, 16 aa, Homo sapiens
  CDR3 for beta chain variable domain of TCR clone 233044 (TRBV11-2, TRBJ1-2)
CASSLDRGGNNYGYTF

SEQ ID NO: 466089 - protein, 14 aa, Homo sapiens
  CDR3 for alpha chain variable domain of TCR clone 233045 (TRAV26-1, TRAJ15)
CNVRANQAGTALIF

SEQ ID NO: 466090 - protein, 16 aa, Homo sapiens
  CDR3 for beta chain variable domain of TCR clone 233045 (TRBV20-1, TRBJ1-4)
CSAIGGPRGANEKLFF

SEQ ID NO: 466091 - protein, 14 aa, Homo sapiens
  CDR3 for alpha chain variable domain of TCR clone 233046 (TRAV17, TRAJ16)
CSTADFSDGQKLLF

SEQ ID NO: 466092 - protein, 15 aa, Homo sapiens
  CDR3 for beta chain variable domain of TCR clone 233046 (TRBV6-5, TRBJ2-1)
CASSYDAGAGNEQFF

SEQ ID NO: 466093 - protein, 14 aa, Homo sapiens
  CDR3 for alpha chain variable domain of TCR clone 233047 (TRAV2, TRAJ9)
CAVEDRSGGFKTIF

SEQ ID NO: 466094 - protein, 18 aa, Homo sapiens
  CDR3 for beta chain variable domain of TCR clone 233047 (TRBV11-2, TRBJ2-3)
CASSFRGASRGAPNTQYF

SEQ ID NO: 466095 - protein, 14 aa, Homo sapiens
  CDR3 for alpha chain variable domain of TCR clone 233048 (TRAV9-2, TRAJ39)
CALYIYNAGNMLTF

SEQ ID NO: 466096 - protein, 17 aa, Homo sapiens
  CDR3 for beta chain variable domain of TCR clone 233048 (TRBV7-3, TRBJ2-3)
CASSRGLAGEVPDTQYF

SEQ ID NO: 466097 - protein, 15 aa, Homo sapiens
  CDR3 for alpha chain variable domain of TCR clone 233049 (TRAV12-1, TRAJ37)
CVVNLPTSNTGKLIF

SEQ ID NO: 466098 - protein, 15 aa, Homo sapiens
  CDR3 for beta chain variable domain of TCR clone 233049 (TRBV2, TRBJ2-1)
CQPEPAGGKYNEQFF

SEQ ID NO: 466099 - protein, 12 aa, Homo sapiens
  CDR3 for alpha chain variable domain of TCR clone 233050 (TRAV23/DV6, TRAJ24)
CAANASWGKLQF

SEQ ID NO: 466100 - protein, 16 aa, Homo sapiens
  CDR3 for beta chain variable domain of TCR clone 233050 (TRBV12-4, TRBJ2-5)
CASSLSTSGGKETQYF

SEQ ID NO: 466101 - protein, 17 aa, Homo sapiens
  CDR3 for alpha chain variable domain of TCR clone 233051 (TRAV38-2/DV8, TRAJ23)
CALSRKLIFGQGTELSV

SEQ ID NO: 466102 - protein, 12 aa, Homo sapiens
  CDR3 for beta chain variable domain of TCR clone 233051 (TRBV18, TRBJ2-1)
CASSSDEDEQFF

SEQ ID NO: 466103 - protein, 12 aa, Homo sapiens
  CDR3 for alpha chain variable domain of TCR clone 233052 (TRAV12-2, TRAJ10)
WGVTAGGNKLTF

SEQ ID NO: 466104 - protein, 16 aa, Homo sapiens
  CDR3 for beta chain variable domain of TCR clone 233052 (TRBV6-4, TRBJ1-2)
CASSEAVGDPNYGYTF

SEQ ID NO: 466105 - protein, 14 aa, Homo sapiens
  CDR3 for alpha chain variable domain of TCR clone 233053 (TRAV12-2, TRAJ6)
CAGIASGGSYIPTF

SEQ ID NO: 466106 - protein, 16 aa, Homo sapiens
  CDR3 for beta chain variable domain of TCR clone 233053 (TRBV7-2, TRBJ2-3)
CASSLAGAGSGDTQYF

SEQ ID NO: 466107 - protein, 14 aa, Homo sapiens
  CDR3 for alpha chain variable domain of TCR clone 233054 (TRAV13-1, TRAJ16)
CAAGQMARSCSLQG

SEQ ID NO: 466108 - protein, 13 aa, Homo sapiens
  CDR3 for beta chain variable domain of TCR clone 233054 (TRBV7-2, TRBJ2-4)
CASSREHANMQYF

SEQ ID NO: 466109 - protein, 16 aa, Homo sapiens
  CDR3 for alpha chain variable domain of TCR clone 233055 (TRAV12-3, TRAJ53)
CAMSVGIGGSNYKLTF

SEQ ID NO: 466110 - protein, 11 aa, Homo sapiens
  CDR3 for beta chain variable domain of TCR clone 233055 (TRBV29-1, TRBJ2-5)
CSVASGETQYF

SEQ ID NO: 466111 - protein, 15 aa, Homo sapiens
  CDR3 for alpha chain variable domain of TCR clone 233056 (TRAV3, TRAJ17)
CAVSPKEAAGNKLTF

SEQ ID NO: 466112 - protein, 16 aa, Homo sapiens
  CDR3 for beta chain variable domain of TCR clone 233056 (TRBV12-5, TRBJ2-5)
CASGPRTSGNQETQYF

SEQ ID NO: 466113 - protein, 16 aa, Homo sapiens
  CDR3 for alpha chain variable domain of TCR clone 233057 (TRAV3, TRAJ28)
CAVLPRSGAGRYQLTL

SEQ ID NO: 466114 - protein, 13 aa, Homo sapiens
  CDR3 for beta chain variable domain of TCR clone 233057 (TRBV12-4, TRBJ2-5)
CASRLAVQETQYF

SEQ ID NO: 466115 - protein, 14 aa, Homo sapiens
  CDR3 for alpha chain variable domain of TCR clone 233058 (TRAV13-1, TRAJ40)
CAASMTSGTYKYIF

SEQ ID NO: 466116 - protein, 14 aa, Homo sapiens
  CDR3 for beta chain variable domain of TCR clone 233058 (TRBV2, TRBJ2-1)
CASSEARQGVSEFF

SEQ ID NO: 466117 - protein, 14 aa, Homo sapiens
  CDR3 for alpha chain variable domain of TCR clone 233059 (TRAV12-2, TRAJ17)
CAVLFKAAGNKLTF

SEQ ID NO: 466118 - protein, 13 aa, Homo sapiens
  CDR3 for beta chain variable domain of TCR clone 233059 (TRBV5-7, TRBJ1-1)
CASSLFQNTEAFF

SEQ ID NO: 466119 - protein, 12 aa, Homo sapiens
  CDR3 for alpha chain variable domain of TCR clone 233060 (TRAV35, TRAJ40)
CAGRAGTYKYIF

SEQ ID NO: 466120 - protein, 11 aa, Homo sapiens
  CDR3 for beta chain variable domain of TCR clone 233060 (TRBV7-8, TRBJ2-7)
CASSLSLEQYF

SEQ ID NO: 466121 - protein, 14 aa, Homo sapiens
  CDR3 for alpha chain variable domain of TCR clone 233061 (TRAV4, TRAJ17)
CFVGDMAAGNKLTF

SEQ ID NO: 466122 - protein, 15 aa, Homo sapiens
  CDR3 for beta chain variable domain of TCR clone 233061 (TRBV5-5, TRBJ1-5)
CASSSTPGSNQPQHF

SEQ ID NO: 466123 - protein, 15 aa, Homo sapiens
  CDR3 for alpha chain variable domain of TCR clone 233062 (TRAV12-2, TRAJ20)
CAVKGGFGAGTTVTV

SEQ ID NO: 466124 - protein, 16 aa, Homo sapiens
  CDR3 for beta chain variable domain of TCR clone 233062 (TRBV12-4, TRBJ1-5)
CASSRPVGGSNQPQHF

SEQ ID NO: 466125 - protein, 14 aa, Homo sapiens
  CDR3 for alpha chain variable domain of TCR clone 233063 (TRAV17, TRAJ56)
CATDPAGANSKLTF

SEQ ID NO: 466126 - protein, 13 aa, Homo sapiens
  CDR3 for beta chain variable domain of TCR clone 233063 (TRBV12-4, TRBJ2-2)
CASSITGSGELFF

SEQ ID NO: 466127 - protein, 17 aa, Homo sapiens
  CDR3 for alpha chain variable domain of TCR clone 233064 (TRAV12-2, TRAJ42)
CAVNILNYGGSQGNLIF

SEQ ID NO: 466128 - protein, 13 aa, Homo sapiens
  CDR3 for beta chain variable domain of TCR clone 233064 (TRBV7-3, TRBJ1-1)
CASSQDWGAEAFF

SEQ ID NO: 466129 - protein, 13 aa, Homo sapiens
  CDR3 for alpha chain variable domain of TCR clone 233065 (TRAV12-1, TRAJ16)
CVVNGPDGQKLLL

SEQ ID NO: 466130 - protein, 12 aa, Homo sapiens
  CDR3 for beta chain variable domain of TCR clone 233065 (TRBV24-1, TRBJ2-2)
CATSDPGLTGLQ

SEQ ID NO: 466131 - protein, 15 aa, Homo sapiens
  CDR3 for alpha chain variable domain of TCR clone 233066 (TRAV12-1, TRAJ9)
CVVSFGDTGGFKTIF

SEQ ID NO: 466132 - protein, 15 aa, Homo sapiens
  CDR3 for beta chain variable domain of TCR clone 233066 (TRBV18, TRBJ2-1)
CASSPPSASYNEQFF

SEQ ID NO: 466133 - protein, 13 aa, Homo sapiens
  CDR3 for alpha chain variable domain of TCR clone 233067 (TRAV12-3, TRAJ47)
CAMKKEYGNKLVF

SEQ ID NO: 466134 - protein, 10 aa, Homo sapiens
  CDR3 for beta chain variable domain of TCR clone 233067 (TRBV20-1, TRBJ2-7)
IGSGMDEQYF

SEQ ID NO: 466135 - protein, 14 aa, Homo sapiens
  CDR3 for alpha chain variable domain of TCR clone 233068 (TRAV12-3, TRAJ10)
SHLPLTGGGNKLTF

SEQ ID NO: 466136 - protein, 12 aa, Homo sapiens
  CDR3 for beta chain variable domain of TCR clone 233068 (TRBV24-1, TRBJ2-3)
CATSDSTDTQYL

SEQ ID NO: 466137 - protein, 15 aa, Homo sapiens
  CDR3 for alpha chain variable domain of TCR clone 233069 (TRAV17, TRAJ57)
CATAPSQGGSEKLVF

SEQ ID NO: 466138 - protein, 16 aa, Homo sapiens
  CDR3 for beta chain variable domain of TCR clone 233069 (TRBV12-4, TRBJ1-5)
CASSRPVGVSNQPQHF

SEQ ID NO: 466139 - protein, 10 aa, Homo sapiens
  CDR3 for alpha chain variable domain of TCR clone 233070 (TRAV12-1, TRAJ20)
CAIYFQRLQA

SEQ ID NO: 466140 - protein, 11 aa, Homo sapiens
  CDR3 for beta chain variable domain of TCR clone 233070 (TRBV25-1, TRBJ2-4)
CQSRDQNIQYF

SEQ ID NO: 466141 - protein, 18 aa, Homo sapiens
  CDR3 for alpha chain variable domain of TCR clone 233071 (TRAV26-1, TRAJ23)
CIVRVGLEVWNQGGKLIF

SEQ ID NO: 466142 - protein, 16 aa, Homo sapiens
  CDR3 for beta chain variable domain of TCR clone 233071 (TRBV12-5, TRBJ2-5)
CASGPRTSGNQETQYF

SEQ ID NO: 466143 - protein, 18 aa, Homo sapiens
  CDR3 for alpha chain variable domain of TCR clone 233072 (TRAV29/DV5, TRAJ52)
CAAGFRGAGGTIYGKLTF

SEQ ID NO: 466144 - protein, 16 aa, Homo sapiens
  CDR3 for beta chain variable domain of TCR clone 233072 (TRBV7-3, TRBJ2-2)
CASSLRRGTLSGELFF

SEQ ID NO: 466145 - protein, 15 aa, Homo sapiens
  CDR3 for alpha chain variable domain of TCR clone 233073 (TRAV3, TRAJ22)
CAVRDRGGSARQLTF

SEQ ID NO: 466146 - protein, 14 aa, Homo sapiens
  CDR3 for beta chain variable domain of TCR clone 233073 (TRBV19, TRBJ2-1)
CASSRLASINEQFF

SEQ ID NO: 466147 - protein, 16 aa, Homo sapiens
  CDR3 for alpha chain variable domain of TCR clone 233074 (TRAV3, TRAJ6)
CAVRDGPSRRKLHTYI

SEQ ID NO: 466148 - protein, 14 aa, Homo sapiens
  CDR3 for beta chain variable domain of TCR clone 233074 (TRBV7-2, TRBJ2-7)
CASSPKTSFYEQYF

SEQ ID NO: 466149 - protein, 21 aa, Homo sapiens
  CDR3 for alpha chain variable domain of TCR clone 233075 (TRAV36/DV7, TRAJ39)
TATQTGDSAIYLPNAGNMLTF

SEQ ID NO: 466150 - protein, 13 aa, Homo sapiens
  CDR3 for beta chain variable domain of TCR clone 233075 (TRBV29-1, TRBJ2-5)
CSAGTGGYETQYF

SEQ ID NO: 466151 - protein, 14 aa, Homo sapiens
  CDR3 for alpha chain variable domain of TCR clone 233076 (TRAV1-2, TRAJ16)
CAVNRFSDGQKLPF

SEQ ID NO: 466152 - protein, 14 aa, Homo sapiens
  CDR3 for beta chain variable domain of TCR clone 233076 (TRBV6-1, TRBJ1-6)
CASSGTAYNSPLHF

SEQ ID NO: 466153 - protein, 16 aa, Homo sapiens
  CDR3 for alpha chain variable domain of TCR clone 233077 (TRAV8-2, TRAJ50)
CVVCDHMKTSYDKVIF

SEQ ID NO: 466154 - protein, 15 aa, Homo sapiens
  CDR3 for beta chain variable domain of TCR clone 233077 (TRBV7-2, TRBJ2-1)
CASSFQADEYNEQFF

SEQ ID NO: 466155 - protein, 13 aa, Homo sapiens
  CDR3 for alpha chain variable domain of TCR clone 233078 (TRAV23/DV6, TRAJ57)
CRSNQGGSEKLVF

SEQ ID NO: 466156 - protein, 13 aa, Homo sapiens
  CDR3 for beta chain variable domain of TCR clone 233078 (TRBV11-2, TRBJ2-7)
CASSSYPSYEQYF

SEQ ID NO: 466157 - protein, 16 aa, Homo sapiens
  CDR3 for alpha chain variable domain of TCR clone 233079 (TRAV30, TRAJ24)
CGTEIVDADSWGKFQI

SEQ ID NO: 466158 - protein, 14 aa, Homo sapiens
  CDR3 for beta chain variable domain of TCR clone 233079 (TRBV18, TRBJ2-7)
CASSPRGGAYEQYF

SEQ ID NO: 466159 - protein, 12 aa, Homo sapiens
  CDR3 for alpha chain variable domain of TCR clone 233080 (TRAV12-3, TRAJ17)
CAMTLTVNKLPF

SEQ ID NO: 466160 - protein, 15 aa, Homo sapiens
  CDR3 for beta chain variable domain of TCR clone 233080 (TRBV20-1, TRBJ2-7)
CSARDRVSGMDEQYF

SEQ ID NO: 466161 - protein, 12 aa, Homo sapiens
  CDR3 for alpha chain variable domain of TCR clone 233081 (TRAV1-1, TRAJ24)
CAVRRSWGKFQF

SEQ ID NO: 466162 - protein, 14 aa, Homo sapiens
  CDR3 for beta chain variable domain of TCR clone 233081 (TRBV7-2, TRBJ1-2)
CASSQTGSTYGYTF

SEQ ID NO: 466163 - protein, 12 aa, Homo sapiens
  CDR3 for alpha chain variable domain of TCR clone 233082 (TRAV17, TRAJ57)
CATDGGSEKLVF

SEQ ID NO: 466164 - protein, 12 aa, Homo sapiens
  CDR3 for beta chain variable domain of TCR clone 233082 (TRBV29-1, TRBJ2-2)
CSVDKYTGQLFF

SEQ ID NO: 466165 - protein, 15 aa, Homo sapiens
  CDR3 for alpha chain variable domain of TCR clone 233083 (TRAV12-2, TRAJ43)
CAFDMRLVAGTRLTV

SEQ ID NO: 466166 - protein, 17 aa, Homo sapiens
  CDR3 for beta chain variable domain of TCR clone 233083 (TRBV13, TRBJ2-3)
CASSLSRVAGGRNTQYF

SEQ ID NO: 466167 - protein, 15 aa, Homo sapiens
  CDR3 for alpha chain variable domain of TCR clone 233084 (TRAV26-1, TRAJ48)
CIVRVGDFGNEKLTF

SEQ ID NO: 466168 - protein, 13 aa, Homo sapiens
  CDR3 for beta chain variable domain of TCR clone 233084 (TRBV7-9, TRBJ1-2)
CASSLKQNYGYTF

SEQ ID NO: 466169 - protein, 13 aa, Homo sapiens
  CDR3 for alpha chain variable domain of TCR clone 233085 (TRAV14/DV4, TRAJ16)
CAIREGSGQKLLF

SEQ ID NO: 466170 - protein, 15 aa, Homo sapiens
  CDR3 for beta chain variable domain of TCR clone 233085 (TRBV7-9, TRBJ2-7)
CASSLDLDRGYEQYF

SEQ ID NO: 466171 - protein, 14 aa, Homo sapiens
  CDR3 for alpha chain variable domain of TCR clone 233086 (TRAV1-2, TRAJ16)
CAVNRFSDGQKLLF

SEQ ID NO: 466172 - protein, 14 aa, Homo sapiens
  CDR3 for beta chain variable domain of TCR clone 233086 (TRBV4-1, TRBJ2-2)
CARSQAVNTGELFF

SEQ ID NO: 466173 - protein, 11 aa, Homo sapiens
  CDR3 for alpha chain variable domain of TCR clone 233087 (TRAV13-1, TRAJ5)
CDPKGRRALTF

SEQ ID NO: 466174 - protein, 17 aa, Homo sapiens
  CDR3 for beta chain variable domain of TCR clone 233087 (TRBV28, TRBJ2-5)
CASSTPEGDALQETQYF

SEQ ID NO: 466175 - protein, 17 aa, Homo sapiens
  CDR3 for alpha chain variable domain of TCR clone 233088 (TRAV13-1, TRAJ52)
CAAGRNAGGTSYGKLTF

SEQ ID NO: 466176 - protein, 19 aa, Homo sapiens
  CDR3 for beta chain variable domain of TCR clone 233088 (TRBV19, TRBJ2-2)
CASTRPGLAGGRVTGELFF

SEQ ID NO: 466177 - protein, 13 aa, Homo sapiens
  CDR3 for alpha chain variable domain of TCR clone 233089 (TRAV12-2, TRAJ39)
CAVNNNAGNMLTF

SEQ ID NO: 466178 - protein, 13 aa, Homo sapiens
  CDR3 for beta chain variable domain of TCR clone 233089 (TRBV2, TRBJ1-5)
CATVGPGNQPQHF

SEQ ID NO: 466179 - protein, 15 aa, Homo sapiens
  CDR3 for alpha chain variable domain of TCR clone 233090 (TRAV3, TRAJ17)
CAVRDTGAAGNKLTF

SEQ ID NO: 466180 - protein, 16 aa, Homo sapiens
  CDR3 for beta chain variable domain of TCR clone 233090 (TRBV4-2, TRBJ2-3)
CASSQELAGDTDTQYF

SEQ ID NO: 466181 - protein, 15 aa, Homo sapiens
  CDR3 for alpha chain variable domain of TCR clone 233091 (TRAV26-1, TRAJ27)
CIVRVLTPMQANQPL

SEQ ID NO: 466182 - protein, 13 aa, Homo sapiens
  CDR3 for beta chain variable domain of TCR clone 233091 (TRBV20-1, TRBJ2-7)
CSATHTSGYEQDF

SEQ ID NO: 466183 - protein, 15 aa, Homo sapiens
  CDR3 for alpha chain variable domain of TCR clone 233092 (TRAV3, TRAJ22)
CAVRDRGGSARQLTF

SEQ ID NO: 466184 - protein, 13 aa, Homo sapiens
  CDR3 for beta chain variable domain of TCR clone 233092 (TRBV7-3, TRBJ2-5)
CASSFRGGGTQYF

SEQ ID NO: 466185 - protein, 14 aa, Homo sapiens
  CDR3 for alpha chain variable domain of TCR clone 233093 (TRAV12-3, TRAJ10)
SHLPLTGGGNKLTF

SEQ ID NO: 466186 - protein, 13 aa, Homo sapiens
  CDR3 for beta chain variable domain of TCR clone 233093 (TRBV12-4, TRBJ1-1)
CASSPGTGFEAFF

SEQ ID NO: 466187 - protein, 16 aa, Homo sapiens
  CDR3 for alpha chain variable domain of TCR clone 233094 (TRAV16, TRAJ42)
CARKMNYGGSQGNLLF

SEQ ID NO: 466188 - protein, 15 aa, Homo sapiens
  CDR3 for beta chain variable domain of TCR clone 233094 (TRBV20-1, TRBJ2-7)
CSAREGRDSLYEQYF

SEQ ID NO: 466189 - protein, 15 aa, Homo sapiens
  CDR3 for alpha chain variable domain of TCR clone 233095 (TRAV2, TRAJ9)
CAVEDRGTGGFKTIF

SEQ ID NO: 466190 - protein, 13 aa, Homo sapiens
  CDR3 for beta chain variable domain of TCR clone 233095 (TRBV7-7, TRBJ2-3)
CASSLSRADTQYF

SEQ ID NO: 466191 - protein, 14 aa, Homo sapiens
  CDR3 for alpha chain variable domain of TCR clone 233096 (TRAV1-2, TRAJ8)
CAVREDTGFQKLVF

SEQ ID NO: 466192 - protein, 13 aa, Homo sapiens
  CDR3 for beta chain variable domain of TCR clone 233096 (TRBV10-2, TRBJ2-5)
CASGRLARETQYF

SEQ ID NO: 466193 - protein, 15 aa, Homo sapiens
  CDR3 for alpha chain variable domain of TCR clone 233097 (TRAV8-3, TRAJ11)
CAVGLLNSGYSTLTF

SEQ ID NO: 466194 - protein, 15 aa, Homo sapiens
  CDR3 for beta chain variable domain of TCR clone 233097 (TRBV2, TRBJ2-1)
CASSELAGSYNEQFF

SEQ ID NO: 466195 - protein, 10 aa, Homo sapiens
  CDR3 for alpha chain variable domain of TCR clone 233098 (TRAV1-1, TRAJ30)
CAVRDDKIIF

SEQ ID NO: 466196 - protein, 16 aa, Homo sapiens
  CDR3 for beta chain variable domain of TCR clone 233098 (TRBV7-3, TRBJ2-2)
CASSLKRGTLSGELFF

SEQ ID NO: 466197 - protein, 18 aa, Homo sapiens
  CDR3 for alpha chain variable domain of TCR clone 233099 (TRAV13-1, TRAJ52)
CAAINPNAGGTSYGKLTF

SEQ ID NO: 466198 - protein, 15 aa, Homo sapiens
  CDR3 for beta chain variable domain of TCR clone 233099 (TRBV27, TRBJ1-5)
CASSSSGTGNQPQHF

SEQ ID NO: 466199 - protein, 14 aa, Homo sapiens
  CDR3 for alpha chain variable domain of TCR clone 233100 (TRAV8-1, TRAJ34)
CAVNPSYNTDKLIF

SEQ ID NO: 466200 - protein, 16 aa, Homo sapiens
  CDR3 for beta chain variable domain of TCR clone 233100 (TRBV7-2, TRBJ2-6)
CASSLAGRSGANILTF

SEQ ID NO: 466201 - protein, 14 aa, Homo sapiens
  CDR3 for alpha chain variable domain of TCR clone 233101 (TRAV12-3, TRAJ10)
SHLTLTGGGNKLTF

SEQ ID NO: 466202 - protein, 15 aa, Homo sapiens
  CDR3 for beta chain variable domain of TCR clone 233101 (TRBV27, TRBJ1-3)
CASSPQGATGNTIYF

SEQ ID NO: 466203 - protein, 14 aa, Homo sapiens
  CDR3 for alpha chain variable domain of TCR clone 233102 (TRAV13-1, TRAJ35)
CAASKGGFGNVLHF

SEQ ID NO: 466204 - protein, 14 aa, Homo sapiens
  CDR3 for beta chain variable domain of TCR clone 233102 (TRBV19, TRBJ2-1)
CASPTFVLSGEQFF

SEQ ID NO: 466205 - protein, 13 aa, Homo sapiens
  CDR3 for alpha chain variable domain of TCR clone 233103 (TRAV23/DV6, TRAJ5)
CAARAAGRRALTF

SEQ ID NO: 466206 - protein, 12 aa, Homo sapiens
  CDR3 for beta chain variable domain of TCR clone 233103 (TRBV19, TRBJ2-7)
CASTDRGYEQYF

SEQ ID NO: 466207 - protein, 11 aa, Homo sapiens
  CDR3 for alpha chain variable domain of TCR clone 233104 (TRAV13-1, TRAJ5)
CAPKGRRALTF

SEQ ID NO: 466208 - protein, 16 aa, Homo sapiens
  CDR3 for beta chain variable domain of TCR clone 233104 (TRBV27, TRBJ2-2)
CASSLRPGGAPGELFF

SEQ ID NO: 466209 - protein, 14 aa, Homo sapiens
  CDR3 for alpha chain variable domain of TCR clone 233105 (TRAV12-2, TRAJ13)
CAVKKTGGYQKVTF

SEQ ID NO: 466210 - protein, 18 aa, Homo sapiens
  CDR3 for beta chain variable domain of TCR clone 233105 (TRBV7-9, TRBJ2-2)
CASSFRDLNAGNTGELFF

SEQ ID NO: 466211 - protein, 12 aa, Homo sapiens
  CDR3 for alpha chain variable domain of TCR clone 233106 (TRAV12-3, TRAJ31)
CAMSVPNARLMF

SEQ ID NO: 466212 - protein, 12 aa, Homo sapiens
  CDR3 for beta chain variable domain of TCR clone 233106 (TRBV11-2, TRBJ2-1)
CASSGQREGQFF

SEQ ID NO: 466213 - protein, 16 aa, Homo sapiens
  CDR3 for alpha chain variable domain of TCR clone 233107 (TRAV1-2, TRAJ10)
CAVRGVLTGGGNKLTF

SEQ ID NO: 466214 - protein, 13 aa, Homo sapiens
  CDR3 for beta chain variable domain of TCR clone 233107 (TRBV4-1, TRBJ2-1)
CASSQVNEYEQFV

SEQ ID NO: 466215 - protein, 14 aa, Homo sapiens
  CDR3 for alpha chain variable domain of TCR clone 233108 (TRAV3, TRAJ33)
CAVRDMGSNYQLIC

SEQ ID NO: 466216 - protein, 17 aa, Homo sapiens
  CDR3 for beta chain variable domain of TCR clone 233108 (TRBV19, TRBJ2-1)
CASSIWSAQPTHNEQFF

SEQ ID NO: 466217 - protein, 13 aa, Homo sapiens
  CDR3 for alpha chain variable domain of TCR clone 233109 (TRAV8-6, TRAJ8)
CAVSNTSFQKLVF

SEQ ID NO: 466218 - protein, 15 aa, Homo sapiens
  CDR3 for beta chain variable domain of TCR clone 233109 (TRBV28, TRBJ2-5)
CASSSGRTIQETQYF

SEQ ID NO: 466219 - protein, 11 aa, Homo sapiens
  CDR3 for alpha chain variable domain of TCR clone 233110 (TRAV17, TRAJ9)
CATTGGFKTIF

SEQ ID NO: 466220 - protein, 11 aa, Homo sapiens
  CDR3 for beta chain variable domain of TCR clone 233110 (TRBV29-1, TRBJ2-5)
CSEDRTWTQYF

SEQ ID NO: 466221 - protein, 15 aa, Homo sapiens
  CDR3 for alpha chain variable domain of TCR clone 233111 (TRAV3, TRAJ22)
CAVRDRGGSARQLTF

SEQ ID NO: 466222 - protein, 14 aa, Homo sapiens
  CDR3 for beta chain variable domain of TCR clone 233111 (TRBV7-9, TRBJ1-6)
CASSVMTDYSPLHF

SEQ ID NO: 466223 - protein, 12 aa, Homo sapiens
  CDR3 for alpha chain variable domain of TCR clone 233112 (TRAV21, TRAJ31)
CVLARNNARLMF

SEQ ID NO: 466224 - protein, 16 aa, Homo sapiens
  CDR3 for beta chain variable domain of TCR clone 233112 (TRBV27, TRBJ2-5)
CASSFGPGGTKETQYF

SEQ ID NO: 466225 - protein, 14 aa, Homo sapiens
  CDR3 for alpha chain variable domain of TCR clone 233113 (TRAV21, TRAJ48)
CAVRSNFGNVKFTF

SEQ ID NO: 466226 - protein, 16 aa, Homo sapiens
  CDR3 for beta chain variable domain of TCR clone 233113 (TRBV12-5, TRBJ2-5)
CASGPRTSGNQETQYF

SEQ ID NO: 466227 - protein, 16 aa, Homo sapiens
  CDR3 for alpha chain variable domain of TCR clone 233114 (TRAV17, TRAJ52)
CATSNAGGTSYGKLTF

SEQ ID NO: 466228 - protein, 14 aa, Homo sapiens
  CDR3 for beta chain variable domain of TCR clone 233114 (TRBV7-2, TRBJ1-1)
CASSFLTGTTEAFF

SEQ ID NO: 466229 - protein, 12 aa, Homo sapiens
  CDR3 for alpha chain variable domain of TCR clone 233115 (TRAV13-1, TRAJ21)
CAAKEGFNKFYF

SEQ ID NO: 466230 - protein, 14 aa, Homo sapiens
  CDR3 for beta chain variable domain of TCR clone 233115 (TRBV18, TRBJ2-7)
CASSPGGGAYEQYF

SEQ ID NO: 466231 - protein, 14 aa, Homo sapiens
  CDR3 for alpha chain variable domain of TCR clone 233116 (TRAV12-2, TRAJ32)
CAHPESGATNKLIF

SEQ ID NO: 466232 - protein, 14 aa, Homo sapiens
  CDR3 for beta chain variable domain of TCR clone 233116 (TRBV5-1, TRBJ2-7)
CASSRGESLYEQYF

SEQ ID NO: 466233 - protein, 17 aa, Homo sapiens
  CDR3 for alpha chain variable domain of TCR clone 233117 (TRAV26-1, TRAJ28)
CIVRALYSGSGSYQLTF

SEQ ID NO: 466234 - protein, 12 aa, Homo sapiens
  CDR3 for beta chain variable domain of TCR clone 233117 (TRBV12-4, TRBJ2-1)
CASRQTENEQFF

SEQ ID NO: 466235 - protein, 14 aa, Homo sapiens
  CDR3 for alpha chain variable domain of TCR clone 233118 (TRAV3, TRAJ34)
CAVRAPGNTDKLIL

SEQ ID NO: 466236 - protein, 17 aa, Homo sapiens
  CDR3 for beta chain variable domain of TCR clone 233118 (TRBV20-1, TRBJ2-7)
CSAAPGLARGISYEQYF

SEQ ID NO: 466237 - protein, 13 aa, Homo sapiens
  CDR3 for alpha chain variable domain of TCR clone 233119 (TRAV13-2, TRAJ48)
CAEMDFGNEKLTF

SEQ ID NO: 466238 - protein, 14 aa, Homo sapiens
  CDR3 for beta chain variable domain of TCR clone 233119 (TRBV19, TRBJ2-7)
CASSMRQGAIEQYF

SEQ ID NO: 466239 - protein, 16 aa, Homo sapiens
  CDR3 for alpha chain variable domain of TCR clone 233120 (TRAV12-3, TRAJ53)
CAMSPGSGGSNSKLTF

SEQ ID NO: 466240 - protein, 15 aa, Homo sapiens
  CDR3 for beta chain variable domain of TCR clone 233120 (TRBV25-1, TRBJ1-4)
CASSKRIATNEKLFF

SEQ ID NO: 466241 - protein, 15 aa, Homo sapiens
  CDR3 for alpha chain variable domain of TCR clone 233121 (TRAV12-3, TRAJ11)
CAMSEENSGYSTLTF

SEQ ID NO: 466242 - protein, 15 aa, Homo sapiens
  CDR3 for beta chain variable domain of TCR clone 233121 (TRBV7-9, TRBJ1-6)
CASSSPGRGNSPLHF

SEQ ID NO: 466243 - protein, 14 aa, Homo sapiens
  CDR3 for alpha chain variable domain of TCR clone 233122 (TRAV23/DV6, TRAJ37)
CAASTSSNTGKLIF

SEQ ID NO: 466244 - protein, 14 aa, Homo sapiens
  CDR3 for beta chain variable domain of TCR clone 233122 (TRBV7-7, TRBJ2-2)
CATRQDSDTGELFF

SEQ ID NO: 466245 - protein, 13 aa, Homo sapiens
  CDR3 for alpha chain variable domain of TCR clone 233123 (TRAV27, TRAJ6)
CAGGTRGSYIPTF

SEQ ID NO: 466246 - protein, 14 aa, Homo sapiens
  CDR3 for beta chain variable domain of TCR clone 233123 (TRBV11-2, TRBJ2-1)
CASSLSGPYNEQFF

SEQ ID NO: 466247 - protein, 13 aa, Homo sapiens
  CDR3 for alpha chain variable domain of TCR clone 233124 (TRAV3, TRAJ4)
CAVRDGGYNKMIL

SEQ ID NO: 466248 - protein, 14 aa, Homo sapiens
  CDR3 for beta chain variable domain of TCR clone 233124 (TRBV12-4, TRBJ1-2)
CASSSSAAGSSDAF

SEQ ID NO: 466249 - protein, 15 aa, Homo sapiens
  CDR3 for alpha chain variable domain of TCR clone 233125 (TRAV12-1, TRAJ45)
CVVLSGGGGADGLTF

SEQ ID NO: 466250 - protein, 16 aa, Homo sapiens
  CDR3 for beta chain variable domain of TCR clone 233125 (TRBV7-3, TRBJ2-2)
CASSLKRGTLSGELFF

SEQ ID NO: 466251 - protein, 11 aa, Homo sapiens
  CDR3 for alpha chain variable domain of TCR clone 233126 (TRAV3, TRAJ21)
CAVGNFNKFYF

SEQ ID NO: 466252 - protein, 14 aa, Homo sapiens
  CDR3 for beta chain variable domain of TCR clone 233126 (TRBV12-4, TRBJ1-3)
CASTLTGAGNTIYF

SEQ ID NO: 466253 - protein, 15 aa, Homo sapiens
  CDR3 for alpha chain variable domain of TCR clone 233127 (TRAV13-1, TRAJ52)
CALRTGGTSYGKLTF

SEQ ID NO: 466254 - protein, 14 aa, Homo sapiens
  CDR3 for beta chain variable domain of TCR clone 233127 (TRBV20-1, TRBJ2-5)
FSASDSGSGETQYF

SEQ ID NO: 466255 - protein, 13 aa, Homo sapiens
  CDR3 for alpha chain variable domain of TCR clone 233128 (TRAV3, TRAJ21)
CAVREPDFNKFYF

SEQ ID NO: 466256 - protein, 16 aa, Homo sapiens
  CDR3 for beta chain variable domain of TCR clone 233128 (TRBV24-1, TRBJ2-1)
CATSGVAGANYNEQFF

SEQ ID NO: 466257 - protein, 16 aa, Homo sapiens
  CDR3 for alpha chain variable domain of TCR clone 233129 (TRAV8-3, TRAJ28)
CAVPPHRGAGSYQLTF

SEQ ID NO: 466258 - protein, 13 aa, Homo sapiens
  CDR3 for beta chain variable domain of TCR clone 233129 (TRBV7-6, TRBJ2-3)
CASSLRSDNTQYF

SEQ ID NO: 466259 - protein, 13 aa, Homo sapiens
  CDR3 for alpha chain variable domain of TCR clone 233130 (TRAV12-2, TRAJ15)
CAVFNQAGTALIF

SEQ ID NO: 466260 - protein, 13 aa, Homo sapiens
  CDR3 for beta chain variable domain of TCR clone 233130 (TRBV7-8, TRBJ2-3)
CASSPGSTDTQYF

SEQ ID NO: 466261 - protein, 18 aa, Homo sapiens
  CDR3 for alpha chain variable domain of TCR clone 233131 (TRAV26-1, TRAJ23)
CIVRVGLEVWNQGGKLIF

SEQ ID NO: 466262 - protein, 14 aa, Homo sapiens
  CDR3 for beta chain variable domain of TCR clone 233131 (TRBV12-4, TRBJ2-3)
CASSGQGSTDTQYF

SEQ ID NO: 466263 - protein, 13 aa, Homo sapiens
  CDR3 for alpha chain variable domain of TCR clone 233132 (TRAV13-1, TRAJ21)
CAASIYNFNKFYF

SEQ ID NO: 466264 - protein, 13 aa, Homo sapiens
  CDR3 for beta chain variable domain of TCR clone 233132 (TRBV7-9, TRBJ1-2)
CASSLRQNYGYTF

SEQ ID NO: 466265 - protein, 10 aa, Homo sapiens
  CDR3 for alpha chain variable domain of TCR clone 233133 (TRAV12-3, TRAJ34)
CAMSADKLIF

SEQ ID NO: 466266 - protein, 15 aa, Homo sapiens
  CDR3 for beta chain variable domain of TCR clone 233133 (TRBV27, TRBJ2-1)
CASSNGGGSANEQFF

SEQ ID NO: 466267 - protein, 14 aa, Homo sapiens
  CDR3 for alpha chain variable domain of TCR clone 233134 (TRAV27, TRAJ58)
CAGDGETSSSRLTF

SEQ ID NO: 466268 - protein, 13 aa, Homo sapiens
  CDR3 for beta chain variable domain of TCR clone 233134 (TRBV7-7, TRBJ2-5)
CASSRSGQETQYF

SEQ ID NO: 466269 - protein, 15 aa, Homo sapiens
  CDR3 for alpha chain variable domain of TCR clone 233135 (TRAV34, TRAJ38)
CGADFTPGNNRKLIW

SEQ ID NO: 466270 - protein, 17 aa, Homo sapiens
  CDR3 for beta chain variable domain of TCR clone 233135 (TRBV4-2, TRBJ2-5)
CASSQDAAGGPVETQYF

SEQ ID NO: 466271 - protein, 15 aa, Homo sapiens
  CDR3 for alpha chain variable domain of TCR clone 233136 (TRAV26-1, TRAJ53)
CIVRVEGGSNYKLTF

SEQ ID NO: 466272 - protein, 14 aa, Homo sapiens
  CDR3 for beta chain variable domain of TCR clone 233136 (TRBV4-3, TRBJ2-1)
CASSQARWRGEQFF

SEQ ID NO: 466273 - protein, 13 aa, Homo sapiens
  CDR3 for alpha chain variable domain of TCR clone 233137 (TRAV2, TRAJ15)
CAVASQAGTALIF

SEQ ID NO: 466274 - protein, 15 aa, Homo sapiens
  CDR3 for beta chain variable domain of TCR clone 233137 (TRBV2, TRBJ2-1)
CASSELAGGHNEQFF

SEQ ID NO: 466275 - protein, 15 aa, Homo sapiens
  CDR3 for alpha chain variable domain of TCR clone 233138 (TRAV12-2, TRAJ40)
CAVNGGGGSNHKLTF

SEQ ID NO: 466276 - protein, 14 aa, Homo sapiens
  CDR3 for beta chain variable domain of TCR clone 233138 (TRBV25-1, TRBJ1-1)
CASTHLGGNTEAFF

SEQ ID NO: 466277 - protein, 14 aa, Homo sapiens
  CDR3 for alpha chain variable domain of TCR clone 233139 (TRAV17, TRAJ6)
CATDASGGSYIPTF

SEQ ID NO: 466278 - protein, 11 aa, Homo sapiens
  CDR3 for beta chain variable domain of TCR clone 233139 (TRBV6-3, TRBJ2-3)
CATGQADTQYF

SEQ ID NO: 466279 - protein, 15 aa, Homo sapiens
  CDR3 for alpha chain variable domain of TCR clone 233140 (TRAV26-1, TRAJ37)
CIVRVATGNTGKLIF

SEQ ID NO: 466280 - protein, 11 aa, Homo sapiens
  CDR3 for beta chain variable domain of TCR clone 233140 (TRBV12-4, TRBJ2-3)
CASTATDTQYF

SEQ ID NO: 466281 - protein, 14 aa, Homo sapiens
  CDR3 for alpha chain variable domain of TCR clone 233141 (TRAV8-6, TRAJ15)
CAVSEDQAGTALIF

SEQ ID NO: 466282 - protein, 15 aa, Homo sapiens
  CDR3 for beta chain variable domain of TCR clone 233141 (TRBV4-1, TRBJ1-2)
CASSQGQGAAYGYTF

SEQ ID NO: 466283 - protein, 13 aa, Homo sapiens
  CDR3 for alpha chain variable domain of TCR clone 233142 (TRAV17, TRAJ11)
CATAGSGYSTLTF

SEQ ID NO: 466284 - protein, 14 aa, Homo sapiens
  CDR3 for beta chain variable domain of TCR clone 233142 (TRBV7-2, TRBJ2-7)
CASSPKTSFYEQYF

SEQ ID NO: 466285 - protein, 11 aa, Homo sapiens
  CDR3 for alpha chain variable domain of TCR clone 233143 (TRAV8-3, TRAJ18)
CAVGGRQRLNP

SEQ ID NO: 466286 - protein, 13 aa, Homo sapiens
  CDR3 for beta chain variable domain of TCR clone 233143 (TRBV6-1, TRBJ1-1)
CASSRQGNTEAFF

SEQ ID NO: 466287 - protein, 15 aa, Homo sapiens
  CDR3 for alpha chain variable domain of TCR clone 233144 (TRAV8-3, TRAJ13)
CAVGAYPSGGYQKVT

SEQ ID NO: 466288 - protein, 15 aa, Homo sapiens
  CDR3 for beta chain variable domain of TCR clone 233144 (TRBV19, TRBJ1-5)
CASSIVWADNQPQHF

SEQ ID NO: 466289 - protein, 17 aa, Homo sapiens
  CDR3 for alpha chain variable domain of TCR clone 233145 (TRAV3, TRAJ6)
CAVRYGPRAGGSYIPTF

SEQ ID NO: 466290 - protein, 14 aa, Homo sapiens
  CDR3 for beta chain variable domain of TCR clone 233145 (TRBV7-2, TRBJ2-7)
CASSPKTSFHEQYF

SEQ ID NO: 466291 - protein, 11 aa, Homo sapiens
  CDR3 for alpha chain variable domain of TCR clone 233146 (TRAV21, TRAJ48)
CAVDGHEKLTF

SEQ ID NO: 466292 - protein, 16 aa, Homo sapiens
  CDR3 for beta chain variable domain of TCR clone 233146 (TRBV12-4, TRBJ1-5)
CASSSGPRGSNPPQHF

SEQ ID NO: 466293 - protein, 15 aa, Homo sapiens
  CDR3 for alpha chain variable domain of TCR clone 233147 (TRAV26-1, TRAJ24)
CINVGATDSWGKLQF

SEQ ID NO: 466294 - protein, 12 aa, Homo sapiens
  CDR3 for beta chain variable domain of TCR clone 233147 (TRBV11-2, TRBJ2-2)
CASSLGGGELFF

SEQ ID NO: 466295 - protein, 18 aa, Homo sapiens
  CDR3 for alpha chain variable domain of TCR clone 233148 (TRAV21, TRAJ52)
CAVRPSPAGGTSYGKLTF

SEQ ID NO: 466296 - protein, 15 aa, Homo sapiens
  CDR3 for beta chain variable domain of TCR clone 233148 (TRBV7-3, TRBJ2-1)
CASSLDGNSYNEQFF

SEQ ID NO: 466297 - protein, 17 aa, Homo sapiens
  CDR3 for alpha chain variable domain of TCR clone 233149 (TRAV26-1, TRAJ58)
CIVRVGAEETSGSRLTF

SEQ ID NO: 466298 - protein, 17 aa, Homo sapiens
  CDR3 for beta chain variable domain of TCR clone 233149 (TRBV7-9, TRBJ1-1)
CASSLGIAGAENTEAFF

SEQ ID NO: 466299 - protein, 18 aa, Homo sapiens
  CDR3 for alpha chain variable domain of TCR clone 233150 (TRAV12-3, TRAJ52)
CAMSVGGAGGTSYGKMTL

SEQ ID NO: 466300 - protein, 15 aa, Homo sapiens
  CDR3 for beta chain variable domain of TCR clone 233150 (TRBV27, TRBJ1-6)
CASSFDRGLGSPLHF

SEQ ID NO: 466301 - protein, 15 aa, Homo sapiens
  CDR3 for alpha chain variable domain of TCR clone 233151 (TRAV30, TRAJ57)
CGTAIPQGGSEKLVF

SEQ ID NO: 466302 - protein, 13 aa, Homo sapiens
  CDR3 for beta chain variable domain of TCR clone 233151 (TRBV7-9, TRBJ1-2)
CASSASNFWGYTF

SEQ ID NO: 466303 - protein, 12 aa, Homo sapiens
  CDR3 for alpha chain variable domain of TCR clone 233152 (TRAV21, TRAJ13)
PGPSGGYQKVTF

SEQ ID NO: 466304 - protein, 14 aa, Homo sapiens
  CDR3 for beta chain variable domain of TCR clone 233152 (TRBV25-1, TRBJ1-1)
CASTHLGGNTEAFF

SEQ ID NO: 466305 - protein, 11 aa, Homo sapiens
  CDR3 for alpha chain variable domain of TCR clone 233153 (TRAV12-3, TRAJ27)
CAMANAGKSTF

SEQ ID NO: 466306 - protein, 14 aa, Homo sapiens
  CDR3 for beta chain variable domain of TCR clone 233153 (TRBV7-3, TRBJ2-1)
CASSLAGGTNEQFF

SEQ ID NO: 466307 - protein, 14 aa, Homo sapiens
  CDR3 for alpha chain variable domain of TCR clone 233154 (TRAV2, TRAJ9)
CAVEDRSGGFKTIF

SEQ ID NO: 466308 - protein, 12 aa, Homo sapiens
  CDR3 for beta chain variable domain of TCR clone 233154 (TRBV5-1, TRBJ1-2)
CASSQDTYGYTF

SEQ ID NO: 466309 - protein, 14 aa, Homo sapiens
  CDR3 for alpha chain variable domain of TCR clone 233155 (TRAV29/DV5, TRAJ13)
CAASLSGGYQKVTF

SEQ ID NO: 466310 - protein, 14 aa, Homo sapiens
  CDR3 for beta chain variable domain of TCR clone 233155 (TRBV11-2, TRBJ2-7)
CASSLGAGAYEQYF

SEQ ID NO: 466311 - protein, 12 aa, Homo sapiens
  CDR3 for alpha chain variable domain of TCR clone 233156 (TRAV8-3, TRAJ20)
CAVGGGDDKLSF

SEQ ID NO: 466312 - protein, 14 aa, Homo sapiens
  CDR3 for beta chain variable domain of TCR clone 233156 (TRBV5-1, TRBJ2-7)
CASSRGESLYEQYF

SEQ ID NO: 466313 - protein, 14 aa, Homo sapiens
  CDR3 for alpha chain variable domain of TCR clone 233157 (TRAV8-1, TRAJ5)
CAVRTATGRRALTF

SEQ ID NO: 466314 - protein, 14 aa, Homo sapiens
  CDR3 for beta chain variable domain of TCR clone 233157 (TRBV7-8, TRBJ2-3)
CASSFPDGQDTQYF

SEQ ID NO: 466315 - protein, 14 aa, Homo sapiens
  CDR3 for alpha chain variable domain of TCR clone 233158 (TRAV13-1, TRAJ35)
CAASKGGFGNVLHC

SEQ ID NO: 466316 - protein, 17 aa, Homo sapiens
  CDR3 for beta chain variable domain of TCR clone 233158 (TRBV2, TRBJ2-3)
CASSLSRVAGGRNTQYF

SEQ ID NO: 466317 - protein, 15 aa, Homo sapiens
  CDR3 for alpha chain variable domain of TCR clone 233159 (TRAV35, TRAJ50)
CAGQLRKTSYDKVRF

SEQ ID NO: 466318 - protein, 12 aa, Homo sapiens
  CDR3 for beta chain variable domain of TCR clone 233159 (TRBV5-1, TRBJ2-5)
CASSLGLGTQYF

SEQ ID NO: 466319 - protein, 13 aa, Homo sapiens
  CDR3 for alpha chain variable domain of TCR clone 233160 (TRAV12-3, TRAJ36)
CAMRRPGANNLFF

SEQ ID NO: 466320 - protein, 18 aa, Homo sapiens
  CDR3 for beta chain variable domain of TCR clone 233160 (TRBV11-1, TRBJ2-2)
CASSRKAGGPGNTGELFF

SEQ ID NO: 466321 - protein, 14 aa, Homo sapiens
  CDR3 for alpha chain variable domain of TCR clone 233161 (TRAV1-2, TRAJ6)
CAVSLSGGSYIPTF

SEQ ID NO: 466322 - protein, 17 aa, Homo sapiens
  CDR3 for beta chain variable domain of TCR clone 233161 (TRBV11-2, TRBJ2-1)
CASSLYPPGVEYNEQFF

SEQ ID NO: 466323 - protein, 14 aa, Homo sapiens
  CDR3 for alpha chain variable domain of TCR clone 233162 (TRAV1-2, TRAJ16)
CAVNRFSDGQKLLF

SEQ ID NO: 466324 - protein, 14 aa, Homo sapiens
  CDR3 for beta chain variable domain of TCR clone 233162 (TRBV4-2, TRBJ2-7)
CASSQDGRKGEQYF

SEQ ID NO: 466325 - protein, 14 aa, Homo sapiens
  CDR3 for alpha chain variable domain of TCR clone 233163 (TRAV20, TRAJ20)
CAVRRGYNDYKLSF

SEQ ID NO: 466326 - protein, 13 aa, Homo sapiens
  CDR3 for beta chain variable domain of TCR clone 233163 (TRBV10-3, TRBJ2-7)
CASKLAVNYEQYF

SEQ ID NO: 466327 - protein, 15 aa, Homo sapiens
  CDR3 for alpha chain variable domain of TCR clone 233164 (TRAV3, TRAJ22)
CALRDRGGSARQLTF

SEQ ID NO: 466328 - protein, 12 aa, Homo sapiens
  CDR3 for beta chain variable domain of TCR clone 233164 (TRBV28, TRBJ2-1)
CASSVQINEQFF

SEQ ID NO: 466329 - protein, 14 aa, Homo sapiens
  CDR3 for alpha chain variable domain of TCR clone 233165 (TRAV8-6, TRAJ48)
CAVRTNFGNEKLTF

SEQ ID NO: 466330 - protein, 14 aa, Homo sapiens
  CDR3 for beta chain variable domain of TCR clone 233165 (TRBV7-3, TRBJ1-1)
CASSLKGGNTEAFF

SEQ ID NO: 466331 - protein, 12 aa, Homo sapiens
  CDR3 for alpha chain variable domain of TCR clone 233166 (TRAV38-1, TRAJ30)
CAFLGRDDKIIF

SEQ ID NO: 466332 - protein, 11 aa, Homo sapiens
  CDR3 for beta chain variable domain of TCR clone 233166 (TRBV19, TRBJ1-1)
CASSTTGQAFF

SEQ ID NO: 466333 - protein, 12 aa, Homo sapiens
  CDR3 for alpha chain variable domain of TCR clone 233167 (TRAV29/DV5, TRAJ15)
CASNQAGTALIF

SEQ ID NO: 466334 - protein, 15 aa, Homo sapiens
  CDR3 for beta chain variable domain of TCR clone 233167 (TRBV4-1, TRBJ2-5)
CASSQWVLYQETQYF

SEQ ID NO: 466335 - protein, 15 aa, Homo sapiens
  CDR3 for alpha chain variable domain of TCR clone 233168 (TRAV3, TRAJ29)
CAVRDRNSGNTPLVF

SEQ ID NO: 466336 - protein, 16 aa, Homo sapiens
  CDR3 for beta chain variable domain of TCR clone 233168 (TRBV4-1, TRBJ2-5)
CASSQTVYGDQETQYF

SEQ ID NO: 466337 - protein, 13 aa, Homo sapiens
  CDR3 for alpha chain variable domain of TCR clone 233169 (TRAV3, TRAJ15)
CAVRDQAGTALIF

SEQ ID NO: 466338 - protein, 17 aa, Homo sapiens
  CDR3 for beta chain variable domain of TCR clone 233169 (TRBV11-2, TRBJ2-1)
CASSLALAEFGRNEQFF

SEQ ID NO: 466339 - protein, 14 aa, Homo sapiens
  CDR3 for alpha chain variable domain of TCR clone 233170 (TRAV4, TRAJ30)
CLVGDMNRDDKIIF

SEQ ID NO: 466340 - protein, 16 aa, Homo sapiens
  CDR3 for beta chain variable domain of TCR clone 233170 (TRBV20-1, TRBJ1-4)
CSAPGQGLFTNEKLFF

SEQ ID NO: 466341 - protein, 16 aa, Homo sapiens
  CDR3 for alpha chain variable domain of TCR clone 233171 (TRAV8-4, TRAJ5)
CAVSPLTDTGRRALTF

SEQ ID NO: 466342 - protein, 14 aa, Homo sapiens
  CDR3 for beta chain variable domain of TCR clone 233171 (TRBV19, TRBJ1-6)
CASSTDGWSSPLHF

SEQ ID NO: 466343 - protein, 15 aa, Homo sapiens
  CDR3 for alpha chain variable domain of TCR clone 233172 (TRAV8-3, TRAJ45)
CASSYSGGGADGLTF

SEQ ID NO: 466344 - protein, 16 aa, Homo sapiens
  CDR3 for beta chain variable domain of TCR clone 233172 (TRBV28, TRBJ2-7)
CASSSGTSGKGYEQYF

SEQ ID NO: 466345 - protein, 16 aa, Homo sapiens
  CDR3 for alpha chain variable domain of TCR clone 233173 (TRAV8-3, TRAJ42)
CAVGEGNGGSQGNLIF

SEQ ID NO: 466346 - protein, 14 aa, Homo sapiens
  CDR3 for beta chain variable domain of TCR clone 233173 (TRBV28, TRBJ1-4)
CASSFGTFDEKLFF

SEQ ID NO: 466347 - protein, 14 aa, Homo sapiens
  CDR3 for alpha chain variable domain of TCR clone 233174 (TRAV21, TRAJ28)
CAVGSGAGSYHLTL

SEQ ID NO: 466348 - protein, 14 aa, Homo sapiens
  CDR3 for beta chain variable domain of TCR clone 233174 (TRBV18, TRBJ1-4)
CASSPGPNGEKLFF

SEQ ID NO: 466349 - protein, 13 aa, Homo sapiens
  CDR3 for alpha chain variable domain of TCR clone 233175 (TRAV6, TRAJ5)
CAPKATGRRALTF

SEQ ID NO: 466350 - protein, 13 aa, Homo sapiens
  CDR3 for beta chain variable domain of TCR clone 233175 (TRBV20-1, TRBJ2-7)
CSASPCSSYEQYF

SEQ ID NO: 466351 - protein, 13 aa, Homo sapiens
  CDR3 for alpha chain variable domain of TCR clone 233176 (TRAV12-1, TRAJ40)
CVVPTSGTYKYIF

SEQ ID NO: 466352 - protein, 15 aa, Homo sapiens
  CDR3 for beta chain variable domain of TCR clone 233176 (TRBV7-9, TRBJ1-6)
CASSSPGRGNSPLHF

SEQ ID NO: 466353 - protein, 14 aa, Homo sapiens
  CDR3 for alpha chain variable domain of TCR clone 233177 (TRAV3, TRAJ9)
CAVRLNTGGFKTIF

SEQ ID NO: 466354 - protein, 16 aa, Homo sapiens
  CDR3 for beta chain variable domain of TCR clone 233177 (TRBV12-5, TRBJ2-5)
CASGPRTGGNQETRYF

SEQ ID NO: 466355 - protein, 11 aa, Homo sapiens
  CDR3 for alpha chain variable domain of TCR clone 233178 (TRAV2, TRAJ13)
CASGGYQKVTF

SEQ ID NO: 466356 - protein, 14 aa, Homo sapiens
  CDR3 for beta chain variable domain of TCR clone 233178 (TRBV4-2, TRBJ2-1)
CASDLDRAYNEQFF

SEQ ID NO: 466357 - protein, 14 aa, Homo sapiens
  CDR3 for alpha chain variable domain of TCR clone 233179 (TRAV35, TRAJ33)
CAGSSQDSNYTLIW

SEQ ID NO: 466358 - protein, 15 aa, Homo sapiens
  CDR3 for beta chain variable domain of TCR clone 233179 (TRBV20-1, TRBJ2-7)
CSAESGTSGAYEQYF

SEQ ID NO: 466359 - protein, 11 aa, Homo sapiens
  CDR3 for alpha chain variable domain of TCR clone 233180 (TRAV2, TRAJ13)
CASVVYQKVTF

SEQ ID NO: 466360 - protein, 16 aa, Homo sapiens
  CDR3 for beta chain variable domain of TCR clone 233180 (TRBV6-1, TRBJ2-5)
CASSETLDRGAETQYF

SEQ ID NO: 466361 - protein, 13 aa, Homo sapiens
  CDR3 for alpha chain variable domain of TCR clone 233181 (TRAV24, TRAJ49)
CASPQNTGNQFYF

SEQ ID NO: 466362 - protein, 13 aa, Homo sapiens
  CDR3 for beta chain variable domain of TCR clone 233181 (TRBV12-5, TRBJ2-3)
CASGDRQSDTQYF

SEQ ID NO: 466363 - protein, 10 aa, Homo sapiens
  CDR3 for alpha chain variable domain of TCR clone 233182 (TRAV13-1, TRAJ43)
CAASKNDMRF

SEQ ID NO: 466364 - protein, 13 aa, Homo sapiens
  CDR3 for beta chain variable domain of TCR clone 233182 (TRBV20-1, TRBJ1-5)
CSARTGINQPQHF

SEQ ID NO: 466365 - protein, 15 aa, Homo sapiens
  CDR3 for alpha chain variable domain of TCR clone 233183 (TRAV38-1, TRAJ57)
CAFMDSQGGSEKLVF

SEQ ID NO: 466366 - protein, 16 aa, Homo sapiens
  CDR3 for beta chain variable domain of TCR clone 233183 (TRBV10-3, TRBJ2-1)
CAIRGGGMGDYNEQFF

SEQ ID NO: 466367 - protein, 12 aa, Homo sapiens
  CDR3 for alpha chain variable domain of TCR clone 233184 (TRAV8-1, TRAJ31)
CAVINNNARLML

SEQ ID NO: 466368 - protein, 15 aa, Homo sapiens
  CDR3 for beta chain variable domain of TCR clone 233184 (TRBV20-1, TRBJ2-2)
CSARGGQGNTGELFF

SEQ ID NO: 466369 - protein, 13 aa, Homo sapiens
  CDR3 for alpha chain variable domain of TCR clone 233185 (TRAV13-2, TRAJ48)
CAEMDFGNEKLTF

SEQ ID NO: 466370 - protein, 13 aa, Homo sapiens
  CDR3 for beta chain variable domain of TCR clone 233185 (TRBV7-2, TRBJ1-4)
CASSLAGLEKLFF

SEQ ID NO: 466371 - protein, 11 aa, Homo sapiens
  CDR3 for alpha chain variable domain of TCR clone 233186 (TRAV1-2, TRAJ40)
CAVPGTYKYNF

SEQ ID NO: 466372 - protein, 13 aa, Homo sapiens
  CDR3 for beta chain variable domain of TCR clone 233186 (TRBV27, TRBJ1-4)
CASSLMGDEKLFF

SEQ ID NO: 466373 - protein, 14 aa, Homo sapiens
  CDR3 for alpha chain variable domain of TCR clone 233187 (TRAV29/DV5, TRAJ36)
CAARRKTGANNLFF

SEQ ID NO: 466374 - protein, 13 aa, Homo sapiens
  CDR3 for beta chain variable domain of TCR clone 233187 (TRBV19, TRBJ1-4)
CASPTQGNEKLFF

SEQ ID NO: 466375 - protein, 12 aa, Homo sapiens
  CDR3 for alpha chain variable domain of TCR clone 233188 (TRAV21, TRAJ39)
CAADNADNMLTF

SEQ ID NO: 466376 - protein, 13 aa, Homo sapiens
  CDR3 for beta chain variable domain of TCR clone 233188 (TRBV12-4, TRBJ1-1)
CASSPGTGFEAFF

SEQ ID NO: 466377 - protein, 11 aa, Homo sapiens
  CDR3 for alpha chain variable domain of TCR clone 233189 (TRAV21, TRAJ34)
CAHYNTDKLIF

SEQ ID NO: 466378 - protein, 13 aa, Homo sapiens
  CDR3 for beta chain variable domain of TCR clone 233189 (TRBV7-6, TRBJ1-2)
CASSVGADYGYTF

SEQ ID NO: 466379 - protein, 12 aa, Homo sapiens
  CDR3 for alpha chain variable domain of TCR clone 233190 (TRAV9-2, TRAJ40)
CTLTSGTYKYIF

SEQ ID NO: 466380 - protein, 16 aa, Homo sapiens
  CDR3 for beta chain variable domain of TCR clone 233190 (TRBV7-7, TRBJ2-2)
CASSPRTGLNTGELFF

SEQ ID NO: 466381 - protein, 17 aa, Homo sapiens
  CDR3 for alpha chain variable domain of TCR clone 233191 (TRAV35, TRAJ28)
CAGLQIYSGAGSYQPTL

SEQ ID NO: 466382 - protein, 15 aa, Homo sapiens
  CDR3 for beta chain variable domain of TCR clone 233191 (TRBV2, TRBJ1-2)
CASSEIGGANYGYTF

SEQ ID NO: 466383 - protein, 17 aa, Homo sapiens
  CDR3 for alpha chain variable domain of TCR clone 233192 (TRAV26-1, TRAJ37)
CIVRVITVSSNTGKLIF

SEQ ID NO: 466384 - protein, 16 aa, Homo sapiens
  CDR3 for beta chain variable domain of TCR clone 233192 (TRBV7-8, TRBJ2-6)
CASRVGDSSGANVLTF

SEQ ID NO: 466385 - protein, 14 aa, Homo sapiens
  CDR3 for alpha chain variable domain of TCR clone 233193 (TRAV1-2, TRAJ8)
CAVREDTGFQKLVF

SEQ ID NO: 466386 - protein, 13 aa, Homo sapiens
  CDR3 for beta chain variable domain of TCR clone 233193 (TRBV10-3, TRBJ2-7)
CASKLAVNYEQYY

SEQ ID NO: 466387 - protein, 14 aa, Homo sapiens
  CDR3 for alpha chain variable domain of TCR clone 233194 (TRAV8-3, TRAJ4)
CAVCAAGGYNKLIF

SEQ ID NO: 466388 - protein, 15 aa, Homo sapiens
  CDR3 for beta chain variable domain of TCR clone 233194 (TRBV13, TRBJ2-1)
CASSLLSGLNNEQFF

SEQ ID NO: 466389 - protein, 15 aa, Homo sapiens
  CDR3 for alpha chain variable domain of TCR clone 233195 (TRAV8-3, TRAJ41)
CAVGSNSNSGYAINF

SEQ ID NO: 466390 - protein, 17 aa, Homo sapiens
  CDR3 for beta chain variable domain of TCR clone 233195 (TRBV25-1, TRBJ2-1)
CASSAYGQGRGVYEQFF

SEQ ID NO: 466391 - protein, 14 aa, Homo sapiens
  CDR3 for alpha chain variable domain of TCR clone 233196 (TRAV26-1, TRAJ38)
CIADNAGNNRKLIG

SEQ ID NO: 466392 - protein, 17 aa, Homo sapiens
  CDR3 for beta chain variable domain of TCR clone 233196 (TRBV15, TRBJ1-1)
CATSRVGGADGDTEAFF

SEQ ID NO: 466393 - protein, 11 aa, Homo sapiens
  CDR3 for alpha chain variable domain of TCR clone 233197 (TRAV23/DV6, TRAJ58)
CAARLLRGETS

SEQ ID NO: 466394 - protein, 14 aa, Homo sapiens
  CDR3 for beta chain variable domain of TCR clone 233197 (TRBV7-2, TRBJ2-1)
CASSPGLAGNEQFF

SEQ ID NO: 466395 - protein, 20 aa, Homo sapiens
  CDR3 for alpha chain variable domain of TCR clone 233198 (TRAV21, TRAJ30)
CAVRRRMTRSSLEKGHDFIF

SEQ ID NO: 466396 - protein, 13 aa, Homo sapiens
  CDR3 for beta chain variable domain of TCR clone 233198 (TRBV7-3, TRBJ1-1)
CASSQDWGAEAFF

SEQ ID NO: 466397 - protein, 10 aa, Homo sapiens
  CDR3 for alpha chain variable domain of TCR clone 233199 (TRAV23/DV6, TRAJ31)
CARGGARLMF

SEQ ID NO: 466398 - protein, 15 aa, Homo sapiens
  CDR3 for beta chain variable domain of TCR clone 233199 (TRBV7-8, TRBJ2-1)
CASSLADSLYNEQFF

SEQ ID NO: 466399 - protein, 12 aa, Homo sapiens
  CDR3 for alpha chain variable domain of TCR clone 233200 (TRAV12-1, TRAJ40)
CVVYSGTYKYIF

SEQ ID NO: 466400 - protein, 11 aa, Homo sapiens
  CDR3 for beta chain variable domain of TCR clone 233200 (TRBV6-3, TRBJ2-3)
CATGQADTQYF

SEQ ID NO: 466401 - protein, 11 aa, Homo sapiens
  CDR3 for alpha chain variable domain of TCR clone 233201 (TRAV2, TRAJ13)
CASGGYQKVTF

SEQ ID NO: 466402 - protein, 20 aa, Homo sapiens
  CDR3 for beta chain variable domain of TCR clone 233201 (TRBV11-2, TRBJ1-6)
CASSLVFATGGSVHPSTLGT

SEQ ID NO: 466403 - protein, 15 aa, Homo sapiens
  CDR3 for alpha chain variable domain of TCR clone 233202 (TRAV12-3, TRAJ6)
CAMSATTGGSYIPTF

SEQ ID NO: 466404 - protein, 14 aa, Homo sapiens
  CDR3 for beta chain variable domain of TCR clone 233202 (TRBV5-8, TRBJ2-1)
CASRLRGGANEQFF

SEQ ID NO: 466405 - protein, 15 aa, Homo sapiens
  CDR3 for alpha chain variable domain of TCR clone 233203 (TRAV2, TRAJ13)
CCLLLCFRGYQKVTF

SEQ ID NO: 466406 - protein, 14 aa, Homo sapiens
  CDR3 for beta chain variable domain of TCR clone 233203 (TRBV18, TRBJ1-2)
CASSPDRVVYGYTF

SEQ ID NO: 466407 - protein, 14 aa, Homo sapiens
  CDR3 for alpha chain variable domain of TCR clone 233204 (TRAV1-2, TRAJ16)
CAVNRFSDGQKLLF

SEQ ID NO: 466408 - protein, 13 aa, Homo sapiens
  CDR3 for beta chain variable domain of TCR clone 233204 (TRBV4-2, TRBJ1-1)
CASIQAGNTEAFF

SEQ ID NO: 466409 - protein, 16 aa, Homo sapiens
  CDR3 for alpha chain variable domain of TCR clone 233205 (TRAV3, TRAJ37)
CALRDSGSGNTGKLIF

SEQ ID NO: 466410 - protein, 12 aa, Homo sapiens
  CDR3 for beta chain variable domain of TCR clone 233205 (TRBV7-2, TRBJ2-5)
CASSLYQETQYF

SEQ ID NO: 466411 - protein, 13 aa, Homo sapiens
  CDR3 for alpha chain variable domain of TCR clone 233206 (TRAV3, TRAJ21)
CAVSEPDFNKFYF

SEQ ID NO: 466412 - protein, 17 aa, Homo sapiens
  CDR3 for beta chain variable domain of TCR clone 233206 (TRBV7-8, TRBJ2-6)
CASSAGTGGAGANVLTF

SEQ ID NO: 466413 - protein, 15 aa, Homo sapiens
  CDR3 for alpha chain variable domain of TCR clone 233207 (TRAV3, TRAJ20)
CAVRDSRSNDYKLSF

SEQ ID NO: 466414 - protein, 14 aa, Homo sapiens
  CDR3 for beta chain variable domain of TCR clone 233207 (TRBV20-1, TRBJ2-7)
SSARRGNGIYEQYF

SEQ ID NO: 466415 - protein, 14 aa, Homo sapiens
  CDR3 for alpha chain variable domain of TCR clone 233208 (TRAV1-2, TRAJ8)
CAVREDTGFQKLVF

SEQ ID NO: 466416 - protein, 15 aa, Homo sapiens
  CDR3 for beta chain variable domain of TCR clone 233208 (TRBV11-2, TRBJ2-1)
CAGSSPSTRYNEQFF

SEQ ID NO: 466417 - protein, 16 aa, Homo sapiens
  CDR3 for alpha chain variable domain of TCR clone 233209 (TRAV2, TRAJ4)
CAVEDRFSGGYNKLIF

SEQ ID NO: 466418 - protein, 13 aa, Homo sapiens
  CDR3 for beta chain variable domain of TCR clone 233209 (TRBV7-7, TRBJ2-5)
CAGSRSGQETQYF

SEQ ID NO: 466419 - protein, 14 aa, Homo sapiens
  CDR3 for alpha chain variable domain of TCR clone 233210 (TRAV1-2, TRAJ16)
CAVNRFSDGQKLLF

SEQ ID NO: 466420 - protein, 12 aa, Homo sapiens
  CDR3 for beta chain variable domain of TCR clone 233210 (TRBV7-6, TRBJ2-5)
CASSLSQETQYF

SEQ ID NO: 466421 - protein, 14 aa, Homo sapiens
  CDR3 for alpha chain variable domain of TCR clone 233211 (TRAV1-2, TRAJ8)
CAVREDTGLQKLVF

SEQ ID NO: 466422 - protein, 15 aa, Homo sapiens
  CDR3 for beta chain variable domain of TCR clone 233211 (TRBV7-3, TRBJ2-2)
CASSETGQGTGELFF

SEQ ID NO: 466423 - protein, 13 aa, Homo sapiens
  CDR3 for alpha chain variable domain of TCR clone 233212 (TRAV8-3, TRAJ36)
FAVGATGANNLFF

SEQ ID NO: 466424 - protein, 13 aa, Homo sapiens
  CDR3 for beta chain variable domain of TCR clone 233212 (TRBV12-4, TRBJ1-2)
CASSLRQGKGYTF

SEQ ID NO: 466425 - protein, 16 aa, Homo sapiens
  CDR3 for alpha chain variable domain of TCR clone 233213 (TRAV30, TRAJ24)
CGTEIVDTDSWGKLQF

SEQ ID NO: 466426 - protein, 14 aa, Homo sapiens
  CDR3 for beta chain variable domain of TCR clone 233213 (TRBV12-5, TRBJ2-5)
CASGSRTHQETQYF

SEQ ID NO: 466427 - protein, 13 aa, Homo sapiens
  CDR3 for alpha chain variable domain of TCR clone 233214 (TRAV12-3, TRAJ13)
CAMSSGGYQKVTF

SEQ ID NO: 466428 - protein, 16 aa, Homo sapiens
  CDR3 for beta chain variable domain of TCR clone 233214 (TRBV4-1, TRBJ2-7)
RASSRGDILNSYEQYF

SEQ ID NO: 466429 - protein, 15 aa, Homo sapiens
  CDR3 for alpha chain variable domain of TCR clone 233215 (TRAV8-4, TRAJ39)
CAVSHHRGSGNMLTF

SEQ ID NO: 466430 - protein, 15 aa, Homo sapiens
  CDR3 for beta chain variable domain of TCR clone 233215 (TRBV20-1, TRBJ1-1)
CSARPRQGAPTEAFF

SEQ ID NO: 466431 - protein, 13 aa, Homo sapiens
  CDR3 for alpha chain variable domain of TCR clone 233216 (TRAV8-1, TRAJ41)
CAVNPGSGYALNF

SEQ ID NO: 466432 - protein, 17 aa, Homo sapiens
  CDR3 for beta chain variable domain of TCR clone 233216 (TRBV3-1, TRBJ2-2)
CASSQCRDKVDTGELFF

SEQ ID NO: 466433 - protein, 15 aa, Homo sapiens
  CDR3 for alpha chain variable domain of TCR clone 233217 (TRAV26-1, TRAJ29)
CIVRVEGSGHTPLVF

SEQ ID NO: 466434 - protein, 15 aa, Homo sapiens
  CDR3 for beta chain variable domain of TCR clone 233217 (TRBV28, TRBJ2-5)
CASSPGQGSIETQYF

SEQ ID NO: 466435 - protein, 12 aa, Homo sapiens
  CDR3 for alpha chain variable domain of TCR clone 233218 (TRAV12-1, TRAJ40)
CVVYSGTYKYIF

SEQ ID NO: 466436 - protein, 15 aa, Homo sapiens
  CDR3 for beta chain variable domain of TCR clone 233218 (TRBV2, TRBJ2-7)
CASSEGLARSYEQYF

SEQ ID NO: 466437 - protein, 15 aa, Homo sapiens
  CDR3 for alpha chain variable domain of TCR clone 233219 (TRAV12-1, TRAJ9)
CVVSFGDSGGFKTIF

SEQ ID NO: 466438 - protein, 19 aa, Homo sapiens
  CDR3 for beta chain variable domain of TCR clone 233219 (TRBV25-1, TRBJ2-2)
CAILVYRVDRGRKTGELFF

SEQ ID NO: 466439 - protein, 13 aa, Homo sapiens
  CDR3 for alpha chain variable domain of TCR clone 233220 (TRAV3, TRAJ21)
CAVREPDFNKFYF

SEQ ID NO: 466440 - protein, 16 aa, Homo sapiens
  CDR3 for beta chain variable domain of TCR clone 233220 (TRBV5-1, TRBJ2-3)
CASSSGRQDATDTQYF

SEQ ID NO: 466441 - protein, 12 aa, Homo sapiens
  CDR3 for alpha chain variable domain of TCR clone 233221 (TRAV35, TRAJ39)
LAPNNAGNMLTF

SEQ ID NO: 466442 - protein, 14 aa, Homo sapiens
  CDR3 for beta chain variable domain of TCR clone 233221 (TRBV10-3, TRBJ2-1)
CAISSDLAYNEQFF

SEQ ID NO: 466443 - protein, 14 aa, Homo sapiens
  CDR3 for alpha chain variable domain of TCR clone 233222 (TRAV8-3, TRAJ9)
CGVVYNTGGFKTIF

SEQ ID NO: 466444 - protein, 14 aa, Homo sapiens
  CDR3 for beta chain variable domain of TCR clone 233222 (TRBV7-3, TRBJ2-2)
CASSSGGYTGELFF

SEQ ID NO: 466445 - protein, 15 aa, Homo sapiens
  CDR3 for alpha chain variable domain of TCR clone 233223 (TRAV12-2, TRAJ43)
CAFDMRFGAGARLTG

SEQ ID NO: 466446 - protein, 15 aa, Homo sapiens
  CDR3 for beta chain variable domain of TCR clone 233223 (TRBV5-1, TRBJ2-3)
CASSVTSGSTDTQYF

SEQ ID NO: 466447 - protein, 14 aa, Homo sapiens
  CDR3 for alpha chain variable domain of TCR clone 233224 (TRAV17, TRAJ22)
CATSPSGSARQLAF

SEQ ID NO: 466448 - protein, 15 aa, Homo sapiens
  CDR3 for beta chain variable domain of TCR clone 233224 (TRBV4-1, TRBJ2-5)
CDSSQWDLYQETQYF

SEQ ID NO: 466449 - protein, 14 aa, Homo sapiens
  CDR3 for alpha chain variable domain of TCR clone 233225 (TRAV21, TRAJ21)
CAVKGFGNFNKFYF

SEQ ID NO: 466450 - protein, 13 aa, Homo sapiens
  CDR3 for beta chain variable domain of TCR clone 233225 (TRBV18, TRBJ1-1)
CASSPETKPEAFF

SEQ ID NO: 466451 - protein, 14 aa, Homo sapiens
  CDR3 for alpha chain variable domain of TCR clone 233226 (TRAV12-1, TRAJ9)
CVVTGYTGGFKTIF

SEQ ID NO: 466452 - protein, 14 aa, Homo sapiens
  CDR3 for beta chain variable domain of TCR clone 233226 (TRBV11-2, TRBJ1-5)
CASSLDRGRQPQHF

SEQ ID NO: 466453 - protein, 14 aa, Homo sapiens
  CDR3 for alpha chain variable domain of TCR clone 233227 (TRAV27, TRAJ23)
CAGAFDNPGGKLIF

SEQ ID NO: 466454 - protein, 15 aa, Homo sapiens
  CDR3 for beta chain variable domain of TCR clone 233227 (TRBV7-3, TRBJ2-7)
CASSLTGQGKYERYF

SEQ ID NO: 466455 - protein, 12 aa, Homo sapiens
  CDR3 for alpha chain variable domain of TCR clone 233228 (TRAV21, TRAJ45)
CATGGGADGLTF

SEQ ID NO: 466456 - protein, 12 aa, Homo sapiens
  CDR3 for beta chain variable domain of TCR clone 233228 (TRBV12-4, TRBJ2-1)
CASTYVLNEQFF

SEQ ID NO: 466457 - protein, 13 aa, Homo sapiens
  CDR3 for alpha chain variable domain of TCR clone 233229 (TRAV9-2, TRAJ53)
CALSGGSNYKLTF

SEQ ID NO: 466458 - protein, 12 aa, Homo sapiens
  CDR3 for beta chain variable domain of TCR clone 233229 (TRBV2, TRBJ2-1)
CAYGPPGNEQFL

SEQ ID NO: 466459 - protein, 14 aa, Homo sapiens
  CDR3 for alpha chain variable domain of TCR clone 233230 (TRAV8-1, TRAJ5)
CAVRTDTGRRALTF

SEQ ID NO: 466460 - protein, 14 aa, Homo sapiens
  CDR3 for beta chain variable domain of TCR clone 233230 (TRBV7-8, TRBJ2-3)
CASSFPDGQDTRYC

SEQ ID NO: 466461 - protein, 12 aa, Homo sapiens
  CDR3 for alpha chain variable domain of TCR clone 233231 (TRAV12-2, TRAJ8)
CAVKTGFQKLVF

SEQ ID NO: 466462 - protein, 15 aa, Homo sapiens
  CDR3 for beta chain variable domain of TCR clone 233231 (TRBV7-8, TRBJ1-5)
CASSLERRGLEPQHF

SEQ ID NO: 466463 - protein, 14 aa, Homo sapiens
  CDR3 for alpha chain variable domain of TCR clone 233232 (TRAV1-2, TRAJ16)
CAVNRFSDGQKQLF

SEQ ID NO: 466464 - protein, 16 aa, Homo sapiens
  CDR3 for beta chain variable domain of TCR clone 233232 (TRBV2, TRBJ2-3)
CASSTSVEGVTDTQYF

SEQ ID NO: 466465 - protein, 17 aa, Homo sapiens
  CDR3 for alpha chain variable domain of TCR clone 233233 (TRAV38-2/DV8, TRAJ45)
CAYRSRYSGGGADGLTF

SEQ ID NO: 466466 - protein, 20 aa, Homo sapiens
  CDR3 for beta chain variable domain of TCR clone 233233 (TRBV7-8, TRBJ2-2)
CASSHLFPGPTIHITGELFF

SEQ ID NO: 466467 - protein, 13 aa, Homo sapiens
  CDR3 for alpha chain variable domain of TCR clone 233234 (TRAV21, TRAJ27)
CAARPGNAGKSTF

SEQ ID NO: 466468 - protein, 15 aa, Homo sapiens
  CDR3 for beta chain variable domain of TCR clone 233234 (TRBV7-2, TRBJ2-3)
CASSLEQGGTDTQYF

SEQ ID NO: 466469 - protein, 18 aa, Homo sapiens
  CDR3 for alpha chain variable domain of TCR clone 233235 (TRAV12-3, TRAJ52)
CAMSRTNAGGTSYGKLTF

SEQ ID NO: 466470 - protein, 14 aa, Homo sapiens
  CDR3 for beta chain variable domain of TCR clone 233235 (TRBV7-2, TRBJ2-7)
CASSPKTSFYGQYF

SEQ ID NO: 466471 - protein, 12 aa, Homo sapiens
  CDR3 for alpha chain variable domain of TCR clone 233236 (TRAV4, TRAJ26)
CLVGDYGQNFVF

SEQ ID NO: 466472 - protein, 12 aa, Homo sapiens
  CDR3 for beta chain variable domain of TCR clone 233236 (TRBV11-2, TRBJ2-1)
CASSPGNNEQFF

SEQ ID NO: 466473 - protein, 14 aa, Homo sapiens
  CDR3 for alpha chain variable domain of TCR clone 233237 (TRAV12-3, TRAJ10)
SHLPLTGGGNKLTF

SEQ ID NO: 466474 - protein, 15 aa, Homo sapiens
  CDR3 for beta chain variable domain of TCR clone 233237 (TRBV9, TRBJ2-1)
CASSLAGSCYKEQFF

SEQ ID NO: 466475 - protein, 16 aa, Homo sapiens
  CDR3 for alpha chain variable domain of TCR clone 233238 (TRAV38-1, TRAJ37)
CAFKGDGSSNTGKLIF

SEQ ID NO: 466476 - protein, 18 aa, Homo sapiens
  CDR3 for beta chain variable domain of TCR clone 233238 (TRBV12-4, TRBJ2-3)
CASSLGGASRGAPNTQYF

SEQ ID NO: 466477 - protein, 14 aa, Homo sapiens
  CDR3 for alpha chain variable domain of TCR clone 233239 (TRAV12-3, TRAJ9)
CAMSPNTGGFKNIS

SEQ ID NO: 466478 - protein, 12 aa, Homo sapiens
  CDR3 for beta chain variable domain of TCR clone 233239 (TRBV19, TRBJ1-5)
CASSIAQQPQHF

SEQ ID NO: 466479 - protein, 17 aa, Homo sapiens
  CDR3 for alpha chain variable domain of TCR clone 233240 (TRAV3, TRAJ28)
CAVRDGYSGAGSYQLTF

SEQ ID NO: 466480 - protein, 15 aa, Homo sapiens
  CDR3 for beta chain variable domain of TCR clone 233240 (TRBV10-3, TRBJ1-2)
CAITVTGGWDYGYTF

SEQ ID NO: 466481 - protein, 14 aa, Homo sapiens
  CDR3 for alpha chain variable domain of TCR clone 233241 (TRAV2, TRAJ9)
CAVEDRSGGFKTIF

SEQ ID NO: 466482 - protein, 13 aa, Homo sapiens
  CDR3 for beta chain variable domain of TCR clone 233241 (TRBV12-4, TRBJ1-1)
CASSPGTGFEAFF

SEQ ID NO: 466483 - protein, 16 aa, Homo sapiens
  CDR3 for alpha chain variable domain of TCR clone 233242 (TRAV4, TRAJ9)
CLVGDPNRPGGFKTIF

SEQ ID NO: 466484 - protein, 13 aa, Homo sapiens
  CDR3 for beta chain variable domain of TCR clone 233242 (TRBV12-5, TRBJ2-3)
CASGDRQSDTQYF

SEQ ID NO: 466485 - protein, 15 aa, Homo sapiens
  CDR3 for alpha chain variable domain of TCR clone 233243 (TRAV3, TRAJ22)
CAVRDRGGSARQLTF

SEQ ID NO: 466486 - protein, 15 aa, Homo sapiens
  CDR3 for beta chain variable domain of TCR clone 233243 (TRBV4-1, TRBJ2-7)
CASSQNTGRLYEQYF

SEQ ID NO: 466487 - protein, 15 aa, Homo sapiens
  CDR3 for alpha chain variable domain of TCR clone 233244 (TRAV2, TRAJ9)
CAVEDRGTGGVKTIF

SEQ ID NO: 466488 - protein, 14 aa, Homo sapiens
  CDR3 for beta chain variable domain of TCR clone 233244 (TRBV7-2, TRBJ2-7)
CASSPKTSFNEQYF

SEQ ID NO: 466489 - protein, 14 aa, Homo sapiens
  CDR3 for alpha chain variable domain of TCR clone 233245 (TRAV8-2, TRAJ13)
CVVTASGGYQKVTF

SEQ ID NO: 466490 - protein, 16 aa, Homo sapiens
  CDR3 for beta chain variable domain of TCR clone 233245 (TRBV12-4, TRBJ1-5)
CASSRPVGGSNQPQHS

SEQ ID NO: 466491 - protein, 14 aa, Homo sapiens
  CDR3 for alpha chain variable domain of TCR clone 233246 (TRAV38-1, TRAJ40)
CDLRPTSGTYKYIF

SEQ ID NO: 466492 - protein, 16 aa, Homo sapiens
  CDR3 for beta chain variable domain of TCR clone 233246 (TRBV7-9, TRBJ2-7)
CASTLGASGGSYEQYF

SEQ ID NO: 466493 - protein, 15 aa, Homo sapiens
  CDR3 for alpha chain variable domain of TCR clone 233247 (TRAV13-1, TRAJ17)
CEASIERAAGNKLTF

SEQ ID NO: 466494 - protein, 13 aa, Homo sapiens
  CDR3 for beta chain variable domain of TCR clone 233247 (TRBV7-7, TRBJ2-3)
CASSLSRADTQYF

SEQ ID NO: 466495 - protein, 15 aa, Homo sapiens
  CDR3 for alpha chain variable domain of TCR clone 233248 (TRAV3, TRAJ22)
CAVRDRGGSARQLTF

SEQ ID NO: 466496 - protein, 13 aa, Homo sapiens
  CDR3 for beta chain variable domain of TCR clone 233248 (TRBV7-8, TRBJ2-7)
CASSLTGGREQYF

SEQ ID NO: 466497 - protein, 13 aa, Homo sapiens
  CDR3 for alpha chain variable domain of TCR clone 233249 (TRAV29/DV5, TRAJ31)
CAASRNNNARLMF

SEQ ID NO: 466498 - protein, 12 aa, Homo sapiens
  CDR3 for beta chain variable domain of TCR clone 233249 (TRBV11-2, TRBJ2-1)
CQQLRSGNEQFF

SEQ ID NO: 466499 - protein, 14 aa, Homo sapiens
  CDR3 for alpha chain variable domain of TCR clone 233250 (TRAV26-1, TRAJ48)
CIVRVGLGDEKLTF

SEQ ID NO: 466500 - protein, 13 aa, Homo sapiens
  CDR3 for beta chain variable domain of TCR clone 233250 (TRBV11-3, TRBJ2-3)
CASSHDTKDTQYF

SEQ ID NO: 466501 - protein, 16 aa, Homo sapiens
  CDR3 for alpha chain variable domain of TCR clone 233251 (TRAV30, TRAJ24)
CGTEIVDADSWGKFQF

SEQ ID NO: 466502 - protein, 13 aa, Homo sapiens
  CDR3 for beta chain variable domain of TCR clone 233251 (TRBV19, TRBJ2-7)
CASSIDRTYEQYF

SEQ ID NO: 466503 - protein, 18 aa, Homo sapiens
  CDR3 for alpha chain variable domain of TCR clone 233252 (TRAV12-3, TRAJ52)
CAMSRTNAGGTSYGKLTF

SEQ ID NO: 466504 - protein, 16 aa, Homo sapiens
  CDR3 for beta chain variable domain of TCR clone 233252 (TRBV7-3, TRBJ2-1)
CASSLEGYRSYNEQFF

SEQ ID NO: 466505 - protein, 11 aa, Homo sapiens
  CDR3 for alpha chain variable domain of TCR clone 233253 (TRAV12-2, TRAJ43)
CAAYNDNDMRF

SEQ ID NO: 466506 - protein, 14 aa, Homo sapiens
  CDR3 for beta chain variable domain of TCR clone 233253 (TRBV7-8, TRBJ1-2)
CASSAGTAIYGYTF

SEQ ID NO: 466507 - protein, 13 aa, Homo sapiens
  CDR3 for alpha chain variable domain of TCR clone 233254 (TRAV12-3, TRAJ13)
CAMTSGGYQKVTF

SEQ ID NO: 466508 - protein, 13 aa, Homo sapiens
  CDR3 for beta chain variable domain of TCR clone 233254 (TRBV7-9, TRBJ1-2)
CASSLKQNDGYTF

SEQ ID NO: 466509 - protein, 23 aa, Homo sapiens
  CDR3 for alpha chain variable domain of TCR clone 233255 (TRAV1-1, TRAJ29)
LLQELQMKDSASYFLGGNTPLVF

SEQ ID NO: 466510 - protein, 11 aa, Homo sapiens
  CDR3 for beta chain variable domain of TCR clone 233255 (TRBV11-2, TRBJ2-2)
CANSLPGELFF

SEQ ID NO: 466511 - protein, 14 aa, Homo sapiens
  CDR3 for alpha chain variable domain of TCR clone 233256 (TRAV12-3, TRAJ10)
SHLPLTGGGSKLTF

SEQ ID NO: 466512 - protein, 15 aa, Homo sapiens
  CDR3 for beta chain variable domain of TCR clone 233256 (TRBV7-9, TRBJ1-5)
CASSQGHQPNQPQHF

SEQ ID NO: 466513 - protein, 14 aa, Homo sapiens
  CDR3 for alpha chain variable domain of TCR clone 233257 (TRAV27, TRAJ23)
CAGAFDNQGGKLIF

SEQ ID NO: 466514 - protein, 15 aa, Homo sapiens
  CDR3 for beta chain variable domain of TCR clone 233257 (TRBV7-3, TRBJ2-7)
CASSLTGQGKYGQYL

SEQ ID NO: 466515 - protein, 14 aa, Homo sapiens
  CDR3 for alpha chain variable domain of TCR clone 233258 (TRAV17, TRAJ49)
CATDARDTGNQFYF

SEQ ID NO: 466516 - protein, 15 aa, Homo sapiens
  CDR3 for beta chain variable domain of TCR clone 233258 (TRBV28, TRBJ2-1)
CASSGLAEVDNEQFF

SEQ ID NO: 466517 - protein, 15 aa, Homo sapiens
  CDR3 for alpha chain variable domain of TCR clone 233259 (TRAV20, TRAJ50)
CAVRQMKTSYDKVIF

SEQ ID NO: 466518 - protein, 17 aa, Homo sapiens
  CDR3 for beta chain variable domain of TCR clone 233259 (TRBV28, TRBJ2-7)
CASSPLHRASGVYEQYF

SEQ ID NO: 466519 - protein, 11 aa, Homo sapiens
  CDR3 for alpha chain variable domain of TCR clone 233260 (TRAV12-2, TRAJ29)
CVVTLRSPLVF

SEQ ID NO: 466520 - protein, 16 aa, Homo sapiens
  CDR3 for beta chain variable domain of TCR clone 233260 (TRBV29-1, TRBJ2-2)
CSVETRASGNTGELFF

SEQ ID NO: 466521 - protein, 14 aa, Homo sapiens
  CDR3 for alpha chain variable domain of TCR clone 233261 (TRAV13-2, TRAJ43)
CAEIPTYNNNDMRF

SEQ ID NO: 466522 - protein, 15 aa, Homo sapiens
  CDR3 for beta chain variable domain of TCR clone 233261 (TRBV7-9, TRBJ2-2)
CASGPLDTFPRELFF

SEQ ID NO: 466523 - protein, 15 aa, Homo sapiens
  CDR3 for alpha chain variable domain of TCR clone 233262 (TRAV26-1, TRAJ44)
CIVRANTGPASKITF

SEQ ID NO: 466524 - protein, 16 aa, Homo sapiens
  CDR3 for beta chain variable domain of TCR clone 233262 (TRBV7-7, TRBJ2-1)
CASSLASGTSYNEQFF

SEQ ID NO: 466525 - protein, 16 aa, Homo sapiens
  CDR3 for alpha chain variable domain of TCR clone 233263 (TRAV21, TRAJ37)
CAVRPRGSSNTGKLIF

SEQ ID NO: 466526 - protein, 14 aa, Homo sapiens
  CDR3 for beta chain variable domain of TCR clone 233263 (TRBV12-5, TRBJ2-5)
CASGSRTHQETQYF

SEQ ID NO: 466527 - protein, 13 aa, Homo sapiens
  CDR3 for alpha chain variable domain of TCR clone 233264 (TRAV8-6, TRAJ13)
CAVRDGGYQKVTF

SEQ ID NO: 466528 - protein, 18 aa, Homo sapiens
  CDR3 for beta chain variable domain of TCR clone 233264 (TRBV11-2, TRBJ2-1)
CASRAGTSGAKYYNEQFF

SEQ ID NO: 466529 - protein, 10 aa, Homo sapiens
  CDR3 for alpha chain variable domain of TCR clone 233265 (TRAV30, TRAJ48)
CGIGNEKLTF

SEQ ID NO: 466530 - protein, 14 aa, Homo sapiens
  CDR3 for beta chain variable domain of TCR clone 233265 (TRBV7-2, TRBJ2-7)
CASSPKTRFYEQYF

SEQ ID NO: 466531 - protein, 14 aa, Homo sapiens
  CDR3 for alpha chain variable domain of TCR clone 233266 (TRAV13-1, TRAJ9)
CAASALTGGFKTIF

SEQ ID NO: 466532 - protein, 13 aa, Homo sapiens
  CDR3 for beta chain variable domain of TCR clone 233266 (TRBV20-1, TRBJ1-1)
CSAGTVGNTGAFF

SEQ ID NO: 466533 - protein, 15 aa, Homo sapiens
  CDR3 for alpha chain variable domain of TCR clone 233267 (TRAV17, TRAJ10)
CATVLLTGGGNKLTL

SEQ ID NO: 466534 - protein, 16 aa, Homo sapiens
  CDR3 for beta chain variable domain of TCR clone 233267 (TRBV7-9, TRBJ2-1)
CASSDVAGGSYNEQFF

SEQ ID NO: 466535 - protein, 15 aa, Homo sapiens
  CDR3 for alpha chain variable domain of TCR clone 233268 (TRAV12-1, TRAJ44)
CVVFVNTGTASKLTF

SEQ ID NO: 466536 - protein, 17 aa, Homo sapiens
  CDR3 for beta chain variable domain of TCR clone 233268 (TRBV7-8, TRBJ2-6)
CASSAGTGGAGANFLTF

SEQ ID NO: 466537 - protein, 17 aa, Homo sapiens
  CDR3 for alpha chain variable domain of TCR clone 233269 (TRAV35, TRAJ52)
CAGQLAAGGTSYGKLTF

SEQ ID NO: 466538 - protein, 20 aa, Homo sapiens
  CDR3 for beta chain variable domain of TCR clone 233269 (TRBV28, TRBJ2-1)
CASTPIGRSPGLAGGNEQFF

SEQ ID NO: 466539 - protein, 13 aa, Homo sapiens
  CDR3 for alpha chain variable domain of TCR clone 233270 (TRAV13-1, TRAJ22)
CLGWISSARQLTF

SEQ ID NO: 466540 - protein, 15 aa, Homo sapiens
  CDR3 for beta chain variable domain of TCR clone 233270 (TRBV7-2, TRBJ2-3)
CASSSTGLETDTQYF

SEQ ID NO: 466541 - protein, 13 aa, Homo sapiens
  CDR3 for alpha chain variable domain of TCR clone 233271 (TRAV12-3, TRAJ13)
CAMGTGGYQKVTF

SEQ ID NO: 466542 - protein, 14 aa, Homo sapiens
  CDR3 for beta chain variable domain of TCR clone 233271 (TRBV7-2, TRBJ2-5)
CGSSTGGELKTQYF

SEQ ID NO: 466543 - protein, 14 aa, Homo sapiens
  CDR3 for alpha chain variable domain of TCR clone 233272 (TRAV26-1, TRAJ38)
CIADNAGNNRKLIW

SEQ ID NO: 466544 - protein, 13 aa, Homo sapiens
  CDR3 for beta chain variable domain of TCR clone 233272 (TRBV11-2, TRBJ2-1)
CASSSEAYNEQFF

SEQ ID NO: 466545 - protein, 14 aa, Homo sapiens
  CDR3 for alpha chain variable domain of TCR clone 233273 (TRAV1-2, TRAJ15)
CAVRDRQAGTALIF

SEQ ID NO: 466546 - protein, 14 aa, Homo sapiens
  CDR3 for beta chain variable domain of TCR clone 233273 (TRBV6-1, TRBJ1-3)
CASVQGGGGNTIYF

SEQ ID NO: 466547 - protein, 13 aa, Homo sapiens
  CDR3 for alpha chain variable domain of TCR clone 233274 (TRAV12-1, TRAJ44)
CVVLTGTASKLTF

SEQ ID NO: 466548 - protein, 12 aa, Homo sapiens
  CDR3 for beta chain variable domain of TCR clone 233274 (TRBV7-8, TRBJ2-7)
CASSLGDREQYF

SEQ ID NO: 466549 - protein, 17 aa, Homo sapiens
  CDR3 for alpha chain variable domain of TCR clone 233275 (TRAV1-2, TRAJ8)
CAVRDPDENTGSQKLVF

SEQ ID NO: 466550 - protein, 14 aa, Homo sapiens
  CDR3 for beta chain variable domain of TCR clone 233275 (TRBV7-6, TRBJ2-3)
CASSVAGGTDTQYF

SEQ ID NO: 466551 - protein, 13 aa, Homo sapiens
  CDR3 for alpha chain variable domain of TCR clone 233276 (TRAV17, TRAJ15)
CATDARAGTALIF

SEQ ID NO: 466552 - protein, 15 aa, Homo sapiens
  CDR3 for beta chain variable domain of TCR clone 233276 (TRBV20-1, TRBJ2-7)
CSARDRVSGMGEQYF

SEQ ID NO: 466553 - protein, 13 aa, Homo sapiens
  CDR3 for alpha chain variable domain of TCR clone 233277 (TRAV17, TRAJ26)
CATVDNYGQNFVF

SEQ ID NO: 466554 - protein, 14 aa, Homo sapiens
  CDR3 for beta chain variable domain of TCR clone 233277 (TRBV7-9, TRBJ2-1)
CASSQGQAEAEQFF

SEQ ID NO: 466555 - protein, 14 aa, Homo sapiens
  CDR3 for alpha chain variable domain of TCR clone 233278 (TRAV1-2, TRAJ8)
CAVREDTGFQKFVF

SEQ ID NO: 466556 - protein, 15 aa, Homo sapiens
  CDR3 for beta chain variable domain of TCR clone 233278 (TRBV6-3, TRBJ2-7)
CASSSPGTVYYEQYF

SEQ ID NO: 466557 - protein, 16 aa, Homo sapiens
  CDR3 for alpha chain variable domain of TCR clone 233279 (TRAV12-2, TRAJ45)
CAVNRGAGGGADGLTF

SEQ ID NO: 466558 - protein, 14 aa, Homo sapiens
  CDR3 for beta chain variable domain of TCR clone 233279 (TRBV23-1, TRBJ2-2)
EDRGVEKDTGELFF

SEQ ID NO: 466559 - protein, 15 aa, Homo sapiens
  CDR3 for alpha chain variable domain of TCR clone 233280 (TRAV17, TRAJ57)
CATGPSQGGSEKLVF

SEQ ID NO: 466560 - protein, 20 aa, Homo sapiens
  CDR3 for beta chain variable domain of TCR clone 233280 (TRBV7-8, TRBJ2-1)
CASILAHRLAGVRSYNEQFF

SEQ ID NO: 466561 - protein, 14 aa, Homo sapiens
  CDR3 for alpha chain variable domain of TCR clone 233281 (TRAV26-1, TRAJ34)
CIVRVAYNTDKLIF

SEQ ID NO: 466562 - protein, 13 aa, Homo sapiens
  CDR3 for beta chain variable domain of TCR clone 233281 (TRBV7-2, TRBJ2-2)
CANSLAVTGELFF

SEQ ID NO: 466563 - protein, 13 aa, Homo sapiens
  CDR3 for alpha chain variable domain of TCR clone 233282 (TRAV13-1, TRAJ33)
CAASRAGNYQLIW

SEQ ID NO: 466564 - protein, 12 aa, Homo sapiens
  CDR3 for beta chain variable domain of TCR clone 233282 (TRBV11-2, TRBJ1-2)
CASSREGDGYSF

SEQ ID NO: 466565 - protein, 14 aa, Homo sapiens
  CDR3 for alpha chain variable domain of TCR clone 233283 (TRAV8-4, TRAJ9)
CAVRINTGGFKTIF

SEQ ID NO: 466566 - protein, 17 aa, Homo sapiens
  CDR3 for beta chain variable domain of TCR clone 233283 (TRBV20-1, TRBJ2-7)
CSARDRVSGMTSSTSGR

SEQ ID NO: 466567 - protein, 17 aa, Homo sapiens
  CDR3 for alpha chain variable domain of TCR clone 233284 (TRAV4, TRAJ18)
CLVVAAGRGSTLGRPYF

SEQ ID NO: 466568 - protein, 11 aa, Homo sapiens
  CDR3 for beta chain variable domain of TCR clone 233284 (TRBV29-1, TRBJ2-5)
CSEDRTGTQYF

SEQ ID NO: 466569 - protein, 14 aa, Homo sapiens
  CDR3 for alpha chain variable domain of TCR clone 233285 (TRAV29/DV5, TRAJ36)
CAARRKPGANNLFF

SEQ ID NO: 466570 - protein, 12 aa, Homo sapiens
  CDR3 for beta chain variable domain of TCR clone 233285 (TRBV11-2, TRBJ2-2)
CASSLGGGELFF

SEQ ID NO: 466571 - protein, 15 aa, Homo sapiens
  CDR3 for alpha chain variable domain of TCR clone 233286 (TRAV2, TRAJ9)
GAVAALNTGVFKTIF

SEQ ID NO: 466572 - protein, 14 aa, Homo sapiens
  CDR3 for beta chain variable domain of TCR clone 233286 (TRBV7-8, TRBJ2-5)
CASSATGGQETQYF

SEQ ID NO: 466573 - protein, 15 aa, Homo sapiens
  CDR3 for alpha chain variable domain of TCR clone 233287 (TRAV3, TRAJ3)
CAVRDMSSSASKITF

SEQ ID NO: 466574 - protein, 14 aa, Homo sapiens
  CDR3 for beta chain variable domain of TCR clone 233287 (TRBV19, TRBJ2-1)
CASPTFVLSGEQFF

SEQ ID NO: 466575 - protein, 11 aa, Homo sapiens
  CDR3 for alpha chain variable domain of TCR clone 233288 (TRAV1-2, TRAJ40)
CAVPGTYKYIF

SEQ ID NO: 466576 - protein, 15 aa, Homo sapiens
  CDR3 for beta chain variable domain of TCR clone 233288 (TRBV28, TRBJ1-3)
CASSLAGTSGNTIYF

SEQ ID NO: 466577 - protein, 16 aa, Homo sapiens
  CDR3 for alpha chain variable domain of TCR clone 233289 (TRAV30, TRAJ24)
CGTEIVDADSWGKFQS

SEQ ID NO: 466578 - protein, 14 aa, Homo sapiens
  CDR3 for beta chain variable domain of TCR clone 233289 (TRBV12-5, TRBJ2-5)
CASGSRTHQGTQYF

SEQ ID NO: 466579 - protein, 14 aa, Homo sapiens
  CDR3 for alpha chain variable domain of TCR clone 233290 (TRAV27, TRAJ40)
CADPTTPGTYKYIF

SEQ ID NO: 466580 - protein, 14 aa, Homo sapiens
  CDR3 for beta chain variable domain of TCR clone 233290 (TRBV19, TRBJ2-7)
CASSIFAGTYEQYF

SEQ ID NO: 466581 - protein, 17 aa, Homo sapiens
  CDR3 for alpha chain variable domain of TCR clone 233291 (TRAV16, TRAJ58)
CITVLSNGETSGSRLTF

SEQ ID NO: 466582 - protein, 14 aa, Homo sapiens
  CDR3 for beta chain variable domain of TCR clone 233291 (TRBV7-8, TRBJ2-3)
CASSLEAGTDTQYF

SEQ ID NO: 466583 - protein, 17 aa, Homo sapiens
  CDR3 for alpha chain variable domain of TCR clone 233292 (TRAV38-1, TRAJ28)
CAFMKPTSGAGSYQLTF

SEQ ID NO: 466584 - protein, 13 aa, Homo sapiens
  CDR3 for beta chain variable domain of TCR clone 233292 (TRBV2, TRBJ2-7)
CASSEGGQFEQYF

SEQ ID NO: 466585 - protein, 12 aa, Homo sapiens
  CDR3 for alpha chain variable domain of TCR clone 233293 (TRAV3, TRAJ31)
CAVRDGNARLMF

SEQ ID NO: 466586 - protein, 16 aa, Homo sapiens
  CDR3 for beta chain variable domain of TCR clone 233293 (TRBV19, TRBJ2-2)
CASRSPGTGATGELFF

SEQ ID NO: 466587 - protein, 13 aa, Homo sapiens
  CDR3 for alpha chain variable domain of TCR clone 233294 (TRAV3, TRAJ21)
CAVREPDFNKFYF

SEQ ID NO: 466588 - protein, 15 aa, Homo sapiens
  CDR3 for beta chain variable domain of TCR clone 233294 (TRBV5-1, TRBJ2-1)
CASSPPRAPYNEQVF

SEQ ID NO: 466589 - protein, 14 aa, Homo sapiens
  CDR3 for alpha chain variable domain of TCR clone 233295 (TRAV12-3, TRAJ42)
CAMNYGGSQGNLIF

SEQ ID NO: 466590 - protein, 13 aa, Homo sapiens
  CDR3 for beta chain variable domain of TCR clone 233295 (TRBV12-5, TRBJ2-3)
CASQNRGTDTQYF

SEQ ID NO: 466591 - protein, 13 aa, Homo sapiens
  CDR3 for alpha chain variable domain of TCR clone 233296 (TRAV13-2, TRAJ13)
CAERPGGYQKVTF

SEQ ID NO: 466592 - protein, 13 aa, Homo sapiens
  CDR3 for beta chain variable domain of TCR clone 233296 (TRBV28, TRBJ2-5)
CASSSRNQETQYF

SEQ ID NO: 466593 - protein, 10 aa, Homo sapiens
  CDR3 for alpha chain variable domain of TCR clone 233297 (TRAV30, TRAJ34)
CGTNPDKLIF

SEQ ID NO: 466594 - protein, 17 aa, Homo sapiens
  CDR3 for beta chain variable domain of TCR clone 233297 (TRBV7-8, TRBJ2-1)
CASSPPTGTLAYNEQFF

SEQ ID NO: 466595 - protein, 14 aa, Homo sapiens
  CDR3 for alpha chain variable domain of TCR clone 233298 (TRAV13-1, TRAJ35)
CAASKGGFGNVLHC

SEQ ID NO: 466596 - protein, 14 aa, Homo sapiens
  CDR3 for beta chain variable domain of TCR clone 233298 (TRBV18, TRBJ2-7)
CASSPRGGAYEQYF

SEQ ID NO: 466597 - protein, 12 aa, Homo sapiens
  CDR3 for alpha chain variable domain of TCR clone 233299 (TRAV35, TRAJ52)
NAGGTSYGKLTF

SEQ ID NO: 466598 - protein, 13 aa, Homo sapiens
  CDR3 for beta chain variable domain of TCR clone 233299 (TRBV4-1, TRBJ1-1)
CASSRKMNTEAFF

SEQ ID NO: 466599 - protein, 13 aa, Homo sapiens
  CDR3 for alpha chain variable domain of TCR clone 233300 (TRAV12-1, TRAJ34)
CVVTGYNTDKLIF

SEQ ID NO: 466600 - protein, 13 aa, Homo sapiens
  CDR3 for beta chain variable domain of TCR clone 233300 (TRBV28, TRBJ2-7)
CASKAGGVCEQYF

SEQ ID NO: 466601 - protein, 14 aa, Homo sapiens
  CDR3 for alpha chain variable domain of TCR clone 233301 (TRAV12-2, TRAJ17)
SAVLFKAAGNKLTF

SEQ ID NO: 466602 - protein, 14 aa, Homo sapiens
  CDR3 for beta chain variable domain of TCR clone 233301 (TRBV7-3, TRBJ1-1)
CASSLKGGNTEAFF

SEQ ID NO: 466603 - protein, 16 aa, Homo sapiens
  CDR3 for alpha chain variable domain of TCR clone 233302 (TRAV26-1, TRAJ53)
CIVRVAMGGSNYKLTF

SEQ ID NO: 466604 - protein, 16 aa, Homo sapiens
  CDR3 for beta chain variable domain of TCR clone 233302 (TRBV7-9, TRBJ1-2)
CASSPGGGAINYGYTF

SEQ ID NO: 466605 - protein, 14 aa, Homo sapiens
  CDR3 for alpha chain variable domain of TCR clone 233303 (TRAV26-1, TRAJ49)
CIVSLTNTGNQFYF

SEQ ID NO: 466606 - protein, 13 aa, Homo sapiens
  CDR3 for beta chain variable domain of TCR clone 233303 (TRBV10-1, TRBJ1-1)
CASQGQTNTEAFF

SEQ ID NO: 466607 - protein, 11 aa, Homo sapiens
  CDR3 for alpha chain variable domain of TCR clone 233304 (TRAV27, TRAJ20)
CAGLNDYKLSF

SEQ ID NO: 466608 - protein, 11 aa, Homo sapiens
  CDR3 for beta chain variable domain of TCR clone 233304 (TRBV20-1, TRBJ2-7)
CSARLSYEQYF

SEQ ID NO: 466609 - protein, 12 aa, Homo sapiens
  CDR3 for alpha chain variable domain of TCR clone 233305 (TRAV12-3, TRAJ20)
CAMVRGDYKLSF

SEQ ID NO: 466610 - protein, 11 aa, Homo sapiens
  CDR3 for beta chain variable domain of TCR clone 233305 (TRBV11-2, TRBJ1-1)
CASSINTEAFF

SEQ ID NO: 466611 - protein, 12 aa, Homo sapiens
  CDR3 for alpha chain variable domain of TCR clone 233306 (TRAV17, TRAJ4)
CATDGGYNKLIF

SEQ ID NO: 466612 - protein, 14 aa, Homo sapiens
  CDR3 for beta chain variable domain of TCR clone 233306 (TRBV27, TRBJ2-5)
CASSSLKGWETQYF

SEQ ID NO: 466613 - protein, 20 aa, Homo sapiens
  CDR3 for alpha chain variable domain of TCR clone 233307 (TRAV14/DV4, TRAJ22)
CAMRDGPFSISSGSARQLTF

SEQ ID NO: 466614 - protein, 13 aa, Homo sapiens
  CDR3 for beta chain variable domain of TCR clone 233307 (TRBV4-2, TRBJ2-3)
CASSQDWQHTQYF

SEQ ID NO: 466615 - protein, 12 aa, Homo sapiens
  CDR3 for alpha chain variable domain of TCR clone 233308 (TRAV13-1, TRAJ40)
CSASWATYKYIF

SEQ ID NO: 466616 - protein, 15 aa, Homo sapiens
  CDR3 for beta chain variable domain of TCR clone 233308 (TRBV7-8, TRBJ2-1)
CASSSRLAAYNEQFF

SEQ ID NO: 466617 - protein, 14 aa, Homo sapiens
  CDR3 for alpha chain variable domain of TCR clone 233309 (TRAV12-2, TRAJ45)
CALPERGGADGLTF

SEQ ID NO: 466618 - protein, 13 aa, Homo sapiens
  CDR3 for beta chain variable domain of TCR clone 233309 (TRBV11-2, TRBJ2-5)
CASSVEPQGTQYF

SEQ ID NO: 466619 - protein, 12 aa, Homo sapiens
  CDR3 for alpha chain variable domain of TCR clone 233310 (TRAV13-2, TRAJ23)
FAERHRGGKLIF

SEQ ID NO: 466620 - protein, 13 aa, Homo sapiens
  CDR3 for beta chain variable domain of TCR clone 233310 (TRBV15, TRBJ1-6)
CATSGGLNSPLHF

SEQ ID NO: 466621 - protein, 14 aa, Homo sapiens
  CDR3 for alpha chain variable domain of TCR clone 233311 (TRAV8-3, TRAJ9)
CAVVYNTGGFKTIF

SEQ ID NO: 466622 - protein, 14 aa, Homo sapiens
  CDR3 for beta chain variable domain of TCR clone 233311 (TRBV7-3, TRBJ2-7)
CASSLPPGQGPQYF

SEQ ID NO: 466623 - protein, 11 aa, Homo sapiens
  CDR3 for alpha chain variable domain of TCR clone 233312 (TRAV29/DV5, TRAJ47)
CAATYGNKLVF

SEQ ID NO: 466624 - protein, 17 aa, Homo sapiens
  CDR3 for beta chain variable domain of TCR clone 233312 (TRBV7-9, TRBJ2-1)
GASSLVASYPSYNEQFF

SEQ ID NO: 466625 - protein, 16 aa, Homo sapiens
  CDR3 for alpha chain variable domain of TCR clone 233313 (TRAV13-1, TRAJ37)
CAASSLGSSNTGKLIF

SEQ ID NO: 466626 - protein, 12 aa, Homo sapiens
  CDR3 for beta chain variable domain of TCR clone 233313 (TRBV6-1, TRBJ2-5)
CASSEARETQYF

SEQ ID NO: 466627 - protein, 12 aa, Homo sapiens
  CDR3 for alpha chain variable domain of TCR clone 233314 (TRAV22, TRAJ22)
CAPGGSARQLTF

SEQ ID NO: 466628 - protein, 11 aa, Homo sapiens
  CDR3 for beta chain variable domain of TCR clone 233314 (TRBV6-3, TRBJ2-3)
CATGQADTQYF

SEQ ID NO: 466629 - protein, 18 aa, Homo sapiens
  CDR3 for alpha chain variable domain of TCR clone 233315 (TRAV13-1, TRAJ52)
CAAKNPNAGGTSYGKLTF

SEQ ID NO: 466630 - protein, 12 aa, Homo sapiens
  CDR3 for beta chain variable domain of TCR clone 233315 (TRBV28, TRBJ2-3)
CASSLYRDTQYF

SEQ ID NO: 466631 - protein, 13 aa, Homo sapiens
  CDR3 for alpha chain variable domain of TCR clone 233316 (TRAV1-2, TRAJ15)
CAVRDKRGTAMIF

SEQ ID NO: 466632 - protein, 15 aa, Homo sapiens
  CDR3 for beta chain variable domain of TCR clone 233316 (TRBV12-4, TRBJ2-5)
CASSPPTGLQETQYF

SEQ ID NO: 466633 - protein, 16 aa, Homo sapiens
  CDR3 for alpha chain variable domain of TCR clone 233317 (TRAV3, TRAJ10)
CAVRDMRAGGGNKPTF

SEQ ID NO: 466634 - protein, 15 aa, Homo sapiens
  CDR3 for beta chain variable domain of TCR clone 233317 (TRBV11-2, TRBJ2-1)
CASSSPSTRYNEQFF

SEQ ID NO: 466635 - protein, 15 aa, Homo sapiens
  CDR3 for alpha chain variable domain of TCR clone 233318 (TRAV34, TRAJ38)
CGADFNPGNNRKLSW

SEQ ID NO: 466636 - protein, 12 aa, Homo sapiens
  CDR3 for beta chain variable domain of TCR clone 233318 (TRBV7-9, TRBJ2-7)
CATRTDAYEQYF

SEQ ID NO: 466637 - protein, 17 aa, Homo sapiens
  CDR3 for alpha chain variable domain of TCR clone 233319 (TRAV40, )
CLPIPDIQNPDPAAYQL

SEQ ID NO: 466638 - protein, 15 aa, Homo sapiens
  CDR3 for beta chain variable domain of TCR clone 233319 (TRBV2, TRBJ1-2)
CASSEIGGANYGYTF

SEQ ID NO: 466639 - protein, 13 aa, Homo sapiens
  CDR3 for alpha chain variable domain of TCR clone 233320 (TRAV13-1, TRAJ37)
CAARSGKTGKLIF

SEQ ID NO: 466640 - protein, 14 aa, Homo sapiens
  CDR3 for beta chain variable domain of TCR clone 233320 (TRBV12-4, TRBJ2-3)
CASSLGQGTDTQYF

SEQ ID NO: 466641 - protein, 14 aa, Homo sapiens
  CDR3 for alpha chain variable domain of TCR clone 233321 (TRAV17, TRAJ40)
CATALTSGTYKYIF

SEQ ID NO: 466642 - protein, 13 aa, Homo sapiens
  CDR3 for beta chain variable domain of TCR clone 233321 (TRBV12-4, TRBJ1-2)
CASSLRQGKGYTF

SEQ ID NO: 466643 - protein, 13 aa, Homo sapiens
  CDR3 for alpha chain variable domain of TCR clone 233322 (TRAV8-3, TRAJ48)
CAVVPFGNEKLTF

SEQ ID NO: 466644 - protein, 19 aa, Homo sapiens
  CDR3 for beta chain variable domain of TCR clone 233322 (TRBV25-1, TRBJ2-2)
CAILVYRVDRGRKPGELFF

SEQ ID NO: 466645 - protein, 12 aa, Homo sapiens
  CDR3 for alpha chain variable domain of TCR clone 233323 (TRAV12-3, TRAJ17)
CAMTLTGSKLTF

SEQ ID NO: 466646 - protein, 15 aa, Homo sapiens
  CDR3 for beta chain variable domain of TCR clone 233323 (TRBV20-1, TRBJ2-7)
CSARDRVSGMDGQYF

SEQ ID NO: 466647 - protein, 14 aa, Homo sapiens
  CDR3 for alpha chain variable domain of TCR clone 233324 (TRAV1-2, TRAJ8)
CAVREDTGFQKLVF

SEQ ID NO: 466648 - protein, 15 aa, Homo sapiens
  CDR3 for beta chain variable domain of TCR clone 233324 (TRBV4-1, TRBJ2-7)
CASSQNTGRLYEQYV

SEQ ID NO: 466649 - protein, 14 aa, Homo sapiens
  CDR3 for alpha chain variable domain of TCR clone 233325 (TRAV1-2, TRAJ8)
CAVREDAGFQKLVF

SEQ ID NO: 466650 - protein, 16 aa, Homo sapiens
  CDR3 for beta chain variable domain of TCR clone 233325 (TRBV12-4, TRBJ1-5)
CASSRLVGGSNQPQHF

SEQ ID NO: 466651 - protein, 15 aa, Homo sapiens
  CDR3 for alpha chain variable domain of TCR clone 233326 (TRAV8-3, TRAJ23)
CAVGDRYNQGGKLIF

SEQ ID NO: 466652 - protein, 15 aa, Homo sapiens
  CDR3 for beta chain variable domain of TCR clone 233326 (TRBV29-1, TRBJ2-5)
EASSIYLCSAGTQYF

SEQ ID NO: 466653 - protein, 14 aa, Homo sapiens
  CDR3 for alpha chain variable domain of TCR clone 233327 (TRAV2, TRAJ9)
CAVEDRSGGFKTIF

SEQ ID NO: 466654 - protein, 15 aa, Homo sapiens
  CDR3 for beta chain variable domain of TCR clone 233327 (TRBV5-1, TRBJ2-5)
CASSFKGGDQETQYF

SEQ ID NO: 466655 - protein, 11 aa, Homo sapiens
  CDR3 for alpha chain variable domain of TCR clone 233328 (TRAV3, TRAJ21)
CAVGNFNKFYF

SEQ ID NO: 466656 - protein, 16 aa, Homo sapiens
  CDR3 for beta chain variable domain of TCR clone 233328 (TRBV19, TRBJ2-1)
CAGSKAGPSSYNEQFS

SEQ ID NO: 466657 - protein, 13 aa, Homo sapiens
  CDR3 for alpha chain variable domain of TCR clone 233329 (TRAV17, TRAJ5)
CALRGTGRRALPF

SEQ ID NO: 466658 - protein, 15 aa, Homo sapiens
  CDR3 for beta chain variable domain of TCR clone 233329 (TRBV9, TRBJ1-6)
CASSVAGTGDSPLHF

SEQ ID NO: 466659 - protein, 15 aa, Homo sapiens
  CDR3 for alpha chain variable domain of TCR clone 233330 (TRAV12-3, TRAJ6)
CAMSATTGGSYIPTF

SEQ ID NO: 466660 - protein, 16 aa, Homo sapiens
  CDR3 for beta chain variable domain of TCR clone 233330 (TRBV20-1, TRBJ1-2)
CSASMGQGVANYGYGV

SEQ ID NO: 466661 - protein, 13 aa, Homo sapiens
  CDR3 for alpha chain variable domain of TCR clone 233331 (TRAV2, TRAJ40)
CAVVTSGTYKYIF

SEQ ID NO: 466662 - protein, 14 aa, Homo sapiens
  CDR3 for beta chain variable domain of TCR clone 233331 (TRBV19, TRBJ2-1)
CASPAVVLSGEQFF

SEQ ID NO: 466663 - protein, 16 aa, Homo sapiens
  CDR3 for alpha chain variable domain of TCR clone 233332 (TRAV8-3, TRAJ48)
CAVGLISNFGNEKLTF

SEQ ID NO: 466664 - protein, 14 aa, Homo sapiens
  CDR3 for beta chain variable domain of TCR clone 233332 (TRBV19, TRBJ2-1)
CASPTFVLSGEQFF

SEQ ID NO: 466665 - protein, 14 aa, Homo sapiens
  CDR3 for alpha chain variable domain of TCR clone 233333 (TRAV1-2, TRAJ8)
CAVREDTGFQKLVF

SEQ ID NO: 466666 - protein, 15 aa, Homo sapiens
  CDR3 for beta chain variable domain of TCR clone 233333 (TRBV6-3, TRBJ2-7)
CASSSPGTVFYDQCF

SEQ ID NO: 466667 - protein, 16 aa, Homo sapiens
  CDR3 for alpha chain variable domain of TCR clone 233334 (TRAV3, TRAJ37)
CAVRGKGSGNTGKLIF

SEQ ID NO: 466668 - protein, 12 aa, Homo sapiens
  CDR3 for beta chain variable domain of TCR clone 233334 (TRBV7-9, TRBJ2-7)
CASSFGSYEQYF

SEQ ID NO: 466669 - protein, 12 aa, Homo sapiens
  CDR3 for alpha chain variable domain of TCR clone 233335 (TRAV25, TRAJ31)
CAGHLNNARLMF

SEQ ID NO: 466670 - protein, 19 aa, Homo sapiens
  CDR3 for beta chain variable domain of TCR clone 233335 (TRBV7-2, TRBJ2-3)
CASSFLSRNWGGGTDTQYF

SEQ ID NO: 466671 - protein, 14 aa, Homo sapiens
  CDR3 for alpha chain variable domain of TCR clone 233336 (TRAV2, TRAJ22)
CAVGRGGSARQLTF

SEQ ID NO: 466672 - protein, 14 aa, Homo sapiens
  CDR3 for beta chain variable domain of TCR clone 233336 (TRBV19, TRBJ2-1)
CASPTFVLRGEQFF

SEQ ID NO: 466673 - protein, 14 aa, Homo sapiens
  CDR3 for alpha chain variable domain of TCR clone 233337 (TRAV12-2, TRAJ13)
CAVKKTGGYQKVTF

SEQ ID NO: 466674 - protein, 23 aa, Homo sapiens
  CDR3 for beta chain variable domain of TCR clone 233337 (TRBV4-2, TRBJ2-3)
CASSHDPPRASSISGGRGDTQYF

SEQ ID NO: 466675 - protein, 13 aa, Homo sapiens
  CDR3 for alpha chain variable domain of TCR clone 233338 (TRAV22, TRAJ12)
CAGRMDSSYKLIF

SEQ ID NO: 466676 - protein, 15 aa, Homo sapiens
  CDR3 for beta chain variable domain of TCR clone 233338 (TRBV4-3, TRBJ2-3)
CASSLGTRSSDTQYF

SEQ ID NO: 466677 - protein, 14 aa, Homo sapiens
  CDR3 for alpha chain variable domain of TCR clone 233339 (TRAV12-2, TRAJ17)
CAVLFTAAGNKLTF

SEQ ID NO: 466678 - protein, 17 aa, Homo sapiens
  CDR3 for beta chain variable domain of TCR clone 233339 (TRBV20-1, TRBJ2-2)
CSARGSGQGGLTGELFF

SEQ ID NO: 466679 - protein, 14 aa, Homo sapiens
  CDR3 for alpha chain variable domain of TCR clone 233340 (TRAV29/DV5, TRAJ36)
CAARHKTGANNLFF

SEQ ID NO: 466680 - protein, 13 aa, Homo sapiens
  CDR3 for beta chain variable domain of TCR clone 233340 (TRBV20-1, TRBJ2-5)
CSARYTGEETQYF

SEQ ID NO: 466681 - protein, 10 aa, Homo sapiens
  CDR3 for alpha chain variable domain of TCR clone 233341 (TRAV30, TRAJ48)
CGIGNEKLTF

SEQ ID NO: 466682 - protein, 14 aa, Homo sapiens
  CDR3 for beta chain variable domain of TCR clone 233341 (TRBV7-2, TRBJ2-5)
CASSLSGGGETQYF

SEQ ID NO: 466683 - protein, 13 aa, Homo sapiens
  CDR3 for alpha chain variable domain of TCR clone 233342 (TRAV2, TRAJ29)
CAVRNSGNTPLVF

SEQ ID NO: 466684 - protein, 15 aa, Homo sapiens
  CDR3 for beta chain variable domain of TCR clone 233342 (TRBV19, TRBJ2-2)
CASSPRTGWTGELFF

SEQ ID NO: 466685 - protein, 15 aa, Homo sapiens
  CDR3 for alpha chain variable domain of TCR clone 233343 (TRAV14/DV4, TRAJ33)
CAMREGRDSYYQLIW

SEQ ID NO: 466686 - protein, 15 aa, Homo sapiens
  CDR3 for beta chain variable domain of TCR clone 233343 (TRBV5-5, TRBJ1-5)
CASSSTPGSNQPQHF

SEQ ID NO: 466687 - protein, 14 aa, Homo sapiens
  CDR3 for alpha chain variable domain of TCR clone 233344 (TRAV2, TRAJ16)
SAVERGSDGQRLLF

SEQ ID NO: 466688 - protein, 12 aa, Homo sapiens
  CDR3 for beta chain variable domain of TCR clone 233344 (TRBV6-5, TRBJ2-7)
CASYIYGYEQYF

SEQ ID NO: 466689 - protein, 15 aa, Homo sapiens
  CDR3 for alpha chain variable domain of TCR clone 233345 (TRAV8-3, TRAJ37)
CAVGGLSSNTGKRIF

SEQ ID NO: 466690 - protein, 15 aa, Homo sapiens
  CDR3 for beta chain variable domain of TCR clone 233345 (TRBV10-3, TRBJ2-7)
CATREQGLRSYEQYF

SEQ ID NO: 466691 - protein, 12 aa, Homo sapiens
  CDR3 for alpha chain variable domain of TCR clone 233346 (TRAV36/DV7, TRAJ40)
CAVGTGTYKYIF

SEQ ID NO: 466692 - protein, 13 aa, Homo sapiens
  CDR3 for beta chain variable domain of TCR clone 233346 (TRBV29-1, TRBJ2-3)
CSATRGGRDTQYF

SEQ ID NO: 466693 - protein, 15 aa, Homo sapiens
  CDR3 for alpha chain variable domain of TCR clone 233347 (TRAV23/DV6, TRAJ30)
CAASSQESRDDKIIF

SEQ ID NO: 466694 - protein, 11 aa, Homo sapiens
  CDR3 for beta chain variable domain of TCR clone 233347 (TRBV19, TRBJ1-1)
CASSIGSEAFF

SEQ ID NO: 466695 - protein, 13 aa, Homo sapiens
  CDR3 for alpha chain variable domain of TCR clone 233348 (TRAV1-1, TRAJ9)
CAAKNTGGLKTIF

SEQ ID NO: 466696 - protein, 17 aa, Homo sapiens
  CDR3 for beta chain variable domain of TCR clone 233348 (TRBV13, TRBJ2-3)
CASSLSRVAGGRNTQYF

SEQ ID NO: 466697 - protein, 13 aa, Homo sapiens
  CDR3 for alpha chain variable domain of TCR clone 233349 (TRAV26-2, TRAJ43)
CILRAVNNNDMRF

SEQ ID NO: 466698 - protein, 12 aa, Homo sapiens
  CDR3 for beta chain variable domain of TCR clone 233349 (TRBV7-9, TRBJ1-4)
CASSTDREKLFF

SEQ ID NO: 466699 - protein, 16 aa, Homo sapiens
  CDR3 for alpha chain variable domain of TCR clone 233350 (TRAV12-3, TRAJ20)
CAMDKLSFGAGTTVTV

SEQ ID NO: 466700 - protein, 13 aa, Homo sapiens
  CDR3 for beta chain variable domain of TCR clone 233350 (TRBV5-4, TRBJ2-2)
CQSLTSRTGELFF

SEQ ID NO: 466701 - protein, 12 aa, Homo sapiens
  CDR3 for alpha chain variable domain of TCR clone 233351 (TRAV13-2, TRAJ8)
CAPWLGFQKLVF

SEQ ID NO: 466702 - protein, 18 aa, Homo sapiens
  CDR3 for beta chain variable domain of TCR clone 233351 (TRBV11-2, TRBJ2-3)
CASSLGGTSRGAPNTQYF

SEQ ID NO: 466703 - protein, 14 aa, Homo sapiens
  CDR3 for alpha chain variable domain of TCR clone 233352 (TRAV21, TRAJ35)
CAVMPIGFGNVLHC

SEQ ID NO: 466704 - protein, 13 aa, Homo sapiens
  CDR3 for beta chain variable domain of TCR clone 233352 (TRBV4-2, TRBJ2-1)
CASSPGTYNEQFF

SEQ ID NO: 466705 - protein, 13 aa, Homo sapiens
  CDR3 for alpha chain variable domain of TCR clone 233353 (TRAV13-1, TRAJ39)
CAASIWAGNMLTF

SEQ ID NO: 466706 - protein, 15 aa, Homo sapiens
  CDR3 for beta chain variable domain of TCR clone 233353 (TRBV7-3, TRBJ2-1)
CASSLSSGSFDEQFF

SEQ ID NO: 466707 - protein, 11 aa, Homo sapiens
  CDR3 for alpha chain variable domain of TCR clone 233354 (TRAV21, TRAJ11)
CAVNGYSTLTF

SEQ ID NO: 466708 - protein, 17 aa, Homo sapiens
  CDR3 for beta chain variable domain of TCR clone 233354 (TRBV20-1, TRBJ2-1)
CSAPPRLAGTRYNEQFF

SEQ ID NO: 466709 - protein, 14 aa, Homo sapiens
  CDR3 for alpha chain variable domain of TCR clone 233355 (TRAV17, TRAJ54)
CATDANQGAQKLVF

SEQ ID NO: 466710 - protein, 14 aa, Homo sapiens
  CDR3 for beta chain variable domain of TCR clone 233355 (TRBV25-1, TRBJ1-1)
CASTYLGGNTEAFF

SEQ ID NO: 466711 - protein, 14 aa, Homo sapiens
  CDR3 for alpha chain variable domain of TCR clone 233356 (TRAV9-2, TRAJ6)
CALSDPGGSYIPTF

SEQ ID NO: 466712 - protein, 13 aa, Homo sapiens
  CDR3 for beta chain variable domain of TCR clone 233356 (TRBV19, TRBJ2-7)
CASSIDRTYEQYF

SEQ ID NO: 466713 - protein, 13 aa, Homo sapiens
  CDR3 for alpha chain variable domain of TCR clone 233357 (TRAV12-1, TRAJ38)
CVVPAGNNRKLIW

SEQ ID NO: 466714 - protein, 14 aa, Homo sapiens
  CDR3 for beta chain variable domain of TCR clone 233357 (TRBV25-1, TRBJ2-4)
CASSRNSAKNIQYF

SEQ ID NO: 466715 - protein, 15 aa, Homo sapiens
  CDR3 for alpha chain variable domain of TCR clone 233358 (TRAV4, TRAJ10)
CLVGDGAGGGNKLTF

SEQ ID NO: 466716 - protein, 11 aa, Homo sapiens
  CDR3 for beta chain variable domain of TCR clone 233358 (TRBV5-1, TRBJ2-2)
CASSPSRCEHR

SEQ ID NO: 466717 - protein, 14 aa, Homo sapiens
  CDR3 for alpha chain variable domain of TCR clone 233359 (TRAV1-2, TRAJ16)
CAVNRFSDGQNLLF

SEQ ID NO: 466718 - protein, 16 aa, Homo sapiens
  CDR3 for beta chain variable domain of TCR clone 233359 (TRBV19, TRBJ2-1)
CASSKAGPGSYNEQFF

SEQ ID NO: 466719 - protein, 17 aa, Homo sapiens
  CDR3 for alpha chain variable domain of TCR clone 233360 (TRAV3, TRAJ6)
CAVRDGPRAGGSYIPTF

SEQ ID NO: 466720 - protein, 17 aa, Homo sapiens
  CDR3 for beta chain variable domain of TCR clone 233360 (TRBV10-3, TRBJ1-2)
CAISETRDRGLEYGYTF

SEQ ID NO: 466721 - protein, 10 aa, Homo sapiens
  CDR3 for alpha chain variable domain of TCR clone 233361 (TRAV12-2, TRAJ41)
CAVTGYALNF

SEQ ID NO: 466722 - protein, 15 aa, Homo sapiens
  CDR3 for beta chain variable domain of TCR clone 233361 (TRBV4-2, TRBJ2-1)
GASSQDVGLAGEQFF

SEQ ID NO: 466723 - protein, 12 aa, Homo sapiens
  CDR3 for alpha chain variable domain of TCR clone 233362 (TRAV12-3, TRAJ17)
CAMTLTGNKLTF

SEQ ID NO: 466724 - protein, 14 aa, Homo sapiens
  CDR3 for beta chain variable domain of TCR clone 233362 (TRBV7-2, TRBJ2-1)
CASSLGFSYNEQFF

SEQ ID NO: 466725 - protein, 12 aa, Homo sapiens
  CDR3 for alpha chain variable domain of TCR clone 233363 (TRAV3, TRAJ20)
CAVRDPDYKLSF

SEQ ID NO: 466726 - protein, 18 aa, Homo sapiens
  CDR3 for beta chain variable domain of TCR clone 233363 (TRBV4-1, TRBJ2-1)
CASSLVGGELAGFNEQFF

SEQ ID NO: 466727 - protein, 14 aa, Homo sapiens
  CDR3 for alpha chain variable domain of TCR clone 233364 (TRAV1-2, TRAJ8)
CAVREDTGFQKLVF

SEQ ID NO: 466728 - protein, 17 aa, Homo sapiens
  CDR3 for beta chain variable domain of TCR clone 233364 (TRBV25-1, TRBJ2-5)
CASSRRGGRGGQETQYF

SEQ ID NO: 466729 - protein, 14 aa, Homo sapiens
  CDR3 for alpha chain variable domain of TCR clone 233365 (TRAV3, TRAJ34)
CAVRAPGNTDKLIF

SEQ ID NO: 466730 - protein, 17 aa, Homo sapiens
  CDR3 for beta chain variable domain of TCR clone 233365 (TRBV20-1, TRBJ2-7)
CSAAPGLARGISYDQYF

SEQ ID NO: 466731 - protein, 10 aa, Homo sapiens
  CDR3 for alpha chain variable domain of TCR clone 233366 (TRAV8-4, TRAJ39)
CAVAGKMLTF

SEQ ID NO: 466732 - protein, 17 aa, Homo sapiens
  CDR3 for beta chain variable domain of TCR clone 233366 (TRBV20-1, TRBJ2-2)
CSASGSGQGGLTGELFF

SEQ ID NO: 466733 - protein, 17 aa, Homo sapiens
  CDR3 for alpha chain variable domain of TCR clone 233367 (TRAV3, TRAJ6)
CAVRDGPRAGGSYIPTF

SEQ ID NO: 466734 - protein, 14 aa, Homo sapiens
  CDR3 for beta chain variable domain of TCR clone 233367 (TRBV5-4, TRBJ1-2)
CASTRQTGNYGYTF

SEQ ID NO: 466735 - protein, 14 aa, Homo sapiens
  CDR3 for alpha chain variable domain of TCR clone 233368 (TRAV12-1, TRAJ30)
CVVNIGGRDDKIIF

SEQ ID NO: 466736 - protein, 15 aa, Homo sapiens
  CDR3 for beta chain variable domain of TCR clone 233368 (TRBV18, TRBJ1-2)
CASSPSNTPNYVYTF

SEQ ID NO: 466737 - protein, 12 aa, Homo sapiens
  CDR3 for alpha chain variable domain of TCR clone 233369 (TRAV26-1, TRAJ13)
CIVSRGYQKVTF

SEQ ID NO: 466738 - protein, 14 aa, Homo sapiens
  CDR3 for beta chain variable domain of TCR clone 233369 (TRBV7-2, TRBJ2-7)
CASSPKTSLYEQYF

SEQ ID NO: 466739 - protein, 14 aa, Homo sapiens
  CDR3 for alpha chain variable domain of TCR clone 233370 (TRAV30, TRAJ33)
CGTERRFSNYQLIW

SEQ ID NO: 466740 - protein, 13 aa, Homo sapiens
  CDR3 for beta chain variable domain of TCR clone 233370 (TRBV3-1, TRBJ1-1)
CASSQLQGAEAFF

SEQ ID NO: 466741 - protein, 15 aa, Homo sapiens
  CDR3 for alpha chain variable domain of TCR clone 233371 (TRAV14/DV4, TRAJ12)
CAMREERESSYKLIF

SEQ ID NO: 466742 - protein, 14 aa, Homo sapiens
  CDR3 for beta chain variable domain of TCR clone 233371 (TRBV12-5, TRBJ2-5)
CASGSRTHQETQYF

SEQ ID NO: 466743 - protein, 21 aa, Homo sapiens
  CDR3 for alpha chain variable domain of TCR clone 233372 (TRAV1-1, TRAJ6)
CLLLLRCERLERTGGSYIPTF

SEQ ID NO: 466744 - protein, 15 aa, Homo sapiens
  CDR3 for beta chain variable domain of TCR clone 233372 (TRBV6-6, TRBJ2-7)
CASSYSYGGPYEQYF

SEQ ID NO: 466745 - protein, 12 aa, Homo sapiens
  CDR3 for alpha chain variable domain of TCR clone 233373 (TRAV8-3, TRAJ20)
CAVGANDYKLNF

SEQ ID NO: 466746 - protein, 16 aa, Homo sapiens
  CDR3 for beta chain variable domain of TCR clone 233373 (TRBV19, TRBJ2-2)
YASRSPGTGATGELFF

SEQ ID NO: 466747 - protein, 15 aa, Homo sapiens
  CDR3 for alpha chain variable domain of TCR clone 233374 (TRAV23/DV6, TRAJ7)
CAASVGRSGNNRLAF

SEQ ID NO: 466748 - protein, 15 aa, Homo sapiens
  CDR3 for beta chain variable domain of TCR clone 233374 (TRBV12-4, TRBJ1-6)
CASSLLGGSSSPLHF

SEQ ID NO: 466749 - protein, 15 aa, Homo sapiens
  CDR3 for alpha chain variable domain of TCR clone 233375 (TRAV3, TRAJ32)
CAVSSYGGATNKLIF

SEQ ID NO: 466750 - protein, 14 aa, Homo sapiens
  CDR3 for beta chain variable domain of TCR clone 233375 (TRBV4-2, TRBJ2-1)
CASGLDRAYNEQFF

SEQ ID NO: 466751 - protein, 13 aa, Homo sapiens
  CDR3 for alpha chain variable domain of TCR clone 233376 (TRAV20, TRAJ21)
CAVAGYNFNKFYF

SEQ ID NO: 466752 - protein, 18 aa, Homo sapiens
  CDR3 for beta chain variable domain of TCR clone 233376 (TRBV4-1, TRBJ1-5)
CASSQDPRGQGLNQPQHF

SEQ ID NO: 466753 - protein, 13 aa, Homo sapiens
  CDR3 for alpha chain variable domain of TCR clone 233377 (TRAV13-1, TRAJ5)
CAAEHTGRRALTF

SEQ ID NO: 466754 - protein, 13 aa, Homo sapiens
  CDR3 for beta chain variable domain of TCR clone 233377 (TRBV15, TRBJ1-6)
CATSGGLNSPLHF

SEQ ID NO: 466755 - protein, 11 aa, Homo sapiens
  CDR3 for alpha chain variable domain of TCR clone 233378 (TRAV17, TRAJ43)
CATPRSNDVRF

SEQ ID NO: 466756 - protein, 15 aa, Homo sapiens
  CDR3 for beta chain variable domain of TCR clone 233378 (TRBV11-2, TRBJ2-1)
CASSLGTSGLNEQFF

SEQ ID NO: 466757 - protein, 11 aa, Homo sapiens
  CDR3 for alpha chain variable domain of TCR clone 233379 (TRAV12-2, TRAJ49)
CALQGGNQFYF

SEQ ID NO: 466758 - protein, 20 aa, Homo sapiens
  CDR3 for beta chain variable domain of TCR clone 233379 (TRBV7-8, TRBJ2-2)
CASSHLFPGPTIHITGELFF

SEQ ID NO: 466759 - protein, 14 aa, Homo sapiens
  CDR3 for alpha chain variable domain of TCR clone 233380 (TRAV35, TRAJ33)
CAGSSQDSNYQLIW

SEQ ID NO: 466760 - protein, 15 aa, Homo sapiens
  CDR3 for beta chain variable domain of TCR clone 233380 (TRBV20-1, TRBJ2-7)
CSAGSGASGAYEQYF

SEQ ID NO: 466761 - protein, 13 aa, Homo sapiens
  CDR3 for alpha chain variable domain of TCR clone 233381 (TRAV23/DV6, TRAJ5)
CAARAAGRKALTF

SEQ ID NO: 466762 - protein, 15 aa, Homo sapiens
  CDR3 for beta chain variable domain of TCR clone 233381 (TRBV20-1, TRBJ1-1)
CSASRGVTGNTEAFF

SEQ ID NO: 466763 - protein, 15 aa, Homo sapiens
  CDR3 for alpha chain variable domain of TCR clone 233382 (TRAV13-1, TRAJ44)
CAASRGGGTASKPTF

SEQ ID NO: 466764 - protein, 14 aa, Homo sapiens
  CDR3 for beta chain variable domain of TCR clone 233382 (TRBV7-2, TRBJ2-5)
CASSPRGSAETQYF

SEQ ID NO: 466765 - protein, 14 aa, Homo sapiens
  CDR3 for alpha chain variable domain of TCR clone 233383 (TRAV2, TRAJ37)
CAVDFTSNTGKLIF

SEQ ID NO: 466766 - protein, 16 aa, Homo sapiens
  CDR3 for beta chain variable domain of TCR clone 233383 (TRBV6-1, TRBJ1-3)
CASVQGGVETPYILER

SEQ ID NO: 466767 - protein, 11 aa, Homo sapiens
  CDR3 for alpha chain variable domain of TCR clone 233384 (TRAV2, TRAJ13)
CASGGYQKVTF

SEQ ID NO: 466768 - protein, 11 aa, Homo sapiens
  CDR3 for beta chain variable domain of TCR clone 233384 (TRBV7-2, TRBJ2-3)
CASSLGDTQYF

SEQ ID NO: 466769 - protein, 11 aa, Homo sapiens
  CDR3 for alpha chain variable domain of TCR clone 233385 (TRAV12-2, TRAJ27)
CAVNNAGKSTF

SEQ ID NO: 466770 - protein, 14 aa, Homo sapiens
  CDR3 for beta chain variable domain of TCR clone 233385 (TRBV7-2, TRBJ2-5)
CASSPRGSSETQYF

SEQ ID NO: 466771 - protein, 11 aa, Homo sapiens
  CDR3 for alpha chain variable domain of TCR clone 233386 (TRAV2, TRAJ33)
CAVESNYQLIW

SEQ ID NO: 466772 - protein, 21 aa, Homo sapiens
  CDR3 for beta chain variable domain of TCR clone 233386 (TRBV4-2, TRBJ2-3)
PCSQKTRPCISVPAAPDTQYF

SEQ ID NO: 466773 - protein, 13 aa, Homo sapiens
  CDR3 for alpha chain variable domain of TCR clone 233387 (TRAV8-1, TRAJ23)
CSVTGGQGGKLIF

SEQ ID NO: 466774 - protein, 15 aa, Homo sapiens
  CDR3 for beta chain variable domain of TCR clone 233387 (TRBV20-1, TRBJ2-2)
CSAIPGHSNTGELFF

SEQ ID NO: 466775 - protein, 15 aa, Homo sapiens
  CDR3 for alpha chain variable domain of TCR clone 233388 (TRAV3, TRAJ3)
CAVRDMCSSASKIIF

SEQ ID NO: 466776 - protein, 14 aa, Homo sapiens
  CDR3 for beta chain variable domain of TCR clone 233388 (TRBV6-6, TRBJ2-7)
CASSIAGGVDEQYF

SEQ ID NO: 466777 - protein, 15 aa, Homo sapiens
  CDR3 for alpha chain variable domain of TCR clone 233389 (TRAV27, TRAJ38)
CSARRNAGNNRKLIW

SEQ ID NO: 466778 - protein, 16 aa, Homo sapiens
  CDR3 for beta chain variable domain of TCR clone 233389 (TRBV7-2, TRBJ2-1)
CASSPRLAGSNNEQFF

SEQ ID NO: 466779 - protein, 13 aa, Homo sapiens
  CDR3 for alpha chain variable domain of TCR clone 233390 (TRAV3, TRAJ43)
CAVKARNNNDMRF

SEQ ID NO: 466780 - protein, 14 aa, Homo sapiens
  CDR3 for beta chain variable domain of TCR clone 233390 (TRBV19, TRBJ2-1)
CASPTFVLSGEQYF

SEQ ID NO: 466781 - protein, 14 aa, Homo sapiens
  CDR3 for alpha chain variable domain of TCR clone 233391 (TRAV3, TRAJ21)
CAVESQANFNKFYF

SEQ ID NO: 466782 - protein, 12 aa, Homo sapiens
  CDR3 for beta chain variable domain of TCR clone 233391 (TRBV12-4, TRBJ1-1)
CASSLAGLEAFF

SEQ ID NO: 466783 - protein, 13 aa, Homo sapiens
  CDR3 for alpha chain variable domain of TCR clone 233392 (TRAV17, TRAJ5)
CAPMDTCRRALTF

SEQ ID NO: 466784 - protein, 16 aa, Homo sapiens
  CDR3 for beta chain variable domain of TCR clone 233392 (TRBV27, TRBJ2-7)
CASSSERRDSAYEQYF

SEQ ID NO: 466785 - protein, 16 aa, Homo sapiens
  CDR3 for alpha chain variable domain of TCR clone 233393 (TRAV3, TRAJ37)
CAVRPHGSGKTGKLIF

SEQ ID NO: 466786 - protein, 16 aa, Homo sapiens
  CDR3 for beta chain variable domain of TCR clone 233393 (TRBV20-1, TRBJ1-4)
CSAPGQGLLTNEKLFF

SEQ ID NO: 466787 - protein, 13 aa, Homo sapiens
  CDR3 for alpha chain variable domain of TCR clone 233394 (TRAV1-2, TRAJ12)
CAVSMDSSDKLIF

SEQ ID NO: 466788 - protein, 14 aa, Homo sapiens
  CDR3 for beta chain variable domain of TCR clone 233394 (TRBV19, TRBJ2-1)
CASSSGRDYNEQFF

SEQ ID NO: 466789 - protein, 16 aa, Homo sapiens
  CDR3 for alpha chain variable domain of TCR clone 233395 (TRAV3, TRAJ37)
CAVRGKGSGNTGKLIF

SEQ ID NO: 466790 - protein, 15 aa, Homo sapiens
  CDR3 for beta chain variable domain of TCR clone 233395 (TRBV28, TRBJ2-7)
CASSRWDRGSYEQYF

SEQ ID NO: 466791 - protein, 11 aa, Homo sapiens
  CDR3 for alpha chain variable domain of TCR clone 233396 (TRAV12-1, TRAJ8)
CVVTGSQKLVF

SEQ ID NO: 466792 - protein, 14 aa, Homo sapiens
  CDR3 for beta chain variable domain of TCR clone 233396 (TRBV19, TRBJ2-1)
CASGKSTQYNEQFF

SEQ ID NO: 466793 - protein, 15 aa, Homo sapiens
  CDR3 for alpha chain variable domain of TCR clone 233397 (TRAV21, TRAJ53)
CATLNSGGSNYKLTF

SEQ ID NO: 466794 - protein, 13 aa, Homo sapiens
  CDR3 for beta chain variable domain of TCR clone 233397 (TRBV7-9, TRBJ2-3)
CASSPGSTDTRYF

SEQ ID NO: 466795 - protein, 14 aa, Homo sapiens
  CDR3 for alpha chain variable domain of TCR clone 233398 (TRAV27, TRAJ13)
CRSSNSGGYQKVTF

SEQ ID NO: 466796 - protein, 16 aa, Homo sapiens
  CDR3 for beta chain variable domain of TCR clone 233398 (TRBV12-4, TRBJ2-5)
CASSWRPSGDLETQYF

SEQ ID NO: 466797 - protein, 11 aa, Homo sapiens
  CDR3 for alpha chain variable domain of TCR clone 233399 (TRAV21, TRAJ11)
CAVNGYSTLTF

SEQ ID NO: 466798 - protein, 10 aa, Homo sapiens
  CDR3 for beta chain variable domain of TCR clone 233399 (TRBV19, TRBJ1-1)
CQCIGSEAFF

SEQ ID NO: 466799 - protein, 15 aa, Homo sapiens
  CDR3 for alpha chain variable domain of TCR clone 233400 (TRAV13-2, TRAJ5)
CAENPHWTGRRALTF

SEQ ID NO: 466800 - protein, 18 aa, Homo sapiens
  CDR3 for beta chain variable domain of TCR clone 233400 (TRBV7-9, TRBJ1-3)
CASSQTSGLGWAPYILER

SEQ ID NO: 466801 - protein, 18 aa, Homo sapiens
  CDR3 for alpha chain variable domain of TCR clone 233401 (TRAV12-3, TRAJ52)
CAMSVGGAGGTSYGKLTF

SEQ ID NO: 466802 - protein, 15 aa, Homo sapiens
  CDR3 for beta chain variable domain of TCR clone 233401 (TRBV7-3, TRBJ2-6)
CASSLGGSGANVLTF

SEQ ID NO: 466803 - protein, 10 aa, Homo sapiens
  CDR3 for alpha chain variable domain of TCR clone 233402 (TRAV23/DV6, TRAJ43)
CAAAVAALEQ

SEQ ID NO: 466804 - protein, 12 aa, Homo sapiens
  CDR3 for beta chain variable domain of TCR clone 233402 (TRBV7-8, TRBJ2-1)
CASSALAGRVFF

SEQ ID NO: 466805 - protein, 19 aa, Homo sapiens
  CDR3 for alpha chain variable domain of TCR clone 233403 (TRAV26-1, TRAJ52)
CIVRAHRNAGGTSYGKLTF

SEQ ID NO: 466806 - protein, 15 aa, Homo sapiens
  CDR3 for beta chain variable domain of TCR clone 233403 (TRBV12-4, TRBJ2-5)
CASSPPTGVQETQYF

SEQ ID NO: 466807 - protein, 11 aa, Homo sapiens
  CDR3 for alpha chain variable domain of TCR clone 233404 (TRAV1-1, TRAJ23)
CAVRQGGKLIF

SEQ ID NO: 466808 - protein, 15 aa, Homo sapiens
  CDR3 for beta chain variable domain of TCR clone 233404 (TRBV7-2, TRBJ1-5)
CASSSNWGAGQPQHF

SEQ ID NO: 466809 - protein, 16 aa, Homo sapiens
  CDR3 for alpha chain variable domain of TCR clone 233405 (TRAV3, TRAJ10)
CAVRDMRAGGGNKLTF

SEQ ID NO: 466810 - protein, 17 aa, Homo sapiens
  CDR3 for beta chain variable domain of TCR clone 233405 (TRBV28, TRBJ2-7)
CASSPGLAGGDSSEQYF

SEQ ID NO: 466811 - protein, 15 aa, Homo sapiens
  CDR3 for alpha chain variable domain of TCR clone 233406 (TRAV38-2/DV8, TRAJ45)
CAYWDSGGGSDGLTF

SEQ ID NO: 466812 - protein, 15 aa, Homo sapiens
  CDR3 for beta chain variable domain of TCR clone 233406 (TRBV20-1, TRBJ2-7)
CSARDRVSGMDEQYF

SEQ ID NO: 466813 - protein, 16 aa, Homo sapiens
  CDR3 for alpha chain variable domain of TCR clone 233407 (TRAV16, TRAJ52)
CALSAAGGTSYGKLTF

SEQ ID NO: 466814 - protein, 12 aa, Homo sapiens
  CDR3 for beta chain variable domain of TCR clone 233407 (TRBV12-4, TRBJ1-3)
CASIFSGNTIYF

SEQ ID NO: 466815 - protein, 13 aa, Homo sapiens
  CDR3 for alpha chain variable domain of TCR clone 233408 (TRAV12-1, TRAJ38)
CVVPAGNNRKLIW

SEQ ID NO: 466816 - protein, 15 aa, Homo sapiens
  CDR3 for beta chain variable domain of TCR clone 233408 (TRBV10-3, TRBJ2-1)
CAISESASGRKEQFF

SEQ ID NO: 466817 - protein, 13 aa, Homo sapiens
  CDR3 for alpha chain variable domain of TCR clone 233409 (TRAV8-3, TRAJ43)
CAVVPYNNNDMRF

SEQ ID NO: 466818 - protein, 17 aa, Homo sapiens
  CDR3 for beta chain variable domain of TCR clone 233409 (TRBV7-7, TRBJ1-1)
RASIGDRPNLGVTEAFF

SEQ ID NO: 466819 - protein, 16 aa, Homo sapiens
  CDR3 for alpha chain variable domain of TCR clone 233410 (TRAV1-1, TRAJ36)
CAVRDTLLPGANNLFF

SEQ ID NO: 466820 - protein, 18 aa, Homo sapiens
  CDR3 for beta chain variable domain of TCR clone 233410 (TRBV20-1, TRBJ2-3)
CSASGLAGGPGTTDTQYF

SEQ ID NO: 466821 - protein, 13 aa, Homo sapiens
  CDR3 for alpha chain variable domain of TCR clone 233411 (TRAV21, TRAJ57)
CAVTQGGSEKLAF

SEQ ID NO: 466822 - protein, 16 aa, Homo sapiens
  CDR3 for beta chain variable domain of TCR clone 233411 (TRBV29-1, TRBJ2-7)
CSVEDAEDGAAYEQYF

SEQ ID NO: 466823 - protein, 13 aa, Homo sapiens
  CDR3 for alpha chain variable domain of TCR clone 233412 (TRAV12-1, TRAJ6)
CVVYPGGSYIPTF

SEQ ID NO: 466824 - protein, 16 aa, Homo sapiens
  CDR3 for beta chain variable domain of TCR clone 233412 (TRBV6-5, TRBJ2-7)
CASSSDPTSGFYEQYF

SEQ ID NO: 466825 - protein, 16 aa, Homo sapiens
  CDR3 for alpha chain variable domain of TCR clone 233413 (TRAV21, TRAJ33)
CAVSPASMDSNYQLIW

SEQ ID NO: 466826 - protein, 17 aa, Homo sapiens
  CDR3 for beta chain variable domain of TCR clone 233413 (TRBV2, TRBJ1-4)
CASSNRELTQGEEKLFF

SEQ ID NO: 466827 - protein, 13 aa, Homo sapiens
  CDR3 for alpha chain variable domain of TCR clone 233414 (TRAV20, TRAJ37)
CAGCSSNTGKLIF

SEQ ID NO: 466828 - protein, 15 aa, Homo sapiens
  CDR3 for beta chain variable domain of TCR clone 233414 (TRBV19, TRBJ1-6)
CASSTQGAVCSPLHF

SEQ ID NO: 466829 - protein, 17 aa, Homo sapiens
  CDR3 for alpha chain variable domain of TCR clone 233415 (TRAV13-1, TRAJ31)
CAPRDRLMFGDGTQLVV

SEQ ID NO: 466830 - protein, 12 aa, Homo sapiens
  CDR3 for beta chain variable domain of TCR clone 233415 (TRBV7-9, TRBJ2-7)
CASSLEGYQQYF

SEQ ID NO: 466831 - protein, 14 aa, Homo sapiens
  CDR3 for alpha chain variable domain of TCR clone 233416 (TRAV9-2, TRAJ39)
CALYIYNAGNMLTF

SEQ ID NO: 466832 - protein, 13 aa, Homo sapiens
  CDR3 for beta chain variable domain of TCR clone 233416 (TRBV2, TRBJ1-5)
CATAGPGNQPQHF

SEQ ID NO: 466833 - protein, 13 aa, Homo sapiens
  CDR3 for alpha chain variable domain of TCR clone 233417 (TRAV13-1, TRAJ5)
CAASDTGRRALTF

SEQ ID NO: 466834 - protein, 15 aa, Homo sapiens
  CDR3 for beta chain variable domain of TCR clone 233417 (TRBV4-3, TRBJ2-1)
CASSQESAIYNEQFF

SEQ ID NO: 466835 - protein, 16 aa, Homo sapiens
  CDR3 for alpha chain variable domain of TCR clone 233418 (TRAV30, TRAJ24)
CGTEIVDADSWGKFQF

SEQ ID NO: 466836 - protein, 13 aa, Homo sapiens
  CDR3 for beta chain variable domain of TCR clone 233418 (TRBV7-2, TRBJ2-5)
CASSSWRQETQYF

SEQ ID NO: 466837 - protein, 14 aa, Homo sapiens
  CDR3 for alpha chain variable domain of TCR clone 233419 (TRAV17, TRAJ45)
CATASGGGADGLTF

SEQ ID NO: 466838 - protein, 15 aa, Homo sapiens
  CDR3 for beta chain variable domain of TCR clone 233419 (TRBV11-2, TRBJ2-1)
CASSRNRGLMYEEFF

SEQ ID NO: 466839 - protein, 10 aa, Homo sapiens
  CDR3 for alpha chain variable domain of TCR clone 233420 (TRAV23/DV6, TRAJ57)
CAASSTLSQG

SEQ ID NO: 466840 - protein, 15 aa, Homo sapiens
  CDR3 for beta chain variable domain of TCR clone 233420 (TRBV7-9, TRBJ1-4)
CASSATGGNNEKLFF

SEQ ID NO: 466841 - protein, 14 aa, Homo sapiens
  CDR3 for alpha chain variable domain of TCR clone 233421 (TRAV8-4, TRAJ13)
CALTLSGGYQKVTF

SEQ ID NO: 466842 - protein, 14 aa, Homo sapiens
  CDR3 for beta chain variable domain of TCR clone 233421 (TRBV7-2, TRBJ1-2)
CASSQTGSTYSYTF

SEQ ID NO: 466843 - protein, 16 aa, Homo sapiens
  CDR3 for alpha chain variable domain of TCR clone 233422 (TRAV13-1, TRAJ48)
CAASIFGNFGNENLTF

SEQ ID NO: 466844 - protein, 14 aa, Homo sapiens
  CDR3 for beta chain variable domain of TCR clone 233422 (TRBV7-3, TRBJ1-1)
CASSLKGGNTEAFF

SEQ ID NO: 466845 - protein, 14 aa, Homo sapiens
  CDR3 for alpha chain variable domain of TCR clone 233423 (TRAV35, TRAJ22)
CAGLRPGSAKRLTF

SEQ ID NO: 466846 - protein, 13 aa, Homo sapiens
  CDR3 for beta chain variable domain of TCR clone 233423 (TRBV20-1, TRBJ2-7)
CSATHTSGYEQYF

SEQ ID NO: 466847 - protein, 13 aa, Homo sapiens
  CDR3 for alpha chain variable domain of TCR clone 233424 (TRAV23/DV6, TRAJ22)
CAPYSGSARQMTF

SEQ ID NO: 466848 - protein, 13 aa, Homo sapiens
  CDR3 for beta chain variable domain of TCR clone 233424 (TRBV6-1, TRBJ1-1)
CASSRQGNTEAFF

SEQ ID NO: 466849 - protein, 17 aa, Homo sapiens
  CDR3 for alpha chain variable domain of TCR clone 233425 (TRAV3, TRAJ42)
CAVRDMDYGGSQGNLIF

SEQ ID NO: 466850 - protein, 12 aa, Homo sapiens
  CDR3 for beta chain variable domain of TCR clone 233425 (TRBV29-1, TRBJ2-2)
CSVDKYTGELFF

SEQ ID NO: 466851 - protein, 14 aa, Homo sapiens
  CDR3 for alpha chain variable domain of TCR clone 233426 (TRAV26-1, TRAJ38)
CIADNAGNNRTLIW

SEQ ID NO: 466852 - protein, 15 aa, Homo sapiens
  CDR3 for beta chain variable domain of TCR clone 233426 (TRBV20-1, TRBJ1-1)
CSARGGGTLKLSLDK

SEQ ID NO: 466853 - protein, 12 aa, Homo sapiens
  CDR3 for alpha chain variable domain of TCR clone 233427 (TRAV8-3, TRAJ20)
CAVGANDYKLSF

SEQ ID NO: 466854 - protein, 13 aa, Homo sapiens
  CDR3 for beta chain variable domain of TCR clone 233427 (TRBV10-1, TRBJ2-1)
CASSAGPDNEQFF

SEQ ID NO: 466855 - protein, 18 aa, Homo sapiens
  CDR3 for alpha chain variable domain of TCR clone 233428 (TRAV13-1, TRAJ52)
CAAKNPNAGGTSYGKLTF

SEQ ID NO: 466856 - protein, 18 aa, Homo sapiens
  CDR3 for beta chain variable domain of TCR clone 233428 (TRBV4-1, TRBJ1-4)
CASSPRTVGAWTNEKLFF

SEQ ID NO: 466857 - protein, 16 aa, Homo sapiens
  CDR3 for alpha chain variable domain of TCR clone 233429 (TRAV3, TRAJ37)
CAVRVGGSGNSGKLIF

SEQ ID NO: 466858 - protein, 11 aa, Homo sapiens
  CDR3 for beta chain variable domain of TCR clone 233429 (TRBV11-2, TRBJ2-2)
CASSLPGELFF

SEQ ID NO: 466859 - protein, 15 aa, Homo sapiens
  CDR3 for alpha chain variable domain of TCR clone 233430 (TRAV29/DV5, TRAJ54)
CAASPIIQGAQKLVF

SEQ ID NO: 466860 - protein, 13 aa, Homo sapiens
  CDR3 for beta chain variable domain of TCR clone 233430 (TRBV20-1, TRBJ2-1)
CSARSSPRDEQFF

SEQ ID NO: 466861 - protein, 16 aa, Homo sapiens
  CDR3 for alpha chain variable domain of TCR clone 233431 (TRAV8-3, TRAJ13)
CAVGAYPSGGYQKVTF

SEQ ID NO: 466862 - protein, 12 aa, Homo sapiens
  CDR3 for beta chain variable domain of TCR clone 233431 (TRBV7-9, TRBJ2-7)
CASSLEGYEQFF

SEQ ID NO: 466863 - protein, 13 aa, Homo sapiens
  CDR3 for alpha chain variable domain of TCR clone 233432 (TRAV12-3, TRAJ7)
CTMTPYGNNRLAF

SEQ ID NO: 466864 - protein, 16 aa, Homo sapiens
  CDR3 for beta chain variable domain of TCR clone 233432 (TRBV20-1, TRBJ1-4)
RSARPYGGELNEKLFF

SEQ ID NO: 466865 - protein, 14 aa, Homo sapiens
  CDR3 for alpha chain variable domain of TCR clone 233433 (TRAV23/DV6, TRAJ22)
CAASVSGSARQLNF

SEQ ID NO: 466866 - protein, 16 aa, Homo sapiens
  CDR3 for beta chain variable domain of TCR clone 233433 (TRBV19, TRBJ2-2)
CASSFPGQGLAGELFF

SEQ ID NO: 466867 - protein, 12 aa, Homo sapiens
  CDR3 for alpha chain variable domain of TCR clone 233434 (TRAV21, TRAJ13)
PGPSGGYQKVTF

SEQ ID NO: 466868 - protein, 13 aa, Homo sapiens
  CDR3 for beta chain variable domain of TCR clone 233434 (TRBV12-4, TRBJ2-2)
CSSSITGSGELFF

SEQ ID NO: 466869 - protein, 16 aa, Homo sapiens
  CDR3 for alpha chain variable domain of TCR clone 233435 (TRAV16, TRAJ52)
CALSAAGGTSYGKLTF

SEQ ID NO: 466870 - protein, 15 aa, Homo sapiens
  CDR3 for beta chain variable domain of TCR clone 233435 (TRBV12-4, TRBJ1-6)
CASSVAGTGDSPLHF

SEQ ID NO: 466871 - protein, 17 aa, Homo sapiens
  CDR3 for alpha chain variable domain of TCR clone 233436 (TRAV26-1, TRAJ37)
CIVRVITVSSNTGKLII

SEQ ID NO: 466872 - protein, 15 aa, Homo sapiens
  CDR3 for beta chain variable domain of TCR clone 233436 (TRBV10-1, TRBJ2-3)
CASSATSGGFDTQYF

SEQ ID NO: 466873 - protein, 14 aa, Homo sapiens
  CDR3 for alpha chain variable domain of TCR clone 233437 (TRAV14/DV4, TRAJ9)
CAMRESTVGFKTIF

SEQ ID NO: 466874 - protein, 19 aa, Homo sapiens
  CDR3 for beta chain variable domain of TCR clone 233437 (TRBV19, TRBJ2-2)
CASTRPGLAGGRVTWELFF

SEQ ID NO: 466875 - protein, 13 aa, Homo sapiens
  CDR3 for alpha chain variable domain of TCR clone 233438 (TRAV12-2, TRAJ30)
CAVNLNRADKIIF

SEQ ID NO: 466876 - protein, 14 aa, Homo sapiens
  CDR3 for beta chain variable domain of TCR clone 233438 (TRBV7-2, TRBJ1-2)
CASSSQGAHYGYTF

SEQ ID NO: 466877 - protein, 15 aa, Homo sapiens
  CDR3 for alpha chain variable domain of TCR clone 233439 (TRAV8-3, TRAJ27)
CAVGPSKTNAGKSTF

SEQ ID NO: 466878 - protein, 14 aa, Homo sapiens
  CDR3 for beta chain variable domain of TCR clone 233439 (TRBV12-4, TRBJ2-5)
CASSFGASGGTQYF

SEQ ID NO: 466879 - protein, 10 aa, Homo sapiens
  CDR3 for alpha chain variable domain of TCR clone 233440 (TRAV26-1, TRAJ22)
SSGSARQLTF

SEQ ID NO: 466880 - protein, 15 aa, Homo sapiens
  CDR3 for beta chain variable domain of TCR clone 233440 (TRBV4-2, TRBJ1-2)
CASSQRTGGRDGYTF

SEQ ID NO: 466881 - protein, 16 aa, Homo sapiens
  CDR3 for alpha chain variable domain of TCR clone 233441 (TRAV3, TRAJ37)
CAVRGKGSGNKGKLIF

SEQ ID NO: 466882 - protein, 15 aa, Homo sapiens
  CDR3 for beta chain variable domain of TCR clone 233441 (TRBV7-9, TRBJ1-6)
CASSSPGRGNSPLHF

SEQ ID NO: 466883 - protein, 13 aa, Homo sapiens
  CDR3 for alpha chain variable domain of TCR clone 233442 (TRAV17, TRAJ9)
CATGSTGGFKTIF

SEQ ID NO: 466884 - protein, 13 aa, Homo sapiens
  CDR3 for beta chain variable domain of TCR clone 233442 (TRBV20-1, TRBJ1-1)
CSDPLGGGTEAFF

SEQ ID NO: 466885 - protein, 16 aa, Homo sapiens
  CDR3 for alpha chain variable domain of TCR clone 233443 (TRAV3, TRAJ37)
CAVRGEGSCNTGKLIF

SEQ ID NO: 466886 - protein, 13 aa, Homo sapiens
  CDR3 for beta chain variable domain of TCR clone 233443 (TRBV14, TRBJ2-7)
CASSQDRRYEQYF

SEQ ID NO: 466887 - protein, 16 aa, Homo sapiens
  CDR3 for alpha chain variable domain of TCR clone 233444 (TRAV3, TRAJ10)
CAVRDMRAGGGNKLTF

SEQ ID NO: 466888 - protein, 16 aa, Homo sapiens
  CDR3 for beta chain variable domain of TCR clone 233444 (TRBV7-9, TRBJ1-2)
CASSLDFSSGEDGYTF

SEQ ID NO: 466889 - protein, 12 aa, Homo sapiens
  CDR3 for alpha chain variable domain of TCR clone 233445 (TRAV23/DV6, TRAJ32)
CSMHGATTKLIF

SEQ ID NO: 466890 - protein, 17 aa, Homo sapiens
  CDR3 for beta chain variable domain of TCR clone 233445 (TRBV13, TRBJ2-3)
CASSSLGTSGLTDTQYF

SEQ ID NO: 466891 - protein, 13 aa, Homo sapiens
  CDR3 for alpha chain variable domain of TCR clone 233446 (TRAV12-3, TRAJ9)
CAMRNTGGFKTIF

SEQ ID NO: 466892 - protein, 15 aa, Homo sapiens
  CDR3 for beta chain variable domain of TCR clone 233446 (TRBV11-1, TRBJ2-7)
CASSLNYGASYEQYF

SEQ ID NO: 466893 - protein, 12 aa, Homo sapiens
  CDR3 for alpha chain variable domain of TCR clone 233447 (TRAV8-3, TRAJ20)
CAVGWGDYKLSF

SEQ ID NO: 466894 - protein, 12 aa, Homo sapiens
  CDR3 for beta chain variable domain of TCR clone 233447 (TRBV3-1, TRBJ2-7)
CASSQVRYEQYF

SEQ ID NO: 466895 - protein, 15 aa, Homo sapiens
  CDR3 for alpha chain variable domain of TCR clone 233448 (TRAV4, TRAJ10)
CLVGDEEGGGNKLTF

SEQ ID NO: 466896 - protein, 15 aa, Homo sapiens
  CDR3 for beta chain variable domain of TCR clone 233448 (TRBV7-2, TRBJ2-7)
CASSLTGQRTYEQYF

SEQ ID NO: 466897 - protein, 15 aa, Homo sapiens
  CDR3 for alpha chain variable domain of TCR clone 233449 (TRAV3, TRAJ5)
CAVRDLDTGRRALTF

SEQ ID NO: 466898 - protein, 15 aa, Homo sapiens
  CDR3 for beta chain variable domain of TCR clone 233449 (TRBV11-3, TRBJ2-3)
CASNGGLDSTDTQYF

SEQ ID NO: 466899 - protein, 15 aa, Homo sapiens
  CDR3 for alpha chain variable domain of TCR clone 233450 (TRAV26-1, TRAJ44)
CIVRVATGTASKLTF

SEQ ID NO: 466900 - protein, 12 aa, Homo sapiens
  CDR3 for beta chain variable domain of TCR clone 233450 (TRBV7-8, TRBJ2-5)
CASSPSVQTQYF

SEQ ID NO: 466901 - protein, 16 aa, Homo sapiens
  CDR3 for alpha chain variable domain of TCR clone 233451 (TRAV26-1, TRAJ53)
CIVRVAMGGSNSKLTF

SEQ ID NO: 466902 - protein, 13 aa, Homo sapiens
  CDR3 for beta chain variable domain of TCR clone 233451 (TRBV19, TRBJ1-2)
CASSVPGQDGYTF

SEQ ID NO: 466903 - protein, 14 aa, Homo sapiens
  CDR3 for alpha chain variable domain of TCR clone 233452 (TRAV12-2, TRAJ40)
CAVKIPSGTYKYIF

SEQ ID NO: 466904 - protein, 13 aa, Homo sapiens
  CDR3 for beta chain variable domain of TCR clone 233452 (TRBV7-2, TRBJ2-5)
CASSQTSVEIQYF

SEQ ID NO: 466905 - protein, 15 aa, Homo sapiens
  CDR3 for alpha chain variable domain of TCR clone 233453 (TRAV8-4, TRAJ12)
CAVSDRVDSSYKLIF

SEQ ID NO: 466906 - protein, 14 aa, Homo sapiens
  CDR3 for beta chain variable domain of TCR clone 233453 (TRBV7-2, TRBJ2-7)
CASSPKTSFYEQYF

SEQ ID NO: 466907 - protein, 15 aa, Homo sapiens
  CDR3 for alpha chain variable domain of TCR clone 233454 (TRAV17, TRAJ57)
CATDWTPGGSEKLVF

SEQ ID NO: 466908 - protein, 15 aa, Homo sapiens
  CDR3 for beta chain variable domain of TCR clone 233454 (TRBV27, TRBJ2-1)
CASSLAGVPFNEQFF

SEQ ID NO: 466909 - protein, 16 aa, Homo sapiens
  CDR3 for alpha chain variable domain of TCR clone 233455 (TRAV21, TRAJ24)
CAGIRLRSTDSWKLQF

SEQ ID NO: 466910 - protein, 15 aa, Homo sapiens
  CDR3 for beta chain variable domain of TCR clone 233455 (TRBV7-2, TRBJ2-3)
CASSPRGLSTDTQYF

SEQ ID NO: 466911 - protein, 14 aa, Homo sapiens
  CDR3 for alpha chain variable domain of TCR clone 233456 (TRAV1-1, TRAJ28)
CAVQLLGWELPTHF

SEQ ID NO: 466912 - protein, 14 aa, Homo sapiens
  CDR3 for beta chain variable domain of TCR clone 233456 (TRBV20-1, TRBJ1-3)
CSASPTGAGNTIYF

SEQ ID NO: 466913 - protein, 15 aa, Homo sapiens
  CDR3 for alpha chain variable domain of TCR clone 233457 (TRAV3, TRAJ36)
CAVRASQTGANNLFF

SEQ ID NO: 466914 - protein, 16 aa, Homo sapiens
  CDR3 for beta chain variable domain of TCR clone 233457 (TRBV7-2, TRBJ1-2)
CASSSNQDRRGHGYTF

SEQ ID NO: 466915 - protein, 13 aa, Homo sapiens
  CDR3 for alpha chain variable domain of TCR clone 233458 (TRAV1-1, TRAJ9)
CAAKNTGGFKDIF

SEQ ID NO: 466916 - protein, 14 aa, Homo sapiens
  CDR3 for beta chain variable domain of TCR clone 233458 (TRBV20-1, TRBJ2-1)
CSAQIGGSANEQFF

SEQ ID NO: 466917 - protein, 15 aa, Homo sapiens
  CDR3 for alpha chain variable domain of TCR clone 233459 (TRAV21, TRAJ22)
CAVRLFFWFCKATDL

SEQ ID NO: 466918 - protein, 15 aa, Homo sapiens
  CDR3 for beta chain variable domain of TCR clone 233459 (TRBV27, TRBJ2-1)
CASSNGGGSSNEQFF

SEQ ID NO: 466919 - protein, 16 aa, Homo sapiens
  CDR3 for alpha chain variable domain of TCR clone 233460 (TRAV16, TRAJ57)
CAPYLITQGGSEKLVF

SEQ ID NO: 466920 - protein, 15 aa, Homo sapiens
  CDR3 for beta chain variable domain of TCR clone 233460 (TRBV13, TRBJ1-1)
CASSPPTGGVGKAFF

SEQ ID NO: 466921 - protein, 12 aa, Homo sapiens
  CDR3 for alpha chain variable domain of TCR clone 233461 (TRAV2, TRAJ31)
CAVEDNNARLMF

SEQ ID NO: 466922 - protein, 15 aa, Homo sapiens
  CDR3 for beta chain variable domain of TCR clone 233461 (TRBV7-3, TRBJ2-1)
CASSLAGAGADEQFF

SEQ ID NO: 466923 - protein, 14 aa, Homo sapiens
  CDR3 for alpha chain variable domain of TCR clone 233462 (TRAV12-1, TRAJ13)
CVVIDSGGYQKVTF

SEQ ID NO: 466924 - protein, 16 aa, Homo sapiens
  CDR3 for beta chain variable domain of TCR clone 233462 (TRBV12-5, TRBJ2-5)
CASGPRTSGNQETQYF

SEQ ID NO: 466925 - protein, 12 aa, Homo sapiens
  CDR3 for alpha chain variable domain of TCR clone 233463 (TRAV13-1, TRAJ27)
CAAHTNAGKSTF

SEQ ID NO: 466926 - protein, 16 aa, Homo sapiens
  CDR3 for beta chain variable domain of TCR clone 233463 (TRBV5-1, TRBJ2-3)
CASSLALAVVSDTQYF

SEQ ID NO: 466927 - protein, 13 aa, Homo sapiens
  CDR3 for alpha chain variable domain of TCR clone 233464 (TRAV3, TRAJ27)
CAVRPLGAGKSTS

SEQ ID NO: 466928 - protein, 13 aa, Homo sapiens
  CDR3 for beta chain variable domain of TCR clone 233464 (TRBV7-9, TRBJ2-3)
CASSPGSTDTQYF

SEQ ID NO: 466929 - protein, 13 aa, Homo sapiens
  CDR3 for alpha chain variable domain of TCR clone 233465 (TRAV3, TRAJ27)
CAVRPLGAGKSTF

SEQ ID NO: 466930 - protein, 15 aa, Homo sapiens
  CDR3 for beta chain variable domain of TCR clone 233465 (TRBV6-3, TRBJ2-7)
CPSSSPGTVFYEQYF

SEQ ID NO: 466931 - protein, 16 aa, Homo sapiens
  CDR3 for alpha chain variable domain of TCR clone 233466 (TRAV3, TRAJ23)
CAVKIGIYNQGGKLIF

SEQ ID NO: 466932 - protein, 16 aa, Homo sapiens
  CDR3 for beta chain variable domain of TCR clone 233466 (TRBV13, TRBJ2-2)
CASSPRTGEHTGELFF

SEQ ID NO: 466933 - protein, 12 aa, Homo sapiens
  CDR3 for alpha chain variable domain of TCR clone 233467 (TRAV20, TRAJ39)
CAVGNAGNMLPF

SEQ ID NO: 466934 - protein, 17 aa, Homo sapiens
  CDR3 for beta chain variable domain of TCR clone 233467 (TRBV4-1, TRBJ2-3)
CASSQGYVSGGTDTQYF

SEQ ID NO: 466935 - protein, 14 aa, Homo sapiens
  CDR3 for alpha chain variable domain of TCR clone 233468 (TRAV1-2, TRAJ16)
CAVNRFSDGQKLLF

SEQ ID NO: 466936 - protein, 14 aa, Homo sapiens
  CDR3 for beta chain variable domain of TCR clone 233468 (TRBV11-2, TRBJ2-3)
RASSRLARTDTQYF

SEQ ID NO: 466937 - protein, 15 aa, Homo sapiens
  CDR3 for alpha chain variable domain of TCR clone 233469 (TRAV8-4, TRAJ10)
CAVSDGPGGGNKLTF

SEQ ID NO: 466938 - protein, 13 aa, Homo sapiens
  CDR3 for beta chain variable domain of TCR clone 233469 (TRBV28, TRBJ1-3)
CASSFLGSGTRYF

SEQ ID NO: 466939 - protein, 12 aa, Homo sapiens
  CDR3 for alpha chain variable domain of TCR clone 233470 (TRAV12-3, TRAJ17)
CAMTLTGNKLTF

SEQ ID NO: 466940 - protein, 16 aa, Homo sapiens
  CDR3 for beta chain variable domain of TCR clone 233470 (TRBV19, TRBJ2-7)
CASSKAGPSSYNEQYF

SEQ ID NO: 466941 - protein, 12 aa, Homo sapiens
  CDR3 for alpha chain variable domain of TCR clone 233471 (TRAV2, TRAJ29)
CAVDSGNTPLVF

SEQ ID NO: 466942 - protein, 14 aa, Homo sapiens
  CDR3 for beta chain variable domain of TCR clone 233471 (TRBV7-8, TRBJ2-7)
CASSLRGISYEQYF

SEQ ID NO: 466943 - protein, 13 aa, Homo sapiens
  CDR3 for alpha chain variable domain of TCR clone 233472 (TRAV17, TRAJ7)
CATDNYGNNRLAF

SEQ ID NO: 466944 - protein, 16 aa, Homo sapiens
  CDR3 for beta chain variable domain of TCR clone 233472 (TRBV4-1, TRBJ2-5)
CASSQASEASSATQYF

SEQ ID NO: 466945 - protein, 14 aa, Homo sapiens
  CDR3 for alpha chain variable domain of TCR clone 233473 (TRAV12-2, TRAJ13)
CAVKKTGGYQKVTF

SEQ ID NO: 466946 - protein, 14 aa, Homo sapiens
  CDR3 for beta chain variable domain of TCR clone 233473 (TRBV7-9, TRBJ2-4)
CASSLAMGGNIQYF

SEQ ID NO: 466947 - protein, 13 aa, Homo sapiens
  CDR3 for alpha chain variable domain of TCR clone 233474 (TRAV30, TRAJ32)
CGIFGGATNKLIF

SEQ ID NO: 466948 - protein, 12 aa, Homo sapiens
  CDR3 for beta chain variable domain of TCR clone 233474 (TRBV6-5, TRBJ1-2)
CASTDPGYGYTF

SEQ ID NO: 466949 - protein, 14 aa, Homo sapiens
  CDR3 for alpha chain variable domain of TCR clone 233475 (TRAV17, TRAJ53)
CATDAGGSNYKLIF

SEQ ID NO: 466950 - protein, 16 aa, Homo sapiens
  CDR3 for beta chain variable domain of TCR clone 233475 (TRBV4-1, TRBJ1-1)
CASSQDAGMGNTEAFF

SEQ ID NO: 466951 - protein, 15 aa, Homo sapiens
  CDR3 for alpha chain variable domain of TCR clone 233476 (TRAV8-3, TRAJ11)
CAVGLLNSGYSTLTF

SEQ ID NO: 466952 - protein, 20 aa, Homo sapiens
  CDR3 for beta chain variable domain of TCR clone 233476 (TRBV7-8, TRBJ2-2)
CASSHLFPGPTIHITGELFF

SEQ ID NO: 466953 - protein, 13 aa, Homo sapiens
  CDR3 for alpha chain variable domain of TCR clone 233477 (TRAV13-1, TRAJ6)
CAASSGGSYIPTF

SEQ ID NO: 466954 - protein, 12 aa, Homo sapiens
  CDR3 for beta chain variable domain of TCR clone 233477 (TRBV12-4, TRBJ2-1)
CASSPGRNEQFF

SEQ ID NO: 466955 - protein, 18 aa, Homo sapiens
  CDR3 for alpha chain variable domain of TCR clone 233478 (TRAV21, TRAJ52)
CAVRPSPAGGTSYGKPTF

SEQ ID NO: 466956 - protein, 13 aa, Homo sapiens
  CDR3 for beta chain variable domain of TCR clone 233478 (TRBV20-1, TRBJ2-5)
CSAREAFQETQYF

SEQ ID NO: 466957 - protein, 17 aa, Homo sapiens
  CDR3 for alpha chain variable domain of TCR clone 233479 (TRAV23/DV6, TRAJ57)
CAASSTLSQGGSEKLVF

SEQ ID NO: 466958 - protein, 11 aa, Homo sapiens
  CDR3 for beta chain variable domain of TCR clone 233479 (TRBV29-1, TRBJ2-5)
CSEDRTGTQYF

SEQ ID NO: 466959 - protein, 11 aa, Homo sapiens
  CDR3 for alpha chain variable domain of TCR clone 233480 (TRAV21, TRAJ48)
CAVDGNEKLTF

SEQ ID NO: 466960 - protein, 14 aa, Homo sapiens
  CDR3 for beta chain variable domain of TCR clone 233480 (TRBV7-8, TRBJ2-3)
CASSLEAGTDTQYF

SEQ ID NO: 466961 - protein, 11 aa, Homo sapiens
  CDR3 for alpha chain variable domain of TCR clone 233481 (TRAV4, TRAJ31)
CLVGDNARLMF

SEQ ID NO: 466962 - protein, 12 aa, Homo sapiens
  CDR3 for beta chain variable domain of TCR clone 233481 (TRBV12-4, TRBJ1-2)
CASSFIWLHLRF

SEQ ID NO: 466963 - protein, 15 aa, Homo sapiens
  CDR3 for alpha chain variable domain of TCR clone 233482 (TRAV3, TRAJ17)
CAERDTGAAGNKLTF

SEQ ID NO: 466964 - protein, 15 aa, Homo sapiens
  CDR3 for beta chain variable domain of TCR clone 233482 (TRBV20-1, TRBJ2-7)
CSARDRVSGMDEQYF

SEQ ID NO: 466965 - protein, 18 aa, Homo sapiens
  CDR3 for alpha chain variable domain of TCR clone 233483 (TRAV21, TRAJ52)
CAVRPSPAGGTSYGKLTF

SEQ ID NO: 466966 - protein, 12 aa, Homo sapiens
  CDR3 for beta chain variable domain of TCR clone 233483 (TRBV12-4, TRBJ2-3)
CASSTLPDTQYF

SEQ ID NO: 466967 - protein, 18 aa, Homo sapiens
  CDR3 for alpha chain variable domain of TCR clone 233484 (TRAV13-1, TRAJ52)
CAAKNPNAGGTSYGKLTF

SEQ ID NO: 466968 - protein, 13 aa, Homo sapiens
  CDR3 for beta chain variable domain of TCR clone 233484 (TRBV18, TRBJ2-5)
CASSLQGQETQYF

SEQ ID NO: 466969 - protein, 15 aa, Homo sapiens
  CDR3 for alpha chain variable domain of TCR clone 233485 (TRAV23/DV6, TRAJ15)
CAALPAGRNCSDLWE

SEQ ID NO: 466970 - protein, 14 aa, Homo sapiens
  CDR3 for beta chain variable domain of TCR clone 233485 (TRBV7-9, TRBJ1-2)
CASSRQGANYGYAF

SEQ ID NO: 466971 - protein, 16 aa, Homo sapiens
  CDR3 for alpha chain variable domain of TCR clone 233486 (TRAV30, TRAJ24)
CGTEIVDADSWGKFQF

SEQ ID NO: 466972 - protein, 18 aa, Homo sapiens
  CDR3 for beta chain variable domain of TCR clone 233486 (TRBV7-9, TRBJ2-7)
CASSLTTSGSGTWYEQYF

SEQ ID NO: 466973 - protein, 14 aa, Homo sapiens
  CDR3 for alpha chain variable domain of TCR clone 233487 (TRAV40, TRAJ41)
CLLGPPNSGYALNF

SEQ ID NO: 466974 - protein, 14 aa, Homo sapiens
  CDR3 for beta chain variable domain of TCR clone 233487 (TRBV6-1, TRBJ1-3)
CASVQGGGGNTIYF

SEQ ID NO: 466975 - protein, 16 aa, Homo sapiens
  CDR3 for alpha chain variable domain of TCR clone 233488 (TRAV3, TRAJ21)
CAVRDIERGNFNKFYF

SEQ ID NO: 466976 - protein, 13 aa, Homo sapiens
  CDR3 for beta chain variable domain of TCR clone 233488 (TRBV7-2, TRBJ2-2)
CASSLAVTGELFF

SEQ ID NO: 466977 - protein, 22 aa, Homo sapiens
  CDR3 for alpha chain variable domain of TCR clone 233489 (TRAV8-3, TRAJ42)
CAVGEGNEEAKEISSLEKALNS

SEQ ID NO: 466978 - protein, 14 aa, Homo sapiens
  CDR3 for beta chain variable domain of TCR clone 233489 (TRBV7-2, TRBJ2-1)
CASSRGGARNEQFF

SEQ ID NO: 466979 - protein, 18 aa, Homo sapiens
  CDR3 for alpha chain variable domain of TCR clone 233490 (TRAV8-4, TRAJ52)
CAVTRANAGGTSYGKLTF

SEQ ID NO: 466980 - protein, 16 aa, Homo sapiens
  CDR3 for beta chain variable domain of TCR clone 233490 (TRBV4-2, TRBJ1-1)
CASSQAGFGMNTEAFF

SEQ ID NO: 466981 - protein, 18 aa, Homo sapiens
  CDR3 for alpha chain variable domain of TCR clone 233491 (TRAV12-2, )
CAVEDIQNPDPAVYQLRD

SEQ ID NO: 466982 - protein, 16 aa, Homo sapiens
  CDR3 for beta chain variable domain of TCR clone 233491 (TRBV6-1, TRBJ1-2)
CDSSGAWQGRSHGYTF

SEQ ID NO: 466983 - protein, 14 aa, Homo sapiens
  CDR3 for alpha chain variable domain of TCR clone 233492 (TRAV1-2, TRAJ8)
CAVREDTGFQKLEF

SEQ ID NO: 466984 - protein, 16 aa, Homo sapiens
  CDR3 for beta chain variable domain of TCR clone 233492 (TRBV29-1, TRBJ1-2)
CSVAANRDIANYGYTF

SEQ ID NO: 466985 - protein, 13 aa, Homo sapiens
  CDR3 for alpha chain variable domain of TCR clone 233493 (TRAV12-3, TRAJ9)
CAMRNTGGFKTIF

SEQ ID NO: 466986 - protein, 13 aa, Homo sapiens
  CDR3 for beta chain variable domain of TCR clone 233493 (TRBV28, TRBJ2-5)
CASSFAGGETQYF

SEQ ID NO: 466987 - protein, 19 aa, Homo sapiens
  CDR3 for alpha chain variable domain of TCR clone 233494 (TRAV29/DV5, TRAJ49)
CSVLLCSKLTVDTGNQFYF

SEQ ID NO: 466988 - protein, 16 aa, Homo sapiens
  CDR3 for beta chain variable domain of TCR clone 233494 (TRBV13, TRBJ2-2)
CASSPRTGEHTGELFF

SEQ ID NO: 466989 - protein, 14 aa, Homo sapiens
  CDR3 for alpha chain variable domain of TCR clone 233495 (TRAV13-1, TRAJ44)
CAAKATGTASKLTF

SEQ ID NO: 466990 - protein, 12 aa, Homo sapiens
  CDR3 for beta chain variable domain of TCR clone 233495 (TRBV5-1, TRBJ1-2)
CASSQDTYGYTF

SEQ ID NO: 466991 - protein, 14 aa, Homo sapiens
  CDR3 for alpha chain variable domain of TCR clone 233496 (TRAV38-1, TRAJ29)
CAFITPSGNTPPVF

SEQ ID NO: 466992 - protein, 15 aa, Homo sapiens
  CDR3 for beta chain variable domain of TCR clone 233496 (TRBV5-1, TRBJ2-1)
CASSPPRAPYNEQFF

SEQ ID NO: 466993 - protein, 13 aa, Homo sapiens
  CDR3 for alpha chain variable domain of TCR clone 233497 (TRAV12-1, TRAJ12)
CVVNIESSYKFIF

SEQ ID NO: 466994 - protein, 11 aa, Homo sapiens
  CDR3 for beta chain variable domain of TCR clone 233497 (TRBV29-1, TRBJ2-5)
CSEDRTGTQYF

SEQ ID NO: 466995 - protein, 14 aa, Homo sapiens
  CDR3 for alpha chain variable domain of TCR clone 233498 (TRAV8-1, TRAJ39)
CAVNASNAGNMLTL

SEQ ID NO: 466996 - protein, 15 aa, Homo sapiens
  CDR3 for beta chain variable domain of TCR clone 233498 (TRBV28, TRBJ1-5)
CASSLSGYSNQPQHF

SEQ ID NO: 466997 - protein, 15 aa, Homo sapiens
  CDR3 for alpha chain variable domain of TCR clone 233499 (TRAV21, TRAJ53)
WATLNSGGSNYKLTF

SEQ ID NO: 466998 - protein, 16 aa, Homo sapiens
  CDR3 for beta chain variable domain of TCR clone 233499 (TRBV24-1, TRBJ2-3)
CATSDPGTGATDTQYF

SEQ ID NO: 466999 - protein, 13 aa, Homo sapiens
  CDR3 for alpha chain variable domain of TCR clone 233500 (TRAV13-1, TRAJ4)
CAASIGGYNKLIF

SEQ ID NO: 467000 - protein, 18 aa, Homo sapiens
  CDR3 for beta chain variable domain of TCR clone 233500 (TRBV23-1, TRBJ2-3)
CISAPAVNRPASTDTQYF

SEQ ID NO: 467001 - protein, 14 aa, Homo sapiens
  CDR3 for alpha chain variable domain of TCR clone 233501 (TRAV12-1, TRAJ17)
CVVNYKAAGNKLTF

SEQ ID NO: 467002 - protein, 12 aa, Homo sapiens
  CDR3 for beta chain variable domain of TCR clone 233501 (TRBV2, TRBJ2-7)
CASSDPDYEQYF

SEQ ID NO: 467003 - protein, 17 aa, Homo sapiens
  CDR3 for alpha chain variable domain of TCR clone 233502 (TRAV26-1, TRAJ22)
CIVRVPSHSSSARQLTF

SEQ ID NO: 467004 - protein, 16 aa, Homo sapiens
  CDR3 for beta chain variable domain of TCR clone 233502 (TRBV28, TRBJ2-1)
CASRRSGRVVGNEQFF

SEQ ID NO: 467005 - protein, 15 aa, Homo sapiens
  CDR3 for alpha chain variable domain of TCR clone 233503 (TRAV13-1, TRAJ52)
CEASSPSTSYGKLTF

SEQ ID NO: 467006 - protein, 13 aa, Homo sapiens
  CDR3 for beta chain variable domain of TCR clone 233503 (TRBV27, TRBJ2-5)
CASSLSSLETQYF

SEQ ID NO: 467007 - protein, 15 aa, Homo sapiens
  CDR3 for alpha chain variable domain of TCR clone 233504 (TRAV2, TRAJ9)
CAVAALTTGGFKTIF

SEQ ID NO: 467008 - protein, 14 aa, Homo sapiens
  CDR3 for beta chain variable domain of TCR clone 233504 (TRBV7-8, TRBJ2-5)
CASSATGGQETQYF

SEQ ID NO: 467009 - protein, 14 aa, Homo sapiens
  CDR3 for alpha chain variable domain of TCR clone 233505 (TRAV13-1, TRAJ35)
CAASKGGFGNMLHC

SEQ ID NO: 467010 - protein, 13 aa, Homo sapiens
  CDR3 for beta chain variable domain of TCR clone 233505 (TRBV7-3, TRBJ1-1)
CASSQGWGAEAFF

SEQ ID NO: 467011 - protein, 12 aa, Homo sapiens
  CDR3 for alpha chain variable domain of TCR clone 233506 (TRAV8-3, TRAJ20)
CAVGENDYKLSF

SEQ ID NO: 467012 - protein, 17 aa, Homo sapiens
  CDR3 for beta chain variable domain of TCR clone 233506 (TRBV13, TRBJ2-3)
CASSLSRVAGGRNTQYF

SEQ ID NO: 467013 - protein, 16 aa, Homo sapiens
  CDR3 for alpha chain variable domain of TCR clone 233507 (TRAV21, TRAJ33)
CAVSPASMDSNYQLIW

SEQ ID NO: 467014 - protein, 13 aa, Homo sapiens
  CDR3 for beta chain variable domain of TCR clone 233507 (TRBV7-9, TRBJ2-1)
CASSWESYNEQFF

SEQ ID NO: 467015 - protein, 17 aa, Homo sapiens
  CDR3 for alpha chain variable domain of TCR clone 233508 (TRAV1-1, TRAJ4)
CAPYNKLIFGAGTSLAV

SEQ ID NO: 467016 - protein, 16 aa, Homo sapiens
  CDR3 for beta chain variable domain of TCR clone 233508 (TRBV7-3, TRBJ2-2)
CASSLKRGTLSGELFF

SEQ ID NO: 467017 - protein, 13 aa, Homo sapiens
  CDR3 for alpha chain variable domain of TCR clone 233509 (TRAV23/DV6, TRAJ22)
CAPYSGSARQLTF

SEQ ID NO: 467018 - protein, 14 aa, Homo sapiens
  CDR3 for beta chain variable domain of TCR clone 233509 (TRBV4-2, TRBJ2-1)
CASGLDRAYNEQFF

SEQ ID NO: 467019 - protein, 14 aa, Homo sapiens
  CDR3 for alpha chain variable domain of TCR clone 233510 (TRAV2, TRAJ9)
CAVEDRSGGFKTIF

SEQ ID NO: 467020 - protein, 14 aa, Homo sapiens
  CDR3 for beta chain variable domain of TCR clone 233510 (TRBV7-2, TRBJ2-7)
CASSYTTYSYEQYF

SEQ ID NO: 467021 - protein, 14 aa, Homo sapiens
  CDR3 for alpha chain variable domain of TCR clone 233511 (TRAV16, TRAJ32)
CALKSGGATNKLIF

SEQ ID NO: 467022 - protein, 14 aa, Homo sapiens
  CDR3 for beta chain variable domain of TCR clone 233511 (TRBV2, TRBJ2-7)
CASSLASGGYEQYF

SEQ ID NO: 467023 - protein, 13 aa, Homo sapiens
  CDR3 for alpha chain variable domain of TCR clone 233512 (TRAV12-3, TRAJ33)
CAMSVNSNNQLIW

SEQ ID NO: 467024 - protein, 16 aa, Homo sapiens
  CDR3 for beta chain variable domain of TCR clone 233512 (TRBV7-3, TRBJ2-3)
CASSLSGYRPGDTQYF

SEQ ID NO: 467025 - protein, 11 aa, Homo sapiens
  CDR3 for alpha chain variable domain of TCR clone 233513 (TRAV21, TRAJ34)
CAHYNTDKLIF

SEQ ID NO: 467026 - protein, 15 aa, Homo sapiens
  CDR3 for beta chain variable domain of TCR clone 233513 (TRBV27, TRBJ1-5)
CASKTQGAGNKPQHF

SEQ ID NO: 467027 - protein, 14 aa, Homo sapiens
  CDR3 for alpha chain variable domain of TCR clone 233514 (TRAV38-1, TRAJ40)
CALRPTSGTYKYIF

SEQ ID NO: 467028 - protein, 20 aa, Homo sapiens
  CDR3 for beta chain variable domain of TCR clone 233514 (TRBV7-8, TRBJ2-1)
CASSLAHRLAGVRSYNEQFF

SEQ ID NO: 467029 - protein, 12 aa, Homo sapiens
  CDR3 for alpha chain variable domain of TCR clone 233515 (TRAV1-2, TRAJ26)
CAVRYYGQNFVF

SEQ ID NO: 467030 - protein, 15 aa, Homo sapiens
  CDR3 for beta chain variable domain of TCR clone 233515 (TRBV27, TRBJ2-1)
CASSNGGGSSNEQFF

SEQ ID NO: 467031 - protein, 15 aa, Homo sapiens
  CDR3 for alpha chain variable domain of TCR clone 233516 (TRAV3, TRAJ5)
CAVRDRKTGGRALTF

SEQ ID NO: 467032 - protein, 15 aa, Homo sapiens
  CDR3 for beta chain variable domain of TCR clone 233516 (TRBV7-8, TRBJ2-1)
CASSLADSLYNQQFF

SEQ ID NO: 467033 - protein, 14 aa, Homo sapiens
  CDR3 for alpha chain variable domain of TCR clone 233517 (TRAV2, TRAJ9)
CAVEDRRGGFKTIF

SEQ ID NO: 467034 - protein, 15 aa, Homo sapiens
  CDR3 for beta chain variable domain of TCR clone 233517 (TRBV10-2, TRBJ2-6)
CASSEQGTGANVLTF

SEQ ID NO: 467035 - protein, 16 aa, Homo sapiens
  CDR3 for alpha chain variable domain of TCR clone 233518 (TRAV16, TRAJ4)
CALRRMFSGGYNKLIF

SEQ ID NO: 467036 - protein, 16 aa, Homo sapiens
  CDR3 for beta chain variable domain of TCR clone 233518 (TRBV24-1, TRBJ2-3)
CATSDPGTGATDTQYS

SEQ ID NO: 467037 - protein, 14 aa, Homo sapiens
  CDR3 for alpha chain variable domain of TCR clone 233519 (TRAV26-1, TRAJ39)
CLVRGSRAGNMLTF

SEQ ID NO: 467038 - protein, 15 aa, Homo sapiens
  CDR3 for beta chain variable domain of TCR clone 233519 (TRBV7-9, TRBJ1-5)
CASSQGHQPNQPQQF

SEQ ID NO: 467039 - protein, 16 aa, Homo sapiens
  CDR3 for alpha chain variable domain of TCR clone 233520 (TRAV36/DV7, TRAJ30)
CAVETYGLDRDDKIIF

SEQ ID NO: 467040 - protein, 15 aa, Homo sapiens
  CDR3 for beta chain variable domain of TCR clone 233520 (TRBV6-6, TRBJ2-5)
CASSYGNIIQETQYF

SEQ ID NO: 467041 - protein, 11 aa, Homo sapiens
  CDR3 for alpha chain variable domain of TCR clone 233521 (TRAV1-2, TRAJ20)
CAVSNDYKLSF

SEQ ID NO: 467042 - protein, 13 aa, Homo sapiens
  CDR3 for beta chain variable domain of TCR clone 233521 (TRBV29-1, TRBJ1-3)
CSVEGGRGNTVYS

SEQ ID NO: 467043 - protein, 12 aa, Homo sapiens
  CDR3 for alpha chain variable domain of TCR clone 233522 (TRAV2, TRAJ31)
CAVEDNNARLMF

SEQ ID NO: 467044 - protein, 16 aa, Homo sapiens
  CDR3 for beta chain variable domain of TCR clone 233522 (TRBV3-1, TRBJ2-2)
CASSHYSGRSTGELFF

SEQ ID NO: 467045 - protein, 11 aa, Homo sapiens
  CDR3 for alpha chain variable domain of TCR clone 233523 (TRAV13-1, TRAJ39)
CASHAGNMLTF

SEQ ID NO: 467046 - protein, 14 aa, Homo sapiens
  CDR3 for beta chain variable domain of TCR clone 233523 (TRBV6-5, TRBJ2-7)
CAASRSGGSYEQYF

SEQ ID NO: 467047 - protein, 12 aa, Homo sapiens
  CDR3 for alpha chain variable domain of TCR clone 233524 (TRAV17, TRAJ49)
CATVTTGNQFDF

SEQ ID NO: 467048 - protein, 18 aa, Homo sapiens
  CDR3 for beta chain variable domain of TCR clone 233524 (TRBV11-2, TRBJ2-6)
CASSLNPFLGTGANVLTF

SEQ ID NO: 467049 - protein, 12 aa, Homo sapiens
  CDR3 for alpha chain variable domain of TCR clone 233525 (TRAV21, TRAJ13)
PGPSGGYQKVTF

SEQ ID NO: 467050 - protein, 12 aa, Homo sapiens
  CDR3 for beta chain variable domain of TCR clone 233525 (TRBV19, TRBJ2-1)
CASSRQGAEQFF

SEQ ID NO: 467051 - protein, 12 aa, Homo sapiens
  CDR3 for alpha chain variable domain of TCR clone 233526 (TRAV1-1, TRAJ43)
CAPRVSSNDMRF

SEQ ID NO: 467052 - protein, 15 aa, Homo sapiens
  CDR3 for beta chain variable domain of TCR clone 233526 (TRBV5-1, TRBJ2-7)
CASSLGDFTTYEQYL

SEQ ID NO: 467053 - protein, 13 aa, Homo sapiens
  CDR3 for alpha chain variable domain of TCR clone 233527 (TRAV13-2, TRAJ13)
CAERQGGYQKVTF

SEQ ID NO: 467054 - protein, 16 aa, Homo sapiens
  CDR3 for beta chain variable domain of TCR clone 233527 (TRBV5-1, TRBJ1-1)
CASSSGGNSLNTEAFF

SEQ ID NO: 467055 - protein, 13 aa, Homo sapiens
  CDR3 for alpha chain variable domain of TCR clone 233528 (TRAV3, TRAJ21)
CAVRESDFNKFYF

SEQ ID NO: 467056 - protein, 15 aa, Homo sapiens
  CDR3 for beta chain variable domain of TCR clone 233528 (TRBV7-8, TRBJ1-1)
CASSLGDSRNTEAFV

SEQ ID NO: 467057 - protein, 13 aa, Homo sapiens
  CDR3 for alpha chain variable domain of TCR clone 233529 (TRAV21, TRAJ27)
CAARPGNAGKSTF

SEQ ID NO: 467058 - protein, 13 aa, Homo sapiens
  CDR3 for beta chain variable domain of TCR clone 233529 (TRBV7-6, TRBJ2-3)
CASSLRSDNTQYF

SEQ ID NO: 467059 - protein, 18 aa, Homo sapiens
  CDR3 for alpha chain variable domain of TCR clone 233530 (TRAV26-2, TRAJ33)
CCVLLHPEGPASNYQLIW

SEQ ID NO: 467060 - protein, 18 aa, Homo sapiens
  CDR3 for beta chain variable domain of TCR clone 233530 (TRBV10-3, TRBJ2-2)
CTSVPSTRQGANTGELFF

SEQ ID NO: 467061 - protein, 13 aa, Homo sapiens
  CDR3 for alpha chain variable domain of TCR clone 233531 (TRAV12-3, TRAJ7)
CAMSASGNNRLAF

SEQ ID NO: 467062 - protein, 12 aa, Homo sapiens
  CDR3 for beta chain variable domain of TCR clone 233531 (TRBV11-2, TRBJ2-2)
CASSLGGGELFF

SEQ ID NO: 467063 - protein, 17 aa, Homo sapiens
  CDR3 for alpha chain variable domain of TCR clone 233532 (TRAV4, )
CLVDIQNPDPAVYQLRD

SEQ ID NO: 467064 - protein, 15 aa, Homo sapiens
  CDR3 for beta chain variable domain of TCR clone 233532 (TRBV5-1, TRBJ2-1)
CASTGSGRTYNEQFF

SEQ ID NO: 467065 - protein, 14 aa, Homo sapiens
  CDR3 for alpha chain variable domain of TCR clone 233533 (TRAV12-1, TRAJ30)
CVVNIGGRDDKIIF

SEQ ID NO: 467066 - protein, 11 aa, Homo sapiens
  CDR3 for beta chain variable domain of TCR clone 233533 (TRBV12-4, TRBJ2-3)
CASTATDTQYF

SEQ ID NO: 467067 - protein, 12 aa, Homo sapiens
  CDR3 for alpha chain variable domain of TCR clone 233534 (TRAV21, TRAJ33)
CAKMDSNYQLIW

SEQ ID NO: 467068 - protein, 12 aa, Homo sapiens
  CDR3 for beta chain variable domain of TCR clone 233534 (TRBV29-1, TRBJ2-3)
CSVTGGADTQYF

SEQ ID NO: 467069 - protein, 13 aa, Homo sapiens
  CDR3 for alpha chain variable domain of TCR clone 233535 (TRAV2, TRAJ40)
CAVVTSGTYKYIF

SEQ ID NO: 467070 - protein, 14 aa, Homo sapiens
  CDR3 for beta chain variable domain of TCR clone 233535 (TRBV19, TRBJ2-1)
CDSPTFVLSGEKFF

SEQ ID NO: 467071 - protein, 12 aa, Homo sapiens
  CDR3 for alpha chain variable domain of TCR clone 233536 (TRAV21, TRAJ13)
PGPSGGYQKVTF

SEQ ID NO: 467072 - protein, 13 aa, Homo sapiens
  CDR3 for beta chain variable domain of TCR clone 233536 (TRBV14, TRBJ2-7)
CASSQDRRYEQYF

SEQ ID NO: 467073 - protein, 15 aa, Homo sapiens
  CDR3 for alpha chain variable domain of TCR clone 233537 (TRAV23/DV6, TRAJ38)
CAARSNAGNNRQLIW

SEQ ID NO: 467074 - protein, 16 aa, Homo sapiens
  CDR3 for beta chain variable domain of TCR clone 233537 (TRBV10-2, TRBJ1-5)
CASSRDRDYSNQPQHF

SEQ ID NO: 467075 - protein, 12 aa, Homo sapiens
  CDR3 for alpha chain variable domain of TCR clone 233538 (TRAV2, TRAJ34)
CAVERNTEKLIF

SEQ ID NO: 467076 - protein, 14 aa, Homo sapiens
  CDR3 for beta chain variable domain of TCR clone 233538 (TRBV7-9, TRBJ2-1)
CASSDNSGYNEQFF

SEQ ID NO: 467077 - protein, 16 aa, Homo sapiens
  CDR3 for alpha chain variable domain of TCR clone 233539 (TRAV17, TRAJ52)
CATGVIGGTSYGKLTF

SEQ ID NO: 467078 - protein, 12 aa, Homo sapiens
  CDR3 for beta chain variable domain of TCR clone 233539 (TRBV7-3, TRBJ2-1)
CASSFINNEQFF

SEQ ID NO: 467079 - protein, 15 aa, Homo sapiens
  CDR3 for alpha chain variable domain of TCR clone 233540 (TRAV21, TRAJ45)
SAVSYSGGGADGLTF

SEQ ID NO: 467080 - protein, 13 aa, Homo sapiens
  CDR3 for beta chain variable domain of TCR clone 233540 (TRBV20-1, TRBJ2-5)
CSAATELQETQYF

SEQ ID NO: 467081 - protein, 14 aa, Homo sapiens
  CDR3 for alpha chain variable domain of TCR clone 233541 (TRAV12-2, TRAJ13)
CAVNPSVGYQKVTF

SEQ ID NO: 467082 - protein, 13 aa, Homo sapiens
  CDR3 for beta chain variable domain of TCR clone 233541 (TRBV20-1, TRBJ1-6)
CSAKLGGTSPLHF

SEQ ID NO: 467083 - protein, 17 aa, Homo sapiens
  CDR3 for alpha chain variable domain of TCR clone 233542 (TRAV13-1, TRAJ31)
CAPRDRLMFGDGTQLVV

SEQ ID NO: 467084 - protein, 15 aa, Homo sapiens
  CDR3 for beta chain variable domain of TCR clone 233542 (TRBV7-2, TRBJ2-1)
CASSFQADEYNEQFF

SEQ ID NO: 467085 - protein, 16 aa, Homo sapiens
  CDR3 for alpha chain variable domain of TCR clone 233543 (TRAV30, TRAJ24)
CGTEIVDADSWGKFQF

SEQ ID NO: 467086 - protein, 14 aa, Homo sapiens
  CDR3 for beta chain variable domain of TCR clone 233543 (TRBV6-3, TRBJ2-5)
CASRRDGGEETQYF

SEQ ID NO: 467087 - protein, 13 aa, Homo sapiens
  CDR3 for alpha chain variable domain of TCR clone 233544 (TRAV20, TRAJ21)
CDVEGYNFNKFYF

SEQ ID NO: 467088 - protein, 14 aa, Homo sapiens
  CDR3 for beta chain variable domain of TCR clone 233544 (TRBV12-5, TRBJ2-5)
CASGSRTHQETQYF

SEQ ID NO: 467089 - protein, 18 aa, Homo sapiens
  CDR3 for alpha chain variable domain of TCR clone 233545 (TRAV38-2/DV8, TRAJ42)
CAYRSADLTGGSQGNLIF

SEQ ID NO: 467090 - protein, 12 aa, Homo sapiens
  CDR3 for beta chain variable domain of TCR clone 233545 (TRBV11-2, TRBJ2-2)
CARSLGGGELFF

SEQ ID NO: 467091 - protein, 15 aa, Homo sapiens
  CDR3 for alpha chain variable domain of TCR clone 233546 (TRAV2, TRAJ24)
CAVVRLTNSWGKLQF

SEQ ID NO: 467092 - protein, 16 aa, Homo sapiens
  CDR3 for beta chain variable domain of TCR clone 233546 (TRBV7-7, TRBJ2-3)
CASSAGTSGSTDTQYF

SEQ ID NO: 467093 - protein, 13 aa, Homo sapiens
  CDR3 for alpha chain variable domain of TCR clone 233547 (TRAV21, TRAJ56)
CAVRTGANSKLTF

SEQ ID NO: 467094 - protein, 15 aa, Homo sapiens
  CDR3 for beta chain variable domain of TCR clone 233547 (TRBV7-9, TRBJ1-1)
CASSHRGAVNTEAFF

SEQ ID NO: 467095 - protein, 15 aa, Homo sapiens
  CDR3 for alpha chain variable domain of TCR clone 233548 (TRAV29/DV5, TRAJ24)
CAASGATDSWGKFQF

SEQ ID NO: 467096 - protein, 12 aa, Homo sapiens
  CDR3 for beta chain variable domain of TCR clone 233548 (TRBV11-2, TRBJ2-2)
CARASLPGSCFF

SEQ ID NO: 467097 - protein, 14 aa, Homo sapiens
  CDR3 for alpha chain variable domain of TCR clone 233549 (TRAV27, TRAJ22)
CAGLPSGSARQLTF

SEQ ID NO: 467098 - protein, 13 aa, Homo sapiens
  CDR3 for beta chain variable domain of TCR clone 233549 (TRBV7-3, TRBJ2-5)
CASSFRGGETQYF

SEQ ID NO: 467099 - protein, 14 aa, Homo sapiens
  CDR3 for alpha chain variable domain of TCR clone 233550 (TRAV13-2, TRAJ11)
RAETGNSGYSTLTF

SEQ ID NO: 467100 - protein, 11 aa, Homo sapiens
  CDR3 for beta chain variable domain of TCR clone 233550 (TRBV10-3, TRBJ2-7)
CAISEGLEQYF

SEQ ID NO: 467101 - protein, 15 aa, Homo sapiens
  CDR3 for alpha chain variable domain of TCR clone 233551 (TRAV27, TRAJ38)
CAARRNAGNNGKRIW

SEQ ID NO: 467102 - protein, 13 aa, Homo sapiens
  CDR3 for beta chain variable domain of TCR clone 233551 (TRBV12-5, TRBJ2-3)
CASGDRQSDTQYF

SEQ ID NO: 467103 - protein, 14 aa, Homo sapiens
  CDR3 for alpha chain variable domain of TCR clone 233552 (TRAV12-1, TRAJ22)
CVVPYRGSARQLTF

SEQ ID NO: 467104 - protein, 15 aa, Homo sapiens
  CDR3 for beta chain variable domain of TCR clone 233552 (TRBV12-4, TRBJ2-1)
CASSLGTSAVKEQFF

SEQ ID NO: 467105 - protein, 15 aa, Homo sapiens
  CDR3 for alpha chain variable domain of TCR clone 233553 (TRAV13-2, TRAJ40)
CAENRSRQGTYKYNF

SEQ ID NO: 467106 - protein, 15 aa, Homo sapiens
  CDR3 for beta chain variable domain of TCR clone 233553 (TRBV19, TRBJ2-1)
CASSMGWNSNNEQFF

SEQ ID NO: 467107 - protein, 14 aa, Homo sapiens
  CDR3 for alpha chain variable domain of TCR clone 233554 (TRAV1-1, TRAJ27)
CAVIYNTNAGKSTL

SEQ ID NO: 467108 - protein, 22 aa, Homo sapiens
  CDR3 for beta chain variable domain of TCR clone 233554 (TRBV7-2, TRBJ2-1)
RRTRPCISVPAAPLAGGNEQFF

SEQ ID NO: 467109 - protein, 14 aa, Homo sapiens
  CDR3 for alpha chain variable domain of TCR clone 233555 (TRAV4, TRAJ43)
CLVGPMYNNNDMRF

SEQ ID NO: 467110 - protein, 21 aa, Homo sapiens
  CDR3 for beta chain variable domain of TCR clone 233555 (TRBV11-1, TRBJ2-1)
CASSARARLRPEGPSYNEQFF

SEQ ID NO: 467111 - protein, 15 aa, Homo sapiens
  CDR3 for alpha chain variable domain of TCR clone 233556 (TRAV21, TRAJ53)
CAALNSGGSNYKLTF

SEQ ID NO: 467112 - protein, 14 aa, Homo sapiens
  CDR3 for beta chain variable domain of TCR clone 233556 (TRBV20-1, TRBJ2-1)
CSAQIGGSANEQFF

SEQ ID NO: 467113 - protein, 14 aa, Homo sapiens
  CDR3 for alpha chain variable domain of TCR clone 233557 (TRAV23/DV6, TRAJ24)
CAASLSDSWGKLKF

SEQ ID NO: 467114 - protein, 15 aa, Homo sapiens
  CDR3 for beta chain variable domain of TCR clone 233557 (TRBV9, TRBJ1-6)
CASSVAGTGDSPLHF

SEQ ID NO: 467115 - protein, 14 aa, Homo sapiens
  CDR3 for alpha chain variable domain of TCR clone 233558 (TRAV9-2, TRAJ39)
CALYIYNAGNMLTF

SEQ ID NO: 467116 - protein, 12 aa, Homo sapiens
  CDR3 for beta chain variable domain of TCR clone 233558 (TRBV5-1, TRBJ2-7)
CASSLDSYEQYF

SEQ ID NO: 467117 - protein, 14 aa, Homo sapiens
  CDR3 for alpha chain variable domain of TCR clone 233559 (TRAV17, TRAJ57)
CATDPQGGSEKRVF

SEQ ID NO: 467118 - protein, 15 aa, Homo sapiens
  CDR3 for beta chain variable domain of TCR clone 233559 (TRBV6-3, TRBJ2-7)
CASSSPGTVFYEQYF

SEQ ID NO: 467119 - protein, 12 aa, Homo sapiens
  CDR3 for alpha chain variable domain of TCR clone 233560 (TRAV13-1, TRAJ20)
CAASMGDYKLSF

SEQ ID NO: 467120 - protein, 14 aa, Homo sapiens
  CDR3 for beta chain variable domain of TCR clone 233560 (TRBV7-2, TRBJ2-2)
CASKGQGAAGELFF

SEQ ID NO: 467121 - protein, 14 aa, Homo sapiens
  CDR3 for alpha chain variable domain of TCR clone 233561 (TRAV29/DV5, TRAJ34)
CPASASRETDKLIF

SEQ ID NO: 467122 - protein, 15 aa, Homo sapiens
  CDR3 for beta chain variable domain of TCR clone 233561 (TRBV7-8, TRBJ2-7)
CASSLERAGSYEQYF

SEQ ID NO: 467123 - protein, 15 aa, Homo sapiens
  CDR3 for alpha chain variable domain of TCR clone 233562 (TRAV12-3, TRAJ6)
CSMSATSGGSYIPTF

SEQ ID NO: 467124 - protein, 11 aa, Homo sapiens
  CDR3 for beta chain variable domain of TCR clone 233562 (TRBV20-1, TRBJ1-5)
CSAQGDQPQHF

SEQ ID NO: 467125 - protein, 11 aa, Homo sapiens
  CDR3 for alpha chain variable domain of TCR clone 233563 (TRAV2, TRAJ33)
CAVESNYQLIW

SEQ ID NO: 467126 - protein, 16 aa, Homo sapiens
  CDR3 for beta chain variable domain of TCR clone 233563 (TRBV20-1, TRBJ1-4)
CSAPGQGLLTNEKPFF

SEQ ID NO: 467127 - protein, 15 aa, Homo sapiens
  CDR3 for alpha chain variable domain of TCR clone 233564 (TRAV8-4, TRAJ15)
CAVSDSVQAGTALIF

SEQ ID NO: 467128 - protein, 15 aa, Homo sapiens
  CDR3 for beta chain variable domain of TCR clone 233564 (TRBV10-2, TRBJ2-6)
CASSEQGTGANVLTF

SEQ ID NO: 467129 - protein, 16 aa, Homo sapiens
  CDR3 for alpha chain variable domain of TCR clone 233565 (TRAV24, TRAJ53)
CAFNMGGGGSNYKLTF

SEQ ID NO: 467130 - protein, 16 aa, Homo sapiens
  CDR3 for beta chain variable domain of TCR clone 233565 (TRBV19, TRBJ2-1)
CASSKAGPSSYNEQFF

SEQ ID NO: 467131 - protein, 13 aa, Homo sapiens
  CDR3 for alpha chain variable domain of TCR clone 233566 (TRAV12-2, TRAJ18)
CAVRGSTLGRLYF

SEQ ID NO: 467132 - protein, 15 aa, Homo sapiens
  CDR3 for beta chain variable domain of TCR clone 233566 (TRBV5-1, TRBJ1-1)
CASSSTTGTNTEAFF

SEQ ID NO: 467133 - protein, 12 aa, Homo sapiens
  CDR3 for alpha chain variable domain of TCR clone 233567 (TRAV12-2, TRAJ30)
CAVRNRDDKFIF

SEQ ID NO: 467134 - protein, 15 aa, Homo sapiens
  CDR3 for beta chain variable domain of TCR clone 233567 (TRBV6-3, TRBJ1-5)
CASRVDRWSNQPQHF

SEQ ID NO: 467135 - protein, 14 aa, Homo sapiens
  CDR3 for alpha chain variable domain of TCR clone 233568 (TRAV12-3, TRAJ10)
SHLPLTGEGNKLTF

SEQ ID NO: 467136 - protein, 15 aa, Homo sapiens
  CDR3 for beta chain variable domain of TCR clone 233568 (TRBV11-2, TRBJ1-3)
CASSLDGTVGNTIYF

SEQ ID NO: 467137 - protein, 15 aa, Homo sapiens
  CDR3 for alpha chain variable domain of TCR clone 233569 (TRAV25, TRAJ52)
CAGRPGGTSYGKLTF

SEQ ID NO: 467138 - protein, 13 aa, Homo sapiens
  CDR3 for beta chain variable domain of TCR clone 233569 (TRBV7-3, TRBJ1-1)
CASSQGWGAEAFF

SEQ ID NO: 467139 - protein, 14 aa, Homo sapiens
  CDR3 for alpha chain variable domain of TCR clone 233570 (TRAV16, TRAJ39)
CALSKNNAGNMLTF

SEQ ID NO: 467140 - protein, 14 aa, Homo sapiens
  CDR3 for beta chain variable domain of TCR clone 233570 (TRBV19, TRBJ2-1)
CASPTFVLSGEQFF

SEQ ID NO: 467141 - protein, 18 aa, Homo sapiens
  CDR3 for alpha chain variable domain of TCR clone 233571 (TRAV38-2/DV8, TRAJ42)
FAYRSADLTGGSQGNLIF

SEQ ID NO: 467142 - protein, 12 aa, Homo sapiens
  CDR3 for beta chain variable domain of TCR clone 233571 (TRBV11-2, TRBJ2-2)
CASSLGGGELFF

SEQ ID NO: 467143 - protein, 13 aa, Homo sapiens
  CDR3 for alpha chain variable domain of TCR clone 233572 (TRAV21, TRAJ27)
CAARPGNAGKSTF

SEQ ID NO: 467144 - protein, 15 aa, Homo sapiens
  CDR3 for beta chain variable domain of TCR clone 233572 (TRBV25-1, TRBJ1-4)
CASSPGDSTNEKLFF

SEQ ID NO: 467145 - protein, 14 aa, Homo sapiens
  CDR3 for alpha chain variable domain of TCR clone 233573 (TRAV16, TRAJ29)
CALTRNSGNTPLVF

SEQ ID NO: 467146 - protein, 12 aa, Homo sapiens
  CDR3 for beta chain variable domain of TCR clone 233573 (TRBV11-2, TRBJ2-2)
CASSLGGGELFF

SEQ ID NO: 467147 - protein, 14 aa, Homo sapiens
  CDR3 for alpha chain variable domain of TCR clone 233574 (TRAV12-2, TRAJ48)
CTVNAFFGNEKLTF

SEQ ID NO: 467148 - protein, 13 aa, Homo sapiens
  CDR3 for beta chain variable domain of TCR clone 233574 (TRBV28, TRBJ2-7)
CAGAQQGLDEQYF

SEQ ID NO: 467149 - protein, 15 aa, Homo sapiens
  CDR3 for alpha chain variable domain of TCR clone 233575 (TRAV8-4, TRAJ36)
CAVRKSWTGANNPFF

SEQ ID NO: 467150 - protein, 17 aa, Homo sapiens
  CDR3 for beta chain variable domain of TCR clone 233575 (TRBV3-1, TRBJ2-2)
CASSQDSQGPNAGELFF

SEQ ID NO: 467151 - protein, 13 aa, Homo sapiens
  CDR3 for alpha chain variable domain of TCR clone 233576 (TRAV3, TRAJ20)
CCEAFCIDYKLSF

SEQ ID NO: 467152 - protein, 15 aa, Homo sapiens
  CDR3 for beta chain variable domain of TCR clone 233576 (TRBV19, TRBJ2-6)
CASVRRDSGANVLTF

SEQ ID NO: 467153 - protein, 10 aa, Homo sapiens
  CDR3 for alpha chain variable domain of TCR clone 233577 (TRAV23/DV6, TRAJ57)
CAASSTLSQG

SEQ ID NO: 467154 - protein, 14 aa, Homo sapiens
  CDR3 for beta chain variable domain of TCR clone 233577 (TRBV7-2, TRBJ1-5)
CASSTQGAGQPQHF

SEQ ID NO: 467155 - protein, 17 aa, Homo sapiens
  CDR3 for alpha chain variable domain of TCR clone 233578 (TRAV13-1, TRAJ52)
CAASSGAGGTSYGKLTF

SEQ ID NO: 467156 - protein, 13 aa, Homo sapiens
  CDR3 for beta chain variable domain of TCR clone 233578 (TRBV7-3, TRBJ1-1)
CASSQDWGAEAFF

SEQ ID NO: 467157 - protein, 14 aa, Homo sapiens
  CDR3 for alpha chain variable domain of TCR clone 233579 (TRAV17, TRAJ40)
CATALTSGTYKYIF

SEQ ID NO: 467158 - protein, 16 aa, Homo sapiens
  CDR3 for beta chain variable domain of TCR clone 233579 (TRBV5-1, TRBJ2-2)
CASSLWDTTNTGELFF

SEQ ID NO: 467159 - protein, 14 aa, Homo sapiens
  CDR3 for alpha chain variable domain of TCR clone 233580 (TRAV4, TRAJ17)
CLVGDMAAGNKLTF

SEQ ID NO: 467160 - protein, 17 aa, Homo sapiens
  CDR3 for beta chain variable domain of TCR clone 233580 (TRBV18, TRBJ2-7)
GSLFLGQPIRGGYEQYF

SEQ ID NO: 467161 - protein, 12 aa, Homo sapiens
  CDR3 for alpha chain variable domain of TCR clone 233581 (TRAV13-2, TRAJ23)
CAKRHRGGKLIF

SEQ ID NO: 467162 - protein, 16 aa, Homo sapiens
  CDR3 for beta chain variable domain of TCR clone 233581 (TRBV20-1, TRBJ1-4)
CSAPGQGLLTNEKLFF

SEQ ID NO: 467163 - protein, 15 aa, Homo sapiens
  CDR3 for alpha chain variable domain of TCR clone 233582 (TRAV1-2, TRAJ8)
CAVRDRNTGFQKLVF

SEQ ID NO: 467164 - protein, 14 aa, Homo sapiens
  CDR3 for beta chain variable domain of TCR clone 233582 (TRBV7-2, TRBJ2-7)
CASSPKTSFYEQYF

SEQ ID NO: 467165 - protein, 18 aa, Homo sapiens
  CDR3 for alpha chain variable domain of TCR clone 233583 (TRAV26-1, TRAJ52)
CIVRVEGDGGTSYGKLTF

SEQ ID NO: 467166 - protein, 13 aa, Homo sapiens
  CDR3 for beta chain variable domain of TCR clone 233583 (TRBV7-3, TRBJ1-2)
CASSLKRGYGYTF

SEQ ID NO: 467167 - protein, 16 aa, Homo sapiens
  CDR3 for alpha chain variable domain of TCR clone 233584 (TRAV30, TRAJ24)
CGTEIVGADRWGKFQF

SEQ ID NO: 467168 - protein, 14 aa, Homo sapiens
  CDR3 for beta chain variable domain of TCR clone 233584 (TRBV12-5, TRBJ2-5)
CASGSRTHQETQYF

SEQ ID NO: 467169 - protein, 13 aa, Homo sapiens
  CDR3 for alpha chain variable domain of TCR clone 233585 (TRAV23/DV6, TRAJ22)
CAPYSGSARQLTF

SEQ ID NO: 467170 - protein, 15 aa, Homo sapiens
  CDR3 for beta chain variable domain of TCR clone 233585 (TRBV11-2, TRBJ1-6)
CASSLDPWPVSPLHF

SEQ ID NO: 467171 - protein, 11 aa, Homo sapiens
  CDR3 for alpha chain variable domain of TCR clone 233586 (TRAV13-1, TRAJ6)
CATLGSYIPTF

SEQ ID NO: 467172 - protein, 17 aa, Homo sapiens
  CDR3 for beta chain variable domain of TCR clone 233586 (TRBV20-1, TRBJ2-1)
CSAFSGTSGSLYNEQFF

SEQ ID NO: 467173 - protein, 13 aa, Homo sapiens
  CDR3 for alpha chain variable domain of TCR clone 233587 (TRAV39, TRAJ49)
CAVDPNTGNQFYF

SEQ ID NO: 467174 - protein, 14 aa, Homo sapiens
  CDR3 for beta chain variable domain of TCR clone 233587 (TRBV4-1, TRBJ1-1)
CASSRSGQSFEAFF

SEQ ID NO: 467175 - protein, 18 aa, Homo sapiens
  CDR3 for alpha chain variable domain of TCR clone 233588 (TRAV26-2, TRAJ45)
CILRVDTYSGGGADGLTF

SEQ ID NO: 467176 - protein, 16 aa, Homo sapiens
  CDR3 for beta chain variable domain of TCR clone 233588 (TRBV2, TRBJ1-4)
CASNLLQGATNEKLFF

SEQ ID NO: 467177 - protein, 14 aa, Homo sapiens
  CDR3 for alpha chain variable domain of TCR clone 233589 (TRAV17, TRAJ6)
CATDASGGSYITTF

SEQ ID NO: 467178 - protein, 15 aa, Homo sapiens
  CDR3 for beta chain variable domain of TCR clone 233589 (TRBV28, TRBJ2-7)
CASSLISGGSYEQYF

SEQ ID NO: 467179 - protein, 12 aa, Homo sapiens
  CDR3 for alpha chain variable domain of TCR clone 233590 (TRAV12-1, TRAJ16)
CGERARWQKLLF

SEQ ID NO: 467180 - protein, 13 aa, Homo sapiens
  CDR3 for beta chain variable domain of TCR clone 233590 (TRBV2, TRBJ1-1)
CARNPTGGFHAFF

SEQ ID NO: 467181 - protein, 12 aa, Homo sapiens
  CDR3 for alpha chain variable domain of TCR clone 233591 (TRAV3, TRAJ20)
CAVRDPDYKLSF

SEQ ID NO: 467182 - protein, 11 aa, Homo sapiens
  CDR3 for beta chain variable domain of TCR clone 233591 (TRBV7-2, TRBJ2-7)
CASSSGLWQYF

SEQ ID NO: 467183 - protein, 12 aa, Homo sapiens
  CDR3 for alpha chain variable domain of TCR clone 233592 (TRAV12-1, TRAJ34)
CVVAGATDKRIF

SEQ ID NO: 467184 - protein, 12 aa, Homo sapiens
  CDR3 for beta chain variable domain of TCR clone 233592 (TRBV11-2, TRBJ2-1)
CASSPGNNEQFF

SEQ ID NO: 467185 - protein, 14 aa, Homo sapiens
  CDR3 for alpha chain variable domain of TCR clone 233593 (TRAV12-1, TRAJ27)
CVVNRWSNAGKSTF

SEQ ID NO: 467186 - protein, 14 aa, Homo sapiens
  CDR3 for beta chain variable domain of TCR clone 233593 (TRBV15, TRBJ2-4)
CATEGGQGANIQYF

SEQ ID NO: 467187 - protein, 15 aa, Homo sapiens
  CDR3 for alpha chain variable domain of TCR clone 233594 (TRAV21, TRAJ13)
CAVRPTSGGYQKVTF

SEQ ID NO: 467188 - protein, 14 aa, Homo sapiens
  CDR3 for beta chain variable domain of TCR clone 233594 (TRBV19, TRBJ1-1)
CASTGHRLNTEAFF

SEQ ID NO: 467189 - protein, 15 aa, Homo sapiens
  CDR3 for alpha chain variable domain of TCR clone 233595 (TRAV17, TRAJ52)
CATEAGGSSYGKLTF

SEQ ID NO: 467190 - protein, 14 aa, Homo sapiens
  CDR3 for beta chain variable domain of TCR clone 233595 (TRBV28, TRBJ1-5)
CASSLGVLVKPQHF

SEQ ID NO: 467191 - protein, 15 aa, Homo sapiens
  CDR3 for alpha chain variable domain of TCR clone 233596 (TRAV8-3, TRAJ40)
CAAPSLGSGIYRYIF

SEQ ID NO: 467192 - protein, 16 aa, Homo sapiens
  CDR3 for beta chain variable domain of TCR clone 233596 (TRBV7-3, TRBJ2-3)
CVSSLSGYRPEDTQYF

SEQ ID NO: 467193 - protein, 12 aa, Homo sapiens
  CDR3 for alpha chain variable domain of TCR clone 233597 (TRAV12-2, TRAJ10)
WGVTGGGNKLTF

SEQ ID NO: 467194 - protein, 14 aa, Homo sapiens
  CDR3 for beta chain variable domain of TCR clone 233597 (TRBV5-4, TRBJ2-5)
CASSFSGGQETQYF

SEQ ID NO: 467195 - protein, 12 aa, Homo sapiens
  CDR3 for alpha chain variable domain of TCR clone 233598 (TRAV29/DV5, TRAJ49)
CAPTDTGNQFYF

SEQ ID NO: 467196 - protein, 12 aa, Homo sapiens
  CDR3 for beta chain variable domain of TCR clone 233598 (TRBV12-4, TRBJ2-7)
CASSLGGYEQYF

SEQ ID NO: 467197 - protein, 15 aa, Homo sapiens
  CDR3 for alpha chain variable domain of TCR clone 233599 (TRAV34, TRAJ38)
CGADFTPGNNRKLIW

SEQ ID NO: 467198 - protein, 13 aa, Homo sapiens
  CDR3 for beta chain variable domain of TCR clone 233599 (TRBV20-1, TRBJ1-1)
CSARGGGNTEAFF

SEQ ID NO: 467199 - protein, 14 aa, Homo sapiens
  CDR3 for alpha chain variable domain of TCR clone 233600 (TRAV8-4, TRAJ37)
CAVSEPSNTGKLTF

SEQ ID NO: 467200 - protein, 14 aa, Homo sapiens
  CDR3 for beta chain variable domain of TCR clone 233600 (TRBV28, TRBJ2-1)
CAIHRTGARTEQFF

SEQ ID NO: 467201 - protein, 16 aa, Homo sapiens
  CDR3 for alpha chain variable domain of TCR clone 233601 (TRAV3, TRAJ37)
CAVRVRGSGNTGQLIF

SEQ ID NO: 467202 - protein, 11 aa, Homo sapiens
  CDR3 for beta chain variable domain of TCR clone 233601 (TRBV11-2, TRBJ2-2)
CASSLPGELFF

SEQ ID NO: 467203 - protein, 11 aa, Homo sapiens
  CDR3 for alpha chain variable domain of TCR clone 233602 (TRAV23/DV6, TRAJ58)
CAARLLRGETS

SEQ ID NO: 467204 - protein, 14 aa, Homo sapiens
  CDR3 for beta chain variable domain of TCR clone 233602 (TRBV12-4, TRBJ1-6)
CASNLQGKGSPLHF

SEQ ID NO: 467205 - protein, 11 aa, Homo sapiens
  CDR3 for alpha chain variable domain of TCR clone 233603 (TRAV13-1, TRAJ39)
CASHAGNMLTF

SEQ ID NO: 467206 - protein, 14 aa, Homo sapiens
  CDR3 for beta chain variable domain of TCR clone 233603 (TRBV11-2, TRBJ1-5)
CASSLARGRLPQHF

SEQ ID NO: 467207 - protein, 12 aa, Homo sapiens
  CDR3 for alpha chain variable domain of TCR clone 233604 (TRAV29/DV5, TRAJ43)
CAAPYNNNDMRF

SEQ ID NO: 467208 - protein, 17 aa, Homo sapiens
  CDR3 for beta chain variable domain of TCR clone 233604 (TRBV19, TRBJ2-6)
CASSTGQVFSGANDLTL

SEQ ID NO: 467209 - protein, 16 aa, Homo sapiens
  CDR3 for alpha chain variable domain of TCR clone 233605 (TRAV3, TRAJ37)
CAVRGKGSGKTGKLIF

SEQ ID NO: 467210 - protein, 13 aa, Homo sapiens
  CDR3 for beta chain variable domain of TCR clone 233605 (TRBV4-2, TRBJ1-1)
CASSQAGNTEAFF

SEQ ID NO: 467211 - protein, 17 aa, Homo sapiens
  CDR3 for alpha chain variable domain of TCR clone 233606 (TRAV20, TRAJ53)
CAVQAQGSGGSNYKLTF

SEQ ID NO: 467212 - protein, 11 aa, Homo sapiens
  CDR3 for beta chain variable domain of TCR clone 233606 (TRBV18, TRBJ2-5)
CANSPRETQYF

SEQ ID NO: 467213 - protein, 14 aa, Homo sapiens
  CDR3 for alpha chain variable domain of TCR clone 233607 (TRAV1-2, TRAJ16)
CAVNRFSDVQKLLF

SEQ ID NO: 467214 - protein, 19 aa, Homo sapiens
  CDR3 for beta chain variable domain of TCR clone 233607 (TRBV6-3, TRBJ1-2)
CASSYSKGRTGPPNYGYTF

SEQ ID NO: 467215 - protein, 14 aa, Homo sapiens
  CDR3 for alpha chain variable domain of TCR clone 233608 (TRAV1-2, TRAJ16)
CAVNRFSDGQKLLF

SEQ ID NO: 467216 - protein, 13 aa, Homo sapiens
  CDR3 for beta chain variable domain of TCR clone 233608 (TRBV19, TRBJ1-5)
CASSEGGNQPQHF

SEQ ID NO: 467217 - protein, 12 aa, Homo sapiens
  CDR3 for alpha chain variable domain of TCR clone 233609 (TRAV24, TRAJ22)
CAPGGSARQLTF

SEQ ID NO: 467218 - protein, 15 aa, Homo sapiens
  CDR3 for beta chain variable domain of TCR clone 233609 (TRBV29-1, TRBJ2-7)
CSVEFFDRGSYEQYF

SEQ ID NO: 467219 - protein, 13 aa, Homo sapiens
  CDR3 for alpha chain variable domain of TCR clone 233610 (TRAV1-2, TRAJ12)
CAVSMDSSYNLIF

SEQ ID NO: 467220 - protein, 15 aa, Homo sapiens
  CDR3 for beta chain variable domain of TCR clone 233610 (TRBV6-3, TRBJ2-7)
CASSSPGTVFYEQYF

SEQ ID NO: 467221 - protein, 12 aa, Homo sapiens
  CDR3 for alpha chain variable domain of TCR clone 233611 (TRAV21, TRAJ23)
CAVYNQGGKLIF

SEQ ID NO: 467222 - protein, 16 aa, Homo sapiens
  CDR3 for beta chain variable domain of TCR clone 233611 (TRBV7-3, TRBJ2-2)
CASSLKRGTLSGELFF

SEQ ID NO: 467223 - protein, 14 aa, Homo sapiens
  CDR3 for alpha chain variable domain of TCR clone 233612 (TRAV26-1, TRAJ21)
CIVRPPYNFNKFYF

SEQ ID NO: 467224 - protein, 12 aa, Homo sapiens
  CDR3 for beta chain variable domain of TCR clone 233612 (TRBV5-5, TRBJ2-5)
CASSYFGETQYF

SEQ ID NO: 467225 - protein, 13 aa, Homo sapiens
  CDR3 for alpha chain variable domain of TCR clone 233613 (TRAV20, TRAJ20)
CAVQAGSGYKLSF

SEQ ID NO: 467226 - protein, 13 aa, Homo sapiens
  CDR3 for beta chain variable domain of TCR clone 233613 (TRBV3-1, TRBJ2-3)
CASRQGGGDTQYF

SEQ ID NO: 467227 - protein, 13 aa, Homo sapiens
  CDR3 for alpha chain variable domain of TCR clone 233614 (TRAV38-1, TRAJ42)
CARWGGSQGNLIF

SEQ ID NO: 467228 - protein, 14 aa, Homo sapiens
  CDR3 for beta chain variable domain of TCR clone 233614 (TRBV6-1, TRBJ1-3)
GASVQGGGGNTIYF

SEQ ID NO: 467229 - protein, 16 aa, Homo sapiens
  CDR3 for alpha chain variable domain of TCR clone 233615 (TRAV17, TRAJ35)
CATAEGGIGFGNVLHC

SEQ ID NO: 467230 - protein, 16 aa, Homo sapiens
  CDR3 for beta chain variable domain of TCR clone 233615 (TRBV6-5, TRBJ2-7)
CASSSDPTSGFYEQSF

SEQ ID NO: 467231 - protein, 17 aa, Homo sapiens
  CDR3 for alpha chain variable domain of TCR clone 233616 (TRAV3, TRAJ37)
CAVRDMRTPGNTGKLIF

SEQ ID NO: 467232 - protein, 13 aa, Homo sapiens
  CDR3 for beta chain variable domain of TCR clone 233616 (TRBV12-4, TRBJ1-2)
CASSSGLTVISTF

SEQ ID NO: 467233 - protein, 12 aa, Homo sapiens
  CDR3 for alpha chain variable domain of TCR clone 233617 (TRAV8-3, TRAJ20)
CAVGANDYKLSF

SEQ ID NO: 467234 - protein, 15 aa, Homo sapiens
  CDR3 for beta chain variable domain of TCR clone 233617 (TRBV6-6, TRBJ2-7)
CASSYSYGGSHEQYF

SEQ ID NO: 467235 - protein, 16 aa, Homo sapiens
  CDR3 for alpha chain variable domain of TCR clone 233618 (TRAV26-1, TRAJ23)
CIVRVARYNQGGKLIF

SEQ ID NO: 467236 - protein, 15 aa, Homo sapiens
  CDR3 for beta chain variable domain of TCR clone 233618 (TRBV18, TRBJ2-7)
CASSPRGGKGYEQYF

SEQ ID NO: 467237 - protein, 15 aa, Homo sapiens
  CDR3 for alpha chain variable domain of TCR clone 233619 (TRAV8-3, TRAJ27)
CAVGPSKTNAGKSTF

SEQ ID NO: 467238 - protein, 15 aa, Homo sapiens
  CDR3 for beta chain variable domain of TCR clone 233619 (TRBV7-8, TRBJ2-2)
CASSLGQHWAGELFF

SEQ ID NO: 467239 - protein, 14 aa, Homo sapiens
  CDR3 for alpha chain variable domain of TCR clone 233620 (TRAV1-2, TRAJ16)
CAVNRFSDGQKLLF

SEQ ID NO: 467240 - protein, 12 aa, Homo sapiens
  CDR3 for beta chain variable domain of TCR clone 233620 (TRBV27, TRBJ1-2)
CASYRKDYGYTF

SEQ ID NO: 467241 - protein, 11 aa, Homo sapiens
  CDR3 for alpha chain variable domain of TCR clone 233621 (TRAV3, TRAJ21)
CAVGNFNKFSF

SEQ ID NO: 467242 - protein, 17 aa, Homo sapiens
  CDR3 for beta chain variable domain of TCR clone 233621 (TRBV24-1, TRBJ2-1)
CATSDVSTSGTYNEQFF

SEQ ID NO: 467243 - protein, 19 aa, Homo sapiens
  CDR3 for alpha chain variable domain of TCR clone 233622 (TRAV1-2, TRAJ26)
CLLPLCCERPDNYGQNFVF

SEQ ID NO: 467244 - protein, 15 aa, Homo sapiens
  CDR3 for beta chain variable domain of TCR clone 233622 (TRBV9, TRBJ1-6)
CPSSVAGTGDSPLHF

SEQ ID NO: 467245 - protein, 13 aa, Homo sapiens
  CDR3 for alpha chain variable domain of TCR clone 233623 (TRAV36/DV7, TRAJ33)
CAVDMDSNYQLIW

SEQ ID NO: 467246 - protein, 16 aa, Homo sapiens
  CDR3 for beta chain variable domain of TCR clone 233623 (TRBV15, TRBJ2-3)
CATRLSGGRAPDTRYF

SEQ ID NO: 467247 - protein, 15 aa, Homo sapiens
  CDR3 for alpha chain variable domain of TCR clone 233624 (TRAV13-1, TRAJ44)
CAANRNTGTASKLTF

SEQ ID NO: 467248 - protein, 14 aa, Homo sapiens
  CDR3 for beta chain variable domain of TCR clone 233624 (TRBV11-2, TRBJ1-2)
CASSLYRGNYGYTF

SEQ ID NO: 467249 - protein, 16 aa, Homo sapiens
  CDR3 for alpha chain variable domain of TCR clone 233625 (TRAV17, TRAJ35)
CATAEGGIGFGNVLHC

SEQ ID NO: 467250 - protein, 16 aa, Homo sapiens
  CDR3 for beta chain variable domain of TCR clone 233625 (TRBV12-5, TRBJ2-5)
CASGPRTSGNQETQYF

SEQ ID NO: 467251 - protein, 14 aa, Homo sapiens
  CDR3 for alpha chain variable domain of TCR clone 233626 (TRAV13-2, TRAJ17)
CAENSKAAGNKLTF

SEQ ID NO: 467252 - protein, 18 aa, Homo sapiens
  CDR3 for beta chain variable domain of TCR clone 233626 (TRBV7-3, TRBJ2-1)
CASSLTLASGRAMVSSSS

SEQ ID NO: 467253 - protein, 15 aa, Homo sapiens
  CDR3 for alpha chain variable domain of TCR clone 233627 (TRAV8-3, TRAJ27)
SAVGPSKTNAGKSTF

SEQ ID NO: 467254 - protein, 14 aa, Homo sapiens
  CDR3 for beta chain variable domain of TCR clone 233627 (TRBV11-2, TRBJ2-3)
CASSRLARTDTQYF

SEQ ID NO: 467255 - protein, 16 aa, Homo sapiens
  CDR3 for alpha chain variable domain of TCR clone 233628 (TRAV16, TRAJ52)
CALNAAGGTSYGKLTF

SEQ ID NO: 467256 - protein, 12 aa, Homo sapiens
  CDR3 for beta chain variable domain of TCR clone 233628 (TRBV12-4, TRBJ1-3)
CASSFSGNTIYF

SEQ ID NO: 467257 - protein, 15 aa, Homo sapiens
  CDR3 for alpha chain variable domain of TCR clone 233629 (TRAV8-3, TRAJ35)
CAVGATIGFGNVLHC

SEQ ID NO: 467258 - protein, 14 aa, Homo sapiens
  CDR3 for beta chain variable domain of TCR clone 233629 (TRBV7-3, TRBJ2-2)
CASSPDPSGRELFF

SEQ ID NO: 467259 - protein, 23 aa, Homo sapiens
  CDR3 for alpha chain variable domain of TCR clone 233630 (TRAV1-1, TRAJ4)
LLQELQMKDSASYFCALYNKLIF

SEQ ID NO: 467260 - protein, 16 aa, Homo sapiens
  CDR3 for beta chain variable domain of TCR clone 233630 (TRBV7-3, TRBJ2-1)
CASSSIRRAPTMSSSS

SEQ ID NO: 467261 - protein, 19 aa, Homo sapiens
  CDR3 for alpha chain variable domain of TCR clone 233631 (TRAV38-1, TRAJ43)
CAFMKHNSGRHALWSRDRT

SEQ ID NO: 467262 - protein, 11 aa, Homo sapiens
  CDR3 for beta chain variable domain of TCR clone 233631 (TRBV7-9, TRBJ2-3)
CASSYTDTQYF

SEQ ID NO: 467263 - protein, 14 aa, Homo sapiens
  CDR3 for alpha chain variable domain of TCR clone 233632 (TRAV12-2, TRAJ40)
CAVKIPSGTYKYIF

SEQ ID NO: 467264 - protein, 13 aa, Homo sapiens
  CDR3 for beta chain variable domain of TCR clone 233632 (TRBV7-9, TRBJ1-2)
CASSLKQNYDYTF

SEQ ID NO: 467265 - protein, 16 aa, Homo sapiens
  CDR3 for alpha chain variable domain of TCR clone 233633 (TRAV12-3, TRAJ53)
SAMSPGSGGSNYKLTF

SEQ ID NO: 467266 - protein, 13 aa, Homo sapiens
  CDR3 for beta chain variable domain of TCR clone 233633 (TRBV11-2, TRBJ2-5)
CASSSTGEGTQYF

SEQ ID NO: 467267 - protein, 14 aa, Homo sapiens
  CDR3 for alpha chain variable domain of TCR clone 233634 (TRAV34, TRAJ44)
CGAGGTGTASKLTF

SEQ ID NO: 467268 - protein, 15 aa, Homo sapiens
  CDR3 for beta chain variable domain of TCR clone 233634 (TRBV5-1, TRBJ2-1)
GASSPPRAPYNEQFF

SEQ ID NO: 467269 - protein, 17 aa, Homo sapiens
  CDR3 for alpha chain variable domain of TCR clone 233635 (TRAV26-1, TRAJ53)
CIVRVDDSGGSNYKLTF

SEQ ID NO: 467270 - protein, 14 aa, Homo sapiens
  CDR3 for beta chain variable domain of TCR clone 233635 (TRBV7-2, TRBJ1-6)
CASSLQGANSPLHF

SEQ ID NO: 467271 - protein, 16 aa, Homo sapiens
  CDR3 for alpha chain variable domain of TCR clone 233636 (TRAV27, TRAJ52)
CAGAPAGGTSYGKLTF

SEQ ID NO: 467272 - protein, 15 aa, Homo sapiens
  CDR3 for beta chain variable domain of TCR clone 233636 (TRBV11-3, TRBJ1-1)
CASSLGGPGDTEAFF

SEQ ID NO: 467273 - protein, 13 aa, Homo sapiens
  CDR3 for alpha chain variable domain of TCR clone 233637 (TRAV21, TRAJ57)
CAVTQGGSEKLVF

SEQ ID NO: 467274 - protein, 16 aa, Homo sapiens
  CDR3 for beta chain variable domain of TCR clone 233637 (TRBV7-9, TRBJ2-1)
CASSDVAGGSYNEQFF

SEQ ID NO: 467275 - protein, 13 aa, Homo sapiens
  CDR3 for alpha chain variable domain of TCR clone 233638 (TRAV13-1, TRAJ40)
CAAISPGTYQYIF

SEQ ID NO: 467276 - protein, 13 aa, Homo sapiens
  CDR3 for beta chain variable domain of TCR clone 233638 (TRBV10-3, TRBJ2-7)
CAIRAGGPHEQYF

SEQ ID NO: 467277 - protein, 16 aa, Homo sapiens
  CDR3 for alpha chain variable domain of TCR clone 233639 (TRAV17, TRAJ53)
CATDALSGGSNYKLTF

SEQ ID NO: 467278 - protein, 13 aa, Homo sapiens
  CDR3 for beta chain variable domain of TCR clone 233639 (TRBV10-3, TRBJ2-7)
CASKLAGNYEQYF

SEQ ID NO: 467279 - protein, 16 aa, Homo sapiens
  CDR3 for alpha chain variable domain of TCR clone 233640 (TRAV30, TRAJ24)
CGTEIVDADSWGKFQF

SEQ ID NO: 467280 - protein, 14 aa, Homo sapiens
  CDR3 for beta chain variable domain of TCR clone 233640 (TRBV19, TRBJ2-7)
CASNCRDTFTGMYF

SEQ ID NO: 467281 - protein, 17 aa, Homo sapiens
  CDR3 for alpha chain variable domain of TCR clone 233641 (TRAV36/DV7, TRAJ42)
CAGGGMNYGGSQGKLIF

SEQ ID NO: 467282 - protein, 13 aa, Homo sapiens
  CDR3 for beta chain variable domain of TCR clone 233641 (TRBV2, TRBJ1-1)
CASSEGGNTEAFF

SEQ ID NO: 467283 - protein, 14 aa, Homo sapiens
  CDR3 for alpha chain variable domain of TCR clone 233642 (TRAV13-2, TRAJ6)
CAERGSGGSYIPTF

SEQ ID NO: 467284 - protein, 12 aa, Homo sapiens
  CDR3 for beta chain variable domain of TCR clone 233642 (TRBV11-2, TRBJ2-2)
CASSLPTGELFF

SEQ ID NO: 467285 - protein, 12 aa, Homo sapiens
  CDR3 for alpha chain variable domain of TCR clone 233643 (TRAV12-1, TRAJ6)
CVVSERSYIPTF

SEQ ID NO: 467286 - protein, 21 aa, Homo sapiens
  CDR3 for beta chain variable domain of TCR clone 233643 (TRBV7-3, TRBJ2-1)
CASSLWPSGSPVLRASDTAHR

SEQ ID NO: 467287 - protein, 14 aa, Homo sapiens
  CDR3 for alpha chain variable domain of TCR clone 233644 (TRAV38-1, TRAJ45)
CPYYSGGGADVLTF

SEQ ID NO: 467288 - protein, 20 aa, Homo sapiens
  CDR3 for beta chain variable domain of TCR clone 233644 (TRBV28, TRBJ2-1)
CASTPIGRSPGLAGGNEQFF

SEQ ID NO: 467289 - protein, 14 aa, Homo sapiens
  CDR3 for alpha chain variable domain of TCR clone 233645 (TRAV2, TRAJ37)
CAVDFTSNTGKLIF

SEQ ID NO: 467290 - protein, 17 aa, Homo sapiens
  CDR3 for beta chain variable domain of TCR clone 233645 (TRBV19, TRBJ2-3)
CASSIDPAGGGTDTQYF

SEQ ID NO: 467291 - protein, 14 aa, Homo sapiens
  CDR3 for alpha chain variable domain of TCR clone 233646 (TRAV8-3, TRAJ4)
CAVGAAGGYNKLIF

SEQ ID NO: 467292 - protein, 14 aa, Homo sapiens
  CDR3 for beta chain variable domain of TCR clone 233646 (TRBV2, TRBJ1-5)
CASSGTGFNQPQHF

SEQ ID NO: 467293 - protein, 11 aa, Homo sapiens
  CDR3 for alpha chain variable domain of TCR clone 233647 (TRAV12-2, TRAJ6)
CAVEGSYIPTF

SEQ ID NO: 467294 - protein, 17 aa, Homo sapiens
  CDR3 for beta chain variable domain of TCR clone 233647 (TRBV10-3, TRBJ1-2)
CAISQTGSASGVDGYTF

SEQ ID NO: 467295 - protein, 14 aa, Homo sapiens
  CDR3 for alpha chain variable domain of TCR clone 233648 (TRAV1-2, TRAJ16)
CAVNRFSDGQKLLF

SEQ ID NO: 467296 - protein, 16 aa, Homo sapiens
  CDR3 for beta chain variable domain of TCR clone 233648 (TRBV28, TRBJ2-6)
CASSNRRGSGANVLTF

SEQ ID NO: 467297 - protein, 13 aa, Homo sapiens
  CDR3 for alpha chain variable domain of TCR clone 233649 (TRAV12-1, TRAJ23)
CVVNLMDGGKLIF

SEQ ID NO: 467298 - protein, 15 aa, Homo sapiens
  CDR3 for beta chain variable domain of TCR clone 233649 (TRBV27, TRBJ2-1)
CASSNGGGSSNEQFF

SEQ ID NO: 467299 - protein, 15 aa, Homo sapiens
  CDR3 for alpha chain variable domain of TCR clone 233650 (TRAV35, TRAJ23)
CAGQRGYNQGGKLIF

SEQ ID NO: 467300 - protein, 14 aa, Homo sapiens
  CDR3 for beta chain variable domain of TCR clone 233650 (TRBV20-1, TRBJ1-5)
CSARDDRGNQPQHF

SEQ ID NO: 467301 - protein, 14 aa, Homo sapiens
  CDR3 for alpha chain variable domain of TCR clone 233651 (TRAV26-1, TRAJ39)
CIVRGSRAGTMLTF

SEQ ID NO: 467302 - protein, 15 aa, Homo sapiens
  CDR3 for beta chain variable domain of TCR clone 233651 (TRBV7-9, TRBJ1-5)
CASSQGHQPKQPQHF

SEQ ID NO: 467303 - protein, 14 aa, Homo sapiens
  CDR3 for alpha chain variable domain of TCR clone 233652 (TRAV26-1, TRAJ38)
CIADNAGNNRKLIW

SEQ ID NO: 467304 - protein, 13 aa, Homo sapiens
  CDR3 for beta chain variable domain of TCR clone 233652 (TRBV15, TRBJ1-6)
CATSGGLNSPLLF

SEQ ID NO: 467305 - protein, 14 aa, Homo sapiens
  CDR3 for alpha chain variable domain of TCR clone 233653 (TRAV2, TRAJ32)
TTVGGWWCYNKLIF

SEQ ID NO: 467306 - protein, 13 aa, Homo sapiens
  CDR3 for beta chain variable domain of TCR clone 233653 (TRBV20-1, TRBJ1-1)
CSARGGGNTEAFF

SEQ ID NO: 467307 - protein, 15 aa, Homo sapiens
  CDR3 for alpha chain variable domain of TCR clone 233654 (TRAV3, TRAJ3)
CAVRDRDSRASKLIF

SEQ ID NO: 467308 - protein, 18 aa, Homo sapiens
  CDR3 for beta chain variable domain of TCR clone 233654 (TRBV25-1, TRBJ1-2)
CASSGLQNGQGLIFGYTF

SEQ ID NO: 467309 - protein, 12 aa, Homo sapiens
  CDR3 for alpha chain variable domain of TCR clone 233655 (TRAV1-1, TRAJ20)
CAVRDRTTSSAF

SEQ ID NO: 467310 - protein, 18 aa, Homo sapiens
  CDR3 for beta chain variable domain of TCR clone 233655 (TRBV20-1, TRBJ2-6)
CSAETTPTRGSGANVLTF

SEQ ID NO: 467311 - protein, 14 aa, Homo sapiens
  CDR3 for alpha chain variable domain of TCR clone 233656 (TRAV8-3, TRAJ39)
CAVGANNAGNMLTF

SEQ ID NO: 467312 - protein, 15 aa, Homo sapiens
  CDR3 for beta chain variable domain of TCR clone 233656 (TRBV19, TRBJ2-1)
CASSSPGVPLDEQFF

SEQ ID NO: 467313 - protein, 16 aa, Homo sapiens
  CDR3 for alpha chain variable domain of TCR clone 233657 (TRAV12-3, TRAJ53)
CAMSPGSGGSNYKLTF

SEQ ID NO: 467314 - protein, 12 aa, Homo sapiens
  CDR3 for beta chain variable domain of TCR clone 233657 (TRBV29-1, TRBJ2-5)
SLQRGPNGDQYF

SEQ ID NO: 467315 - protein, 11 aa, Homo sapiens
  CDR3 for alpha chain variable domain of TCR clone 233658 (TRAV2, TRAJ21)
CAVFNFIKFYF

SEQ ID NO: 467316 - protein, 17 aa, Homo sapiens
  CDR3 for beta chain variable domain of TCR clone 233658 (TRBV11-2, TRBJ2-1)
CASSLYPPGVEYNEQFF

SEQ ID NO: 467317 - protein, 11 aa, Homo sapiens
  CDR3 for alpha chain variable domain of TCR clone 233659 (TRAV3, TRAJ21)
CALGNFNKFYF

SEQ ID NO: 467318 - protein, 17 aa, Homo sapiens
  CDR3 for beta chain variable domain of TCR clone 233659 (TRBV13, TRBJ2-3)
CASSLSRVAGGRNTQYF

SEQ ID NO: 467319 - protein, 14 aa, Homo sapiens
  CDR3 for alpha chain variable domain of TCR clone 233660 (TRAV2, TRAJ23)
CAVGLRTQGGKLIF

SEQ ID NO: 467320 - protein, 15 aa, Homo sapiens
  CDR3 for beta chain variable domain of TCR clone 233660 (TRBV6-5, TRBJ2-5)
CASSPLAGGIETQYF

SEQ ID NO: 467321 - protein, 14 aa, Homo sapiens
  CDR3 for alpha chain variable domain of TCR clone 233661 (TRAV12-1, TRAJ30)
CAPTGTNRDDKIIF

SEQ ID NO: 467322 - protein, 14 aa, Homo sapiens
  CDR3 for beta chain variable domain of TCR clone 233661 (TRBV18, TRBJ2-7)
CASSPRGGAYEQYF

SEQ ID NO: 467323 - protein, 16 aa, Homo sapiens
  CDR3 for alpha chain variable domain of TCR clone 233662 (TRAV30, TRAJ24)
CGTEIVDADSWGKFQF

SEQ ID NO: 467324 - protein, 16 aa, Homo sapiens
  CDR3 for beta chain variable domain of TCR clone 233662 (TRBV5-1, TRBJ2-5)
CASSSSGLGGAETQYF

SEQ ID NO: 467325 - protein, 16 aa, Homo sapiens
  CDR3 for alpha chain variable domain of TCR clone 233663 (TRAV30, TRAJ24)
CGTEIVDAHSWGKFQF

SEQ ID NO: 467326 - protein, 13 aa, Homo sapiens
  CDR3 for beta chain variable domain of TCR clone 233663 (TRBV7-2, TRBJ2-7)
CASSLTGGREQYF

SEQ ID NO: 467327 - protein, 14 aa, Homo sapiens
  CDR3 for alpha chain variable domain of TCR clone 233664 (TRAV17, TRAJ15)
CATAPNQAGTALIF

SEQ ID NO: 467328 - protein, 14 aa, Homo sapiens
  CDR3 for beta chain variable domain of TCR clone 233664 (TRBV19, TRBJ2-7)
CASSRGQGAIEQYF

SEQ ID NO: 467329 - protein, 14 aa, Homo sapiens
  CDR3 for alpha chain variable domain of TCR clone 233665 (TRAV12-1, TRAJ9)
CVVTLNTGGFKTIF

SEQ ID NO: 467330 - protein, 11 aa, Homo sapiens
  CDR3 for beta chain variable domain of TCR clone 233665 (TRBV29-1, TRBJ2-5)
CSEDRTGTQHF

SEQ ID NO: 467331 - protein, 20 aa, Homo sapiens
  CDR3 for alpha chain variable domain of TCR clone 233666 (TRAV8-3, TRAJ45)
LSTSVLWGSYSGGGADGLTF

SEQ ID NO: 467332 - protein, 11 aa, Homo sapiens
  CDR3 for beta chain variable domain of TCR clone 233666 (TRBV20-1, TRBJ2-5)
CSADRAGTQYF

SEQ ID NO: 467333 - protein, 17 aa, Homo sapiens
  CDR3 for alpha chain variable domain of TCR clone 233667 (TRAV36/DV7, TRAJ52)
CAVAQRAGGTSYGKLTF

SEQ ID NO: 467334 - protein, 15 aa, Homo sapiens
  CDR3 for beta chain variable domain of TCR clone 233667 (TRBV19, TRBJ2-3)
CAAGDTNAPNDTQYF

SEQ ID NO: 467335 - protein, 14 aa, Homo sapiens
  CDR3 for alpha chain variable domain of TCR clone 233668 (TRAV13-2, TRAJ16)
CAENNWEDGQKLLF

SEQ ID NO: 467336 - protein, 14 aa, Homo sapiens
  CDR3 for beta chain variable domain of TCR clone 233668 (TRBV7-9, TRBJ1-1)
CASSLGGLRTEAFF

SEQ ID NO: 467337 - protein, 13 aa, Homo sapiens
  CDR3 for alpha chain variable domain of TCR clone 233669 (TRAV26-1, TRAJ34)
CIVRPWITDKLIL

SEQ ID NO: 467338 - protein, 14 aa, Homo sapiens
  CDR3 for beta chain variable domain of TCR clone 233669 (TRBV7-2, TRBJ2-7)
CASRSQGAAYEQYF

SEQ ID NO: 467339 - protein, 14 aa, Homo sapiens
  CDR3 for alpha chain variable domain of TCR clone 233670 (TRAV26-2, TRAJ40)
CILPTPEGTYKSIF

SEQ ID NO: 467340 - protein, 12 aa, Homo sapiens
  CDR3 for beta chain variable domain of TCR clone 233670 (TRBV19, TRBJ2-1)
CASSQISNEQFF

SEQ ID NO: 467341 - protein, 10 aa, Homo sapiens
  CDR3 for alpha chain variable domain of TCR clone 233671 (TRAV23/DV6, TRAJ57)
CAASSTLSQG

SEQ ID NO: 467342 - protein, 13 aa, Homo sapiens
  CDR3 for beta chain variable domain of TCR clone 233671 (TRBV12-4, TRBJ1-2)
CASSSGLTVISAF

SEQ ID NO: 467343 - protein, 11 aa, Homo sapiens
  CDR3 for alpha chain variable domain of TCR clone 233672 (TRAV2, TRAJ13)
CASGGYQRVTF

SEQ ID NO: 467344 - protein, 14 aa, Homo sapiens
  CDR3 for beta chain variable domain of TCR clone 233672 (TRBV12-5, TRBJ2-5)
CASGSRTHQETQYV

SEQ ID NO: 467345 - protein, 13 aa, Homo sapiens
  CDR3 for alpha chain variable domain of TCR clone 233673 (TRAV12-3, TRAJ33)
CAMSVNSNYPLIW

SEQ ID NO: 467346 - protein, 14 aa, Homo sapiens
  CDR3 for beta chain variable domain of TCR clone 233673 (TRBV7-2, TRBJ2-2)
CASSQAVNTGELFF

SEQ ID NO: 467347 - protein, 14 aa, Homo sapiens
  CDR3 for alpha chain variable domain of TCR clone 233674 (TRAV26-1, TRAJ38)
CIADNAGNNRKLIW

SEQ ID NO: 467348 - protein, 14 aa, Homo sapiens
  CDR3 for beta chain variable domain of TCR clone 233674 (TRBV4-1, TRBJ1-4)
CASSSTRAREKLFF

SEQ ID NO: 467349 - protein, 16 aa, Homo sapiens
  CDR3 for alpha chain variable domain of TCR clone 233675 (TRAV3, TRAJ37)
CAVRGKGSGNTGKLIL

SEQ ID NO: 467350 - protein, 12 aa, Homo sapiens
  CDR3 for beta chain variable domain of TCR clone 233675 (TRBV11-2, TRBJ2-2)
CASSLPTGELFF

SEQ ID NO: 467351 - protein, 23 aa, Homo sapiens
  CDR3 for alpha chain variable domain of TCR clone 233676 (TRAV26-1, TRAJ38)
CIADNAGNNHIQNPDPAVYQLRS

SEQ ID NO: 467352 - protein, 13 aa, Homo sapiens
  CDR3 for beta chain variable domain of TCR clone 233676 (TRBV10-3, TRBJ2-7)
CASKLAVNYEQYF

SEQ ID NO: 467353 - protein, 13 aa, Homo sapiens
  CDR3 for alpha chain variable domain of TCR clone 233677 (TRAV1-2, TRAJ9)
CAALNTGGFKTIF

SEQ ID NO: 467354 - protein, 13 aa, Homo sapiens
  CDR3 for beta chain variable domain of TCR clone 233677 (TRBV12-4, TRBJ2-5)
CASRLAVQETQYF

SEQ ID NO: 467355 - protein, 13 aa, Homo sapiens
  CDR3 for alpha chain variable domain of TCR clone 233678 (TRAV27, TRAJ8)
CAGGPTGFQKLVF

SEQ ID NO: 467356 - protein, 15 aa, Homo sapiens
  CDR3 for beta chain variable domain of TCR clone 233678 (TRBV6-1, TRBJ2-7)
CASSKSMGDFYEQYF

SEQ ID NO: 467357 - protein, 14 aa, Homo sapiens
  CDR3 for alpha chain variable domain of TCR clone 233679 (TRAV1-2, TRAJ16)
CAVNRFSDGQKLPF

SEQ ID NO: 467358 - protein, 16 aa, Homo sapiens
  CDR3 for beta chain variable domain of TCR clone 233679 (TRBV19, TRBJ2-3)
CASIPEWDRGTDTQYF

SEQ ID NO: 467359 - protein, 14 aa, Homo sapiens
  CDR3 for alpha chain variable domain of TCR clone 233680 (TRAV26-1, TRAJ34)
CIVRLRYNTDKLIF

SEQ ID NO: 467360 - protein, 15 aa, Homo sapiens
  CDR3 for beta chain variable domain of TCR clone 233680 (TRBV2, TRBJ2-7)
CASSEGLARSYEQYF

SEQ ID NO: 467361 - protein, 16 aa, Homo sapiens
  CDR3 for alpha chain variable domain of TCR clone 233681 (TRAV30, TRAJ24)
CGTEIVDADSWWKFQF

SEQ ID NO: 467362 - protein, 15 aa, Homo sapiens
  CDR3 for beta chain variable domain of TCR clone 233681 (TRBV20-1, TRBJ2-4)
CSARDLTGGPNIQYF

SEQ ID NO: 467363 - protein, 15 aa, Homo sapiens
  CDR3 for alpha chain variable domain of TCR clone 233682 (TRAV8-6, TRAJ11)
CAVSDRRSGYSTLTF

SEQ ID NO: 467364 - protein, 15 aa, Homo sapiens
  CDR3 for beta chain variable domain of TCR clone 233682 (TRBV7-3, TRBJ2-1)
CASSPTGRSRNEQFF

SEQ ID NO: 467365 - protein, 10 aa, Homo sapiens
  CDR3 for alpha chain variable domain of TCR clone 233683 (TRAV36/DV7, TRAJ49)
CALTGNQFYF

SEQ ID NO: 467366 - protein, 15 aa, Homo sapiens
  CDR3 for beta chain variable domain of TCR clone 233683 (TRBV7-2, TRBJ2-3)
CASSSTGLETDTQYF

SEQ ID NO: 467367 - protein, 12 aa, Homo sapiens
  CDR3 for alpha chain variable domain of TCR clone 233684 (TRAV21, TRAJ11)
CAATSGYGTLTF

SEQ ID NO: 467368 - protein, 16 aa, Homo sapiens
  CDR3 for beta chain variable domain of TCR clone 233684 (TRBV28, TRBJ2-2)
CASSLEGGSNTGELFF

SEQ ID NO: 467369 - protein, 12 aa, Homo sapiens
  CDR3 for alpha chain variable domain of TCR clone 233685 (TRAV35, TRAJ39)
LAPNNAGNMLTF

SEQ ID NO: 467370 - protein, 15 aa, Homo sapiens
  CDR3 for beta chain variable domain of TCR clone 233685 (TRBV7-3, TRBJ1-1)
CASSYSGQGSTEAFF

SEQ ID NO: 467371 - protein, 14 aa, Homo sapiens
  CDR3 for alpha chain variable domain of TCR clone 233686 (TRAV1-2, TRAJ16)
CAVNRFSDGQKLLF

SEQ ID NO: 467372 - protein, 16 aa, Homo sapiens
  CDR3 for beta chain variable domain of TCR clone 233686 (TRBV19, TRBJ2-7)
CASSLIAGTYFYEQYF

SEQ ID NO: 467373 - protein, 11 aa, Homo sapiens
  CDR3 for alpha chain variable domain of TCR clone 233687 (TRAV3, TRAJ21)
CAVGNFNKFYF

SEQ ID NO: 467374 - protein, 17 aa, Homo sapiens
  CDR3 for beta chain variable domain of TCR clone 233687 (TRBV5-1, TRBJ2-5)
CASAVIRQFGNKETQYF

SEQ ID NO: 467375 - protein, 12 aa, Homo sapiens
  CDR3 for alpha chain variable domain of TCR clone 233688 (TRAV12-3, TRAJ20)
CAMVRGDYKLSF

SEQ ID NO: 467376 - protein, 14 aa, Homo sapiens
  CDR3 for beta chain variable domain of TCR clone 233688 (TRBV20-1, TRBJ2-7)
CSAISREASYEQYV

SEQ ID NO: 467377 - protein, 15 aa, Homo sapiens
  CDR3 for alpha chain variable domain of TCR clone 233689 (TRAV3, TRAJ5)
CAVRDLYTGRRALTF

SEQ ID NO: 467378 - protein, 16 aa, Homo sapiens
  CDR3 for beta chain variable domain of TCR clone 233689 (TRBV20-1, TRBJ1-4)
CSAPGQGLLTNEKLFS

SEQ ID NO: 467379 - protein, 14 aa, Homo sapiens
  CDR3 for alpha chain variable domain of TCR clone 233690 (TRAV12-3, TRAJ6)
CAMSATGGSYIPTF

SEQ ID NO: 467380 - protein, 16 aa, Homo sapiens
  CDR3 for beta chain variable domain of TCR clone 233690 (TRBV4-2, TRBJ2-1)
CASSPRAGQGANEQCV

SEQ ID NO: 467381 - protein, 10 aa, Homo sapiens
  CDR3 for alpha chain variable domain of TCR clone 233691 (TRAV25, TRAJ34)
CAYNTDKLIF

SEQ ID NO: 467382 - protein, 13 aa, Homo sapiens
  CDR3 for beta chain variable domain of TCR clone 233691 (TRBV5-1, TRBJ1-1)
CASSLGTDAEAFF

SEQ ID NO: 467383 - protein, 14 aa, Homo sapiens
  CDR3 for alpha chain variable domain of TCR clone 233692 (TRAV16, TRAJ44)
CALSTTGTASKLTF

SEQ ID NO: 467384 - protein, 15 aa, Homo sapiens
  CDR3 for beta chain variable domain of TCR clone 233692 (TRBV2, TRBJ2-7)
CASSEGLARSYEQYF

SEQ ID NO: 467385 - protein, 10 aa, Homo sapiens
  CDR3 for alpha chain variable domain of TCR clone 233693 (TRAV3, TRAJ27)
CAVRDPLTNA

SEQ ID NO: 467386 - protein, 15 aa, Homo sapiens
  CDR3 for beta chain variable domain of TCR clone 233693 (TRBV28, TRBJ2-1)
CASSIIAGGRSEQFF

SEQ ID NO: 467387 - protein, 16 aa, Homo sapiens
  CDR3 for alpha chain variable domain of TCR clone 233694 (TRAV12-1, TRAJ42)
CVVTPYYGGSQGNLIF

SEQ ID NO: 467388 - protein, 16 aa, Homo sapiens
  CDR3 for beta chain variable domain of TCR clone 233694 (TRBV27, TRBJ2-2)
CASSFRGLVRTGELFF

SEQ ID NO: 467389 - protein, 12 aa, Homo sapiens
  CDR3 for alpha chain variable domain of TCR clone 233695 (TRAV27, TRAJ9)
CAGESGGFKTIF

SEQ ID NO: 467390 - protein, 13 aa, Homo sapiens
  CDR3 for beta chain variable domain of TCR clone 233695 (TRBV20-1, TRBJ1-1)
CSARGGGNTEAFF

SEQ ID NO: 467391 - protein, 13 aa, Homo sapiens
  CDR3 for alpha chain variable domain of TCR clone 233696 (TRAV20, TRAJ48)
CSVQGVGNEKLTF

SEQ ID NO: 467392 - protein, 19 aa, Homo sapiens
  CDR3 for beta chain variable domain of TCR clone 233696 (TRBV2, TRBJ2-2)
CASSQPGLAGGGNTGELFF

SEQ ID NO: 467393 - protein, 12 aa, Homo sapiens
  CDR3 for alpha chain variable domain of TCR clone 233697 (TRAV27, TRAJ42)
CAGGGSQGNLIF

SEQ ID NO: 467394 - protein, 13 aa, Homo sapiens
  CDR3 for beta chain variable domain of TCR clone 233697 (TRBV19, TRBJ2-7)
CASSIRSSYDQYF

SEQ ID NO: 467395 - protein, 12 aa, Homo sapiens
  CDR3 for alpha chain variable domain of TCR clone 233698 (TRAV12-1, TRAJ34)
CVVAGVTDKLIF

SEQ ID NO: 467396 - protein, 12 aa, Homo sapiens
  CDR3 for beta chain variable domain of TCR clone 233698 (TRBV7-9, TRBJ1-1)
CASSLVRGEAFF

SEQ ID NO: 467397 - protein, 11 aa, Homo sapiens
  CDR3 for alpha chain variable domain of TCR clone 233699 (TRAV2, TRAJ33)
CAVDSNYQLIW

SEQ ID NO: 467398 - protein, 13 aa, Homo sapiens
  CDR3 for beta chain variable domain of TCR clone 233699 (TRBV11-2, TRBJ2-7)
CASSTLDRYEQYF

SEQ ID NO: 467399 - protein, 15 aa, Homo sapiens
  CDR3 for alpha chain variable domain of TCR clone 233700 (TRAV12-1, TRAJ44)
CVVFVNTGSASKLTF

SEQ ID NO: 467400 - protein, 17 aa, Homo sapiens
  CDR3 for beta chain variable domain of TCR clone 233700 (TRBV7-8, TRBJ2-6)
CASSAGTGGAGANVLTF

SEQ ID NO: 467401 - protein, 15 aa, Homo sapiens
  CDR3 for alpha chain variable domain of TCR clone 233701 (TRAV25, TRAJ52)
CAGTSGGTSYGKPKF

SEQ ID NO: 467402 - protein, 13 aa, Homo sapiens
  CDR3 for beta chain variable domain of TCR clone 233701 (TRBV6-5, TRBJ2-5)
CASSPQGGETQYF

SEQ ID NO: 467403 - protein, 15 aa, Homo sapiens
  CDR3 for alpha chain variable domain of TCR clone 233702 (TRAV27, TRAJ38)
CAGRFDAGNNRKLIW

SEQ ID NO: 467404 - protein, 14 aa, Homo sapiens
  CDR3 for beta chain variable domain of TCR clone 233702 (TRBV19, TRBJ1-6)
CASSSGTGYSPLHF

SEQ ID NO: 467405 - protein, 23 aa, Homo sapiens
  CDR3 for alpha chain variable domain of TCR clone 233703 (TRAV2, TRAJ13)
CASGGYQKVTLELEQSSKSSQIS

SEQ ID NO: 467406 - protein, 14 aa, Homo sapiens
  CDR3 for beta chain variable domain of TCR clone 233703 (TRBV7-3, TRBJ2-7)
CASSYDQDYYEQYF

SEQ ID NO: 467407 - protein, 16 aa, Homo sapiens
  CDR3 for alpha chain variable domain of TCR clone 233704 (TRAV12-2, TRAJ18)
CAVNPGRGSTLGRLYF

SEQ ID NO: 467408 - protein, 14 aa, Homo sapiens
  CDR3 for beta chain variable domain of TCR clone 233704 (TRBV29-1, TRBJ2-3)
CSAKGLTATDTQYF

SEQ ID NO: 467409 - protein, 15 aa, Homo sapiens
  CDR3 for alpha chain variable domain of TCR clone 233705 (TRAV13-1, TRAJ44)
CAASRGGGTASKLTF

SEQ ID NO: 467410 - protein, 15 aa, Homo sapiens
  CDR3 for beta chain variable domain of TCR clone 233705 (TRBV18, TRBJ2-1)
CASSPLSASYNEQFF

SEQ ID NO: 467411 - protein, 17 aa, Homo sapiens
  CDR3 for alpha chain variable domain of TCR clone 233706 (TRAV9-2, TRAJ45)
CALSGYYSGGGADGLTF

SEQ ID NO: 467412 - protein, 12 aa, Homo sapiens
  CDR3 for beta chain variable domain of TCR clone 233706 (TRBV11-2, TRBJ2-2)
CANSLGGGELFF

SEQ ID NO: 467413 - protein, 12 aa, Homo sapiens
  CDR3 for alpha chain variable domain of TCR clone 233707 (TRAV1-1, TRAJ9)
CAVDTGGFKTIF

SEQ ID NO: 467414 - protein, 14 aa, Homo sapiens
  CDR3 for beta chain variable domain of TCR clone 233707 (TRBV19, TRBJ2-1)
CASPTFVLSGEQFF

SEQ ID NO: 467415 - protein, 19 aa, Homo sapiens
  CDR3 for alpha chain variable domain of TCR clone 233708 (TRAV29/DV5, TRAJ49)
CSVLLCSKLTVDTGNQFYF

SEQ ID NO: 467416 - protein, 17 aa, Homo sapiens
  CDR3 for beta chain variable domain of TCR clone 233708 (TRBV13, TRBJ2-3)
CASSLSRVAGGRNTPYF

SEQ ID NO: 467417 - protein, 16 aa, Homo sapiens
  CDR3 for alpha chain variable domain of TCR clone 233709 (TRAV26-1, TRAJ36)
CIVRVPDQTGANNLFL

SEQ ID NO: 467418 - protein, 13 aa, Homo sapiens
  CDR3 for beta chain variable domain of TCR clone 233709 (TRBV7-9, TRBJ1-2)
CASSLKQNYGYTF

SEQ ID NO: 467419 - protein, 16 aa, Homo sapiens
  CDR3 for alpha chain variable domain of TCR clone 233710 (TRAV3, TRAJ37)
CAVSPHGSGNTGKLIF

SEQ ID NO: 467420 - protein, 15 aa, Homo sapiens
  CDR3 for beta chain variable domain of TCR clone 233710 (TRBV20-1, TRBJ2-7)
CSARDRVSGMDEQYF

SEQ ID NO: 467421 - protein, 13 aa, Homo sapiens
  CDR3 for alpha chain variable domain of TCR clone 233711 (TRAV26-1, TRAJ36)
CIAVGTGANNLFF

SEQ ID NO: 467422 - protein, 14 aa, Homo sapiens
  CDR3 for beta chain variable domain of TCR clone 233711 (TRBV20-1, TRBJ1-1)
CSAQTRIGGTEAFF

SEQ ID NO: 467423 - protein, 15 aa, Homo sapiens
  CDR3 for alpha chain variable domain of TCR clone 233712 (TRAV27, TRAJ50)
CAGVGRVTSYDKVIF

SEQ ID NO: 467424 - protein, 14 aa, Homo sapiens
  CDR3 for beta chain variable domain of TCR clone 233712 (TRBV7-2, TRBJ1-1)
CASSFYDLNTEAFF

SEQ ID NO: 467425 - protein, 13 aa, Homo sapiens
  CDR3 for alpha chain variable domain of TCR clone 233713 (TRAV8-6, TRAJ34)
CAVSDQVTDKLIF

SEQ ID NO: 467426 - protein, 14 aa, Homo sapiens
  CDR3 for beta chain variable domain of TCR clone 233713 (TRBV12-4, TRBJ1-1)
CASTWTGHDTEAFF

SEQ ID NO: 467427 - protein, 14 aa, Homo sapiens
  CDR3 for alpha chain variable domain of TCR clone 233714 (TRAV3, TRAJ27)
CAVRYDTNAGKSTF

SEQ ID NO: 467428 - protein, 15 aa, Homo sapiens
  CDR3 for beta chain variable domain of TCR clone 233714 (TRBV7-7, TRBJ2-2)
CATSKLAKNTGELFF

SEQ ID NO: 467429 - protein, 16 aa, Homo sapiens
  CDR3 for alpha chain variable domain of TCR clone 233715 (TRAV20, TRAJ17)
CAVQARWESCKQQANF

SEQ ID NO: 467430 - protein, 15 aa, Homo sapiens
  CDR3 for beta chain variable domain of TCR clone 233715 (TRBV6-1, TRBJ1-1)
CASRRGEGQLSEAFF

SEQ ID NO: 467431 - protein, 14 aa, Homo sapiens
  CDR3 for alpha chain variable domain of TCR clone 233716 (TRAV26-1, TRAJ45)
CIEVTGGGADGLTF

SEQ ID NO: 467432 - protein, 19 aa, Homo sapiens
  CDR3 for beta chain variable domain of TCR clone 233716 (TRBV7-9, TRBJ2-6)
CASSLESATVLPGANVLTF

SEQ ID NO: 467433 - protein, 14 aa, Homo sapiens
  CDR3 for alpha chain variable domain of TCR clone 233717 (TRAV3, TRAJ27)
CAVRDDTNAGKSTF

SEQ ID NO: 467434 - protein, 15 aa, Homo sapiens
  CDR3 for beta chain variable domain of TCR clone 233717 (TRBV7-7, TRBJ2-2)
CATSKLAQHTGELFF

SEQ ID NO: 467435 - protein, 12 aa, Homo sapiens
  CDR3 for alpha chain variable domain of TCR clone 233718 (TRAV21, TRAJ23)
CAVPNQGGKLIF

SEQ ID NO: 467436 - protein, 13 aa, Homo sapiens
  CDR3 for beta chain variable domain of TCR clone 233718 (TRBV19, TRBJ1-2)
CASSVPGQDGYTF

SEQ ID NO: 467437 - protein, 13 aa, Homo sapiens
  CDR3 for alpha chain variable domain of TCR clone 233719 (TRAV36/DV7, TRAJ54)
CAVLIQVAQKLVF

SEQ ID NO: 467438 - protein, 13 aa, Homo sapiens
  CDR3 for beta chain variable domain of TCR clone 233719 (TRBV29-1, TRBJ2-4)
CSVGEGTKNIQYF

SEQ ID NO: 467439 - protein, 17 aa, Homo sapiens
  CDR3 for alpha chain variable domain of TCR clone 233720 (TRAV3, TRAJ42)
CAVRDRDYGGSQGNLIF

SEQ ID NO: 467440 - protein, 15 aa, Homo sapiens
  CDR3 for beta chain variable domain of TCR clone 233720 (TRBV6-6, TRBJ2-7)
CASSYSFGGSYEQYF

SEQ ID NO: 467441 - protein, 12 aa, Homo sapiens
  CDR3 for alpha chain variable domain of TCR clone 233721 (TRAV30, TRAJ43)
CGTEERGNDMRF

SEQ ID NO: 467442 - protein, 16 aa, Homo sapiens
  CDR3 for beta chain variable domain of TCR clone 233721 (TRBV15, TRBJ1-2)
CATSRGPRTGGGGYTF

SEQ ID NO: 467443 - protein, 15 aa, Homo sapiens
  CDR3 for alpha chain variable domain of TCR clone 233722 (TRAV21, TRAJ32)
FAVNSYGGATNKLIF

SEQ ID NO: 467444 - protein, 18 aa, Homo sapiens
  CDR3 for beta chain variable domain of TCR clone 233722 (TRBV7-9, TRBJ2-1)
CASSTGLAEGSSYNEKFF

SEQ ID NO: 467445 - protein, 10 aa, Homo sapiens
  CDR3 for alpha chain variable domain of TCR clone 233723 (TRAV13-2, TRAJ49)
CEGTGNQFYF

SEQ ID NO: 467446 - protein, 15 aa, Homo sapiens
  CDR3 for beta chain variable domain of TCR clone 233723 (TRBV7-6, TRBJ2-1)
CASSSLAGEGNEQFF

SEQ ID NO: 467447 - protein, 13 aa, Homo sapiens
  CDR3 for alpha chain variable domain of TCR clone 233724 (TRAV2, TRAJ40)
CAVVTSGTYKYIF

SEQ ID NO: 467448 - protein, 13 aa, Homo sapiens
  CDR3 for beta chain variable domain of TCR clone 233724 (TRBV19, TRBJ2-1)
CQSDFRFERVQFF

SEQ ID NO: 467449 - protein, 17 aa, Homo sapiens
  CDR3 for alpha chain variable domain of TCR clone 233725 (TRAV3, TRAJ42)
CAVRARDYGGSQGNPIF

SEQ ID NO: 467450 - protein, 20 aa, Homo sapiens
  CDR3 for beta chain variable domain of TCR clone 233725 (TRBV28, TRBJ2-1)
CASTPIGRSPGLAGGNEQFF

SEQ ID NO: 467451 - protein, 13 aa, Homo sapiens
  CDR3 for alpha chain variable domain of TCR clone 233726 (TRAV8-3, TRAJ34)
CAVGAYNTDKLIF

SEQ ID NO: 467452 - protein, 14 aa, Homo sapiens
  CDR3 for beta chain variable domain of TCR clone 233726 (TRBV19, TRBJ2-1)
CASPTFVLSGEQFF

SEQ ID NO: 467453 - protein, 12 aa, Homo sapiens
  CDR3 for alpha chain variable domain of TCR clone 233727 (TRAV1-1, TRAJ23)
CAVTNQGGKLIF

SEQ ID NO: 467454 - protein, 15 aa, Homo sapiens
  CDR3 for beta chain variable domain of TCR clone 233727 (TRBV20-1, TRBJ2-7)
CSARDRVSGMDEQYF

SEQ ID NO: 467455 - protein, 14 aa, Homo sapiens
  CDR3 for alpha chain variable domain of TCR clone 233728 (TRAV16, TRAJ33)
CALSAMDSNYHLIC

SEQ ID NO: 467456 - protein, 12 aa, Homo sapiens
  CDR3 for beta chain variable domain of TCR clone 233728 (TRBV28, TRBJ2-6)
CAIQAGANVLTF

SEQ ID NO: 467457 - protein, 21 aa, Homo sapiens
  CDR3 for alpha chain variable domain of TCR clone 233729 (TRAV17, TRAJ7)
TASRAAETASCFCATLGRLAF

SEQ ID NO: 467458 - protein, 13 aa, Homo sapiens
  CDR3 for beta chain variable domain of TCR clone 233729 (TRBV12-4, TRBJ2-7)
CASSLERVREQYF

SEQ ID NO: 467459 - protein, 11 aa, Homo sapiens
  CDR3 for alpha chain variable domain of TCR clone 233730 (TRAV1-2, TRAJ20)
CAVANDYKLSF

SEQ ID NO: 467460 - protein, 18 aa, Homo sapiens
  CDR3 for beta chain variable domain of TCR clone 233730 (TRBV20-1, TRBJ2-6)
CSAETTPTHGSGANVLTV

SEQ ID NO: 467461 - protein, 12 aa, Homo sapiens
  CDR3 for alpha chain variable domain of TCR clone 233731 (TRAV8-3, TRAJ4)
PAFSGGYNKLIF

SEQ ID NO: 467462 - protein, 13 aa, Homo sapiens
  CDR3 for beta chain variable domain of TCR clone 233731 (TRBV20-1, TRBJ1-3)
CSAGAYSGNTIHF

SEQ ID NO: 467463 - protein, 12 aa, Homo sapiens
  CDR3 for alpha chain variable domain of TCR clone 233732 (TRAV13-2, TRAJ54)
CWAHEGAQKLVF

SEQ ID NO: 467464 - protein, 13 aa, Homo sapiens
  CDR3 for beta chain variable domain of TCR clone 233732 (TRBV7-2, TRBJ1-6)
CASSLVGSSPLHF

SEQ ID NO: 467465 - protein, 15 aa, Homo sapiens
  CDR3 for alpha chain variable domain of TCR clone 233733 (TRAV13-1, TRAJ17)
CAASIHGGCRQQANF

SEQ ID NO: 467466 - protein, 14 aa, Homo sapiens
  CDR3 for beta chain variable domain of TCR clone 233733 (TRBV20-1, TRBJ2-4)
CSARDRGQWGIQYL

SEQ ID NO: 467467 - protein, 12 aa, Homo sapiens
  CDR3 for alpha chain variable domain of TCR clone 233734 (TRAV13-1, TRAJ21)
CASKEGFNKFYF

SEQ ID NO: 467468 - protein, 12 aa, Homo sapiens
  CDR3 for beta chain variable domain of TCR clone 233734 (TRBV7-8, TRBJ2-7)
CASSLGDREQYF

SEQ ID NO: 467469 - protein, 15 aa, Homo sapiens
  CDR3 for alpha chain variable domain of TCR clone 233735 (TRAV26-1, TRAJ42)
FIVRVKGGSEGNLIF

SEQ ID NO: 467470 - protein, 14 aa, Homo sapiens
  CDR3 for beta chain variable domain of TCR clone 233735 (TRBV19, TRBJ2-2)
CATTGHANTGELFF

SEQ ID NO: 467471 - protein, 15 aa, Homo sapiens
  CDR3 for alpha chain variable domain of TCR clone 233736 (TRAV17, TRAJ22)
CAMAALLGSARQLTF

SEQ ID NO: 467472 - protein, 13 aa, Homo sapiens
  CDR3 for beta chain variable domain of TCR clone 233736 (TRBV29-1, TRBJ2-3)
CSVVPQGGDTQYF

SEQ ID NO: 467473 - protein, 16 aa, Homo sapiens
  CDR3 for alpha chain variable domain of TCR clone 233737 (TRAV8-3, TRAJ8)
CAVPSDGNTGFQNLVF

SEQ ID NO: 467474 - protein, 15 aa, Homo sapiens
  CDR3 for beta chain variable domain of TCR clone 233737 (TRBV6-1, TRBJ2-6)
CASSSRPSGANVLTF

SEQ ID NO: 467475 - protein, 15 aa, Homo sapiens
  CDR3 for alpha chain variable domain of TCR clone 233738 (TRAV8-3, TRAJ45)
CASSYSGVGADGLTV

SEQ ID NO: 467476 - protein, 13 aa, Homo sapiens
  CDR3 for beta chain variable domain of TCR clone 233738 (TRBV10-3, TRBJ2-7)
CASKLAVSYEQYF

SEQ ID NO: 467477 - protein, 18 aa, Homo sapiens
  CDR3 for alpha chain variable domain of TCR clone 233739 (TRAV25, TRAJ35)
CAGGGLWECAALRVRHSS

SEQ ID NO: 467478 - protein, 15 aa, Homo sapiens
  CDR3 for beta chain variable domain of TCR clone 233739 (TRBV12-4, TRBJ2-5)
CASSPPTGLQETQYF

SEQ ID NO: 467479 - protein, 14 aa, Homo sapiens
  CDR3 for alpha chain variable domain of TCR clone 233740 (TRAV19, TRAJ5)
CALKKATGRRALTF

SEQ ID NO: 467480 - protein, 15 aa, Homo sapiens
  CDR3 for beta chain variable domain of TCR clone 233740 (TRBV2, TRBJ2-5)
CASSEAGTRQETQYF

SEQ ID NO: 467481 - protein, 17 aa, Homo sapiens
  CDR3 for alpha chain variable domain of TCR clone 233741 (TRAV3, TRAJ6)
CAVRDGPRAGGSYIPTF

SEQ ID NO: 467482 - protein, 15 aa, Homo sapiens
  CDR3 for beta chain variable domain of TCR clone 233741 (TRBV12-4, TRBJ1-2)
CASSPITGGGYGYTF

SEQ ID NO: 467483 - protein, 14 aa, Homo sapiens
  CDR3 for alpha chain variable domain of TCR clone 233742 (TRAV2, TRAJ9)
CAVEDRSGGFKTIF

SEQ ID NO: 467484 - protein, 17 aa, Homo sapiens
  CDR3 for beta chain variable domain of TCR clone 233742 (TRBV7-8, TRBJ2-6)
CASSAGTGGAGANVLTY

SEQ ID NO: 467485 - protein, 14 aa, Homo sapiens
  CDR3 for alpha chain variable domain of TCR clone 233743 (TRAV1-2, TRAJ8)
CAVREDTGFQKLVF

SEQ ID NO: 467486 - protein, 13 aa, Homo sapiens
  CDR3 for beta chain variable domain of TCR clone 233743 (TRBV20-1, TRBJ1-2)
CSARGRVYGGYTF

SEQ ID NO: 467487 - protein, 16 aa, Homo sapiens
  CDR3 for alpha chain variable domain of TCR clone 233744 (TRAV3, TRAJ10)
CAVRDKRAGGGNKLTF

SEQ ID NO: 467488 - protein, 17 aa, Homo sapiens
  CDR3 for beta chain variable domain of TCR clone 233744 (TRBV28, TRBJ2-5)
CASSTPEGDALQETQYF

SEQ ID NO: 467489 - protein, 13 aa, Homo sapiens
  CDR3 for alpha chain variable domain of TCR clone 233745 (TRAV23/DV6, TRAJ22)
CAPYSGSARQLTL

SEQ ID NO: 467490 - protein, 13 aa, Homo sapiens
  CDR3 for beta chain variable domain of TCR clone 233745 (TRBV6-1, TRBJ1-1)
CASSRQGNTEAFF

SEQ ID NO: 467491 - protein, 13 aa, Homo sapiens
  CDR3 for alpha chain variable domain of TCR clone 233746 (TRAV20, TRAJ9)
CAVPDTGGFKTTF

SEQ ID NO: 467492 - protein, 15 aa, Homo sapiens
  CDR3 for beta chain variable domain of TCR clone 233746 (TRBV27, TRBJ2-7)
CASSKAGRGGYEQYF

SEQ ID NO: 467493 - protein, 14 aa, Homo sapiens
  CDR3 for alpha chain variable domain of TCR clone 233747 (TRAV1-2, TRAJ8)
CAVREDTGFQKLVF

SEQ ID NO: 467494 - protein, 15 aa, Homo sapiens
  CDR3 for beta chain variable domain of TCR clone 233747 (TRBV29-1, TRBJ2-1)
CSVPTGLALYNDQFF

SEQ ID NO: 467495 - protein, 11 aa, Homo sapiens
  CDR3 for alpha chain variable domain of TCR clone 233748 (TRAV2, TRAJ13)
CASGGYQKVTF

SEQ ID NO: 467496 - protein, 14 aa, Homo sapiens
  CDR3 for beta chain variable domain of TCR clone 233748 (TRBV7-8, TRBJ2-3)
CASSFKSSTDTQYF

SEQ ID NO: 467497 - protein, 15 aa, Homo sapiens
  CDR3 for alpha chain variable domain of TCR clone 233749 (TRAV20, TRAJ4)
CAVQVFSGGYNKLIF

SEQ ID NO: 467498 - protein, 16 aa, Homo sapiens
  CDR3 for beta chain variable domain of TCR clone 233749 (TRBV5-1, TRBJ2-3)
CASSLTSGTSGGTQYF

SEQ ID NO: 467499 - protein, 16 aa, Homo sapiens
  CDR3 for alpha chain variable domain of TCR clone 233750 (TRAV23/DV6, TRAJ9)
CAASIGGNTGGFKTIF

SEQ ID NO: 467500 - protein, 15 aa, Homo sapiens
  CDR3 for beta chain variable domain of TCR clone 233750 (TRBV12-4, TRBJ2-7)
CASSQTGAISYEQYF

SEQ ID NO: 467501 - protein, 14 aa, Homo sapiens
  CDR3 for alpha chain variable domain of TCR clone 233751 (TRAV12-2, TRAJ13)
CAVKKTGGNQKVTF

SEQ ID NO: 467502 - protein, 14 aa, Homo sapiens
  CDR3 for beta chain variable domain of TCR clone 233751 (TRBV19, TRBJ2-1)
CASPTFVLSSEQFF

SEQ ID NO: 467503 - protein, 16 aa, Homo sapiens
  CDR3 for alpha chain variable domain of TCR clone 233752 (TRAV3, TRAJ10)
CAVRDMRAGGGNKPNF

SEQ ID NO: 467504 - protein, 15 aa, Homo sapiens
  CDR3 for beta chain variable domain of TCR clone 233752 (TRBV6-3, TRBJ2-7)
CASSSPGTVFYEQYF

SEQ ID NO: 467505 - protein, 16 aa, Homo sapiens
  CDR3 for alpha chain variable domain of TCR clone 233753 (TRAV12-3, TRAJ10)
CAMKKGITGGGNKLTF

SEQ ID NO: 467506 - protein, 12 aa, Homo sapiens
  CDR3 for beta chain variable domain of TCR clone 233753 (TRBV20-1, TRBJ2-7)
CSAITPTKEQYC

SEQ ID NO: 467507 - protein, 14 aa, Homo sapiens
  CDR3 for alpha chain variable domain of TCR clone 233754 (TRAV34, TRAJ22)
CGADTSGSARQLTF

SEQ ID NO: 467508 - protein, 13 aa, Homo sapiens
  CDR3 for beta chain variable domain of TCR clone 233754 (TRBV12-4, TRBJ2-7)
CASSPTETYEQYF

SEQ ID NO: 467509 - protein, 13 aa, Homo sapiens
  CDR3 for alpha chain variable domain of TCR clone 233755 (TRAV1-2, TRAJ9)
CAALNTGGFKTIF

SEQ ID NO: 467510 - protein, 14 aa, Homo sapiens
  CDR3 for beta chain variable domain of TCR clone 233755 (TRBV7-7, TRBJ2-7)
CASSLGRGVGERYF

SEQ ID NO: 467511 - protein, 13 aa, Homo sapiens
  CDR3 for alpha chain variable domain of TCR clone 233756 (TRAV12-1, TRAJ26)
SATYLYYGQNFVF

SEQ ID NO: 467512 - protein, 15 aa, Homo sapiens
  CDR3 for beta chain variable domain of TCR clone 233756 (TRBV5-1, TRBJ2-6)
CASSLGPSGANVLTF

SEQ ID NO: 467513 - protein, 12 aa, Homo sapiens
  CDR3 for alpha chain variable domain of TCR clone 233757 (TRAV21, TRAJ27)
CAPPGNAGKSTF

SEQ ID NO: 467514 - protein, 16 aa, Homo sapiens
  CDR3 for beta chain variable domain of TCR clone 233757 (TRBV6-1, TRBJ2-5)
CASSETLDRGAETQYF

SEQ ID NO: 467515 - protein, 15 aa, Homo sapiens
  CDR3 for alpha chain variable domain of TCR clone 233758 (TRAV13-1, TRAJ16)
CAARYQMARSCSLQG

SEQ ID NO: 467516 - protein, 13 aa, Homo sapiens
  CDR3 for beta chain variable domain of TCR clone 233758 (TRBV7-7, TRBJ2-2)
CASSLTSAGELFF

SEQ ID NO: 467517 - protein, 16 aa, Homo sapiens
  CDR3 for alpha chain variable domain of TCR clone 233759 (TRAV30, TRAJ24)
CGTEIVDADSWGKFQF

SEQ ID NO: 467518 - protein, 14 aa, Homo sapiens
  CDR3 for beta chain variable domain of TCR clone 233759 (TRBV2, TRBJ1-5)
CASSGTGFNQPQHF

SEQ ID NO: 467519 - protein, 12 aa, Homo sapiens
  CDR3 for alpha chain variable domain of TCR clone 233760 (TRAV26-1, TRAJ53)
CIEGGSNYKLTF

SEQ ID NO: 467520 - protein, 13 aa, Homo sapiens
  CDR3 for beta chain variable domain of TCR clone 233760 (TRBV28, TRBJ2-7)
CASTQTGAYEQYF

SEQ ID NO: 467521 - protein, 16 aa, Homo sapiens
  CDR3 for alpha chain variable domain of TCR clone 233761 (TRAV12-1, TRAJ28)
CVVTAYSGAGSYQLTF

SEQ ID NO: 467522 - protein, 15 aa, Homo sapiens
  CDR3 for beta chain variable domain of TCR clone 233761 (TRBV14, TRBJ1-1)
CASSQEGMGFTEAFF

SEQ ID NO: 467523 - protein, 15 aa, Homo sapiens
  CDR3 for alpha chain variable domain of TCR clone 233762 (TRAV35, TRAJ58)
CAWRRQETSGSRLTF

SEQ ID NO: 467524 - protein, 13 aa, Homo sapiens
  CDR3 for beta chain variable domain of TCR clone 233762 (TRBV28, TRBJ2-7)
CASSLPSRYEQYF

SEQ ID NO: 467525 - protein, 11 aa, Homo sapiens
  CDR3 for alpha chain variable domain of TCR clone 233763 (TRAV27, TRAJ47)
CRSNQGNKLVF

SEQ ID NO: 467526 - protein, 16 aa, Homo sapiens
  CDR3 for beta chain variable domain of TCR clone 233763 (TRBV7-9, TRBJ2-1)
CTSSDVAGGSYNEQFF

SEQ ID NO: 467527 - protein, 14 aa, Homo sapiens
  CDR3 for alpha chain variable domain of TCR clone 233764 (TRAV1-2, TRAJ16)
CAVNRFPDGQKLLF

SEQ ID NO: 467528 - protein, 10 aa, Homo sapiens
  CDR3 for beta chain variable domain of TCR clone 233764 (TRBV20-1, TRBJ1-4)
PQGANEKLFF

SEQ ID NO: 467529 - protein, 12 aa, Homo sapiens
  CDR3 for alpha chain variable domain of TCR clone 233765 (TRAV9-2, TRAJ26)
CALRGDGQHFVF

SEQ ID NO: 467530 - protein, 12 aa, Homo sapiens
  CDR3 for beta chain variable domain of TCR clone 233765 (TRBV29-1, TRBJ2-3)
CSVTGGADTQYF

SEQ ID NO: 467531 - protein, 16 aa, Homo sapiens
  CDR3 for alpha chain variable domain of TCR clone 233766 (TRAV1-2, TRAJ35)
CAVRGLTLGFGNVLHC

SEQ ID NO: 467532 - protein, 13 aa, Homo sapiens
  CDR3 for beta chain variable domain of TCR clone 233766 (TRBV6-6, TRBJ2-1)
CASSLHQGDEQFF

SEQ ID NO: 467533 - protein, 17 aa, Homo sapiens
  CDR3 for alpha chain variable domain of TCR clone 233767 (TRAV3, TRAJ12)
CAVRDGGRMDSSYKLIF

SEQ ID NO: 467534 - protein, 14 aa, Homo sapiens
  CDR3 for beta chain variable domain of TCR clone 233767 (TRBV7-9, TRBJ1-2)
CASSRQGANYGYTI

SEQ ID NO: 467535 - protein, 12 aa, Homo sapiens
  CDR3 for alpha chain variable domain of TCR clone 233768 (TRAV12-1, TRAJ40)
CVVYSGTYKYIF

SEQ ID NO: 467536 - protein, 15 aa, Homo sapiens
  CDR3 for beta chain variable domain of TCR clone 233768 (TRBV5-1, TRBJ2-1)
CASSPPRAPYNEQSF

SEQ ID NO: 467537 - protein, 13 aa, Homo sapiens
  CDR3 for alpha chain variable domain of TCR clone 233769 (TRAV12-3, TRAJ7)
CAMTPYGNNRLAF

SEQ ID NO: 467538 - protein, 13 aa, Homo sapiens
  CDR3 for beta chain variable domain of TCR clone 233769 (TRBV19, TRBJ2-1)
CQSTFVLSGEQFF

SEQ ID NO: 467539 - protein, 11 aa, Homo sapiens
  CDR3 for alpha chain variable domain of TCR clone 233770 (TRAV16, TRAJ31)
CALFNNARLMF

SEQ ID NO: 467540 - protein, 15 aa, Homo sapiens
  CDR3 for beta chain variable domain of TCR clone 233770 (TRBV18, TRBJ1-1)
CASSPRQGENTEAFV

SEQ ID NO: 467541 - protein, 16 aa, Homo sapiens
  CDR3 for alpha chain variable domain of TCR clone 233771 (TRAV30, TRAJ24)
CGTEIVDADSWGKFQF

SEQ ID NO: 467542 - protein, 13 aa, Homo sapiens
  CDR3 for beta chain variable domain of TCR clone 233771 (TRBV11-2, TRBJ2-5)
CASGSTGEETQYF

SEQ ID NO: 467543 - protein, 12 aa, Homo sapiens
  CDR3 for alpha chain variable domain of TCR clone 233772 (TRAV13-1, TRAJ15)
CAASQAGTTLIF

SEQ ID NO: 467544 - protein, 15 aa, Homo sapiens
  CDR3 for beta chain variable domain of TCR clone 233772 (TRBV11-3, TRBJ2-3)
CASLKDGREGDTQYF

SEQ ID NO: 467545 - protein, 14 aa, Homo sapiens
  CDR3 for alpha chain variable domain of TCR clone 233773 (TRAV3, TRAJ34)
CAVRAPGNTDKLIF

SEQ ID NO: 467546 - protein, 13 aa, Homo sapiens
  CDR3 for beta chain variable domain of TCR clone 233773 (TRBV4-1, TRBJ2-2)
CASSQENTGELFF

SEQ ID NO: 467547 - protein, 13 aa, Homo sapiens
  CDR3 for alpha chain variable domain of TCR clone 233774 (TRAV8-3, TRAJ28)
CAVGAVGSYQLTF

SEQ ID NO: 467548 - protein, 15 aa, Homo sapiens
  CDR3 for beta chain variable domain of TCR clone 233774 (TRBV11-2, TRBJ2-2)
CASSSGRVNAGELFF

SEQ ID NO: 467549 - protein, 16 aa, Homo sapiens
  CDR3 for alpha chain variable domain of TCR clone 233775 (TRAV17, TRAJ35)
FATAEGGIGFGNVLHC

SEQ ID NO: 467550 - protein, 16 aa, Homo sapiens
  CDR3 for beta chain variable domain of TCR clone 233775 (TRBV6-5, TRBJ2-7)
CASSSDPTSGFYEQYF

SEQ ID NO: 467551 - protein, 10 aa, Homo sapiens
  CDR3 for alpha chain variable domain of TCR clone 233776 (TRAV10, TRAJ38)
MAGNNRKLIW

SEQ ID NO: 467552 - protein, 16 aa, Homo sapiens
  CDR3 for beta chain variable domain of TCR clone 233776 (TRBV12-5, TRBJ2-5)
CASGPRTSGNQETQYF

SEQ ID NO: 467553 - protein, 11 aa, Homo sapiens
  CDR3 for alpha chain variable domain of TCR clone 233777 (TRAV21, TRAJ34)
CAVTNTDKLIF

SEQ ID NO: 467554 - protein, 15 aa, Homo sapiens
  CDR3 for beta chain variable domain of TCR clone 233777 (TRBV5-1, TRBJ2-7)
CASSLMTSGSNEQYF

SEQ ID NO: 467555 - protein, 16 aa, Homo sapiens
  CDR3 for alpha chain variable domain of TCR clone 233778 (TRAV26-1, TRAJ31)
CIVGPPVLNNNARLMF

SEQ ID NO: 467556 - protein, 13 aa, Homo sapiens
  CDR3 for beta chain variable domain of TCR clone 233778 (TRBV20-1, TRBJ1-6)
CSAPLGVGSPLHV

SEQ ID NO: 467557 - protein, 14 aa, Homo sapiens
  CDR3 for alpha chain variable domain of TCR clone 233779 (TRAV8-3, TRAJ35)
CAVVPQGFVNVLHC

SEQ ID NO: 467558 - protein, 15 aa, Homo sapiens
  CDR3 for beta chain variable domain of TCR clone 233779 (TRBV6-1, TRBJ2-2)
CASSAGQGYTGELFF

SEQ ID NO: 467559 - protein, 13 aa, Homo sapiens
  CDR3 for alpha chain variable domain of TCR clone 233780 (TRAV12-1, TRAJ16)
CVVNGPDGQKVLF

SEQ ID NO: 467560 - protein, 13 aa, Homo sapiens
  CDR3 for beta chain variable domain of TCR clone 233780 (TRBV2, TRBJ1-1)
CARNPTGGFHAFF

SEQ ID NO: 467561 - protein, 17 aa, Homo sapiens
  CDR3 for alpha chain variable domain of TCR clone 233781 (TRAV13-1, TRAJ52)
CAAGRNAGGTSYGKLTF

SEQ ID NO: 467562 - protein, 15 aa, Homo sapiens
  CDR3 for beta chain variable domain of TCR clone 233781 (TRBV7-3, TRBJ2-1)
CASSPTGGGEVEQFF

SEQ ID NO: 467563 - protein, 16 aa, Homo sapiens
  CDR3 for alpha chain variable domain of TCR clone 233782 (TRAV4, TRAJ22)
CLVGDLYSGSARQLTF

SEQ ID NO: 467564 - protein, 14 aa, Homo sapiens
  CDR3 for beta chain variable domain of TCR clone 233782 (TRBV20-1, TRBJ2-3)
CSARVRGSTDTQYF

SEQ ID NO: 467565 - protein, 14 aa, Homo sapiens
  CDR3 for alpha chain variable domain of TCR clone 233783 (TRAV26-1, TRAJ21)
CIVRPPYKFNKFYF

SEQ ID NO: 467566 - protein, 14 aa, Homo sapiens
  CDR3 for beta chain variable domain of TCR clone 233783 (TRBV19, TRBJ2-1)
CASPTFVLSGEQFF

SEQ ID NO: 467567 - protein, 16 aa, Homo sapiens
  CDR3 for alpha chain variable domain of TCR clone 233784 (TRAV14/DV4, TRAJ53)
CAMREGGGGSNYKLTF

SEQ ID NO: 467568 - protein, 12 aa, Homo sapiens
  CDR3 for beta chain variable domain of TCR clone 233784 (TRBV2, TRBJ2-7)
CASSGGSGIPYF

SEQ ID NO: 467569 - protein, 16 aa, Homo sapiens
  CDR3 for alpha chain variable domain of TCR clone 233785 (TRAV12-2, TRAJ40)
CAVKIPPGTYKYILEQ

SEQ ID NO: 467570 - protein, 14 aa, Homo sapiens
  CDR3 for beta chain variable domain of TCR clone 233785 (TRBV20-1, TRBJ1-1)
CSAQTRIGGTEAFF

SEQ ID NO: 467571 - protein, 15 aa, Homo sapiens
  CDR3 for alpha chain variable domain of TCR clone 233786 (TRAV3, TRAJ4)
CAVRDGTGGYNKLIF

SEQ ID NO: 467572 - protein, 14 aa, Homo sapiens
  CDR3 for beta chain variable domain of TCR clone 233786 (TRBV27, TRBJ2-1)
CAGSIAETYNEQFF

SEQ ID NO: 467573 - protein, 13 aa, Homo sapiens
  CDR3 for alpha chain variable domain of TCR clone 233787 (TRAV17, TRAJ54)
CAAGIQGAQKLVF

SEQ ID NO: 467574 - protein, 11 aa, Homo sapiens
  CDR3 for beta chain variable domain of TCR clone 233787 (TRBV11-2, TRBJ1-2)
CASSLGQLTMA

SEQ ID NO: 467575 - protein, 14 aa, Homo sapiens
  CDR3 for alpha chain variable domain of TCR clone 233788 (TRAV13-2, TRAJ17)
CAENSKAAGNKLTF

SEQ ID NO: 467576 - protein, 20 aa, Homo sapiens
  CDR3 for beta chain variable domain of TCR clone 233788 (TRBV7-8, TRBJ2-2)
CASSYLFPGPTIHITGELFF

SEQ ID NO: 467577 - protein, 12 aa, Homo sapiens
  CDR3 for alpha chain variable domain of TCR clone 233789 (TRAV8-3, TRAJ43)
CAVGAGNNDMRF

SEQ ID NO: 467578 - protein, 15 aa, Homo sapiens
  CDR3 for beta chain variable domain of TCR clone 233789 (TRBV27, TRBJ2-7)
CASSTAGTGSYEQYF

SEQ ID NO: 467579 - protein, 15 aa, Homo sapiens
  CDR3 for alpha chain variable domain of TCR clone 233790 (TRAV3, TRAJ5)
CAVSDLDTGRRALTF

SEQ ID NO: 467580 - protein, 12 aa, Homo sapiens
  CDR3 for beta chain variable domain of TCR clone 233790 (TRBV11-2, TRBJ2-2)
CASSLGGGELFF

SEQ ID NO: 467581 - protein, 14 aa, Homo sapiens
  CDR3 for alpha chain variable domain of TCR clone 233791 (TRAV12-1, TRAJ43)
CVVNGRSNNNDMRF

SEQ ID NO: 467582 - protein, 14 aa, Homo sapiens
  CDR3 for beta chain variable domain of TCR clone 233791 (TRBV7-3, TRBJ2-7)
CASSLKADSYEQYF

SEQ ID NO: 467583 - protein, 15 aa, Homo sapiens
  CDR3 for alpha chain variable domain of TCR clone 233792 (TRAV17, TRAJ54)
CATDAQIQGAQKLVF

SEQ ID NO: 467584 - protein, 14 aa, Homo sapiens
  CDR3 for beta chain variable domain of TCR clone 233792 (TRBV5-4, TRBJ1-1)
CASSLDSRRDEAFF

SEQ ID NO: 467585 - protein, 11 aa, Homo sapiens
  CDR3 for alpha chain variable domain of TCR clone 233793 (TRAV13-1, TRAJ20)
CAASNDSKLSF

SEQ ID NO: 467586 - protein, 15 aa, Homo sapiens
  CDR3 for beta chain variable domain of TCR clone 233793 (TRBV28, TRBJ1-5)
CASSRTGGYVQPQHF

SEQ ID NO: 467587 - protein, 12 aa, Homo sapiens
  CDR3 for alpha chain variable domain of TCR clone 233794 (TRAV13-1, TRAJ49)
CAASQMGNQFYF

SEQ ID NO: 467588 - protein, 17 aa, Homo sapiens
  CDR3 for beta chain variable domain of TCR clone 233794 (TRBV11-2, TRBJ2-1)
CASSLYPPGVEYNEQFF

SEQ ID NO: 467589 - protein, 15 aa, Homo sapiens
  CDR3 for alpha chain variable domain of TCR clone 233795 (TRAV13-2, TRAJ23)
CAERGFYNQGGKLIF

SEQ ID NO: 467590 - protein, 15 aa, Homo sapiens
  CDR3 for beta chain variable domain of TCR clone 233795 (TRBV20-1, TRBJ2-7)
CSARDRVSGMDEQYF

SEQ ID NO: 467591 - protein, 14 aa, Homo sapiens
  CDR3 for alpha chain variable domain of TCR clone 233796 (TRAV1-2, TRAJ8)
CAVREDTGFQKLVF

SEQ ID NO: 467592 - protein, 23 aa, Homo sapiens
  CDR3 for beta chain variable domain of TCR clone 233796 (TRBV10-1, TRBJ2-6)
CASRGRGPLWGQRPDFRGRQQAD

SEQ ID NO: 467593 - protein, 13 aa, Homo sapiens
  CDR3 for alpha chain variable domain of TCR clone 233797 (TRAV12-2, TRAJ42)
CAVKRGRQGNLIF

SEQ ID NO: 467594 - protein, 16 aa, Homo sapiens
  CDR3 for beta chain variable domain of TCR clone 233797 (TRBV9, TRBJ2-2)
CASSAMGKGNTGELFF

SEQ ID NO: 467595 - protein, 14 aa, Homo sapiens
  CDR3 for alpha chain variable domain of TCR clone 233798 (TRAV12-2, TRAJ13)
CAVKKTGGFQKVTF

SEQ ID NO: 467596 - protein, 14 aa, Homo sapiens
  CDR3 for beta chain variable domain of TCR clone 233798 (TRBV7-2, TRBJ1-1)
CASSFLTGTTEAFF

SEQ ID NO: 467597 - protein, 13 aa, Homo sapiens
  CDR3 for alpha chain variable domain of TCR clone 233799 (TRAV8-3, TRAJ28)
CAVGAVGSYQLTF

SEQ ID NO: 467598 - protein, 15 aa, Homo sapiens
  CDR3 for beta chain variable domain of TCR clone 233799 (TRBV28, TRBJ2-7)
CASSPGGRGFYEQYF

SEQ ID NO: 467599 - protein, 16 aa, Homo sapiens
  CDR3 for alpha chain variable domain of TCR clone 233800 (TRAV30, TRAJ24)
CGTEIVDADSWGKFKF

SEQ ID NO: 467600 - protein, 13 aa, Homo sapiens
  CDR3 for beta chain variable domain of TCR clone 233800 (TRBV20-1, TRBJ1-1)
CSGRGGGNTEAFL

SEQ ID NO: 467601 - protein, 15 aa, Homo sapiens
  CDR3 for alpha chain variable domain of TCR clone 233801 (TRAV17, TRAJ57)
CATGPSQGGSEKLVF

SEQ ID NO: 467602 - protein, 13 aa, Homo sapiens
  CDR3 for beta chain variable domain of TCR clone 233801 (TRBV5-7, TRBJ2-3)
CASSLGRTDTQYF

SEQ ID NO: 467603 - protein, 16 aa, Homo sapiens
  CDR3 for alpha chain variable domain of TCR clone 233802 (TRAV13-1, TRAJ13)
CTAFFLGVTRKLPLEL

SEQ ID NO: 467604 - protein, 14 aa, Homo sapiens
  CDR3 for beta chain variable domain of TCR clone 233802 (TRBV20-1, TRBJ1-5)
CSARDVTGFQPQHF

SEQ ID NO: 467605 - protein, 15 aa, Homo sapiens
  CDR3 for alpha chain variable domain of TCR clone 233803 (TRAV12-1, TRAJ26)
CVVNSWVTMVRILSL

SEQ ID NO: 467606 - protein, 13 aa, Homo sapiens
  CDR3 for beta chain variable domain of TCR clone 233803 (TRBV10-3, TRBJ2-7)
CASKLAVNDEQYF

SEQ ID NO: 467607 - protein, 11 aa, Homo sapiens
  CDR3 for alpha chain variable domain of TCR clone 233804 (TRAV1-2, TRAJ20)
CAVANDYKLSF

SEQ ID NO: 467608 - protein, 16 aa, Homo sapiens
  CDR3 for beta chain variable domain of TCR clone 233804 (TRBV4-3, TRBJ1-6)
CASSQDPGVYNPPLHF

SEQ ID NO: 467609 - protein, 12 aa, Homo sapiens
  CDR3 for alpha chain variable domain of TCR clone 233805 (TRAV21, TRAJ37)
CAVRGNTGKLIC

SEQ ID NO: 467610 - protein, 14 aa, Homo sapiens
  CDR3 for beta chain variable domain of TCR clone 233805 (TRBV19, TRBJ2-1)
CASEVTGARNEQFF

SEQ ID NO: 467611 - protein, 13 aa, Homo sapiens
  CDR3 for alpha chain variable domain of TCR clone 233806 (TRAV3, TRAJ20)
CAVRSLNDYKLSF

SEQ ID NO: 467612 - protein, 12 aa, Homo sapiens
  CDR3 for beta chain variable domain of TCR clone 233806 (TRBV12-4, TRBJ2-3)
CASSTLPDTQYF

SEQ ID NO: 467613 - protein, 17 aa, Homo sapiens
  CDR3 for alpha chain variable domain of TCR clone 233807 (TRAV23/DV6, TRAJ57)
CAASSTLSQGGPEKLVF

SEQ ID NO: 467614 - protein, 17 aa, Homo sapiens
  CDR3 for beta chain variable domain of TCR clone 233807 (TRBV25-1, TRBJ1-1)
SAPLCQHPPGGNTEAFF

SEQ ID NO: 467615 - protein, 14 aa, Homo sapiens
  CDR3 for alpha chain variable domain of TCR clone 233808 (TRAV8-3, TRAJ16)
CAVDRFSDGQKLLF

SEQ ID NO: 467616 - protein, 15 aa, Homo sapiens
  CDR3 for beta chain variable domain of TCR clone 233808 (TRBV4-3, TRBJ2-7)
CASSQDLGSSYEQYF

SEQ ID NO: 467617 - protein, 13 aa, Homo sapiens
  CDR3 for alpha chain variable domain of TCR clone 233809 (TRAV2, TRAJ15)
CAVASQSGTALIF

SEQ ID NO: 467618 - protein, 15 aa, Homo sapiens
  CDR3 for beta chain variable domain of TCR clone 233809 (TRBV5-1, TRBJ2-1)
CASSPPRAHYNEQFF

SEQ ID NO: 467619 - protein, 15 aa, Homo sapiens
  CDR3 for alpha chain variable domain of TCR clone 233810 (TRAV16, TRAJ23)
CALSGPYNQGGKLIF

SEQ ID NO: 467620 - protein, 13 aa, Homo sapiens
  CDR3 for beta chain variable domain of TCR clone 233810 (TRBV15, TRBJ1-1)
CATSRGIQARAFF

SEQ ID NO: 467621 - protein, 18 aa, Homo sapiens
  CDR3 for alpha chain variable domain of TCR clone 233811 (TRAV26-1, TRAJ5)
CIVRVVPPRDTGRRALTF

SEQ ID NO: 467622 - protein, 16 aa, Homo sapiens
  CDR3 for beta chain variable domain of TCR clone 233811 (TRBV7-6, TRBJ1-6)
CASSLSSRIGDSPLHF

SEQ ID NO: 467623 - protein, 14 aa, Homo sapiens
  CDR3 for alpha chain variable domain of TCR clone 233812 (TRAV8-3, TRAJ21)
CAVGLNPRSDKVYF

SEQ ID NO: 467624 - protein, 11 aa, Homo sapiens
  CDR3 for beta chain variable domain of TCR clone 233812 (TRBV6-3, TRBJ2-3)
CATGQADTQYF

SEQ ID NO: 467625 - protein, 22 aa, Homo sapiens
  CDR3 for alpha chain variable domain of TCR clone 233813 (TRAV12-2, TRAJ32)
CSSETPSPVIQPPKSATNKLIF

SEQ ID NO: 467626 - protein, 14 aa, Homo sapiens
  CDR3 for beta chain variable domain of TCR clone 233813 (TRBV7-3, TRBJ2-1)
RASSLSGSYNEQFF

SEQ ID NO: 467627 - protein, 23 aa, Homo sapiens
  CDR3 for alpha chain variable domain of TCR clone 233814 (TRAV8-3, )
CAVVTTWIPDIQNPDPAVYQLRD

SEQ ID NO: 467628 - protein, 18 aa, Homo sapiens
  CDR3 for beta chain variable domain of TCR clone 233814 (TRBV20-1, TRBJ2-3)
CSASGLAGGPGTTDTQYF

SEQ ID NO: 467629 - protein, 15 aa, Homo sapiens
  CDR3 for alpha chain variable domain of TCR clone 233815 (TRAV21, TRAJ24)
CAARSSTDSWGNLQF

SEQ ID NO: 467630 - protein, 11 aa, Homo sapiens
  CDR3 for beta chain variable domain of TCR clone 233815 (TRBV11-2, TRBJ2-2)
CASSLPGELFF

SEQ ID NO: 467631 - protein, 15 aa, Homo sapiens
  CDR3 for alpha chain variable domain of TCR clone 233816 (TRAV3, TRAJ20)
CAVRDIKLSDYKLSF

SEQ ID NO: 467632 - protein, 13 aa, Homo sapiens
  CDR3 for beta chain variable domain of TCR clone 233816 (TRBV11-2, TRBJ2-7)
CASSLGDSYEQYF

SEQ ID NO: 467633 - protein, 11 aa, Homo sapiens
  CDR3 for alpha chain variable domain of TCR clone 233817 (TRAV23/DV6, TRAJ49)
CAARAGNQFYF

SEQ ID NO: 467634 - protein, 17 aa, Homo sapiens
  CDR3 for beta chain variable domain of TCR clone 233817 (TRBV7-8, TRBJ2-1)
CASSPTTGTRAYNEQFF

SEQ ID NO: 467635 - protein, 13 aa, Homo sapiens
  CDR3 for alpha chain variable domain of TCR clone 233818 (TRAV27, TRAJ29)
CAGAHSGNAPLVF

SEQ ID NO: 467636 - protein, 15 aa, Homo sapiens
  CDR3 for beta chain variable domain of TCR clone 233818 (TRBV15, TRBJ1-4)
CATSRDMGSYEKLFF

SEQ ID NO: 467637 - protein, 13 aa, Homo sapiens
  CDR3 for alpha chain variable domain of TCR clone 233819 (TRAV8-3, TRAJ48)
CAVVPFGNGNLTF

SEQ ID NO: 467638 - protein, 15 aa, Homo sapiens
  CDR3 for beta chain variable domain of TCR clone 233819 (TRBV11-2, TRBJ2-1)
CASSSPSTRYNEQFF

SEQ ID NO: 467639 - protein, 10 aa, Homo sapiens
  CDR3 for alpha chain variable domain of TCR clone 233820 (TRAV13-1, TRAJ43)
CAASKNYMRF

SEQ ID NO: 467640 - protein, 13 aa, Homo sapiens
  CDR3 for beta chain variable domain of TCR clone 233820 (TRBV20-1, TRBJ1-5)
CSARTGVNQPQHF

SEQ ID NO: 467641 - protein, 13 aa, Homo sapiens
  CDR3 for alpha chain variable domain of TCR clone 233821 (TRAV27, TRAJ41)
CAGEENSGYALNF

SEQ ID NO: 467642 - protein, 15 aa, Homo sapiens
  CDR3 for beta chain variable domain of TCR clone 233821 (TRBV7-8, TRBJ2-7)
CASSLRHFEAYEQYF

SEQ ID NO: 467643 - protein, 11 aa, Homo sapiens
  CDR3 for alpha chain variable domain of TCR clone 233822 (TRAV2, TRAJ23)
CAVETRGKLIF

SEQ ID NO: 467644 - protein, 14 aa, Homo sapiens
  CDR3 for beta chain variable domain of TCR clone 233822 (TRBV2, TRBJ2-3)
CASSEGQNTDTQSF

SEQ ID NO: 467645 - protein, 12 aa, Homo sapiens
  CDR3 for alpha chain variable domain of TCR clone 233823 (TRAV21, TRAJ29)
CAVTSGNTPLVF

SEQ ID NO: 467646 - protein, 16 aa, Homo sapiens
  CDR3 for beta chain variable domain of TCR clone 233823 (TRBV28, TRBJ2-7)
CASSLFFETGGPEQYF

SEQ ID NO: 467647 - protein, 14 aa, Homo sapiens
  CDR3 for alpha chain variable domain of TCR clone 233824 (TRAV2, TRAJ9)
CAVDPNTGGFKTFF

SEQ ID NO: 467648 - protein, 14 aa, Homo sapiens
  CDR3 for beta chain variable domain of TCR clone 233824 (TRBV4-1, TRBJ2-2)
CASSQAVNTGELFF

SEQ ID NO: 467649 - protein, 13 aa, Homo sapiens
  CDR3 for alpha chain variable domain of TCR clone 233825 (TRAV8-6, TRAJ34)
CAVSDQGTDKLIC

SEQ ID NO: 467650 - protein, 14 aa, Homo sapiens
  CDR3 for beta chain variable domain of TCR clone 233825 (TRBV12-4, TRBJ1-1)
CASTWTGHDTEASF

SEQ ID NO: 467651 - protein, 14 aa, Homo sapiens
  CDR3 for alpha chain variable domain of TCR clone 233826 (TRAV1-2, TRAJ8)
CAVREDTGFHKLVF

SEQ ID NO: 467652 - protein, 14 aa, Homo sapiens
  CDR3 for beta chain variable domain of TCR clone 233826 (TRBV7-8, TRBJ2-3)
CASSLEAGTDTQYF

SEQ ID NO: 467653 - protein, 15 aa, Homo sapiens
  CDR3 for alpha chain variable domain of TCR clone 233827 (TRAV26-1, TRAJ42)
FIVRVTGGSQGTLFF

SEQ ID NO: 467654 - protein, 14 aa, Homo sapiens
  CDR3 for beta chain variable domain of TCR clone 233827 (TRBV19, TRBJ2-2)
CATTGHANTGELFF

SEQ ID NO: 467655 - protein, 16 aa, Homo sapiens
  CDR3 for alpha chain variable domain of TCR clone 233828 (TRAV26-1, TRAJ45)
CIVEKYSGGGADGLTF

SEQ ID NO: 467656 - protein, 16 aa, Homo sapiens
  CDR3 for beta chain variable domain of TCR clone 233828 (TRBV4-3, TRBJ2-7)
CASSPRTSGRSYEQYF

SEQ ID NO: 467657 - protein, 14 aa, Homo sapiens
  CDR3 for alpha chain variable domain of TCR clone 233829 (TRAV8-3, TRAJ11)
CAVGSNSGYSTLTF

SEQ ID NO: 467658 - protein, 14 aa, Homo sapiens
  CDR3 for beta chain variable domain of TCR clone 233829 (TRBV7-2, TRBJ2-7)
CASRSQGAAYEQYF

SEQ ID NO: 467659 - protein, 14 aa, Homo sapiens
  CDR3 for alpha chain variable domain of TCR clone 233830 (TRAV1-2, TRAJ8)
CAVREDTGFQTLVF

SEQ ID NO: 467660 - protein, 12 aa, Homo sapiens
  CDR3 for beta chain variable domain of TCR clone 233830 (TRBV2, TRBJ2-1)
CAYGPPGNEQFF

SEQ ID NO: 467661 - protein, 12 aa, Homo sapiens
  CDR3 for alpha chain variable domain of TCR clone 233831 (TRAV13-1, TRAJ15)
CAANQAGTALIF

SEQ ID NO: 467662 - protein, 14 aa, Homo sapiens
  CDR3 for beta chain variable domain of TCR clone 233831 (TRBV20-1, TRBJ2-5)
CSARYRGLQGTQYF

SEQ ID NO: 467663 - protein, 14 aa, Homo sapiens
  CDR3 for alpha chain variable domain of TCR clone 233832 (TRAV25, TRAJ27)
CAGPGNANAGKSTF

SEQ ID NO: 467664 - protein, 16 aa, Homo sapiens
  CDR3 for beta chain variable domain of TCR clone 233832 (TRBV4-1, TRBJ2-6)
CASSQDGGPGDNVLTF

SEQ ID NO: 467665 - protein, 11 aa, Homo sapiens
  CDR3 for alpha chain variable domain of TCR clone 233833 (TRAV3, TRAJ21)
CAVGNFNKFYV

SEQ ID NO: 467666 - protein, 16 aa, Homo sapiens
  CDR3 for beta chain variable domain of TCR clone 233833 (TRBV19, TRBJ2-1)
CASSKAGPSSYNEQFF

SEQ ID NO: 467667 - protein, 14 aa, Homo sapiens
  CDR3 for alpha chain variable domain of TCR clone 233834 (TRAV8-4, TRAJ3)
CAVIEYSSASKIIF

SEQ ID NO: 467668 - protein, 16 aa, Homo sapiens
  CDR3 for beta chain variable domain of TCR clone 233834 (TRBV7-2, TRBJ1-4)
CASSPVGRFDREKLFF

SEQ ID NO: 467669 - protein, 16 aa, Homo sapiens
  CDR3 for alpha chain variable domain of TCR clone 233835 (TRAV3, TRAJ37)
CAVRVRGSGNTGKLIC

SEQ ID NO: 467670 - protein, 13 aa, Homo sapiens
  CDR3 for beta chain variable domain of TCR clone 233835 (TRBV14, TRBJ2-1)
CASSQDRRNEQFF

SEQ ID NO: 467671 - protein, 16 aa, Homo sapiens
  CDR3 for alpha chain variable domain of TCR clone 233836 (TRAV12-2, TRAJ40)
CAVIRGGTSGTYKYIF

SEQ ID NO: 467672 - protein, 15 aa, Homo sapiens
  CDR3 for beta chain variable domain of TCR clone 233836 (TRBV7-3, TRBJ2-1)
CASSQRGGALIEQFF

SEQ ID NO: 467673 - protein, 13 aa, Homo sapiens
  CDR3 for alpha chain variable domain of TCR clone 233837 (TRAV8-3, TRAJ5)
CAVGPRGRRALTF

SEQ ID NO: 467674 - protein, 11 aa, Homo sapiens
  CDR3 for beta chain variable domain of TCR clone 233837 (TRBV11-2, TRBJ2-2)
CASSLPGELFF

SEQ ID NO: 467675 - protein, 11 aa, Homo sapiens
  CDR3 for alpha chain variable domain of TCR clone 233838 (TRAV13-1, TRAJ39)
CASHAGNMLTF

SEQ ID NO: 467676 - protein, 15 aa, Homo sapiens
  CDR3 for beta chain variable domain of TCR clone 233838 (TRBV4-3, TRBJ2-5)
CASSQGTGHRETQYF

SEQ ID NO: 467677 - protein, 14 aa, Homo sapiens
  CDR3 for alpha chain variable domain of TCR clone 233839 (TRAV12-2, TRAJ5)
CAVNRSTGRRALTF

SEQ ID NO: 467678 - protein, 12 aa, Homo sapiens
  CDR3 for beta chain variable domain of TCR clone 233839 (TRBV6-5, TRBJ2-7)
CASSDRQNEQYF

SEQ ID NO: 467679 - protein, 16 aa, Homo sapiens
  CDR3 for alpha chain variable domain of TCR clone 233840 (TRAV12-2, TRAJ18)
CAVTTDGGSTLGRLYF

SEQ ID NO: 467680 - protein, 12 aa, Homo sapiens
  CDR3 for beta chain variable domain of TCR clone 233840 (TRBV7-9, TRBJ2-7)
CASSIKREEQYF

SEQ ID NO: 467681 - protein, 14 aa, Homo sapiens
  CDR3 for alpha chain variable domain of TCR clone 233841 (TRAV12-1, TRAJ17)
CVVNYKAAGNKLTF

SEQ ID NO: 467682 - protein, 15 aa, Homo sapiens
  CDR3 for beta chain variable domain of TCR clone 233841 (TRBV29-1, TRBJ2-7)
CSVECFDRGSYEQYF

SEQ ID NO: 467683 - protein, 15 aa, Homo sapiens
  CDR3 for alpha chain variable domain of TCR clone 233842 (TRAV23/DV6, TRAJ17)
CARGSCRQQANFLRR

SEQ ID NO: 467684 - protein, 14 aa, Homo sapiens
  CDR3 for beta chain variable domain of TCR clone 233842 (TRBV7-2, TRBJ1-2)
CASSQTGSTYGYTF

SEQ ID NO: 467685 - protein, 11 aa, Homo sapiens
  CDR3 for alpha chain variable domain of TCR clone 233843 (TRAV1-1, TRAJ3)
CAVRSAPKIIF

SEQ ID NO: 467686 - protein, 14 aa, Homo sapiens
  CDR3 for beta chain variable domain of TCR clone 233843 (TRBV2, TRBJ1-6)
CALSPSDPRSPLHF

SEQ ID NO: 467687 - protein, 12 aa, Homo sapiens
  CDR3 for alpha chain variable domain of TCR clone 233844 (TRAV12-2, TRAJ47)
CAVAEYGDKPVF

SEQ ID NO: 467688 - protein, 14 aa, Homo sapiens
  CDR3 for beta chain variable domain of TCR clone 233844 (TRBV20-1, TRBJ1-1)
CSAMGGTANTEAFF

SEQ ID NO: 467689 - protein, 18 aa, Homo sapiens
  CDR3 for alpha chain variable domain of TCR clone 233845 (TRAV26-1, TRAJ52)
CIVRVAGAGGTSYGKRTF

SEQ ID NO: 467690 - protein, 13 aa, Homo sapiens
  CDR3 for beta chain variable domain of TCR clone 233845 (TRBV7-8, TRBJ1-2)
CASSAQSYYGYTL

SEQ ID NO: 467691 - protein, 14 aa, Homo sapiens
  CDR3 for alpha chain variable domain of TCR clone 233846 (TRAV27, TRAJ15)
CAGFDNQAGTAPIF

SEQ ID NO: 467692 - protein, 11 aa, Homo sapiens
  CDR3 for beta chain variable domain of TCR clone 233846 (TRBV29-1, TRBJ1-1)
CSVEVGTRTFF

SEQ ID NO: 467693 - protein, 13 aa, Homo sapiens
  CDR3 for alpha chain variable domain of TCR clone 233847 (TRAV2, TRAJ20)
CAVEGPSEYKLSF

SEQ ID NO: 467694 - protein, 16 aa, Homo sapiens
  CDR3 for beta chain variable domain of TCR clone 233847 (TRBV25-1, TRBJ2-7)
CASSELTGGGIYEQYV

SEQ ID NO: 467695 - protein, 16 aa, Homo sapiens
  CDR3 for alpha chain variable domain of TCR clone 233848 (TRAV30, TRAJ24)
CCTEIVDADSWGKFQF

SEQ ID NO: 467696 - protein, 13 aa, Homo sapiens
  CDR3 for beta chain variable domain of TCR clone 233848 (TRBV9, TRBJ1-1)
CASSPTGSTEAFF

SEQ ID NO: 467697 - protein, 13 aa, Homo sapiens
  CDR3 for alpha chain variable domain of TCR clone 233849 (TRAV20, TRAJ34)
CAGGSYYTDKLIF

SEQ ID NO: 467698 - protein, 14 aa, Homo sapiens
  CDR3 for beta chain variable domain of TCR clone 233849 (TRBV11-2, TRBJ2-1)
CASSLSGPYNEQFF

SEQ ID NO: 467699 - protein, 13 aa, Homo sapiens
  CDR3 for alpha chain variable domain of TCR clone 233850 (TRAV3, TRAJ21)
CAVREPDFNKFYF

SEQ ID NO: 467700 - protein, 15 aa, Homo sapiens
  CDR3 for beta chain variable domain of TCR clone 233850 (TRBV2, TRBJ2-1)
CASGELAGGTMSSSS

SEQ ID NO: 467701 - protein, 14 aa, Homo sapiens
  CDR3 for alpha chain variable domain of TCR clone 233851 (TRAV1-2, TRAJ16)
CAVKRFSDGQKLLF

SEQ ID NO: 467702 - protein, 15 aa, Homo sapiens
  CDR3 for beta chain variable domain of TCR clone 233851 (TRBV3-1, TRBJ2-5)
CASSANLGGPETQYF

SEQ ID NO: 467703 - protein, 15 aa, Homo sapiens
  CDR3 for alpha chain variable domain of TCR clone 233852 (TRAV12-3, TRAJ47)
CAMSALVEYGNKLVF

SEQ ID NO: 467704 - protein, 15 aa, Homo sapiens
  CDR3 for beta chain variable domain of TCR clone 233852 (TRBV7-3, TRBJ2-1)
CASSPTGGGEVEQFF

SEQ ID NO: 467705 - protein, 13 aa, Homo sapiens
  CDR3 for alpha chain variable domain of TCR clone 233853 (TRAV12-3, TRAJ47)
CAMKKEYGNKLVF

SEQ ID NO: 467706 - protein, 13 aa, Homo sapiens
  CDR3 for beta chain variable domain of TCR clone 233853 (TRBV7-3, TRBJ1-1)
CASSQDWGAEAFF

SEQ ID NO: 467707 - protein, 14 aa, Homo sapiens
  CDR3 for alpha chain variable domain of TCR clone 233854 (TRAV8-2, TRAJ4)
CVVSPSGDYNKLIF

SEQ ID NO: 467708 - protein, 20 aa, Homo sapiens
  CDR3 for beta chain variable domain of TCR clone 233854 (TRBV11-2, TRBJ2-7)
CASSPVGRERAGGPSYEQYF

SEQ ID NO: 467709 - protein, 17 aa, Homo sapiens
  CDR3 for alpha chain variable domain of TCR clone 233855 (TRAV3, TRAJ12)
CAVRDGGRMDSSYKLIF

SEQ ID NO: 467710 - protein, 14 aa, Homo sapiens
  CDR3 for beta chain variable domain of TCR clone 233855 (TRBV12-4, TRBJ1-1)
CASSLRSSGTEAFF

SEQ ID NO: 467711 - protein, 14 aa, Homo sapiens
  CDR3 for alpha chain variable domain of TCR clone 233856 (TRAV29/DV5, TRAJ36)
CAARRKTGANNLFF

SEQ ID NO: 467712 - protein, 14 aa, Homo sapiens
  CDR3 for beta chain variable domain of TCR clone 233856 (TRBV7-9, TRBJ2-5)
CASSLVGGEETQYF

SEQ ID NO: 467713 - protein, 13 aa, Homo sapiens
  CDR3 for alpha chain variable domain of TCR clone 233857 (TRAV2, TRAJ37)
CAVPSGNTGKLIF

SEQ ID NO: 467714 - protein, 13 aa, Homo sapiens
  CDR3 for beta chain variable domain of TCR clone 233857 (TRBV20-1, TRBJ2-2)
CSASAAGTGELFF

SEQ ID NO: 467715 - protein, 11 aa, Homo sapiens
  CDR3 for alpha chain variable domain of TCR clone 233858 (TRAV21, TRAJ11)
CAVNGYSTLTF

SEQ ID NO: 467716 - protein, 17 aa, Homo sapiens
  CDR3 for beta chain variable domain of TCR clone 233858 (TRBV18, TRBJ2-3)
CASSAAGTSGTTDTQYF

SEQ ID NO: 467717 - protein, 14 aa, Homo sapiens
  CDR3 for alpha chain variable domain of TCR clone 233859 (TRAV13-1, TRAJ45)
CAAIGGGGADGITF

SEQ ID NO: 467718 - protein, 16 aa, Homo sapiens
  CDR3 for beta chain variable domain of TCR clone 233859 (TRBV7-2, TRBJ1-1)
CASSLGAGWTNTEAFF

SEQ ID NO: 467719 - protein, 15 aa, Homo sapiens
  CDR3 for alpha chain variable domain of TCR clone 233860 (TRAV21, TRAJ24)
CAARSSTDSWGKLQF

SEQ ID NO: 467720 - protein, 13 aa, Homo sapiens
  CDR3 for beta chain variable domain of TCR clone 233860 (TRBV7-9, TRBJ1-2)
CASSLKQNHGYTF

SEQ ID NO: 467721 - protein, 14 aa, Homo sapiens
  CDR3 for alpha chain variable domain of TCR clone 233861 (TRAV1-2, TRAJ28)
CVARSGAGSYQLTF

SEQ ID NO: 467722 - protein, 14 aa, Homo sapiens
  CDR3 for beta chain variable domain of TCR clone 233861 (TRBV19, TRBJ2-1)
CASPTFVLSGEQFF

SEQ ID NO: 467723 - protein, 10 aa, Homo sapiens
  CDR3 for alpha chain variable domain of TCR clone 233862 (TRAV12-1, TRAJ20)
CAIYFQRLQA

SEQ ID NO: 467724 - protein, 17 aa, Homo sapiens
  CDR3 for beta chain variable domain of TCR clone 233862 (TRBV20-1, TRBJ2-2)
CSASGSGQGGLTGELFF

SEQ ID NO: 467725 - protein, 18 aa, Homo sapiens
  CDR3 for alpha chain variable domain of TCR clone 233863 (TRAV29/DV5, TRAJ53)
CSVLLCSKRGGSNYKLTF

SEQ ID NO: 467726 - protein, 13 aa, Homo sapiens
  CDR3 for beta chain variable domain of TCR clone 233863 (TRBV19, TRBJ2-5)
CASSIPYGETQYF

SEQ ID NO: 467727 - protein, 14 aa, Homo sapiens
  CDR3 for alpha chain variable domain of TCR clone 233864 (TRAV12-3, TRAJ6)
CAMSASGGSYIPTF

SEQ ID NO: 467728 - protein, 16 aa, Homo sapiens
  CDR3 for beta chain variable domain of TCR clone 233864 (TRBV28, TRBJ1-1)
CASTTLDEPLNTEAFF

SEQ ID NO: 467729 - protein, 12 aa, Homo sapiens
  CDR3 for alpha chain variable domain of TCR clone 233865 (TRAV26-1, TRAJ36)
CIVRVRSDNLFF

SEQ ID NO: 467730 - protein, 15 aa, Homo sapiens
  CDR3 for beta chain variable domain of TCR clone 233865 (TRBV6-3, TRBJ2-7)
CASSSPGTVFYEQYF

SEQ ID NO: 467731 - protein, 14 aa, Homo sapiens
  CDR3 for alpha chain variable domain of TCR clone 233866 (TRAV12-2, TRAJ40)
CAVKIPSGTYKSIF

SEQ ID NO: 467732 - protein, 17 aa, Homo sapiens
  CDR3 for beta chain variable domain of TCR clone 233866 (TRBV20-1, TRBJ2-1)
CSAFSGTSGSLYNEQFF

SEQ ID NO: 467733 - protein, 15 aa, Homo sapiens
  CDR3 for alpha chain variable domain of TCR clone 233867 (TRAV8-3, TRAJ37)
CAVGARASNTGKLIF

SEQ ID NO: 467734 - protein, 15 aa, Homo sapiens
  CDR3 for beta chain variable domain of TCR clone 233867 (TRBV5-4, TRBJ2-3)
CASSLAGRVTDTQYC

SEQ ID NO: 467735 - protein, 14 aa, Homo sapiens
  CDR3 for alpha chain variable domain of TCR clone 233868 (TRAV12-2, TRAJ17)
FSVLFKAAGNKLTF

SEQ ID NO: 467736 - protein, 17 aa, Homo sapiens
  CDR3 for beta chain variable domain of TCR clone 233868 (TRBV20-1, TRBJ2-2)
GSASGSGQGGLTGELFF

SEQ ID NO: 467737 - protein, 14 aa, Homo sapiens
  CDR3 for alpha chain variable domain of TCR clone 233869 (TRAV14/DV4, TRAJ20)
CAMRESLNYYKLSF

SEQ ID NO: 467738 - protein, 15 aa, Homo sapiens
  CDR3 for beta chain variable domain of TCR clone 233869 (TRBV5-7, TRBJ1-5)
CASSYGKLWDQPQHF

SEQ ID NO: 467739 - protein, 15 aa, Homo sapiens
  CDR3 for alpha chain variable domain of TCR clone 233870 (TRAV25, TRAJ53)
CITSNSGGSNYKLTF

SEQ ID NO: 467740 - protein, 14 aa, Homo sapiens
  CDR3 for beta chain variable domain of TCR clone 233870 (TRBV11-2, TRBJ2-3)
CASSRLARTDTQYF

SEQ ID NO: 467741 - protein, 13 aa, Homo sapiens
  CDR3 for alpha chain variable domain of TCR clone 233871 (TRAV12-3, TRAJ43)
CAMIRPNNNDMRF

SEQ ID NO: 467742 - protein, 12 aa, Homo sapiens
  CDR3 for beta chain variable domain of TCR clone 233871 (TRBV11-2, TRBJ2-5)
CASSLGQETKYF

SEQ ID NO: 467743 - protein, 18 aa, Homo sapiens
  CDR3 for alpha chain variable domain of TCR clone 233872 (TRAV12-3, TRAJ52)
CAMSVGGAGGTSYGKLTF

SEQ ID NO: 467744 - protein, 14 aa, Homo sapiens
  CDR3 for beta chain variable domain of TCR clone 233872 (TRBV10-3, TRBJ1-2)
CAIRAGTGDYGYTF

SEQ ID NO: 467745 - protein, 14 aa, Homo sapiens
  CDR3 for alpha chain variable domain of TCR clone 233873 (TRAV8-6, TRAJ8)
CAVNESTGFQKLVF

SEQ ID NO: 467746 - protein, 15 aa, Homo sapiens
  CDR3 for beta chain variable domain of TCR clone 233873 (TRBV27, TRBJ2-3)
CASSSLAGVIDTQYF

SEQ ID NO: 467747 - protein, 11 aa, Homo sapiens
  CDR3 for alpha chain variable domain of TCR clone 233874 (TRAV3, TRAJ21)
CAVGNFNKFCF

SEQ ID NO: 467748 - protein, 13 aa, Homo sapiens
  CDR3 for beta chain variable domain of TCR clone 233874 (TRBV20-1, TRBJ2-5)
CSARGDYQETKYF

SEQ ID NO: 467749 - protein, 14 aa, Homo sapiens
  CDR3 for alpha chain variable domain of TCR clone 233875 (TRAV35, TRAJ22)
CAGLRPDSASQLTF

SEQ ID NO: 467750 - protein, 15 aa, Homo sapiens
  CDR3 for beta chain variable domain of TCR clone 233875 (TRBV12-4, TRBJ2-5)
CASSPPTGLQETQYF

SEQ ID NO: 467751 - protein, 15 aa, Homo sapiens
  CDR3 for alpha chain variable domain of TCR clone 233876 (TRAV29/DV5, TRAJ29)
CAASERSPGNTPLVL

SEQ ID NO: 467752 - protein, 17 aa, Homo sapiens
  CDR3 for beta chain variable domain of TCR clone 233876 (TRBV4-1, TRBJ1-4)
CASSQEGPRGVEEKLFF

SEQ ID NO: 467753 - protein, 15 aa, Homo sapiens
  CDR3 for alpha chain variable domain of TCR clone 233877 (TRAV2, TRAJ15)
CAVEDRGQAGTALIF

SEQ ID NO: 467754 - protein, 13 aa, Homo sapiens
  CDR3 for beta chain variable domain of TCR clone 233877 (TRBV10-2, TRBJ2-7)
CASGASAGYEQYF

SEQ ID NO: 467755 - protein, 10 aa, Homo sapiens
  CDR3 for alpha chain variable domain of TCR clone 233878 (TRAV8-2, TRAJ29)
CTGGNTPLVF

SEQ ID NO: 467756 - protein, 17 aa, Homo sapiens
  CDR3 for beta chain variable domain of TCR clone 233878 (TRBV2, TRBJ2-7)
CASSQAPTGWDSYEQYF

SEQ ID NO: 467757 - protein, 13 aa, Homo sapiens
  CDR3 for alpha chain variable domain of TCR clone 233879 (TRAV12-1, TRAJ3)
CVVNPRGASKIIF

SEQ ID NO: 467758 - protein, 14 aa, Homo sapiens
  CDR3 for beta chain variable domain of TCR clone 233879 (TRBV6-1, TRBJ1-3)
CASVQGGGGNTIYF

SEQ ID NO: 467759 - protein, 15 aa, Homo sapiens
  CDR3 for alpha chain variable domain of TCR clone 233880 (TRAV26-2, TRAJ50)
CILRDEETSYDKVIF

SEQ ID NO: 467760 - protein, 17 aa, Homo sapiens
  CDR3 for beta chain variable domain of TCR clone 233880 (TRBV28, TRBJ2-5)
CASSTPEGDALQETQYF

SEQ ID NO: 467761 - protein, 16 aa, Homo sapiens
  CDR3 for alpha chain variable domain of TCR clone 233881 (TRAV8-3, TRAJ8)
CAVPRDGNTGSQKLVF

SEQ ID NO: 467762 - protein, 14 aa, Homo sapiens
  CDR3 for beta chain variable domain of TCR clone 233881 (TRBV4-1, TRBJ2-2)
CASSQAVNTGELFF

SEQ ID NO: 467763 - protein, 14 aa, Homo sapiens
  CDR3 for alpha chain variable domain of TCR clone 233882 (TRAV3, TRAJ7)
CAVREEEREQQTRF

SEQ ID NO: 467764 - protein, 12 aa, Homo sapiens
  CDR3 for beta chain variable domain of TCR clone 233882 (TRBV7-8, TRBJ2-7)
CASGLGDREQYF

SEQ ID NO: 467765 - protein, 14 aa, Homo sapiens
  CDR3 for alpha chain variable domain of TCR clone 233883 (TRAV2, TRAJ9)
CAVEDRSGGFKTIF

SEQ ID NO: 467766 - protein, 11 aa, Homo sapiens
  CDR3 for beta chain variable domain of TCR clone 233883 (TRBV19, TRBJ2-2)
CASRYSGELFF

SEQ ID NO: 467767 - protein, 15 aa, Homo sapiens
  CDR3 for alpha chain variable domain of TCR clone 233884 (TRAV26-2, TRAJ45)
CILRDRVDQKEVLTD

SEQ ID NO: 467768 - protein, 15 aa, Homo sapiens
  CDR3 for beta chain variable domain of TCR clone 233884 (TRBV7-6, TRBJ2-5)
CASSKPTGPQETQYF

SEQ ID NO: 467769 - protein, 18 aa, Homo sapiens
  CDR3 for alpha chain variable domain of TCR clone 233885 (TRAV29/DV5, TRAJ52)
CAAGFRGAGGTSYGKLTF

SEQ ID NO: 467770 - protein, 16 aa, Homo sapiens
  CDR3 for beta chain variable domain of TCR clone 233885 (TRBV7-3, TRBJ2-2)
CASSLKRGTLSGEQFF

SEQ ID NO: 467771 - protein, 11 aa, Homo sapiens
  CDR3 for alpha chain variable domain of TCR clone 233886 (TRAV12-2, TRAJ33)
CAVGSNYQLIW

SEQ ID NO: 467772 - protein, 16 aa, Homo sapiens
  CDR3 for beta chain variable domain of TCR clone 233886 (TRBV27, TRBJ2-5)
CASSSQTSGFQETQYF

SEQ ID NO: 467773 - protein, 11 aa, Homo sapiens
  CDR3 for alpha chain variable domain of TCR clone 233887 (TRAV5, TRAJ3)
CGWSSASKIIF

SEQ ID NO: 467774 - protein, 13 aa, Homo sapiens
  CDR3 for beta chain variable domain of TCR clone 233887 (TRBV27, TRBJ2-1)
CASRTLGVGEQFF

SEQ ID NO: 467775 - protein, 15 aa, Homo sapiens
  CDR3 for alpha chain variable domain of TCR clone 233888 (TRAV13-1, TRAJ11)
CAASNRNSGYSTLTF

SEQ ID NO: 467776 - protein, 13 aa, Homo sapiens
  CDR3 for beta chain variable domain of TCR clone 233888 (TRBV13, TRBJ2-5)
CASSPEVGETQYF

SEQ ID NO: 467777 - protein, 13 aa, Homo sapiens
  CDR3 for alpha chain variable domain of TCR clone 233889 (TRAV17, TRAJ9)
CATGSTGGFKTIF

SEQ ID NO: 467778 - protein, 14 aa, Homo sapiens
  CDR3 for beta chain variable domain of TCR clone 233889 (TRBV12-5, TRBJ2-5)
CASGSRTHQETQYF

SEQ ID NO: 467779 - protein, 10 aa, Homo sapiens
  CDR3 for alpha chain variable domain of TCR clone 233890 (TRAV8-6, TRAJ34)
CAGRADKLIF

SEQ ID NO: 467780 - protein, 14 aa, Homo sapiens
  CDR3 for beta chain variable domain of TCR clone 233890 (TRBV12-5, TRBJ2-5)
CASGSRTHQETQYF

SEQ ID NO: 467781 - protein, 12 aa, Homo sapiens
  CDR3 for alpha chain variable domain of TCR clone 233891 (TRAV8-6, TRAJ4)
CAVSDHPNKLIF

SEQ ID NO: 467782 - protein, 17 aa, Homo sapiens
  CDR3 for beta chain variable domain of TCR clone 233891 (TRBV7-3, TRBJ2-2)
CASSLSGTSGGTGELFF

SEQ ID NO: 467783 - protein, 14 aa, Homo sapiens
  CDR3 for alpha chain variable domain of TCR clone 233892 (TRAV1-2, TRAJ28)
CVARSGAGSYQLTF

SEQ ID NO: 467784 - protein, 13 aa, Homo sapiens
  CDR3 for beta chain variable domain of TCR clone 233892 (TRBV12-4, TRBJ1-1)
CASSPGTGFEAFF

SEQ ID NO: 467785 - protein, 10 aa, Homo sapiens
  CDR3 for alpha chain variable domain of TCR clone 233893 (TRAV38-2/DV8, TRAJ40)
CASGTYKYIF

SEQ ID NO: 467786 - protein, 14 aa, Homo sapiens
  CDR3 for beta chain variable domain of TCR clone 233893 (TRBV7-9, TRBJ2-1)
CASSPRDSLYEPFF

SEQ ID NO: 467787 - protein, 13 aa, Homo sapiens
  CDR3 for alpha chain variable domain of TCR clone 233894 (TRAV2, TRAJ15)
CAVASQAGTALIF

SEQ ID NO: 467788 - protein, 11 aa, Homo sapiens
  CDR3 for beta chain variable domain of TCR clone 233894 (TRBV7-9, TRBJ2-3)
CASSPTDTQYF

SEQ ID NO: 467789 - protein, 11 aa, Homo sapiens
  CDR3 for alpha chain variable domain of TCR clone 233895 (TRAV3, TRAJ21)
CSMGNFNKFYF

SEQ ID NO: 467790 - protein, 16 aa, Homo sapiens
  CDR3 for beta chain variable domain of TCR clone 233895 (TRBV19, TRBJ2-1)
CASSKAGPSSYNEQFF

SEQ ID NO: 467791 - protein, 13 aa, Homo sapiens
  CDR3 for alpha chain variable domain of TCR clone 233896 (TRAV27, TRAJ18)
CAVRGSTLGRLYF

SEQ ID NO: 467792 - protein, 16 aa, Homo sapiens
  CDR3 for beta chain variable domain of TCR clone 233896 (TRBV7-3, TRBJ2-2)
CASSLKRGTLSVELFF

SEQ ID NO: 467793 - protein, 15 aa, Homo sapiens
  CDR3 for alpha chain variable domain of TCR clone 233897 (TRAV13-1, TRAJ9)
CAASTLNTGGFKTIF

SEQ ID NO: 467794 - protein, 15 aa, Homo sapiens
  CDR3 for beta chain variable domain of TCR clone 233897 (TRBV6-5, TRBJ2-4)
FASSLRESPKNMQYF

SEQ ID NO: 467795 - protein, 18 aa, Homo sapiens
  CDR3 for alpha chain variable domain of TCR clone 233898 (TRAV26-2, TRAJ33)
CCVLLHPEEPASNYQLIW

SEQ ID NO: 467796 - protein, 14 aa, Homo sapiens
  CDR3 for beta chain variable domain of TCR clone 233898 (TRBV19, TRBJ2-7)
CASNFRDTFTGMYF

SEQ ID NO: 467797 - protein, 13 aa, Homo sapiens
  CDR3 for alpha chain variable domain of TCR clone 233899 (TRAV13-1, TRAJ11)
CAASIRGYSTITF

SEQ ID NO: 467798 - protein, 13 aa, Homo sapiens
  CDR3 for beta chain variable domain of TCR clone 233899 (TRBV7-2, TRBJ1-6)
CASSLGSNSPLHF

SEQ ID NO: 467799 - protein, 11 aa, Homo sapiens
  CDR3 for alpha chain variable domain of TCR clone 233900 (TRAV12-3, TRAJ27)
CAMANASKSTF

SEQ ID NO: 467800 - protein, 17 aa, Homo sapiens
  CDR3 for beta chain variable domain of TCR clone 233900 (TRBV13, TRBJ2-3)
CASSLSRVAGGRNTQYF

SEQ ID NO: 467801 - protein, 15 aa, Homo sapiens
  CDR3 for alpha chain variable domain of TCR clone 233901 (TRAV3, TRAJ22)
CAVRDRGGSARELTF

SEQ ID NO: 467802 - protein, 15 aa, Homo sapiens
  CDR3 for beta chain variable domain of TCR clone 233901 (TRBV7-3, TRBJ2-1)
CASSPTGGGGVEQFF

SEQ ID NO: 467803 - protein, 13 aa, Homo sapiens
  CDR3 for alpha chain variable domain of TCR clone 233902 (TRAV13-1, TRAJ5)
CAAEHTGRRALTF

SEQ ID NO: 467804 - protein, 20 aa, Homo sapiens
  CDR3 for beta chain variable domain of TCR clone 233902 (TRBV7-8, TRBJ2-2)
CASSHLFPGPTIHITGELFF

SEQ ID NO: 467805 - protein, 10 aa, Homo sapiens
  CDR3 for alpha chain variable domain of TCR clone 233903 (TRAV13-1, TRAJ27)
CAPLARQINL

SEQ ID NO: 467806 - protein, 14 aa, Homo sapiens
  CDR3 for beta chain variable domain of TCR clone 233903 (TRBV7-9, TRBJ2-2)
CASSFDRGTGELFF

SEQ ID NO: 467807 - protein, 14 aa, Homo sapiens
  CDR3 for alpha chain variable domain of TCR clone 233904 (TRAV3, TRAJ7)
CAVREEEREQQTRF

SEQ ID NO: 467808 - protein, 12 aa, Homo sapiens
  CDR3 for beta chain variable domain of TCR clone 233904 (TRBV7-8, TRBJ2-7)
CGSSLGDREQYF

SEQ ID NO: 467809 - protein, 14 aa, Homo sapiens
  CDR3 for alpha chain variable domain of TCR clone 233905 (TRAV27, TRAJ36)
CAGPPKRGANNLFF

SEQ ID NO: 467810 - protein, 15 aa, Homo sapiens
  CDR3 for beta chain variable domain of TCR clone 233905 (TRBV11-3, TRBJ2-7)
CASSPGPASSYEQYF

SEQ ID NO: 467811 - protein, 12 aa, Homo sapiens
  CDR3 for alpha chain variable domain of TCR clone 233906 (TRAV8-4, TRAJ43)
CAVSVNNNDMRF

SEQ ID NO: 467812 - protein, 13 aa, Homo sapiens
  CDR3 for beta chain variable domain of TCR clone 233906 (TRBV7-9, TRBJ1-2)
CASSLNQNYGYTF

SEQ ID NO: 467813 - protein, 16 aa, Homo sapiens
  CDR3 for alpha chain variable domain of TCR clone 233907 (TRAV13-2, TRAJ23)
CRESLMIYNQGGKLIF

SEQ ID NO: 467814 - protein, 17 aa, Homo sapiens
  CDR3 for beta chain variable domain of TCR clone 233907 (TRBV25-1, TRBJ2-7)
CASSDARVVFSSYEQYF

SEQ ID NO: 467815 - protein, 10 aa, Homo sapiens
  CDR3 for alpha chain variable domain of TCR clone 233908 (TRAV36/DV7, TRAJ48)
CAVGNEKLTF

SEQ ID NO: 467816 - protein, 15 aa, Homo sapiens
  CDR3 for beta chain variable domain of TCR clone 233908 (TRBV11-2, TRBJ2-5)
CASSLGAGGVETQYF

SEQ ID NO: 467817 - protein, 13 aa, Homo sapiens
  CDR3 for alpha chain variable domain of TCR clone 233909 (TRAV12-1, TRAJ10)
CVVSTGGGNKLTF

SEQ ID NO: 467818 - protein, 13 aa, Homo sapiens
  CDR3 for beta chain variable domain of TCR clone 233909 (TRBV12-4, TRBJ1-5)
CASSINFNQPQHF

SEQ ID NO: 467819 - protein, 14 aa, Homo sapiens
  CDR3 for alpha chain variable domain of TCR clone 233910 (TRAV1-2, TRAJ16)
CAFNRFSDGQKLLF

SEQ ID NO: 467820 - protein, 20 aa, Homo sapiens
  CDR3 for beta chain variable domain of TCR clone 233910 (TRBV7-8, TRBJ2-2)
CASSHLFPGPTIHITGELFF

SEQ ID NO: 467821 - protein, 11 aa, Homo sapiens
  CDR3 for alpha chain variable domain of TCR clone 233911 (TRAV12-3, TRAJ41)
CAMNAREALNF

SEQ ID NO: 467822 - protein, 16 aa, Homo sapiens
  CDR3 for beta chain variable domain of TCR clone 233911 (TRBV7-8, TRBJ2-3)
CASSNEGQRETDTQYF

SEQ ID NO: 467823 - protein, 15 aa, Homo sapiens
  CDR3 for alpha chain variable domain of TCR clone 233912 (TRAV26-1, TRAJ42)
CIVRVAEGSKGNLIF

SEQ ID NO: 467824 - protein, 13 aa, Homo sapiens
  CDR3 for beta chain variable domain of TCR clone 233912 (TRBV24-1, TRBJ2-2)
CATSDWSTGELFF

SEQ ID NO: 467825 - protein, 13 aa, Homo sapiens
  CDR3 for alpha chain variable domain of TCR clone 233913 (TRAV20, TRAJ56)
CAVQAGANSKLTF

SEQ ID NO: 467826 - protein, 16 aa, Homo sapiens
  CDR3 for beta chain variable domain of TCR clone 233913 (TRBV7-2, TRBJ2-2)
CASSPRAGEHTGELFF

SEQ ID NO: 467827 - protein, 23 aa, Homo sapiens
  CDR3 for alpha chain variable domain of TCR clone 233914 (TRAV26-1, TRAJ38)
CIAANAGNNHIQNPDPAVNQLRD

SEQ ID NO: 467828 - protein, 17 aa, Homo sapiens
  CDR3 for beta chain variable domain of TCR clone 233914 (TRBV11-2, TRBJ2-6)
CASSQRDIFSGANVLTF

SEQ ID NO: 467829 - protein, 14 aa, Homo sapiens
  CDR3 for alpha chain variable domain of TCR clone 233915 (TRAV12-3, TRAJ56)
CAMSVTGANSKLTF

SEQ ID NO: 467830 - protein, 17 aa, Homo sapiens
  CDR3 for beta chain variable domain of TCR clone 233915 (TRBV20-1, TRBJ2-3)
CSACLLGRGGSADTQYF

SEQ ID NO: 467831 - protein, 14 aa, Homo sapiens
  CDR3 for alpha chain variable domain of TCR clone 233916 (TRAV1-2, TRAJ29)
CAVRELTSTTPLVF

SEQ ID NO: 467832 - protein, 14 aa, Homo sapiens
  CDR3 for beta chain variable domain of TCR clone 233916 (TRBV6-1, TRBJ1-3)
CASVQGGGGNTIYF

SEQ ID NO: 467833 - protein, 15 aa, Homo sapiens
  CDR3 for alpha chain variable domain of TCR clone 233917 (TRAV13-1, TRAJ17)
CAASIHGGCRQQANF

SEQ ID NO: 467834 - protein, 14 aa, Homo sapiens
  CDR3 for beta chain variable domain of TCR clone 233917 (TRBV25-1, TRBJ1-1)
CASTHLGGNTEAFF

SEQ ID NO: 467835 - protein, 14 aa, Homo sapiens
  CDR3 for alpha chain variable domain of TCR clone 233918 (TRAV12-3, TRAJ10)
SHLPLTGGGNKLTF

SEQ ID NO: 467836 - protein, 15 aa, Homo sapiens
  CDR3 for beta chain variable domain of TCR clone 233918 (TRBV5-5, TRBJ1-5)
CASSSTPGSNQPQHF

SEQ ID NO: 467837 - protein, 11 aa, Homo sapiens
  CDR3 for alpha chain variable domain of TCR clone 233919 (TRAV29/DV5, TRAJ31)
CAASYRYRLMF

SEQ ID NO: 467838 - protein, 19 aa, Homo sapiens
  CDR3 for beta chain variable domain of TCR clone 233919 (TRBV19, TRBJ2-5)
CASSIGQVTDFFLGETQYF

SEQ ID NO: 467839 - protein, 16 aa, Homo sapiens
  CDR3 for alpha chain variable domain of TCR clone 233920 (TRAV3, TRAJ5)
CAVRNLMDTGRRALTF

SEQ ID NO: 467840 - protein, 14 aa, Homo sapiens
  CDR3 for beta chain variable domain of TCR clone 233920 (TRBV5-1, TRBJ2-7)
CASSRGESLYEQYF

SEQ ID NO: 467841 - protein, 12 aa, Homo sapiens
  CDR3 for alpha chain variable domain of TCR clone 233921 (TRAV1-2, TRAJ7)
CAMAYGNNRLAF

SEQ ID NO: 467842 - protein, 16 aa, Homo sapiens
  CDR3 for beta chain variable domain of TCR clone 233921 (TRBV5-1, TRBJ2-7)
CASSPMTGALSYEQYF

SEQ ID NO: 467843 - protein, 13 aa, Homo sapiens
  CDR3 for alpha chain variable domain of TCR clone 233922 (TRAV21, TRAJ9)
CAVRRSGGFKTIF

SEQ ID NO: 467844 - protein, 14 aa, Homo sapiens
  CDR3 for beta chain variable domain of TCR clone 233922 (TRBV28, TRBJ2-3)
CASSWRGRADTQYF

SEQ ID NO: 467845 - protein, 16 aa, Homo sapiens
  CDR3 for alpha chain variable domain of TCR clone 233923 (TRAV8-3, TRAJ10)
CAVGPILTGGGNKLTF

SEQ ID NO: 467846 - protein, 16 aa, Homo sapiens
  CDR3 for beta chain variable domain of TCR clone 233923 (TRBV12-4, TRBJ2-5)
CASSFFVRGRQETQYF

SEQ ID NO: 467847 - protein, 15 aa, Homo sapiens
  CDR3 for alpha chain variable domain of TCR clone 233924 (TRAV4, TRAJ10)
CLVVREGGGGNKLTF

SEQ ID NO: 467848 - protein, 13 aa, Homo sapiens
  CDR3 for beta chain variable domain of TCR clone 233924 (TRBV7-3, TRBJ1-1)
CASSQDWGAEAFF

SEQ ID NO: 467849 - protein, 15 aa, Homo sapiens
  CDR3 for alpha chain variable domain of TCR clone 233925 (TRAV12-1, TRAJ8)
CVANVENTGFQKLVF

SEQ ID NO: 467850 - protein, 16 aa, Homo sapiens
  CDR3 for beta chain variable domain of TCR clone 233925 (TRBV7-2, TRBJ2-7)
CASSLEAGGPWYEQYF

SEQ ID NO: 467851 - protein, 12 aa, Homo sapiens
  CDR3 for alpha chain variable domain of TCR clone 233926 (TRAV8-3, TRAJ26)
CAGDNYGQNFVS

SEQ ID NO: 467852 - protein, 12 aa, Homo sapiens
  CDR3 for beta chain variable domain of TCR clone 233926 (TRBV11-2, TRBJ2-2)
CASSLGGGELFF

SEQ ID NO: 467853 - protein, 14 aa, Homo sapiens
  CDR3 for alpha chain variable domain of TCR clone 233927 (TRAV17, TRAJ17)
CATDHRAAGNKLPF

SEQ ID NO: 467854 - protein, 14 aa, Homo sapiens
  CDR3 for beta chain variable domain of TCR clone 233927 (TRBV19, TRBJ1-5)
CASSIGGGGQPQHF

SEQ ID NO: 467855 - protein, 13 aa, Homo sapiens
  CDR3 for alpha chain variable domain of TCR clone 233928 (TRAV30, TRAJ48)
CGTFLKRNEKLTF

SEQ ID NO: 467856 - protein, 15 aa, Homo sapiens
  CDR3 for beta chain variable domain of TCR clone 233928 (TRBV11-3, TRBJ2-3)
CASLKDGREGDTQYF

SEQ ID NO: 467857 - protein, 17 aa, Homo sapiens
  CDR3 for alpha chain variable domain of TCR clone 233929 (TRAV13-1, )
CAANIQNPDPAVYQLRD

SEQ ID NO: 467858 - protein, 14 aa, Homo sapiens
  CDR3 for beta chain variable domain of TCR clone 233929 (TRBV7-2, TRBJ2-7)
CASSLPPGQGPQYF

SEQ ID NO: 467859 - protein, 14 aa, Homo sapiens
  CDR3 for alpha chain variable domain of TCR clone 233930 (TRAV26-1, TRAJ34)
CIVRESYNTDKLIF

SEQ ID NO: 467860 - protein, 13 aa, Homo sapiens
  CDR3 for beta chain variable domain of TCR clone 233930 (TRBV2, TRBJ1-5)
CATAGPGNQPQHF

SEQ ID NO: 467861 - protein, 14 aa, Homo sapiens
  CDR3 for alpha chain variable domain of TCR clone 233931 (TRAV8-3, TRAJ4)
CAVGASGGYNKLIF

SEQ ID NO: 467862 - protein, 16 aa, Homo sapiens
  CDR3 for beta chain variable domain of TCR clone 233931 (TRBV4-3, TRBJ2-2)
CASSHLHGSGTGELFF

SEQ ID NO: 467863 - protein, 15 aa, Homo sapiens
  CDR3 for alpha chain variable domain of TCR clone 233932 (TRAV3, TRAJ22)
CAVRDRGGSARQLTF

SEQ ID NO: 467864 - protein, 20 aa, Homo sapiens
  CDR3 for beta chain variable domain of TCR clone 233932 (TRBV11-3, TRBJ1-6)
CASSLVFATGGSVHPSTLGT

SEQ ID NO: 467865 - protein, 14 aa, Homo sapiens
  CDR3 for alpha chain variable domain of TCR clone 233933 (TRAV14/DV4, TRAJ58)
CAMMKETSGSRLTF

SEQ ID NO: 467866 - protein, 12 aa, Homo sapiens
  CDR3 for beta chain variable domain of TCR clone 233933 (TRBV12-4, TRBJ2-1)
CASRYVLNEQFF

SEQ ID NO: 467867 - protein, 13 aa, Homo sapiens
  CDR3 for alpha chain variable domain of TCR clone 233934 (TRAV8-1, TRAJ36)
CAVNSPTGAHNLF

SEQ ID NO: 467868 - protein, 15 aa, Homo sapiens
  CDR3 for beta chain variable domain of TCR clone 233934 (TRBV7-2, TRBJ2-3)
CASSLEQGGTDTQYF

SEQ ID NO: 467869 - protein, 14 aa, Homo sapiens
  CDR3 for alpha chain variable domain of TCR clone 233935 (TRAV1-2, TRAJ8)
CAVREDTGSQKLVF

SEQ ID NO: 467870 - protein, 14 aa, Homo sapiens
  CDR3 for beta chain variable domain of TCR clone 233935 (TRBV7-2, TRBJ1-2)
CATSQTGSTYGYTF

SEQ ID NO: 467871 - protein, 16 aa, Homo sapiens
  CDR3 for alpha chain variable domain of TCR clone 233936 (TRAV4, TRAJ37)
CLVGWFGSSHTGKLIF

SEQ ID NO: 467872 - protein, 15 aa, Homo sapiens
  CDR3 for beta chain variable domain of TCR clone 233936 (TRBV12-4, TRBJ2-3)
CASSLAERPTDTQYF

SEQ ID NO: 467873 - protein, 12 aa, Homo sapiens
  CDR3 for alpha chain variable domain of TCR clone 233937 (TRAV2, TRAJ31)
CAVEDNNARLMF

SEQ ID NO: 467874 - protein, 19 aa, Homo sapiens
  CDR3 for beta chain variable domain of TCR clone 233937 (TRBV19, TRBJ2-5)
CASSIGQVTDFFLGETQYF

SEQ ID NO: 467875 - protein, 14 aa, Homo sapiens
  CDR3 for alpha chain variable domain of TCR clone 233938 (TRAV8-4, TRAJ9)
CAVVGNTGGFKTIF

SEQ ID NO: 467876 - protein, 16 aa, Homo sapiens
  CDR3 for beta chain variable domain of TCR clone 233938 (TRBV7-8, TRBJ2-1)
CASSLQGTGRYNEQFF

SEQ ID NO: 467877 - protein, 15 aa, Homo sapiens
  CDR3 for alpha chain variable domain of TCR clone 233939 (TRAV38-1, TRAJ37)
CAFIFGPGNTGKLIF

SEQ ID NO: 467878 - protein, 13 aa, Homo sapiens
  CDR3 for beta chain variable domain of TCR clone 233939 (TRBV5-5, TRBJ1-2)
CASSLWRGEDYTF

SEQ ID NO: 467879 - protein, 15 aa, Homo sapiens
  CDR3 for alpha chain variable domain of TCR clone 233940 (TRAV27, TRAJ38)
CAGRFNAGNNRKLIW

SEQ ID NO: 467880 - protein, 13 aa, Homo sapiens
  CDR3 for beta chain variable domain of TCR clone 233940 (TRBV20-1, TRBJ2-1)
TSGALPPGNVQFF

SEQ ID NO: 467881 - protein, 14 aa, Homo sapiens
  CDR3 for alpha chain variable domain of TCR clone 233941 (TRAV17, TRAJ12)
CATDGVDSSYKLIF

SEQ ID NO: 467882 - protein, 13 aa, Homo sapiens
  CDR3 for beta chain variable domain of TCR clone 233941 (TRBV28, TRBJ2-1)
CASRSGGLNEQFF

SEQ ID NO: 467883 - protein, 14 aa, Homo sapiens
  CDR3 for alpha chain variable domain of TCR clone 233942 (TRAV12-2, TRAJ40)
CAVKVPSGTYKYIF

SEQ ID NO: 467884 - protein, 17 aa, Homo sapiens
  CDR3 for beta chain variable domain of TCR clone 233942 (TRBV7-8, TRBJ2-6)
CASSAGTGGAGANVLTF

SEQ ID NO: 467885 - protein, 15 aa, Homo sapiens
  CDR3 for alpha chain variable domain of TCR clone 233943 (TRAV17, TRAJ23)
CAPDAEDNQGGKLNF

SEQ ID NO: 467886 - protein, 12 aa, Homo sapiens
  CDR3 for beta chain variable domain of TCR clone 233943 (TRBV2, TRBJ2-1)
CAKREGYNEQFF

SEQ ID NO: 467887 - protein, 14 aa, Homo sapiens
  CDR3 for alpha chain variable domain of TCR clone 233944 (TRAV26-1, TRAJ38)
CIAENAGNNRKLIW

SEQ ID NO: 467888 - protein, 13 aa, Homo sapiens
  CDR3 for beta chain variable domain of TCR clone 233944 (TRBV7-9, TRBJ2-3)
CASSPGSTDTQYF

SEQ ID NO: 467889 - protein, 15 aa, Homo sapiens
  CDR3 for alpha chain variable domain of TCR clone 233945 (TRAV3, TRAJ17)
CAVRDTGAAGTKLTF

SEQ ID NO: 467890 - protein, 14 aa, Homo sapiens
  CDR3 for beta chain variable domain of TCR clone 233945 (TRBV6-3, TRBJ1-1)
CASSNPLPGAEAFF

SEQ ID NO: 467891 - protein, 18 aa, Homo sapiens
  CDR3 for alpha chain variable domain of TCR clone 233946 (TRAV21, TRAJ52)
CAVRPSPAGGTSYGTLTF

SEQ ID NO: 467892 - protein, 12 aa, Homo sapiens
  CDR3 for beta chain variable domain of TCR clone 233946 (TRBV11-2, TRBJ2-2)
CASSLGGGELFF

SEQ ID NO: 467893 - protein, 14 aa, Homo sapiens
  CDR3 for alpha chain variable domain of TCR clone 233947 (TRAV8-6, TRAJ5)
CAVSVDTGRSALTF

SEQ ID NO: 467894 - protein, 11 aa, Homo sapiens
  CDR3 for beta chain variable domain of TCR clone 233947 (TRBV7-3, TRBJ2-5)
CASSLSETQYF

SEQ ID NO: 467895 - protein, 14 aa, Homo sapiens
  CDR3 for alpha chain variable domain of TCR clone 233948 (TRAV17, TRAJ6)
CATDASGGSYIPTF

SEQ ID NO: 467896 - protein, 13 aa, Homo sapiens
  CDR3 for beta chain variable domain of TCR clone 233948 (TRBV20-1, TRBJ2-5)
CSAREAFQETQFF

SEQ ID NO: 467897 - protein, 15 aa, Homo sapiens
  CDR3 for alpha chain variable domain of TCR clone 233949 (TRAV13-1, TRAJ42)
CAASIAGGSQGNLIF

SEQ ID NO: 467898 - protein, 15 aa, Homo sapiens
  CDR3 for beta chain variable domain of TCR clone 233949 (TRBV19, TRBJ2-1)
CASSRVRGEGREQFF

SEQ ID NO: 467899 - protein, 13 aa, Homo sapiens
  CDR3 for alpha chain variable domain of TCR clone 233950 (TRAV12-2, TRAJ9)
CAVKWAGGFKTIL

SEQ ID NO: 467900 - protein, 15 aa, Homo sapiens
  CDR3 for beta chain variable domain of TCR clone 233950 (TRBV5-1, TRBJ1-4)
CASSLTADSDEKLFF

SEQ ID NO: 467901 - protein, 14 aa, Homo sapiens
  CDR3 for alpha chain variable domain of TCR clone 233951 (TRAV25, TRAJ20)
CAGKGRWDDYKLSF

SEQ ID NO: 467902 - protein, 15 aa, Homo sapiens
  CDR3 for beta chain variable domain of TCR clone 233951 (TRBV6-3, TRBJ2-7)
CASSSPGTVFYEQYF

SEQ ID NO: 467903 - protein, 16 aa, Homo sapiens
  CDR3 for alpha chain variable domain of TCR clone 233952 (TRAV30, TRAJ24)
CGTEIVDADSWGKFQF

SEQ ID NO: 467904 - protein, 14 aa, Homo sapiens
  CDR3 for beta chain variable domain of TCR clone 233952 (TRBV28, TRBJ1-5)
CASSLGVLVKPQHF

SEQ ID NO: 467905 - protein, 12 aa, Homo sapiens
  CDR3 for alpha chain variable domain of TCR clone 233953 (TRAV3, TRAJ26)
CAVRDYGKNFVF

SEQ ID NO: 467906 - protein, 13 aa, Homo sapiens
  CDR3 for beta chain variable domain of TCR clone 233953 (TRBV7-7, TRBJ2-5)
CASSRSGQETQYF

SEQ ID NO: 467907 - protein, 15 aa, Homo sapiens
  CDR3 for alpha chain variable domain of TCR clone 233954 (TRAV35, TRAJ58)
CAGRRQETSGSRLTC

SEQ ID NO: 467908 - protein, 16 aa, Homo sapiens
  CDR3 for beta chain variable domain of TCR clone 233954 (TRBV2, TRBJ2-1)
CASSVGGSLSYNEQFF

SEQ ID NO: 467909 - protein, 16 aa, Homo sapiens
  CDR3 for alpha chain variable domain of TCR clone 233955 (TRAV12-3, TRAJ53)
CAMSPGSGGTNYKLKF

SEQ ID NO: 467910 - protein, 11 aa, Homo sapiens
  CDR3 for beta chain variable domain of TCR clone 233955 (TRBV29-1, TRBJ2-5)
CSEDRTGTQYF

SEQ ID NO: 467911 - protein, 15 aa, Homo sapiens
  CDR3 for alpha chain variable domain of TCR clone 233956 (TRAV27, TRAJ38)
CAARRNSGNNRKLIW

SEQ ID NO: 467912 - protein, 16 aa, Homo sapiens
  CDR3 for beta chain variable domain of TCR clone 233956 (TRBV5-1, TRBJ2-2)
CASSLWDTTNTGELFF

SEQ ID NO: 467913 - protein, 14 aa, Homo sapiens
  CDR3 for alpha chain variable domain of TCR clone 233957 (TRAV19, TRAJ5)
CALKKDTGRRSLTF

SEQ ID NO: 467914 - protein, 15 aa, Homo sapiens
  CDR3 for beta chain variable domain of TCR clone 233957 (TRBV2, TRBJ2-5)
CASSEAGTRQETQYF

SEQ ID NO: 467915 - protein, 11 aa, Homo sapiens
  CDR3 for alpha chain variable domain of TCR clone 233958 (TRAV12-2, TRAJ49)
CAVNTGNQFYF

SEQ ID NO: 467916 - protein, 12 aa, Homo sapiens
  CDR3 for beta chain variable domain of TCR clone 233958 (TRBV2, TRBJ2-3)
CASSGRFNTQYF

SEQ ID NO: 467917 - protein, 15 aa, Homo sapiens
  CDR3 for alpha chain variable domain of TCR clone 233959 (TRAV12-1, TRAJ9)
FVVSFGDTGGFKTIF

SEQ ID NO: 467918 - protein, 13 aa, Homo sapiens
  CDR3 for beta chain variable domain of TCR clone 233959 (TRBV2, TRBJ1-4)
CASSERAGEKLLF

SEQ ID NO: 467919 - protein, 16 aa, Homo sapiens
  CDR3 for alpha chain variable domain of TCR clone 233960 (TRAV30, TRAJ24)
CGTEILDADSWGKFQF

SEQ ID NO: 467920 - protein, 12 aa, Homo sapiens
  CDR3 for beta chain variable domain of TCR clone 233960 (TRBV11-2, TRBJ2-2)
CASSLPTGELFF

SEQ ID NO: 467921 - protein, 12 aa, Homo sapiens
  CDR3 for alpha chain variable domain of TCR clone 233961 (TRAV12-2, TRAJ36)
CAVRIGANNLFF

SEQ ID NO: 467922 - protein, 16 aa, Homo sapiens
  CDR3 for beta chain variable domain of TCR clone 233961 (TRBV6-4, TRBJ1-2)
CASSEAVGDPNYGYTF

SEQ ID NO: 467923 - protein, 16 aa, Homo sapiens
  CDR3 for alpha chain variable domain of TCR clone 233962 (TRAV30, TRAJ24)
CGTEIVDSDSWGKFQF

SEQ ID NO: 467924 - protein, 15 aa, Homo sapiens
  CDR3 for beta chain variable domain of TCR clone 233962 (TRBV7-9, TRBJ1-4)
CASSARTGGNEKLFF

SEQ ID NO: 467925 - protein, 18 aa, Homo sapiens
  CDR3 for alpha chain variable domain of TCR clone 233963 (TRAV21, TRAJ52)
CAVRPSPAGGTSYGKLTF

SEQ ID NO: 467926 - protein, 17 aa, Homo sapiens
  CDR3 for beta chain variable domain of TCR clone 233963 (TRBV13, TRBJ2-3)
CASRLPRVAGGRNTQYF

SEQ ID NO: 467927 - protein, 13 aa, Homo sapiens
  CDR3 for alpha chain variable domain of TCR clone 233964 (TRAV26-2, TRAJ43)
CILRAVNKNDMRF

SEQ ID NO: 467928 - protein, 14 aa, Homo sapiens
  CDR3 for beta chain variable domain of TCR clone 233964 (TRBV20-1, TRBJ1-1)
CSARTRIGGTEAFF

SEQ ID NO: 467929 - protein, 14 aa, Homo sapiens
  CDR3 for alpha chain variable domain of TCR clone 233965 (TRAV8-3, TRAJ9)
CAVVSNTGGFITIF

SEQ ID NO: 467930 - protein, 14 aa, Homo sapiens
  CDR3 for beta chain variable domain of TCR clone 233965 (TRBV7-3, TRBJ2-2)
CASSSGGYTGELFF

SEQ ID NO: 467931 - protein, 14 aa, Homo sapiens
  CDR3 for alpha chain variable domain of TCR clone 233966 (TRAV20, TRAJ47)
CAVTFGEYGNKLVF

SEQ ID NO: 467932 - protein, 12 aa, Homo sapiens
  CDR3 for beta chain variable domain of TCR clone 233966 (TRBV11-2, TRBJ2-2)
CASSLGGGELFF

SEQ ID NO: 467933 - protein, 13 aa, Homo sapiens
  CDR3 for alpha chain variable domain of TCR clone 233967 (TRAV35, TRAJ57)
CAGSQGGSEKLFF

SEQ ID NO: 467934 - protein, 15 aa, Homo sapiens
  CDR3 for beta chain variable domain of TCR clone 233967 (TRBV20-1, TRBJ2-7)
CSARDRVSGMDEQYF

SEQ ID NO: 467935 - protein, 17 aa, Homo sapiens
  CDR3 for alpha chain variable domain of TCR clone 233968 (TRAV4, TRAJ13)
CLVGVQGSFGGYPKVTF

SEQ ID NO: 467936 - protein, 18 aa, Homo sapiens
  CDR3 for beta chain variable domain of TCR clone 233968 (TRBV15, TRBJ2-3)
CATSRDGARSWDTDTQYF

SEQ ID NO: 467937 - protein, 14 aa, Homo sapiens
  CDR3 for alpha chain variable domain of TCR clone 233969 (TRAV12-1, TRAJ22)
CVAFSSGSVRQLTF

SEQ ID NO: 467938 - protein, 22 aa, Homo sapiens
  CDR3 for beta chain variable domain of TCR clone 233969 (TRBV15, TRBJ2-1)
QAWGTQPCTCVPPAEVDTARFF

SEQ ID NO: 467939 - protein, 13 aa, Homo sapiens
  CDR3 for alpha chain variable domain of TCR clone 233970 (TRAV35, TRAJ44)
CAGLSGTASKLTF

SEQ ID NO: 467940 - protein, 16 aa, Homo sapiens
  CDR3 for beta chain variable domain of TCR clone 233970 (TRBV29-1, TRBJ2-7)
CSVEDAEDGTAYEQYF

SEQ ID NO: 467941 - protein, 16 aa, Homo sapiens
  CDR3 for alpha chain variable domain of TCR clone 233971 (TRAV14/DV4, TRAJ20)
CAMREGRSRDDYKLSF

SEQ ID NO: 467942 - protein, 17 aa, Homo sapiens
  CDR3 for beta chain variable domain of TCR clone 233971 (TRBV28, TRBJ2-5)
CASSTPEGDALQETQYF

SEQ ID NO: 467943 - protein, 14 aa, Homo sapiens
  CDR3 for alpha chain variable domain of TCR clone 233972 (TRAV29/DV5, TRAJ44)
CAAFLVGTASKLPF

SEQ ID NO: 467944 - protein, 15 aa, Homo sapiens
  CDR3 for beta chain variable domain of TCR clone 233972 (TRBV7-3, TRBJ2-2)
CASSETGQGTGELFF

SEQ ID NO: 467945 - protein, 14 aa, Homo sapiens
  CDR3 for alpha chain variable domain of TCR clone 233973 (TRAV14/DV4, TRAJ50)
CAMREFPTDDKVIF

SEQ ID NO: 467946 - protein, 14 aa, Homo sapiens
  CDR3 for beta chain variable domain of TCR clone 233973 (TRBV25-1, TRBJ1-1)
CASTHLGGNTEAFF

SEQ ID NO: 467947 - protein, 14 aa, Homo sapiens
  CDR3 for alpha chain variable domain of TCR clone 233974 (TRAV8-4, TRAJ48)
CAVSETFGNEKLTF

SEQ ID NO: 467948 - protein, 19 aa, Homo sapiens
  CDR3 for beta chain variable domain of TCR clone 233974 (TRBV7-2, TRBJ2-3)
CASSFLSRDWGVGTDTQYF

SEQ ID NO: 467949 - protein, 13 aa, Homo sapiens
  CDR3 for alpha chain variable domain of TCR clone 233975 (TRAV27, TRAJ57)
CRSAQGGSEKLVF

SEQ ID NO: 467950 - protein, 15 aa, Homo sapiens
  CDR3 for beta chain variable domain of TCR clone 233975 (TRBV12-4, TRBJ2-7)
CASSQRTSGNYEQYF

SEQ ID NO: 467951 - protein, 16 aa, Homo sapiens
  CDR3 for alpha chain variable domain of TCR clone 233976 (TRAV36/DV7, TRAJ33)
WRPGNKVQDSNYQLIW

SEQ ID NO: 467952 - protein, 11 aa, Homo sapiens
  CDR3 for beta chain variable domain of TCR clone 233976 (TRBV7-8, TRBJ2-7)
CASSLSLEQYF

SEQ ID NO: 467953 - protein, 19 aa, Homo sapiens
  CDR3 for alpha chain variable domain of TCR clone 233977 (TRAV13-1, TRAJ52)
CAASPYQNAGGTSYGKLSF

SEQ ID NO: 467954 - protein, 14 aa, Homo sapiens
  CDR3 for beta chain variable domain of TCR clone 233977 (TRBV19, TRBJ2-7)
CASTVQGRPYEQYF

SEQ ID NO: 467955 - protein, 12 aa, Homo sapiens
  CDR3 for alpha chain variable domain of TCR clone 233978 (TRAV2, TRAJ31)
CSVEEGNARLMF

SEQ ID NO: 467956 - protein, 18 aa, Homo sapiens
  CDR3 for beta chain variable domain of TCR clone 233978 (TRBV7-9, TRBJ2-3)
GASSLDLAGLATPDTQYF

SEQ ID NO: 467957 - protein, 13 aa, Homo sapiens
  CDR3 for alpha chain variable domain of TCR clone 233979 (TRAV12-2, TRAJ32)
RAAYGGATNKLIF

SEQ ID NO: 467958 - protein, 16 aa, Homo sapiens
  CDR3 for beta chain variable domain of TCR clone 233979 (TRBV19, TRBJ2-3)
CASGTGPNDGTDTQYF

SEQ ID NO: 467959 - protein, 14 aa, Homo sapiens
  CDR3 for alpha chain variable domain of TCR clone 233980 (TRAV12-2, TRAJ40)
CAVKIPSGTSKYIF

SEQ ID NO: 467960 - protein, 14 aa, Homo sapiens
  CDR3 for beta chain variable domain of TCR clone 233980 (TRBV20-1, TRBJ1-1)
CSAQTRIGGTEVFF

SEQ ID NO: 467961 - protein, 12 aa, Homo sapiens
  CDR3 for alpha chain variable domain of TCR clone 233981 (TRAV27, TRAJ33)
CAGEDSNYHLIW

SEQ ID NO: 467962 - protein, 17 aa, Homo sapiens
  CDR3 for beta chain variable domain of TCR clone 233981 (TRBV7-3, TRBJ1-3)
CASSPLGRGTPGNTIYF

SEQ ID NO: 467963 - protein, 15 aa, Homo sapiens
  CDR3 for alpha chain variable domain of TCR clone 233982 (TRAV34, TRAJ38)
CGADFTPGNNRKLIW

SEQ ID NO: 467964 - protein, 13 aa, Homo sapiens
  CDR3 for beta chain variable domain of TCR clone 233982 (TRBV13, TRBJ2-1)
CASILGGRGEQFF

SEQ ID NO: 467965 - protein, 13 aa, Homo sapiens
  CDR3 for alpha chain variable domain of TCR clone 233983 (TRAV17, TRAJ5)
CALRGTGRRALTF

SEQ ID NO: 467966 - protein, 12 aa, Homo sapiens
  CDR3 for beta chain variable domain of TCR clone 233983 (TRBV29-1, TRBJ2-3)
CSVTGGADTQYF

SEQ ID NO: 467967 - protein, 15 aa, Homo sapiens
  CDR3 for alpha chain variable domain of TCR clone 233984 (TRAV1-2, TRAJ15)
CAVDVMGSAGTALIF

SEQ ID NO: 467968 - protein, 13 aa, Homo sapiens
  CDR3 for beta chain variable domain of TCR clone 233984 (TRBV20-1, TRBJ1-1)
CSAFNRENTEAFF

SEQ ID NO: 467969 - protein, 12 aa, Homo sapiens
  CDR3 for alpha chain variable domain of TCR clone 233985 (TRAV3, TRAJ20)
CAVRDPDFKLSF

SEQ ID NO: 467970 - protein, 15 aa, Homo sapiens
  CDR3 for beta chain variable domain of TCR clone 233985 (TRBV2, TRBJ2-2)
CASSRETVGTGELFF

SEQ ID NO: 467971 - protein, 13 aa, Homo sapiens
  CDR3 for alpha chain variable domain of TCR clone 233986 (TRAV13-2, TRAJ48)
CAEMDFGNEKLTF

SEQ ID NO: 467972 - protein, 13 aa, Homo sapiens
  CDR3 for beta chain variable domain of TCR clone 233986 (TRBV7-9, TRBJ1-2)
CASSLKQNYGFTF

SEQ ID NO: 467973 - protein, 17 aa, Homo sapiens
  CDR3 for alpha chain variable domain of TCR clone 233987 (TRAV12-2, TRAJ52)
CAVNPYAGGTSYGKLTF

SEQ ID NO: 467974 - protein, 20 aa, Homo sapiens
  CDR3 for beta chain variable domain of TCR clone 233987 (TRBV19, TRBJ2-1)
CASSISRTVTSTRLNNEQFF

SEQ ID NO: 467975 - protein, 15 aa, Homo sapiens
  CDR3 for alpha chain variable domain of TCR clone 233988 (TRAV12-2, TRAJ9)
CAVNNERTGGFKTNF

SEQ ID NO: 467976 - protein, 14 aa, Homo sapiens
  CDR3 for beta chain variable domain of TCR clone 233988 (TRBV4-1, TRBJ1-4)
CASSQERKNEKLFF

SEQ ID NO: 467977 - protein, 14 aa, Homo sapiens
  CDR3 for alpha chain variable domain of TCR clone 233989 (TRAV16, TRAJ37)
CALDISGNTDNLIF

SEQ ID NO: 467978 - protein, 14 aa, Homo sapiens
  CDR3 for beta chain variable domain of TCR clone 233989 (TRBV7-6, TRBJ2-7)
CASSFRQGADEQYF

SEQ ID NO: 467979 - protein, 12 aa, Homo sapiens
  CDR3 for alpha chain variable domain of TCR clone 233990 (TRAV8-1, TRAJ26)
CAVNNYGQTFVF

SEQ ID NO: 467980 - protein, 15 aa, Homo sapiens
  CDR3 for beta chain variable domain of TCR clone 233990 (TRBV20-1, TRBJ1-1)
CSASWDRFLNTEAFF

SEQ ID NO: 467981 - protein, 14 aa, Homo sapiens
  CDR3 for alpha chain variable domain of TCR clone 233991 (TRAV21, TRAJ37)
CAVKGSSNTGKLIF

SEQ ID NO: 467982 - protein, 16 aa, Homo sapiens
  CDR3 for beta chain variable domain of TCR clone 233991 (TRBV29-1, TRBJ2-7)
CSVEVVGTSGSYEQYF

SEQ ID NO: 467983 - protein, 14 aa, Homo sapiens
  CDR3 for alpha chain variable domain of TCR clone 233992 (TRAV12-3, TRAJ54)
CAMSALQGAQKLVV

SEQ ID NO: 467984 - protein, 15 aa, Homo sapiens
  CDR3 for beta chain variable domain of TCR clone 233992 (TRBV19, TRBJ2-4)
CASSTPGIAKNIKYF

SEQ ID NO: 467985 - protein, 16 aa, Homo sapiens
  CDR3 for alpha chain variable domain of TCR clone 233993 (TRAV3, TRAJ21)
CAVRDIERGNFNKFYF

SEQ ID NO: 467986 - protein, 14 aa, Homo sapiens
  CDR3 for beta chain variable domain of TCR clone 233993 (TRBV11-2, TRBJ2-3)
CASSRLARTDTQYF

SEQ ID NO: 467987 - protein, 14 aa, Homo sapiens
  CDR3 for alpha chain variable domain of TCR clone 233994 (TRAV2, TRAJ9)
CAVEDRSGGCKTNF

SEQ ID NO: 467988 - protein, 14 aa, Homo sapiens
  CDR3 for beta chain variable domain of TCR clone 233994 (TRBV12-4, TRBJ1-1)
CASSLGTGGTEAFF

SEQ ID NO: 467989 - protein, 14 aa, Homo sapiens
  CDR3 for alpha chain variable domain of TCR clone 233995 (TRAV8-3, TRAJ4)
CAVGAAGGYNKLIF

SEQ ID NO: 467990 - protein, 12 aa, Homo sapiens
  CDR3 for beta chain variable domain of TCR clone 233995 (TRBV3-1, TRBJ1-1)
CQQPGVITEAFF

SEQ ID NO: 467991 - protein, 12 aa, Homo sapiens
  CDR3 for alpha chain variable domain of TCR clone 233996 (TRAV12-2, TRAJ9)
CRERTGGFKTIF

SEQ ID NO: 467992 - protein, 13 aa, Homo sapiens
  CDR3 for beta chain variable domain of TCR clone 233996 (TRBV15, TRBJ1-6)
CATSGGLNSPLHF

SEQ ID NO: 467993 - protein, 14 aa, Homo sapiens
  CDR3 for alpha chain variable domain of TCR clone 233997 (TRAV2, TRAJ4)
CAVEERGGYNKLIF

SEQ ID NO: 467994 - protein, 15 aa, Homo sapiens
  CDR3 for beta chain variable domain of TCR clone 233997 (TRBV4-2, TRBJ2-3)
CASSKQQIRTDTQYF

SEQ ID NO: 467995 - protein, 11 aa, Homo sapiens
  CDR3 for alpha chain variable domain of TCR clone 233998 (TRAV2, TRAJ13)
CASGGYQKVTF

SEQ ID NO: 467996 - protein, 13 aa, Homo sapiens
  CDR3 for beta chain variable domain of TCR clone 233998 (TRBV7-7, TRBJ2-5)
CASSRSGQETQYF

SEQ ID NO: 467997 - protein, 11 aa, Homo sapiens
  CDR3 for alpha chain variable domain of TCR clone 233999 (TRAV8-1, TRAJ15)
CAVGPGTALIF

SEQ ID NO: 467998 - protein, 13 aa, Homo sapiens
  CDR3 for beta chain variable domain of TCR clone 233999 (TRBV4-1, TRBJ2-2)
CASSQENTGELFF

SEQ ID NO: 467999 - protein, 11 aa, Homo sapiens
  CDR3 for alpha chain variable domain of TCR clone 234000 (TRAV3, TRAJ32)
CAVREGIMVVL

SEQ ID NO: 468000 - protein, 16 aa, Homo sapiens
  CDR3 for beta chain variable domain of TCR clone 234000 (TRBV12-5, TRBJ2-5)
CASGPRTSGNQETQYF

SEQ ID NO: 468001 - protein, 14 aa, Homo sapiens
  CDR3 for alpha chain variable domain of TCR clone 234001 (TRAV12-2, TRAJ24)
CAVTPADSWGKLQF

SEQ ID NO: 468002 - protein, 12 aa, Homo sapiens
  CDR3 for beta chain variable domain of TCR clone 234001 (TRBV3-1, TRBJ2-1)
CASSQGSSGQFS

SEQ ID NO: 468003 - protein, 17 aa, Homo sapiens
  CDR3 for alpha chain variable domain of TCR clone 234002 (TRAV13-1, TRAJ52)
CAASSGAGGTSYGKLTF

SEQ ID NO: 468004 - protein, 15 aa, Homo sapiens
  CDR3 for beta chain variable domain of TCR clone 234002 (TRBV2, TRBJ2-1)
CASCELAGSYNEQFF

SEQ ID NO: 468005 - protein, 15 aa, Homo sapiens
  CDR3 for alpha chain variable domain of TCR clone 234003 (TRAV12-3, TRAJ10)
CASYILTGGGNKLTF

SEQ ID NO: 468006 - protein, 17 aa, Homo sapiens
  CDR3 for beta chain variable domain of TCR clone 234003 (TRBV28, TRBJ2-5)
CASSRQGGLAGAETQYF

SEQ ID NO: 468007 - protein, 11 aa, Homo sapiens
  CDR3 for alpha chain variable domain of TCR clone 234004 (TRAV12-3, TRAJ16)
CAIRDGQKLLF

SEQ ID NO: 468008 - protein, 13 aa, Homo sapiens
  CDR3 for beta chain variable domain of TCR clone 234004 (TRBV4-1, TRBJ2-7)
CASSQGQAYEQYF

SEQ ID NO: 468009 - protein, 18 aa, Homo sapiens
  CDR3 for alpha chain variable domain of TCR clone 234005 (TRAV12-3, TRAJ52)
CAMSVGGAGGTSYGKLTF

SEQ ID NO: 468010 - protein, 14 aa, Homo sapiens
  CDR3 for beta chain variable domain of TCR clone 234005 (TRBV5-1, TRBJ2-7)
CASSRGESSYEQYF

SEQ ID NO: 468011 - protein, 15 aa, Homo sapiens
  CDR3 for alpha chain variable domain of TCR clone 234006 (TRAV29/DV5, TRAJ24)
CAASGVTDSWGKFQF

SEQ ID NO: 468012 - protein, 13 aa, Homo sapiens
  CDR3 for beta chain variable domain of TCR clone 234006 (TRBV19, TRBJ1-2)
CASSVPGQDGYTF

SEQ ID NO: 468013 - protein, 12 aa, Homo sapiens
  CDR3 for alpha chain variable domain of TCR clone 234007 (TRAV12-2, TRAJ45)
CAVTGGADGLTF

SEQ ID NO: 468014 - protein, 15 aa, Homo sapiens
  CDR3 for beta chain variable domain of TCR clone 234007 (TRBV7-9, TRBJ2-5)
CASSLEGGSGETQYF

SEQ ID NO: 468015 - protein, 14 aa, Homo sapiens
  CDR3 for alpha chain variable domain of TCR clone 234008 (TRAV1-2, TRAJ16)
CAVNRFSDGQKLIF

SEQ ID NO: 468016 - protein, 13 aa, Homo sapiens
  CDR3 for beta chain variable domain of TCR clone 234008 (TRBV19, TRBJ2-7)
CASRKAGGSEQYF

SEQ ID NO: 468017 - protein, 14 aa, Homo sapiens
  CDR3 for alpha chain variable domain of TCR clone 234009 (TRAV13-1, TRAJ26)
CAASSAHYGQNFVF

SEQ ID NO: 468018 - protein, 17 aa, Homo sapiens
  CDR3 for beta chain variable domain of TCR clone 234009 (TRBV25-1, TRBJ2-5)
CASSRRGGRGGQETQFF

SEQ ID NO: 468019 - protein, 11 aa, Homo sapiens
  CDR3 for alpha chain variable domain of TCR clone 234010 (TRAV17, TRAJ9)
CATTGGFETIF

SEQ ID NO: 468020 - protein, 15 aa, Homo sapiens
  CDR3 for beta chain variable domain of TCR clone 234010 (TRBV9, TRBJ1-6)
CASSVAGTGDSPLHF

SEQ ID NO: 468021 - protein, 16 aa, Homo sapiens
  CDR3 for alpha chain variable domain of TCR clone 234011 (TRAV26-1, TRAJ23)
CIVRPRFYNQGGKIIF

SEQ ID NO: 468022 - protein, 13 aa, Homo sapiens
  CDR3 for beta chain variable domain of TCR clone 234011 (TRBV20-1, TRBJ1-1)
CSARGGGNTEAFF

SEQ ID NO: 468023 - protein, 12 aa, Homo sapiens
  CDR3 for alpha chain variable domain of TCR clone 234012 (TRAV3, TRAJ43)
CAVRAPNNDIRF

SEQ ID NO: 468024 - protein, 15 aa, Homo sapiens
  CDR3 for beta chain variable domain of TCR clone 234012 (TRBV4-3, TRBJ2-7)
CASSQGDWGDYEQYF

SEQ ID NO: 468025 - protein, 13 aa, Homo sapiens
  CDR3 for alpha chain variable domain of TCR clone 234013 (TRAV17, TRAJ29)
CATDAFRKHTSCL

SEQ ID NO: 468026 - protein, 13 aa, Homo sapiens
  CDR3 for beta chain variable domain of TCR clone 234013 (TRBV5-7, TRBJ2-6)
CASTSSVANVLTF

SEQ ID NO: 468027 - protein, 11 aa, Homo sapiens
  CDR3 for alpha chain variable domain of TCR clone 234014 (TRAV3, TRAJ21)
CAVGNFNKFYF

SEQ ID NO: 468028 - protein, 13 aa, Homo sapiens
  CDR3 for beta chain variable domain of TCR clone 234014 (TRBV7-9, TRBJ1-2)
CAGSLKQNYGFTF

SEQ ID NO: 468029 - protein, 18 aa, Homo sapiens
  CDR3 for alpha chain variable domain of TCR clone 234015 (TRAV21, TRAJ52)
CAVRPSPAGGTSYGKLSF

SEQ ID NO: 468030 - protein, 16 aa, Homo sapiens
  CDR3 for beta chain variable domain of TCR clone 234015 (TRBV7-3, TRBJ2-1)
CASSLEGYRAYNEQFF

SEQ ID NO: 468031 - protein, 14 aa, Homo sapiens
  CDR3 for alpha chain variable domain of TCR clone 234016 (TRAV12-1, TRAJ9)
CVVNKGTGGFKTIF

SEQ ID NO: 468032 - protein, 16 aa, Homo sapiens
  CDR3 for beta chain variable domain of TCR clone 234016 (TRBV4-3, TRBJ2-2)
CASSQDRGSETGELFF

SEQ ID NO: 468033 - protein, 11 aa, Homo sapiens
  CDR3 for alpha chain variable domain of TCR clone 234017 (TRAV12-2, TRAJ49)
CALQGVNQFYF

SEQ ID NO: 468034 - protein, 13 aa, Homo sapiens
  CDR3 for beta chain variable domain of TCR clone 234017 (TRBV4-1, TRBJ1-1)
CASSQLGTGEAFF

SEQ ID NO: 468035 - protein, 11 aa, Homo sapiens
  CDR3 for alpha chain variable domain of TCR clone 234018 (TRAV2, TRAJ33)
CAVDSNYQLIW

SEQ ID NO: 468036 - protein, 13 aa, Homo sapiens
  CDR3 for beta chain variable domain of TCR clone 234018 (TRBV5-7, TRBJ2-3)
CESSLGRTDTQYF

SEQ ID NO: 468037 - protein, 13 aa, Homo sapiens
  CDR3 for alpha chain variable domain of TCR clone 234019 (TRAV25, TRAJ47)
CAGHRGYGNKLVF

SEQ ID NO: 468038 - protein, 17 aa, Homo sapiens
  CDR3 for beta chain variable domain of TCR clone 234019 (TRBV7-8, TRBJ2-5)
CASSFASGGRFQETQYF

SEQ ID NO: 468039 - protein, 11 aa, Homo sapiens
  CDR3 for alpha chain variable domain of TCR clone 234020 (TRAV4, TRAJ23)
CLVAPGGKLIF

SEQ ID NO: 468040 - protein, 15 aa, Homo sapiens
  CDR3 for beta chain variable domain of TCR clone 234020 (TRBV7-8, TRBJ2-1)
CVSSFQADEYNEQFF

SEQ ID NO: 468041 - protein, 16 aa, Homo sapiens
  CDR3 for alpha chain variable domain of TCR clone 234021 (TRAV12-3, TRAJ53)
CAMSPGSGGSNYKLTS

SEQ ID NO: 468042 - protein, 15 aa, Homo sapiens
  CDR3 for beta chain variable domain of TCR clone 234021 (TRBV7-3, TRBJ2-2)
CASSETGQGTGELFF

SEQ ID NO: 468043 - protein, 18 aa, Homo sapiens
  CDR3 for alpha chain variable domain of TCR clone 234022 (TRAV14/DV4, TRAJ15)
CAMREFPPTGQAGTALIF

SEQ ID NO: 468044 - protein, 13 aa, Homo sapiens
  CDR3 for beta chain variable domain of TCR clone 234022 (TRBV19, TRBJ1-5)
RASSINFNQPQHF

SEQ ID NO: 468045 - protein, 15 aa, Homo sapiens
  CDR3 for alpha chain variable domain of TCR clone 234023 (TRAV3, TRAJ17)
CAVRDTGAAGNKLTF

SEQ ID NO: 468046 - protein, 17 aa, Homo sapiens
  CDR3 for beta chain variable domain of TCR clone 234023 (TRBV5-1, TRBJ2-5)
CASSPVALGQNQETQYF

SEQ ID NO: 468047 - protein, 16 aa, Homo sapiens
  CDR3 for alpha chain variable domain of TCR clone 234024 (TRAV3, TRAJ32)
CALRDMGGGATNKLIF

SEQ ID NO: 468048 - protein, 11 aa, Homo sapiens
  CDR3 for beta chain variable domain of TCR clone 234024 (TRBV12-4, TRBJ2-1)
CASSRLNEQFF

SEQ ID NO: 468049 - protein, 16 aa, Homo sapiens
  CDR3 for alpha chain variable domain of TCR clone 234025 (TRAV4, TRAJ5)
CLVGPDHGHGREGTYF

SEQ ID NO: 468050 - protein, 17 aa, Homo sapiens
  CDR3 for beta chain variable domain of TCR clone 234025 (TRBV11-2, TRBJ2-1)
CASSLYPPGVEYNEQFF

SEQ ID NO: 468051 - protein, 17 aa, Homo sapiens
  CDR3 for alpha chain variable domain of TCR clone 234026 (TRAV12-2, TRAJ52)
CAVNKGAGGTSYGKLTF

SEQ ID NO: 468052 - protein, 15 aa, Homo sapiens
  CDR3 for beta chain variable domain of TCR clone 234026 (TRBV7-2, TRBJ2-1)
CASSSRTSREDEQFF

SEQ ID NO: 468053 - protein, 17 aa, Homo sapiens
  CDR3 for alpha chain variable domain of TCR clone 234027 (TRAV13-1, TRAJ52)
GAASSGAGGTSYGKLTF

SEQ ID NO: 468054 - protein, 14 aa, Homo sapiens
  CDR3 for beta chain variable domain of TCR clone 234027 (TRBV12-4, TRBJ2-3)
CASTIAGWGDTQYF

SEQ ID NO: 468055 - protein, 16 aa, Homo sapiens
  CDR3 for alpha chain variable domain of TCR clone 234028 (TRAV30, TRAJ24)
CGTEIVDADSWGKFQF

SEQ ID NO: 468056 - protein, 14 aa, Homo sapiens
  CDR3 for beta chain variable domain of TCR clone 234028 (TRBV20-1, TRBJ2-3)
CSASSGGSTDTQYF

SEQ ID NO: 468057 - protein, 15 aa, Homo sapiens
  CDR3 for alpha chain variable domain of TCR clone 234029 (TRAV1-1, TRAJ5)
CAVRHMDTGRRALTF

SEQ ID NO: 468058 - protein, 17 aa, Homo sapiens
  CDR3 for beta chain variable domain of TCR clone 234029 (TRBV28, TRBJ2-7)
CASSPGLGGGDSSEQYF

SEQ ID NO: 468059 - protein, 13 aa, Homo sapiens
  CDR3 for alpha chain variable domain of TCR clone 234030 (TRAV3, TRAJ29)
CAVSLSGNTPLVF

SEQ ID NO: 468060 - protein, 16 aa, Homo sapiens
  CDR3 for beta chain variable domain of TCR clone 234030 (TRBV5-1, TRBJ2-1)
CASSLSSLRESNEQFF

SEQ ID NO: 468061 - protein, 15 aa, Homo sapiens
  CDR3 for alpha chain variable domain of TCR clone 234031 (TRAV25, TRAJ52)
CAGTSGGTSYGKLTF

SEQ ID NO: 468062 - protein, 16 aa, Homo sapiens
  CDR3 for beta chain variable domain of TCR clone 234031 (TRBV15, TRBJ1-2)
CATSRGPRTGGGGNTF

SEQ ID NO: 468063 - protein, 12 aa, Homo sapiens
  CDR3 for alpha chain variable domain of TCR clone 234032 (TRAV2, TRAJ40)
CCGTSGTYKYIF

SEQ ID NO: 468064 - protein, 12 aa, Homo sapiens
  CDR3 for beta chain variable domain of TCR clone 234032 (TRBV19, TRBJ2-1)
CASSRQGAEQFF

SEQ ID NO: 468065 - protein, 13 aa, Homo sapiens
  CDR3 for alpha chain variable domain of TCR clone 234033 (TRAV21, TRAJ49)
CAVRQSTGNQFYF

SEQ ID NO: 468066 - protein, 13 aa, Homo sapiens
  CDR3 for beta chain variable domain of TCR clone 234033 (TRBV6-6, TRBJ1-5)
CASRAYQDQTQHF

SEQ ID NO: 468067 - protein, 12 aa, Homo sapiens
  CDR3 for alpha chain variable domain of TCR clone 234034 (TRAV21, TRAJ33)
CAKMDSNYQLIW

SEQ ID NO: 468068 - protein, 13 aa, Homo sapiens
  CDR3 for beta chain variable domain of TCR clone 234034 (TRBV12-4, TRBJ2-5)
CASSPGTEEAQYF

SEQ ID NO: 468069 - protein, 16 aa, Homo sapiens
  CDR3 for alpha chain variable domain of TCR clone 234035 (TRAV38-1, TRAJ37)
CAFKGDGSSKPGNLIF

SEQ ID NO: 468070 - protein, 13 aa, Homo sapiens
  CDR3 for beta chain variable domain of TCR clone 234035 (TRBV12-4, TRBJ2-5)
CASSLFRRETKYF

SEQ ID NO: 468071 - protein, 14 aa, Homo sapiens
  CDR3 for alpha chain variable domain of TCR clone 234036 (TRAV26-2, TRAJ38)
CILYNAGNNRKLIW

SEQ ID NO: 468072 - protein, 13 aa, Homo sapiens
  CDR3 for beta chain variable domain of TCR clone 234036 (TRBV3-1, TRBJ1-1)
CSSQGGRGSEAFF

SEQ ID NO: 468073 - protein, 14 aa, Homo sapiens
  CDR3 for alpha chain variable domain of TCR clone 234037 (TRAV21, TRAJ35)
CAVMPIGFGNVLHC

SEQ ID NO: 468074 - protein, 15 aa, Homo sapiens
  CDR3 for beta chain variable domain of TCR clone 234037 (TRBV20-1, TRBJ1-1)
CSASRGVTGNTGAFF

SEQ ID NO: 468075 - protein, 13 aa, Homo sapiens
  CDR3 for alpha chain variable domain of TCR clone 234038 (TRAV8-3, TRAJ21)
CAVGAYNFNKFYF

SEQ ID NO: 468076 - protein, 15 aa, Homo sapiens
  CDR3 for beta chain variable domain of TCR clone 234038 (TRBV6-1, TRBJ2-6)
CASSSRPSGANVLTF

SEQ ID NO: 468077 - protein, 15 aa, Homo sapiens
  CDR3 for alpha chain variable domain of TCR clone 234039 (TRAV34, TRAJ38)
CGADFTPGNNRKLIW

SEQ ID NO: 468078 - protein, 15 aa, Homo sapiens
  CDR3 for beta chain variable domain of TCR clone 234039 (TRBV6-5, TRBJ2-1)
CASRGDFDSYYEQFF

SEQ ID NO: 468079 - protein, 13 aa, Homo sapiens
  CDR3 for alpha chain variable domain of TCR clone 234040 (TRAV12-1, TRAJ42)
CGDLWRKQGNLIF

SEQ ID NO: 468080 - protein, 13 aa, Homo sapiens
  CDR3 for beta chain variable domain of TCR clone 234040 (TRBV18, TRBJ2-5)
CASSPPGKETQYF

SEQ ID NO: 468081 - protein, 16 aa, Homo sapiens
  CDR3 for alpha chain variable domain of TCR clone 234041 (TRAV21, TRAJ37)
CAVRPRGSSDTGKLIF

SEQ ID NO: 468082 - protein, 20 aa, Homo sapiens
  CDR3 for beta chain variable domain of TCR clone 234041 (TRBV11-2, TRBJ2-2)
LRTRPCISVPAASLPGSCFF

SEQ ID NO: 468083 - protein, 14 aa, Homo sapiens
  CDR3 for alpha chain variable domain of TCR clone 234042 (TRAV8-3, TRAJ44)
CAVGAGGTASKLTF

SEQ ID NO: 468084 - protein, 14 aa, Homo sapiens
  CDR3 for beta chain variable domain of TCR clone 234042 (TRBV25-1, TRBJ1-1)
CASTHLGGNTEAFF

SEQ ID NO: 468085 - protein, 15 aa, Homo sapiens
  CDR3 for alpha chain variable domain of TCR clone 234043 (TRAV26-1, TRAJ44)
CIARVPFGTASKLTF

SEQ ID NO: 468086 - protein, 17 aa, Homo sapiens
  CDR3 for beta chain variable domain of TCR clone 234043 (TRBV24-1, TRBJ2-4)
CATSDAEARGVRNIRYF

SEQ ID NO: 468087 - protein, 13 aa, Homo sapiens
  CDR3 for alpha chain variable domain of TCR clone 234044 (TRAV2, TRAJ40)
CAVVTSGTYKYIF

SEQ ID NO: 468088 - protein, 15 aa, Homo sapiens
  CDR3 for beta chain variable domain of TCR clone 234044 (TRBV6-3, TRBJ2-7)
CASSSPGTVFYGQYF

SEQ ID NO: 468089 - protein, 15 aa, Homo sapiens
  CDR3 for alpha chain variable domain of TCR clone 234045 (TRAV13-1, TRAJ5)
CAVYIRDTGRRALTF

SEQ ID NO: 468090 - protein, 16 aa, Homo sapiens
  CDR3 for beta chain variable domain of TCR clone 234045 (TRBV12-4, TRBJ2-1)
CASTEQGIDRSNEQFF

SEQ ID NO: 468091 - protein, 15 aa, Homo sapiens
  CDR3 for alpha chain variable domain of TCR clone 234046 (TRAV23/DV6, TRAJ13)
CAAWPGGGGYQKCTF

SEQ ID NO: 468092 - protein, 17 aa, Homo sapiens
  CDR3 for beta chain variable domain of TCR clone 234046 (TRBV19, TRBJ2-7)
CASSISLYDSYPYEQYF

SEQ ID NO: 468093 - protein, 11 aa, Homo sapiens
  CDR3 for alpha chain variable domain of TCR clone 234047 (TRAV12-1, TRAJ43)
CVEYDNTDMRF

SEQ ID NO: 468094 - protein, 17 aa, Homo sapiens
  CDR3 for beta chain variable domain of TCR clone 234047 (TRBV20-1, TRBJ2-1)
CSARDPLAGVWDNEQFF

SEQ ID NO: 468095 - protein, 11 aa, Homo sapiens
  CDR3 for alpha chain variable domain of TCR clone 234048 (TRAV26-1, TRAJ27)
CIDPNAGKSTF

SEQ ID NO: 468096 - protein, 12 aa, Homo sapiens
  CDR3 for beta chain variable domain of TCR clone 234048 (TRBV5-5, TRBJ2-5)
CASSYFGETQYF

SEQ ID NO: 468097 - protein, 16 aa, Homo sapiens
  CDR3 for alpha chain variable domain of TCR clone 234049 (TRAV3, TRAJ10)
CAVRDLRAGGGNKLTF

SEQ ID NO: 468098 - protein, 14 aa, Homo sapiens
  CDR3 for beta chain variable domain of TCR clone 234049 (TRBV7-2, TRBJ1-1)
CASSFLTGTTEAFF

SEQ ID NO: 468099 - protein, 15 aa, Homo sapiens
  CDR3 for alpha chain variable domain of TCR clone 234050 (TRAV3, TRAJ5)
CAVRDVDTGRRALTF

SEQ ID NO: 468100 - protein, 14 aa, Homo sapiens
  CDR3 for beta chain variable domain of TCR clone 234050 (TRBV25-1, TRBJ1-1)
CASTHLGGNTEAFF

SEQ ID NO: 468101 - protein, 13 aa, Homo sapiens
  CDR3 for alpha chain variable domain of TCR clone 234051 (TRAV12-1, TRAJ26)
CVVRRNYGQNFVF

SEQ ID NO: 468102 - protein, 14 aa, Homo sapiens
  CDR3 for beta chain variable domain of TCR clone 234051 (TRBV19, TRBJ2-7)
CASNFRDTFTGMYF

SEQ ID NO: 468103 - protein, 12 aa, Homo sapiens
  CDR3 for alpha chain variable domain of TCR clone 234052 (TRAV2, TRAJ36)
CAELTGANNLFF

SEQ ID NO: 468104 - protein, 13 aa, Homo sapiens
  CDR3 for beta chain variable domain of TCR clone 234052 (TRBV10-3, TRBJ2-7)
CASKLAVNYEQYF

SEQ ID NO: 468105 - protein, 17 aa, Homo sapiens
  CDR3 for alpha chain variable domain of TCR clone 234053 (TRAV3, TRAJ6)
CAVRDGPRARGSHIPTF

SEQ ID NO: 468106 - protein, 14 aa, Homo sapiens
  CDR3 for beta chain variable domain of TCR clone 234053 (TRBV7-2, TRBJ2-7)
CASSPKTSFYEQYF

SEQ ID NO: 468107 - protein, 13 aa, Homo sapiens
  CDR3 for alpha chain variable domain of TCR clone 234054 (TRAV17, TRAJ26)
CATVDNYGQHFVF

SEQ ID NO: 468108 - protein, 13 aa, Homo sapiens
  CDR3 for beta chain variable domain of TCR clone 234054 (TRBV14, TRBJ1-1)
CASSREFGTEAFF

SEQ ID NO: 468109 - protein, 23 aa, Homo sapiens
  CDR3 for alpha chain variable domain of TCR clone 234055 (TRAV8-4, TRAJ38)
CARLNAGNNHIQNPDPAVYQLRD

SEQ ID NO: 468110 - protein, 12 aa, Homo sapiens
  CDR3 for beta chain variable domain of TCR clone 234055 (TRBV7-8, TRBJ2-7)
CASSLSDIGQYF

SEQ ID NO: 468111 - protein, 14 aa, Homo sapiens
  CDR3 for alpha chain variable domain of TCR clone 234056 (TRAV3, TRAJ30)
CAVSDIGRDDKIIF

SEQ ID NO: 468112 - protein, 14 aa, Homo sapiens
  CDR3 for beta chain variable domain of TCR clone 234056 (TRBV20-1, TRBJ2-3)
CSARGGTSTDTQYF

SEQ ID NO: 468113 - protein, 15 aa, Homo sapiens
  CDR3 for alpha chain variable domain of TCR clone 234057 (TRAV21, TRAJ45)
CAVSYSGGGADGLTF

SEQ ID NO: 468114 - protein, 14 aa, Homo sapiens
  CDR3 for beta chain variable domain of TCR clone 234057 (TRBV7-6, TRBJ2-3)
CASSLGTVTDTQYF

SEQ ID NO: 468115 - protein, 19 aa, Homo sapiens
  CDR3 for alpha chain variable domain of TCR clone 234058 (TRAV8-3, TRAJ8)
LSTSVLWDPMNTGFQKLEF

SEQ ID NO: 468116 - protein, 13 aa, Homo sapiens
  CDR3 for beta chain variable domain of TCR clone 234058 (TRBV10-2, TRBJ2-3)
CASSESGDHTQYF

SEQ ID NO: 468117 - protein, 13 aa, Homo sapiens
  CDR3 for alpha chain variable domain of TCR clone 234059 (TRAV8-6, TRAJ49)
CAVITNTGNQLYF

SEQ ID NO: 468118 - protein, 14 aa, Homo sapiens
  CDR3 for beta chain variable domain of TCR clone 234059 (TRBV5-1, TRBJ2-7)
CASSKGESLYEQYF

SEQ ID NO: 468119 - protein, 17 aa, Homo sapiens
  CDR3 for alpha chain variable domain of TCR clone 234060 (TRAV3, TRAJ6)
CAVRDGPRAGGSYIPTF

SEQ ID NO: 468120 - protein, 15 aa, Homo sapiens
  CDR3 for beta chain variable domain of TCR clone 234060 (TRBV28, TRBJ2-1)
CASSGLAEVDNEQFF

SEQ ID NO: 468121 - protein, 14 aa, Homo sapiens
  CDR3 for alpha chain variable domain of TCR clone 234061 (TRAV8-1, TRAJ9)
CAVNAWTGGFKTIF

SEQ ID NO: 468122 - protein, 15 aa, Homo sapiens
  CDR3 for beta chain variable domain of TCR clone 234061 (TRBV6-6, TRBJ2-7)
CASSYSYGGSYEQYF

SEQ ID NO: 468123 - protein, 14 aa, Homo sapiens
  CDR3 for alpha chain variable domain of TCR clone 234062 (TRAV13-1, TRAJ26)
CAASSAHYGQNFVF

SEQ ID NO: 468124 - protein, 17 aa, Homo sapiens
  CDR3 for beta chain variable domain of TCR clone 234062 (TRBV25-1, TRBJ2-5)
CASSRRGGRGGQENQYF

SEQ ID NO: 468125 - protein, 14 aa, Homo sapiens
  CDR3 for alpha chain variable domain of TCR clone 234063 (TRAV2, TRAJ37)
CAVDFTSNTGKLSF

SEQ ID NO: 468126 - protein, 13 aa, Homo sapiens
  CDR3 for beta chain variable domain of TCR clone 234063 (TRBV20-1, TRBJ1-1)
CSAPLGGGTEAFF

SEQ ID NO: 468127 - protein, 15 aa, Homo sapiens
  CDR3 for alpha chain variable domain of TCR clone 234064 (TRAV1-1, TRAJ4)
CAVRAFSGGYNKLIF

SEQ ID NO: 468128 - protein, 17 aa, Homo sapiens
  CDR3 for beta chain variable domain of TCR clone 234064 (TRBV11-2, TRBJ2-1)
CASSLYPPGVEYNEQFF

SEQ ID NO: 468129 - protein, 14 aa, Homo sapiens
  CDR3 for alpha chain variable domain of TCR clone 234065 (TRAV1-2, TRAJ8)
CAVREDTGFQKLVF

SEQ ID NO: 468130 - protein, 15 aa, Homo sapiens
  CDR3 for beta chain variable domain of TCR clone 234065 (TRBV20-1, TRBJ2-4)
RARAILAGQGDIQYF

SEQ ID NO: 468131 - protein, 12 aa, Homo sapiens
  CDR3 for alpha chain variable domain of TCR clone 234066 (TRAV1-1, TRAJ39)
CAVPMVGNMLTF

SEQ ID NO: 468132 - protein, 15 aa, Homo sapiens
  CDR3 for beta chain variable domain of TCR clone 234066 (TRBV7-3, TRBJ2-2)
CASSETGQGTGELFF

SEQ ID NO: 468133 - protein, 14 aa, Homo sapiens
  CDR3 for alpha chain variable domain of TCR clone 234067 (TRAV1-2, TRAJ16)
CAVNRFSDGQKLLF

SEQ ID NO: 468134 - protein, 17 aa, Homo sapiens
  CDR3 for beta chain variable domain of TCR clone 234067 (TRBV7-7, TRBJ1-4)
CASSLVGQGASNEKLFF

SEQ ID NO: 468135 - protein, 14 aa, Homo sapiens
  CDR3 for alpha chain variable domain of TCR clone 234068 (TRAV2, TRAJ9)
CAVYPNTGGFKTIF

SEQ ID NO: 468136 - protein, 13 aa, Homo sapiens
  CDR3 for beta chain variable domain of TCR clone 234068 (TRBV20-1, TRBJ2-1)
CSASTGTSNEQFF

SEQ ID NO: 468137 - protein, 13 aa, Homo sapiens
  CDR3 for alpha chain variable domain of TCR clone 234069 (TRAV27, TRAJ49)
CAPRPYTGNQFCF

SEQ ID NO: 468138 - protein, 16 aa, Homo sapiens
  CDR3 for beta chain variable domain of TCR clone 234069 (TRBV4-1, TRBJ1-2)
CASSQDAGQVLYGYAF

SEQ ID NO: 468139 - protein, 12 aa, Homo sapiens
  CDR3 for alpha chain variable domain of TCR clone 234070 (TRAV16, TRAJ10)
CSRTGGGNKLTF

SEQ ID NO: 468140 - protein, 14 aa, Homo sapiens
  CDR3 for beta chain variable domain of TCR clone 234070 (TRBV7-2, TRBJ1-2)
CASSQTGSTYGDTF

SEQ ID NO: 468141 - protein, 14 aa, Homo sapiens
  CDR3 for alpha chain variable domain of TCR clone 234071 (TRAV8-3, TRAJ4)
CAVGASGGYNKLMF

SEQ ID NO: 468142 - protein, 13 aa, Homo sapiens
  CDR3 for beta chain variable domain of TCR clone 234071 (TRBV18, TRBJ2-5)
CASSLQGQETQYF

SEQ ID NO: 468143 - protein, 15 aa, Homo sapiens
  CDR3 for alpha chain variable domain of TCR clone 234072 (TRAV23/DV6, TRAJ38)
CAARSNAGNNRKLNL

SEQ ID NO: 468144 - protein, 16 aa, Homo sapiens
  CDR3 for beta chain variable domain of TCR clone 234072 (TRBV10-2, TRBJ1-5)
CASSRDRDYSNQPQHF

SEQ ID NO: 468145 - protein, 13 aa, Homo sapiens
  CDR3 for alpha chain variable domain of TCR clone 234073 (TRAV8-6, TRAJ50)
CAVIKPSYDKVIF

SEQ ID NO: 468146 - protein, 15 aa, Homo sapiens
  CDR3 for beta chain variable domain of TCR clone 234073 (TRBV7-2, TRBJ2-2)
CASRRPGQNTGELFF

SEQ ID NO: 468147 - protein, 16 aa, Homo sapiens
  CDR3 for alpha chain variable domain of TCR clone 234074 (TRAV30, TRAJ24)
CGTEIVDADSWGKVPF

SEQ ID NO: 468148 - protein, 14 aa, Homo sapiens
  CDR3 for beta chain variable domain of TCR clone 234074 (TRBV12-5, TRBJ2-5)
CASGSRTHQETQYF

SEQ ID NO: 468149 - protein, 21 aa, Homo sapiens
  CDR3 for alpha chain variable domain of TCR clone 234075 (TRAV26-1, TRAJ56)
CCVLLHRQSRAYTGANSKLTF

SEQ ID NO: 468150 - protein, 20 aa, Homo sapiens
  CDR3 for beta chain variable domain of TCR clone 234075 (TRBV28, TRBJ2-1)
CASTPIGRSPGLAGGNEQFF

SEQ ID NO: 468151 - protein, 12 aa, Homo sapiens
  CDR3 for alpha chain variable domain of TCR clone 234076 (TRAV1-2, TRAJ11)
CAVDSGYSTLTF

SEQ ID NO: 468152 - protein, 17 aa, Homo sapiens
  CDR3 for beta chain variable domain of TCR clone 234076 (TRBV4-1, TRBJ2-3)
CASSQGYVSGGTDTQYF

SEQ ID NO: 468153 - protein, 16 aa, Homo sapiens
  CDR3 for alpha chain variable domain of TCR clone 234077 (TRAV1-2, TRAJ10)
CAVGAVLTGGGNKLTF

SEQ ID NO: 468154 - protein, 12 aa, Homo sapiens
  CDR3 for beta chain variable domain of TCR clone 234077 (TRBV7-8, TRBJ2-7)
CASSLGDREQYF

SEQ ID NO: 468155 - protein, 16 aa, Homo sapiens
  CDR3 for alpha chain variable domain of TCR clone 234078 (TRAV8-4, TRAJ9)
CAVTFNTGGFKDYLWS

SEQ ID NO: 468156 - protein, 14 aa, Homo sapiens
  CDR3 for beta chain variable domain of TCR clone 234078 (TRBV7-2, TRBJ2-7)
CASSPKTSFYEQYF

SEQ ID NO: 468157 - protein, 14 aa, Homo sapiens
  CDR3 for alpha chain variable domain of TCR clone 234079 (TRAV26-1, TRAJ34)
CIVRVAYNTDKLIF

SEQ ID NO: 468158 - protein, 13 aa, Homo sapiens
  CDR3 for beta chain variable domain of TCR clone 234079 (TRBV19, TRBJ1-2)
CASSVPGQDGYTF

SEQ ID NO: 468159 - protein, 14 aa, Homo sapiens
  CDR3 for alpha chain variable domain of TCR clone 234080 (TRAV8-3, TRAJ4)
CAVCAAGGYNKLIF

SEQ ID NO: 468160 - protein, 16 aa, Homo sapiens
  CDR3 for beta chain variable domain of TCR clone 234080 (TRBV12-5, TRBJ2-5)
CASGPRTSGNQETQYF

SEQ ID NO: 468161 - protein, 16 aa, Homo sapiens
  CDR3 for alpha chain variable domain of TCR clone 234081 (TRAV14/DV4, TRAJ53)
CAMREGGGGSNYKLTF

SEQ ID NO: 468162 - protein, 12 aa, Homo sapiens
  CDR3 for beta chain variable domain of TCR clone 234081 (TRBV7-6, TRBJ2-7)
CASSLADSEQYF

SEQ ID NO: 468163 - protein, 16 aa, Homo sapiens
  CDR3 for alpha chain variable domain of TCR clone 234082 (TRAV30, TRAJ24)
CGTEIVDADSWGKFQF

SEQ ID NO: 468164 - protein, 17 aa, Homo sapiens
  CDR3 for beta chain variable domain of TCR clone 234082 (TRBV11-2, TRBJ2-4)
CASSFLALGGAGDIQYF

SEQ ID NO: 468165 - protein, 16 aa, Homo sapiens
  CDR3 for alpha chain variable domain of TCR clone 234083 (TRAV13-1, TRAJ39)
CAASIVMQATCSPLEG

SEQ ID NO: 468166 - protein, 16 aa, Homo sapiens
  CDR3 for beta chain variable domain of TCR clone 234083 (TRBV20-1, TRBJ1-4)
CSAPGQDLLTNEKLFF

SEQ ID NO: 468167 - protein, 14 aa, Homo sapiens
  CDR3 for alpha chain variable domain of TCR clone 234084 (TRAV1-2, TRAJ16)
CAVNRFSDCQKLLF

SEQ ID NO: 468168 - protein, 14 aa, Homo sapiens
  CDR3 for beta chain variable domain of TCR clone 234084 (TRBV3-1, TRBJ2-5)
CASSQGPDQETQYF

SEQ ID NO: 468169 - protein, 12 aa, Homo sapiens
  CDR3 for alpha chain variable domain of TCR clone 234085 (TRAV8-3, TRAJ26)
CAGDNYGQNFVF

SEQ ID NO: 468170 - protein, 16 aa, Homo sapiens
  CDR3 for beta chain variable domain of TCR clone 234085 (TRBV28, TRBJ2-7)
CASSLFFETGGPEQYF

SEQ ID NO: 468171 - protein, 12 aa, Homo sapiens
  CDR3 for alpha chain variable domain of TCR clone 234086 (TRAV12-2, TRAJ16)
CAVAPDGQKLLF

SEQ ID NO: 468172 - protein, 16 aa, Homo sapiens
  CDR3 for beta chain variable domain of TCR clone 234086 (TRBV12-5, TRBJ2-5)
CASGPRTSGNQETQYF

SEQ ID NO: 468173 - protein, 14 aa, Homo sapiens
  CDR3 for alpha chain variable domain of TCR clone 234087 (TRAV12-3, TRAJ10)
SLLPLTGGGNKLTF

SEQ ID NO: 468174 - protein, 12 aa, Homo sapiens
  CDR3 for beta chain variable domain of TCR clone 234087 (TRBV11-2, TRBJ2-2)
CASSLGGGELFF

SEQ ID NO: 468175 - protein, 13 aa, Homo sapiens
  CDR3 for alpha chain variable domain of TCR clone 234088 (TRAV13-2, TRAJ53)
CAENMGSTYKLTF

SEQ ID NO: 468176 - protein, 13 aa, Homo sapiens
  CDR3 for beta chain variable domain of TCR clone 234088 (TRBV4-1, TRBJ2-2)
CASSQQNTGELFF

SEQ ID NO: 468177 - protein, 14 aa, Homo sapiens
  CDR3 for alpha chain variable domain of TCR clone 234089 (TRAV12-3, TRAJ22)
CAMSLFGSARQLTF

SEQ ID NO: 468178 - protein, 11 aa, Homo sapiens
  CDR3 for beta chain variable domain of TCR clone 234089 (TRBV12-4, TRBJ2-2)
CASSSAGVLFF

SEQ ID NO: 468179 - protein, 14 aa, Homo sapiens
  CDR3 for alpha chain variable domain of TCR clone 234090 (TRAV12-2, TRAJ26)
CAVNDDNYGQNFVF

SEQ ID NO: 468180 - protein, 15 aa, Homo sapiens
  CDR3 for beta chain variable domain of TCR clone 234090 (TRBV7-2, TRBJ1-2)
CASSLVSGGDYGYTF

SEQ ID NO: 468181 - protein, 13 aa, Homo sapiens
  CDR3 for alpha chain variable domain of TCR clone 234091 (TRAV13-1, TRAJ5)
CAASDTGRRALTF

SEQ ID NO: 468182 - protein, 15 aa, Homo sapiens
  CDR3 for beta chain variable domain of TCR clone 234091 (TRBV5-1, TRBJ2-7)
CASSLNGGPAREQYF

SEQ ID NO: 468183 - protein, 14 aa, Homo sapiens
  CDR3 for alpha chain variable domain of TCR clone 234092 (TRAV12-2, TRAJ40)
CAVKIPPGTYNYIF

SEQ ID NO: 468184 - protein, 14 aa, Homo sapiens
  CDR3 for beta chain variable domain of TCR clone 234092 (TRBV20-1, TRBJ1-1)
CSAQTRIGGTEAFF

SEQ ID NO: 468185 - protein, 15 aa, Homo sapiens
  CDR3 for alpha chain variable domain of TCR clone 234093 (TRAV17, TRAJ57)
CATGPSQGGSEKLFF

SEQ ID NO: 468186 - protein, 15 aa, Homo sapiens
  CDR3 for beta chain variable domain of TCR clone 234093 (TRBV9, TRBJ1-6)
CASSVAGTGDSPLHF

SEQ ID NO: 468187 - protein, 12 aa, Homo sapiens
  CDR3 for alpha chain variable domain of TCR clone 234094 (TRAV21, TRAJ11)
CAATSGYSTPTF

SEQ ID NO: 468188 - protein, 14 aa, Homo sapiens
  CDR3 for beta chain variable domain of TCR clone 234094 (TRBV20-1, TRBJ2-7)
CSAPALAGVGEQYF

SEQ ID NO: 468189 - protein, 19 aa, Homo sapiens
  CDR3 for alpha chain variable domain of TCR clone 234095 (TRAV29/DV5, TRAJ53)
CSVLLCSKPDRGSNYKLTF

SEQ ID NO: 468190 - protein, 15 aa, Homo sapiens
  CDR3 for beta chain variable domain of TCR clone 234095 (TRBV19, TRBJ2-4)
CASSIRLAGANIQYF

SEQ ID NO: 468191 - protein, 18 aa, Homo sapiens
  CDR3 for alpha chain variable domain of TCR clone 234096 (TRAV3, TRAJ17)
CAVRARRGGRSCRQQANF

SEQ ID NO: 468192 - protein, 13 aa, Homo sapiens
  CDR3 for beta chain variable domain of TCR clone 234096 (TRBV19, TRBJ2-7)
CASSPRQSYEQYF

SEQ ID NO: 468193 - protein, 15 aa, Homo sapiens
  CDR3 for alpha chain variable domain of TCR clone 234097 (TRAV20, TRAJ41)
CAVQANSNSGYALNF

SEQ ID NO: 468194 - protein, 18 aa, Homo sapiens
  CDR3 for beta chain variable domain of TCR clone 234097 (TRBV7-9, TRBJ2-7)
CASSLTTSGSRRWYEQYF

SEQ ID NO: 468195 - protein, 14 aa, Homo sapiens
  CDR3 for alpha chain variable domain of TCR clone 234098 (TRAV8-4, TRAJ43)
CAVSDPRNNNDMRF

SEQ ID NO: 468196 - protein, 15 aa, Homo sapiens
  CDR3 for beta chain variable domain of TCR clone 234098 (TRBV4-2, TRBJ1-2)
CASSQRTGGSDGYTF

SEQ ID NO: 468197 - protein, 22 aa, Homo sapiens
  CDR3 for alpha chain variable domain of TCR clone 234099 (TRAV26-1, TRAJ42)
CIVRPIKEEDKEISSLEKALNS

SEQ ID NO: 468198 - protein, 16 aa, Homo sapiens
  CDR3 for beta chain variable domain of TCR clone 234099 (TRBV7-3, TRBJ2-2)
CASSLKRGTLSGELFF

SEQ ID NO: 468199 - protein, 18 aa, Homo sapiens
  CDR3 for alpha chain variable domain of TCR clone 234100 (TRAV8-4, TRAJ52)
CAVTRANAGGTSYGKLTF

SEQ ID NO: 468200 - protein, 14 aa, Homo sapiens
  CDR3 for beta chain variable domain of TCR clone 234100 (TRBV7-9, TRBJ2-1)
CASSPRDSLYEQFF

SEQ ID NO: 468201 - protein, 15 aa, Homo sapiens
  CDR3 for alpha chain variable domain of TCR clone 234101 (TRAV21, TRAJ53)
CATLNSGGSNYKLTF

SEQ ID NO: 468202 - protein, 13 aa, Homo sapiens
  CDR3 for beta chain variable domain of TCR clone 234101 (TRBV20-1, TRBJ2-7)
CSATGQVHYEQYF

SEQ ID NO: 468203 - protein, 15 aa, Homo sapiens
  CDR3 for alpha chain variable domain of TCR clone 234102 (TRAV17, TRAJ10)
CATVLLTGGGNKLTF

SEQ ID NO: 468204 - protein, 15 aa, Homo sapiens
  CDR3 for beta chain variable domain of TCR clone 234102 (TRBV27, TRBJ2-1)
CASSNGGGSSNEQFF

SEQ ID NO: 468205 - protein, 13 aa, Homo sapiens
  CDR3 for alpha chain variable domain of TCR clone 234103 (TRAV12-1, TRAJ33)
CGDAPDSNYQLIW

SEQ ID NO: 468206 - protein, 13 aa, Homo sapiens
  CDR3 for beta chain variable domain of TCR clone 234103 (TRBV4-1, TRBJ2-2)
CASSQENTGELFF

SEQ ID NO: 468207 - protein, 14 aa, Homo sapiens
  CDR3 for alpha chain variable domain of TCR clone 234104 (TRAV8-2, TRAJ40)
CCVGTTSGTYKYIF

SEQ ID NO: 468208 - protein, 16 aa, Homo sapiens
  CDR3 for beta chain variable domain of TCR clone 234104 (TRBV7-3, TRBJ2-1)
CASSLEGYRSYNEQFF

SEQ ID NO: 468209 - protein, 14 aa, Homo sapiens
  CDR3 for alpha chain variable domain of TCR clone 234105 (TRAV8-3, TRAJ47)
CAVVRRDMETNWSF

SEQ ID NO: 468210 - protein, 14 aa, Homo sapiens
  CDR3 for beta chain variable domain of TCR clone 234105 (TRBV6-5, TRBJ2-7)
CASSSGVPPYEQYF

SEQ ID NO: 468211 - protein, 14 aa, Homo sapiens
  CDR3 for alpha chain variable domain of TCR clone 234106 (TRAV8-4, TRAJ9)
CAVRVTTGGFKTIF

SEQ ID NO: 468212 - protein, 15 aa, Homo sapiens
  CDR3 for beta chain variable domain of TCR clone 234106 (TRBV10-2, TRBJ2-6)
CASSEQGTGANVLTF

SEQ ID NO: 468213 - protein, 14 aa, Homo sapiens
  CDR3 for alpha chain variable domain of TCR clone 234107 (TRAV8-3, TRAJ15)
CAVGRHQAGTALIF

SEQ ID NO: 468214 - protein, 13 aa, Homo sapiens
  CDR3 for beta chain variable domain of TCR clone 234107 (TRBV12-4, TRBJ2-7)
CASSPTETYEQYF

SEQ ID NO: 468215 - protein, 15 aa, Homo sapiens
  CDR3 for alpha chain variable domain of TCR clone 234108 (TRAV1-2, TRAJ30)
CAVRPHWNRDDKIIF

SEQ ID NO: 468216 - protein, 13 aa, Homo sapiens
  CDR3 for beta chain variable domain of TCR clone 234108 (TRBV4-1, TRBJ2-7)
CASSQGQAYEQYF

SEQ ID NO: 468217 - protein, 23 aa, Homo sapiens
  CDR3 for alpha chain variable domain of TCR clone 234109 (TRAV2, TRAJ9)
CAVRIEVLEASKLSLEQEQDYLL

SEQ ID NO: 468218 - protein, 14 aa, Homo sapiens
  CDR3 for beta chain variable domain of TCR clone 234109 (TRBV4-1, TRBJ2-2)
CASSQAVNTGELFF

SEQ ID NO: 468219 - protein, 15 aa, Homo sapiens
  CDR3 for alpha chain variable domain of TCR clone 234110 (TRAV12-3, TRAJ53)
CNERLIEGSNYKLTF

SEQ ID NO: 468220 - protein, 13 aa, Homo sapiens
  CDR3 for beta chain variable domain of TCR clone 234110 (TRBV15, TRBJ1-1)
CATSRGIQARAFF

SEQ ID NO: 468221 - protein, 11 aa, Homo sapiens
  CDR3 for alpha chain variable domain of TCR clone 234111 (TRAV16, TRAJ31)
CALFNNARLMF

SEQ ID NO: 468222 - protein, 14 aa, Homo sapiens
  CDR3 for beta chain variable domain of TCR clone 234111 (TRBV15, TRBJ1-1)
CATSREWGNAEAFF

SEQ ID NO: 468223 - protein, 14 aa, Homo sapiens
  CDR3 for alpha chain variable domain of TCR clone 234112 (TRAV23/DV6, TRAJ4)
CAAPSSGGYNKLIF

SEQ ID NO: 468224 - protein, 16 aa, Homo sapiens
  CDR3 for beta chain variable domain of TCR clone 234112 (TRBV19, TRBJ1-1)
CASRFGGPVTGTEASF

SEQ ID NO: 468225 - protein, 14 aa, Homo sapiens
  CDR3 for alpha chain variable domain of TCR clone 234113 (TRAV17, TRAJ6)
CATNPAGGSYIPTF

SEQ ID NO: 468226 - protein, 15 aa, Homo sapiens
  CDR3 for beta chain variable domain of TCR clone 234113 (TRBV20-1, TRBJ2-5)
CSAEGAGGLQETQYF

SEQ ID NO: 468227 - protein, 17 aa, Homo sapiens
  CDR3 for alpha chain variable domain of TCR clone 234114 (TRAV3, TRAJ6)
CAVRDGPRAGGSYIHTF

SEQ ID NO: 468228 - protein, 14 aa, Homo sapiens
  CDR3 for beta chain variable domain of TCR clone 234114 (TRBV7-2, TRBJ2-7)
CASSPKTRFYEQYF

SEQ ID NO: 468229 - protein, 16 aa, Homo sapiens
  CDR3 for alpha chain variable domain of TCR clone 234115 (TRAV21, TRAJ52)
CAVTNAGGTSYGKLTF

SEQ ID NO: 468230 - protein, 15 aa, Homo sapiens
  CDR3 for beta chain variable domain of TCR clone 234115 (TRBV19, TRBJ2-1)
CASSSPGVPLDEQFF

SEQ ID NO: 468231 - protein, 12 aa, Homo sapiens
  CDR3 for alpha chain variable domain of TCR clone 234116 (TRAV2, TRAJ37)
CAVAGNTGKLIF

SEQ ID NO: 468232 - protein, 17 aa, Homo sapiens
  CDR3 for beta chain variable domain of TCR clone 234116 (TRBV28, TRBJ2-5)
CASRTPGGDALQETQYF

SEQ ID NO: 468233 - protein, 12 aa, Homo sapiens
  CDR3 for alpha chain variable domain of TCR clone 234117 (TRAV21, TRAJ20)
CCGLRDDYKLSF

SEQ ID NO: 468234 - protein, 13 aa, Homo sapiens
  CDR3 for beta chain variable domain of TCR clone 234117 (TRBV6-1, TRBJ1-1)
CASSRQGNTEAFF

SEQ ID NO: 468235 - protein, 13 aa, Homo sapiens
  CDR3 for alpha chain variable domain of TCR clone 234118 (TRAV8-3, TRAJ6)
CAVVSGGSYIPTF

SEQ ID NO: 468236 - protein, 14 aa, Homo sapiens
  CDR3 for beta chain variable domain of TCR clone 234118 (TRBV11-2, TRBJ1-1)
CASSTQRGRTEAFF

SEQ ID NO: 468237 - protein, 15 aa, Homo sapiens
  CDR3 for alpha chain variable domain of TCR clone 234119 (TRAV17, TRAJ16)
CATALRFSDGQKLPL

SEQ ID NO: 468238 - protein, 15 aa, Homo sapiens
  CDR3 for beta chain variable domain of TCR clone 234119 (TRBV20-1, TRBJ1-1)
CSASRGVTGNTEAFF

SEQ ID NO: 468239 - protein, 14 aa, Homo sapiens
  CDR3 for alpha chain variable domain of TCR clone 234120 (TRAV4, TRAJ26)
CLVGPHNYGQNFVF

SEQ ID NO: 468240 - protein, 16 aa, Homo sapiens
  CDR3 for beta chain variable domain of TCR clone 234120 (TRBV7-9, TRBJ2-1)
CASSLVSGPSYNEQFF

SEQ ID NO: 468241 - protein, 13 aa, Homo sapiens
  CDR3 for alpha chain variable domain of TCR clone 234121 (TRAV16, TRAJ26)
CLTVLCLGQNFVF

SEQ ID NO: 468242 - protein, 12 aa, Homo sapiens
  CDR3 for beta chain variable domain of TCR clone 234121 (TRBV11-2, TRBJ2-1)
CASSPGNNEQFF

SEQ ID NO: 468243 - protein, 16 aa, Homo sapiens
  CDR3 for alpha chain variable domain of TCR clone 234122 (TRAV13-1, TRAJ13)
CTAFFFGVTRKLPLEL

SEQ ID NO: 468244 - protein, 15 aa, Homo sapiens
  CDR3 for beta chain variable domain of TCR clone 234122 (TRBV7-8, TRBJ2-1)
CASSLADSLYNEQFF

SEQ ID NO: 468245 - protein, 15 aa, Homo sapiens
  CDR3 for alpha chain variable domain of TCR clone 234123 (TRAV3, TRAJ3)
CAVRDRDSSASKIII

SEQ ID NO: 468246 - protein, 18 aa, Homo sapiens
  CDR3 for beta chain variable domain of TCR clone 234123 (TRBV25-1, TRBJ1-2)
CASSGLQNGQGLIFGYTF

SEQ ID NO: 468247 - protein, 18 aa, Homo sapiens
  CDR3 for alpha chain variable domain of TCR clone 234124 (TRAV13-2, TRAJ52)
CVETPRNAGGTSDGKLTF

SEQ ID NO: 468248 - protein, 14 aa, Homo sapiens
  CDR3 for beta chain variable domain of TCR clone 234124 (TRBV7-9, TRBJ2-1)
CASSSMVGFGEQFF

SEQ ID NO: 468249 - protein, 15 aa, Homo sapiens
  CDR3 for alpha chain variable domain of TCR clone 234125 (TRAV4, TRAJ26)
CLVGDMNNYGQNFVF

SEQ ID NO: 468250 - protein, 13 aa, Homo sapiens
  CDR3 for beta chain variable domain of TCR clone 234125 (TRBV10-3, TRBJ2-7)
CASKLAVNYEQYF

SEQ ID NO: 468251 - protein, 17 aa, Homo sapiens
  CDR3 for alpha chain variable domain of TCR clone 234126 (TRAV29/DV5, TRAJ34)
CAATDKLIFGTGTRLQV

SEQ ID NO: 468252 - protein, 16 aa, Homo sapiens
  CDR3 for beta chain variable domain of TCR clone 234126 (TRBV13, TRBJ2-2)
CASSPRTGEHTGELFF

SEQ ID NO: 468253 - protein, 14 aa, Homo sapiens
  CDR3 for alpha chain variable domain of TCR clone 234127 (TRAV12-2, TRAJ24)
CAVTPADSWGKLQF

SEQ ID NO: 468254 - protein, 12 aa, Homo sapiens
  CDR3 for beta chain variable domain of TCR clone 234127 (TRBV3-1, TRBJ2-1)
RASSQGSSGQFF

SEQ ID NO: 468255 - protein, 14 aa, Homo sapiens
  CDR3 for alpha chain variable domain of TCR clone 234128 (TRAV26-1, TRAJ38)
CIADNTGNNRKLIW

SEQ ID NO: 468256 - protein, 11 aa, Homo sapiens
  CDR3 for beta chain variable domain of TCR clone 234128 (TRBV2, TRBJ1-1)
CASREGTEAFF

SEQ ID NO: 468257 - protein, 13 aa, Homo sapiens
  CDR3 for alpha chain variable domain of TCR clone 234129 (TRAV23/DV6, )
CAATALIPDIQNP

SEQ ID NO: 468258 - protein, 16 aa, Homo sapiens
  CDR3 for beta chain variable domain of TCR clone 234129 (TRBV10-3, TRBJ2-7)
CAISPRGQEQTYEQYC

SEQ ID NO: 468259 - protein, 15 aa, Homo sapiens
  CDR3 for alpha chain variable domain of TCR clone 234130 (TRAV2, TRAJ24)
CAVEVLTDSWGKFQF

SEQ ID NO: 468260 - protein, 14 aa, Homo sapiens
  CDR3 for beta chain variable domain of TCR clone 234130 (TRBV19, TRBJ2-1)
CASGMGSGRRSSSS

SEQ ID NO: 468261 - protein, 13 aa, Homo sapiens
  CDR3 for alpha chain variable domain of TCR clone 234131 (TRAV3, TRAJ15)
CAVRDQAGTALIF

SEQ ID NO: 468262 - protein, 18 aa, Homo sapiens
  CDR3 for beta chain variable domain of TCR clone 234131 (TRBV11-2, TRBJ2-3)
CASSLGGASRGAPNTQYF

SEQ ID NO: 468263 - protein, 15 aa, Homo sapiens
  CDR3 for alpha chain variable domain of TCR clone 234132 (TRAV8-3, TRAJ27)
CAVGPSKTNAGKSTF

SEQ ID NO: 468264 - protein, 13 aa, Homo sapiens
  CDR3 for beta chain variable domain of TCR clone 234132 (TRBV10-2, TRBJ2-7)
CASGASGGYEQYF

SEQ ID NO: 468265 - protein, 15 aa, Homo sapiens
  CDR3 for alpha chain variable domain of TCR clone 234133 (TRAV12-3, TRAJ6)
CAMSATTGGSYIPKF

SEQ ID NO: 468266 - protein, 15 aa, Homo sapiens
  CDR3 for beta chain variable domain of TCR clone 234133 (TRBV7-3, TRBJ2-3)
CASSLTSGEADTQYF

SEQ ID NO: 468267 - protein, 11 aa, Homo sapiens
  CDR3 for alpha chain variable domain of TCR clone 234134 (TRAV21, TRAJ11)
CAVNGYSTLTF

SEQ ID NO: 468268 - protein, 15 aa, Homo sapiens
  CDR3 for beta chain variable domain of TCR clone 234134 (TRBV7-8, TRBJ2-1)
CASSLADSLYNEQFF

SEQ ID NO: 468269 - protein, 14 aa, Homo sapiens
  CDR3 for alpha chain variable domain of TCR clone 234135 (TRAV13-1, TRAJ35)
CAASKGGFGNVQHC

SEQ ID NO: 468270 - protein, 13 aa, Homo sapiens
  CDR3 for beta chain variable domain of TCR clone 234135 (TRBV7-3, TRBJ1-1)
CASSQDWGAEALF

SEQ ID NO: 468271 - protein, 14 aa, Homo sapiens
  CDR3 for alpha chain variable domain of TCR clone 234136 (TRAV26-1, TRAJ21)
CIVRVVYNFNKFYF

SEQ ID NO: 468272 - protein, 16 aa, Homo sapiens
  CDR3 for beta chain variable domain of TCR clone 234136 (TRBV7-3, TRBJ2-2)
CASSLKRGTLSGELFF

SEQ ID NO: 468273 - protein, 15 aa, Homo sapiens
  CDR3 for alpha chain variable domain of TCR clone 234137 (TRAV23/DV6, TRAJ13)
CAAWPGGGGYQKVTF

SEQ ID NO: 468274 - protein, 14 aa, Homo sapiens
  CDR3 for beta chain variable domain of TCR clone 234137 (TRBV7-2, TRBJ1-1)
CASSFLTGTTEDFF

SEQ ID NO: 468275 - protein, 15 aa, Homo sapiens
  CDR3 for alpha chain variable domain of TCR clone 234138 (TRAV29/DV5, TRAJ42)
CAAKTDGGSQGNLIF

SEQ ID NO: 468276 - protein, 14 aa, Homo sapiens
  CDR3 for beta chain variable domain of TCR clone 234138 (TRBV20-1, TRBJ1-1)
CSAQTRIGGTESFF

SEQ ID NO: 468277 - protein, 15 aa, Homo sapiens
  CDR3 for alpha chain variable domain of TCR clone 234139 (TRAV8-3, TRAJ10)
CAVAVLTGGGNKLTF

SEQ ID NO: 468278 - protein, 15 aa, Homo sapiens
  CDR3 for beta chain variable domain of TCR clone 234139 (TRBV20-1, TRBJ2-7)
CSARVPAAYFYEQYF

SEQ ID NO: 468279 - protein, 23 aa, Homo sapiens
  CDR3 for alpha chain variable domain of TCR clone 234140 (TRAV26-1, TRAJ38)
CIADNAGNNHIQNPDPAAYQLRD

SEQ ID NO: 468280 - protein, 13 aa, Homo sapiens
  CDR3 for beta chain variable domain of TCR clone 234140 (TRBV20-1, TRBJ1-1)
CSARGGGNTEALF

SEQ ID NO: 468281 - protein, 12 aa, Homo sapiens
  CDR3 for alpha chain variable domain of TCR clone 234141 (TRAV16, TRAJ17)
CAPSAAGNKLTF

SEQ ID NO: 468282 - protein, 13 aa, Homo sapiens
  CDR3 for beta chain variable domain of TCR clone 234141 (TRBV12-4, TRBJ1-1)
CASSPGTGFEAFF

SEQ ID NO: 468283 - protein, 15 aa, Homo sapiens
  CDR3 for alpha chain variable domain of TCR clone 234142 (TRAV8-3, TRAJ34)
DAAEYSCAIPGKFIF

SEQ ID NO: 468284 - protein, 15 aa, Homo sapiens
  CDR3 for beta chain variable domain of TCR clone 234142 (TRBV5-7, TRBJ2-1)
CASSRRLAGDNEQFF

SEQ ID NO: 468285 - protein, 11 aa, Homo sapiens
  CDR3 for alpha chain variable domain of TCR clone 234143 (TRAV2, TRAJ21)
CAVFNFNKFYF

SEQ ID NO: 468286 - protein, 15 aa, Homo sapiens
  CDR3 for beta chain variable domain of TCR clone 234143 (TRBV12-4, TRBJ2-1)
CASSLLGRTYNEQFF

SEQ ID NO: 468287 - protein, 18 aa, Homo sapiens
  CDR3 for alpha chain variable domain of TCR clone 234144 (TRAV9-2, TRAJ52)
CALSRHNVGGTSYGKLTF

SEQ ID NO: 468288 - protein, 16 aa, Homo sapiens
  CDR3 for beta chain variable domain of TCR clone 234144 (TRBV19, TRBJ2-1)
CASSKAGPSSYNEQFF

SEQ ID NO: 468289 - protein, 14 aa, Homo sapiens
  CDR3 for alpha chain variable domain of TCR clone 234145 (TRAV1-2, TRAJ16)
CAVNRFSDGQKLLV

SEQ ID NO: 468290 - protein, 16 aa, Homo sapiens
  CDR3 for beta chain variable domain of TCR clone 234145 (TRBV13, TRBJ2-2)
CASSTRTGEHTGELFF

SEQ ID NO: 468291 - protein, 14 aa, Homo sapiens
  CDR3 for alpha chain variable domain of TCR clone 234146 (TRAV1-2, TRAJ27)
CAPAEYTNAGKSTF

SEQ ID NO: 468292 - protein, 18 aa, Homo sapiens
  CDR3 for beta chain variable domain of TCR clone 234146 (TRBV28, TRBJ1-2)
CASRQQQGKRGSNYGYTL

SEQ ID NO: 468293 - protein, 16 aa, Homo sapiens
  CDR3 for alpha chain variable domain of TCR clone 234147 (TRAV3, TRAJ37)
CAMRGRGSGNTGKLIF

SEQ ID NO: 468294 - protein, 14 aa, Homo sapiens
  CDR3 for beta chain variable domain of TCR clone 234147 (TRBV20-1, TRBJ2-3)
CSARGGTSTDTQYF

SEQ ID NO: 468295 - protein, 14 aa, Homo sapiens
  CDR3 for alpha chain variable domain of TCR clone 234148 (TRAV20, TRAJ56)
CAVQFGGANSKLTF

SEQ ID NO: 468296 - protein, 15 aa, Homo sapiens
  CDR3 for beta chain variable domain of TCR clone 234148 (TRBV28, TRBJ2-1)
CASSGLAKVDNEQFF

SEQ ID NO: 468297 - protein, 15 aa, Homo sapiens
  CDR3 for alpha chain variable domain of TCR clone 234149 (TRAV8-3, TRAJ45)
CAVSYSGGGADGLTF

SEQ ID NO: 468298 - protein, 13 aa, Homo sapiens
  CDR3 for beta chain variable domain of TCR clone 234149 (TRBV10-3, TRBJ2-7)
CASKLAVNYEQYF

SEQ ID NO: 468299 - protein, 15 aa, Homo sapiens
  CDR3 for alpha chain variable domain of TCR clone 234150 (TRAV26-1, TRAJ29)
CIVRVEVSGNTPLVF

SEQ ID NO: 468300 - protein, 15 aa, Homo sapiens
  CDR3 for beta chain variable domain of TCR clone 234150 (TRBV7-9, TRBJ1-5)
CASSQGHQPNQAQHF

SEQ ID NO: 468301 - protein, 11 aa, Homo sapiens
  CDR3 for alpha chain variable domain of TCR clone 234151 (TRAV2, TRAJ20)
CAVLNDYKLSF

SEQ ID NO: 468302 - protein, 13 aa, Homo sapiens
  CDR3 for beta chain variable domain of TCR clone 234151 (TRBV6-9, TRBJ2-5)
CASKGDGRRTQYF

SEQ ID NO: 468303 - protein, 12 aa, Homo sapiens
  CDR3 for alpha chain variable domain of TCR clone 234152 (TRAV13-1, TRAJ48)
CAANFGNEKLTF

SEQ ID NO: 468304 - protein, 12 aa, Homo sapiens
  CDR3 for beta chain variable domain of TCR clone 234152 (TRBV29-1, TRBJ2-3)
CSVTGGADTQYF

SEQ ID NO: 468305 - protein, 11 aa, Homo sapiens
  CDR3 for alpha chain variable domain of TCR clone 234153 (TRAV12-1, TRAJ43)
CVEYDNNDMRF

SEQ ID NO: 468306 - protein, 14 aa, Homo sapiens
  CDR3 for beta chain variable domain of TCR clone 234153 (TRBV18, TRBJ2-5)
CASSPGVSQETQYF

SEQ ID NO: 468307 - protein, 13 aa, Homo sapiens
  CDR3 for alpha chain variable domain of TCR clone 234154 (TRAV12-3, TRAJ33)
CAMSVNSNYQLIW

SEQ ID NO: 468308 - protein, 19 aa, Homo sapiens
  CDR3 for beta chain variable domain of TCR clone 234154 (TRBV7-2, TRBJ2-3)
CASSSQGGPRLAGADTQYF

SEQ ID NO: 468309 - protein, 10 aa, Homo sapiens
  CDR3 for alpha chain variable domain of TCR clone 234155 (TRAV2, TRAJ34)
CAVVNDKLIF

SEQ ID NO: 468310 - protein, 12 aa, Homo sapiens
  CDR3 for beta chain variable domain of TCR clone 234155 (TRBV9, TRBJ2-2)
CASSAYTGELFF

SEQ ID NO: 468311 - protein, 12 aa, Homo sapiens
  CDR3 for alpha chain variable domain of TCR clone 234156 (TRAV12-1, TRAJ40)
CVVYSGTYKYIF

SEQ ID NO: 468312 - protein, 14 aa, Homo sapiens
  CDR3 for beta chain variable domain of TCR clone 234156 (TRBV3-1, TRBJ2-7)
CASCPSSGTYEQYF

SEQ ID NO: 468313 - protein, 11 aa, Homo sapiens
  CDR3 for alpha chain variable domain of TCR clone 234157 (TRAV4, TRAJ21)
CLINNFNKFYF

SEQ ID NO: 468314 - protein, 13 aa, Homo sapiens
  CDR3 for beta chain variable domain of TCR clone 234157 (TRBV6-1, TRBJ2-7)
CASSADTSYERYF

SEQ ID NO: 468315 - protein, 15 aa, Homo sapiens
  CDR3 for alpha chain variable domain of TCR clone 234158 (TRAV12-2, TRAJ32)
CRELGPSGATNKLIF

SEQ ID NO: 468316 - protein, 12 aa, Homo sapiens
  CDR3 for beta chain variable domain of TCR clone 234158 (TRBV29-1, TRBJ2-3)
CSVTGGADTQYF

SEQ ID NO: 468317 - protein, 14 aa, Homo sapiens
  CDR3 for alpha chain variable domain of TCR clone 234159 (TRAV13-1, TRAJ26)
CAASSAHYGQNFVF

SEQ ID NO: 468318 - protein, 16 aa, Homo sapiens
  CDR3 for beta chain variable domain of TCR clone 234159 (TRBV7-3, TRBJ2-2)
CASSLKRGTLSGELFF

SEQ ID NO: 468319 - protein, 14 aa, Homo sapiens
  CDR3 for alpha chain variable domain of TCR clone 234160 (TRAV20, TRAJ18)
CAVGRGSTLGRLYF

SEQ ID NO: 468320 - protein, 14 aa, Homo sapiens
  CDR3 for beta chain variable domain of TCR clone 234160 (TRBV28, TRBJ2-4)
CASTHVTGVNIQYF

SEQ ID NO: 468321 - protein, 12 aa, Homo sapiens
  CDR3 for alpha chain variable domain of TCR clone 234161 (TRAV1-2, TRAJ33)
CAALDSNYRLIW

SEQ ID NO: 468322 - protein, 18 aa, Homo sapiens
  CDR3 for beta chain variable domain of TCR clone 234161 (TRBV20-1, TRBJ2-6)
CSAETTPTHGSGANVLTF

SEQ ID NO: 468323 - protein, 14 aa, Homo sapiens
  CDR3 for alpha chain variable domain of TCR clone 234162 (TRAV12-2, TRAJ40)
CAVKIPSGTYKYIF

SEQ ID NO: 468324 - protein, 20 aa, Homo sapiens
  CDR3 for beta chain variable domain of TCR clone 234162 (TRBV28, TRBJ2-1)
CASTPIGRSPGLAGGNEQFF

SEQ ID NO: 468325 - protein, 14 aa, Homo sapiens
  CDR3 for alpha chain variable domain of TCR clone 234163 (TRAV12-3, TRAJ10)
SHLPLTGGGNKLTF

SEQ ID NO: 468326 - protein, 15 aa, Homo sapiens
  CDR3 for beta chain variable domain of TCR clone 234163 (TRBV6-6, TRBJ1-5)
CASSSIQGTKQPQHF

SEQ ID NO: 468327 - protein, 14 aa, Homo sapiens
  CDR3 for alpha chain variable domain of TCR clone 234164 (TRAV8-3, TRAJ23)
CAVIIYNQGGKLIF

SEQ ID NO: 468328 - protein, 15 aa, Homo sapiens
  CDR3 for beta chain variable domain of TCR clone 234164 (TRBV18, TRBJ2-1)
CASSPPSASYNEPFF

SEQ ID NO: 468329 - protein, 14 aa, Homo sapiens
  CDR3 for alpha chain variable domain of TCR clone 234165 (TRAV12-3, TRAJ42)
CAMNYGGSQGNLIF

SEQ ID NO: 468330 - protein, 13 aa, Homo sapiens
  CDR3 for beta chain variable domain of TCR clone 234165 (TRBV20-1, TRBJ1-6)
CSAPWRVGSPLHF

SEQ ID NO: 468331 - protein, 14 aa, Homo sapiens
  CDR3 for alpha chain variable domain of TCR clone 234166 (TRAV1-2, TRAJ16)
CAVNRFSDGQKLLF

SEQ ID NO: 468332 - protein, 16 aa, Homo sapiens
  CDR3 for beta chain variable domain of TCR clone 234166 (TRBV9, TRBJ1-1)
CASSQAGFGMNTEAFF

SEQ ID NO: 468333 - protein, 10 aa, Homo sapiens
  CDR3 for alpha chain variable domain of TCR clone 234167 (TRAV2, TRAJ31)
CAVEDLRITM

SEQ ID NO: 468334 - protein, 13 aa, Homo sapiens
  CDR3 for beta chain variable domain of TCR clone 234167 (TRBV28, TRBJ2-7)
CASTPGLAGEQYF

SEQ ID NO: 468335 - protein, 11 aa, Homo sapiens
  CDR3 for alpha chain variable domain of TCR clone 234168 (TRAV12-3, TRAJ16)
CAIRDGQKLLF

SEQ ID NO: 468336 - protein, 18 aa, Homo sapiens
  CDR3 for beta chain variable domain of TCR clone 234168 (TRBV7-2, TRBJ2-3)
CASSLKREGSGITDTQYF

SEQ ID NO: 468337 - protein, 12 aa, Homo sapiens
  CDR3 for alpha chain variable domain of TCR clone 234169 (TRAV13-1, TRAJ21)
CAAKEGFNKCYF

SEQ ID NO: 468338 - protein, 14 aa, Homo sapiens
  CDR3 for beta chain variable domain of TCR clone 234169 (TRBV5-4, TRBJ1-1)
CASSLDSRRDEAFF

SEQ ID NO: 468339 - protein, 12 aa, Homo sapiens
  CDR3 for alpha chain variable domain of TCR clone 234170 (TRAV25, TRAJ45)
DYSGGGADGLTF

SEQ ID NO: 468340 - protein, 21 aa, Homo sapiens
  CDR3 for beta chain variable domain of TCR clone 234170 (TRBV28, TRBJ2-7)
CASSYSGTSRLGWVYEQYLGR

SEQ ID NO: 468341 - protein, 16 aa, Homo sapiens
  CDR3 for alpha chain variable domain of TCR clone 234171 (TRAV1-2, TRAJ10)
CAVRGVLTGGGNKLTL

SEQ ID NO: 468342 - protein, 12 aa, Homo sapiens
  CDR3 for beta chain variable domain of TCR clone 234171 (TRBV7-8, TRBJ2-7)
CASSLGDREKYF

SEQ ID NO: 468343 - protein, 13 aa, Homo sapiens
  CDR3 for alpha chain variable domain of TCR clone 234172 (TRAV12-2, TRAJ39)
CAVTDNAGNMLTF

SEQ ID NO: 468344 - protein, 15 aa, Homo sapiens
  CDR3 for beta chain variable domain of TCR clone 234172 (TRBV7-6, TRBJ1-5)
CASSQSSGINQPQHF

SEQ ID NO: 468345 - protein, 15 aa, Homo sapiens
  CDR3 for alpha chain variable domain of TCR clone 234173 (TRAV8-4, TRAJ13)
CAVSDWGGGYQKVTF

SEQ ID NO: 468346 - protein, 14 aa, Homo sapiens
  CDR3 for beta chain variable domain of TCR clone 234173 (TRBV7-2, TRBJ2-7)
CASSPKTSFYEQYF

SEQ ID NO: 468347 - protein, 14 aa, Homo sapiens
  CDR3 for alpha chain variable domain of TCR clone 234174 (TRAV29/DV5, TRAJ28)
CAARAGAGSYQLTF

SEQ ID NO: 468348 - protein, 14 aa, Homo sapiens
  CDR3 for beta chain variable domain of TCR clone 234174 (TRBV6-3, TRBJ1-1)
CASSYHSKNTEAFF

SEQ ID NO: 468349 - protein, 12 aa, Homo sapiens
  CDR3 for alpha chain variable domain of TCR clone 234175 (TRAV26-1, TRAJ17)
CISQSCRQQSNF

SEQ ID NO: 468350 - protein, 16 aa, Homo sapiens
  CDR3 for beta chain variable domain of TCR clone 234175 (TRBV28, TRBJ1-4)
CASSSRTGAANEKLFF

SEQ ID NO: 468351 - protein, 14 aa, Homo sapiens
  CDR3 for alpha chain variable domain of TCR clone 234176 (TRAV13-2, TRAJ17)
CAENSKAAGNKLTF

SEQ ID NO: 468352 - protein, 11 aa, Homo sapiens
  CDR3 for beta chain variable domain of TCR clone 234176 (TRBV6-3, TRBJ2-3)
CDTGQADTQYF

SEQ ID NO: 468353 - protein, 15 aa, Homo sapiens
  CDR3 for alpha chain variable domain of TCR clone 234177 (TRAV3, TRAJ22)
CAVRDRGGSAGQLTF

SEQ ID NO: 468354 - protein, 17 aa, Homo sapiens
  CDR3 for beta chain variable domain of TCR clone 234177 (TRBV28, TRBJ2-5)
CASSTPEGDALQETQYF

SEQ ID NO: 468355 - protein, 15 aa, Homo sapiens
  CDR3 for alpha chain variable domain of TCR clone 234178 (TRAV21, TRAJ24)
CAARSSTDSWGKLQL

SEQ ID NO: 468356 - protein, 13 aa, Homo sapiens
  CDR3 for beta chain variable domain of TCR clone 234178 (TRBV7-9, TRBJ1-2)
CASSLKQNYGYTF

SEQ ID NO: 468357 - protein, 14 aa, Homo sapiens
  CDR3 for alpha chain variable domain of TCR clone 234179 (TRAV1-2, TRAJ16)
CAVNRVSDGQKLLF

SEQ ID NO: 468358 - protein, 13 aa, Homo sapiens
  CDR3 for beta chain variable domain of TCR clone 234179 (TRBV12-5, TRBJ2-3)
CASGDRQSDTQYF

SEQ ID NO: 468359 - protein, 15 aa, Homo sapiens
  CDR3 for alpha chain variable domain of TCR clone 234180 (TRAV12-3, TRAJ42)
CAMSGHGGSQGNLIF

SEQ ID NO: 468360 - protein, 14 aa, Homo sapiens
  CDR3 for beta chain variable domain of TCR clone 234180 (TRBV18, TRBJ2-5)
CASSPGVSQETQYF

SEQ ID NO: 468361 - protein, 15 aa, Homo sapiens
  CDR3 for alpha chain variable domain of TCR clone 234181 (TRAV3, TRAJ5)
CAVRDLDTGRRALTF

SEQ ID NO: 468362 - protein, 14 aa, Homo sapiens
  CDR3 for beta chain variable domain of TCR clone 234181 (TRBV25-1, TRBJ1-1)
SASTHLGGNTEAFF

SEQ ID NO: 468363 - protein, 11 aa, Homo sapiens
  CDR3 for alpha chain variable domain of TCR clone 234182 (TRAV3, TRAJ21)
CAVGNFNKFYY

SEQ ID NO: 468364 - protein, 16 aa, Homo sapiens
  CDR3 for beta chain variable domain of TCR clone 234182 (TRBV19, TRBJ2-1)
CANSKAGPSAYNEQFF

SEQ ID NO: 468365 - protein, 14 aa, Homo sapiens
  CDR3 for alpha chain variable domain of TCR clone 234183 (TRAV21, TRAJ58)
CAVRRGRSGSRLTF

SEQ ID NO: 468366 - protein, 13 aa, Homo sapiens
  CDR3 for beta chain variable domain of TCR clone 234183 (TRBV7-9, TRBJ1-4)
CASSLPGTEKLFF

SEQ ID NO: 468367 - protein, 13 aa, Homo sapiens
  CDR3 for alpha chain variable domain of TCR clone 234184 (TRAV12-3, TRAJ13)
WAMSSGGYQKVTF

SEQ ID NO: 468368 - protein, 16 aa, Homo sapiens
  CDR3 for beta chain variable domain of TCR clone 234184 (TRBV4-1, TRBJ2-7)
CASSRGDILNSYEQYF

SEQ ID NO: 468369 - protein, 15 aa, Homo sapiens
  CDR3 for alpha chain variable domain of TCR clone 234185 (TRAV12-2, TRAJ53)
CAVSGGGGSNYKLTF

SEQ ID NO: 468370 - protein, 17 aa, Homo sapiens
  CDR3 for beta chain variable domain of TCR clone 234185 (TRBV7-3, TRBJ2-3)
CASSLMKRMRGADTQYF

SEQ ID NO: 468371 - protein, 18 aa, Homo sapiens
  CDR3 for alpha chain variable domain of TCR clone 234186 (TRAV21, TRAJ52)
CAVRPSPPGGTSYGKLTF

SEQ ID NO: 468372 - protein, 17 aa, Homo sapiens
  CDR3 for beta chain variable domain of TCR clone 234186 (TRBV13, TRBJ2-3)
CASSLSRVAGGRNTQYL

SEQ ID NO: 468373 - protein, 15 aa, Homo sapiens
  CDR3 for alpha chain variable domain of TCR clone 234187 (TRAV21, TRAJ53)
CATLNSGGSNYKLTF

SEQ ID NO: 468374 - protein, 16 aa, Homo sapiens
  CDR3 for beta chain variable domain of TCR clone 234187 (TRBV7-6, TRBJ2-5)
CASSETSGRAVETQYF

SEQ ID NO: 468375 - protein, 15 aa, Homo sapiens
  CDR3 for alpha chain variable domain of TCR clone 234188 (TRAV3, TRAJ33)
CPSERLLLWNYQLIW

SEQ ID NO: 468376 - protein, 15 aa, Homo sapiens
  CDR3 for beta chain variable domain of TCR clone 234188 (TRBV20-1, TRBJ1-1)
CSASRGVTGNTEAFF

SEQ ID NO: 468377 - protein, 14 aa, Homo sapiens
  CDR3 for alpha chain variable domain of TCR clone 234189 (TRAV2, TRAJ9)
CAVEDRSGGFKTIF

SEQ ID NO: 468378 - protein, 12 aa, Homo sapiens
  CDR3 for beta chain variable domain of TCR clone 234189 (TRBV19, TRBJ1-1)
CASTSGGGEAFF

SEQ ID NO: 468379 - protein, 16 aa, Homo sapiens
  CDR3 for alpha chain variable domain of TCR clone 234190 (TRAV21, TRAJ37)
CAVRTAGPSHTGKLIF

SEQ ID NO: 468380 - protein, 13 aa, Homo sapiens
  CDR3 for beta chain variable domain of TCR clone 234190 (TRBV7-9, TRBJ2-5)
CASRPSGRETQYF

SEQ ID NO: 468381 - protein, 13 aa, Homo sapiens
  CDR3 for alpha chain variable domain of TCR clone 234191 (TRAV17, TRAJ9)
CATGSTGGFKTIF

SEQ ID NO: 468382 - protein, 14 aa, Homo sapiens
  CDR3 for beta chain variable domain of TCR clone 234191 (TRBV7-8, TRBJ2-7)
CASTFRGGPNEQYV

SEQ ID NO: 468383 - protein, 16 aa, Homo sapiens
  CDR3 for alpha chain variable domain of TCR clone 234192 (TRAV17, TRAJ53)
CATDALSGGSNYKLTF

SEQ ID NO: 468384 - protein, 12 aa, Homo sapiens
  CDR3 for beta chain variable domain of TCR clone 234192 (TRBV6-3, TRBJ2-7)
CASLGSYYEQYF

SEQ ID NO: 468385 - protein, 15 aa, Homo sapiens
  CDR3 for alpha chain variable domain of TCR clone 234193 (TRAV12-1, TRAJ9)
CVVSFGDTGGFKTIF

SEQ ID NO: 468386 - protein, 19 aa, Homo sapiens
  CDR3 for beta chain variable domain of TCR clone 234193 (TRBV25-1, TRBJ2-2)
CALLVYRVDRGRKTGELFF

SEQ ID NO: 468387 - protein, 12 aa, Homo sapiens
  CDR3 for alpha chain variable domain of TCR clone 234194 (TRAV23/DV6, TRAJ17)
CAAKAAGNKLNF

SEQ ID NO: 468388 - protein, 12 aa, Homo sapiens
  CDR3 for beta chain variable domain of TCR clone 234194 (TRBV19, TRBJ2-1)
CASSMQDTEQFF

SEQ ID NO: 468389 - protein, 14 aa, Homo sapiens
  CDR3 for alpha chain variable domain of TCR clone 234195 (TRAV12-2, TRAJ33)
CAVKRARSNYQLIW

SEQ ID NO: 468390 - protein, 15 aa, Homo sapiens
  CDR3 for beta chain variable domain of TCR clone 234195 (TRBV5-1, TRBJ2-2)
CASSSQGGNTGELFF

SEQ ID NO: 468391 - protein, 16 aa, Homo sapiens
  CDR3 for alpha chain variable domain of TCR clone 234196 (TRAV3, TRAJ10)
CAVRDMRAGGGNKLTF

SEQ ID NO: 468392 - protein, 13 aa, Homo sapiens
  CDR3 for beta chain variable domain of TCR clone 234196 (TRBV19, TRBJ1-2)
CASSQGQVYGDTF

SEQ ID NO: 468393 - protein, 16 aa, Homo sapiens
  CDR3 for alpha chain variable domain of TCR clone 234197 (TRAV3, TRAJ27)
CAVRDPQVTNAGKSTF

SEQ ID NO: 468394 - protein, 17 aa, Homo sapiens
  CDR3 for beta chain variable domain of TCR clone 234197 (TRBV4-1, TRBJ2-7)
CASSQGRGLQTSYEQYL

SEQ ID NO: 468395 - protein, 14 aa, Homo sapiens
  CDR3 for alpha chain variable domain of TCR clone 234198 (TRAV1-2, TRAJ16)
CAVNRVSDGQKLLF

SEQ ID NO: 468396 - protein, 13 aa, Homo sapiens
  CDR3 for beta chain variable domain of TCR clone 234198 (TRBV11-2, TRBJ2-1)
CASSLGLAGGRFF

SEQ ID NO: 468397 - protein, 14 aa, Homo sapiens
  CDR3 for alpha chain variable domain of TCR clone 234199 (TRAV12-1, TRAJ26)
CVVKGSNYGQNFVF

SEQ ID NO: 468398 - protein, 14 aa, Homo sapiens
  CDR3 for beta chain variable domain of TCR clone 234199 (TRBV4-1, TRBJ2-2)
CASSQAVNTGELFF

SEQ ID NO: 468399 - protein, 14 aa, Homo sapiens
  CDR3 for alpha chain variable domain of TCR clone 234200 (TRAV12-1, TRAJ12)
CVVTRMDSSYKLIF

SEQ ID NO: 468400 - protein, 14 aa, Homo sapiens
  CDR3 for beta chain variable domain of TCR clone 234200 (TRBV4-1, TRBJ2-7)
CASSPVAGGDEHYF

SEQ ID NO: 468401 - protein, 14 aa, Homo sapiens
  CDR3 for alpha chain variable domain of TCR clone 234201 (TRAV29/DV5, TRAJ49)
CAASLSNTGNQFHF

SEQ ID NO: 468402 - protein, 16 aa, Homo sapiens
  CDR3 for beta chain variable domain of TCR clone 234201 (TRBV12-5, TRBJ2-5)
CASGPRTSGNQETQYF

SEQ ID NO: 468403 - protein, 11 aa, Homo sapiens
  CDR3 for alpha chain variable domain of TCR clone 234202 (TRAV35, TRAJ34)
CWARNTDKLLF

SEQ ID NO: 468404 - protein, 12 aa, Homo sapiens
  CDR3 for beta chain variable domain of TCR clone 234202 (TRBV12-5, TRBJ2-5)
CASGQGVETQYF

SEQ ID NO: 468405 - protein, 14 aa, Homo sapiens
  CDR3 for alpha chain variable domain of TCR clone 234203 (TRAV8-3, TRAJ35)
CAVVPQGFGNVLHC

SEQ ID NO: 468406 - protein, 15 aa, Homo sapiens
  CDR3 for beta chain variable domain of TCR clone 234203 (TRBV6-1, TRBJ2-3)
CASSERGGITDTQYF

SEQ ID NO: 468407 - protein, 12 aa, Homo sapiens
  CDR3 for alpha chain variable domain of TCR clone 234204 (TRAV3, TRAJ31)
CAVRPRGPRLMF

SEQ ID NO: 468408 - protein, 17 aa, Homo sapiens
  CDR3 for beta chain variable domain of TCR clone 234204 (TRBV7-9, TRBJ1-5)
RASSASQGGYSNQPQHF

SEQ ID NO: 468409 - protein, 16 aa, Homo sapiens
  CDR3 for alpha chain variable domain of TCR clone 234205 (TRAV3, TRAJ37)
CAVRGKGSGNTGKLIF

SEQ ID NO: 468410 - protein, 15 aa, Homo sapiens
  CDR3 for beta chain variable domain of TCR clone 234205 (TRBV11-2, TRBJ2-2)
CASSSDRVNAGDLFF

SEQ ID NO: 468411 - protein, 10 aa, Homo sapiens
  CDR3 for alpha chain variable domain of TCR clone 234206 (TRAV16, TRAJ22)
SAMYLRQLTF

SEQ ID NO: 468412 - protein, 15 aa, Homo sapiens
  CDR3 for beta chain variable domain of TCR clone 234206 (TRBV7-9, TRBJ1-6)
CASSSQGRGNSPLHS

SEQ ID NO: 468413 - protein, 14 aa, Homo sapiens
  CDR3 for alpha chain variable domain of TCR clone 234207 (TRAV12-3, TRAJ56)
CALSVTGANSKLTF

SEQ ID NO: 468414 - protein, 17 aa, Homo sapiens
  CDR3 for beta chain variable domain of TCR clone 234207 (TRBV20-1, TRBJ2-3)
CSASLLGRGGSADTQYF

SEQ ID NO: 468415 - protein, 13 aa, Homo sapiens
  CDR3 for alpha chain variable domain of TCR clone 234208 (TRAV26-1, TRAJ34)
CIVRVGNTDKLIF

SEQ ID NO: 468416 - protein, 15 aa, Homo sapiens
  CDR3 for beta chain variable domain of TCR clone 234208 (TRBV7-3, TRBJ1-2)
CASSPQGFAPGGDTF

SEQ ID NO: 468417 - protein, 14 aa, Homo sapiens
  CDR3 for alpha chain variable domain of TCR clone 234209 (TRAV1-2, TRAJ8)
CAVREDPGFQKLVF

SEQ ID NO: 468418 - protein, 15 aa, Homo sapiens
  CDR3 for beta chain variable domain of TCR clone 234209 (TRBV6-3, TRBJ2-7)
CASSSPGTVFCEQYF

SEQ ID NO: 468419 - protein, 11 aa, Homo sapiens
  CDR3 for alpha chain variable domain of TCR clone 234210 (TRAV12-1, TRAJ30)
CVVNGQDKIIF

SEQ ID NO: 468420 - protein, 13 aa, Homo sapiens
  CDR3 for beta chain variable domain of TCR clone 234210 (TRBV20-1, TRBJ2-7)
CSARTGAGYEQYF

SEQ ID NO: 468421 - protein, 16 aa, Homo sapiens
  CDR3 for alpha chain variable domain of TCR clone 234211 (TRAV30, TRAJ24)
CGTEIVDADSWGKFQF

SEQ ID NO: 468422 - protein, 13 aa, Homo sapiens
  CDR3 for beta chain variable domain of TCR clone 234211 (TRBV4-1, TRBJ2-7)
CASSWTGGYEQYF

SEQ ID NO: 468423 - protein, 14 aa, Homo sapiens
  CDR3 for alpha chain variable domain of TCR clone 234212 (TRAV17, TRAJ57)
CATDPQGGSAKLVF

SEQ ID NO: 468424 - protein, 18 aa, Homo sapiens
  CDR3 for beta chain variable domain of TCR clone 234212 (TRBV6-6, TRBJ1-3)
CASSYSKWDSISGNTIYF

SEQ ID NO: 468425 - protein, 17 aa, Homo sapiens
  CDR3 for alpha chain variable domain of TCR clone 234213 (TRAV4, TRAJ18)
CLVGERSVGSTLGRLYF

SEQ ID NO: 468426 - protein, 14 aa, Homo sapiens
  CDR3 for beta chain variable domain of TCR clone 234213 (TRBV7-8, TRBJ2-3)
CASSFKSSTDTQYF

SEQ ID NO: 468427 - protein, 16 aa, Homo sapiens
  CDR3 for alpha chain variable domain of TCR clone 234214 (TRAV23/DV6, TRAJ9)
CAASIGGNPGGFKTIF

SEQ ID NO: 468428 - protein, 17 aa, Homo sapiens
  CDR3 for beta chain variable domain of TCR clone 234214 (TRBV13, TRBJ2-3)
CASSLSRVAGGRNTQYF

SEQ ID NO: 468429 - protein, 15 aa, Homo sapiens
  CDR3 for alpha chain variable domain of TCR clone 234215 (TRAV29/DV5, TRAJ28)
RAAGYSGAGSYQLTF

SEQ ID NO: 468430 - protein, 18 aa, Homo sapiens
  CDR3 for beta chain variable domain of TCR clone 234215 (TRBV3-1, TRBJ1-2)
CASSQDVIGWNGDYGYTF

SEQ ID NO: 468431 - protein, 21 aa, Homo sapiens
  CDR3 for alpha chain variable domain of TCR clone 234216 (TRAV3, TRAJ27)
CAVRPLGAGKSTFGDVSTLTV

SEQ ID NO: 468432 - protein, 13 aa, Homo sapiens
  CDR3 for beta chain variable domain of TCR clone 234216 (TRBV7-9, TRBJ2-3)
CASSPGSTDTQYF

SEQ ID NO: 468433 - protein, 14 aa, Homo sapiens
  CDR3 for alpha chain variable domain of TCR clone 234217 (TRAV17, TRAJ17)
CATDHRAAGNKLTF

SEQ ID NO: 468434 - protein, 13 aa, Homo sapiens
  CDR3 for beta chain variable domain of TCR clone 234217 (TRBV12-4, TRBJ1-5)
CASSPDRAQPQHF

SEQ ID NO: 468435 - protein, 10 aa, Homo sapiens
  CDR3 for alpha chain variable domain of TCR clone 234218 (TRAV1-2, TRAJ31)
CAFFDARIMF

SEQ ID NO: 468436 - protein, 17 aa, Homo sapiens
  CDR3 for beta chain variable domain of TCR clone 234218 (TRBV15, TRBJ1-2)
CATSGREIDVVNYGYTF

SEQ ID NO: 468437 - protein, 14 aa, Homo sapiens
  CDR3 for alpha chain variable domain of TCR clone 234219 (TRAV12-2, TRAJ33)
CAVQRARSNYQLIW

SEQ ID NO: 468438 - protein, 12 aa, Homo sapiens
  CDR3 for beta chain variable domain of TCR clone 234219 (TRBV24-1, TRBJ2-3)
CATSDSTDTQYF

SEQ ID NO: 468439 - protein, 21 aa, Homo sapiens
  CDR3 for alpha chain variable domain of TCR clone 234220 (TRAV1-1, TRAJ6)
CAVRREEAAYLHLEEEPALLF

SEQ ID NO: 468440 - protein, 15 aa, Homo sapiens
  CDR3 for beta chain variable domain of TCR clone 234220 (TRBV6-6, TRBJ2-1)
CATRQGVSSYNEQFF

SEQ ID NO: 468441 - protein, 15 aa, Homo sapiens
  CDR3 for alpha chain variable domain of TCR clone 234221 (TRAV8-3, TRAJ23)
CAVGDRYNQGGKLIF

SEQ ID NO: 468442 - protein, 13 aa, Homo sapiens
  CDR3 for beta chain variable domain of TCR clone 234221 (TRBV10-3, TRBJ2-7)
CASKLAVNYEQYF

SEQ ID NO: 468443 - protein, 13 aa, Homo sapiens
  CDR3 for alpha chain variable domain of TCR clone 234222 (TRAV29/DV5, TRAJ34)
CAARVDNTDKLIF

SEQ ID NO: 468444 - protein, 14 aa, Homo sapiens
  CDR3 for beta chain variable domain of TCR clone 234222 (TRBV7-9, TRBJ2-2)
CASSLTANTGELFF

SEQ ID NO: 468445 - protein, 18 aa, Homo sapiens
  CDR3 for alpha chain variable domain of TCR clone 234223 (TRAV21, TRAJ52)
CAVRPSPAGGTSDGKLTF

SEQ ID NO: 468446 - protein, 17 aa, Homo sapiens
  CDR3 for beta chain variable domain of TCR clone 234223 (TRBV13, TRBJ2-3)
CASSLSRVAGGRNTQFF

SEQ ID NO: 468447 - protein, 15 aa, Homo sapiens
  CDR3 for alpha chain variable domain of TCR clone 234224 (TRAV1-1, TRAJ20)
CAVRDNVANDYKLSF

SEQ ID NO: 468448 - protein, 13 aa, Homo sapiens
  CDR3 for beta chain variable domain of TCR clone 234224 (TRBV4-1, TRBJ2-2)
CASSQVNTGELFF

SEQ ID NO: 468449 - protein, 13 aa, Homo sapiens
  CDR3 for alpha chain variable domain of TCR clone 234225 (TRAV13-1, TRAJ41)
CADAPNSGYALNS

SEQ ID NO: 468450 - protein, 13 aa, Homo sapiens
  CDR3 for beta chain variable domain of TCR clone 234225 (TRBV19, TRBJ2-7)
CASEGTTTYEQYF

SEQ ID NO: 468451 - protein, 14 aa, Homo sapiens
  CDR3 for alpha chain variable domain of TCR clone 234226 (TRAV17, TRAJ31)
CATDAEDNNARLMF

SEQ ID NO: 468452 - protein, 13 aa, Homo sapiens
  CDR3 for beta chain variable domain of TCR clone 234226 (TRBV20-1, TRBJ2-3)
CSAILAGTDTQYF

SEQ ID NO: 468453 - protein, 14 aa, Homo sapiens
  CDR3 for alpha chain variable domain of TCR clone 234227 (TRAV17, TRAJ42)
CATSPPGSQGNLIF

SEQ ID NO: 468454 - protein, 12 aa, Homo sapiens
  CDR3 for beta chain variable domain of TCR clone 234227 (TRBV7-6, TRBJ2-7)
CASSLTDSGQYF

SEQ ID NO: 468455 - protein, 15 aa, Homo sapiens
  CDR3 for alpha chain variable domain of TCR clone 234228 (TRAV3, TRAJ27)
CAVSGFTPMQANQPL

SEQ ID NO: 468456 - protein, 12 aa, Homo sapiens
  CDR3 for beta chain variable domain of TCR clone 234228 (TRBV11-2, TRBJ2-2)
CASSLGGGELFF

SEQ ID NO: 468457 - protein, 11 aa, Homo sapiens
  CDR3 for alpha chain variable domain of TCR clone 234229 (TRAV23/DV6, TRAJ58)
CAARLLRGETS

SEQ ID NO: 468458 - protein, 15 aa, Homo sapiens
  CDR3 for beta chain variable domain of TCR clone 234229 (TRBV27, TRBJ1-6)
CASSFDRGLGSPLHF

SEQ ID NO: 468459 - protein, 23 aa, Homo sapiens
  CDR3 for alpha chain variable domain of TCR clone 234230 (TRAV26-1, TRAJ38)
CIADNAGNNHIQNRDPAVYQLRD

SEQ ID NO: 468460 - protein, 13 aa, Homo sapiens
  CDR3 for beta chain variable domain of TCR clone 234230 (TRBV20-1, TRBJ1-1)
CSARGGGNTEDFF

SEQ ID NO: 468461 - protein, 19 aa, Homo sapiens
  CDR3 for alpha chain variable domain of TCR clone 234231 (TRAV29/DV5, TRAJ49)
CSVLLCSKLTVDTGNQFYF

SEQ ID NO: 468462 - protein, 15 aa, Homo sapiens
  CDR3 for beta chain variable domain of TCR clone 234231 (TRBV4-3, TRBJ2-2)
CASSQGGTPAGELFF

SEQ ID NO: 468463 - protein, 17 aa, Homo sapiens
  CDR3 for alpha chain variable domain of TCR clone 234232 (TRAV4, TRAJ18)
CLVGERSVGSTLGRLYF

SEQ ID NO: 468464 - protein, 12 aa, Homo sapiens
  CDR3 for beta chain variable domain of TCR clone 234232 (TRBV5-1, TRBJ1-2)
CASSQDTYGYTF

SEQ ID NO: 468465 - protein, 19 aa, Homo sapiens
  CDR3 for alpha chain variable domain of TCR clone 234233 (TRAV26-1, TRAJ28)
CIVRVAHAYSGAGRYQLTF

SEQ ID NO: 468466 - protein, 17 aa, Homo sapiens
  CDR3 for beta chain variable domain of TCR clone 234233 (TRBV9, TRBJ2-2)
CASSVGGQGTDTGELFF

SEQ ID NO: 468467 - protein, 13 aa, Homo sapiens
  CDR3 for alpha chain variable domain of TCR clone 234234 (TRAV13-1, TRAJ5)
CAAEHTGRRALTF

SEQ ID NO: 468468 - protein, 14 aa, Homo sapiens
  CDR3 for beta chain variable domain of TCR clone 234234 (TRBV19, TRBJ2-1)
CASPTFVLSGEQFF

SEQ ID NO: 468469 - protein, 14 aa, Homo sapiens
  CDR3 for alpha chain variable domain of TCR clone 234235 (TRAV12-1, TRAJ9)
CVVNINTGGFKTIF

SEQ ID NO: 468470 - protein, 15 aa, Homo sapiens
  CDR3 for beta chain variable domain of TCR clone 234235 (TRBV5-1, TRBJ2-3)
CASSVTSGSTDTQYF

SEQ ID NO: 468471 - protein, 16 aa, Homo sapiens
  CDR3 for alpha chain variable domain of TCR clone 234236 (TRAV12-2, TRAJ32)
CAVNLGQGGATNKLIF

SEQ ID NO: 468472 - protein, 13 aa, Homo sapiens
  CDR3 for beta chain variable domain of TCR clone 234236 (TRBV19, TRBJ1-2)
CASSVPGQDGYTF

SEQ ID NO: 468473 - protein, 13 aa, Homo sapiens
  CDR3 for alpha chain variable domain of TCR clone 234237 (TRAV1-2, TRAJ9)
SAALNNGGFKTIF

SEQ ID NO: 468474 - protein, 13 aa, Homo sapiens
  CDR3 for beta chain variable domain of TCR clone 234237 (TRBV19, TRBJ1-2)
CASSVPGQDGYTF

SEQ ID NO: 468475 - protein, 14 aa, Homo sapiens
  CDR3 for alpha chain variable domain of TCR clone 234238 (TRAV8-3, TRAJ4)
CAVGAAGSYTKLIF

SEQ ID NO: 468476 - protein, 16 aa, Homo sapiens
  CDR3 for beta chain variable domain of TCR clone 234238 (TRBV7-2, TRBJ1-2)
CASSRQGGGANYGYTF

SEQ ID NO: 468477 - protein, 14 aa, Homo sapiens
  CDR3 for alpha chain variable domain of TCR clone 234239 (TRAV17, TRAJ17)
CATDHRAAGNKLTF

SEQ ID NO: 468478 - protein, 10 aa, Homo sapiens
  CDR3 for beta chain variable domain of TCR clone 234239 (TRBV19, TRBJ1-5)
CASSIGGGRT

SEQ ID NO: 468479 - protein, 15 aa, Homo sapiens
  CDR3 for alpha chain variable domain of TCR clone 234240 (TRAV3, TRAJ29)
CAVIDINSGNTPLVF

SEQ ID NO: 468480 - protein, 16 aa, Homo sapiens
  CDR3 for beta chain variable domain of TCR clone 234240 (TRBV4-1, TRBJ2-5)
CASSQTFYGDQETQYF

SEQ ID NO: 468481 - protein, 15 aa, Homo sapiens
  CDR3 for alpha chain variable domain of TCR clone 234241 (TRAV3, TRAJ24)
CAGGMTTDSWGKFQF

SEQ ID NO: 468482 - protein, 14 aa, Homo sapiens
  CDR3 for beta chain variable domain of TCR clone 234241 (TRBV4-1, TRBJ2-2)
CASRRGRASGELSF

SEQ ID NO: 468483 - protein, 13 aa, Homo sapiens
  CDR3 for alpha chain variable domain of TCR clone 234242 (TRAV8-6, TRAJ21)
CAVSPSSLNKFYF

SEQ ID NO: 468484 - protein, 14 aa, Homo sapiens
  CDR3 for beta chain variable domain of TCR clone 234242 (TRBV19, TRBJ2-3)
CASSIDLGGDTQYF

SEQ ID NO: 468485 - protein, 12 aa, Homo sapiens
  CDR3 for alpha chain variable domain of TCR clone 234243 (TRAV12-3, TRAJ43)
CAISSNNNDMRF

SEQ ID NO: 468486 - protein, 12 aa, Homo sapiens
  CDR3 for beta chain variable domain of TCR clone 234243 (TRBV2, TRBJ2-1)
CAYGPPGNEQFF

SEQ ID NO: 468487 - protein, 14 aa, Homo sapiens
  CDR3 for alpha chain variable domain of TCR clone 234244 (TRAV13-1, TRAJ10)
CAAKEPGGGNKLTF

SEQ ID NO: 468488 - protein, 17 aa, Homo sapiens
  CDR3 for beta chain variable domain of TCR clone 234244 (TRBV4-2, TRBJ2-1)
CASSQVSGLAMNNEQFF

SEQ ID NO: 468489 - protein, 13 aa, Homo sapiens
  CDR3 for alpha chain variable domain of TCR clone 234245 (TRAV2, TRAJ16)
CAVELGDGQKLLF

SEQ ID NO: 468490 - protein, 14 aa, Homo sapiens
  CDR3 for beta chain variable domain of TCR clone 234245 (TRBV20-1, TRBJ1-1)
CSAMGGTANTEAFF

SEQ ID NO: 468491 - protein, 17 aa, Homo sapiens
  CDR3 for alpha chain variable domain of TCR clone 234246 (TRAV3, TRAJ6)
CAVSRRTDTGGSYIPTF

SEQ ID NO: 468492 - protein, 18 aa, Homo sapiens
  CDR3 for beta chain variable domain of TCR clone 234246 (TRBV7-2, TRBJ2-3)
CASSLETSRGRKADSQYF

SEQ ID NO: 468493 - protein, 15 aa, Homo sapiens
  CDR3 for alpha chain variable domain of TCR clone 234247 (TRAV8-3, TRAJ7)
CAVGSISYGNNRLAF

SEQ ID NO: 468494 - protein, 15 aa, Homo sapiens
  CDR3 for beta chain variable domain of TCR clone 234247 (TRBV4-2, TRBJ1-1)
CASSQEDLLRTEAFF

SEQ ID NO: 468495 - protein, 16 aa, Homo sapiens
  CDR3 for alpha chain variable domain of TCR clone 234248 (TRAV30, TRAJ57)
CGTGWAPQGGSEKLVF

SEQ ID NO: 468496 - protein, 13 aa, Homo sapiens
  CDR3 for beta chain variable domain of TCR clone 234248 (TRBV7-9, TRBJ1-2)
CASSLKQNYGYTF

SEQ ID NO: 468497 - protein, 11 aa, Homo sapiens
  CDR3 for alpha chain variable domain of TCR clone 234249 (TRAV23/DV6, TRAJ4)
APAGGYNKLTF

SEQ ID NO: 468498 - protein, 17 aa, Homo sapiens
  CDR3 for beta chain variable domain of TCR clone 234249 (TRBV20-1, TRBJ2-1)
CSAPDRGAGVAYNGQFF

SEQ ID NO: 468499 - protein, 15 aa, Homo sapiens
  CDR3 for alpha chain variable domain of TCR clone 234250 (TRAV20, TRAJ4)
CAVQVFSGGYNKLIF

SEQ ID NO: 468500 - protein, 14 aa, Homo sapiens
  CDR3 for beta chain variable domain of TCR clone 234250 (TRBV7-6, TRBJ2-3)
CASNSGGNANTQYF

SEQ ID NO: 468501 - protein, 14 aa, Homo sapiens
  CDR3 for alpha chain variable domain of TCR clone 234251 (TRAV9-2, TRAJ39)
CALYIYNAGNMLTF

SEQ ID NO: 468502 - protein, 15 aa, Homo sapiens
  CDR3 for beta chain variable domain of TCR clone 234251 (TRBV28, TRBJ1-3)
CASSMGWASGNTLYF

SEQ ID NO: 468503 - protein, 13 aa, Homo sapiens
  CDR3 for alpha chain variable domain of TCR clone 234252 (TRAV20, TRAJ9)
CAAPDTGGFKTIF

SEQ ID NO: 468504 - protein, 14 aa, Homo sapiens
  CDR3 for beta chain variable domain of TCR clone 234252 (TRBV7-2, TRBJ2-5)
CASSPRGSSETQYF

SEQ ID NO: 468505 - protein, 14 aa, Homo sapiens
  CDR3 for alpha chain variable domain of TCR clone 234253 (TRAV12-1, TRAJ17)
CVVNYKAAGNKLTF

SEQ ID NO: 468506 - protein, 15 aa, Homo sapiens
  CDR3 for beta chain variable domain of TCR clone 234253 (TRBV20-1, TRBJ1-1)
CSANRGVTGNTEAFF

SEQ ID NO: 468507 - protein, 14 aa, Homo sapiens
  CDR3 for alpha chain variable domain of TCR clone 234254 (TRAV12-1, TRAJ23)
WVVIVYNQGGKLIF

SEQ ID NO: 468508 - protein, 13 aa, Homo sapiens
  CDR3 for beta chain variable domain of TCR clone 234254 (TRBV11-2, TRBJ2-5)
CASSFSSQETQYF

SEQ ID NO: 468509 - protein, 16 aa, Homo sapiens
  CDR3 for alpha chain variable domain of TCR clone 234255 (TRAV13-2, TRAJ32)
CAENMNYGGATNKSIF

SEQ ID NO: 468510 - protein, 14 aa, Homo sapiens
  CDR3 for beta chain variable domain of TCR clone 234255 (TRBV15, TRBJ2-5)
CATSSTGYQETQYF

SEQ ID NO: 468511 - protein, 13 aa, Homo sapiens
  CDR3 for alpha chain variable domain of TCR clone 234256 (TRAV13-2, TRAJ13)
CADRPGGYQKVTF

SEQ ID NO: 468512 - protein, 14 aa, Homo sapiens
  CDR3 for beta chain variable domain of TCR clone 234256 (TRBV20-1, TRBJ2-5)
CSARYRGLQETQYF

SEQ ID NO: 468513 - protein, 14 aa, Homo sapiens
  CDR3 for alpha chain variable domain of TCR clone 234257 (TRAV12-2, TRAJ5)
CAVKGDTGRRALLL

SEQ ID NO: 468514 - protein, 15 aa, Homo sapiens
  CDR3 for beta chain variable domain of TCR clone 234257 (TRBV5-7, TRBJ1-2)
CASSLGVAANYGYTF

SEQ ID NO: 468515 - protein, 13 aa, Homo sapiens
  CDR3 for alpha chain variable domain of TCR clone 234258 (TRAV12-1, TRAJ34)
CVVTGYNTDKLIF

SEQ ID NO: 468516 - protein, 10 aa, Homo sapiens
  CDR3 for beta chain variable domain of TCR clone 234258 (TRBV28, TRBJ2-7)
KRGGVYEQYF

SEQ ID NO: 468517 - protein, 10 aa, Homo sapiens
  CDR3 for alpha chain variable domain of TCR clone 234259 (TRAV30, TRAJ48)
CGIGNEKLTF

SEQ ID NO: 468518 - protein, 14 aa, Homo sapiens
  CDR3 for beta chain variable domain of TCR clone 234259 (TRBV7-2, TRBJ2-7)
CASSPKTSFYEQYV

SEQ ID NO: 468519 - protein, 13 aa, Homo sapiens
  CDR3 for alpha chain variable domain of TCR clone 234260 (TRAV3, TRAJ3)
CAVADSSASKIIF

SEQ ID NO: 468520 - protein, 16 aa, Homo sapiens
  CDR3 for beta chain variable domain of TCR clone 234260 (TRBV5-1, TRBJ2-3)
CASSLGLAVYTDTQYV

SEQ ID NO: 468521 - protein, 13 aa, Homo sapiens
  CDR3 for alpha chain variable domain of TCR clone 234261 (TRAV2, TRAJ40)
CAVVTSGTYKYIF

SEQ ID NO: 468522 - protein, 14 aa, Homo sapiens
  CDR3 for beta chain variable domain of TCR clone 234261 (TRBV12-4, TRBJ1-2)
CASSPPGPGGGYTF

SEQ ID NO: 468523 - protein, 11 aa, Homo sapiens
  CDR3 for alpha chain variable domain of TCR clone 234262 (TRAV12-2, TRAJ33)
CAVTSNYQLIW

SEQ ID NO: 468524 - protein, 16 aa, Homo sapiens
  CDR3 for beta chain variable domain of TCR clone 234262 (TRBV13, TRBJ2-2)
CASSSRTGEHTGELFF

SEQ ID NO: 468525 - protein, 12 aa, Homo sapiens
  CDR3 for alpha chain variable domain of TCR clone 234263 (TRAV12-2, TRAJ31)
CAVNKPDARLLF

SEQ ID NO: 468526 - protein, 17 aa, Homo sapiens
  CDR3 for beta chain variable domain of TCR clone 234263 (TRBV20-1, TRBJ1-6)
CSARGGYTFSYNSPLHF

SEQ ID NO: 468527 - protein, 16 aa, Homo sapiens
  CDR3 for alpha chain variable domain of TCR clone 234264 (TRAV30, TRAJ24)
CGTEIVDADSWGKFQF

SEQ ID NO: 468528 - protein, 13 aa, Homo sapiens
  CDR3 for beta chain variable domain of TCR clone 234264 (TRBV12-4, TRBJ1-1)
CASSSRAGAEAFF

SEQ ID NO: 468529 - protein, 16 aa, Homo sapiens
  CDR3 for alpha chain variable domain of TCR clone 234265 (TRAV26-1, TRAJ37)
CIVRGEGSGNTGKLIF

SEQ ID NO: 468530 - protein, 14 aa, Homo sapiens
  CDR3 for beta chain variable domain of TCR clone 234265 (TRBV19, TRBJ2-2)
CASSGQGIAGELFF

SEQ ID NO: 468531 - protein, 14 aa, Homo sapiens
  CDR3 for alpha chain variable domain of TCR clone 234266 (TRAV12-1, TRAJ26)
CVVKGSNYGQNFVF

SEQ ID NO: 468532 - protein, 17 aa, Homo sapiens
  CDR3 for beta chain variable domain of TCR clone 234266 (TRBV11-2, TRBJ2-1)
CASSLYPPGVEYNEQFF

SEQ ID NO: 468533 - protein, 14 aa, Homo sapiens
  CDR3 for alpha chain variable domain of TCR clone 234267 (TRAV1-2, TRAJ16)
CAVNRFSDGQKLLL

SEQ ID NO: 468534 - protein, 12 aa, Homo sapiens
  CDR3 for beta chain variable domain of TCR clone 234267 (TRBV14, TRBJ1-1)
CASSQLKGLAFF

SEQ ID NO: 468535 - protein, 12 aa, Homo sapiens
  CDR3 for alpha chain variable domain of TCR clone 234268 (TRAV21, TRAJ31)
CAVWGNNARLMF

SEQ ID NO: 468536 - protein, 16 aa, Homo sapiens
  CDR3 for beta chain variable domain of TCR clone 234268 (TRBV27, TRBJ2-5)
CASSYGPGGPKETQYF

SEQ ID NO: 468537 - protein, 11 aa, Homo sapiens
  CDR3 for alpha chain variable domain of TCR clone 234269 (TRAV26-2, TRAJ8)
CILTGFQKLVF

SEQ ID NO: 468538 - protein, 19 aa, Homo sapiens
  CDR3 for beta chain variable domain of TCR clone 234269 (TRBV20-1, TRBJ2-1)
CSARGETSGNSPQIDEQYF

SEQ ID NO: 468539 - protein, 14 aa, Homo sapiens
  CDR3 for alpha chain variable domain of TCR clone 234270 (TRAV12-2, TRAJ13)
CAVKKTGGYQKVTF

SEQ ID NO: 468540 - protein, 18 aa, Homo sapiens
  CDR3 for beta chain variable domain of TCR clone 234270 (TRBV27, TRBJ2-1)
CASGNRAVGVGSKNEQFF

SEQ ID NO: 468541 - protein, 13 aa, Homo sapiens
  CDR3 for alpha chain variable domain of TCR clone 234271 (TRAV12-3, TRAJ7)
CAMTPYGNNRLTF

SEQ ID NO: 468542 - protein, 16 aa, Homo sapiens
  CDR3 for beta chain variable domain of TCR clone 234271 (TRBV20-1, TRBJ1-4)
CSARPYGGELNEKLFF

SEQ ID NO: 468543 - protein, 18 aa, Homo sapiens
  CDR3 for alpha chain variable domain of TCR clone 234272 (TRAV21, TRAJ52)
CAVRPSPAGVTSYGKLTF

SEQ ID NO: 468544 - protein, 17 aa, Homo sapiens
  CDR3 for beta chain variable domain of TCR clone 234272 (TRBV4-1, TRBJ1-4)
CASSQEGPRGVEEKLFF

SEQ ID NO: 468545 - protein, 15 aa, Homo sapiens
  CDR3 for alpha chain variable domain of TCR clone 234273 (TRAV2, TRAJ13)
CATPSYSGGYQKVTF

SEQ ID NO: 468546 - protein, 15 aa, Homo sapiens
  CDR3 for beta chain variable domain of TCR clone 234273 (TRBV6-1, TRBJ2-5)
CASPRWGTEGQTQYF

SEQ ID NO: 468547 - protein, 15 aa, Homo sapiens
  CDR3 for alpha chain variable domain of TCR clone 234274 (TRAV3, TRAJ20)
CAVRDIKLSDYKRSF

SEQ ID NO: 468548 - protein, 15 aa, Homo sapiens
  CDR3 for beta chain variable domain of TCR clone 234274 (TRBV7-9, TRBJ1-6)
CASSSPGCGNSPLHF

SEQ ID NO: 468549 - protein, 15 aa, Homo sapiens
  CDR3 for alpha chain variable domain of TCR clone 234275 (TRAV17, TRAJ56)
CATEPFPGANSKLTF

SEQ ID NO: 468550 - protein, 15 aa, Homo sapiens
  CDR3 for beta chain variable domain of TCR clone 234275 (TRBV28, TRBJ1-5)
CASSRTGGYVQPQHF

SEQ ID NO: 468551 - protein, 13 aa, Homo sapiens
  CDR3 for alpha chain variable domain of TCR clone 234276 (TRAV23/DV6, TRAJ47)
CAASIRNGIWKQT

SEQ ID NO: 468552 - protein, 12 aa, Homo sapiens
  CDR3 for beta chain variable domain of TCR clone 234276 (TRBV7-9, TRBJ1-4)
CASSTDREKLFF

SEQ ID NO: 468553 - protein, 17 aa, Homo sapiens
  CDR3 for alpha chain variable domain of TCR clone 234277 (TRAV26-1, TRAJ58)
CIVRVGAEETSGTRLTF

SEQ ID NO: 468554 - protein, 18 aa, Homo sapiens
  CDR3 for beta chain variable domain of TCR clone 234277 (TRBV7-9, TRBJ2-7)
CASSLTTSGSRTWYEQYF

SEQ ID NO: 468555 - protein, 15 aa, Homo sapiens
  CDR3 for alpha chain variable domain of TCR clone 234278 (TRAV39, TRAJ32)
CAVDMEGGATNKLIF

SEQ ID NO: 468556 - protein, 17 aa, Homo sapiens
  CDR3 for beta chain variable domain of TCR clone 234278 (TRBV7-2, TRBJ1-4)
CASSFKAGPTTNDKLFF

SEQ ID NO: 468557 - protein, 23 aa, Homo sapiens
  CDR3 for alpha chain variable domain of TCR clone 234279 (TRAV8-4, )
CARLNAGNNHIQNPDPAVYQLRD

SEQ ID NO: 468558 - protein, 12 aa, Homo sapiens
  CDR3 for beta chain variable domain of TCR clone 234279 (TRBV6-1, TRBJ2-7)
CASSEPLYEQYF

SEQ ID NO: 468559 - protein, 14 aa, Homo sapiens
  CDR3 for alpha chain variable domain of TCR clone 234280 (TRAV23/DV6, TRAJ6)
CAASRSRGSYIPTF

SEQ ID NO: 468560 - protein, 17 aa, Homo sapiens
  CDR3 for beta chain variable domain of TCR clone 234280 (TRBV20-1, TRBJ2-1)
CSASASGLAGSYNEQFF

SEQ ID NO: 468561 - protein, 13 aa, Homo sapiens
  CDR3 for alpha chain variable domain of TCR clone 234281 (TRAV21, TRAJ27)
CAARPGNAGKSTF

SEQ ID NO: 468562 - protein, 13 aa, Homo sapiens
  CDR3 for beta chain variable domain of TCR clone 234281 (TRBV19, TRBJ2-2)
CASSGRGTGELFF

SEQ ID NO: 468563 - protein, 12 aa, Homo sapiens
  CDR3 for alpha chain variable domain of TCR clone 234282 (TRAV13-1, TRAJ21)
CAAKEGFNKFYF

SEQ ID NO: 468564 - protein, 15 aa, Homo sapiens
  CDR3 for beta chain variable domain of TCR clone 234282 (TRBV18, TRBJ1-1)
CASSPRQGENTEAFF

SEQ ID NO: 468565 - protein, 11 aa, Homo sapiens
  CDR3 for alpha chain variable domain of TCR clone 234283 (TRAV20, TRAJ23)
CACNQGGKLIF

SEQ ID NO: 468566 - protein, 16 aa, Homo sapiens
  CDR3 for beta chain variable domain of TCR clone 234283 (TRBV7-8, TRBJ2-5)
CASSFGGQPAQETQYF

SEQ ID NO: 468567 - protein, 21 aa, Homo sapiens
  CDR3 for alpha chain variable domain of TCR clone 234284 (TRAV36/DV7, TRAJ39)
TATQTGDSAIYLPNAGNMLTF

SEQ ID NO: 468568 - protein, 18 aa, Homo sapiens
  CDR3 for beta chain variable domain of TCR clone 234284 (TRBV11-2, TRBJ2-3)
CASSLGGASRGAPNTQYF

SEQ ID NO: 468569 - protein, 14 aa, Homo sapiens
  CDR3 for alpha chain variable domain of TCR clone 234285 (TRAV26-1, TRAJ38)
CIADNAGNNRKLIW

SEQ ID NO: 468570 - protein, 15 aa, Homo sapiens
  CDR3 for beta chain variable domain of TCR clone 234285 (TRBV7-6, TRAJ28)
CASSLGAGAGEKLFF

SEQ ID NO: 468571 - protein, 17 aa, Homo sapiens
  CDR3 for alpha chain variable domain of TCR clone 234286 (TRAV4, TRAJ13)
CIVGVQGSSGGYQKVTF

SEQ ID NO: 468572 - protein, 15 aa, Homo sapiens
  CDR3 for beta chain variable domain of TCR clone 234286 (TRBV7-2, TRBJ2-7)
CASSSGLAGRREQYF

SEQ ID NO: 468573 - protein, 13 aa, Homo sapiens
  CDR3 for alpha chain variable domain of TCR clone 234287 (TRAV35, TRAJ42)
CAGFPGSQRNLIF

SEQ ID NO: 468574 - protein, 12 aa, Homo sapiens
  CDR3 for beta chain variable domain of TCR clone 234287 (TRBV7-8, TRBJ2-7)
CASSLGDREQYF

SEQ ID NO: 468575 - protein, 14 aa, Homo sapiens
  CDR3 for alpha chain variable domain of TCR clone 234288 (TRAV8-4, TRAJ11)
CAVSLNSGYSTLTF

SEQ ID NO: 468576 - protein, 13 aa, Homo sapiens
  CDR3 for beta chain variable domain of TCR clone 234288 (TRBV5-5, TRBJ1-2)
CASSFWRGEDYTF

SEQ ID NO: 468577 - protein, 15 aa, Homo sapiens
  CDR3 for alpha chain variable domain of TCR clone 234289 (TRAV27, TRAJ38)
CAARRNAGNNRKLMW

SEQ ID NO: 468578 - protein, 13 aa, Homo sapiens
  CDR3 for beta chain variable domain of TCR clone 234289 (TRBV12-5, TRBJ2-3)
CASGDRQSDTQYF

SEQ ID NO: 468579 - protein, 13 aa, Homo sapiens
  CDR3 for alpha chain variable domain of TCR clone 234290 (TRAV21, TRAJ15)
CAVANQAGTALVF

SEQ ID NO: 468580 - protein, 14 aa, Homo sapiens
  CDR3 for beta chain variable domain of TCR clone 234290 (TRBV27, TRBJ2-2)
CASSLGAATGELFF

SEQ ID NO: 468581 - protein, 15 aa, Homo sapiens
  CDR3 for alpha chain variable domain of TCR clone 234291 (TRAV17, TRAJ57)
CATGPSQGGPEKLVF

SEQ ID NO: 468582 - protein, 12 aa, Homo sapiens
  CDR3 for beta chain variable domain of TCR clone 234291 (TRBV12-4, TRBJ2-7)
CASSLGGYEQYF

SEQ ID NO: 468583 - protein, 13 aa, Homo sapiens
  CDR3 for alpha chain variable domain of TCR clone 234292 (TRAV26-1, TRAJ31)
CIVRVDGNARLMF

SEQ ID NO: 468584 - protein, 14 aa, Homo sapiens
  CDR3 for beta chain variable domain of TCR clone 234292 (TRBV9, TRBJ2-1)
CASSVDPRGKEQFF

SEQ ID NO: 468585 - protein, 16 aa, Homo sapiens
  CDR3 for alpha chain variable domain of TCR clone 234293 (TRAV30, TRAJ24)
CGTEIVDADSWGKFQF

SEQ ID NO: 468586 - protein, 15 aa, Homo sapiens
  CDR3 for beta chain variable domain of TCR clone 234293 (TRBV11-3, TRBJ2-5)
CASSDTSGGIETQYF

SEQ ID NO: 468587 - protein, 13 aa, Homo sapiens
  CDR3 for alpha chain variable domain of TCR clone 234294 (TRAV12-3, TRAJ56)
CAMSFGANSKLTF

SEQ ID NO: 468588 - protein, 10 aa, Homo sapiens
  CDR3 for beta chain variable domain of TCR clone 234294 (TRBV6-3, TRBJ2-7)
CASSSPGQFS

SEQ ID NO: 468589 - protein, 15 aa, Homo sapiens
  CDR3 for alpha chain variable domain of TCR clone 234295 (TRAV35, TRAJ50)
CAGQLRKTSYAKVIF

SEQ ID NO: 468590 - protein, 12 aa, Homo sapiens
  CDR3 for beta chain variable domain of TCR clone 234295 (TRBV5-1, TRBJ2-5)
CASSLGLEAQYF

SEQ ID NO: 468591 - protein, 14 aa, Homo sapiens
  CDR3 for alpha chain variable domain of TCR clone 234296 (TRAV17, TRAJ16)
CATADFSDGQKLLF

SEQ ID NO: 468592 - protein, 18 aa, Homo sapiens
  CDR3 for beta chain variable domain of TCR clone 234296 (TRBV6-6, TRBJ1-3)
CASSYSKWDSISGNTMYF

SEQ ID NO: 468593 - protein, 14 aa, Homo sapiens
  CDR3 for alpha chain variable domain of TCR clone 234297 (TRAV17, TRAJ22)
CATVLSGSARQLTF

SEQ ID NO: 468594 - protein, 13 aa, Homo sapiens
  CDR3 for beta chain variable domain of TCR clone 234297 (TRBV15, TRBJ1-6)
CATSGGLNSPLHC

SEQ ID NO: 468595 - protein, 16 aa, Homo sapiens
  CDR3 for alpha chain variable domain of TCR clone 234298 (TRAV17, TRAJ52)
CATSNAGGTSYGKLTF

SEQ ID NO: 468596 - protein, 16 aa, Homo sapiens
  CDR3 for beta chain variable domain of TCR clone 234298 (TRBV6-1, TRBJ2-5)
CASSETLDRGAETQYF

SEQ ID NO: 468597 - protein, 14 aa, Homo sapiens
  CDR3 for alpha chain variable domain of TCR clone 234299 (TRAV26-1, TRAJ38)
CIADNAGNNRKLIG

SEQ ID NO: 468598 - protein, 15 aa, Homo sapiens
  CDR3 for beta chain variable domain of TCR clone 234299 (TRBV9, TRBJ2-1)
CVSSLAGSSYNEQFF

SEQ ID NO: 468599 - protein, 10 aa, Homo sapiens
  CDR3 for alpha chain variable domain of TCR clone 234300 (TRAV12-3, TRAJ49)
CAMNDDQFYF

SEQ ID NO: 468600 - protein, 16 aa, Homo sapiens
  CDR3 for beta chain variable domain of TCR clone 234300 (TRBV27, TRBJ1-1)
CASSLLAGTGETEAFF

SEQ ID NO: 468601 - protein, 12 aa, Homo sapiens
  CDR3 for alpha chain variable domain of TCR clone 234301 (TRAV1-1, TRAJ8)
CAGGTGFQKLVF

SEQ ID NO: 468602 - protein, 16 aa, Homo sapiens
  CDR3 for beta chain variable domain of TCR clone 234301 (TRBV12-5, TRBJ2-5)
CASGPRTSENQETQYF

SEQ ID NO: 468603 - protein, 11 aa, Homo sapiens
  CDR3 for alpha chain variable domain of TCR clone 234302 (TRAV12-1, TRAJ21)
CVVSNFNKFYF

SEQ ID NO: 468604 - protein, 11 aa, Homo sapiens
  CDR3 for beta chain variable domain of TCR clone 234302 (TRBV12-4, TRBJ2-3)
CASTATDTQYF

SEQ ID NO: 468605 - protein, 12 aa, Homo sapiens
  CDR3 for alpha chain variable domain of TCR clone 234303 (TRAV29/DV5, TRAJ41)
CAAISSGYALNF

SEQ ID NO: 468606 - protein, 14 aa, Homo sapiens
  CDR3 for beta chain variable domain of TCR clone 234303 (TRBV7-8, TRBJ1-5)
CASSLGAFNQPQHF

SEQ ID NO: 468607 - protein, 14 aa, Homo sapiens
  CDR3 for alpha chain variable domain of TCR clone 234304 (TRAV8-3, TRAJ6)
CAVGASGGSYIPTF

SEQ ID NO: 468608 - protein, 17 aa, Homo sapiens
  CDR3 for beta chain variable domain of TCR clone 234304 (TRBV18, TRBJ2-2)
CASSASDPWQNTGELFF

SEQ ID NO: 468609 - protein, 16 aa, Homo sapiens
  CDR3 for alpha chain variable domain of TCR clone 234305 (TRAV20, TRAJ26)
CAVQHRRDNYGQNFVF

SEQ ID NO: 468610 - protein, 16 aa, Homo sapiens
  CDR3 for beta chain variable domain of TCR clone 234305 (TRBV13, TRBJ2-7)
CASSSRESGRTYEQYF

SEQ ID NO: 468611 - protein, 12 aa, Homo sapiens
  CDR3 for alpha chain variable domain of TCR clone 234306 (TRAV13-1, TRAJ42)
VNYGGSQGNLIF

SEQ ID NO: 468612 - protein, 15 aa, Homo sapiens
  CDR3 for beta chain variable domain of TCR clone 234306 (TRBV20-1, TRBJ2-1)
CSASSAGSSYNEQFS

SEQ ID NO: 468613 - protein, 13 aa, Homo sapiens
  CDR3 for alpha chain variable domain of TCR clone 234307 (TRAV3, TRAJ17)
CAVPRAAGNKLTF

SEQ ID NO: 468614 - protein, 13 aa, Homo sapiens
  CDR3 for beta chain variable domain of TCR clone 234307 (TRBV4-1, TRBJ1-1)
CASSRKMNTEAFF

SEQ ID NO: 468615 - protein, 14 aa, Homo sapiens
  CDR3 for alpha chain variable domain of TCR clone 234308 (TRAV2, TRAJ9)
CAVEDRCGGFKTIF

SEQ ID NO: 468616 - protein, 16 aa, Homo sapiens
  CDR3 for beta chain variable domain of TCR clone 234308 (TRBV5-1, TRBJ1-1)
CASSSGGNSLNTEAFF

SEQ ID NO: 468617 - protein, 11 aa, Homo sapiens
  CDR3 for alpha chain variable domain of TCR clone 234309 (TRAV12-3, TRAJ27)
CAMANAGKSTF

SEQ ID NO: 468618 - protein, 10 aa, Homo sapiens
  CDR3 for beta chain variable domain of TCR clone 234309 (TRBV20-1, TRBJ2-5)
CSARFETQYF

SEQ ID NO: 468619 - protein, 12 aa, Homo sapiens
  CDR3 for alpha chain variable domain of TCR clone 234310 (TRAV26-2, TRAJ21)
CILKGNFNKFYF

SEQ ID NO: 468620 - protein, 19 aa, Homo sapiens
  CDR3 for beta chain variable domain of TCR clone 234310 (TRBV7-9, TRBJ2-6)
CASSLESATVLPGANVLTF

SEQ ID NO: 468621 - protein, 13 aa, Homo sapiens
  CDR3 for alpha chain variable domain of TCR clone 234311 (TRAV17, TRAJ26)
CATVDNYGQNFVF

SEQ ID NO: 468622 - protein, 15 aa, Homo sapiens
  CDR3 for beta chain variable domain of TCR clone 234311 (TRBV6-6, TRBJ1-5)
CASSSIQGTNQPQHF

SEQ ID NO: 468623 - protein, 10 aa, Homo sapiens
  CDR3 for alpha chain variable domain of TCR clone 234312 (TRAV30, TRAJ24)
WVLTAGKFQF

SEQ ID NO: 468624 - protein, 17 aa, Homo sapiens
  CDR3 for beta chain variable domain of TCR clone 234312 (TRBV7-9, TRBJ1-4)
CASSARIGGNEKLFLAV

SEQ ID NO: 468625 - protein, 14 aa, Homo sapiens
  CDR3 for alpha chain variable domain of TCR clone 234313 (TRAV12-2, TRAJ13)
CSVKKTGGYQKVTF

SEQ ID NO: 468626 - protein, 15 aa, Homo sapiens
  CDR3 for beta chain variable domain of TCR clone 234313 (TRBV11-2, TRBJ2-2)
CASSSDRVNAGELFF

SEQ ID NO: 468627 - protein, 13 aa, Homo sapiens
  CDR3 for alpha chain variable domain of TCR clone 234314 (TRAV12-3, TRAJ40)
CAMCDSGTYKYIF

SEQ ID NO: 468628 - protein, 14 aa, Homo sapiens
  CDR3 for beta chain variable domain of TCR clone 234314 (TRBV7-2, TRBJ1-5)
CASSTQGAGQPQHF

SEQ ID NO: 468629 - protein, 18 aa, Homo sapiens
  CDR3 for alpha chain variable domain of TCR clone 234315 (TRAV12-3, TRAJ52)
CAMSVGGAGGTSYGKRTF

SEQ ID NO: 468630 - protein, 15 aa, Homo sapiens
  CDR3 for beta chain variable domain of TCR clone 234315 (TRBV6-3, TRBJ2-7)
CASSSPGTVFYEQYF

SEQ ID NO: 468631 - protein, 13 aa, Homo sapiens
  CDR3 for alpha chain variable domain of TCR clone 234316 (TRAV3, TRAJ36)
CAVSLGGANNLFF

SEQ ID NO: 468632 - protein, 13 aa, Homo sapiens
  CDR3 for beta chain variable domain of TCR clone 234316 (TRBV19, TRBJ1-2)
CASSVAGQDGDTF

SEQ ID NO: 468633 - protein, 13 aa, Homo sapiens
  CDR3 for alpha chain variable domain of TCR clone 234317 (TRAV8-1, TRAJ34)
CAVRPYNTDKLIF

SEQ ID NO: 468634 - protein, 15 aa, Homo sapiens
  CDR3 for beta chain variable domain of TCR clone 234317 (TRBV7-9, TRBJ1-3)
CASSLRSGSGNTIYL

SEQ ID NO: 468635 - protein, 12 aa, Homo sapiens
  CDR3 for alpha chain variable domain of TCR clone 234318 (TRAV13-1, TRAJ21)
CAAKEGFKKFYF

SEQ ID NO: 468636 - protein, 17 aa, Homo sapiens
  CDR3 for beta chain variable domain of TCR clone 234318 (TRBV20-1, TRBJ2-1)
CSASSSGLAGSYNEQFF

SEQ ID NO: 468637 - protein, 12 aa, Homo sapiens
  CDR3 for alpha chain variable domain of TCR clone 234319 (TRAV8-6, TRAJ43)
CAVSNNNNDMRF

SEQ ID NO: 468638 - protein, 20 aa, Homo sapiens
  CDR3 for beta chain variable domain of TCR clone 234319 (TRBV11-1, TRBJ2-6)
CASSAEFQPGMSSGANVLTF

SEQ ID NO: 468639 - protein, 14 aa, Homo sapiens
  CDR3 for alpha chain variable domain of TCR clone 234320 (TRAV1-2, TRAJ33)
CAVRAPDSNYQLIW

SEQ ID NO: 468640 - protein, 14 aa, Homo sapiens
  CDR3 for beta chain variable domain of TCR clone 234320 (TRBV7-3, TRBJ2-1)
CASSLAGGTNEQFF

SEQ ID NO: 468641 - protein, 13 aa, Homo sapiens
  CDR3 for alpha chain variable domain of TCR clone 234321 (TRAV38-1, TRAJ52)
CAFRGTSYGKLTF

SEQ ID NO: 468642 - protein, 13 aa, Homo sapiens
  CDR3 for beta chain variable domain of TCR clone 234321 (TRBV12-5, TRBJ2-3)
CASGDRQSDTQYF

SEQ ID NO: 468643 - protein, 13 aa, Homo sapiens
  CDR3 for alpha chain variable domain of TCR clone 234322 (TRAV8-3, TRAJ6)
CAVGSGGSYIPTF

SEQ ID NO: 468644 - protein, 16 aa, Homo sapiens
  CDR3 for beta chain variable domain of TCR clone 234322 (TRBV11-2, TRBJ1-1)
CASSTQRGRTELSLDK

SEQ ID NO: 468645 - protein, 16 aa, Homo sapiens
  CDR3 for alpha chain variable domain of TCR clone 234323 (TRAV12-3, TRAJ53)
CAMSPGSGGSNYKLTF

SEQ ID NO: 468646 - protein, 14 aa, Homo sapiens
  CDR3 for beta chain variable domain of TCR clone 234323 (TRBV2, TRBJ2-7)
CVSSLTSGGYEQYF

SEQ ID NO: 468647 - protein, 13 aa, Homo sapiens
  CDR3 for alpha chain variable domain of TCR clone 234324 (TRAV17, TRAJ26)
CATVDNYGQNFVF

SEQ ID NO: 468648 - protein, 12 aa, Homo sapiens
  CDR3 for beta chain variable domain of TCR clone 234324 (TRBV9, TRBJ2-1)
CASSTVNYEQLF

SEQ ID NO: 468649 - protein, 16 aa, Homo sapiens
  CDR3 for alpha chain variable domain of TCR clone 234325 (TRAV30, TRAJ24)
CGTEIVDADSWGKCQF

SEQ ID NO: 468650 - protein, 13 aa, Homo sapiens
  CDR3 for beta chain variable domain of TCR clone 234325 (TRBV11-2, TRBJ2-5)
CASSSTGEETQYF

SEQ ID NO: 468651 - protein, 14 aa, Homo sapiens
  CDR3 for alpha chain variable domain of TCR clone 234326 (TRAV8-4, TRAJ13)
CAVTLSGGYQKVTF

SEQ ID NO: 468652 - protein, 14 aa, Homo sapiens
  CDR3 for beta chain variable domain of TCR clone 234326 (TRBV12-5, TRBJ2-5)
CASGSRTHQETLYF

SEQ ID NO: 468653 - protein, 14 aa, Homo sapiens
  CDR3 for alpha chain variable domain of TCR clone 234327 (TRAV23/DV6, TRAJ4)
CAANLSGGYNKLMF

SEQ ID NO: 468654 - protein, 17 aa, Homo sapiens
  CDR3 for beta chain variable domain of TCR clone 234327 (TRBV4-1, TRBJ1-3)
CASSPQRGIRFGNTIYF

SEQ ID NO: 468655 - protein, 16 aa, Homo sapiens
  CDR3 for alpha chain variable domain of TCR clone 234328 (TRAV1-1, TRAJ28)
CAVRDDSGAGSYQLTF

SEQ ID NO: 468656 - protein, 12 aa, Homo sapiens
  CDR3 for beta chain variable domain of TCR clone 234328 (TRBV11-2, TRBJ2-5)
CASSLDTQTQYC

SEQ ID NO: 468657 - protein, 12 aa, Homo sapiens
  CDR3 for alpha chain variable domain of TCR clone 234329 (TRAV12-2, TRAJ29)
CAVDSGNTPLVF

SEQ ID NO: 468658 - protein, 13 aa, Homo sapiens
  CDR3 for beta chain variable domain of TCR clone 234329 (TRBV11-2, TRBJ1-1)
CASSLETSTEAFF

SEQ ID NO: 468659 - protein, 16 aa, Homo sapiens
  CDR3 for alpha chain variable domain of TCR clone 234330 (TRAV12-3, TRAJ53)
CAMSPGSGGSNYKLTF

SEQ ID NO: 468660 - protein, 14 aa, Homo sapiens
  CDR3 for beta chain variable domain of TCR clone 234330 (TRBV4-2, TRBJ2-1)
CASGLDRAYNQQFF

SEQ ID NO: 468661 - protein, 14 aa, Homo sapiens
  CDR3 for alpha chain variable domain of TCR clone 234331 (TRAV2, TRAJ37)
CAVDFTSNTGKLIF

SEQ ID NO: 468662 - protein, 15 aa, Homo sapiens
  CDR3 for beta chain variable domain of TCR clone 234331 (TRBV7-2, TRBJ2-5)
CASSFLRGGEETQYF

SEQ ID NO: 468663 - protein, 14 aa, Homo sapiens
  CDR3 for alpha chain variable domain of TCR clone 234332 (TRAV17, TRAJ54)
CATDANQGAQKLVF

SEQ ID NO: 468664 - protein, 12 aa, Homo sapiens
  CDR3 for beta chain variable domain of TCR clone 234332 (TRBV6-3, TRBJ2-1)
CASSGSYYEQFF

SEQ ID NO: 468665 - protein, 14 aa, Homo sapiens
  CDR3 for alpha chain variable domain of TCR clone 234333 (TRAV35, TRAJ34)
CAGRGTPTSPSLGL

SEQ ID NO: 468666 - protein, 15 aa, Homo sapiens
  CDR3 for beta chain variable domain of TCR clone 234333 (TRBV6-1, TRBJ2-3)
CASSERGGITDTQYF

SEQ ID NO: 468667 - protein, 15 aa, Homo sapiens
  CDR3 for alpha chain variable domain of TCR clone 234334 (TRAV26-1, TRAJ22)
CIVRVSFLFCKAPAL

SEQ ID NO: 468668 - protein, 13 aa, Homo sapiens
  CDR3 for beta chain variable domain of TCR clone 234334 (TRBV7-9, TRBJ1-2)
CASSLKQNYGYTF

SEQ ID NO: 468669 - protein, 14 aa, Homo sapiens
  CDR3 for alpha chain variable domain of TCR clone 234335 (TRAV6, TRAJ37)
CALGSQVNTGKLIF

SEQ ID NO: 468670 - protein, 15 aa, Homo sapiens
  CDR3 for beta chain variable domain of TCR clone 234335 (TRBV2, TRBJ2-1)
CASSEEREGDNEQFF

SEQ ID NO: 468671 - protein, 14 aa, Homo sapiens
  CDR3 for alpha chain variable domain of TCR clone 234336 (TRAV12-2, TRAJ13)
CAVKKTGGYQKVTF

SEQ ID NO: 468672 - protein, 18 aa, Homo sapiens
  CDR3 for beta chain variable domain of TCR clone 234336 (TRBV20-1, TRBJ2-3)
CSASGRAGGPGTTDTQYF

SEQ ID NO: 468673 - protein, 15 aa, Homo sapiens
  CDR3 for alpha chain variable domain of TCR clone 234337 (TRAV2, TRAJ9)
CAVEDRGTGGFKTIF

SEQ ID NO: 468674 - protein, 16 aa, Homo sapiens
  CDR3 for beta chain variable domain of TCR clone 234337 (TRBV11-1, TRBJ1-1)
CATNPRDRAFNTEAFF

SEQ ID NO: 468675 - protein, 13 aa, Homo sapiens
  CDR3 for alpha chain variable domain of TCR clone 234338 (TRAV8-3, TRAJ28)
CAVGAVGSYQLTF

SEQ ID NO: 468676 - protein, 16 aa, Homo sapiens
  CDR3 for beta chain variable domain of TCR clone 234338 (TRBV6-1, TRBJ1-2)
CASSGAWQGRSHGYTF

SEQ ID NO: 468677 - protein, 18 aa, Homo sapiens
  CDR3 for alpha chain variable domain of TCR clone 234339 (TRAV29/DV5, TRAJ53)
CSVLLCSKRGGSNYKLTF

SEQ ID NO: 468678 - protein, 14 aa, Homo sapiens
  CDR3 for beta chain variable domain of TCR clone 234339 (TRBV15, TRBJ2-3)
CATRRGTSTDTQYF

SEQ ID NO: 468679 - protein, 17 aa, Homo sapiens
  CDR3 for alpha chain variable domain of TCR clone 234340 (TRAV3, TRAJ38)
CAVRDCLNAGNNLKLIW

SEQ ID NO: 468680 - protein, 14 aa, Homo sapiens
  CDR3 for beta chain variable domain of TCR clone 234340 (TRBV6-1, TRBJ1-3)
CASVQGGGGNTIYF

SEQ ID NO: 468681 - protein, 16 aa, Homo sapiens
  CDR3 for alpha chain variable domain of TCR clone 234341 (TRAV27, TRAJ13)
CAGAKSDSGGYQKVTF

SEQ ID NO: 468682 - protein, 15 aa, Homo sapiens
  CDR3 for beta chain variable domain of TCR clone 234341 (TRBV11-3, TRBJ2-3)
CASLKDGREGDTQYF

SEQ ID NO: 468683 - protein, 13 aa, Homo sapiens
  CDR3 for alpha chain variable domain of TCR clone 234342 (TRAV36/DV7, TRAJ34)
CAVGEVNTDKLIF

SEQ ID NO: 468684 - protein, 14 aa, Homo sapiens
  CDR3 for beta chain variable domain of TCR clone 234342 (TRBV6-1, TRBJ1-3)
CASVQGGGGSTIYF

SEQ ID NO: 468685 - protein, 14 aa, Homo sapiens
  CDR3 for alpha chain variable domain of TCR clone 234343 (TRAV3, TRAJ15)
CAVTLNQAGTALIF

SEQ ID NO: 468686 - protein, 13 aa, Homo sapiens
  CDR3 for beta chain variable domain of TCR clone 234343 (TRBV12-4, TRBJ1-2)
CASSLRQGKGYTF

SEQ ID NO: 468687 - protein, 12 aa, Homo sapiens
  CDR3 for alpha chain variable domain of TCR clone 234344 (TRAV30, TRAJ31)
CGTAKHNARLMF

SEQ ID NO: 468688 - protein, 13 aa, Homo sapiens
  CDR3 for beta chain variable domain of TCR clone 234344 (TRBV19, TRBJ1-2)
CASSQGQVYGYTF

SEQ ID NO: 468689 - protein, 12 aa, Homo sapiens
  CDR3 for alpha chain variable domain of TCR clone 234345 (TRAV25, TRAJ53)
CQSGGSNYKLTF

SEQ ID NO: 468690 - protein, 12 aa, Homo sapiens
  CDR3 for beta chain variable domain of TCR clone 234345 (TRBV14, TRBJ2-7)
CASSSVKGEQYF

SEQ ID NO: 468691 - protein, 13 aa, Homo sapiens
  CDR3 for alpha chain variable domain of TCR clone 234346 (TRAV35, TRAJ48)
CAGHEFGNEKVTF

SEQ ID NO: 468692 - protein, 13 aa, Homo sapiens
  CDR3 for beta chain variable domain of TCR clone 234346 (TRBV7-2, TRBJ1-6)
CASSLVGSSPLHF

SEQ ID NO: 468693 - protein, 14 aa, Homo sapiens
  CDR3 for alpha chain variable domain of TCR clone 234347 (TRAV12-2, TRAJ13)
CAVKKTGGYQTVTF

SEQ ID NO: 468694 - protein, 13 aa, Homo sapiens
  CDR3 for beta chain variable domain of TCR clone 234347 (TRBV10-3, TRBJ2-7)
CASKLAVNYEKYF

SEQ ID NO: 468695 - protein, 13 aa, Homo sapiens
  CDR3 for alpha chain variable domain of TCR clone 234348 (TRAV27, TRAJ41)
CAGEGNPGYALNF

SEQ ID NO: 468696 - protein, 14 aa, Homo sapiens
  CDR3 for beta chain variable domain of TCR clone 234348 (TRBV25-1, TRBJ1-1)
CASTHLGGNTEAFF

SEQ ID NO: 468697 - protein, 15 aa, Homo sapiens
  CDR3 for alpha chain variable domain of TCR clone 234349 (TRAV35, TRAJ58)
CAGRRQETSGSRLTF

SEQ ID NO: 468698 - protein, 16 aa, Homo sapiens
  CDR3 for beta chain variable domain of TCR clone 234349 (TRBV4-2, TRBJ1-1)
CASSQAGFGMNTEAFF

SEQ ID NO: 468699 - protein, 14 aa, Homo sapiens
  CDR3 for alpha chain variable domain of TCR clone 234350 (TRAV1-2, TRAJ16)
CAVNRFSDGQKLLF

SEQ ID NO: 468700 - protein, 11 aa, Homo sapiens
  CDR3 for beta chain variable domain of TCR clone 234350 (TRBV10-1, TRBJ2-3)
CASSDSDTQYF

SEQ ID NO: 468701 - protein, 16 aa, Homo sapiens
  CDR3 for alpha chain variable domain of TCR clone 234351 (TRAV14/DV4, TRAJ20)
CAMREGRSRDDYKLSF

SEQ ID NO: 468702 - protein, 15 aa, Homo sapiens
  CDR3 for beta chain variable domain of TCR clone 234351 (TRBV10-2, TRBJ2-6)
CASSEQGTGANVLTF

SEQ ID NO: 468703 - protein, 12 aa, Homo sapiens
  CDR3 for alpha chain variable domain of TCR clone 234352 (TRAV21, TRAJ12)
CAVMDSSYKLIF

SEQ ID NO: 468704 - protein, 16 aa, Homo sapiens
  CDR3 for beta chain variable domain of TCR clone 234352 (TRBV7-9, TRBJ2-5)
CASRLEIGTRKETQNF

SEQ ID NO: 468705 - protein, 14 aa, Homo sapiens
  CDR3 for alpha chain variable domain of TCR clone 234353 (TRAV38-1, TRAJ45)
CASHSGGGADGLTF

SEQ ID NO: 468706 - protein, 15 aa, Homo sapiens
  CDR3 for beta chain variable domain of TCR clone 234353 (TRBV6-1, TRBJ2-5)
CASSEGWGIQETQYF

SEQ ID NO: 468707 - protein, 15 aa, Homo sapiens
  CDR3 for alpha chain variable domain of TCR clone 234354 (TRAV21, TRAJ33)
CAVNPPRDSNYQLIW

SEQ ID NO: 468708 - protein, 14 aa, Homo sapiens
  CDR3 for beta chain variable domain of TCR clone 234354 (TRBV7-2, TRBJ2-7)
CASSPKTSFYEQYF

SEQ ID NO: 468709 - protein, 13 aa, Homo sapiens
  CDR3 for alpha chain variable domain of TCR clone 234355 (TRAV8-3, TRAJ48)
CAGVPFGNEKLTF

SEQ ID NO: 468710 - protein, 12 aa, Homo sapiens
  CDR3 for beta chain variable domain of TCR clone 234355 (TRBV11-2, TRBJ2-2)
CASSLGGGELFF

SEQ ID NO: 468711 - protein, 13 aa, Homo sapiens
  CDR3 for alpha chain variable domain of TCR clone 234356 (TRAV8-3, TRAJ36)
CAVGATGANNLFF

SEQ ID NO: 468712 - protein, 15 aa, Homo sapiens
  CDR3 for beta chain variable domain of TCR clone 234356 (TRBV5-7, TRBJ2-3)
CASSPWDSATDTQYF

SEQ ID NO: 468713 - protein, 14 aa, Homo sapiens
  CDR3 for alpha chain variable domain of TCR clone 234357 (TRAV9-2, TRAJ39)
CALYIYDAGNMLTF

SEQ ID NO: 468714 - protein, 14 aa, Homo sapiens
  CDR3 for beta chain variable domain of TCR clone 234357 (TRBV11-3, TRBJ1-6)
RASSFSGGDSPLHF

SEQ ID NO: 468715 - protein, 13 aa, Homo sapiens
  CDR3 for alpha chain variable domain of TCR clone 234358 (TRAV27, TRAJ45)
CRSSGGGADGLTF

SEQ ID NO: 468716 - protein, 14 aa, Homo sapiens
  CDR3 for beta chain variable domain of TCR clone 234358 (TRBV7-9, TRBJ2-1)
CAGSSMVGFGEQFF

SEQ ID NO: 468717 - protein, 11 aa, Homo sapiens
  CDR3 for alpha chain variable domain of TCR clone 234359 (TRAV13-1, TRAJ43)
CAAHNNNDMRF

SEQ ID NO: 468718 - protein, 15 aa, Homo sapiens
  CDR3 for beta chain variable domain of TCR clone 234359 (TRBV6-1, TRBJ2-2)
CSSSRLRGDTGELFF

SEQ ID NO: 468719 - protein, 15 aa, Homo sapiens
  CDR3 for alpha chain variable domain of TCR clone 234360 (TRAV23/DV6, TRAJ27)
CAASKPMQANQPLGM

SEQ ID NO: 468720 - protein, 15 aa, Homo sapiens
  CDR3 for beta chain variable domain of TCR clone 234360 (TRBV6-3, TRBJ2-7)
CASSSPGTVFYEQYF

SEQ ID NO: 468721 - protein, 15 aa, Homo sapiens
  CDR3 for alpha chain variable domain of TCR clone 234361 (TRAV29/DV5, TRAJ40)
CAASEGTSGTYKYIF

SEQ ID NO: 468722 - protein, 15 aa, Homo sapiens
  CDR3 for beta chain variable domain of TCR clone 234361 (TRBV27, TRBJ1-5)
CASTIQGAGNQPQHF

SEQ ID NO: 468723 - protein, 15 aa, Homo sapiens
  CDR3 for alpha chain variable domain of TCR clone 234362 (TRAV20, TRAJ53)
CAVQASGGSNYKLTF

SEQ ID NO: 468724 - protein, 15 aa, Homo sapiens
  CDR3 for beta chain variable domain of TCR clone 234362 (TRBV9, TRBJ2-1)
CASSIAGSSYNEQFF

SEQ ID NO: 468725 - protein, 11 aa, Homo sapiens
  CDR3 for alpha chain variable domain of TCR clone 234363 (TRAV21, TRAJ11)
CAVNGYSTLTF

SEQ ID NO: 468726 - protein, 11 aa, Homo sapiens
  CDR3 for beta chain variable domain of TCR clone 234363 (TRBV19, TRBJ1-1)
CASSIGSGAFL

SEQ ID NO: 468727 - protein, 16 aa, Homo sapiens
  CDR3 for alpha chain variable domain of TCR clone 234364 (TRAV3, TRAJ40)
CAVRDRIASGTDKYIF

SEQ ID NO: 468728 - protein, 16 aa, Homo sapiens
  CDR3 for beta chain variable domain of TCR clone 234364 (TRBV2, TRBJ2-1)
CASRSPAGGKYNEQFF

SEQ ID NO: 468729 - protein, 14 aa, Homo sapiens
  CDR3 for alpha chain variable domain of TCR clone 234365 (TRAV13-2, TRAJ17)
CAENSKAAGNKLTF

SEQ ID NO: 468730 - protein, 11 aa, Homo sapiens
  CDR3 for beta chain variable domain of TCR clone 234365 (TRBV6-3, TRBJ2-3)
CATGQKDTQYF

SEQ ID NO: 468731 - protein, 12 aa, Homo sapiens
  CDR3 for alpha chain variable domain of TCR clone 234366 (TRAV12-3, TRAJ20)
CAMVRGDYKLSF

SEQ ID NO: 468732 - protein, 17 aa, Homo sapiens
  CDR3 for beta chain variable domain of TCR clone 234366 (TRBV28, TRBJ2-5)
CASRTPEGDALQETQYF

SEQ ID NO: 468733 - protein, 14 aa, Homo sapiens
  CDR3 for alpha chain variable domain of TCR clone 234367 (TRAV12-2, TRAJ13)
CAVKKTGGYQKVTF

SEQ ID NO: 468734 - protein, 12 aa, Homo sapiens
  CDR3 for beta chain variable domain of TCR clone 234367 (TRBV19, TRBJ2-7)
CASTSGTYEQYF

SEQ ID NO: 468735 - protein, 13 aa, Homo sapiens
  CDR3 for alpha chain variable domain of TCR clone 234368 (TRAV26-2, TRAJ43)
CILRAVNHNDMRF

SEQ ID NO: 468736 - protein, 15 aa, Homo sapiens
  CDR3 for beta chain variable domain of TCR clone 234368 (TRBV7-2, TRBJ2-1)
CASTHGTGIYNEQFF

SEQ ID NO: 468737 - protein, 12 aa, Homo sapiens
  CDR3 for alpha chain variable domain of TCR clone 234369 (TRAV26-1, TRAJ26)
CIVYNYGQNFVF

SEQ ID NO: 468738 - protein, 15 aa, Homo sapiens
  CDR3 for beta chain variable domain of TCR clone 234369 (TRBV7-2, TRBJ2-3)
CASSLRGGRTDTQYF

SEQ ID NO: 468739 - protein, 13 aa, Homo sapiens
  CDR3 for alpha chain variable domain of TCR clone 234370 (TRAV2, TRAJ40)
CAVVPSGTYKYIF

SEQ ID NO: 468740 - protein, 16 aa, Homo sapiens
  CDR3 for beta chain variable domain of TCR clone 234370 (TRBV29-1, TRBJ2-6)
CSVEDITYSGANVLTF

SEQ ID NO: 468741 - protein, 14 aa, Homo sapiens
  CDR3 for alpha chain variable domain of TCR clone 234371 (TRAV38-1, TRAJ29)
CAFITPSGNTPLVF

SEQ ID NO: 468742 - protein, 17 aa, Homo sapiens
  CDR3 for beta chain variable domain of TCR clone 234371 (TRBV11-2, TRBJ2-1)
CASSLYPPGVEYNEQFF

SEQ ID NO: 468743 - protein, 12 aa, Homo sapiens
  CDR3 for alpha chain variable domain of TCR clone 234372 (TRAV12-2, TRAJ57)
CAVSRVRADLKS

SEQ ID NO: 468744 - protein, 14 aa, Homo sapiens
  CDR3 for beta chain variable domain of TCR clone 234372 (TRBV20-1, TRBJ2-1)
CSAHPGLPYNEQFF

SEQ ID NO: 468745 - protein, 16 aa, Homo sapiens
  CDR3 for alpha chain variable domain of TCR clone 234373 (TRAV1-2, TRAJ35)
CAARGLTIGFGNVLHC

SEQ ID NO: 468746 - protein, 13 aa, Homo sapiens
  CDR3 for beta chain variable domain of TCR clone 234373 (TRBV6-6, TRBJ2-1)
CASSLHQGDEQFF

SEQ ID NO: 468747 - protein, 17 aa, Homo sapiens
  CDR3 for alpha chain variable domain of TCR clone 234374 (TRAV3, TRAJ6)
CAVRDGHRAGGSYIPTF

SEQ ID NO: 468748 - protein, 16 aa, Homo sapiens
  CDR3 for beta chain variable domain of TCR clone 234374 (TRBV7-8, TRBJ2-3)
CASSTEGQRETDTQYF

SEQ ID NO: 468749 - protein, 16 aa, Homo sapiens
  CDR3 for alpha chain variable domain of TCR clone 234375 (TRAV13-1, TRAJ37)
CAASIGGSSNTGKLIF

SEQ ID NO: 468750 - protein, 11 aa, Homo sapiens
  CDR3 for beta chain variable domain of TCR clone 234375 (TRBV12-4, TRBJ2-3)
CASTATDTQYF

SEQ ID NO: 468751 - protein, 14 aa, Homo sapiens
  CDR3 for alpha chain variable domain of TCR clone 234376 (TRAV17, TRAJ12)
CATDREDRSYKLIF

SEQ ID NO: 468752 - protein, 14 aa, Homo sapiens
  CDR3 for beta chain variable domain of TCR clone 234376 (TRBV4-1, TRBJ2-7)
CASSQERDSSEQYF

SEQ ID NO: 468753 - protein, 15 aa, Homo sapiens
  CDR3 for alpha chain variable domain of TCR clone 234377 (TRAV3, TRAJ22)
CAVRDRGGSARPLTF

SEQ ID NO: 468754 - protein, 13 aa, Homo sapiens
  CDR3 for beta chain variable domain of TCR clone 234377 (TRBV7-9, TRBJ1-2)
CASSLKQNYGYTF

SEQ ID NO: 468755 - protein, 14 aa, Homo sapiens
  CDR3 for alpha chain variable domain of TCR clone 234378 (TRAV17, TRAJ57)
CATDPQGGSEKLVF

SEQ ID NO: 468756 - protein, 16 aa, Homo sapiens
  CDR3 for beta chain variable domain of TCR clone 234378 (TRBV7-2, TRBJ2-7)
CASSLVMGVGSYEQYF

SEQ ID NO: 468757 - protein, 22 aa, Homo sapiens
  CDR3 for alpha chain variable domain of TCR clone 234379 (TRAV26-1, TRAJ23)
CCVLLHRQSGLEVWNQGGKLIF

SEQ ID NO: 468758 - protein, 15 aa, Homo sapiens
  CDR3 for beta chain variable domain of TCR clone 234379 (TRBV10-3, TRBJ2-3)
CAISDWDRDTDTQYF

SEQ ID NO: 468759 - protein, 13 aa, Homo sapiens
  CDR3 for alpha chain variable domain of TCR clone 234380 (TRAV2, TRAJ40)
FAVVTSGTYKFIF

SEQ ID NO: 468760 - protein, 14 aa, Homo sapiens
  CDR3 for beta chain variable domain of TCR clone 234380 (TRBV19, TRBJ2-1)
CASPTFVLSGEQFF

SEQ ID NO: 468761 - protein, 13 aa, Homo sapiens
  CDR3 for alpha chain variable domain of TCR clone 234381 (TRAV24, TRAJ42)
CAFSTGSQGNLIF

SEQ ID NO: 468762 - protein, 16 aa, Homo sapiens
  CDR3 for beta chain variable domain of TCR clone 234381 (TRBV27, TRBJ2-7)
CASSSERRDSAYEQYF

SEQ ID NO: 468763 - protein, 15 aa, Homo sapiens
  CDR3 for alpha chain variable domain of TCR clone 234382 (TRAV3, TRAJ3)
CAVRDRDSSASTIIF

SEQ ID NO: 468764 - protein, 18 aa, Homo sapiens
  CDR3 for beta chain variable domain of TCR clone 234382 (TRBV25-1, TRBJ1-2)
CASSGLRNGQGLIFGYTF

SEQ ID NO: 468765 - protein, 17 aa, Homo sapiens
  CDR3 for alpha chain variable domain of TCR clone 234383 (TRAV8-6, TRAJ58)
CALSSWVGETSGSRLTF

SEQ ID NO: 468766 - protein, 17 aa, Homo sapiens
  CDR3 for beta chain variable domain of TCR clone 234383 (TRBV11-2, TRBJ2-1)
CASSLYPPGVEYNEQFF

SEQ ID NO: 468767 - protein, 14 aa, Homo sapiens
  CDR3 for alpha chain variable domain of TCR clone 234384 (TRAV1-2, TRAJ8)
CAVREDTGFQKLVV

SEQ ID NO: 468768 - protein, 15 aa, Homo sapiens
  CDR3 for beta chain variable domain of TCR clone 234384 (TRBV6-3, TRBJ2-7)
CASSSPGTVFYEQYF

SEQ ID NO: 468769 - protein, 14 aa, Homo sapiens
  CDR3 for alpha chain variable domain of TCR clone 234385 (TRAV16, TRAJ15)
CALSGPQAGTARIF

SEQ ID NO: 468770 - protein, 12 aa, Homo sapiens
  CDR3 for beta chain variable domain of TCR clone 234385 (TRBV18, TRBJ2-5)
CASSPSKETQYF

SEQ ID NO: 468771 - protein, 14 aa, Homo sapiens
  CDR3 for alpha chain variable domain of TCR clone 234386 (TRAV38-1, TRAJ45)
CASHSGGGADGITF

SEQ ID NO: 468772 - protein, 16 aa, Homo sapiens
  CDR3 for beta chain variable domain of TCR clone 234386 (TRBV27, TRBJ2-2)
CASSFRGLVRTGELFF

SEQ ID NO: 468773 - protein, 14 aa, Homo sapiens
  CDR3 for alpha chain variable domain of TCR clone 234387 (TRAV1-1, TRAJ27)
CAVIYNTNAGKSTF

SEQ ID NO: 468774 - protein, 13 aa, Homo sapiens
  CDR3 for beta chain variable domain of TCR clone 234387 (TRBV27, TRBJ1-4)
CASSLMGDEKLFF

SEQ ID NO: 468775 - protein, 10 aa, Homo sapiens
  CDR3 for alpha chain variable domain of TCR clone 234388 (TRAV36/DV7, TRAJ48)
CAVGNEKLTF

SEQ ID NO: 468776 - protein, 14 aa, Homo sapiens
  CDR3 for beta chain variable domain of TCR clone 234388 (TRBV12-5, TRBJ2-3)
CASEGIPSTDTQYF

SEQ ID NO: 468777 - protein, 12 aa, Homo sapiens
  CDR3 for alpha chain variable domain of TCR clone 234389 (TRAV38-1, TRAJ32)
CAPLGATKKLIF

SEQ ID NO: 468778 - protein, 14 aa, Homo sapiens
  CDR3 for beta chain variable domain of TCR clone 234389 (TRBV29-1, TRBJ2-5)
CSVETSGSGETQYF

SEQ ID NO: 468779 - protein, 17 aa, Homo sapiens
  CDR3 for alpha chain variable domain of TCR clone 234390 (TRAV14/DV4, TRAJ4)
CAMREASGRGGYNKLIF

SEQ ID NO: 468780 - protein, 14 aa, Homo sapiens
  CDR3 for beta chain variable domain of TCR clone 234390 (TRBV19, TRBJ2-7)
CASSMGQWAIEQYF

SEQ ID NO: 468781 - protein, 13 aa, Homo sapiens
  CDR3 for alpha chain variable domain of TCR clone 234391 (TRAV27, TRAJ58)
CAGFETSGSRLTF

SEQ ID NO: 468782 - protein, 13 aa, Homo sapiens
  CDR3 for beta chain variable domain of TCR clone 234391 (TRBV4-1, TRBJ2-7)
CASSQGQAYEQYF

SEQ ID NO: 468783 - protein, 13 aa, Homo sapiens
  CDR3 for alpha chain variable domain of TCR clone 234392 (TRAV3, TRAJ21)
CAVREPNFNKFYF

SEQ ID NO: 468784 - protein, 15 aa, Homo sapiens
  CDR3 for beta chain variable domain of TCR clone 234392 (TRBV9, TRBJ1-6)
CASSVAGTGDSPLHF

SEQ ID NO: 468785 - protein, 15 aa, Homo sapiens
  CDR3 for alpha chain variable domain of TCR clone 234393 (TRAV13-1, TRAJ17)
CAASIERAAGNKLTF

SEQ ID NO: 468786 - protein, 15 aa, Homo sapiens
  CDR3 for beta chain variable domain of TCR clone 234393 (TRBV16, TRBJ1-1)
CASSPSRGGRTEAFF

SEQ ID NO: 468787 - protein, 13 aa, Homo sapiens
  CDR3 for alpha chain variable domain of TCR clone 234394 (TRAV26-1, TRAJ33)
CIVRVEGNYQLIW

SEQ ID NO: 468788 - protein, 14 aa, Homo sapiens
  CDR3 for beta chain variable domain of TCR clone 234394 (TRBV7-2, TRBJ2-7)
CASRSQGAAYEQYF

SEQ ID NO: 468789 - protein, 13 aa, Homo sapiens
  CDR3 for alpha chain variable domain of TCR clone 234395 (TRAV3, TRAJ21)
CAVREADFNKFYF

SEQ ID NO: 468790 - protein, 13 aa, Homo sapiens
  CDR3 for beta chain variable domain of TCR clone 234395 (TRBV9, TRBJ2-1)
CASSPSGGNEQFF

SEQ ID NO: 468791 - protein, 13 aa, Homo sapiens
  CDR3 for alpha chain variable domain of TCR clone 234396 (TRAV12-2, TRAJ20)
CAVYPSNDYKLSF

SEQ ID NO: 468792 - protein, 13 aa, Homo sapiens
  CDR3 for beta chain variable domain of TCR clone 234396 (TRBV7-2, TRBJ2-7)
CASSSPSGSEQYF

SEQ ID NO: 468793 - protein, 13 aa, Homo sapiens
  CDR3 for alpha chain variable domain of TCR clone 234397 (TRAV35, TRAJ37)
CAGSSGNTGKLSF

SEQ ID NO: 468794 - protein, 16 aa, Homo sapiens
  CDR3 for beta chain variable domain of TCR clone 234397 (TRBV10-3, TRBJ2-1)
CAISLTSGNSYNEQFF

SEQ ID NO: 468795 - protein, 14 aa, Homo sapiens
  CDR3 for alpha chain variable domain of TCR clone 234398 (TRAV13-1, TRAJ44)
CAAKATGTARKLTF

SEQ ID NO: 468796 - protein, 16 aa, Homo sapiens
  CDR3 for beta chain variable domain of TCR clone 234398 (TRBV28, TRBJ2-1)
CASSSPEYPRDNEQFF

SEQ ID NO: 468797 - protein, 16 aa, Homo sapiens
  CDR3 for alpha chain variable domain of TCR clone 234399 (TRAV26-1, TRAJ53)
CIVRVAMGGSNYKLTF

SEQ ID NO: 468798 - protein, 16 aa, Homo sapiens
  CDR3 for beta chain variable domain of TCR clone 234399 (TRBV15, TRBJ2-5)
CATSRYLEAAQETQYF

SEQ ID NO: 468799 - protein, 13 aa, Homo sapiens
  CDR3 for alpha chain variable domain of TCR clone 234400 (TRAV1-2, TRAJ11)
CAVRREGYSTLPF

SEQ ID NO: 468800 - protein, 14 aa, Homo sapiens
  CDR3 for beta chain variable domain of TCR clone 234400 (TRBV25-1, TRBJ1-1)
CASTHLGGNTEAFF

SEQ ID NO: 468801 - protein, 14 aa, Homo sapiens
  CDR3 for alpha chain variable domain of TCR clone 234401 (TRAV1-2, TRAJ8)
CAVREDTGFQKLVC

SEQ ID NO: 468802 - protein, 15 aa, Homo sapiens
  CDR3 for beta chain variable domain of TCR clone 234401 (TRBV6-3, TRBJ2-7)
CASSSTGTVFYEQYF

SEQ ID NO: 468803 - protein, 15 aa, Homo sapiens
  CDR3 for alpha chain variable domain of TCR clone 234402 (TRAV12-3, TRAJ6)
CAMSAASVGSYIPTF

SEQ ID NO: 468804 - protein, 13 aa, Homo sapiens
  CDR3 for beta chain variable domain of TCR clone 234402 (TRBV20-1, TRBJ1-2)
CSASPEFNYGYTF

SEQ ID NO: 468805 - protein, 14 aa, Homo sapiens
  CDR3 for alpha chain variable domain of TCR clone 234403 (TRAV12-2, TRAJ13)
CAVKKTGGYQKVTF

SEQ ID NO: 468806 - protein, 16 aa, Homo sapiens
  CDR3 for beta chain variable domain of TCR clone 234403 (TRBV27, TRBJ2-2)
CASSASGVSNTGELFF

SEQ ID NO: 468807 - protein, 14 aa, Homo sapiens
  CDR3 for alpha chain variable domain of TCR clone 234404 (TRAV12-2, TRAJ40)
CAVKIPSGTYKYIF

SEQ ID NO: 468808 - protein, 13 aa, Homo sapiens
  CDR3 for beta chain variable domain of TCR clone 234404 (TRBV7-9, TRBJ1-2)
CASSLKQNYGYTL

SEQ ID NO: 468809 - protein, 14 aa, Homo sapiens
  CDR3 for alpha chain variable domain of TCR clone 234405 (TRAV12-1, TRAJ23)
CVVILYNQGGKLIF

SEQ ID NO: 468810 - protein, 15 aa, Homo sapiens
  CDR3 for beta chain variable domain of TCR clone 234405 (TRBV20-1, TRBJ1-5)
CSAKPPGQGPQPQHF

SEQ ID NO: 468811 - protein, 14 aa, Homo sapiens
  CDR3 for alpha chain variable domain of TCR clone 234406 (TRAV9-2, TRAJ39)
CALYIYNAGNMLTF

SEQ ID NO: 468812 - protein, 12 aa, Homo sapiens
  CDR3 for beta chain variable domain of TCR clone 234406 (TRBV7-3, TRBJ2-5)
CASSSPGGTQYF

SEQ ID NO: 468813 - protein, 14 aa, Homo sapiens
  CDR3 for alpha chain variable domain of TCR clone 234407 (TRAV17, TRAJ22)
CATDKRGSERQLTF

SEQ ID NO: 468814 - protein, 15 aa, Homo sapiens
  CDR3 for beta chain variable domain of TCR clone 234407 (TRBV11-3, TRBJ2-3)
CASLKDGREGDTQYF

SEQ ID NO: 468815 - protein, 17 aa, Homo sapiens
  CDR3 for alpha chain variable domain of TCR clone 234408 (TRAV3, TRAJ38)
CAVRDCLNAGNNRKLIW

SEQ ID NO: 468816 - protein, 15 aa, Homo sapiens
  CDR3 for beta chain variable domain of TCR clone 234408 (TRBV28, TRBJ2-1)
CASSIIAGGRSEQFF

SEQ ID NO: 468817 - protein, 13 aa, Homo sapiens
  CDR3 for alpha chain variable domain of TCR clone 234409 (TRAV6, TRAJ5)
CAPADTGRRALTF

SEQ ID NO: 468818 - protein, 16 aa, Homo sapiens
  CDR3 for beta chain variable domain of TCR clone 234409 (TRBV5-7, TRBJ1-5)
CASSLQQDREYQPQQF

SEQ ID NO: 468819 - protein, 15 aa, Homo sapiens
  CDR3 for alpha chain variable domain of TCR clone 234410 (TRAV13-1, TRAJ4)
CAASIGGYNKLILEQ

SEQ ID NO: 468820 - protein, 16 aa, Homo sapiens
  CDR3 for beta chain variable domain of TCR clone 234410 (TRBV20-1, TRBJ2-1)
CSAPGLAGSYSDEQFF

SEQ ID NO: 468821 - protein, 14 aa, Homo sapiens
  CDR3 for alpha chain variable domain of TCR clone 234411 (TRAV8-4, TRAJ17)
CAVRDQAAGNKLTL

SEQ ID NO: 468822 - protein, 15 aa, Homo sapiens
  CDR3 for beta chain variable domain of TCR clone 234411 (TRBV7-2, TRBJ1-2)
CASSLAPDRGLGYTF

SEQ ID NO: 468823 - protein, 19 aa, Homo sapiens
  CDR3 for alpha chain variable domain of TCR clone 234412 (TRAV2, TRAJ20)
ILQVREADAAVYRDCKLSF

SEQ ID NO: 468824 - protein, 16 aa, Homo sapiens
  CDR3 for beta chain variable domain of TCR clone 234412 (TRBV2, TRBJ2-5)
CASSETQGVGEETQYF

SEQ ID NO: 468825 - protein, 14 aa, Homo sapiens
  CDR3 for alpha chain variable domain of TCR clone 234413 (TRAV12-1, TRAJ23)
CVVNAAGRKAYLRP

SEQ ID NO: 468826 - protein, 12 aa, Homo sapiens
  CDR3 for beta chain variable domain of TCR clone 234413 (TRBV6-5, TRBJ2-3)
CASSDTTDTQYF

SEQ ID NO: 468827 - protein, 10 aa, Homo sapiens
  CDR3 for alpha chain variable domain of TCR clone 234414 (TRAV16, TRAJ22)
SAMYLRQLTF

SEQ ID NO: 468828 - protein, 15 aa, Homo sapiens
  CDR3 for beta chain variable domain of TCR clone 234414 (TRBV9, TRBJ1-6)
CASSVAGTGDSPLHF

SEQ ID NO: 468829 - protein, 13 aa, Homo sapiens
  CDR3 for alpha chain variable domain of TCR clone 234415 (TRAV1-1, TRAJ38)
CASNAGNNRKLFW

SEQ ID NO: 468830 - protein, 14 aa, Homo sapiens
  CDR3 for beta chain variable domain of TCR clone 234415 (TRBV15, TRBJ2-1)
CATSGVEDYNEQFF

SEQ ID NO: 468831 - protein, 11 aa, Homo sapiens
  CDR3 for alpha chain variable domain of TCR clone 234416 (TRAV21, TRAJ23)
CAPQRRGKLIF

SEQ ID NO: 468832 - protein, 14 aa, Homo sapiens
  CDR3 for beta chain variable domain of TCR clone 234416 (TRBV12-4, TRBJ1-1)
CANTWTGHDTEAFF

SEQ ID NO: 468833 - protein, 15 aa, Homo sapiens
  CDR3 for alpha chain variable domain of TCR clone 234417 (TRAV17, TRAJ57)
CATGPSQGGSEKLVF

SEQ ID NO: 468834 - protein, 16 aa, Homo sapiens
  CDR3 for beta chain variable domain of TCR clone 234417 (TRBV12-4, TRBJ1-5)
CASIQPVGGSNQRQHF

SEQ ID NO: 468835 - protein, 13 aa, Homo sapiens
  CDR3 for alpha chain variable domain of TCR clone 234418 (TRAV12-1, TRAJ21)
CVVTLYNFHKFYF

SEQ ID NO: 468836 - protein, 20 aa, Homo sapiens
  CDR3 for beta chain variable domain of TCR clone 234418 (TRBV7-8, TRBJ2-1)
CASSLAHRLAGVRSYNEQFF

SEQ ID NO: 468837 - protein, 14 aa, Homo sapiens
  CDR3 for alpha chain variable domain of TCR clone 234419 (TRAV20, TRAJ56)
CAVQFGGANSKLTF

SEQ ID NO: 468838 - protein, 15 aa, Homo sapiens
  CDR3 for beta chain variable domain of TCR clone 234419 (TRBV20-1, TRBJ2-2)
CSAIPGHSNTGELFF

SEQ ID NO: 468839 - protein, 16 aa, Homo sapiens
  CDR3 for alpha chain variable domain of TCR clone 234420 (TRAV13-1, TRAJ18)
CAASRMRGSTLGRLYF

SEQ ID NO: 468840 - protein, 12 aa, Homo sapiens
  CDR3 for beta chain variable domain of TCR clone 234420 (TRBV12-4, TRBJ2-1)
CASSKDRRWQFF

SEQ ID NO: 468841 - protein, 14 aa, Homo sapiens
  CDR3 for alpha chain variable domain of TCR clone 234421 (TRAV12-3, TRAJ12)
CAMSEVDSSYKLIL

SEQ ID NO: 468842 - protein, 12 aa, Homo sapiens
  CDR3 for beta chain variable domain of TCR clone 234421 (TRBV18, TRBJ1-4)
CASAPSREKLFF

SEQ ID NO: 468843 - protein, 16 aa, Homo sapiens
  CDR3 for alpha chain variable domain of TCR clone 234422 (TRAV3, TRAJ37)
CAVRGKGFGNTGKLIF

SEQ ID NO: 468844 - protein, 15 aa, Homo sapiens
  CDR3 for beta chain variable domain of TCR clone 234422 (TRBV18, TRBJ2-1)
CASSPPSASYNEQFF

SEQ ID NO: 468845 - protein, 13 aa, Homo sapiens
  CDR3 for alpha chain variable domain of TCR clone 234423 (TRAV17, TRAJ22)
CAHHSGSARQLTF

SEQ ID NO: 468846 - protein, 15 aa, Homo sapiens
  CDR3 for beta chain variable domain of TCR clone 234423 (TRBV5-1, TRBJ2-3)
CASSVTSGSTDTQYF

SEQ ID NO: 468847 - protein, 16 aa, Homo sapiens
  CDR3 for alpha chain variable domain of TCR clone 234424 (TRAV3, TRAJ32)
CAVRENYVGATNKLIF

SEQ ID NO: 468848 - protein, 12 aa, Homo sapiens
  CDR3 for beta chain variable domain of TCR clone 234424 (TRBV20-1, TRBJ1-2)
CSVTPEGYGYTF

SEQ ID NO: 468849 - protein, 12 aa, Homo sapiens
  CDR3 for alpha chain variable domain of TCR clone 234425 (TRAV16, TRAJ49)
CALNEGGNQFYF

SEQ ID NO: 468850 - protein, 16 aa, Homo sapiens
  CDR3 for beta chain variable domain of TCR clone 234425 (TRBV11-2, TRBJ2-7)
CASSPTTGGVSYEQYF

SEQ ID NO: 468851 - protein, 14 aa, Homo sapiens
  CDR3 for alpha chain variable domain of TCR clone 234426 (TRAV13-1, TRAJ24)
CAASRADSWGKLQF

SEQ ID NO: 468852 - protein, 15 aa, Homo sapiens
  CDR3 for beta chain variable domain of TCR clone 234426 (TRBV7-9, TRBJ1-5)
CASSQGHQPNQPQHF

SEQ ID NO: 468853 - protein, 11 aa, Homo sapiens
  CDR3 for alpha chain variable domain of TCR clone 234427 (TRAV23/DV6, TRAJ9)
CFHPGGFKTIF

SEQ ID NO: 468854 - protein, 15 aa, Homo sapiens
  CDR3 for beta chain variable domain of TCR clone 234427 (TRBV7-9, TRBJ1-6)
CASSSPGRGNSPLHF

SEQ ID NO: 468855 - protein, 13 aa, Homo sapiens
  CDR3 for alpha chain variable domain of TCR clone 234428 (TRAV1-2, TRAJ20)
CAVPRSNDSKLSF

SEQ ID NO: 468856 - protein, 14 aa, Homo sapiens
  CDR3 for beta chain variable domain of TCR clone 234428 (TRBV20-1, TRBJ2-7)
RSARYGTTYYEQYF

SEQ ID NO: 468857 - protein, 18 aa, Homo sapiens
  CDR3 for alpha chain variable domain of TCR clone 234429 (TRAV35, TRAJ28)
CAGHNYPLSGAGSYQLTF

SEQ ID NO: 468858 - protein, 14 aa, Homo sapiens
  CDR3 for beta chain variable domain of TCR clone 234429 (TRBV7-9, TRBJ1-1)
CASSLRVLKLSLDK

SEQ ID NO: 468859 - protein, 14 aa, Homo sapiens
  CDR3 for alpha chain variable domain of TCR clone 234430 (TRAV1-2, TRAJ16)
CAVNRFSDGQKLLF

SEQ ID NO: 468860 - protein, 16 aa, Homo sapiens
  CDR3 for beta chain variable domain of TCR clone 234430 (TRBV28, TRBJ2-3)
CASSSFGTGGTDTQYF

SEQ ID NO: 468861 - protein, 16 aa, Homo sapiens
  CDR3 for alpha chain variable domain of TCR clone 234431 (TRAV3, TRAJ21)
CAVRDIKRGNFNKFYF

SEQ ID NO: 468862 - protein, 16 aa, Homo sapiens
  CDR3 for beta chain variable domain of TCR clone 234431 (TRBV12-4, TRBJ1-5)
CASSRPVGGSNQPQHF

SEQ ID NO: 468863 - protein, 14 aa, Homo sapiens
  CDR3 for alpha chain variable domain of TCR clone 234432 (TRAV9-2, TRAJ36)
CALPWRTGAKNLFF

SEQ ID NO: 468864 - protein, 14 aa, Homo sapiens
  CDR3 for beta chain variable domain of TCR clone 234432 (TRBV2, TRBJ1-2)
CASSELQVNYGYTF

SEQ ID NO: 468865 - protein, 13 aa, Homo sapiens
  CDR3 for alpha chain variable domain of TCR clone 234433 (TRAV17, TRAJ54)
CATSWGGAHKLVF

SEQ ID NO: 468866 - protein, 15 aa, Homo sapiens
  CDR3 for beta chain variable domain of TCR clone 234433 (TRBV4-3, TRBJ2-3)
CASSPSLLSTDTQYF

SEQ ID NO: 468867 - protein, 14 aa, Homo sapiens
  CDR3 for alpha chain variable domain of TCR clone 234434 (TRAV12-1, TRAJ23)
CVVIVYNQGGKLIF

SEQ ID NO: 468868 - protein, 16 aa, Homo sapiens
  CDR3 for beta chain variable domain of TCR clone 234434 (TRBV19, TRBJ2-2)
CASRSPGTGATGELFF

SEQ ID NO: 468869 - protein, 13 aa, Homo sapiens
  CDR3 for alpha chain variable domain of TCR clone 234435 (TRAV21, TRAJ27)
CAARPGNAGKSTL

SEQ ID NO: 468870 - protein, 14 aa, Homo sapiens
  CDR3 for beta chain variable domain of TCR clone 234435 (TRBV7-6, TRBJ2-3)
CATSLGTVTDTQYF

SEQ ID NO: 468871 - protein, 15 aa, Homo sapiens
  CDR3 for alpha chain variable domain of TCR clone 234436 (TRAV1-2, TRAJ28)
CAVQYSGAGSYQITF

SEQ ID NO: 468872 - protein, 13 aa, Homo sapiens
  CDR3 for beta chain variable domain of TCR clone 234436 (TRBV20-1, TRBJ2-7)
CSATHTSGYEQYF

SEQ ID NO: 468873 - protein, 12 aa, Homo sapiens
  CDR3 for alpha chain variable domain of TCR clone 234437 (TRAV12-1, TRAJ40)
CVVYSRTYKYIF

SEQ ID NO: 468874 - protein, 18 aa, Homo sapiens
  CDR3 for beta chain variable domain of TCR clone 234437 (TRBV11-3, TRBJ2-3)
CASSLGGASRGAPNTQYF

SEQ ID NO: 468875 - protein, 14 aa, Homo sapiens
  CDR3 for alpha chain variable domain of TCR clone 234438 (TRAV38-1, TRAJ43)
CAFMKHNNNNDMRF

SEQ ID NO: 468876 - protein, 20 aa, Homo sapiens
  CDR3 for beta chain variable domain of TCR clone 234438 (TRBV19, TRBJ2-1)
CASSISRTVTSTRLNNEQFF

SEQ ID NO: 468877 - protein, 17 aa, Homo sapiens
  CDR3 for alpha chain variable domain of TCR clone 234439 (TRAV3, TRAJ42)
FAVRDRDYGGSQGNLIF

SEQ ID NO: 468878 - protein, 15 aa, Homo sapiens
  CDR3 for beta chain variable domain of TCR clone 234439 (TRBV6-3, TRBJ2-7)
CASSSPGTVFYEQYF

SEQ ID NO: 468879 - protein, 16 aa, Homo sapiens
  CDR3 for alpha chain variable domain of TCR clone 234440 (TRAV21, TRAJ52)
CAVTNAGGTSYGNLTF

SEQ ID NO: 468880 - protein, 13 aa, Homo sapiens
  CDR3 for beta chain variable domain of TCR clone 234440 (TRBV20-1, TRBJ2-3)
CSARLAGTDTQYF

SEQ ID NO: 468881 - protein, 15 aa, Homo sapiens
  CDR3 for alpha chain variable domain of TCR clone 234441 (TRAV17, TRAJ28)
CATDPSGAGSYQLTF

SEQ ID NO: 468882 - protein, 14 aa, Homo sapiens
  CDR3 for beta chain variable domain of TCR clone 234441 (TRBV25-1, TRBJ1-1)
CASTHLGGNTEAFF

SEQ ID NO: 468883 - protein, 12 aa, Homo sapiens
  CDR3 for alpha chain variable domain of TCR clone 234442 (TRAV21, TRAJ31)
CAVSPARGRLMF

SEQ ID NO: 468884 - protein, 14 aa, Homo sapiens
  CDR3 for beta chain variable domain of TCR clone 234442 (TRBV28, TRBJ2-7)
CAISLLRISYEQYF

SEQ ID NO: 468885 - protein, 15 aa, Homo sapiens
  CDR3 for alpha chain variable domain of TCR clone 234443 (TRAV17, TRAJ57)
CATGPSQGGSEKRVF

SEQ ID NO: 468886 - protein, 16 aa, Homo sapiens
  CDR3 for beta chain variable domain of TCR clone 234443 (TRBV12-4, TRBJ1-5)
CASSRPVGGSNQPQHV

SEQ ID NO: 468887 - protein, 13 aa, Homo sapiens
  CDR3 for alpha chain variable domain of TCR clone 234444 (TRAV12-3, TRAJ33)
CAMSVNSNYRLIW

SEQ ID NO: 468888 - protein, 13 aa, Homo sapiens
  CDR3 for beta chain variable domain of TCR clone 234444 (TRBV4-1, TRBJ2-2)
CASSQENTGELFF

SEQ ID NO: 468889 - protein, 14 aa, Homo sapiens
  CDR3 for alpha chain variable domain of TCR clone 234445 (TRAV26-1, TRAJ38)
CIADNAGNNRKLIL

SEQ ID NO: 468890 - protein, 12 aa, Homo sapiens
  CDR3 for beta chain variable domain of TCR clone 234445 (TRBV5-4, TRBJ2-7)
CASSWAGQGENF

SEQ ID NO: 468891 - protein, 10 aa, Homo sapiens
  CDR3 for alpha chain variable domain of TCR clone 234446 (TRAV21, TRAJ31)
CAVDNARLMF

SEQ ID NO: 468892 - protein, 15 aa, Homo sapiens
  CDR3 for beta chain variable domain of TCR clone 234446 (TRBV7-8, TRBJ1-5)
CASSLERRGLEPQHF

SEQ ID NO: 468893 - protein, 15 aa, Homo sapiens
  CDR3 for alpha chain variable domain of TCR clone 234447 (TRAV25, TRAJ38)
CAGPVNAGNNRKLIW

SEQ ID NO: 468894 - protein, 14 aa, Homo sapiens
  CDR3 for beta chain variable domain of TCR clone 234447 (TRBV15, TRBJ2-7)
CATSRVARGYEQYF

SEQ ID NO: 468895 - protein, 12 aa, Homo sapiens
  CDR3 for alpha chain variable domain of TCR clone 234448 (TRAV1-1, TRAJ23)
CAVTNQGGKLIF

SEQ ID NO: 468896 - protein, 13 aa, Homo sapiens
  CDR3 for beta chain variable domain of TCR clone 234448 (TRBV19, TRBJ1-2)
CASSVPGQDGYTF

SEQ ID NO: 468897 - protein, 13 aa, Homo sapiens
  CDR3 for alpha chain variable domain of TCR clone 234449 (TRAV13-2, TRAJ5)
CAVMDTGRRALTF

SEQ ID NO: 468898 - protein, 16 aa, Homo sapiens
  CDR3 for beta chain variable domain of TCR clone 234449 (TRBV12-5, TRBJ2-5)
CASGPRTSGKQETQYF

SEQ ID NO: 468899 - protein, 14 aa, Homo sapiens
  CDR3 for alpha chain variable domain of TCR clone 234450 (TRAV20, TRAJ20)
CAVRRGYNDYKLSF

SEQ ID NO: 468900 - protein, 13 aa, Homo sapiens
  CDR3 for beta chain variable domain of TCR clone 234450 (TRBV19, TRBJ2-5)
CASREPAPETQYF

SEQ ID NO: 468901 - protein, 14 aa, Homo sapiens
  CDR3 for alpha chain variable domain of TCR clone 234451 (TRAV36/DV7, TRAJ48)
CAQRRDFGNEKLTF

SEQ ID NO: 468902 - protein, 14 aa, Homo sapiens
  CDR3 for beta chain variable domain of TCR clone 234451 (TRBV28, TRBJ2-4)
CASTQVTGINIQYF

SEQ ID NO: 468903 - protein, 12 aa, Homo sapiens
  CDR3 for alpha chain variable domain of TCR clone 234452 (TRAV16, TRAJ26)
CALRSYVQNFVF

SEQ ID NO: 468904 - protein, 14 aa, Homo sapiens
  CDR3 for beta chain variable domain of TCR clone 234452 (TRBV10-3, TRBJ2-1)
CASSSDLAYNEQFS

SEQ ID NO: 468905 - protein, 13 aa, Homo sapiens
  CDR3 for alpha chain variable domain of TCR clone 234453 (TRAV21, TRAJ20)
CSVGLRVDYKLSF

SEQ ID NO: 468906 - protein, 13 aa, Homo sapiens
  CDR3 for beta chain variable domain of TCR clone 234453 (TRBV7-3, TRBJ1-1)
CASSQDWGAEAFF

SEQ ID NO: 468907 - protein, 15 aa, Homo sapiens
  CDR3 for alpha chain variable domain of TCR clone 234454 (TRAV4, TRAJ12)
CLVGDLMDSSYKLIF

SEQ ID NO: 468908 - protein, 14 aa, Homo sapiens
  CDR3 for beta chain variable domain of TCR clone 234454 (TRBV7-2, TRBJ1-1)
CASSHRQWRTEAFF

SEQ ID NO: 468909 - protein, 12 aa, Homo sapiens
  CDR3 for alpha chain variable domain of TCR clone 234455 (TRAV3, TRAJ20)
CAVRDPDYKLSF

SEQ ID NO: 468910 - protein, 13 aa, Homo sapiens
  CDR3 for beta chain variable domain of TCR clone 234455 (TRBV12-4, TRBJ2-5)
CASRLAVQETQYF

SEQ ID NO: 468911 - protein, 19 aa, Homo sapiens
  CDR3 for alpha chain variable domain of TCR clone 234456 (TRAV2, TRAJ37)
CAPWLWQHRQNNLWARDNF

SEQ ID NO: 468912 - protein, 19 aa, Homo sapiens
  CDR3 for beta chain variable domain of TCR clone 234456 (TRBV20-1, TRBJ2-7)
CSARGLVEGTSGRGNEQYF

SEQ ID NO: 468913 - protein, 12 aa, Homo sapiens
  CDR3 for alpha chain variable domain of TCR clone 234457 (TRAV12-3, TRAJ17)
CAMTLTGNKLTF

SEQ ID NO: 468914 - protein, 18 aa, Homo sapiens
  CDR3 for beta chain variable domain of TCR clone 234457 (TRBV18, TRBJ1-3)
CASSPRGGAGPSGNTMYF

SEQ ID NO: 468915 - protein, 15 aa, Homo sapiens
  CDR3 for alpha chain variable domain of TCR clone 234458 (TRAV8-3, TRAJ21)
CAVGALPPRGYKFYF

SEQ ID NO: 468916 - protein, 16 aa, Homo sapiens
  CDR3 for beta chain variable domain of TCR clone 234458 (TRBV20-1, TRBJ1-4)
CSAPGQGLLTNEKLFF

SEQ ID NO: 468917 - protein, 17 aa, Homo sapiens
  CDR3 for alpha chain variable domain of TCR clone 234459 (TRAV8-6, TRAJ58)
CAVSSWVGETSGSRLTF

SEQ ID NO: 468918 - protein, 17 aa, Homo sapiens
  CDR3 for beta chain variable domain of TCR clone 234459 (TRBV4-1, TRBJ2-3)
CASSQGYVSGGTDTQYF

SEQ ID NO: 468919 - protein, 11 aa, Homo sapiens
  CDR3 for alpha chain variable domain of TCR clone 234460 (TRAV21, TRAJ23)
CAPQRRGKLIF

SEQ ID NO: 468920 - protein, 16 aa, Homo sapiens
  CDR3 for beta chain variable domain of TCR clone 234460 (TRBV7-3, TRBJ2-2)
CASSLKRGTLSGELFF

SEQ ID NO: 468921 - protein, 13 aa, Homo sapiens
  CDR3 for alpha chain variable domain of TCR clone 234461 (TRAV12-1, TRAJ34)
CVVTGYNTDKLIF

SEQ ID NO: 468922 - protein, 14 aa, Homo sapiens
  CDR3 for beta chain variable domain of TCR clone 234461 (TRBV7-9, TRBJ2-2)
CASSLGHRTGELFF

SEQ ID NO: 468923 - protein, 14 aa, Homo sapiens
  CDR3 for alpha chain variable domain of TCR clone 234462 (TRAV12-1, TRAJ42)
CVVIYGGSQGNLIF

SEQ ID NO: 468924 - protein, 13 aa, Homo sapiens
  CDR3 for beta chain variable domain of TCR clone 234462 (TRBV18, TRBJ2-5)
CANSPPGKETQYF

SEQ ID NO: 468925 - protein, 13 aa, Homo sapiens
  CDR3 for alpha chain variable domain of TCR clone 234463 (TRAV35, TRAJ42)
CAGFPGSQGDLIF

SEQ ID NO: 468926 - protein, 13 aa, Homo sapiens
  CDR3 for beta chain variable domain of TCR clone 234463 (TRBV29-1, TRBJ2-1)
CIVEGGRVNEQFF

SEQ ID NO: 468927 - protein, 14 aa, Homo sapiens
  CDR3 for alpha chain variable domain of TCR clone 234464 (TRAV13-1, TRAJ35)
CAASKGGFRNVLYC

SEQ ID NO: 468928 - protein, 13 aa, Homo sapiens
  CDR3 for beta chain variable domain of TCR clone 234464 (TRBV7-3, TRBJ1-1)
CASSQDWGAEAFF

SEQ ID NO: 468929 - protein, 21 aa, Homo sapiens
  CDR3 for alpha chain variable domain of TCR clone 234465 (TRAV8-3, TRAJ6)
CAVGGEEATYIHLEEEPALLF

SEQ ID NO: 468930 - protein, 14 aa, Homo sapiens
  CDR3 for beta chain variable domain of TCR clone 234465 (TRBV5-1, TRBJ2-7)
CASSRGESLYEQYF

SEQ ID NO: 468931 - protein, 14 aa, Homo sapiens
  CDR3 for alpha chain variable domain of TCR clone 234466 (TRAV2, TRAJ9)
CAVEDRSGGFKTIF

SEQ ID NO: 468932 - protein, 16 aa, Homo sapiens
  CDR3 for beta chain variable domain of TCR clone 234466 (TRBV7-2, TRBJ1-2)
CASSSNQDRRGHGYTF

SEQ ID NO: 468933 - protein, 17 aa, Homo sapiens
  CDR3 for alpha chain variable domain of TCR clone 234467 (TRAV3, TRAJ42)
CAVRDRDYGGSQGNLIF

SEQ ID NO: 468934 - protein, 13 aa, Homo sapiens
  CDR3 for beta chain variable domain of TCR clone 234467 (TRBV19, TRBJ2-7)
CASSPRQSYEQYF

SEQ ID NO: 468935 - protein, 12 aa, Homo sapiens
  CDR3 for alpha chain variable domain of TCR clone 234468 (TRAV13-2, TRAJ23)
CAERHRGGKLIL

SEQ ID NO: 468936 - protein, 17 aa, Homo sapiens
  CDR3 for beta chain variable domain of TCR clone 234468 (TRBV5-3, TRBJ1-5)
CARSPRRDRRCTQPQHF

SEQ ID NO: 468937 - protein, 15 aa, Homo sapiens
  CDR3 for alpha chain variable domain of TCR clone 234469 (TRAV8-3, TRAJ35)
CAVGATIGVGNVLHC

SEQ ID NO: 468938 - protein, 11 aa, Homo sapiens
  CDR3 for beta chain variable domain of TCR clone 234469 (TRBV24-1, TRBJ2-5)
CATSIGETQYF

SEQ ID NO: 468939 - protein, 12 aa, Homo sapiens
  CDR3 for alpha chain variable domain of TCR clone 234470 (TRAV3, TRAJ43)
CAVRDPNNDMRF

SEQ ID NO: 468940 - protein, 15 aa, Homo sapiens
  CDR3 for beta chain variable domain of TCR clone 234470 (TRBV27, TRBJ1-5)
CASSLGTGFDEPQHF

SEQ ID NO: 468941 - protein, 18 aa, Homo sapiens
  CDR3 for alpha chain variable domain of TCR clone 234471 (TRAV26-1, TRAJ5)
CIVRVVPPRDTGRRALTF

SEQ ID NO: 468942 - protein, 15 aa, Homo sapiens
  CDR3 for beta chain variable domain of TCR clone 234471 (TRBV7-9, TRBJ2-7)
CASSLLMGQANEQYF

SEQ ID NO: 468943 - protein, 14 aa, Homo sapiens
  CDR3 for alpha chain variable domain of TCR clone 234472 (TRAV8-1, TRAJ23)
CALGTYNQGGKLIF

SEQ ID NO: 468944 - protein, 16 aa, Homo sapiens
  CDR3 for beta chain variable domain of TCR clone 234472 (TRBV18, TRBJ1-5)
CASSPSTGNSNQPQHF

SEQ ID NO: 468945 - protein, 14 aa, Homo sapiens
  CDR3 for alpha chain variable domain of TCR clone 234473 (TRAV2, TRAJ9)
CAVEDRSGGFKTIF

SEQ ID NO: 468946 - protein, 12 aa, Homo sapiens
  CDR3 for beta chain variable domain of TCR clone 234473 (TRBV12-4, TRBJ2-4)
WASSSSGNIQYF

SEQ ID NO: 468947 - protein, 14 aa, Homo sapiens
  CDR3 for alpha chain variable domain of TCR clone 234474 (TRAV4, TRAJ20)
CLGGRRSNDYKLSF

SEQ ID NO: 468948 - protein, 18 aa, Homo sapiens
  CDR3 for beta chain variable domain of TCR clone 234474 (TRBV2, TRBJ2-5)
CASSGDPQGRGAQETQYF

SEQ ID NO: 468949 - protein, 12 aa, Homo sapiens
  CDR3 for alpha chain variable domain of TCR clone 234475 (TRAV21, TRAJ33)
CAKMDSNYQLIW

SEQ ID NO: 468950 - protein, 13 aa, Homo sapiens
  CDR3 for beta chain variable domain of TCR clone 234475 (TRBV7-2, TRBJ2-1)
CASSLGVYNEQFF

SEQ ID NO: 468951 - protein, 15 aa, Homo sapiens
  CDR3 for alpha chain variable domain of TCR clone 234476 (TRAV26-1, )
CIADNAGNDHIQNPD

SEQ ID NO: 468952 - protein, 15 aa, Homo sapiens
  CDR3 for beta chain variable domain of TCR clone 234476 (TRBV19, TRBJ1-1)
CASTSGQIQNTEAFF

SEQ ID NO: 468953 - protein, 15 aa, Homo sapiens
  CDR3 for alpha chain variable domain of TCR clone 234477 (TRAV29/DV5, TRAJ48)
CAASASNFGNEKLTF

SEQ ID NO: 468954 - protein, 15 aa, Homo sapiens
  CDR3 for beta chain variable domain of TCR clone 234477 (TRBV9, TRBJ1-6)
CASSVAGTGDSPLHF

SEQ ID NO: 468955 - protein, 14 aa, Homo sapiens
  CDR3 for alpha chain variable domain of TCR clone 234478 (TRAV2, TRAJ37)
CAVDFTSNTGKLIF

SEQ ID NO: 468956 - protein, 15 aa, Homo sapiens
  CDR3 for beta chain variable domain of TCR clone 234478 (TRBV20-1, TRBJ1-1)
RSASREVTGNTEAFF

SEQ ID NO: 468957 - protein, 14 aa, Homo sapiens
  CDR3 for alpha chain variable domain of TCR clone 234479 (TRAV13-1, TRAJ48)
CAASRSFGNEKLTF

SEQ ID NO: 468958 - protein, 12 aa, Homo sapiens
  CDR3 for beta chain variable domain of TCR clone 234479 (TRBV11-2, TRBJ2-2)
CASSLGGGELFF

SEQ ID NO: 468959 - protein, 14 aa, Homo sapiens
  CDR3 for alpha chain variable domain of TCR clone 234480 (TRAV3, TRAJ9)
CAERLNTRGFKTIF

SEQ ID NO: 468960 - protein, 15 aa, Homo sapiens
  CDR3 for beta chain variable domain of TCR clone 234480 (TRBV7-2, TRBJ2-1)
CASSLASGRVNEQFF

SEQ ID NO: 468961 - protein, 14 aa, Homo sapiens
  CDR3 for alpha chain variable domain of TCR clone 234481 (TRAV1-2, TRAJ8)
CSVREDTGFQKLVF

SEQ ID NO: 468962 - protein, 15 aa, Homo sapiens
  CDR3 for beta chain variable domain of TCR clone 234481 (TRBV27, TRBJ2-1)
CASSNGGGSSNEQFF

SEQ ID NO: 468963 - protein, 13 aa, Homo sapiens
  CDR3 for alpha chain variable domain of TCR clone 234482 (TRAV8-3, TRAJ4)
WVFYSGGYNKLIF

SEQ ID NO: 468964 - protein, 15 aa, Homo sapiens
  CDR3 for beta chain variable domain of TCR clone 234482 (TRBV12-4, TRBJ2-2)
CASSPQPGSTGELFF

SEQ ID NO: 468965 - protein, 11 aa, Homo sapiens
  CDR3 for alpha chain variable domain of TCR clone 234483 (TRAV8-2, TRAJ26)
CVVTLLLGSEF

SEQ ID NO: 468966 - protein, 15 aa, Homo sapiens
  CDR3 for beta chain variable domain of TCR clone 234483 (TRBV11-2, TRBJ2-2)
CATSSDRVNAGELFF

SEQ ID NO: 468967 - protein, 15 aa, Homo sapiens
  CDR3 for alpha chain variable domain of TCR clone 234484 (TRAV3, TRAJ22)
CAARDRGGSARQRTF

SEQ ID NO: 468968 - protein, 13 aa, Homo sapiens
  CDR3 for beta chain variable domain of TCR clone 234484 (TRBV7-3, TRBJ2-5)
CASSFRGGETQYF

SEQ ID NO: 468969 - protein, 13 aa, Homo sapiens
  CDR3 for alpha chain variable domain of TCR clone 234485 (TRAV12-1, TRAJ21)
CVVTLYNFNNFYF

SEQ ID NO: 468970 - protein, 20 aa, Homo sapiens
  CDR3 for beta chain variable domain of TCR clone 234485 (TRBV7-8, TRBJ2-1)
CAISLAHRLAGVRSYNEQFF

SEQ ID NO: 468971 - protein, 15 aa, Homo sapiens
  CDR3 for alpha chain variable domain of TCR clone 234486 (TRAV29/DV5, TRAJ42)
CAAKTDGGSQGNLIF

SEQ ID NO: 468972 - protein, 15 aa, Homo sapiens
  CDR3 for beta chain variable domain of TCR clone 234486 (TRBV5-1, TRBJ2-2)
CVSSSQGGNTGELFF

SEQ ID NO: 468973 - protein, 12 aa, Homo sapiens
  CDR3 for alpha chain variable domain of TCR clone 234487 (TRAV17, TRAJ36)
CATLTGANNPFF

SEQ ID NO: 468974 - protein, 15 aa, Homo sapiens
  CDR3 for beta chain variable domain of TCR clone 234487 (TRBV19, TRBJ1-2)
CASSTKTDTNYGYTF

SEQ ID NO: 468975 - protein, 11 aa, Homo sapiens
  CDR3 for alpha chain variable domain of TCR clone 234488 (TRAV1-2, TRAJ40)
CPVPGTYKYIF

SEQ ID NO: 468976 - protein, 16 aa, Homo sapiens
  CDR3 for beta chain variable domain of TCR clone 234488 (TRBV29-1, TRBJ2-7)
CSVEVVGTSGSYEQYF

SEQ ID NO: 468977 - protein, 16 aa, Homo sapiens
  CDR3 for alpha chain variable domain of TCR clone 234489 (TRAV4, TRAJ22)
CLVGDLYSCSARQLTF

SEQ ID NO: 468978 - protein, 17 aa, Homo sapiens
  CDR3 for beta chain variable domain of TCR clone 234489 (TRBV11-2, TRBJ2-1)
CASSLYPPGVEYNEQFF

SEQ ID NO: 468979 - protein, 14 aa, Homo sapiens
  CDR3 for alpha chain variable domain of TCR clone 234490 (TRAV21, TRAJ11)
CAMRRNSGYSTLTF

SEQ ID NO: 468980 - protein, 11 aa, Homo sapiens
  CDR3 for beta chain variable domain of TCR clone 234490 (TRBV11-2, TRBJ1-1)
CASSINTEAFF

SEQ ID NO: 468981 - protein, 10 aa, Homo sapiens
  CDR3 for alpha chain variable domain of TCR clone 234491 (TRAV1-2, TRAJ31)
CAFFDARLMF

SEQ ID NO: 468982 - protein, 13 aa, Homo sapiens
  CDR3 for beta chain variable domain of TCR clone 234491 (TRBV20-1, TRBJ2-2)
CSASAAGTGELSF

SEQ ID NO: 468983 - protein, 14 aa, Homo sapiens
  CDR3 for alpha chain variable domain of TCR clone 234492 (TRAV12-3, TRAJ10)
SHLPLTGGGNKLTF

SEQ ID NO: 468984 - protein, 13 aa, Homo sapiens
  CDR3 for beta chain variable domain of TCR clone 234492 (TRBV11-2, TRBJ1-1)
CASSLETSTEAFF

SEQ ID NO: 468985 - protein, 10 aa, Homo sapiens
  CDR3 for alpha chain variable domain of TCR clone 234493 (TRAV1-2, TRAJ31)
CAFFDARLMF

SEQ ID NO: 468986 - protein, 11 aa, Homo sapiens
  CDR3 for beta chain variable domain of TCR clone 234493 (TRBV29-1, TRBJ2-5)
CSEDRTGTKYF

SEQ ID NO: 468987 - protein, 16 aa, Homo sapiens
  CDR3 for alpha chain variable domain of TCR clone 234494 (TRAV38-1, TRAJ53)
CACPLNRGGSNYKLTF

SEQ ID NO: 468988 - protein, 15 aa, Homo sapiens
  CDR3 for beta chain variable domain of TCR clone 234494 (TRBV5-7, TRBJ2-5)
CASSLGLAAQETQYF

SEQ ID NO: 468989 - protein, 15 aa, Homo sapiens
  CDR3 for alpha chain variable domain of TCR clone 234495 (TRAV8-2, TRAJ23)
CVVSPLITREESLSS

SEQ ID NO: 468990 - protein, 15 aa, Homo sapiens
  CDR3 for beta chain variable domain of TCR clone 234495 (TRBV7-6, TRBJ1-2)
CASSSGGRGGYGYTF

SEQ ID NO: 468991 - protein, 14 aa, Homo sapiens
  CDR3 for alpha chain variable domain of TCR clone 234496 (TRAV1-2, TRAJ16)
CAVNRFSDGQELLF

SEQ ID NO: 468992 - protein, 13 aa, Homo sapiens
  CDR3 for beta chain variable domain of TCR clone 234496 (TRBV29-1, TRBJ1-1)
CSVGDSRNTEAFF

SEQ ID NO: 468993 - protein, 14 aa, Homo sapiens
  CDR3 for alpha chain variable domain of TCR clone 234497 (TRAV12-2, TRAJ13)
CAVKKTGGYQKVHF

SEQ ID NO: 468994 - protein, 15 aa, Homo sapiens
  CDR3 for beta chain variable domain of TCR clone 234497 (TRBV28, TRBJ2-1)
CASSIIAGGRSEQFF

SEQ ID NO: 468995 - protein, 14 aa, Homo sapiens
  CDR3 for alpha chain variable domain of TCR clone 234498 (TRAV12-3, TRAJ10)
SHLPLPGGGNKLTF

SEQ ID NO: 468996 - protein, 12 aa, Homo sapiens
  CDR3 for beta chain variable domain of TCR clone 234498 (TRBV7-9, TRBJ2-7)
CATRTDAYEQYF

SEQ ID NO: 468997 - protein, 17 aa, Homo sapiens
  CDR3 for alpha chain variable domain of TCR clone 234499 (TRAV3, TRAJ42)
FAVRDRDYGVSQGNLIF

SEQ ID NO: 468998 - protein, 14 aa, Homo sapiens
  CDR3 for beta chain variable domain of TCR clone 234499 (TRBV25-1, TRBJ1-1)
CASTHLGGNTEAFF

SEQ ID NO: 468999 - protein, 13 aa, Homo sapiens
  CDR3 for alpha chain variable domain of TCR clone 234500 (TRAV1-1, TRAJ28)
CVTSGAGSYLLTF

SEQ ID NO: 469000 - protein, 17 aa, Homo sapiens
  CDR3 for beta chain variable domain of TCR clone 234500 (TRBV18, TRBJ2-2)
CASSQRSSGQGPGELFF

SEQ ID NO: 469001 - protein, 13 aa, Homo sapiens
  CDR3 for alpha chain variable domain of TCR clone 234501 (TRAV25, TRAJ17)
CAGLRAAGNKLTF

SEQ ID NO: 469002 - protein, 16 aa, Homo sapiens
  CDR3 for beta chain variable domain of TCR clone 234501 (TRBV28, TRBJ2-7)
CASSPWVATGDLSQYF

SEQ ID NO: 469003 - protein, 12 aa, Homo sapiens
  CDR3 for alpha chain variable domain of TCR clone 234502 (TRAV2, TRAJ3)
CAVRSSASKIIF

SEQ ID NO: 469004 - protein, 15 aa, Homo sapiens
  CDR3 for beta chain variable domain of TCR clone 234502 (TRBV15, TRBJ2-5)
CATSRDGGPQENQYF

SEQ ID NO: 469005 - protein, 13 aa, Homo sapiens
  CDR3 for alpha chain variable domain of TCR clone 234503 (TRAV8-4, TRAJ49)
CAVSDPGGNQFYF

SEQ ID NO: 469006 - protein, 15 aa, Homo sapiens
  CDR3 for beta chain variable domain of TCR clone 234503 (TRBV12-4, TRBJ1-3)
CASSLGLQKGNTMYF

SEQ ID NO: 469007 - protein, 13 aa, Homo sapiens
  CDR3 for alpha chain variable domain of TCR clone 234504 (TRAV12-2, TRAJ42)
CAVKRGSQGNLIF

SEQ ID NO: 469008 - protein, 12 aa, Homo sapiens
  CDR3 for beta chain variable domain of TCR clone 234504 (TRBV5-7, TRBJ1-2)
CAGSLVQNGYTF

SEQ ID NO: 469009 - protein, 16 aa, Homo sapiens
  CDR3 for alpha chain variable domain of TCR clone 234505 (TRAV12-1, TRAJ42)
CVVTPYYGGSQGNLIF

SEQ ID NO: 469010 - protein, 12 aa, Homo sapiens
  CDR3 for beta chain variable domain of TCR clone 234505 (TRBV6-5, TRBJ2-2)
CASRQITGELFF

SEQ ID NO: 469011 - protein, 13 aa, Homo sapiens
  CDR3 for alpha chain variable domain of TCR clone 234506 (TRAV8-3, TRAJ42)
CARYGGSQGNRIF

SEQ ID NO: 469012 - protein, 14 aa, Homo sapiens
  CDR3 for beta chain variable domain of TCR clone 234506 (TRBV20-1, TRBJ2-1)
CSALDRGTYNEQFF

SEQ ID NO: 469013 - protein, 12 aa, Homo sapiens
  CDR3 for alpha chain variable domain of TCR clone 234507 (TRAV13-2, TRAJ23)
CAERHRGGTLIF

SEQ ID NO: 469014 - protein, 15 aa, Homo sapiens
  CDR3 for beta chain variable domain of TCR clone 234507 (TRBV19, TRBJ1-2)
CASSVGQVLNYGYTF

SEQ ID NO: 469015 - protein, 19 aa, Homo sapiens
  CDR3 for alpha chain variable domain of TCR clone 234508 (TRAV26-1, TRAJ52)
CIVRAHRNAGGTSNGKLTF

SEQ ID NO: 469016 - protein, 14 aa, Homo sapiens
  CDR3 for beta chain variable domain of TCR clone 234508 (TRBV7-6, TRBJ2-3)
CASSLGTVTDTQYF

SEQ ID NO: 469017 - protein, 12 aa, Homo sapiens
  CDR3 for alpha chain variable domain of TCR clone 234509 (TRAV22, TRAJ43)
CAVELNNNDMRF

SEQ ID NO: 469018 - protein, 13 aa, Homo sapiens
  CDR3 for beta chain variable domain of TCR clone 234509 (TRBV4-1, TRBJ2-1)
CASSRAGGDEQFF

SEQ ID NO: 469019 - protein, 14 aa, Homo sapiens
  CDR3 for alpha chain variable domain of TCR clone 234510 (TRAV13-1, TRAJ13)
CAASRVGGYQKVTF

SEQ ID NO: 469020 - protein, 13 aa, Homo sapiens
  CDR3 for beta chain variable domain of TCR clone 234510 (TRBV19, TRBJ2-2)
CASSIWSTGELFF

SEQ ID NO: 469021 - protein, 12 aa, Homo sapiens
  CDR3 for alpha chain variable domain of TCR clone 234511 (TRAV9-2, TRAJ20)
CALSEGDYKLSF

SEQ ID NO: 469022 - protein, 13 aa, Homo sapiens
  CDR3 for beta chain variable domain of TCR clone 234511 (TRBV11-2, TRBJ1-6)
CASSLAGVSPLHC

SEQ ID NO: 469023 - protein, 11 aa, Homo sapiens
  CDR3 for alpha chain variable domain of TCR clone 234512 (TRAV12-2, TRAJ39)
CAVNNMLKLGG

SEQ ID NO: 469024 - protein, 16 aa, Homo sapiens
  CDR3 for beta chain variable domain of TCR clone 234512 (TRBV9, TRBJ2-7)
CASSAGPDRSPYEQYF

SEQ ID NO: 469025 - protein, 13 aa, Homo sapiens
  CDR3 for alpha chain variable domain of TCR clone 234513 (TRAV8-3, TRAJ36)
CAVCATGANNLFF

SEQ ID NO: 469026 - protein, 16 aa, Homo sapiens
  CDR3 for beta chain variable domain of TCR clone 234513 (TRBV20-1, TRBJ1-4)
CSAPGQGLLTNEKLFF

SEQ ID NO: 469027 - protein, 13 aa, Homo sapiens
  CDR3 for alpha chain variable domain of TCR clone 234514 (TRAV39, TRAJ58)
CAGEETSGSRLTF

SEQ ID NO: 469028 - protein, 15 aa, Homo sapiens
  CDR3 for beta chain variable domain of TCR clone 234514 (TRBV11-2, TRBJ2-1)
CASSKNRGLIYEQFF

SEQ ID NO: 469029 - protein, 13 aa, Homo sapiens
  CDR3 for alpha chain variable domain of TCR clone 234515 (TRAV35, TRAJ22)
CAGISGSARQLTF

SEQ ID NO: 469030 - protein, 16 aa, Homo sapiens
  CDR3 for beta chain variable domain of TCR clone 234515 (TRBV7-9, TRBJ2-1)
CASSLVLTGQGNEQFF

SEQ ID NO: 469031 - protein, 17 aa, Homo sapiens
  CDR3 for alpha chain variable domain of TCR clone 234516 (TRAV3, TRAJ6)
CAMRDGPRAGGSYIPTF

SEQ ID NO: 469032 - protein, 15 aa, Homo sapiens
  CDR3 for beta chain variable domain of TCR clone 234516 (TRBV20-1, TRBJ2-7)
CSARDRVSGMDEQYF

SEQ ID NO: 469033 - protein, 14 aa, Homo sapiens
  CDR3 for alpha chain variable domain of TCR clone 234517 (TRAV13-2, TRAJ17)
CAENSKAAGNKLTF

SEQ ID NO: 469034 - protein, 16 aa, Homo sapiens
  CDR3 for beta chain variable domain of TCR clone 234517 (TRBV6-5, TRBJ2-7)
CASSYFRVGISDEQYF

SEQ ID NO: 469035 - protein, 18 aa, Homo sapiens
  CDR3 for alpha chain variable domain of TCR clone 234518 (TRAV26-2, TRAJ54)
CIRRDVEVGIQGAQKLVF

SEQ ID NO: 469036 - protein, 17 aa, Homo sapiens
  CDR3 for beta chain variable domain of TCR clone 234518 (TRBV20-1, TRBJ1-5)
CSASLSPGQGGNQPQHF

SEQ ID NO: 469037 - protein, 12 aa, Homo sapiens
  CDR3 for alpha chain variable domain of TCR clone 234519 (TRAV21, TRAJ13)
PGPSGGHQKVTF

SEQ ID NO: 469038 - protein, 16 aa, Homo sapiens
  CDR3 for beta chain variable domain of TCR clone 234519 (TRBV28, TRBJ2-7)
CASSSGTSGRGYEQYF

SEQ ID NO: 469039 - protein, 11 aa, Homo sapiens
  CDR3 for alpha chain variable domain of TCR clone 234520 (TRAV2, TRAJ33)
CAVDSNYQLIW

SEQ ID NO: 469040 - protein, 14 aa, Homo sapiens
  CDR3 for beta chain variable domain of TCR clone 234520 (TRBV11-3, TRBJ2-7)
RASSLGVGDYEQYF

SEQ ID NO: 469041 - protein, 14 aa, Homo sapiens
  CDR3 for alpha chain variable domain of TCR clone 234521 (TRAV12-2, TRAJ48)
CAVKAFFGNEKLTS

SEQ ID NO: 469042 - protein, 13 aa, Homo sapiens
  CDR3 for beta chain variable domain of TCR clone 234521 (TRBV28, TRBJ2-7)
CAGAQQGLDEQYF

SEQ ID NO: 469043 - protein, 14 aa, Homo sapiens
  CDR3 for alpha chain variable domain of TCR clone 234522 (TRAV13-1, TRAJ44)
CAAKATGTASKLTL

SEQ ID NO: 469044 - protein, 16 aa, Homo sapiens
  CDR3 for beta chain variable domain of TCR clone 234522 (TRBV7-9, TRBJ2-6)
CASSLKGPLRANVLTF

SEQ ID NO: 469045 - protein, 13 aa, Homo sapiens
  CDR3 for alpha chain variable domain of TCR clone 234523 (TRAV26-2, TRAJ40)
CILRDAGTYKYIF

SEQ ID NO: 469046 - protein, 13 aa, Homo sapiens
  CDR3 for beta chain variable domain of TCR clone 234523 (TRBV12-5, TRBJ2-3)
CASGDRQSDTQYF

SEQ ID NO: 469047 - protein, 15 aa, Homo sapiens
  CDR3 for alpha chain variable domain of TCR clone 234524 (TRAV1-2, TRAJ32)
CAVRGYGGATNKLIF

SEQ ID NO: 469048 - protein, 15 aa, Homo sapiens
  CDR3 for beta chain variable domain of TCR clone 234524 (TRBV25-1, TRBJ2-5)
CASSDKGTHQETQYF

SEQ ID NO: 469049 - protein, 16 aa, Homo sapiens
  CDR3 for alpha chain variable domain of TCR clone 234525 (TRAV8-3, TRAJ18)
CAVALDRGSTLGRLYF

SEQ ID NO: 469050 - protein, 14 aa, Homo sapiens
  CDR3 for beta chain variable domain of TCR clone 234525 (TRBV19, TRBJ2-1)
CASPTFVLSGEQFF

SEQ ID NO: 469051 - protein, 16 aa, Homo sapiens
  CDR3 for alpha chain variable domain of TCR clone 234526 (TRAV29/DV5, TRAJ18)
CAASANRGSTLGRLYF

SEQ ID NO: 469052 - protein, 15 aa, Homo sapiens
  CDR3 for beta chain variable domain of TCR clone 234526 (TRBV20-1, TRBJ2-7)
CSARDRVSGMDEQYF

SEQ ID NO: 469053 - protein, 13 aa, Homo sapiens
  CDR3 for alpha chain variable domain of TCR clone 234527 (TRAV8-3, TRAJ28)
CAVGAVGSYQLPF

SEQ ID NO: 469054 - protein, 13 aa, Homo sapiens
  CDR3 for beta chain variable domain of TCR clone 234527 (TRBV7-3, TRBJ1-1)
CASSQDWGAEAFF

SEQ ID NO: 469055 - protein, 17 aa, Homo sapiens
  CDR3 for alpha chain variable domain of TCR clone 234528 (TRAV12-1, TRAJ42)
CVVMRMNYGGSQGNLIF

SEQ ID NO: 469056 - protein, 13 aa, Homo sapiens
  CDR3 for beta chain variable domain of TCR clone 234528 (TRBV7-2, TRBJ1-1)
CASSLARPAEVFF

SEQ ID NO: 469057 - protein, 12 aa, Homo sapiens
  CDR3 for alpha chain variable domain of TCR clone 234529 (TRAV21, TRAJ49)
CAVNDAGNQFYF

SEQ ID NO: 469058 - protein, 14 aa, Homo sapiens
  CDR3 for beta chain variable domain of TCR clone 234529 (TRBV18, TRBJ2-7)
CASSPRGGAYEQYF

SEQ ID NO: 469059 - protein, 15 aa, Homo sapiens
  CDR3 for alpha chain variable domain of TCR clone 234530 (TRAV12-1, TRAJ41)
CVVNSRTGSGYALNC

SEQ ID NO: 469060 - protein, 11 aa, Homo sapiens
  CDR3 for beta chain variable domain of TCR clone 234530 (TRBV6-4, TRBJ2-1)
CASSDSYAQFF

SEQ ID NO: 469061 - protein, 13 aa, Homo sapiens
  CDR3 for alpha chain variable domain of TCR clone 234531 (TRAV12-1, TRAJ11)
CVLTRGGYSTLTF

SEQ ID NO: 469062 - protein, 13 aa, Homo sapiens
  CDR3 for beta chain variable domain of TCR clone 234531 (TRBV20-1, TRBJ1-2)
CSARDQGAYGYTF

SEQ ID NO: 469063 - protein, 15 aa, Homo sapiens
  CDR3 for alpha chain variable domain of TCR clone 234532 (TRAV16, TRAJ12)
CSKWLLRDSNYKLIF

SEQ ID NO: 469064 - protein, 13 aa, Homo sapiens
  CDR3 for beta chain variable domain of TCR clone 234532 (TRBV4-2, TRBJ1-1)
CASSQAGNTEAFF

SEQ ID NO: 469065 - protein, 15 aa, Homo sapiens
  CDR3 for alpha chain variable domain of TCR clone 234533 (TRAV3, TRAJ22)
CAVRERGGSARQLTF

SEQ ID NO: 469066 - protein, 15 aa, Homo sapiens
  CDR3 for beta chain variable domain of TCR clone 234533 (TRBV7-2, TRBJ2-2)
CASASQGEPTGELFF

SEQ ID NO: 469067 - protein, 13 aa, Homo sapiens
  CDR3 for alpha chain variable domain of TCR clone 234534 (TRAV27, TRAJ41)
CAGEGNSGYALNF

SEQ ID NO: 469068 - protein, 13 aa, Homo sapiens
  CDR3 for beta chain variable domain of TCR clone 234534 (TRBV7-2, TRBJ2-4)
CASSREHANIQYF

SEQ ID NO: 469069 - protein, 16 aa, Homo sapiens
  CDR3 for alpha chain variable domain of TCR clone 234535 (TRAV4, TRAJ42)
CLVGPIYGGSQGNLIF

SEQ ID NO: 469070 - protein, 20 aa, Homo sapiens
  CDR3 for beta chain variable domain of TCR clone 234535 (TRBV11-2, TRBJ2-7)
LRTRPCISVPAAPGSYEQYF

SEQ ID NO: 469071 - protein, 16 aa, Homo sapiens
  CDR3 for alpha chain variable domain of TCR clone 234536 (TRAV30, TRAJ24)
CGTEIVDADSWGKFQF

SEQ ID NO: 469072 - protein, 14 aa, Homo sapiens
  CDR3 for beta chain variable domain of TCR clone 234536 (TRBV7-9, TRBJ2-7)
CASSLVAGPYEQYF

SEQ ID NO: 469073 - protein, 13 aa, Homo sapiens
  CDR3 for alpha chain variable domain of TCR clone 234537 (TRAV8-3, TRAJ21)
CAVGAYNFNKFYF

SEQ ID NO: 469074 - protein, 15 aa, Homo sapiens
  CDR3 for beta chain variable domain of TCR clone 234537 (TRBV28, TRBJ1-3)
CASSMGWASGNTIYF

SEQ ID NO: 469075 - protein, 13 aa, Homo sapiens
  CDR3 for alpha chain variable domain of TCR clone 234538 (TRAV3, TRAJ36)
CAVRDSGANNPFF

SEQ ID NO: 469076 - protein, 14 aa, Homo sapiens
  CDR3 for beta chain variable domain of TCR clone 234538 (TRBV12-4, TRBJ1-1)
CASSLGTGGTEAFF

SEQ ID NO: 469077 - protein, 12 aa, Homo sapiens
  CDR3 for alpha chain variable domain of TCR clone 234539 (TRAV29/DV5, TRAJ49)
CAATDTGNQFYF

SEQ ID NO: 469078 - protein, 12 aa, Homo sapiens
  CDR3 for beta chain variable domain of TCR clone 234539 (TRBV12-4, TRBJ2-7)
CASSLEGYEQYF

SEQ ID NO: 469079 - protein, 14 aa, Homo sapiens
  CDR3 for alpha chain variable domain of TCR clone 234540 (TRAV8-4, TRAJ33)
CAVSSFDSNYQLIW

SEQ ID NO: 469080 - protein, 14 aa, Homo sapiens
  CDR3 for beta chain variable domain of TCR clone 234540 (TRBV11-2, TRBJ1-3)
CASSLAVPGNTIYF

SEQ ID NO: 469081 - protein, 13 aa, Homo sapiens
  CDR3 for alpha chain variable domain of TCR clone 234541 (TRAV8-1, TRAJ32)
CAADGGATNKLIF

SEQ ID NO: 469082 - protein, 15 aa, Homo sapiens
  CDR3 for beta chain variable domain of TCR clone 234541 (TRBV7-9, TRBJ2-7)
CASSLALAEAYEQYL

SEQ ID NO: 469083 - protein, 15 aa, Homo sapiens
  CDR3 for alpha chain variable domain of TCR clone 234542 (TRAV35, TRAJ40)
CTGQLGTSGTYKYIF

SEQ ID NO: 469084 - protein, 14 aa, Homo sapiens
  CDR3 for beta chain variable domain of TCR clone 234542 (TRBV7-3, TRBJ2-1)
CARSLAGGTNEQFF

SEQ ID NO: 469085 - protein, 11 aa, Homo sapiens
  CDR3 for alpha chain variable domain of TCR clone 234543 (TRAV21, TRAJ20)
CAVRDDYKLSF

SEQ ID NO: 469086 - protein, 14 aa, Homo sapiens
  CDR3 for beta chain variable domain of TCR clone 234543 (TRBV12-4, TRBJ1-1)
CTSSFSQMNTEAFF

SEQ ID NO: 469087 - protein, 12 aa, Homo sapiens
  CDR3 for alpha chain variable domain of TCR clone 234544 (TRAV8-3, TRAJ26)
CAGDNYGQNFVF

SEQ ID NO: 469088 - protein, 12 aa, Homo sapiens
  CDR3 for beta chain variable domain of TCR clone 234544 (TRBV11-2, TRBJ2-1)
CASSPGNNEQFL

SEQ ID NO: 469089 - protein, 14 aa, Homo sapiens
  CDR3 for alpha chain variable domain of TCR clone 234545 (TRAV23/DV6, TRAJ22)
CAASRSGSARQLTF

SEQ ID NO: 469090 - protein, 15 aa, Homo sapiens
  CDR3 for beta chain variable domain of TCR clone 234545 (TRBV27, TRBJ1-6)
CASSFDRGLGSPLHF

SEQ ID NO: 469091 - protein, 15 aa, Homo sapiens
  CDR3 for alpha chain variable domain of TCR clone 234546 (TRAV8-4, TRAJ37)
CAVTYGSSNTGKLIF

SEQ ID NO: 469092 - protein, 13 aa, Homo sapiens
  CDR3 for beta chain variable domain of TCR clone 234546 (TRBV12-4, TRBJ2-5)
CASSLGGSRTQYY

SEQ ID NO: 469093 - protein, 14 aa, Homo sapiens
  CDR3 for alpha chain variable domain of TCR clone 234547 (TRAV12-2, TRAJ13)
CAVKKPGGYQKVTF

SEQ ID NO: 469094 - protein, 15 aa, Homo sapiens
  CDR3 for beta chain variable domain of TCR clone 234547 (TRBV20-1, TRBJ2-1)
CSARGIGGTYNEQFF

SEQ ID NO: 469095 - protein, 15 aa, Homo sapiens
  CDR3 for alpha chain variable domain of TCR clone 234548 (TRAV25, TRAJ23)
CALVPNYNQGGKLIF

SEQ ID NO: 469096 - protein, 13 aa, Homo sapiens
  CDR3 for beta chain variable domain of TCR clone 234548 (TRBV11-3, TRBJ1-1)
CASSWDGNTEAFF

SEQ ID NO: 469097 - protein, 18 aa, Homo sapiens
  CDR3 for alpha chain variable domain of TCR clone 234549 (TRAV21, TRAJ52)
CAVRPSPAGGTSYGKLTF

SEQ ID NO: 469098 - protein, 13 aa, Homo sapiens
  CDR3 for beta chain variable domain of TCR clone 234549 (TRBV2, TRBJ1-5)
CATAGPGNQTQHF

SEQ ID NO: 469099 - protein, 13 aa, Homo sapiens
  CDR3 for alpha chain variable domain of TCR clone 234550 (TRAV20, TRAJ54)
CAVQAGGAQKLVF

SEQ ID NO: 469100 - protein, 14 aa, Homo sapiens
  CDR3 for beta chain variable domain of TCR clone 234550 (TRBV20-1, TRBJ2-7)
CSAKTRTGGYEQYF

SEQ ID NO: 469101 - protein, 13 aa, Homo sapiens
  CDR3 for alpha chain variable domain of TCR clone 234551 (TRAV17, TRAJ9)
CATDYTGGSKTIF

SEQ ID NO: 469102 - protein, 16 aa, Homo sapiens
  CDR3 for beta chain variable domain of TCR clone 234551 (TRBV7-7, TRBJ2-1)
CASSLARGTSYNEQFF

SEQ ID NO: 469103 - protein, 15 aa, Homo sapiens
  CDR3 for alpha chain variable domain of TCR clone 234552 (TRAV19, TRAJ53)
CALSSSGGSNYKMTF

SEQ ID NO: 469104 - protein, 14 aa, Homo sapiens
  CDR3 for beta chain variable domain of TCR clone 234552 (TRBV6-1, TRBJ1-3)
CASVQGGGGNTIYF

SEQ ID NO: 469105 - protein, 13 aa, Homo sapiens
  CDR3 for alpha chain variable domain of TCR clone 234553 (TRAV3, TRAJ29)
CAVRDIIDTPLVF

SEQ ID NO: 469106 - protein, 14 aa, Homo sapiens
  CDR3 for beta chain variable domain of TCR clone 234553 (TRBV4-1, TRBJ1-1)
CASSPKAGNTEAFF

SEQ ID NO: 469107 - protein, 15 aa, Homo sapiens
  CDR3 for alpha chain variable domain of TCR clone 234554 (TRAV17, TRAJ16)
CATALRFSDVQKLLF

SEQ ID NO: 469108 - protein, 15 aa, Homo sapiens
  CDR3 for beta chain variable domain of TCR clone 234554 (TRBV20-1, TRBJ1-1)
CSASRGVTGNTEALF

SEQ ID NO: 469109 - protein, 14 aa, Homo sapiens
  CDR3 for alpha chain variable domain of TCR clone 234555 (TRAV13-1, TRAJ12)
FAASYMDSCYKLIF

SEQ ID NO: 469110 - protein, 13 aa, Homo sapiens
  CDR3 for beta chain variable domain of TCR clone 234555 (TRBV2, TRBJ2-5)
CASSDGIQETQYF

SEQ ID NO: 469111 - protein, 13 aa, Homo sapiens
  CDR3 for alpha chain variable domain of TCR clone 234556 (TRAV35, TRAJ48)
CAGHEFVNEKLTF

SEQ ID NO: 469112 - protein, 14 aa, Homo sapiens
  CDR3 for beta chain variable domain of TCR clone 234556 (TRBV19, TRBJ2-1)
CASPTFVLSGEQFF

SEQ ID NO: 469113 - protein, 11 aa, Homo sapiens
  CDR3 for alpha chain variable domain of TCR clone 234557 (TRAV3, TRAJ21)
CAVCNFIKFYF

SEQ ID NO: 469114 - protein, 16 aa, Homo sapiens
  CDR3 for beta chain variable domain of TCR clone 234557 (TRBV19, TRBJ2-1)
CASSKAGPSSYNEQFF

SEQ ID NO: 469115 - protein, 15 aa, Homo sapiens
  CDR3 for alpha chain variable domain of TCR clone 234558 (TRAV27, TRAJ38)
CAGRFDAGKNRKLIW

SEQ ID NO: 469116 - protein, 13 aa, Homo sapiens
  CDR3 for beta chain variable domain of TCR clone 234558 (TRBV20-1, TRBJ2-1)
TSGALPPGNEQFF

SEQ ID NO: 469117 - protein, 12 aa, Homo sapiens
  CDR3 for alpha chain variable domain of TCR clone 234559 (TRAV12-1, TRAJ40)
CVVPSGTYKYSF

SEQ ID NO: 469118 - protein, 15 aa, Homo sapiens
  CDR3 for beta chain variable domain of TCR clone 234559 (TRBV12-4, TRBJ2-1)
CASSPLSGRNNEQFF

SEQ ID NO: 469119 - protein, 21 aa, Homo sapiens
  CDR3 for alpha chain variable domain of TCR clone 234560 (TRAV1-1, TRAJ6)
CLLLLRCERLERTGGSYLPTF

SEQ ID NO: 469120 - protein, 13 aa, Homo sapiens
  CDR3 for beta chain variable domain of TCR clone 234560 (TRBV10-2, TRBJ2-7)
CASGASGGYEQYF

SEQ ID NO: 469121 - protein, 15 aa, Homo sapiens
  CDR3 for alpha chain variable domain of TCR clone 234561 (TRAV2, TRAJ9)
CAVEDRGTGGFKTIF

SEQ ID NO: 469122 - protein, 16 aa, Homo sapiens
  CDR3 for beta chain variable domain of TCR clone 234561 (TRBV24-1, TRBJ2-3)
CATSDPATGATDTQYF

SEQ ID NO: 469123 - protein, 15 aa, Homo sapiens
  CDR3 for alpha chain variable domain of TCR clone 234562 (TRAV23/DV6, TRAJ13)
CAAWPGGGGYQNVTF

SEQ ID NO: 469124 - protein, 13 aa, Homo sapiens
  CDR3 for beta chain variable domain of TCR clone 234562 (TRBV10-3, TRBJ2-7)
CASKLAVNYEQYF

SEQ ID NO: 469125 - protein, 14 aa, Homo sapiens
  CDR3 for alpha chain variable domain of TCR clone 234563 (TRAV16, TRAJ15)
CALSGPQAGTALIF

SEQ ID NO: 469126 - protein, 16 aa, Homo sapiens
  CDR3 for beta chain variable domain of TCR clone 234563 (TRBV7-8, TRBJ2-6)
CQQRRDRGAGANVLTF

SEQ ID NO: 469127 - protein, 15 aa, Homo sapiens
  CDR3 for alpha chain variable domain of TCR clone 234564 (TRAV3, TRAJ15)
CAVRPANQAGTALVF

SEQ ID NO: 469128 - protein, 15 aa, Homo sapiens
  CDR3 for beta chain variable domain of TCR clone 234564 (TRBV7-7, TRBJ1-3)
CASSQGEHSGNTIYF

SEQ ID NO: 469129 - protein, 12 aa, Homo sapiens
  CDR3 for alpha chain variable domain of TCR clone 234565 (TRAV3, TRAJ43)
CAVRDPNNDMRF

SEQ ID NO: 469130 - protein, 15 aa, Homo sapiens
  CDR3 for beta chain variable domain of TCR clone 234565 (TRBV7-2, TRBJ2-5)
CASSFLRGGEETQYF

SEQ ID NO: 469131 - protein, 13 aa, Homo sapiens
  CDR3 for alpha chain variable domain of TCR clone 234566 (TRAV3, TRAJ21)
CAVREPDFNKFYF

SEQ ID NO: 469132 - protein, 17 aa, Homo sapiens
  CDR3 for beta chain variable domain of TCR clone 234566 (TRBV7-8, TRBJ2-6)
CASSAGTGGAGANVLTV

SEQ ID NO: 469133 - protein, 13 aa, Homo sapiens
  CDR3 for alpha chain variable domain of TCR clone 234567 (TRAV2, TRAJ40)
CAVVTSGTYKYIF

SEQ ID NO: 469134 - protein, 16 aa, Homo sapiens
  CDR3 for beta chain variable domain of TCR clone 234567 (TRBV20-1, TRBJ2-7)
CSARDWAGGPSSTSGR

SEQ ID NO: 469135 - protein, 14 aa, Homo sapiens
  CDR3 for alpha chain variable domain of TCR clone 234568 (TRAV26-1, TRAJ38)
CIADNAGNNRKLIW

SEQ ID NO: 469136 - protein, 15 aa, Homo sapiens
  CDR3 for beta chain variable domain of TCR clone 234568 (TRBV6-3, TRBJ2-7)
CAGGGGGGGGEGGEG

SEQ ID NO: 469137 - protein, 12 aa, Homo sapiens
  CDR3 for alpha chain variable domain of TCR clone 234569 (TRAV12-3, TRAJ17)
CAMTLTGNKLTF

SEQ ID NO: 469138 - protein, 11 aa, Homo sapiens
  CDR3 for beta chain variable domain of TCR clone 234569 (TRBV11-2, TRBJ1-1)
CASSINTESFF

SEQ ID NO: 469139 - protein, 16 aa, Homo sapiens
  CDR3 for alpha chain variable domain of TCR clone 234570 (TRAV30, TRAJ24)
CGTEIVDADSWGKLQF

SEQ ID NO: 469140 - protein, 15 aa, Homo sapiens
  CDR3 for beta chain variable domain of TCR clone 234570 (TRBV28, TRBJ2-1)
CASSIIAGGRSEQFF

SEQ ID NO: 469141 - protein, 12 aa, Homo sapiens
  CDR3 for alpha chain variable domain of TCR clone 234571 (TRAV12-1, TRAJ40)
CVVYSGTYKYIF

SEQ ID NO: 469142 - protein, 13 aa, Homo sapiens
  CDR3 for beta chain variable domain of TCR clone 234571 (TRBV6-6, TRBJ2-3)
CASSQGGRDTQYF

SEQ ID NO: 469143 - protein, 13 aa, Homo sapiens
  CDR3 for alpha chain variable domain of TCR clone 234572 (TRAV8-3, TRAJ28)
CAVGAVGSYQLTL

SEQ ID NO: 469144 - protein, 14 aa, Homo sapiens
  CDR3 for beta chain variable domain of TCR clone 234572 (TRBV20-1, TRBJ2-3)
CSARDGVGTDTQYF

SEQ ID NO: 469145 - protein, 13 aa, Homo sapiens
  CDR3 for alpha chain variable domain of TCR clone 234573 (TRAV2, TRAJ13)
CAVESGGYQKVTF

SEQ ID NO: 469146 - protein, 13 aa, Homo sapiens
  CDR3 for beta chain variable domain of TCR clone 234573 (TRBV28, TRBJ2-5)
CATSFAGGETQYF

SEQ ID NO: 469147 - protein, 15 aa, Homo sapiens
  CDR3 for alpha chain variable domain of TCR clone 234574 (TRAV21, TRAJ53)
CATLNSGGSHYKLTF

SEQ ID NO: 469148 - protein, 14 aa, Homo sapiens
  CDR3 for beta chain variable domain of TCR clone 234574 (TRBV7-9, TRBJ2-1)
CASSPRDSLYEQFF

SEQ ID NO: 469149 - protein, 14 aa, Homo sapiens
  CDR3 for alpha chain variable domain of TCR clone 234575 (TRAV23/DV6, TRAJ37)
CAASTSSNTGKLIF

SEQ ID NO: 469150 - protein, 14 aa, Homo sapiens
  CDR3 for beta chain variable domain of TCR clone 234575 (TRBV7-6, TRBJ2-3)
CASSVAGGTDTQYF

SEQ ID NO: 469151 - protein, 18 aa, Homo sapiens
  CDR3 for alpha chain variable domain of TCR clone 234576 (TRAV21, TRAJ52)
CAVRPSPAGGTSYGKLTF

SEQ ID NO: 469152 - protein, 13 aa, Homo sapiens
  CDR3 for beta chain variable domain of TCR clone 234576 (TRBV28, TRBJ1-2)
CAGRDRGNYGYTF

SEQ ID NO: 469153 - protein, 11 aa, Homo sapiens
  CDR3 for alpha chain variable domain of TCR clone 234577 (TRAV21, TRAJ34)
CAVTNTEKLIF

SEQ ID NO: 469154 - protein, 16 aa, Homo sapiens
  CDR3 for beta chain variable domain of TCR clone 234577 (TRBV6-1, TRBJ2-5)
CASSETLDRGAETQYF

SEQ ID NO: 469155 - protein, 14 aa, Homo sapiens
  CDR3 for alpha chain variable domain of TCR clone 234578 (TRAV13-2, TRAJ57)
CAENFQGGSEKLVF

SEQ ID NO: 469156 - protein, 12 aa, Homo sapiens
  CDR3 for beta chain variable domain of TCR clone 234578 (TRBV7-9, TRBJ1-5)
CASSPQGQPQHF

SEQ ID NO: 469157 - protein, 13 aa, Homo sapiens
  CDR3 for alpha chain variable domain of TCR clone 234579 (TRAV12-3, TRAJ43)
CAMIRPNNNDMRF

SEQ ID NO: 469158 - protein, 12 aa, Homo sapiens
  CDR3 for beta chain variable domain of TCR clone 234579 (TRBV11-2, TRBJ2-5)
CASSLGQETQYV

SEQ ID NO: 469159 - protein, 12 aa, Homo sapiens
  CDR3 for alpha chain variable domain of TCR clone 234580 (TRAV12-3, TRAJ17)
CAMTLTGNKLTF

SEQ ID NO: 469160 - protein, 16 aa, Homo sapiens
  CDR3 for beta chain variable domain of TCR clone 234580 (TRBV7-2, TRBJ2-3)
CVSSLAGAGSGDTQYF

SEQ ID NO: 469161 - protein, 12 aa, Homo sapiens
  CDR3 for alpha chain variable domain of TCR clone 234581 (TRAV2, TRAJ26)
CPPGDYGQNFVF

SEQ ID NO: 469162 - protein, 17 aa, Homo sapiens
  CDR3 for beta chain variable domain of TCR clone 234581 (TRBV11-2, TRBJ2-1)
CASSLYPPGVEYNEQFF

SEQ ID NO: 469163 - protein, 15 aa, Homo sapiens
  CDR3 for alpha chain variable domain of TCR clone 234582 (TRAV3, TRAJ29)
CAVRDINSGNPPLVF

SEQ ID NO: 469164 - protein, 16 aa, Homo sapiens
  CDR3 for beta chain variable domain of TCR clone 234582 (TRBV4-1, TRBJ2-5)
CASSQTFYGDQETQYF

SEQ ID NO: 469165 - protein, 15 aa, Homo sapiens
  CDR3 for alpha chain variable domain of TCR clone 234583 (TRAV3, TRAJ4)
CAQNMFSGGYNKLIF

SEQ ID NO: 469166 - protein, 13 aa, Homo sapiens
  CDR3 for beta chain variable domain of TCR clone 234583 (TRBV12-4, TRBJ2-5)
SASSPGTEETQYF

SEQ ID NO: 469167 - protein, 12 aa, Homo sapiens
  CDR3 for alpha chain variable domain of TCR clone 234584 (TRAV1-1, TRAJ8)
CAAGTGFQKLVF

SEQ ID NO: 469168 - protein, 14 aa, Homo sapiens
  CDR3 for beta chain variable domain of TCR clone 234584 (TRBV12-5, TRBJ2-5)
CASGSRTHQETQYF

SEQ ID NO: 469169 - protein, 14 aa, Homo sapiens
  CDR3 for alpha chain variable domain of TCR clone 234585 (TRAV26-1, TRAJ38)
CIADNAGNNRKLIW

SEQ ID NO: 469170 - protein, 16 aa, Homo sapiens
  CDR3 for beta chain variable domain of TCR clone 234585 (TRBV20-1, TRBJ2-7)
CSASTSGRLSSYEQYF

SEQ ID NO: 469171 - protein, 14 aa, Homo sapiens
  CDR3 for alpha chain variable domain of TCR clone 234586 (TRAV12-2, TRAJ33)
CAVKRASSNYQLTW

SEQ ID NO: 469172 - protein, 15 aa, Homo sapiens
  CDR3 for beta chain variable domain of TCR clone 234586 (TRBV20-1, TRBJ2-7)
CSARDRVSGMDEQYF

SEQ ID NO: 469173 - protein, 16 aa, Homo sapiens
  CDR3 for alpha chain variable domain of TCR clone 234587 (TRAV13-1, TRAJ13)
CTAFFLGVTRKLPLEL

SEQ ID NO: 469174 - protein, 19 aa, Homo sapiens
  CDR3 for beta chain variable domain of TCR clone 234587 (TRBV25-1, TRBJ2-2)
CAILVYRVDRGRKTGELFF

SEQ ID NO: 469175 - protein, 18 aa, Homo sapiens
  CDR3 for alpha chain variable domain of TCR clone 234588 (TRAV21, TRAJ52)
CAVRPSPAGGTSYGKMTF

SEQ ID NO: 469176 - protein, 17 aa, Homo sapiens
  CDR3 for beta chain variable domain of TCR clone 234588 (TRBV13, TRBJ2-3)
CASSLCRVAGGRNTQYF

SEQ ID NO: 469177 - protein, 14 aa, Homo sapiens
  CDR3 for alpha chain variable domain of TCR clone 234589 (TRAV1-2, TRAJ8)
CAVREDTGFQKLVF

SEQ ID NO: 469178 - protein, 15 aa, Homo sapiens
  CDR3 for beta chain variable domain of TCR clone 234589 (TRBV4-1, TRBJ2-7)
CASSQTTGRLYEQYF

SEQ ID NO: 469179 - protein, 13 aa, Homo sapiens
  CDR3 for alpha chain variable domain of TCR clone 234590 (TRAV12-3, TRAJ13)
CAMTSGGYQKVTF

SEQ ID NO: 469180 - protein, 17 aa, Homo sapiens
  CDR3 for beta chain variable domain of TCR clone 234590 (TRBV11-2, TRBJ2-1)
CASSLYPPGVEYNEQFF

SEQ ID NO: 469181 - protein, 16 aa, Homo sapiens
  CDR3 for alpha chain variable domain of TCR clone 234591 (TRAV23/DV6, TRAJ9)
CAASIGGNTGGFKTTF

SEQ ID NO: 469182 - protein, 15 aa, Homo sapiens
  CDR3 for beta chain variable domain of TCR clone 234591 (TRBV4-1, TRBJ2-7)
CASSQQGQGFDEQYF

SEQ ID NO: 469183 - protein, 15 aa, Homo sapiens
  CDR3 for alpha chain variable domain of TCR clone 234592 (TRAV2, TRAJ37)
CAVGDGSSNTGELIF

SEQ ID NO: 469184 - protein, 13 aa, Homo sapiens
  CDR3 for beta chain variable domain of TCR clone 234592 (TRBV20-1, TRBJ2-7)
RSAQTGLSYEQYF

SEQ ID NO: 469185 - protein, 10 aa, Homo sapiens
  CDR3 for alpha chain variable domain of TCR clone 234593 (TRAV12-2, TRAJ22)
CAVNETQQTF

SEQ ID NO: 469186 - protein, 13 aa, Homo sapiens
  CDR3 for beta chain variable domain of TCR clone 234593 (TRBV6-5, TRBJ2-6)
CASSTSGPLRLDF

SEQ ID NO: 469187 - protein, 12 aa, Homo sapiens
  CDR3 for alpha chain variable domain of TCR clone 234594 (TRAV8-3, TRAJ40)
CAVTSGTYKYIF

SEQ ID NO: 469188 - protein, 12 aa, Homo sapiens
  CDR3 for beta chain variable domain of TCR clone 234594 (TRBV11-2, TRBJ2-2)
CASSLGGGELFF

SEQ ID NO: 469189 - protein, 15 aa, Homo sapiens
  CDR3 for alpha chain variable domain of TCR clone 234595 (TRAV3, TRAJ5)
CAVRDGKTGRRALTC

SEQ ID NO: 469190 - protein, 15 aa, Homo sapiens
  CDR3 for beta chain variable domain of TCR clone 234595 (TRBV7-8, TRBJ2-1)
CASSLADSLYNEQFF

SEQ ID NO: 469191 - protein, 14 aa, Homo sapiens
  CDR3 for alpha chain variable domain of TCR clone 234596 (TRAV26-1, TRAJ38)
CIFVGAGNNRKLIW

SEQ ID NO: 469192 - protein, 12 aa, Homo sapiens
  CDR3 for beta chain variable domain of TCR clone 234596 (TRBV5-1, TRBJ2-5)
CASSWDQETQYF

SEQ ID NO: 469193 - protein, 19 aa, Homo sapiens
  CDR3 for alpha chain variable domain of TCR clone 234597 (TRAV16, )
CALRGDIRNPDPAVYQLRD

SEQ ID NO: 469194 - protein, 16 aa, Homo sapiens
  CDR3 for beta chain variable domain of TCR clone 234597 (TRBV12-5, TRBJ2-5)
CASGPRTSGNQETQYF

SEQ ID NO: 469195 - protein, 13 aa, Homo sapiens
  CDR3 for alpha chain variable domain of TCR clone 234598 (TRAV8-2, TRAJ26)
CVVSLGYGQNFVF

SEQ ID NO: 469196 - protein, 16 aa, Homo sapiens
  CDR3 for beta chain variable domain of TCR clone 234598 (TRBV24-1, TRBJ2-1)
CATSGVTGANYNEQFF

SEQ ID NO: 469197 - protein, 13 aa, Homo sapiens
  CDR3 for alpha chain variable domain of TCR clone 234599 (TRAV21, TRAJ27)
CAARPGNAGKSTF

SEQ ID NO: 469198 - protein, 12 aa, Homo sapiens
  CDR3 for beta chain variable domain of TCR clone 234599 (TRBV7-6, TRBJ2-1)
CASSLGGGQMSS

SEQ ID NO: 469199 - protein, 20 aa, Homo sapiens
  CDR3 for alpha chain variable domain of TCR clone 234600 (TRAV12-2, TRAJ52)
SPVIQPPARAGGTSYGKLTF

SEQ ID NO: 469200 - protein, 13 aa, Homo sapiens
  CDR3 for beta chain variable domain of TCR clone 234600 (TRBV15, TRBJ2-7)
CATSTTGHYEQYF

SEQ ID NO: 469201 - protein, 14 aa, Homo sapiens
  CDR3 for alpha chain variable domain of TCR clone 234601 (TRAV27, TRAJ36)
CAGPPKRGANNLFF

SEQ ID NO: 469202 - protein, 13 aa, Homo sapiens
  CDR3 for beta chain variable domain of TCR clone 234601 (TRBV7-7, TRBJ2-3)
CASSLSRADTQYF

SEQ ID NO: 469203 - protein, 16 aa, Homo sapiens
  CDR3 for alpha chain variable domain of TCR clone 234602 (TRAV21, TRAJ33)
CAVSPASMDSNYQLIW

SEQ ID NO: 469204 - protein, 17 aa, Homo sapiens
  CDR3 for beta chain variable domain of TCR clone 234602 (TRBV2, TRBJ1-4)
CASSKSELTQGEEKLFF

SEQ ID NO: 469205 - protein, 14 aa, Homo sapiens
  CDR3 for alpha chain variable domain of TCR clone 234603 (TRAV35, TRAJ42)
CAGRYGGSQGNLIF

SEQ ID NO: 469206 - protein, 15 aa, Homo sapiens
  CDR3 for beta chain variable domain of TCR clone 234603 (TRBV7-9, TRBJ2-1)
CASSLRWGRANEQFF

SEQ ID NO: 469207 - protein, 14 aa, Homo sapiens
  CDR3 for alpha chain variable domain of TCR clone 234604 (TRAV12-3, TRAJ58)
CNEVVETSGSRLTF

SEQ ID NO: 469208 - protein, 17 aa, Homo sapiens
  CDR3 for beta chain variable domain of TCR clone 234604 (TRBV13, TRBJ2-3)
CASSLSRVAGGRNTQYF

SEQ ID NO: 469209 - protein, 14 aa, Homo sapiens
  CDR3 for alpha chain variable domain of TCR clone 234605 (TRAV23/DV6, TRAJ11)
CATSLESGYSTLTF

SEQ ID NO: 469210 - protein, 13 aa, Homo sapiens
  CDR3 for beta chain variable domain of TCR clone 234605 (TRBV4-1, TRBJ2-5)
CASSLTRGETQYY

SEQ ID NO: 469211 - protein, 14 aa, Homo sapiens
  CDR3 for alpha chain variable domain of TCR clone 234606 (TRAV12-2, TRAJ13)
CAVKKTGGYQKVTF

SEQ ID NO: 469212 - protein, 15 aa, Homo sapiens
  CDR3 for beta chain variable domain of TCR clone 234606 (TRBV27, TRBJ2-1)
CSSSNGGGSPNEQFF

SEQ ID NO: 469213 - protein, 11 aa, Homo sapiens
  CDR3 for alpha chain variable domain of TCR clone 234607 (TRAV21, TRAJ39)
LLVNAGNMLTF

SEQ ID NO: 469214 - protein, 14 aa, Homo sapiens
  CDR3 for beta chain variable domain of TCR clone 234607 (TRBV6-1, TRBJ1-3)
CASVQGGGGNTIYF

SEQ ID NO: 469215 - protein, 17 aa, Homo sapiens
  CDR3 for alpha chain variable domain of TCR clone 234608 (TRAV26-1, TRAJ50)
CIVRTRKPPTTRCYLGQ

SEQ ID NO: 469216 - protein, 17 aa, Homo sapiens
  CDR3 for beta chain variable domain of TCR clone 234608 (TRBV4-1, TRBJ1-4)
CASSQEGPRGVEEKLFF

SEQ ID NO: 469217 - protein, 16 aa, Homo sapiens
  CDR3 for alpha chain variable domain of TCR clone 234609 (TRAV16, TRAJ57)
CAPYLITQGGSEKLVF

SEQ ID NO: 469218 - protein, 15 aa, Homo sapiens
  CDR3 for beta chain variable domain of TCR clone 234609 (TRBV11-2, TRBJ1-6)
CASTLRGTGNSPLHF

SEQ ID NO: 469219 - protein, 12 aa, Homo sapiens
  CDR3 for alpha chain variable domain of TCR clone 234610 (TRAV12-3, TRAJ17)
CAMTLTGNKLTF

SEQ ID NO: 469220 - protein, 14 aa, Homo sapiens
  CDR3 for beta chain variable domain of TCR clone 234610 (TRBV4-1, TRBJ2-7)
CASSRTGVAFEQYF

SEQ ID NO: 469221 - protein, 14 aa, Homo sapiens
  CDR3 for alpha chain variable domain of TCR clone 234611 (TRAV23/DV6, TRAJ37)
CAASTSSNTGKLIF

SEQ ID NO: 469222 - protein, 15 aa, Homo sapiens
  CDR3 for beta chain variable domain of TCR clone 234611 (TRBV7-3, TRBJ2-2)
CASSETGQGTGELFF

SEQ ID NO: 469223 - protein, 14 aa, Homo sapiens
  CDR3 for alpha chain variable domain of TCR clone 234612 (TRAV38-1, TRAJ45)
CAYYSGGGAYGRTF

SEQ ID NO: 469224 - protein, 20 aa, Homo sapiens
  CDR3 for beta chain variable domain of TCR clone 234612 (TRBV28, TRBJ2-1)
CASTPIGRSPGLAGGNEQFF

SEQ ID NO: 469225 - protein, 16 aa, Homo sapiens
  CDR3 for alpha chain variable domain of TCR clone 234613 (TRAV12-3, TRAJ53)
CAMSPGSGGSNYRLTF

SEQ ID NO: 469226 - protein, 14 aa, Homo sapiens
  CDR3 for beta chain variable domain of TCR clone 234613 (TRBV12-5, TRBJ2-5)
CASGSRTHQETQYF

SEQ ID NO: 469227 - protein, 13 aa, Homo sapiens
  CDR3 for alpha chain variable domain of TCR clone 234614 (TRAV3, TRAJ21)
CAVREPAFNQFYF

SEQ ID NO: 469228 - protein, 17 aa, Homo sapiens
  CDR3 for beta chain variable domain of TCR clone 234614 (TRBV7-8, TRBJ2-6)
CASSAGTGGAGANVLTF

SEQ ID NO: 469229 - protein, 22 aa, Homo sapiens
  CDR3 for alpha chain variable domain of TCR clone 234615 (TRAV2, TRAJ10)
ILQVREADAAVYYTGGGNKLTF

SEQ ID NO: 469230 - protein, 11 aa, Homo sapiens
  CDR3 for beta chain variable domain of TCR clone 234615 (TRBV20-1, TRBJ2-5)
CSADRAETQYF

SEQ ID NO: 469231 - protein, 14 aa, Homo sapiens
  CDR3 for alpha chain variable domain of TCR clone 234616 (TRAV12-2, TRAJ17)
CAVLFKAAGNKLTF

SEQ ID NO: 469232 - protein, 14 aa, Homo sapiens
  CDR3 for beta chain variable domain of TCR clone 234616 (TRBV5-5, TRBJ1-5)
CASSGQGVDQPQHF

SEQ ID NO: 469233 - protein, 14 aa, Homo sapiens
  CDR3 for alpha chain variable domain of TCR clone 234617 (TRAV35, TRAJ13)
CAGSPSGGYQKVTF

SEQ ID NO: 469234 - protein, 15 aa, Homo sapiens
  CDR3 for beta chain variable domain of TCR clone 234617 (TRBV7-9, TRBJ1-4)
CASSARTGGNEKLFF

SEQ ID NO: 469235 - protein, 15 aa, Homo sapiens
  CDR3 for alpha chain variable domain of TCR clone 234618 (TRAV17, TRAJ35)
CATAFVIGFGNVLHC

SEQ ID NO: 469236 - protein, 13 aa, Homo sapiens
  CDR3 for beta chain variable domain of TCR clone 234618 (TRBV19, TRBJ1-2)
CASSVPGQDGYTF

SEQ ID NO: 469237 - protein, 14 aa, Homo sapiens
  CDR3 for alpha chain variable domain of TCR clone 234619 (TRAV17, TRAJ34)
CATDSLEGTDKLIF

SEQ ID NO: 469238 - protein, 13 aa, Homo sapiens
  CDR3 for beta chain variable domain of TCR clone 234619 (TRBV11-2, TRBJ2-5)
CASSSTGEETQYF

SEQ ID NO: 469239 - protein, 11 aa, Homo sapiens
  CDR3 for alpha chain variable domain of TCR clone 234620 (TRAV1-1, TRAJ23)
CAVRQGGELIF

SEQ ID NO: 469240 - protein, 20 aa, Homo sapiens
  CDR3 for beta chain variable domain of TCR clone 234620 (TRBV7-8, TRBJ2-2)
CASSHLFPGPPIHITGELFF

SEQ ID NO: 469241 - protein, 14 aa, Homo sapiens
  CDR3 for alpha chain variable domain of TCR clone 234621 (TRAV8-4, TRAJ54)
CAGSEVLGAQKLGF

SEQ ID NO: 469242 - protein, 13 aa, Homo sapiens
  CDR3 for beta chain variable domain of TCR clone 234621 (TRBV27, TRBJ2-7)
CASSFVSSYEQYF

SEQ ID NO: 469243 - protein, 14 aa, Homo sapiens
  CDR3 for alpha chain variable domain of TCR clone 234622 (TRAV1-2, TRAJ8)
CALREDTGFQKLVF

SEQ ID NO: 469244 - protein, 16 aa, Homo sapiens
  CDR3 for beta chain variable domain of TCR clone 234622 (TRBV24-1, TRBJ2-3)
CATSDPGTGATDTQYF

SEQ ID NO: 469245 - protein, 17 aa, Homo sapiens
  CDR3 for alpha chain variable domain of TCR clone 234623 (TRAV8-2, TRAJ17)
CVVSDRRFKAAGNKLTF

SEQ ID NO: 469246 - protein, 18 aa, Homo sapiens
  CDR3 for beta chain variable domain of TCR clone 234623 (TRBV7-9, TRBJ2-7)
CASSLTTSGSRTWYEQDF

SEQ ID NO: 469247 - protein, 13 aa, Homo sapiens
  CDR3 for alpha chain variable domain of TCR clone 234624 (TRAV27, TRAJ29)
CAGAHPGNTPLVF

SEQ ID NO: 469248 - protein, 15 aa, Homo sapiens
  CDR3 for beta chain variable domain of TCR clone 234624 (TRBV15, TRGJ1)
CATSRDMGSYEKLFF

SEQ ID NO: 469249 - protein, 13 aa, Homo sapiens
  CDR3 for alpha chain variable domain of TCR clone 234625 (TRAV21, TRAJ27)
CAQWGGNAGKSTF

SEQ ID NO: 469250 - protein, 14 aa, Homo sapiens
  CDR3 for beta chain variable domain of TCR clone 234625 (TRBV7-9, TRBJ1-2)
CASSRQGANYGYTF

SEQ ID NO: 469251 - protein, 15 aa, Homo sapiens
  CDR3 for alpha chain variable domain of TCR clone 234626 (TRAV17, TRAJ4)
CATKSGGYNKLILEQ

SEQ ID NO: 469252 - protein, 14 aa, Homo sapiens
  CDR3 for beta chain variable domain of TCR clone 234626 (TRBV20-1, TRBJ1-5)
CSARDDRGNQPQHF

SEQ ID NO: 469253 - protein, 16 aa, Homo sapiens
  CDR3 for alpha chain variable domain of TCR clone 234627 (TRAV38-1, TRAJ37)
CSFKGDGSSKTGKLIF

SEQ ID NO: 469254 - protein, 13 aa, Homo sapiens
  CDR3 for beta chain variable domain of TCR clone 234627 (TRBV12-4, TRBJ2-5)
CASSLFRRETQYF

SEQ ID NO: 469255 - protein, 16 aa, Homo sapiens
  CDR3 for alpha chain variable domain of TCR clone 234628 (TRAV30, TRAJ24)
CGTEIVDADSWGKFQF

SEQ ID NO: 469256 - protein, 13 aa, Homo sapiens
  CDR3 for beta chain variable domain of TCR clone 234628 (TRBV5-1, TRBJ1-2)
CASSFSGNLGYTF

SEQ ID NO: 469257 - protein, 12 aa, Homo sapiens
  CDR3 for alpha chain variable domain of TCR clone 234629 (TRAV12-2, TRAJ8)
CAVNTGFQKLVF

SEQ ID NO: 469258 - protein, 15 aa, Homo sapiens
  CDR3 for beta chain variable domain of TCR clone 234629 (TRBV7-8, TRBJ1-5)
CASSLERRGLAPQHR

SEQ ID NO: 469259 - protein, 12 aa, Homo sapiens
  CDR3 for alpha chain variable domain of TCR clone 234630 (TRAV12-3, TRAJ17)
CAMTLTGNKLTF

SEQ ID NO: 469260 - protein, 14 aa, Homo sapiens
  CDR3 for beta chain variable domain of TCR clone 234630 (TRBV7-9, TRBJ2-1)
CASSLGGGADEQFF

SEQ ID NO: 469261 - protein, 16 aa, Homo sapiens
  CDR3 for alpha chain variable domain of TCR clone 234631 (TRAV21, TRAJ52)
CAVTNAGGTSYGKLTF

SEQ ID NO: 469262 - protein, 11 aa, Homo sapiens
  CDR3 for beta chain variable domain of TCR clone 234631 (TRBV2, TRBJ1-1)
CASREGTEVFF

SEQ ID NO: 469263 - protein, 13 aa, Homo sapiens
  CDR3 for alpha chain variable domain of TCR clone 234632 (TRAV21, TRAJ27)
CAARPGNTGKSTF

SEQ ID NO: 469264 - protein, 13 aa, Homo sapiens
  CDR3 for beta chain variable domain of TCR clone 234632 (TRBV13, TRBJ2-1)
CASILGGRGEQFF

SEQ ID NO: 469265 - protein, 13 aa, Homo sapiens
  CDR3 for alpha chain variable domain of TCR clone 234633 (TRAV3, TRAJ27)
CAVRPLGAGKSTF

SEQ ID NO: 469266 - protein, 14 aa, Homo sapiens
  CDR3 for beta chain variable domain of TCR clone 234633 (TRBV19, TRBJ2-3)
CASSAPRGTDTQYF

SEQ ID NO: 469267 - protein, 15 aa, Homo sapiens
  CDR3 for alpha chain variable domain of TCR clone 234634 (TRAV12-2, TRAJ20)
CAVKGGFGAGTTVTV

SEQ ID NO: 469268 - protein, 13 aa, Homo sapiens
  CDR3 for beta chain variable domain of TCR clone 234634 (TRBV12-4, TRBJ2-1)
CASSPGQLYEQYF

SEQ ID NO: 469269 - protein, 16 aa, Homo sapiens
  CDR3 for alpha chain variable domain of TCR clone 234635 (TRAV16, TRAJ4)
CALSRMSSGGYNKLIF

SEQ ID NO: 469270 - protein, 13 aa, Homo sapiens
  CDR3 for beta chain variable domain of TCR clone 234635 (TRBV7-9, TRBJ1-2)
CASSLKQNYGYTF

SEQ ID NO: 469271 - protein, 15 aa, Homo sapiens
  CDR3 for alpha chain variable domain of TCR clone 234636 (TRAV20, TRAJ50)
CAVQQMKTSYDKVIF

SEQ ID NO: 469272 - protein, 17 aa, Homo sapiens
  CDR3 for beta chain variable domain of TCR clone 234636 (TRBV28, TRBJ2-7)
CASSPLHRASGVYEQYF

SEQ ID NO: 469273 - protein, 12 aa, Homo sapiens
  CDR3 for alpha chain variable domain of TCR clone 234637 (TRAV3, TRAJ31)
CAVRDGNARLMF

SEQ ID NO: 469274 - protein, 16 aa, Homo sapiens
  CDR3 for beta chain variable domain of TCR clone 234637 (TRBV20-1, TRBJ1-4)
CSAPGQGLLTNEKLFF

SEQ ID NO: 469275 - protein, 15 aa, Homo sapiens
  CDR3 for alpha chain variable domain of TCR clone 234638 (TRAV12-3, TRAJ49)
CAMTAPGNTGNQFYF

SEQ ID NO: 469276 - protein, 15 aa, Homo sapiens
  CDR3 for beta chain variable domain of TCR clone 234638 (TRBV27, TRBJ1-6)
CASSFDRGLGSPLHF

SEQ ID NO: 469277 - protein, 16 aa, Homo sapiens
  CDR3 for alpha chain variable domain of TCR clone 234639 (TRAV30, TRAJ24)
CGTEIVDANSWGKFQF

SEQ ID NO: 469278 - protein, 14 aa, Homo sapiens
  CDR3 for beta chain variable domain of TCR clone 234639 (TRBV7-9, TRBJ2-4)
CASSLAMGGNIQYF

SEQ ID NO: 469279 - protein, 14 aa, Homo sapiens
  CDR3 for alpha chain variable domain of TCR clone 234640 (TRAV26-1, TRAJ38)
LIADNAGNNRKLIW

SEQ ID NO: 469280 - protein, 13 aa, Homo sapiens
  CDR3 for beta chain variable domain of TCR clone 234640 (TRBV20-1, TRBJ1-1)
CSARGGGNTEAFF

SEQ ID NO: 469281 - protein, 15 aa, Homo sapiens
  CDR3 for alpha chain variable domain of TCR clone 234641 (TRAV12-1, TRAJ15)
GVVTRANQAGTALIF

SEQ ID NO: 469282 - protein, 14 aa, Homo sapiens
  CDR3 for beta chain variable domain of TCR clone 234641 (TRBV5-1, TRBJ1-1)
CASSLVSINTEAFF

SEQ ID NO: 469283 - protein, 15 aa, Homo sapiens
  CDR3 for alpha chain variable domain of TCR clone 234642 (TRAV21, TRAJ57)
CAVIITQGGYEKLVF

SEQ ID NO: 469284 - protein, 14 aa, Homo sapiens
  CDR3 for beta chain variable domain of TCR clone 234642 (TRBV5-1, TRBJ2-2)
CASSLIWIPGELFF

SEQ ID NO: 469285 - protein, 13 aa, Homo sapiens
  CDR3 for alpha chain variable domain of TCR clone 234643 (TRAV21, TRAJ27)
CAARPGNAGKSTF

SEQ ID NO: 469286 - protein, 13 aa, Homo sapiens
  CDR3 for beta chain variable domain of TCR clone 234643 (TRBV13, TRBJ1-4)
CASSSASGEKLFF

SEQ ID NO: 469287 - protein, 16 aa, Homo sapiens
  CDR3 for alpha chain variable domain of TCR clone 234644 (TRAV30, TRAJ24)
RGTEIVDADSCGKFQF

SEQ ID NO: 469288 - protein, 14 aa, Homo sapiens
  CDR3 for beta chain variable domain of TCR clone 234644 (TRBV12-5, TRBJ2-5)
CASGSRTHQETQYF

SEQ ID NO: 469289 - protein, 11 aa, Homo sapiens
  CDR3 for alpha chain variable domain of TCR clone 234645 (TRAV12-3, TRAJ43)
CAMSVSNGRRF

SEQ ID NO: 469290 - protein, 11 aa, Homo sapiens
  CDR3 for beta chain variable domain of TCR clone 234645 (TRBV29-1, TRBJ2-5)
CSEDRTGTQYF

SEQ ID NO: 469291 - protein, 12 aa, Homo sapiens
  CDR3 for alpha chain variable domain of TCR clone 234646 (TRAV17, TRAJ53)
CAFGGSNYKLTF

SEQ ID NO: 469292 - protein, 20 aa, Homo sapiens
  CDR3 for beta chain variable domain of TCR clone 234646 (TRBV7-8, TRBJ2-2)
CASSHLFPGPTIHITGELFF

SEQ ID NO: 469293 - protein, 17 aa, Homo sapiens
  CDR3 for alpha chain variable domain of TCR clone 234647 (TRAV12-2, TRAJ22)
CAVNRIPCSGSARQLTF

SEQ ID NO: 469294 - protein, 13 aa, Homo sapiens
  CDR3 for beta chain variable domain of TCR clone 234647 (TRBV11-3, TRBJ1-1)
CASSSNRDTEAFF

SEQ ID NO: 469295 - protein, 13 aa, Homo sapiens
  CDR3 for alpha chain variable domain of TCR clone 234648 (TRAV12-3, TRAJ33)
CAMSVNSNYQLIW

SEQ ID NO: 469296 - protein, 14 aa, Homo sapiens
  CDR3 for beta chain variable domain of TCR clone 234648 (TRBV4-1, TRBJ2-5)
CASSRSGSGETQYF

SEQ ID NO: 469297 - protein, 10 aa, Homo sapiens
  CDR3 for alpha chain variable domain of TCR clone 234649 (TRAV8-3, TRAJ33)
CAVGAIATIS

SEQ ID NO: 469298 - protein, 16 aa, Homo sapiens
  CDR3 for beta chain variable domain of TCR clone 234649 (TRBV12-5, TRBJ2-5)
CASGPRTSGNQETQYF

SEQ ID NO: 469299 - protein, 16 aa, Homo sapiens
  CDR3 for alpha chain variable domain of TCR clone 234650 (TRAV12-3, TRAJ58)
CAMTDTEETSGSRLTF

SEQ ID NO: 469300 - protein, 22 aa, Homo sapiens
  CDR3 for beta chain variable domain of TCR clone 234650 (TRBV23-1, TRBJ2-7)
CASSRRLDSGQGYVGGGYELYF

SEQ ID NO: 469301 - protein, 12 aa, Homo sapiens
  CDR3 for alpha chain variable domain of TCR clone 234651 (TRAV12-3, TRAJ40)
RAMSSGTYKYIF

SEQ ID NO: 469302 - protein, 15 aa, Homo sapiens
  CDR3 for beta chain variable domain of TCR clone 234651 (TRBV7-3, TRBJ2-2)
CASSEMGQGTGELFF

SEQ ID NO: 469303 - protein, 12 aa, Homo sapiens
  CDR3 for alpha chain variable domain of TCR clone 234652 (TRAV12-3, TRAJ17)
CAMTLTGNKLTF

SEQ ID NO: 469304 - protein, 14 aa, Homo sapiens
  CDR3 for beta chain variable domain of TCR clone 234652 (TRBV29-1, TRBJ2-3)
CSAGAGVGADTQYF

SEQ ID NO: 469305 - protein, 14 aa, Homo sapiens
  CDR3 for alpha chain variable domain of TCR clone 234653 (TRAV38-1, TRAJ28)
CAFPSGAGSYQLTF

SEQ ID NO: 469306 - protein, 18 aa, Homo sapiens
  CDR3 for beta chain variable domain of TCR clone 234653 (TRBV7-9, TRBJ1-1)
CASSKPWDTIGMNTEAFF

SEQ ID NO: 469307 - protein, 14 aa, Homo sapiens
  CDR3 for alpha chain variable domain of TCR clone 234654 (TRAV12-2, TRAJ13)
CAVKKTGGYQKVTF

SEQ ID NO: 469308 - protein, 13 aa, Homo sapiens
  CDR3 for beta chain variable domain of TCR clone 234654 (TRBV23-1, TRBJ1-4)
CDSRGKFNEKLFF

SEQ ID NO: 469309 - protein, 13 aa, Homo sapiens
  CDR3 for alpha chain variable domain of TCR clone 234655 (TRAV3, TRAJ21)
CTVREPDFNKFYF

SEQ ID NO: 469310 - protein, 15 aa, Homo sapiens
  CDR3 for beta chain variable domain of TCR clone 234655 (TRBV2, TRBJ2-1)
CASSELAGGYNEQFF

SEQ ID NO: 469311 - protein, 14 aa, Homo sapiens
  CDR3 for alpha chain variable domain of TCR clone 234656 (TRAV27, TRAJ22)
CAGLPSGSARQLTF

SEQ ID NO: 469312 - protein, 15 aa, Homo sapiens
  CDR3 for beta chain variable domain of TCR clone 234656 (TRBV5-1, TRBJ1-4)
FAPAAWKDGNEKLFF

SEQ ID NO: 469313 - protein, 12 aa, Homo sapiens
  CDR3 for alpha chain variable domain of TCR clone 234657 (TRAV12-3, TRAJ7)
CNERLREQQTRF

SEQ ID NO: 469314 - protein, 14 aa, Homo sapiens
  CDR3 for beta chain variable domain of TCR clone 234657 (TRBV13, TRBJ2-5)
CASSLGPRGETQYF

SEQ ID NO: 469315 - protein, 15 aa, Homo sapiens
  CDR3 for alpha chain variable domain of TCR clone 234658 (TRAV27, TRAJ33)
CAGADIMDSNYQLIW

SEQ ID NO: 469316 - protein, 13 aa, Homo sapiens
  CDR3 for beta chain variable domain of TCR clone 234658 (TRBV28, TRBJ1-2)
CASSLQRRGGYTF

SEQ ID NO: 469317 - protein, 15 aa, Homo sapiens
  CDR3 for alpha chain variable domain of TCR clone 234659 (TRAV36/DV7, TRAJ21)
CALKFYFGSGTKLNV

SEQ ID NO: 469318 - protein, 13 aa, Homo sapiens
  CDR3 for beta chain variable domain of TCR clone 234659 (TRBV11-3, TRBJ2-5)
CASSSGRQETQYF

SEQ ID NO: 469319 - protein, 12 aa, Homo sapiens
  CDR3 for alpha chain variable domain of TCR clone 234660 (TRAV13-2, TRAJ23)
CAERHRGGKLIF

SEQ ID NO: 469320 - protein, 16 aa, Homo sapiens
  CDR3 for beta chain variable domain of TCR clone 234660 (TRBV7-9, TRBJ1-2)
CASSLGFSAGEDGYTF

SEQ ID NO: 469321 - protein, 17 aa, Homo sapiens
  CDR3 for alpha chain variable domain of TCR clone 234661 (TRAV17, TRAJ52)
CATDLVGCGTSYGKLTF

SEQ ID NO: 469322 - protein, 16 aa, Homo sapiens
  CDR3 for beta chain variable domain of TCR clone 234661 (TRBV12-4, TRBJ2-3)
CASSLRLAETTDTQYF

SEQ ID NO: 469323 - protein, 14 aa, Homo sapiens
  CDR3 for alpha chain variable domain of TCR clone 234662 (TRAV17, TRAJ54)
CATDANQGARKLVF

SEQ ID NO: 469324 - protein, 12 aa, Homo sapiens
  CDR3 for beta chain variable domain of TCR clone 234662 (TRBV6-3, TRBJ2-1)
CASSGSYNEQFF

SEQ ID NO: 469325 - protein, 10 aa, Homo sapiens
  CDR3 for alpha chain variable domain of TCR clone 234663 (TRAV12-3, TRAJ49)
CAMNDDQFYF

SEQ ID NO: 469326 - protein, 14 aa, Homo sapiens
  CDR3 for beta chain variable domain of TCR clone 234663 (TRBV18, TRBJ2-3)
CASSPRTSTDTQYF

SEQ ID NO: 469327 - protein, 14 aa, Homo sapiens
  CDR3 for alpha chain variable domain of TCR clone 234664 (TRAV30, TRAJ33)
CGTVAPRSNYQLIW

SEQ ID NO: 469328 - protein, 17 aa, Homo sapiens
  CDR3 for beta chain variable domain of TCR clone 234664 (TRBV15, TRBJ1-4)
CATSRYGTGDPNEKLFF

SEQ ID NO: 469329 - protein, 14 aa, Homo sapiens
  CDR3 for alpha chain variable domain of TCR clone 234665 (TRAV23/DV6, TRAJ27)
CSASRDTNAGKSTL

SEQ ID NO: 469330 - protein, 13 aa, Homo sapiens
  CDR3 for beta chain variable domain of TCR clone 234665 (TRBV20-1, TRBJ1-5)
CSASGRGNQPQHF

SEQ ID NO: 469331 - protein, 14 aa, Homo sapiens
  CDR3 for alpha chain variable domain of TCR clone 234666 (TRAV12-2, TRAJ13)
CAVKKTGGYQTVTF

SEQ ID NO: 469332 - protein, 20 aa, Homo sapiens
  CDR3 for beta chain variable domain of TCR clone 234666 (TRBV7-8, TRBJ2-2)
CASSHLFPGPTIHITGELFF

SEQ ID NO: 469333 - protein, 17 aa, Homo sapiens
  CDR3 for alpha chain variable domain of TCR clone 234667 (TRAV16, TRAJ58)
CITVLSNGETSGSRLTF

SEQ ID NO: 469334 - protein, 17 aa, Homo sapiens
  CDR3 for beta chain variable domain of TCR clone 234667 (TRBV11-2, TRBJ2-1)
CASSLYPPGVEYNEQFF

SEQ ID NO: 469335 - protein, 10 aa, Homo sapiens
  CDR3 for alpha chain variable domain of TCR clone 234668 (TRAV1-2, TRAJ31)
CVSEDARLMF

SEQ ID NO: 469336 - protein, 17 aa, Homo sapiens
  CDR3 for beta chain variable domain of TCR clone 234668 (TRBV28, TRBJ2-5)
CASSRQGGLAGAETQYF

SEQ ID NO: 469337 - protein, 13 aa, Homo sapiens
  CDR3 for alpha chain variable domain of TCR clone 234669 (TRAV27, TRAJ8)
CAGGPTGFQKLVF

SEQ ID NO: 469338 - protein, 12 aa, Homo sapiens
  CDR3 for beta chain variable domain of TCR clone 234669 (TRBV5-1, TRBJ2-1)
QPAEGPLNEQFF

SEQ ID NO: 469339 - protein, 15 aa, Homo sapiens
  CDR3 for alpha chain variable domain of TCR clone 234670 (TRAV25, TRAJ53)
CPTSNRGGSNYKLTF

SEQ ID NO: 469340 - protein, 12 aa, Homo sapiens
  CDR3 for beta chain variable domain of TCR clone 234670 (TRBV11-2, TRBJ2-2)
CASSLGGGELFF

SEQ ID NO: 469341 - protein, 12 aa, Homo sapiens
  CDR3 for alpha chain variable domain of TCR clone 234671 (TRAV16, TRAJ49)
CALNEGGNQFYF

SEQ ID NO: 469342 - protein, 13 aa, Homo sapiens
  CDR3 for beta chain variable domain of TCR clone 234671 (TRBV7-9, TRBJ1-2)
CASSLKQNYGYTF

SEQ ID NO: 469343 - protein, 13 aa, Homo sapiens
  CDR3 for alpha chain variable domain of TCR clone 234672 (TRAV3, TRAJ21)
RAVREPDFNKFYF

SEQ ID NO: 469344 - protein, 16 aa, Homo sapiens
  CDR3 for beta chain variable domain of TCR clone 234672 (TRBV7-2, TRBJ2-6)
CASSLAGRSGANVLTF

SEQ ID NO: 469345 - protein, 15 aa, Homo sapiens
  CDR3 for alpha chain variable domain of TCR clone 234673 (TRAV8-3, TRAJ13)
CAVAPNSGGYQQVTF

SEQ ID NO: 469346 - protein, 12 aa, Homo sapiens
  CDR3 for beta chain variable domain of TCR clone 234673 (TRBV19, TRBJ2-7)
CASTDRDYEQYF

SEQ ID NO: 469347 - protein, 14 aa, Homo sapiens
  CDR3 for alpha chain variable domain of TCR clone 234674 (TRAV12-2, TRAJ17)
CAVLFKAAGNKLTF

SEQ ID NO: 469348 - protein, 14 aa, Homo sapiens
  CDR3 for beta chain variable domain of TCR clone 234674 (TRBV5-7, TRBJ1-5)
CASSRTGGGQPQHF

SEQ ID NO: 469349 - protein, 16 aa, Homo sapiens
  CDR3 for alpha chain variable domain of TCR clone 234675 (TRAV17, TRAJ35)
CATAEGGIGFGNVLHC

SEQ ID NO: 469350 - protein, 12 aa, Homo sapiens
  CDR3 for beta chain variable domain of TCR clone 234675 (TRBV11-2, TRBJ2-1)
CASSPGNNEQFF

SEQ ID NO: 469351 - protein, 13 aa, Homo sapiens
  CDR3 for alpha chain variable domain of TCR clone 234676 (TRAV13-1, TRAJ20)
CAARVSNDYKLSF

SEQ ID NO: 469352 - protein, 12 aa, Homo sapiens
  CDR3 for beta chain variable domain of TCR clone 234676 (TRBV20-1, TRBJ2-1)
CSARFGTDGQFF

SEQ ID NO: 469353 - protein, 15 aa, Homo sapiens
  CDR3 for alpha chain variable domain of TCR clone 234677 (TRAV26-1, TRAJ44)
CNARVPFGTASKLTF

SEQ ID NO: 469354 - protein, 17 aa, Homo sapiens
  CDR3 for beta chain variable domain of TCR clone 234677 (TRBV24-1, TRBJ2-4)
CATSDAEARGVRNIQYF

SEQ ID NO: 469355 - protein, 12 aa, Homo sapiens
  CDR3 for alpha chain variable domain of TCR clone 234678 (TRAV12-3, TRAJ17)
CAMTLKGNKLTF

SEQ ID NO: 469356 - protein, 13 aa, Homo sapiens
  CDR3 for beta chain variable domain of TCR clone 234678 (TRBV7-9, TRBJ1-2)
CASSLKQNYGYTF

SEQ ID NO: 469357 - protein, 13 aa, Homo sapiens
  CDR3 for alpha chain variable domain of TCR clone 234679 (TRAV2, TRAJ40)
CAVITSGTYKYIF

SEQ ID NO: 469358 - protein, 16 aa, Homo sapiens
  CDR3 for beta chain variable domain of TCR clone 234679 (TRBV29-1, TRBJ2-6)
CSVEDITYSGANVLTF

SEQ ID NO: 469359 - protein, 14 aa, Homo sapiens
  CDR3 for alpha chain variable domain of TCR clone 234680 (TRAV12-2, TRAJ17)
CAVLFKAAGNKLTF

SEQ ID NO: 469360 - protein, 17 aa, Homo sapiens
  CDR3 for beta chain variable domain of TCR clone 234680 (TRBV20-1, TRBJ2-2)
CSASGSGQGGLTGDVFF

SEQ ID NO: 469361 - protein, 11 aa, Homo sapiens
  CDR3 for alpha chain variable domain of TCR clone 234681 (TRAV4, TRAJ31)
CLVGDNARLMF

SEQ ID NO: 469362 - protein, 16 aa, Homo sapiens
  CDR3 for beta chain variable domain of TCR clone 234681 (TRBV7-2, TRBJ2-5)
CASSSKWLSGQETQYC

SEQ ID NO: 469363 - protein, 13 aa, Homo sapiens
  CDR3 for alpha chain variable domain of TCR clone 234682 (TRAV8-3, TRAJ28)
CAVGAVGSYQLTF

SEQ ID NO: 469364 - protein, 14 aa, Homo sapiens
  CDR3 for beta chain variable domain of TCR clone 234682 (TRBV11-2, TRBJ2-7)
CASSRSGGAGEQYF

SEQ ID NO: 469365 - protein, 22 aa, Homo sapiens
  CDR3 for alpha chain variable domain of TCR clone 234683 (TRAV29/DV5, TRAJ52)
CSVLLCSRLRGAGGTSYGKLTF

SEQ ID NO: 469366 - protein, 16 aa, Homo sapiens
  CDR3 for beta chain variable domain of TCR clone 234683 (TRBV7-3, TRBJ2-2)
CASSLKRGTLSGELFF

SEQ ID NO: 469367 - protein, 17 aa, Homo sapiens
  CDR3 for alpha chain variable domain of TCR clone 234684 (TRAV3, TRAJ28)
CAVREAYSGAGSYQLTF

SEQ ID NO: 469368 - protein, 15 aa, Homo sapiens
  CDR3 for beta chain variable domain of TCR clone 234684 (TRBV20-1, TRBJ2-7)
CSARDRVSGMDEQCF

SEQ ID NO: 469369 - protein, 16 aa, Homo sapiens
  CDR3 for alpha chain variable domain of TCR clone 234685 (TRAV8-3, TRAJ8)
CAVPRDGNTGFQKLVF

SEQ ID NO: 469370 - protein, 15 aa, Homo sapiens
  CDR3 for beta chain variable domain of TCR clone 234685 (TRBV7-2, TRBJ2-3)
CASSSTGLETDTQYF

SEQ ID NO: 469371 - protein, 15 aa, Homo sapiens
  CDR3 for alpha chain variable domain of TCR clone 234686 (TRAV3, TRAJ4)
CAVRDGTGGYHKLIF

SEQ ID NO: 469372 - protein, 13 aa, Homo sapiens
  CDR3 for beta chain variable domain of TCR clone 234686 (TRBV12-5, TRBJ1-2)
CASGVRTGNGYTF

SEQ ID NO: 469373 - protein, 11 aa, Homo sapiens
  CDR3 for alpha chain variable domain of TCR clone 234687 (TRAV12-3, TRAJ43)
CAMSVSNDMRF

SEQ ID NO: 469374 - protein, 20 aa, Homo sapiens
  CDR3 for beta chain variable domain of TCR clone 234687 (TRBV28, TRBJ2-1)
CASTPIGRSTGLAGGNEQFF

SEQ ID NO: 469375 - protein, 14 aa, Homo sapiens
  CDR3 for alpha chain variable domain of TCR clone 234688 (TRAV26-1, TRAJ38)
CIADNAGNNRKLIW

SEQ ID NO: 469376 - protein, 14 aa, Homo sapiens
  CDR3 for beta chain variable domain of TCR clone 234688 (TRBV11-3, TRBJ2-1)
CASSATTSGSIQFF

SEQ ID NO: 469377 - protein, 15 aa, Homo sapiens
  CDR3 for alpha chain variable domain of TCR clone 234689 (TRAV27, TRAJ38)
CAARRNAGNNRKLIW

SEQ ID NO: 469378 - protein, 12 aa, Homo sapiens
  CDR3 for beta chain variable domain of TCR clone 234689 (TRBV7-2, TRBJ2-5)
CASSQYQETQYF

SEQ ID NO: 469379 - protein, 12 aa, Homo sapiens
  CDR3 for alpha chain variable domain of TCR clone 234690 (TRAV13-1, TRAJ21)
CSAKEGFNKFYF

SEQ ID NO: 469380 - protein, 15 aa, Homo sapiens
  CDR3 for beta chain variable domain of TCR clone 234690 (TRBV5-1, TRBJ2-1)
CASSPPRAPYNEQFF

SEQ ID NO: 469381 - protein, 15 aa, Homo sapiens
  CDR3 for alpha chain variable domain of TCR clone 234691 (TRAV17, TRAJ57)
CATGSSQGGSEKLVF

SEQ ID NO: 469382 - protein, 14 aa, Homo sapiens
  CDR3 for beta chain variable domain of TCR clone 234691 (TRBV11-2, TRBJ1-2)
CASSLYRGNYGYTF

SEQ ID NO: 469383 - protein, 12 aa, Homo sapiens
  CDR3 for alpha chain variable domain of TCR clone 234692 (TRAV9-2, TRAJ27)
CALSTNAGKSTF

SEQ ID NO: 469384 - protein, 17 aa, Homo sapiens
  CDR3 for beta chain variable domain of TCR clone 234692 (TRBV20-1, TRBJ2-1)
CSASSSGLAGSYNERFF

SEQ ID NO: 469385 - protein, 13 aa, Homo sapiens
  CDR3 for alpha chain variable domain of TCR clone 234693 (TRAV8-6, TRAJ32)
CAVSDRATNKLIY

SEQ ID NO: 469386 - protein, 13 aa, Homo sapiens
  CDR3 for beta chain variable domain of TCR clone 234693 (TRBV11-2, TRBJ2-7)
CASSLDLGYEQYF

SEQ ID NO: 469387 - protein, 13 aa, Homo sapiens
  CDR3 for alpha chain variable domain of TCR clone 234694 (TRAV8-3, TRAJ28)
CAVGAVGSYQLTF

SEQ ID NO: 469388 - protein, 11 aa, Homo sapiens
  CDR3 for beta chain variable domain of TCR clone 234694 (TRBV6-1, TRBJ2-1)
CASISSNEQFF

SEQ ID NO: 469389 - protein, 14 aa, Homo sapiens
  CDR3 for alpha chain variable domain of TCR clone 234695 (TRAV23/DV6, TRAJ22)
CADISSGSARQLTF

SEQ ID NO: 469390 - protein, 12 aa, Homo sapiens
  CDR3 for beta chain variable domain of TCR clone 234695 (TRBV19, TRBJ2-1)
CASSMQDTEQFF

SEQ ID NO: 469391 - protein, 14 aa, Homo sapiens
  CDR3 for alpha chain variable domain of TCR clone 234696 (TRAV26-1, TRAJ38)
CIADNAGNNRKLIW

SEQ ID NO: 469392 - protein, 13 aa, Homo sapiens
  CDR3 for beta chain variable domain of TCR clone 234696 (TRBV7-9, TRBJ1-2)
CASSLKQNYVYTF

SEQ ID NO: 469393 - protein, 16 aa, Homo sapiens
  CDR3 for alpha chain variable domain of TCR clone 234697 (TRAV38-1, TRAJ39)
CAFMKHYLGARNMLTF

SEQ ID NO: 469394 - protein, 20 aa, Homo sapiens
  CDR3 for beta chain variable domain of TCR clone 234697 (TRBV6-7, TRBJ2-1)
TSVPAAPLRERGGGVNEQFF

SEQ ID NO: 469395 - protein, 13 aa, Homo sapiens
  CDR3 for alpha chain variable domain of TCR clone 234698 (TRAV9-2, TRAJ53)
CALSGGSNYRLTF

SEQ ID NO: 469396 - protein, 14 aa, Homo sapiens
  CDR3 for beta chain variable domain of TCR clone 234698 (TRBV12-5, TRBJ2-5)
CASGSRTHQETQYF

SEQ ID NO: 469397 - protein, 15 aa, Homo sapiens
  CDR3 for alpha chain variable domain of TCR clone 234699 (TRAV9-2, TRAJ6)
CALRIGPGGSYIPTF

SEQ ID NO: 469398 - protein, 16 aa, Homo sapiens
  CDR3 for beta chain variable domain of TCR clone 234699 (TRBV5-7, TRBJ2-7)
CVSSSPGGRTPYEQYF

SEQ ID NO: 469399 - protein, 14 aa, Homo sapiens
  CDR3 for alpha chain variable domain of TCR clone 234700 (TRAV12-1, TRAJ24)
CVVRSTDSWGKFQF

SEQ ID NO: 469400 - protein, 14 aa, Homo sapiens
  CDR3 for beta chain variable domain of TCR clone 234700 (TRBV12-5, TRBJ2-5)
CASGSRTHQETQYF

SEQ ID NO: 469401 - protein, 11 aa, Homo sapiens
  CDR3 for alpha chain variable domain of TCR clone 234701 (TRAV14/DV4, TRAJ26)
CAMRGPSEFCL

SEQ ID NO: 469402 - protein, 14 aa, Homo sapiens
  CDR3 for beta chain variable domain of TCR clone 234701 (TRBV12-4, TRBJ1-3)
CASALTGAGNTIYF

SEQ ID NO: 469403 - protein, 14 aa, Homo sapiens
  CDR3 for alpha chain variable domain of TCR clone 234702 (TRAV17, TRAJ57)
CATDPQGGSEKLVF

SEQ ID NO: 469404 - protein, 14 aa, Homo sapiens
  CDR3 for beta chain variable domain of TCR clone 234702 (TRBV7-3, TRBJ2-2)
CASSLNSNTGELFF

SEQ ID NO: 469405 - protein, 17 aa, Homo sapiens
  CDR3 for alpha chain variable domain of TCR clone 234703 (TRAV3, TRAJ12)
CAVRDGGRMDSSYKLIF

SEQ ID NO: 469406 - protein, 15 aa, Homo sapiens
  CDR3 for beta chain variable domain of TCR clone 234703 (TRBV28, TRBJ2-5)
CASSPGQGSIETQYF

SEQ ID NO: 469407 - protein, 15 aa, Homo sapiens
  CDR3 for alpha chain variable domain of TCR clone 234704 (TRAV21, TRAJ53)
CATLNSGGRNYKLTF

SEQ ID NO: 469408 - protein, 13 aa, Homo sapiens
  CDR3 for beta chain variable domain of TCR clone 234704 (TRBV12-4, TRBJ2-7)
CASSFVPTAEQYF

SEQ ID NO: 469409 - protein, 10 aa, Homo sapiens
  CDR3 for alpha chain variable domain of TCR clone 234705 (TRAV8-4, TRAJ43)
CAVSADDMGF

SEQ ID NO: 469410 - protein, 13 aa, Homo sapiens
  CDR3 for beta chain variable domain of TCR clone 234705 (TRBV12-4, TRBJ2-5)
CASSPGTEETQYF

SEQ ID NO: 469411 - protein, 16 aa, Homo sapiens
  CDR3 for alpha chain variable domain of TCR clone 234706 (TRAV3, TRAJ37)
CAVRPHGSSNTGKLIF

SEQ ID NO: 469412 - protein, 16 aa, Homo sapiens
  CDR3 for beta chain variable domain of TCR clone 234706 (TRBV20-1, TRBJ1-4)
CSAPGQGLLTNEKLFF

SEQ ID NO: 469413 - protein, 11 aa, Homo sapiens
  CDR3 for alpha chain variable domain of TCR clone 234707 (TRAV1-2, TRAJ20)
CAAANDYKLSF

SEQ ID NO: 469414 - protein, 11 aa, Homo sapiens
  CDR3 for beta chain variable domain of TCR clone 234707 (TRBV29-1, TRBJ2-5)
CSEDRTGTQYF

SEQ ID NO: 469415 - protein, 14 aa, Homo sapiens
  CDR3 for alpha chain variable domain of TCR clone 234708 (TRAV8-2, TRAJ44)
AAEYFDGTASKLTF

SEQ ID NO: 469416 - protein, 14 aa, Homo sapiens
  CDR3 for beta chain variable domain of TCR clone 234708 (TRBV7-8, TRBJ2-3)
CASSLDRGTDTQYF

SEQ ID NO: 469417 - protein, 14 aa, Homo sapiens
  CDR3 for alpha chain variable domain of TCR clone 234709 (TRAV17, TRAJ34)
CATDSLEGTDKLIF

SEQ ID NO: 469418 - protein, 15 aa, Homo sapiens
  CDR3 for beta chain variable domain of TCR clone 234709 (TRBV12-4, TRBJ1-2)
CASSPITGGGFGYTF

SEQ ID NO: 469419 - protein, 14 aa, Homo sapiens
  CDR3 for alpha chain variable domain of TCR clone 234710 (TRAV26-1, TRAJ38)
CIVMGAGNNRKLIW

SEQ ID NO: 469420 - protein, 13 aa, Homo sapiens
  CDR3 for beta chain variable domain of TCR clone 234710 (TRBV7-8, TRBJ2-7)
CASSLTGGREQYF

SEQ ID NO: 469421 - protein, 16 aa, Homo sapiens
  CDR3 for alpha chain variable domain of TCR clone 234711 (TRAV12-2, TRAJ28)
CAVITDSGAGSYQLTF

SEQ ID NO: 469422 - protein, 15 aa, Homo sapiens
  CDR3 for beta chain variable domain of TCR clone 234711 (TRBV9, TRBJ1-2)
CASSVVGQANYGYTF

SEQ ID NO: 469423 - protein, 16 aa, Homo sapiens
  CDR3 for alpha chain variable domain of TCR clone 234712 (TRAV8-3, TRAJ18)
CAVGARRGSTLGRLYF

SEQ ID NO: 469424 - protein, 14 aa, Homo sapiens
  CDR3 for beta chain variable domain of TCR clone 234712 (TRBV25-1, TRBJ1-1)
CASTHLGGNTEAFF

SEQ ID NO: 469425 - protein, 19 aa, Homo sapiens
  CDR3 for alpha chain variable domain of TCR clone 234713 (TRAV29/DV5, TRAJ49)
CSVLLCSKLTVDTGNQFYF

SEQ ID NO: 469426 - protein, 14 aa, Homo sapiens
  CDR3 for beta chain variable domain of TCR clone 234713 (TRBV11-2, TRBJ2-7)
CASSLGAGAYEQYF

SEQ ID NO: 469427 - protein, 14 aa, Homo sapiens
  CDR3 for alpha chain variable domain of TCR clone 234714 (TRAV16, TRAJ44)
CALSTTGTASKLTF

SEQ ID NO: 469428 - protein, 16 aa, Homo sapiens
  CDR3 for beta chain variable domain of TCR clone 234714 (TRBV7-7, TRBJ2-1)
CASSLASGTSYNEQFF

SEQ ID NO: 469429 - protein, 13 aa, Homo sapiens
  CDR3 for alpha chain variable domain of TCR clone 234715 (TRAV20, TRAJ37)
CAGCSSNTGKLIF

SEQ ID NO: 469430 - protein, 11 aa, Homo sapiens
  CDR3 for beta chain variable domain of TCR clone 234715 (TRBV7-2, TRBJ2-7)
CASSSGLWQYF

SEQ ID NO: 469431 - protein, 18 aa, Homo sapiens
  CDR3 for alpha chain variable domain of TCR clone 234716 (TRAV21, TRAJ53)
CAVKGGENSGGSNYKLTF

SEQ ID NO: 469432 - protein, 13 aa, Homo sapiens
  CDR3 for beta chain variable domain of TCR clone 234716 (TRBV9, TRBJ2-1)
CASSPSGGAEQFF

SEQ ID NO: 469433 - protein, 15 aa, Homo sapiens
  CDR3 for alpha chain variable domain of TCR clone 234717 (TRAV26-2, TRAJ28)
CILVESGAGSYQLTF

SEQ ID NO: 469434 - protein, 16 aa, Homo sapiens
  CDR3 for beta chain variable domain of TCR clone 234717 (TRBV4-2, TRBJ1-2)
CASSQEIGGASFGYTF

SEQ ID NO: 469435 - protein, 15 aa, Homo sapiens
  CDR3 for alpha chain variable domain of TCR clone 234718 (TRAV12-3, TRAJ47)
CAMSALVEYGNKLVF

SEQ ID NO: 469436 - protein, 13 aa, Homo sapiens
  CDR3 for beta chain variable domain of TCR clone 234718 (TRBV12-4, TRBJ1-2)
CASSLRQGKGYTF

SEQ ID NO: 469437 - protein, 15 aa, Homo sapiens
  CDR3 for alpha chain variable domain of TCR clone 234719 (TRAV26-1, TRAJ42)
CIVRVKGGSQGNLSF

SEQ ID NO: 469438 - protein, 14 aa, Homo sapiens
  CDR3 for beta chain variable domain of TCR clone 234719 (TRBV19, TRBJ2-2)
CATTGHANTGELFF

SEQ ID NO: 469439 - protein, 11 aa, Homo sapiens
  CDR3 for alpha chain variable domain of TCR clone 234720 (TRAV12-3, TRAJ41)
CAMNAREALNF

SEQ ID NO: 469440 - protein, 16 aa, Homo sapiens
  CDR3 for beta chain variable domain of TCR clone 234720 (TRBV7-8, TRBJ2-3)
WASSTEGQRETDTQYF

SEQ ID NO: 469441 - protein, 15 aa, Homo sapiens
  CDR3 for alpha chain variable domain of TCR clone 234721 (TRAV3, TRAJ29)
CAVRAPLSVNTPLVF

SEQ ID NO: 469442 - protein, 14 aa, Homo sapiens
  CDR3 for beta chain variable domain of TCR clone 234721 (TRBV12-5, TRBJ2-5)
CASGSRTHQETQYF

SEQ ID NO: 469443 - protein, 15 aa, Homo sapiens
  CDR3 for alpha chain variable domain of TCR clone 234722 (TRAV8-3, TRAJ23)
CAVGDRYNQGGKLIF

SEQ ID NO: 469444 - protein, 22 aa, Homo sapiens
  CDR3 for beta chain variable domain of TCR clone 234722 (TRBV29-1, TRBJ2-5)
TVSNMSPEDSSIYLGSAETQYF

SEQ ID NO: 469445 - protein, 13 aa, Homo sapiens
  CDR3 for alpha chain variable domain of TCR clone 234723 (TRAV1-2, TRAJ11)
CAVRDSGYSTLTF

SEQ ID NO: 469446 - protein, 14 aa, Homo sapiens
  CDR3 for beta chain variable domain of TCR clone 234723 (TRBV7-2, TRBJ2-7)
CASSPKTSFYEQYF

SEQ ID NO: 469447 - protein, 15 aa, Homo sapiens
  CDR3 for alpha chain variable domain of TCR clone 234724 (TRAV1-2, TRAJ40)
CAVRPQTSGTYKYIF

SEQ ID NO: 469448 - protein, 13 aa, Homo sapiens
  CDR3 for beta chain variable domain of TCR clone 234724 (TRBV7-2, TRBJ2-2)
CASSSVRAGELFF

SEQ ID NO: 469449 - protein, 15 aa, Homo sapiens
  CDR3 for alpha chain variable domain of TCR clone 234725 (TRAV13-1, TRAJ43)
CAASGGFGAGTRLTV

SEQ ID NO: 469450 - protein, 14 aa, Homo sapiens
  CDR3 for beta chain variable domain of TCR clone 234725 (TRBV20-1, TRBJ2-5)
CSASDSGSGETQYF

SEQ ID NO: 469451 - protein, 11 aa, Homo sapiens
  CDR3 for alpha chain variable domain of TCR clone 234726 (TRAV12-2, TRAJ33)
GAVTSNYQLIW

SEQ ID NO: 469452 - protein, 14 aa, Homo sapiens
  CDR3 for beta chain variable domain of TCR clone 234726 (TRBV12-4, TRBJ2-2)
CASNQGANTGELFF

SEQ ID NO: 469453 - protein, 14 aa, Homo sapiens
  CDR3 for alpha chain variable domain of TCR clone 234727 (TRAV17, TRAJ32)
CATDPGGATNKLIF

SEQ ID NO: 469454 - protein, 12 aa, Homo sapiens
  CDR3 for beta chain variable domain of TCR clone 234727 (TRBV7-9, TRBJ1-5)
CASSPQGQPQHF

SEQ ID NO: 469455 - protein, 13 aa, Homo sapiens
  CDR3 for alpha chain variable domain of TCR clone 234728 (TRAV27, TRAJ11)
CAGGGSGYSTLTF

SEQ ID NO: 469456 - protein, 14 aa, Homo sapiens
  CDR3 for beta chain variable domain of TCR clone 234728 (TRBV25-1, TRBJ1-1)
CASTHLGGNTEAFF

SEQ ID NO: 469457 - protein, 14 aa, Homo sapiens
  CDR3 for alpha chain variable domain of TCR clone 234729 (TRAV38-1, TRAJ45)
CAYYSGGGADGLTF

SEQ ID NO: 469458 - protein, 20 aa, Homo sapiens
  CDR3 for beta chain variable domain of TCR clone 234729 (TRBV28, TRBJ2-1)
CDSTPIGRSPGLAGGNEQFI

SEQ ID NO: 469459 - protein, 14 aa, Homo sapiens
  CDR3 for alpha chain variable domain of TCR clone 234730 (TRAV8-4, TRAJ9)
CAVRINTGGFKTIF

SEQ ID NO: 469460 - protein, 15 aa, Homo sapiens
  CDR3 for beta chain variable domain of TCR clone 234730 (TRBV29-1, TRBJ1-2)
CSGLDVRGANYGYTF

SEQ ID NO: 469461 - protein, 14 aa, Homo sapiens
  CDR3 for alpha chain variable domain of TCR clone 234731 (TRAV1-2, TRAJ8)
CAVREDTGFQKLVF

SEQ ID NO: 469462 - protein, 15 aa, Homo sapiens
  CDR3 for beta chain variable domain of TCR clone 234731 (TRBV29-1, TRBJ2-1)
CSVGRHALFYNEQFF

SEQ ID NO: 469463 - protein, 14 aa, Homo sapiens
  CDR3 for alpha chain variable domain of TCR clone 234732 (TRAV1-2, TRAJ8)
CAVREDTGFQKLVF

SEQ ID NO: 469464 - protein, 14 aa, Homo sapiens
  CDR3 for beta chain variable domain of TCR clone 234732 (TRBV4-1, TRBJ2-7)
CASRLTSGSYEQYF

SEQ ID NO: 469465 - protein, 16 aa, Homo sapiens
  CDR3 for alpha chain variable domain of TCR clone 234733 (TRAV21, TRAJ16)
CAVNGFQMARSCSLQG

SEQ ID NO: 469466 - protein, 15 aa, Homo sapiens
  CDR3 for beta chain variable domain of TCR clone 234733 (TRBV20-1, TRBJ2-7)
CSARDRVSGMDEQYF

SEQ ID NO: 469467 - protein, 16 aa, Homo sapiens
  CDR3 for alpha chain variable domain of TCR clone 234734 (TRAV21, TRAJ37)
CAVRTAGSSNTGKLIF

SEQ ID NO: 469468 - protein, 13 aa, Homo sapiens
  CDR3 for beta chain variable domain of TCR clone 234734 (TRBV7-9, TRBJ2-5)
CPSLPSGRETQYF

SEQ ID NO: 469469 - protein, 14 aa, Homo sapiens
  CDR3 for alpha chain variable domain of TCR clone 234735 (TRAV1-2, TRAJ8)
CAVREDTGFQKLVF

SEQ ID NO: 469470 - protein, 15 aa, Homo sapiens
  CDR3 for beta chain variable domain of TCR clone 234735 (TRBV6-3, TRBJ2-7)
CASSSPGTVFYEQYA

SEQ ID NO: 469471 - protein, 14 aa, Homo sapiens
  CDR3 for alpha chain variable domain of TCR clone 234736 (TRAV38-1, TRAJ29)
CAFITPSGKPPLVF

SEQ ID NO: 469472 - protein, 14 aa, Homo sapiens
  CDR3 for beta chain variable domain of TCR clone 234736 (TRBV18, TRBJ2-7)
CASSPRGGAYEQYF

SEQ ID NO: 469473 - protein, 15 aa, Homo sapiens
  CDR3 for alpha chain variable domain of TCR clone 234737 (TRAV8-3, TRAJ45)
CAPSYSGGGAAGLTF

SEQ ID NO: 469474 - protein, 13 aa, Homo sapiens
  CDR3 for beta chain variable domain of TCR clone 234737 (TRBV10-3, TRBJ2-7)
CASKLAVNYEQYF

SEQ ID NO: 469475 - protein, 16 aa, Homo sapiens
  CDR3 for alpha chain variable domain of TCR clone 234738 (TRAV12-2, TRAJ45)
CAVTRNPGGGADGLTF

SEQ ID NO: 469476 - protein, 12 aa, Homo sapiens
  CDR3 for beta chain variable domain of TCR clone 234738 (TRBV6-1, TRBJ2-5)
CASSEGRETQYF

SEQ ID NO: 469477 - protein, 13 aa, Homo sapiens
  CDR3 for alpha chain variable domain of TCR clone 234739 (TRAV1-1, TRAJ9)
CAAKNTGGFKTLF

SEQ ID NO: 469478 - protein, 18 aa, Homo sapiens
  CDR3 for beta chain variable domain of TCR clone 234739 (TRBV12-4, TRBJ2-2)
CASSLVAGTRGRTGELFF

SEQ ID NO: 469479 - protein, 14 aa, Homo sapiens
  CDR3 for alpha chain variable domain of TCR clone 234740 (TRAV12-2, TRAJ17)
CAVLFKAAGNKRTF

SEQ ID NO: 469480 - protein, 17 aa, Homo sapiens
  CDR3 for beta chain variable domain of TCR clone 234740 (TRBV20-1, TRBJ2-2)
CSASGSGRGGLTGELFF

SEQ ID NO: 469481 - protein, 11 aa, Homo sapiens
  CDR3 for alpha chain variable domain of TCR clone 234741 (TRAV3, TRAJ21)
RAVGNFNKFYF

SEQ ID NO: 469482 - protein, 13 aa, Homo sapiens
  CDR3 for beta chain variable domain of TCR clone 234741 (TRBV19, TRBJ1-2)
CASSVPGQDGYTF

SEQ ID NO: 469483 - protein, 20 aa, Homo sapiens
  CDR3 for alpha chain variable domain of TCR clone 234742 (TRAV8-3, TRAJ44)
LSTSVPWVRLYTGTASKLTF

SEQ ID NO: 469484 - protein, 15 aa, Homo sapiens
  CDR3 for beta chain variable domain of TCR clone 234742 (TRBV6-5, TRBJ1-2)
CASSYSQAFNYGYTF

SEQ ID NO: 469485 - protein, 13 aa, Homo sapiens
  CDR3 for alpha chain variable domain of TCR clone 234743 (TRAV12-3, TRAJ13)
CSMSSGGYQKVTF

SEQ ID NO: 469486 - protein, 14 aa, Homo sapiens
  CDR3 for beta chain variable domain of TCR clone 234743 (TRBV2, TRBJ2-1)
CASRTGSSYNEQFF

SEQ ID NO: 469487 - protein, 14 aa, Homo sapiens
  CDR3 for alpha chain variable domain of TCR clone 234744 (TRAV21, TRAJ10)
CAVALTGGGNKLTF

SEQ ID NO: 469488 - protein, 13 aa, Homo sapiens
  CDR3 for beta chain variable domain of TCR clone 234744 (TRBV7-2, TRBJ1-6)
CASSLGSNSTLHF

SEQ ID NO: 469489 - protein, 14 aa, Homo sapiens
  CDR3 for alpha chain variable domain of TCR clone 234745 (TRAV8-1, TRAJ13)
CAVKSSGGYQKVTF

SEQ ID NO: 469490 - protein, 14 aa, Homo sapiens
  CDR3 for beta chain variable domain of TCR clone 234745 (TRBV6-1, TRBJ1-3)
CASVQGGGGNTIYF

SEQ ID NO: 469491 - protein, 12 aa, Homo sapiens
  CDR3 for alpha chain variable domain of TCR clone 234746 (TRAV27, TRAJ13)
CAGVRGYQKVTF

SEQ ID NO: 469492 - protein, 16 aa, Homo sapiens
  CDR3 for beta chain variable domain of TCR clone 234746 (TRBV28, TRBJ2-1)
CASSSSYSGSRNEQFF

SEQ ID NO: 469493 - protein, 14 aa, Homo sapiens
  CDR3 for alpha chain variable domain of TCR clone 234747 (TRAV13-2, TRAJ9)
CAENSFTGGFKTIF

SEQ ID NO: 469494 - protein, 14 aa, Homo sapiens
  CDR3 for beta chain variable domain of TCR clone 234747 (TRBV20-1, TRBJ2-7)
CSAKRGRSSYEQYF

SEQ ID NO: 469495 - protein, 12 aa, Homo sapiens
  CDR3 for alpha chain variable domain of TCR clone 234748 (TRAV1-1, TRAJ8)
CAGGTGFQKLVF

SEQ ID NO: 469496 - protein, 15 aa, Homo sapiens
  CDR3 for beta chain variable domain of TCR clone 234748 (TRBV5-1, TRBJ2-7)
CASSLNGGPAREQYF

SEQ ID NO: 469497 - protein, 16 aa, Homo sapiens
  CDR3 for alpha chain variable domain of TCR clone 234749 (TRAV3, TRAJ37)
CAVRGNGSGNTGKLIF

SEQ ID NO: 469498 - protein, 15 aa, Homo sapiens
  CDR3 for beta chain variable domain of TCR clone 234749 (TRBV7-9, TRBJ1-6)
CASSSTGRGNSPLHF

SEQ ID NO: 469499 - protein, 11 aa, Homo sapiens
  CDR3 for alpha chain variable domain of TCR clone 234750 (TRAV12-1, TRAJ21)
CVVNNFNKFYF

SEQ ID NO: 469500 - protein, 15 aa, Homo sapiens
  CDR3 for beta chain variable domain of TCR clone 234750 (TRBV28, TRBJ2-1)
CASSIIAGGRSEQFF

SEQ ID NO: 469501 - protein, 13 aa, Homo sapiens
  CDR3 for alpha chain variable domain of TCR clone 234751 (TRAV21, TRAJ15)
CAVRNQAGTALIF

SEQ ID NO: 469502 - protein, 16 aa, Homo sapiens
  CDR3 for beta chain variable domain of TCR clone 234751 (TRBV24-1, TRBJ2-3)
CATSDPGTGATDTQYF

SEQ ID NO: 469503 - protein, 10 aa, Homo sapiens
  CDR3 for alpha chain variable domain of TCR clone 234752 (TRAV26-1, TRAJ40)
CIAGTYKYIF

SEQ ID NO: 469504 - protein, 16 aa, Homo sapiens
  CDR3 for beta chain variable domain of TCR clone 234752 (TRBV5-1, TRBJ2-2)
CASSSQTGGRTGELFF

SEQ ID NO: 469505 - protein, 12 aa, Homo sapiens
  CDR3 for alpha chain variable domain of TCR clone 234753 (TRAV8-3, TRAJ26)
CAGDNYGKNFVF

SEQ ID NO: 469506 - protein, 13 aa, Homo sapiens
  CDR3 for beta chain variable domain of TCR clone 234753 (TRBV7-2, TRBJ2-7)
CASSSPSGSEQYF

SEQ ID NO: 469507 - protein, 17 aa, Homo sapiens
  CDR3 for alpha chain variable domain of TCR clone 234754 (TRAV23/DV6, TRAJ57)
CSASSTLSQGGSEKLVF

SEQ ID NO: 469508 - protein, 14 aa, Homo sapiens
  CDR3 for beta chain variable domain of TCR clone 234754 (TRBV25-1, TRBJ1-1)
CANTHLGGNTEAFF

SEQ ID NO: 469509 - protein, 18 aa, Homo sapiens
  CDR3 for alpha chain variable domain of TCR clone 234755 (TRAV27, TRAJ34)
CAGGGWEIITPTSSSLGL

SEQ ID NO: 469510 - protein, 15 aa, Homo sapiens
  CDR3 for beta chain variable domain of TCR clone 234755 (TRBV9, TRBJ1-4)
CASSVGGSTNEKLFF

SEQ ID NO: 469511 - protein, 15 aa, Homo sapiens
  CDR3 for alpha chain variable domain of TCR clone 234756 (TRAV8-6, TRAJ37)
CAVIFSSCNTGKLIF

SEQ ID NO: 469512 - protein, 15 aa, Homo sapiens
  CDR3 for beta chain variable domain of TCR clone 234756 (TRBV25-1, TRBJ2-4)
CASSETESAKNIQYF

SEQ ID NO: 469513 - protein, 13 aa, Homo sapiens
  CDR3 for alpha chain variable domain of TCR clone 234757 (TRAV2, TRAJ20)
CAVEGPSEYKLSF

SEQ ID NO: 469514 - protein, 16 aa, Homo sapiens
  CDR3 for beta chain variable domain of TCR clone 234757 (TRBV25-1, TRBJ2-7)
CASSDLTGGGIYEQYF

SEQ ID NO: 469515 - protein, 11 aa, Homo sapiens
  CDR3 for alpha chain variable domain of TCR clone 234758 (TRAV2, TRAJ33)
CAVESNYQLIW

SEQ ID NO: 469516 - protein, 12 aa, Homo sapiens
  CDR3 for beta chain variable domain of TCR clone 234758 (TRBV11-2, TRBJ2-2)
CASSLGGVELFF

SEQ ID NO: 469517 - protein, 14 aa, Homo sapiens
  CDR3 for alpha chain variable domain of TCR clone 234759 (TRAV3, TRAJ37)
CAVKESGNTGKLIF

SEQ ID NO: 469518 - protein, 15 aa, Homo sapiens
  CDR3 for beta chain variable domain of TCR clone 234759 (TRBV12-4, TRBJ2-5)
CASSLGGQGRETQYF

SEQ ID NO: 469519 - protein, 14 aa, Homo sapiens
  CDR3 for alpha chain variable domain of TCR clone 234760 (TRAV29/DV5, TRAJ36)
CAARRKTEANHLFF

SEQ ID NO: 469520 - protein, 14 aa, Homo sapiens
  CDR3 for beta chain variable domain of TCR clone 234760 (TRBV12-5, TRBJ2-5)
CASGSRTHQETQYF

SEQ ID NO: 469521 - protein, 16 aa, Homo sapiens
  CDR3 for alpha chain variable domain of TCR clone 234761 (TRAV12-3, TRAJ53)
CAMSPGSVGSNYKLTF

SEQ ID NO: 469522 - protein, 11 aa, Homo sapiens
  CDR3 for beta chain variable domain of TCR clone 234761 (TRBV29-1, TRBJ2-5)
CSEDRTGTRYF

SEQ ID NO: 469523 - protein, 12 aa, Homo sapiens
  CDR3 for alpha chain variable domain of TCR clone 234762 (TRAV12-3, TRAJ20)
CAMVRGDYKLSF

SEQ ID NO: 469524 - protein, 13 aa, Homo sapiens
  CDR3 for beta chain variable domain of TCR clone 234762 (TRBV23-1, TRBJ1-4)
CASRGKFNDKLFF

SEQ ID NO: 469525 - protein, 12 aa, Homo sapiens
  CDR3 for alpha chain variable domain of TCR clone 234763 (TRAV16, TRAJ12)
CAHGDSSYKLIF

SEQ ID NO: 469526 - protein, 12 aa, Homo sapiens
  CDR3 for beta chain variable domain of TCR clone 234763 (TRBV28, TRBJ2-1)
CASSQLVGEQFF

SEQ ID NO: 469527 - protein, 16 aa, Homo sapiens
  CDR3 for alpha chain variable domain of TCR clone 234764 (TRAV14/DV4, TRAJ21)
CAMREGPENNFSKFYF

SEQ ID NO: 469528 - protein, 12 aa, Homo sapiens
  CDR3 for beta chain variable domain of TCR clone 234764 (TRBV5-1, TRBJ2-7)
CASSLDSYEQYF

SEQ ID NO: 469529 - protein, 14 aa, Homo sapiens
  CDR3 for alpha chain variable domain of TCR clone 234765 (TRAV8-2, TRAJ37)
CVVSISSNTGKLIF

SEQ ID NO: 469530 - protein, 12 aa, Homo sapiens
  CDR3 for beta chain variable domain of TCR clone 234765 (TRBV11-2, TRBJ2-2)
CASSLPTGELFF

SEQ ID NO: 469531 - protein, 14 aa, Homo sapiens
  CDR3 for alpha chain variable domain of TCR clone 234766 (TRAV1-1, TRAJ27)
CAVIYNTNAGKSTF

SEQ ID NO: 469532 - protein, 12 aa, Homo sapiens
  CDR3 for beta chain variable domain of TCR clone 234766 (TRBV4-1, TRBJ2-3)
CASSQGTDTRYF

SEQ ID NO: 469533 - protein, 14 aa, Homo sapiens
  CDR3 for alpha chain variable domain of TCR clone 234767 (TRAV8-3, TRAJ10)
CAVGNAGGGNKLTF

SEQ ID NO: 469534 - protein, 16 aa, Homo sapiens
  CDR3 for beta chain variable domain of TCR clone 234767 (TRBV11-2, TRBJ1-2)
CASSLDTGGEDYGYTF

SEQ ID NO: 469535 - protein, 14 aa, Homo sapiens
  CDR3 for alpha chain variable domain of TCR clone 234768 (TRAV27, TRAJ23)
CAGAFDHQGGKLIF

SEQ ID NO: 469536 - protein, 15 aa, Homo sapiens
  CDR3 for beta chain variable domain of TCR clone 234768 (TRBV7-3, TRBJ2-7)
CASSLTGQGKYEQYF

SEQ ID NO: 469537 - protein, 15 aa, Homo sapiens
  CDR3 for alpha chain variable domain of TCR clone 234769 (TRAV2, TRAJ24)
CAVVRLKNSWGKLQF

SEQ ID NO: 469538 - protein, 19 aa, Homo sapiens
  CDR3 for beta chain variable domain of TCR clone 234769 (TRBV7-2, TRBJ2-3)
CASSPGLAGGGLTTDTQYF

SEQ ID NO: 469539 - protein, 14 aa, Homo sapiens
  CDR3 for alpha chain variable domain of TCR clone 234770 (TRAV9-2, TRAJ36)
CALPWRTGANNLFS

SEQ ID NO: 469540 - protein, 15 aa, Homo sapiens
  CDR3 for beta chain variable domain of TCR clone 234770 (TRBV6-3, TRBJ2-7)
CASSSPGTVFYEQYF

SEQ ID NO: 469541 - protein, 12 aa, Homo sapiens
  CDR3 for alpha chain variable domain of TCR clone 234771 (TRAV4, TRAJ34)
CLVGEDTDKLIF

SEQ ID NO: 469542 - protein, 13 aa, Homo sapiens
  CDR3 for beta chain variable domain of TCR clone 234771 (TRBV2, TRBJ2-7)
CATSMGLVYEQYF

SEQ ID NO: 469543 - protein, 12 aa, Homo sapiens
  CDR3 for alpha chain variable domain of TCR clone 234772 (TRAV38-1, TRAJ47)
CAFETYGNKLVF

SEQ ID NO: 469544 - protein, 15 aa, Homo sapiens
  CDR3 for beta chain variable domain of TCR clone 234772 (TRBV20-1, TRBJ2-7)
CSARKGLVESYEQYF

SEQ ID NO: 469545 - protein, 13 aa, Homo sapiens
  CDR3 for alpha chain variable domain of TCR clone 234773 (TRAV35, TRAJ26)
CAGQSAYGQNFVF

SEQ ID NO: 469546 - protein, 14 aa, Homo sapiens
  CDR3 for beta chain variable domain of TCR clone 234773 (TRBV29-1, TRBJ2-1)
CSVPTALSENEQFF

SEQ ID NO: 469547 - protein, 15 aa, Homo sapiens
  CDR3 for alpha chain variable domain of TCR clone 234774 (TRAV38-1, TRAJ57)
CAFMYSQGGSEKLVF

SEQ ID NO: 469548 - protein, 16 aa, Homo sapiens
  CDR3 for beta chain variable domain of TCR clone 234774 (TRBV10-3, TRBJ2-1)
CAIRGGGRGDYNEQFF

SEQ ID NO: 469549 - protein, 15 aa, Homo sapiens
  CDR3 for alpha chain variable domain of TCR clone 234775 (TRAV36/DV7, TRAJ53)
CAVEGSGGSNYKLTF

SEQ ID NO: 469550 - protein, 16 aa, Homo sapiens
  CDR3 for beta chain variable domain of TCR clone 234775 (TRBV27, TRBJ2-2)
CASSLSGFWVTGELYF

SEQ ID NO: 469551 - protein, 13 aa, Homo sapiens
  CDR3 for alpha chain variable domain of TCR clone 234776 (TRAV12-3, TRAJ9)
CAMRNTGGFKTIF

SEQ ID NO: 469552 - protein, 13 aa, Homo sapiens
  CDR3 for beta chain variable domain of TCR clone 234776 (TRBV11-2, TRBJ1-1)
CASSLETSTEAFF

SEQ ID NO: 469553 - protein, 14 aa, Homo sapiens
  CDR3 for alpha chain variable domain of TCR clone 234777 (TRAV13-1, TRAJ44)
CAAQATGIASKLTF

SEQ ID NO: 469554 - protein, 14 aa, Homo sapiens
  CDR3 for beta chain variable domain of TCR clone 234777 (TRBV5-4, TRBJ1-1)
CASSLDSRRDEAFF

SEQ ID NO: 469555 - protein, 14 aa, Homo sapiens
  CDR3 for alpha chain variable domain of TCR clone 234778 (TRAV12-2, TRAJ40)
CAVKIPSGTYKYIF

SEQ ID NO: 469556 - protein, 16 aa, Homo sapiens
  CDR3 for beta chain variable domain of TCR clone 234778 (TRBV20-1, TRBJ1-1)
CSARALTQGMNTEAFF

SEQ ID NO: 469557 - protein, 11 aa, Homo sapiens
  CDR3 for alpha chain variable domain of TCR clone 234779 (TRAV12-3, TRAJ43)
CAMSVSNDMRF

SEQ ID NO: 469558 - protein, 17 aa, Homo sapiens
  CDR3 for beta chain variable domain of TCR clone 234779 (TRBV20-1, TRBJ2-1)
CSASSSGLAGSYNKQFF

SEQ ID NO: 469559 - protein, 15 aa, Homo sapiens
  CDR3 for alpha chain variable domain of TCR clone 234780 (TRAV23/DV6, TRAJ18)
CAARYRGPTLGRLYF

SEQ ID NO: 469560 - protein, 16 aa, Homo sapiens
  CDR3 for beta chain variable domain of TCR clone 234780 (TRBV7-9, TRBJ2-1)
CASSDVAGGSYNEQFF

SEQ ID NO: 469561 - protein, 13 aa, Homo sapiens
  CDR3 for alpha chain variable domain of TCR clone 234781 (TRAV12-3, TRAJ40)
CAMSDSGTYKYIF

SEQ ID NO: 469562 - protein, 16 aa, Homo sapiens
  CDR3 for beta chain variable domain of TCR clone 234781 (TRBV11-2, TRBJ2-3)
CASSSRTSGGAGTQYF

SEQ ID NO: 469563 - protein, 12 aa, Homo sapiens
  CDR3 for alpha chain variable domain of TCR clone 234782 (TRAV21, TRAJ8)
CALNTGYQKLVF

SEQ ID NO: 469564 - protein, 12 aa, Homo sapiens
  CDR3 for beta chain variable domain of TCR clone 234782 (TRBV7-2, TRBJ2-3)
CASSLTGDTQYF

SEQ ID NO: 469565 - protein, 14 aa, Homo sapiens
  CDR3 for alpha chain variable domain of TCR clone 234783 (TRAV1-2, TRAJ16)
CVVNRFSDGQKLLF

SEQ ID NO: 469566 - protein, 13 aa, Homo sapiens
  CDR3 for beta chain variable domain of TCR clone 234783 (TRBV14, TRBJ1-1)
CASSQEAGTEAFF

SEQ ID NO: 469567 - protein, 15 aa, Homo sapiens
  CDR3 for alpha chain variable domain of TCR clone 234784 (TRAV3, TRAJ22)
CAVRDRGGSARQLTF

SEQ ID NO: 469568 - protein, 15 aa, Homo sapiens
  CDR3 for beta chain variable domain of TCR clone 234784 (TRBV7-3, TRBJ2-1)
RASSQRGGALIEQFF

SEQ ID NO: 469569 - protein, 12 aa, Homo sapiens
  CDR3 for alpha chain variable domain of TCR clone 234785 (TRAV16, TRAJ10)
CSRTGGGNKLAF

SEQ ID NO: 469570 - protein, 12 aa, Homo sapiens
  CDR3 for beta chain variable domain of TCR clone 234785 (TRBV11-3, TRBJ1-1)
CASSHRQGEAFL

SEQ ID NO: 469571 - protein, 14 aa, Homo sapiens
  CDR3 for alpha chain variable domain of TCR clone 234786 (TRAV1-2, TRAJ16)
CAVNRFSDGQKLLF

SEQ ID NO: 469572 - protein, 14 aa, Homo sapiens
  CDR3 for beta chain variable domain of TCR clone 234786 (TRBV7-3, TRBJ2-1)
CASSDRAYYNEQFF

SEQ ID NO: 469573 - protein, 15 aa, Homo sapiens
  CDR3 for alpha chain variable domain of TCR clone 234787 (TRAV3, TRAJ17)
CAVRDTGAAGNKLTF

SEQ ID NO: 469574 - protein, 15 aa, Homo sapiens
  CDR3 for beta chain variable domain of TCR clone 234787 (TRBV6-5, TRBJ2-1)
CASGYDAGAGNEQFF

SEQ ID NO: 469575 - protein, 14 aa, Homo sapiens
  CDR3 for alpha chain variable domain of TCR clone 234788 (TRAV1-2, TRAJ8)
CAVREDTGFQKLVF

SEQ ID NO: 469576 - protein, 12 aa, Homo sapiens
  CDR3 for beta chain variable domain of TCR clone 234788 (TRBV27, TRBJ2-2)
CASKLLTGELFF

SEQ ID NO: 469577 - protein, 12 aa, Homo sapiens
  CDR3 for alpha chain variable domain of TCR clone 234789 (TRAV35, TRAJ49)
CAGWNTGNQFYF

SEQ ID NO: 469578 - protein, 16 aa, Homo sapiens
  CDR3 for beta chain variable domain of TCR clone 234789 (TRBV5-1, TRBJ2-2)
CASSLWDTTNTGVLFF

SEQ ID NO: 469579 - protein, 14 aa, Homo sapiens
  CDR3 for alpha chain variable domain of TCR clone 234790 (TRAV12-2, TRAJ45)
CAVYSGGGSDGLTF

SEQ ID NO: 469580 - protein, 15 aa, Homo sapiens
  CDR3 for beta chain variable domain of TCR clone 234790 (TRBV4-1, TRBJ1-4)
CASSDTGGTNEKLFF

SEQ ID NO: 469581 - protein, 17 aa, Homo sapiens
  CDR3 for alpha chain variable domain of TCR clone 234791 (TRAV12-2, TRAJ4)
CAVNVRPVSGGYNKLIF

SEQ ID NO: 469582 - protein, 16 aa, Homo sapiens
  CDR3 for beta chain variable domain of TCR clone 234791 (TRBV7-9, TRBJ2-1)
CASSDVAGGSYNEQFF

SEQ ID NO: 469583 - protein, 13 aa, Homo sapiens
  CDR3 for alpha chain variable domain of TCR clone 234792 (TRAV12-3, TRAJ16)
CAMSVSDGQKLLF

SEQ ID NO: 469584 - protein, 14 aa, Homo sapiens
  CDR3 for beta chain variable domain of TCR clone 234792 (TRBV20-1, TRBJ2-7)
CSAKRGRSSYEQYF

SEQ ID NO: 469585 - protein, 15 aa, Homo sapiens
  CDR3 for alpha chain variable domain of TCR clone 234793 (TRAV26-1, TRAJ44)
CIVRANTGTASKLTF

SEQ ID NO: 469586 - protein, 15 aa, Homo sapiens
  CDR3 for beta chain variable domain of TCR clone 234793 (TRBV27, TRBJ1-6)
CASSFDRGLGSPLHF

SEQ ID NO: 469587 - protein, 13 aa, Homo sapiens
  CDR3 for alpha chain variable domain of TCR clone 234794 (TRAV17, TRAJ13)
CATDSGGYQKVTF

SEQ ID NO: 469588 - protein, 15 aa, Homo sapiens
  CDR3 for beta chain variable domain of TCR clone 234794 (TRBV10-2, TRBJ2-6)
CASSEQGTGANVLTF

SEQ ID NO: 469589 - protein, 14 aa, Homo sapiens
  CDR3 for alpha chain variable domain of TCR clone 234795 (TRAV8-6, TRAJ57)
CAVSSKGGSEKLVF

SEQ ID NO: 469590 - protein, 13 aa, Homo sapiens
  CDR3 for beta chain variable domain of TCR clone 234795 (TRBV15, TRBJ1-2)
CATSMTANYGYTF

SEQ ID NO: 469591 - protein, 12 aa, Homo sapiens
  CDR3 for alpha chain variable domain of TCR clone 234796 (TRAV12-3, TRAJ17)
CAMTLTGNKLTF

SEQ ID NO: 469592 - protein, 14 aa, Homo sapiens
  CDR3 for beta chain variable domain of TCR clone 234796 (TRBV18, TRBJ1-5)
CASSPGTGDQPQHF

SEQ ID NO: 469593 - protein, 16 aa, Homo sapiens
  CDR3 for alpha chain variable domain of TCR clone 234797 (TRAV8-3, TRAJ8)
CAVPRDGNTGFQTFGF

SEQ ID NO: 469594 - protein, 14 aa, Homo sapiens
  CDR3 for beta chain variable domain of TCR clone 234797 (TRBV28, TRBJ1-1)
CASSESGRGTEAFF

SEQ ID NO: 469595 - protein, 13 aa, Homo sapiens
  CDR3 for alpha chain variable domain of TCR clone 234798 (TRAV2, TRAJ32)
CGGGGGATNKLIF

SEQ ID NO: 469596 - protein, 13 aa, Homo sapiens
  CDR3 for beta chain variable domain of TCR clone 234798 (TRBV20-1, TRBJ1-1)
CSARGGGNTEAFF

SEQ ID NO: 469597 - protein, 14 aa, Homo sapiens
  CDR3 for alpha chain variable domain of TCR clone 234799 (TRAV1-2, TRAJ16)
CAVNRFSDGQKLLF

SEQ ID NO: 469598 - protein, 14 aa, Homo sapiens
  CDR3 for beta chain variable domain of TCR clone 234799 (TRBV4-1, TRBJ2-7)
CASIPSREGFEQYL

SEQ ID NO: 469599 - protein, 10 aa, Homo sapiens
  CDR3 for alpha chain variable domain of TCR clone 234800 (TRAV1-2, TRAJ23)
CAGQGGKLIF

SEQ ID NO: 469600 - protein, 16 aa, Homo sapiens
  CDR3 for beta chain variable domain of TCR clone 234800 (TRBV24-1, TRBJ2-3)
CATSDPGTGATDTQYF

SEQ ID NO: 469601 - protein, 14 aa, Homo sapiens
  CDR3 for alpha chain variable domain of TCR clone 234801 (TRAV9-2, TRAJ39)
CALYIYNAGNILTF

SEQ ID NO: 469602 - protein, 14 aa, Homo sapiens
  CDR3 for beta chain variable domain of TCR clone 234801 (TRBV7-2, TRBJ2-7)
CASRSQGAAYEQYF

SEQ ID NO: 469603 - protein, 13 aa, Homo sapiens
  CDR3 for alpha chain variable domain of TCR clone 234802 (TRAV1-2, TRAJ12)
CAVSMDSSYKLIF

SEQ ID NO: 469604 - protein, 13 aa, Homo sapiens
  CDR3 for beta chain variable domain of TCR clone 234802 (TRBV11-2, TRBJ1-2)
CASSLDSPSGYTF

SEQ ID NO: 469605 - protein, 14 aa, Homo sapiens
  CDR3 for alpha chain variable domain of TCR clone 234803 (TRAV21, TRAJ35)
CAVMPIGFGNVLHC

SEQ ID NO: 469606 - protein, 14 aa, Homo sapiens
  CDR3 for beta chain variable domain of TCR clone 234803 (TRBV19, TRBJ2-1)
CASPTFVLSGEQFC

SEQ ID NO: 469607 - protein, 14 aa, Homo sapiens
  CDR3 for alpha chain variable domain of TCR clone 234804 (TRAV23/DV6, TRAJ4)
CAANLSGGYNQLIF

SEQ ID NO: 469608 - protein, 17 aa, Homo sapiens
  CDR3 for beta chain variable domain of TCR clone 234804 (TRBV4-1, TRBJ1-3)
CASSPQRGIRFGNTIYF

SEQ ID NO: 469609 - protein, 14 aa, Homo sapiens
  CDR3 for alpha chain variable domain of TCR clone 234805 (TRAV1-2, TRAJ16)
CAVNRFSGGQKLLF

SEQ ID NO: 469610 - protein, 16 aa, Homo sapiens
  CDR3 for beta chain variable domain of TCR clone 234805 (TRBV7-3, TRBJ2-2)
CASSLKRGTSSGELFF

SEQ ID NO: 469611 - protein, 13 aa, Homo sapiens
  CDR3 for alpha chain variable domain of TCR clone 234806 (TRAV2, TRAJ29)
CAAQHSGTTPLVF

SEQ ID NO: 469612 - protein, 14 aa, Homo sapiens
  CDR3 for beta chain variable domain of TCR clone 234806 (TRBV7-9, TRBJ2-4)
CASSLAMGGNSQYF

SEQ ID NO: 469613 - protein, 11 aa, Homo sapiens
  CDR3 for alpha chain variable domain of TCR clone 234807 (TRAV13-1, TRAJ30)
CAASRDDKIIF

SEQ ID NO: 469614 - protein, 16 aa, Homo sapiens
  CDR3 for beta chain variable domain of TCR clone 234807 (TRBV11-2, TRBJ1-2)
CASSPSGREANYGYTF

SEQ ID NO: 469615 - protein, 14 aa, Homo sapiens
  CDR3 for alpha chain variable domain of TCR clone 234808 (TRAV2, TRAJ37)
CAVEGSSNTGQLIF

SEQ ID NO: 469616 - protein, 15 aa, Homo sapiens
  CDR3 for beta chain variable domain of TCR clone 234808 (TRBV24-1, TRBJ2-4)
CATSDPRDRANIQYF

SEQ ID NO: 469617 - protein, 14 aa, Homo sapiens
  CDR3 for alpha chain variable domain of TCR clone 234809 (TRAV12-1, TRAJ17)
CVVNYKAAGNKLTF

SEQ ID NO: 469618 - protein, 15 aa, Homo sapiens
  CDR3 for beta chain variable domain of TCR clone 234809 (TRBV20-1, TRBJ2-7)
CSARDRVSGMDEQYC

SEQ ID NO: 469619 - protein, 12 aa, Homo sapiens
  CDR3 for alpha chain variable domain of TCR clone 234810 (TRAV21, TRAJ42)
CAVGGSQGNLIF

SEQ ID NO: 469620 - protein, 14 aa, Homo sapiens
  CDR3 for beta chain variable domain of TCR clone 234810 (TRBV12-4, TRBJ1-1)
CASSLVTGGTEAFF

SEQ ID NO: 469621 - protein, 15 aa, Homo sapiens
  CDR3 for alpha chain variable domain of TCR clone 234811 (TRAV17, TRAJ56)
CSTDANTGANSKLTF

SEQ ID NO: 469622 - protein, 16 aa, Homo sapiens
  CDR3 for beta chain variable domain of TCR clone 234811 (TRBV7-3, TRBJ2-2)
CASSLKRGTLSGELFF

SEQ ID NO: 469623 - protein, 16 aa, Homo sapiens
  CDR3 for alpha chain variable domain of TCR clone 234812 (TRAV30, TRAJ24)
CGTEIVDADGWGKFQF

SEQ ID NO: 469624 - protein, 13 aa, Homo sapiens
  CDR3 for beta chain variable domain of TCR clone 234812 (TRBV4-1, TRBJ2-2)
CASSQENTGELFF

SEQ ID NO: 469625 - protein, 16 aa, Homo sapiens
  CDR3 for alpha chain variable domain of TCR clone 234813 (TRAV16, TRAJ52)
CALSAAGGISYGKLTF

SEQ ID NO: 469626 - protein, 14 aa, Homo sapiens
  CDR3 for beta chain variable domain of TCR clone 234813 (TRBV19, TRBJ2-1)
CASPTFVLSGEQFF

SEQ ID NO: 469627 - protein, 14 aa, Homo sapiens
  CDR3 for alpha chain variable domain of TCR clone 234814 (TRAV1-2, TRAJ16)
CAVNRFSDGQKLRF

SEQ ID NO: 469628 - protein, 16 aa, Homo sapiens
  CDR3 for beta chain variable domain of TCR clone 234814 (TRBV5-1, TRBJ2-5)
CASSLRRTSGQETQYF

SEQ ID NO: 469629 - protein, 13 aa, Homo sapiens
  CDR3 for alpha chain variable domain of TCR clone 234815 (TRAV12-2, TRAJ10)
CAVPTGGGNKLTF

SEQ ID NO: 469630 - protein, 11 aa, Homo sapiens
  CDR3 for beta chain variable domain of TCR clone 234815 (TRBV6-1, TRBJ2-1)
CASISSNEQFS

SEQ ID NO: 469631 - protein, 14 aa, Homo sapiens
  CDR3 for alpha chain variable domain of TCR clone 234816 (TRAV13-1, TRAJ20)
CAARPGPNDYKLSF

SEQ ID NO: 469632 - protein, 15 aa, Homo sapiens
  CDR3 for beta chain variable domain of TCR clone 234816 (TRBV4-1, TRBJ2-7)
CASSQQGQGFDEQYF

SEQ ID NO: 469633 - protein, 15 aa, Homo sapiens
  CDR3 for alpha chain variable domain of TCR clone 234817 (TRAV21, TRAJ53)
CATLNSGGSNYKLTF

SEQ ID NO: 469634 - protein, 13 aa, Homo sapiens
  CDR3 for beta chain variable domain of TCR clone 234817 (TRBV12-4, TRBJ1-2)
CASSSGPNYGYTF

SEQ ID NO: 469635 - protein, 11 aa, Homo sapiens
  CDR3 for alpha chain variable domain of TCR clone 234818 (TRAV3, TRAJ21)
CAVGNLNKFYF

SEQ ID NO: 469636 - protein, 17 aa, Homo sapiens
  CDR3 for beta chain variable domain of TCR clone 234818 (TRBV20-1, TRBJ2-1)
CSASSSGIAGSYNEQFF

SEQ ID NO: 469637 - protein, 16 aa, Homo sapiens
  CDR3 for alpha chain variable domain of TCR clone 234819 (TRAV8-3, TRAJ13)
CAVGAYPSGGYQKVTF

SEQ ID NO: 469638 - protein, 14 aa, Homo sapiens
  CDR3 for beta chain variable domain of TCR clone 234819 (TRBV7-9, TRBJ2-1)
CASSPRDSLYEQFF

SEQ ID NO: 469639 - protein, 14 aa, Homo sapiens
  CDR3 for alpha chain variable domain of TCR clone 234820 (TRAV13-1, TRAJ10)
CAASSPGGGNKLTF

SEQ ID NO: 469640 - protein, 16 aa, Homo sapiens
  CDR3 for beta chain variable domain of TCR clone 234820 (TRBV4-2, TRBJ1-1)
CASRPLDGGGDTEAFF

SEQ ID NO: 469641 - protein, 10 aa, Homo sapiens
  CDR3 for alpha chain variable domain of TCR clone 234821 (TRAV1-2, TRAJ18)
CAVRGEAQPW

SEQ ID NO: 469642 - protein, 12 aa, Homo sapiens
  CDR3 for beta chain variable domain of TCR clone 234821 (TRBV11-2, TRBJ2-2)
CASSLGGGELFF

SEQ ID NO: 469643 - protein, 16 aa, Homo sapiens
  CDR3 for alpha chain variable domain of TCR clone 234822 (TRAV12-2, TRAJ18)
CAVTTDRGSTLGRIYF

SEQ ID NO: 469644 - protein, 14 aa, Homo sapiens
  CDR3 for beta chain variable domain of TCR clone 234822 (TRBV4-2, TRBJ1-5)
CASSQDSINQPQHF

SEQ ID NO: 469645 - protein, 14 aa, Homo sapiens
  CDR3 for alpha chain variable domain of TCR clone 234823 (TRAV3, TRAJ21)
CAVRDAYNFNKFYF

SEQ ID NO: 469646 - protein, 15 aa, Homo sapiens
  CDR3 for beta chain variable domain of TCR clone 234823 (TRBV6-5, TRBJ1-5)
CASSYLWDSNQPQHF

SEQ ID NO: 469647 - protein, 15 aa, Homo sapiens
  CDR3 for alpha chain variable domain of TCR clone 234824 (TRAV17, TRAJ57)
CATGPSQGGSEKLVF

SEQ ID NO: 469648 - protein, 16 aa, Homo sapiens
  CDR3 for beta chain variable domain of TCR clone 234824 (TRBV12-4, TRBJ1-5)
CASSGPVGGSNQPQHF

SEQ ID NO: 469649 - protein, 12 aa, Homo sapiens
  CDR3 for alpha chain variable domain of TCR clone 234825 (TRAV13-2, TRAJ23)
CAERHREGKLIF

SEQ ID NO: 469650 - protein, 13 aa, Homo sapiens
  CDR3 for beta chain variable domain of TCR clone 234825 (TRBV2, TRBJ1-6)
CADSGSYNSPLHF

SEQ ID NO: 469651 - protein, 14 aa, Homo sapiens
  CDR3 for alpha chain variable domain of TCR clone 234826 (TRAV8-1, TRAJ34)
CAVNPSYNTDKLIF

SEQ ID NO: 469652 - protein, 16 aa, Homo sapiens
  CDR3 for beta chain variable domain of TCR clone 234826 (TRBV7-2, TRBJ2-6)
CASSLAVRSGANVLTF

SEQ ID NO: 469653 - protein, 13 aa, Homo sapiens
  CDR3 for alpha chain variable domain of TCR clone 234827 (TRAV21, TRAJ57)
WAVTQGGSEKLVF

SEQ ID NO: 469654 - protein, 14 aa, Homo sapiens
  CDR3 for beta chain variable domain of TCR clone 234827 (TRBV7-6, TRBJ2-3)
CASSLGTVTDTQYF

SEQ ID NO: 469655 - protein, 13 aa, Homo sapiens
  CDR3 for alpha chain variable domain of TCR clone 234828 (TRAV21, TRAJ27)
CAARPGNAGKSTF

SEQ ID NO: 469656 - protein, 13 aa, Homo sapiens
  CDR3 for beta chain variable domain of TCR clone 234828 (TRBV7-9, TRBJ2-1)
CASSSSNFNEQFF

SEQ ID NO: 469657 - protein, 13 aa, Homo sapiens
  CDR3 for alpha chain variable domain of TCR clone 234829 (TRAV8-3, TRAJ36)
CAVGATGANNLFF

SEQ ID NO: 469658 - protein, 13 aa, Homo sapiens
  CDR3 for beta chain variable domain of TCR clone 234829 (TRBV20-1, TRBJ2-7)
CSATHTSGYEQYF

SEQ ID NO: 469659 - protein, 13 aa, Homo sapiens
  CDR3 for alpha chain variable domain of TCR clone 234830 (TRAV14/DV4, TRAJ23)
CAMREVKGGKLIF

SEQ ID NO: 469660 - protein, 15 aa, Homo sapiens
  CDR3 for beta chain variable domain of TCR clone 234830 (TRBV6-3, TRBJ2-1)
CASGYASDSYNEQFF

SEQ ID NO: 469661 - protein, 16 aa, Homo sapiens
  CDR3 for alpha chain variable domain of TCR clone 234831 (TRAV20, TRAJ10)
CAVLRGLTGGGNKLTF

SEQ ID NO: 469662 - protein, 11 aa, Homo sapiens
  CDR3 for beta chain variable domain of TCR clone 234831 (TRBV12-4, TRBJ2-3)
CASTATDTQYF

SEQ ID NO: 469663 - protein, 17 aa, Homo sapiens
  CDR3 for alpha chain variable domain of TCR clone 234832 (TRAV17, TRAJ28)
CASDPRRGGAGSYQLTF

SEQ ID NO: 469664 - protein, 16 aa, Homo sapiens
  CDR3 for beta chain variable domain of TCR clone 234832 (TRBV25-1, TRBJ1-1)
CASSGDRDRGRIEAFF

SEQ ID NO: 469665 - protein, 17 aa, Homo sapiens
  CDR3 for alpha chain variable domain of TCR clone 234833 (TRAV23/DV6, TRAJ57)
CAASSTLSQGGSEKLLF

SEQ ID NO: 469666 - protein, 14 aa, Homo sapiens
  CDR3 for beta chain variable domain of TCR clone 234833 (TRBV25-1, TRBJ1-1)
CASTHLGGNTEAFF

SEQ ID NO: 469667 - protein, 14 aa, Homo sapiens
  CDR3 for alpha chain variable domain of TCR clone 234834 (TRAV3, TRAJ17)
CAVRGAAAGNKLTF

SEQ ID NO: 469668 - protein, 13 aa, Homo sapiens
  CDR3 for beta chain variable domain of TCR clone 234834 (TRBV19, TRBJ1-2)
CASSVPGQDGYTF

SEQ ID NO: 469669 - protein, 14 aa, Homo sapiens
  CDR3 for alpha chain variable domain of TCR clone 234835 (TRAV23/DV6, TRAJ11)
CAASPESGYSTLTF

SEQ ID NO: 469670 - protein, 13 aa, Homo sapiens
  CDR3 for beta chain variable domain of TCR clone 234835 (TRBV4-1, TRBJ2-5)
CASSLTRGETQYF

SEQ ID NO: 469671 - protein, 12 aa, Homo sapiens
  CDR3 for alpha chain variable domain of TCR clone 234836 (TRAV21, TRAJ39)
CAADNAGNMLTF

SEQ ID NO: 469672 - protein, 19 aa, Homo sapiens
  CDR3 for beta chain variable domain of TCR clone 234836 (TRBV11-3, TRBJ2-2)
CASSTRPGAKTTNTGELFF

SEQ ID NO: 469673 - protein, 13 aa, Homo sapiens
  CDR3 for alpha chain variable domain of TCR clone 234837 (TRAV8-6, TRAJ8)
CAVSNTGFQKLVF

SEQ ID NO: 469674 - protein, 16 aa, Homo sapiens
  CDR3 for beta chain variable domain of TCR clone 234837 (TRBV5-1, TRBJ2-2)
CASSSRTGGRTGELFF

SEQ ID NO: 469675 - protein, 13 aa, Homo sapiens
  CDR3 for alpha chain variable domain of TCR clone 234838 (TRAV12-1, TRAJ22)
CVVYSGSARKLTF

SEQ ID NO: 469676 - protein, 10 aa, Homo sapiens
  CDR3 for beta chain variable domain of TCR clone 234838 (TRBV6-3, TRBJ2-2)
CASRDGELFF

SEQ ID NO: 469677 - protein, 13 aa, Homo sapiens
  CDR3 for alpha chain variable domain of TCR clone 234839 (TRAV21, TRAJ27)
CAARPGNAGKETF

SEQ ID NO: 469678 - protein, 14 aa, Homo sapiens
  CDR3 for beta chain variable domain of TCR clone 234839 (TRBV7-9, TRBJ2-5)
CGSSLDTAQETQYF

SEQ ID NO: 469679 - protein, 14 aa, Homo sapiens
  CDR3 for alpha chain variable domain of TCR clone 234840 (TRAV1-2, TRAJ8)
CAVREDTGFQKLVF

SEQ ID NO: 469680 - protein, 15 aa, Homo sapiens
  CDR3 for beta chain variable domain of TCR clone 234840 (TRBV11-2, TRBJ2-2)
CASSLDTGNTGELFF

SEQ ID NO: 469681 - protein, 16 aa, Homo sapiens
  CDR3 for alpha chain variable domain of TCR clone 234841 (TRAV3, TRAJ37)
CAVRGKGSGNTGTLIF

SEQ ID NO: 469682 - protein, 15 aa, Homo sapiens
  CDR3 for beta chain variable domain of TCR clone 234841 (TRBV7-3, TRBJ2-2)
CASSETGQGTGELFF

SEQ ID NO: 469683 - protein, 17 aa, Homo sapiens
  CDR3 for alpha chain variable domain of TCR clone 234842 (TRAV27, TRAJ52)
CAGAGWAGGTSYGKLTF

SEQ ID NO: 469684 - protein, 12 aa, Homo sapiens
  CDR3 for beta chain variable domain of TCR clone 234842 (TRBV11-2, TRBJ2-2)
CASSLGGGELFF

SEQ ID NO: 469685 - protein, 13 aa, Homo sapiens
  CDR3 for alpha chain variable domain of TCR clone 234843 (TRAV12-2, TRAJ6)
CAVNVSRKLHTYI

SEQ ID NO: 469686 - protein, 12 aa, Homo sapiens
  CDR3 for beta chain variable domain of TCR clone 234843 (TRBV29-1, TRBJ2-3)
CSVTVGADTQYF

SEQ ID NO: 469687 - protein, 16 aa, Homo sapiens
  CDR3 for alpha chain variable domain of TCR clone 234844 (TRAV13-1, TRAJ48)
CAASIFGNLGNEKVTF

SEQ ID NO: 469688 - protein, 16 aa, Homo sapiens
  CDR3 for beta chain variable domain of TCR clone 234844 (TRBV18, TRBJ1-5)
CASSPYRVEGNQPQHF

SEQ ID NO: 469689 - protein, 15 aa, Homo sapiens
  CDR3 for alpha chain variable domain of TCR clone 234845 (TRAV38-1, TRAJ37)
CAFIHGSGNTGKLIF

SEQ ID NO: 469690 - protein, 17 aa, Homo sapiens
  CDR3 for beta chain variable domain of TCR clone 234845 (TRBV7-8, TRBJ2-6)
CASSAGTGGAGANVLTF

SEQ ID NO: 469691 - protein, 13 aa, Homo sapiens
  CDR3 for alpha chain variable domain of TCR clone 234846 (TRAV8-3, TRAJ36)
CAVGATGANNLFF

SEQ ID NO: 469692 - protein, 15 aa, Homo sapiens
  CDR3 for beta chain variable domain of TCR clone 234846 (TRBV7-9, TRBJ1-4)
CASSRTGGFNDKLFF

SEQ ID NO: 469693 - protein, 14 aa, Homo sapiens
  CDR3 for alpha chain variable domain of TCR clone 234847 (TRAV13-1, TRAJ40)
CAASMTAGTYKYIF

SEQ ID NO: 469694 - protein, 15 aa, Homo sapiens
  CDR3 for beta chain variable domain of TCR clone 234847 (TRBV7-3, TRBJ2-1)
CASSPTGGGEVEQFF

SEQ ID NO: 469695 - protein, 14 aa, Homo sapiens
  CDR3 for alpha chain variable domain of TCR clone 234848 (TRAV13-1, TRAJ5)
CAAPLGTGRRALTF

SEQ ID NO: 469696 - protein, 14 aa, Homo sapiens
  CDR3 for beta chain variable domain of TCR clone 234848 (TRBV12-4, TRBJ1-2)
CASSPPGPGGGYTF

SEQ ID NO: 469697 - protein, 13 aa, Homo sapiens
  CDR3 for alpha chain variable domain of TCR clone 234849 (TRAV8-3, TRAJ43)
CAVGPDNKNDMRF

SEQ ID NO: 469698 - protein, 18 aa, Homo sapiens
  CDR3 for beta chain variable domain of TCR clone 234849 (TRBV25-1, TRBJ1-2)
CASSGLQNGQGLICGYTF

SEQ ID NO: 469699 - protein, 13 aa, Homo sapiens
  CDR3 for alpha chain variable domain of TCR clone 234850 (TRAV17, TRAJ26)
CATVDNYGQNFVF

SEQ ID NO: 469700 - protein, 16 aa, Homo sapiens
  CDR3 for beta chain variable domain of TCR clone 234850 (TRBV2, TRBJ2-1)
FASSVGGSLSYNEQFF

SEQ ID NO: 469701 - protein, 11 aa, Homo sapiens
  CDR3 for alpha chain variable domain of TCR clone 234851 (TRAV12-1, TRAJ30)
CVVNGQDKIIF

SEQ ID NO: 469702 - protein, 13 aa, Homo sapiens
  CDR3 for beta chain variable domain of TCR clone 234851 (TRBV2, TRBJ1-1)
CASRWTVNTEAFF

SEQ ID NO: 469703 - protein, 15 aa, Homo sapiens
  CDR3 for alpha chain variable domain of TCR clone 234852 (TRAV25, TRAJ52)
CAGTSGGTSYGKLTF

SEQ ID NO: 469704 - protein, 13 aa, Homo sapiens
  CDR3 for beta chain variable domain of TCR clone 234852 (TRBV19, TRBJ1-1)
CASSPSNGGEAFF

SEQ ID NO: 469705 - protein, 15 aa, Homo sapiens
  CDR3 for alpha chain variable domain of TCR clone 234853 (TRAV3, TRAJ37)
CAVRATSGNTGKLIF

SEQ ID NO: 469706 - protein, 13 aa, Homo sapiens
  CDR3 for beta chain variable domain of TCR clone 234853 (TRBV7-3, TRBJ2-5)
CASSFRGGETQYF

SEQ ID NO: 469707 - protein, 11 aa, Homo sapiens
  CDR3 for alpha chain variable domain of TCR clone 234854 (TRAV35, TRAJ30)
CAGERDDKIIF

SEQ ID NO: 469708 - protein, 12 aa, Homo sapiens
  CDR3 for beta chain variable domain of TCR clone 234854 (TRBV11-2, TRBJ2-2)
CASSLGGGELFF

SEQ ID NO: 469709 - protein, 14 aa, Homo sapiens
  CDR3 for alpha chain variable domain of TCR clone 234855 (TRAV35, TRAJ13)
CAGSPSGGYQKVTF

SEQ ID NO: 469710 - protein, 16 aa, Homo sapiens
  CDR3 for beta chain variable domain of TCR clone 234855 (TRBV10-3, TRBJ2-1)
CAISGVGDGGGGEQFF

SEQ ID NO: 469711 - protein, 15 aa, Homo sapiens
  CDR3 for alpha chain variable domain of TCR clone 234856 (TRAV23/DV6, TRAJ18)
CAARYRGSTLGRLYF

SEQ ID NO: 469712 - protein, 16 aa, Homo sapiens
  CDR3 for beta chain variable domain of TCR clone 234856 (TRBV5-1, TRBJ2-1)
CASSIRSGGSYNEQFF

SEQ ID NO: 469713 - protein, 15 aa, Homo sapiens
  CDR3 for alpha chain variable domain of TCR clone 234857 (TRAV12-1, TRAJ26)
CVVNSWVIMVRILSL

SEQ ID NO: 469714 - protein, 13 aa, Homo sapiens
  CDR3 for beta chain variable domain of TCR clone 234857 (TRBV10-3, TRBJ2-7)
CASKLAVNYEQYF

SEQ ID NO: 469715 - protein, 18 aa, Homo sapiens
  CDR3 for alpha chain variable domain of TCR clone 234858 (TRAV21, TRAJ52)
CAVRPSPAGDTSYGKLTF

SEQ ID NO: 469716 - protein, 15 aa, Homo sapiens
  CDR3 for beta chain variable domain of TCR clone 234858 (TRBV28, TRBJ2-1)
CASSIIAGGRSEQFF

SEQ ID NO: 469717 - protein, 14 aa, Homo sapiens
  CDR3 for alpha chain variable domain of TCR clone 234859 (TRAV29/DV5, TRAJ42)
CATHYGGSQGNLIF

SEQ ID NO: 469718 - protein, 13 aa, Homo sapiens
  CDR3 for beta chain variable domain of TCR clone 234859 (TRBV5-1, TRBJ1-2)
CASSFAGFHGYTF

SEQ ID NO: 469719 - protein, 13 aa, Homo sapiens
  CDR3 for alpha chain variable domain of TCR clone 234860 (TRAV3, TRAJ21)
CAVGNFNKFYFDL

SEQ ID NO: 469720 - protein, 16 aa, Homo sapiens
  CDR3 for beta chain variable domain of TCR clone 234860 (TRBV19, TRBJ2-1)
YAGSKAGPSSYNEQFF

SEQ ID NO: 469721 - protein, 14 aa, Homo sapiens
  CDR3 for alpha chain variable domain of TCR clone 234861 (TRAV12-2, TRAJ17)
CAGLFKAAGNKLTF

SEQ ID NO: 469722 - protein, 14 aa, Homo sapiens
  CDR3 for beta chain variable domain of TCR clone 234861 (TRBV11-2, TRBJ2-5)
CASSALGQQETQYF

SEQ ID NO: 469723 - protein, 14 aa, Homo sapiens
  CDR3 for alpha chain variable domain of TCR clone 234862 (TRAV1-2, TRAJ6)
CAVRLSGGSYIPTF

SEQ ID NO: 469724 - protein, 15 aa, Homo sapiens
  CDR3 for beta chain variable domain of TCR clone 234862 (TRBV28, TRBJ2-7)
CASSPGGGGFYEQYF

SEQ ID NO: 469725 - protein, 12 aa, Homo sapiens
  CDR3 for alpha chain variable domain of TCR clone 234863 (TRAV8-4, TRAJ37)
CAVRSNTAKLIF

SEQ ID NO: 469726 - protein, 16 aa, Homo sapiens
  CDR3 for beta chain variable domain of TCR clone 234863 (TRBV7-2, TRBJ2-3)
CASSLVGDASTDTQYF

SEQ ID NO: 469727 - protein, 14 aa, Homo sapiens
  CDR3 for alpha chain variable domain of TCR clone 234864 (TRAV12-2, TRAJ13)
CAVKKTGGYQKVTF

SEQ ID NO: 469728 - protein, 13 aa, Homo sapiens
  CDR3 for beta chain variable domain of TCR clone 234864 (TRBV2, TRBJ1-6)
CASGRGGISPLHF

SEQ ID NO: 469729 - protein, 12 aa, Homo sapiens
  CDR3 for alpha chain variable domain of TCR clone 234865 (TRAV8-3, TRAJ20)
CAVGANDYKLSF

SEQ ID NO: 469730 - protein, 16 aa, Homo sapiens
  CDR3 for beta chain variable domain of TCR clone 234865 (TRBV19, TRBJ2-2)
CASRSPGTGATGGLLF

SEQ ID NO: 469731 - protein, 14 aa, Homo sapiens
  CDR3 for alpha chain variable domain of TCR clone 234866 (TRAV1-2, TRAJ8)
CAVREDTGFQKFVF

SEQ ID NO: 469732 - protein, 14 aa, Homo sapiens
  CDR3 for beta chain variable domain of TCR clone 234866 (TRBV9, TRBJ2-1)
CASSVDPRGKEQFF

SEQ ID NO: 469733 - protein, 14 aa, Homo sapiens
  CDR3 for alpha chain variable domain of TCR clone 234867 (TRAV12-2, TRAJ53)
CAVKGGGSYYKLTF

SEQ ID NO: 469734 - protein, 12 aa, Homo sapiens
  CDR3 for beta chain variable domain of TCR clone 234867 (TRBV28, TRBJ2-3)
CASSLYRDTQYF

SEQ ID NO: 469735 - protein, 15 aa, Homo sapiens
  CDR3 for alpha chain variable domain of TCR clone 234868 (TRAV21, TRAJ13)
CAVRPTSGGYQKGTF

SEQ ID NO: 469736 - protein, 15 aa, Homo sapiens
  CDR3 for beta chain variable domain of TCR clone 234868 (TRBV28, TRBJ2-7)
CASSPGGRGFYEQYF

SEQ ID NO: 469737 - protein, 15 aa, Homo sapiens
  CDR3 for alpha chain variable domain of TCR clone 234869 (TRAV25, TRAJ53)
CPTSNSGGSNYKLTF

SEQ ID NO: 469738 - protein, 14 aa, Homo sapiens
  CDR3 for beta chain variable domain of TCR clone 234869 (TRBV11-2, TRBJ2-3)
CASSRQARTDTQYF

SEQ ID NO: 469739 - protein, 14 aa, Homo sapiens
  CDR3 for alpha chain variable domain of TCR clone 234870 (TRAV8-3, TRAJ4)
CAVGAAGGYNKLIS

SEQ ID NO: 469740 - protein, 14 aa, Homo sapiens
  CDR3 for beta chain variable domain of TCR clone 234870 (TRBV19, TRBJ2-1)
CASPTFVLSGEQFF

SEQ ID NO: 469741 - protein, 17 aa, Homo sapiens
  CDR3 for alpha chain variable domain of TCR clone 234871 (TRAV17, TRAJ28)
CATDPWRGGAGSYQLTF

SEQ ID NO: 469742 - protein, 16 aa, Homo sapiens
  CDR3 for beta chain variable domain of TCR clone 234871 (TRBV25-1, TRBJ1-1)
CASSGDRDRGRIEAFF

SEQ ID NO: 469743 - protein, 13 aa, Homo sapiens
  CDR3 for alpha chain variable domain of TCR clone 234872 (TRAV3, TRAJ3)
CAVADSSASKIIF

SEQ ID NO: 469744 - protein, 14 aa, Homo sapiens
  CDR3 for beta chain variable domain of TCR clone 234872 (TRBV7-2, TRBJ1-2)
CASSQTGSTYGYTF

SEQ ID NO: 469745 - protein, 14 aa, Homo sapiens
  CDR3 for alpha chain variable domain of TCR clone 234873 (TRAV12-2, TRAJ13)
CAVKKTGGYQKVTF

SEQ ID NO: 469746 - protein, 12 aa, Homo sapiens
  CDR3 for beta chain variable domain of TCR clone 234873 (TRBV12-4, TRBJ1-2)
CASSFRWLHLRF

SEQ ID NO: 469747 - protein, 15 aa, Homo sapiens
  CDR3 for alpha chain variable domain of TCR clone 234874 (TRAV23/DV6, TRAJ30)
CAASSKERRDDKVIF

SEQ ID NO: 469748 - protein, 17 aa, Homo sapiens
  CDR3 for beta chain variable domain of TCR clone 234874 (TRBV4-3, TRBJ2-1)
CASSQFSSGRASGEQFF

SEQ ID NO: 469749 - protein, 11 aa, Homo sapiens
  CDR3 for alpha chain variable domain of TCR clone 234875 (TRAV17, TRAJ9)
CGFTGGFKPFF

SEQ ID NO: 469750 - protein, 14 aa, Homo sapiens
  CDR3 for beta chain variable domain of TCR clone 234875 (TRBV7-9, TRBJ2-2)
CASSLVQDTGELFF

SEQ ID NO: 469751 - protein, 11 aa, Homo sapiens
  CDR3 for alpha chain variable domain of TCR clone 234876 (TRAV17, TRAJ9)
CATTGGFKTIF

SEQ ID NO: 469752 - protein, 14 aa, Homo sapiens
  CDR3 for beta chain variable domain of TCR clone 234876 (TRBV20-1, TRBJ2-1)
CSAQIGGSANEQFF

SEQ ID NO: 469753 - protein, 10 aa, Homo sapiens
  CDR3 for alpha chain variable domain of TCR clone 234877 (TRAV1-2, TRAJ23)
CAGQGGKLIF

SEQ ID NO: 469754 - protein, 15 aa, Homo sapiens
  CDR3 for beta chain variable domain of TCR clone 234877 (TRBV10-3, TRBJ2-3)
CAISLTSGGTDTQYF

SEQ ID NO: 469755 - protein, 13 aa, Homo sapiens
  CDR3 for alpha chain variable domain of TCR clone 234878 (TRAV12-3, TRAJ54)
CALVPQGAQKLVF

SEQ ID NO: 469756 - protein, 14 aa, Homo sapiens
  CDR3 for beta chain variable domain of TCR clone 234878 (TRBV4-1, TRBJ2-2)
RQQPRLQGHRGLFF

SEQ ID NO: 469757 - protein, 12 aa, Homo sapiens
  CDR3 for alpha chain variable domain of TCR clone 234879 (TRAV25, TRAJ20)
CAGRSNDYKLSF

SEQ ID NO: 469758 - protein, 17 aa, Homo sapiens
  CDR3 for beta chain variable domain of TCR clone 234879 (TRBV15, TRBJ1-4)
CATSRYGTGDPNEKLFF

SEQ ID NO: 469759 - protein, 12 aa, Homo sapiens
  CDR3 for alpha chain variable domain of TCR clone 234880 (TRAV12-3, TRAJ17)
CAMTLTGNELTF

SEQ ID NO: 469760 - protein, 14 aa, Homo sapiens
  CDR3 for beta chain variable domain of TCR clone 234880 (TRBV6-1, TRBJ1-3)
CASVQGGGGNTIYF

SEQ ID NO: 469761 - protein, 15 aa, Homo sapiens
  CDR3 for alpha chain variable domain of TCR clone 234881 (TRAV17, TRAJ57)
CATDWTPGGSEKLVF

SEQ ID NO: 469762 - protein, 15 aa, Homo sapiens
  CDR3 for beta chain variable domain of TCR clone 234881 (TRBV27, TRBJ2-1)
CASSLAGGPLNEQFF

SEQ ID NO: 469763 - protein, 14 aa, Homo sapiens
  CDR3 for alpha chain variable domain of TCR clone 234882 (TRAV17, TRAJ54)
CATDANQGAKKLVF

SEQ ID NO: 469764 - protein, 14 aa, Homo sapiens
  CDR3 for beta chain variable domain of TCR clone 234882 (TRBV25-1, TRBJ1-1)
CASTHLGGNTEAFF

SEQ ID NO: 469765 - protein, 14 aa, Homo sapiens
  CDR3 for alpha chain variable domain of TCR clone 234883 (TRAV13-1, TRAJ35)
CAASKGGFGNCLHC

SEQ ID NO: 469766 - protein, 13 aa, Homo sapiens
  CDR3 for beta chain variable domain of TCR clone 234883 (TRBV7-3, TRBJ1-1)
CASSQDWGAEAFF

SEQ ID NO: 469767 - protein, 14 aa, Homo sapiens
  CDR3 for alpha chain variable domain of TCR clone 234884 (TRAV1-2, TRAJ13)
CAVLNSGGYQKVTF

SEQ ID NO: 469768 - protein, 14 aa, Homo sapiens
  CDR3 for beta chain variable domain of TCR clone 234884 (TRBV12-4, TRBJ1-1)
CASSLNDTNTEAFF

SEQ ID NO: 469769 - protein, 15 aa, Homo sapiens
  CDR3 for alpha chain variable domain of TCR clone 234885 (TRAV21, TRAJ32)
CAVNSYGGATSKLIF

SEQ ID NO: 469770 - protein, 18 aa, Homo sapiens
  CDR3 for beta chain variable domain of TCR clone 234885 (TRBV7-9, TRBJ2-1)
CASSTGLAEGSSYNEQFF

SEQ ID NO: 469771 - protein, 14 aa, Homo sapiens
  CDR3 for alpha chain variable domain of TCR clone 234886 (TRAV12-2, TRAJ40)
CAVKIPSGTYKYIF

SEQ ID NO: 469772 - protein, 13 aa, Homo sapiens
  CDR3 for beta chain variable domain of TCR clone 234886 (TRBV4-1, TRBJ1-1)
CASSLRGPTEAFF

SEQ ID NO: 469773 - protein, 16 aa, Homo sapiens
  CDR3 for alpha chain variable domain of TCR clone 234887 (TRAV13-1, TRAJ48)
CAASIFGNFGNEKLTF

SEQ ID NO: 469774 - protein, 11 aa, Homo sapiens
  CDR3 for beta chain variable domain of TCR clone 234887 (TRBV27, TRBJ2-3)
CASRLGDTQYF

SEQ ID NO: 469775 - protein, 12 aa, Homo sapiens
  CDR3 for alpha chain variable domain of TCR clone 234888 (TRAV3, TRAJ43)
RAVRDPNNDMRF

SEQ ID NO: 469776 - protein, 17 aa, Homo sapiens
  CDR3 for beta chain variable domain of TCR clone 234888 (TRBV7-8, TRBJ2-6)
CASSAGTGGAGANVLTF

SEQ ID NO: 469777 - protein, 16 aa, Homo sapiens
  CDR3 for alpha chain variable domain of TCR clone 234889 (TRAV38-1, TRAJ37)
CAFKGDGSSNTGTLIF

SEQ ID NO: 469778 - protein, 13 aa, Homo sapiens
  CDR3 for beta chain variable domain of TCR clone 234889 (TRBV12-4, TRBJ2-5)
CASSLLRRETQYF

SEQ ID NO: 469779 - protein, 14 aa, Homo sapiens
  CDR3 for alpha chain variable domain of TCR clone 234890 (TRAV8-3, TRAJ23)
CAVIIYNQGGKLTF

SEQ ID NO: 469780 - protein, 15 aa, Homo sapiens
  CDR3 for beta chain variable domain of TCR clone 234890 (TRBV18, TRBJ2-1)
CASSPPSASYNEQFF

SEQ ID NO: 469781 - protein, 12 aa, Homo sapiens
  CDR3 for alpha chain variable domain of TCR clone 234891 (TRAV13-2, TRAJ8)
CAPWLGFQKLVF

SEQ ID NO: 469782 - protein, 13 aa, Homo sapiens
  CDR3 for beta chain variable domain of TCR clone 234891 (TRBV20-1, TRBJ2-1)
CSATTFGEGEQFF

SEQ ID NO: 469783 - protein, 14 aa, Homo sapiens
  CDR3 for alpha chain variable domain of TCR clone 234892 (TRAV1-1, TRAJ35)
CAVRAIGFGNVLHC

SEQ ID NO: 469784 - protein, 14 aa, Homo sapiens
  CDR3 for beta chain variable domain of TCR clone 234892 (TRBV5-7, TRBJ2-7)
CASSGGLSSYEQYF

SEQ ID NO: 469785 - protein, 14 aa, Homo sapiens
  CDR3 for alpha chain variable domain of TCR clone 234893 (TRAV13-1, TRAJ20)
CAARPGSNDYKRSF

SEQ ID NO: 469786 - protein, 16 aa, Homo sapiens
  CDR3 for beta chain variable domain of TCR clone 234893 (TRBV19, TRBJ1-1)
CASSPTRFWPGTEAFF

SEQ ID NO: 469787 - protein, 21 aa, Homo sapiens
  CDR3 for alpha chain variable domain of TCR clone 234894 (TRAV9-2, )
CALSRAGNNHIQNPDPAVYQL

SEQ ID NO: 469788 - protein, 12 aa, Homo sapiens
  CDR3 for beta chain variable domain of TCR clone 234894 (TRBV7-2, TRBJ2-5)
CASSQYQETQYF

SEQ ID NO: 469789 - protein, 12 aa, Homo sapiens
  CDR3 for alpha chain variable domain of TCR clone 234895 (TRAV12-3, TRAJ17)
CAMTLTGNKITF

SEQ ID NO: 469790 - protein, 12 aa, Homo sapiens
  CDR3 for beta chain variable domain of TCR clone 234895 (TRBV14, TRBJ2-4)
CASSNLKSIQYF

SEQ ID NO: 469791 - protein, 14 aa, Homo sapiens
  CDR3 for alpha chain variable domain of TCR clone 234896 (TRAV8-4, TRAJ54)
CAVSEVLGAQKLVF

SEQ ID NO: 469792 - protein, 15 aa, Homo sapiens
  CDR3 for beta chain variable domain of TCR clone 234896 (TRBV6-3, TRBJ2-7)
CASSSPGTVFYEQYF

SEQ ID NO: 469793 - protein, 14 aa, Homo sapiens
  CDR3 for alpha chain variable domain of TCR clone 234897 (TRAV22, TRAJ52)
CAPAGGTSYGKLTF

SEQ ID NO: 469794 - protein, 13 aa, Homo sapiens
  CDR3 for beta chain variable domain of TCR clone 234897 (TRBV10-3, TRBJ2-7)
CASKLAVNYEQYF

SEQ ID NO: 469795 - protein, 12 aa, Homo sapiens
  CDR3 for alpha chain variable domain of TCR clone 234898 (TRAV36/DV7, TRAJ54)
CAVVRGAQKLVF

SEQ ID NO: 469796 - protein, 15 aa, Homo sapiens
  CDR3 for beta chain variable domain of TCR clone 234898 (TRBV7-9, TRBJ1-1)
CASSLLEQGGTEAFF

SEQ ID NO: 469797 - protein, 12 aa, Homo sapiens
  CDR3 for alpha chain variable domain of TCR clone 234899 (TRAV26-2, TRAJ21)
CILKGNFNKFYF

SEQ ID NO: 469798 - protein, 15 aa, Homo sapiens
  CDR3 for beta chain variable domain of TCR clone 234899 (TRBV11-3, TRBJ2-3)
CASLKDGREGDTQYF

SEQ ID NO: 469799 - protein, 17 aa, Homo sapiens
  CDR3 for alpha chain variable domain of TCR clone 234900 (TRAV3, TRAJ6)
CAVRDGPMAGGSYIPTF

SEQ ID NO: 469800 - protein, 15 aa, Homo sapiens
  CDR3 for beta chain variable domain of TCR clone 234900 (TRBV7-8, TRBJ1-5)
CASSLERRGLEPQHF

SEQ ID NO: 469801 - protein, 16 aa, Homo sapiens
  CDR3 for alpha chain variable domain of TCR clone 234901 (TRAV30, TRAJ24)
CGTEIVDADSWGKFQF

SEQ ID NO: 469802 - protein, 17 aa, Homo sapiens
  CDR3 for beta chain variable domain of TCR clone 234901 (TRBV4-1, TRBJ2-7)
WASSRDPLGVRGGEQYF

SEQ ID NO: 469803 - protein, 13 aa, Homo sapiens
  CDR3 for alpha chain variable domain of TCR clone 234902 (TRAV2, TRAJ15)
CAVASQAGTALIF

SEQ ID NO: 469804 - protein, 13 aa, Homo sapiens
  CDR3 for beta chain variable domain of TCR clone 234902 (TRBV11-3, TRBJ2-3)
CASSHDTKDTQYF

SEQ ID NO: 469805 - protein, 13 aa, Homo sapiens
  CDR3 for alpha chain variable domain of TCR clone 234903 (TRAV17, TRAJ4)
CATKSGGYDKLIF

SEQ ID NO: 469806 - protein, 14 aa, Homo sapiens
  CDR3 for beta chain variable domain of TCR clone 234903 (TRBV20-1, TRBJ1-5)
CSARDVRGNQPQHF

SEQ ID NO: 469807 - protein, 17 aa, Homo sapiens
  CDR3 for alpha chain variable domain of TCR clone 234904 (TRAV3, TRAJ6)
CAVRDGPRAGGSYIPTF

SEQ ID NO: 469808 - protein, 15 aa, Homo sapiens
  CDR3 for beta chain variable domain of TCR clone 234904 (TRBV7-9, TRBJ2-5)
CASSFKAGREETQYF

SEQ ID NO: 469809 - protein, 14 aa, Homo sapiens
  CDR3 for alpha chain variable domain of TCR clone 234905 (TRAV12-2, TRAJ24)
CAVTPADSWGKLQF

SEQ ID NO: 469810 - protein, 11 aa, Homo sapiens
  CDR3 for beta chain variable domain of TCR clone 234905 (TRBV20-1, TRBJ2-7)
CSARTSYEQYF

SEQ ID NO: 469811 - protein, 13 aa, Homo sapiens
  CDR3 for alpha chain variable domain of TCR clone 234906 (TRAV12-3, TRAJ21)
CAPGPHNFNKFYF

SEQ ID NO: 469812 - protein, 15 aa, Homo sapiens
  CDR3 for beta chain variable domain of TCR clone 234906 (TRBV10-3, TRBJ2-3)
CAISLTSGGKDTQYF

SEQ ID NO: 469813 - protein, 16 aa, Homo sapiens
  CDR3 for alpha chain variable domain of TCR clone 234907 (TRAV38-1, TRAJ37)
CAFKGDGSSNTGKLIF

SEQ ID NO: 469814 - protein, 13 aa, Homo sapiens
  CDR3 for beta chain variable domain of TCR clone 234907 (TRBV12-4, TRBJ2-5)
CASSLFRRETLYF

SEQ ID NO: 469815 - protein, 16 aa, Homo sapiens
  CDR3 for alpha chain variable domain of TCR clone 234908 (TRAV3, TRAJ37)
CAVRGKGSGNTGKLIF

SEQ ID NO: 469816 - protein, 15 aa, Homo sapiens
  CDR3 for beta chain variable domain of TCR clone 234908 (TRBV7-3, TRBJ2-2)
CASSETGQGTGELVF

SEQ ID NO: 469817 - protein, 11 aa, Homo sapiens
  CDR3 for alpha chain variable domain of TCR clone 234909 (TRAV16, TRAJ49)
CSLNTGNPFHF

SEQ ID NO: 469818 - protein, 12 aa, Homo sapiens
  CDR3 for beta chain variable domain of TCR clone 234909 (TRBV7-9, TRBJ1-4)
CASSTDREKLFF

SEQ ID NO: 469819 - protein, 14 aa, Homo sapiens
  CDR3 for alpha chain variable domain of TCR clone 234910 (TRAV12-3, TRAJ10)
SHLPLAGGGNKLTF

SEQ ID NO: 469820 - protein, 15 aa, Homo sapiens
  CDR3 for beta chain variable domain of TCR clone 234910 (TRBV6-1, TRBJ2-1)
CASSELRGQYNEQFF

SEQ ID NO: 469821 - protein, 17 aa, Homo sapiens
  CDR3 for alpha chain variable domain of TCR clone 234911 (TRAV21, TRAJ52)
CAVGVNAGGTSYGKLSF

SEQ ID NO: 469822 - protein, 13 aa, Homo sapiens
  CDR3 for beta chain variable domain of TCR clone 234911 (TRBV5-1, TRBJ1-2)
CASSFQGNYGYTF

SEQ ID NO: 469823 - protein, 14 aa, Homo sapiens
  CDR3 for alpha chain variable domain of TCR clone 234912 (TRAV16, TRAJ17)
CALSGRAAGNKLTF

SEQ ID NO: 469824 - protein, 15 aa, Homo sapiens
  CDR3 for beta chain variable domain of TCR clone 234912 (TRBV3-1, TRBJ1-2)
CASSPTRRPEGGYAF

SEQ ID NO: 469825 - protein, 10 aa, Homo sapiens
  CDR3 for alpha chain variable domain of TCR clone 234913 (TRAV36/DV7, TRAJ49)
CALTGNQFYF

SEQ ID NO: 469826 - protein, 14 aa, Homo sapiens
  CDR3 for beta chain variable domain of TCR clone 234913 (TRBV4-2, TRBJ2-5)
CASSEDRGRETQYF

SEQ ID NO: 469827 - protein, 17 aa, Homo sapiens
  CDR3 for alpha chain variable domain of TCR clone 234914 (TRAV3, TRAJ6)
CAVSRRTDTGGSYIPTF

SEQ ID NO: 469828 - protein, 18 aa, Homo sapiens
  CDR3 for beta chain variable domain of TCR clone 234914 (TRBV7-2, TRBJ2-3)
CASSLETSRGRKADTHYF

SEQ ID NO: 469829 - protein, 13 aa, Homo sapiens
  CDR3 for alpha chain variable domain of TCR clone 234915 (TRAV12-2, TRAJ42)
FAVKRGSQGNLIF

SEQ ID NO: 469830 - protein, 13 aa, Homo sapiens
  CDR3 for beta chain variable domain of TCR clone 234915 (TRBV7-9, TRBJ2-3)
CASNPGSTDTQYF

SEQ ID NO: 469831 - protein, 17 aa, Homo sapiens
  CDR3 for alpha chain variable domain of TCR clone 234916 (TRAV17, TRAJ52)
CATAPRAGGTSYGKLTF

SEQ ID NO: 469832 - protein, 13 aa, Homo sapiens
  CDR3 for beta chain variable domain of TCR clone 234916 (TRBV7-3, TRBJ1-1)
CASSQDWGAEAFF

SEQ ID NO: 469833 - protein, 14 aa, Homo sapiens
  CDR3 for alpha chain variable domain of TCR clone 234917 (TRAV20, TRAJ37)
CAVQSSSNTGKLIF

SEQ ID NO: 469834 - protein, 14 aa, Homo sapiens
  CDR3 for beta chain variable domain of TCR clone 234917 (TRBV7-3, TRBJ2-2)
CASSLNSNNGELFF

SEQ ID NO: 469835 - protein, 16 aa, Homo sapiens
  CDR3 for alpha chain variable domain of TCR clone 234918 (TRAV3, TRAJ37)
YAMRGKGSGNTGKLIF

SEQ ID NO: 469836 - protein, 15 aa, Homo sapiens
  CDR3 for beta chain variable domain of TCR clone 234918 (TRBV6-6, TRBJ2-5)
CASSYGKIIQETQYF

SEQ ID NO: 469837 - protein, 13 aa, Homo sapiens
  CDR3 for alpha chain variable domain of TCR clone 234919 (TRAV23/DV6, TRAJ58)
CAATGTSGSRVTF

SEQ ID NO: 469838 - protein, 13 aa, Homo sapiens
  CDR3 for beta chain variable domain of TCR clone 234919 (TRBV5-5, TRBJ1-2)
CASSFWRGEDYTF

SEQ ID NO: 469839 - protein, 14 aa, Homo sapiens
  CDR3 for alpha chain variable domain of TCR clone 234920 (TRAV34, TRAJ44)
CGADGTGTACKLTF

SEQ ID NO: 469840 - protein, 15 aa, Homo sapiens
  CDR3 for beta chain variable domain of TCR clone 234920 (TRBV5-1, TRBJ2-1)
CASSPPRAPYNEQFF

SEQ ID NO: 469841 - protein, 15 aa, Homo sapiens
  CDR3 for alpha chain variable domain of TCR clone 234921 (TRAV21, TRAJ37)
CAVRPTLSNTGKLNF

SEQ ID NO: 469842 - protein, 16 aa, Homo sapiens
  CDR3 for beta chain variable domain of TCR clone 234921 (TRBV24-1, TRBJ2-3)
CATSDRRQDLTDTQYF

SEQ ID NO: 469843 - protein, 14 aa, Homo sapiens
  CDR3 for alpha chain variable domain of TCR clone 234922 (TRAV29/DV5, TRAJ36)
CAARRKTGANNLFF

SEQ ID NO: 469844 - protein, 14 aa, Homo sapiens
  CDR3 for beta chain variable domain of TCR clone 234922 (TRBV12-5, TRBJ2-5)
CASGSRTHPATQYF

SEQ ID NO: 469845 - protein, 13 aa, Homo sapiens
  CDR3 for alpha chain variable domain of TCR clone 234923 (TRAV1-2, TRAJ36)
CAVAQTGANNLFF

SEQ ID NO: 469846 - protein, 14 aa, Homo sapiens
  CDR3 for beta chain variable domain of TCR clone 234923 (TRBV20-1, TRBJ2-5)
CSAREMTKQETQYF

SEQ ID NO: 469847 - protein, 11 aa, Homo sapiens
  CDR3 for alpha chain variable domain of TCR clone 234924 (TRAV2, TRAJ13)
CASGGYQKVTF

SEQ ID NO: 469848 - protein, 11 aa, Homo sapiens
  CDR3 for beta chain variable domain of TCR clone 234924 (TRBV4-1, TRBJ2-2)
CASEHTGELFF

SEQ ID NO: 469849 - protein, 15 aa, Homo sapiens
  CDR3 for alpha chain variable domain of TCR clone 234925 (TRAV27, TRAJ38)
RAARRNAGHNRKLIW

SEQ ID NO: 469850 - protein, 13 aa, Homo sapiens
  CDR3 for beta chain variable domain of TCR clone 234925 (TRBV12-5, TRBJ2-3)
CASGDRQSDTQYF

SEQ ID NO: 469851 - protein, 15 aa, Homo sapiens
  CDR3 for alpha chain variable domain of TCR clone 234926 (TRAV12-3, TRAJ5)
CAMSGLGTGRRALTF

SEQ ID NO: 469852 - protein, 13 aa, Homo sapiens
  CDR3 for beta chain variable domain of TCR clone 234926 (TRBV3-1, TRBJ2-2)
CASLARGSGELFF

SEQ ID NO: 469853 - protein, 20 aa, Homo sapiens
  CDR3 for alpha chain variable domain of TCR clone 234927 (TRAV26-1, TRAJ57)
CCVLLHRQIETQGGSEKLVF

SEQ ID NO: 469854 - protein, 16 aa, Homo sapiens
  CDR3 for beta chain variable domain of TCR clone 234927 (TRBV4-2, TRBJ2-7)
CASSKEELAGTYEQYF

SEQ ID NO: 469855 - protein, 13 aa, Homo sapiens
  CDR3 for alpha chain variable domain of TCR clone 234928 (TRAV13-1, TRAJ29)
CAASIGLNTPLVF

SEQ ID NO: 469856 - protein, 15 aa, Homo sapiens
  CDR3 for beta chain variable domain of TCR clone 234928 (TRBV6-1, TRBJ2-5)
CASSESPLMGETQYF

SEQ ID NO: 469857 - protein, 10 aa, Homo sapiens
  CDR3 for alpha chain variable domain of TCR clone 234929 (TRAV24, TRAJ20)
CAVNDYKLSF

SEQ ID NO: 469858 - protein, 15 aa, Homo sapiens
  CDR3 for beta chain variable domain of TCR clone 234929 (TRBV7-9, TRBJ1-5)
CASSQGHQPNQPQHF

SEQ ID NO: 469859 - protein, 13 aa, Homo sapiens
  CDR3 for alpha chain variable domain of TCR clone 234930 (TRAV17, TRAJ5)
CAPMDTGRRALTF

SEQ ID NO: 469860 - protein, 15 aa, Homo sapiens
  CDR3 for beta chain variable domain of TCR clone 234930 (TRBV6-6, TRBJ2-5)
CASSHGGGLEETQYF

SEQ ID NO: 469861 - protein, 14 aa, Homo sapiens
  CDR3 for alpha chain variable domain of TCR clone 234931 (TRAV23/DV6, TRAJ57)
CAASNQGGSEKLVV

SEQ ID NO: 469862 - protein, 13 aa, Homo sapiens
  CDR3 for beta chain variable domain of TCR clone 234931 (TRBV11-2, TRBJ2-7)
CASSSYPSYEQYF

SEQ ID NO: 469863 - protein, 16 aa, Homo sapiens
  CDR3 for alpha chain variable domain of TCR clone 234932 (TRAV12-2, TRAJ32)
CAVNLGQGGATNKLIF

SEQ ID NO: 469864 - protein, 15 aa, Homo sapiens
  CDR3 for beta chain variable domain of TCR clone 234932 (TRBV20-1, TRBJ2-7)
SAVLGPRAGGREQYF

SEQ ID NO: 469865 - protein, 18 aa, Homo sapiens
  CDR3 for alpha chain variable domain of TCR clone 234933 (TRAV21, TRAJ52)
CAVRPSPAGGTSYGTLTF

SEQ ID NO: 469866 - protein, 17 aa, Homo sapiens
  CDR3 for beta chain variable domain of TCR clone 234933 (TRBV7-8, TRBJ2-6)
CASSAGTGGAGANVLTF

SEQ ID NO: 469867 - protein, 13 aa, Homo sapiens
  CDR3 for alpha chain variable domain of TCR clone 234934 (TRAV2, TRAJ40)
CAVVTSGTYKYIF

SEQ ID NO: 469868 - protein, 12 aa, Homo sapiens
  CDR3 for beta chain variable domain of TCR clone 234934 (TRBV19, TRBJ2-1)
CASSQISNEQFF

SEQ ID NO: 469869 - protein, 14 aa, Homo sapiens
  CDR3 for alpha chain variable domain of TCR clone 234935 (TRAV8-2, TRAJ45)
CVVSAGGGADGLTF

SEQ ID NO: 469870 - protein, 12 aa, Homo sapiens
  CDR3 for beta chain variable domain of TCR clone 234935 (TRBV29-1, TRBJ2-3)
CSVTGGADTQYF

SEQ ID NO: 469871 - protein, 13 aa, Homo sapiens
  CDR3 for alpha chain variable domain of TCR clone 234936 (TRAV27, TRAJ49)
CAPRPYTGNQFYF

SEQ ID NO: 469872 - protein, 18 aa, Homo sapiens
  CDR3 for beta chain variable domain of TCR clone 234936 (TRBV7-3, TRBJ2-5)
CASSFGGAAQGRWETQYF

SEQ ID NO: 469873 - protein, 17 aa, Homo sapiens
  CDR3 for alpha chain variable domain of TCR clone 234937 (TRAV29/DV5, TRAJ40)
CAASVIYTTSGTYKYIF

SEQ ID NO: 469874 - protein, 15 aa, Homo sapiens
  CDR3 for beta chain variable domain of TCR clone 234937 (TRBV18, TRBJ1-2)
CASSPSNTPNYGYTF

SEQ ID NO: 469875 - protein, 15 aa, Homo sapiens
  CDR3 for alpha chain variable domain of TCR clone 234938 (TRAV13-1, TRAJ32)
CAASIYGGATSKLIF

SEQ ID NO: 469876 - protein, 12 aa, Homo sapiens
  CDR3 for beta chain variable domain of TCR clone 234938 (TRBV7-6, TRBJ2-3)
CASSTGTDTQYF

SEQ ID NO: 469877 - protein, 13 aa, Homo sapiens
  CDR3 for alpha chain variable domain of TCR clone 234939 (TRAV20, TRAJ37)
CAGCSSNTGKLIF

SEQ ID NO: 469878 - protein, 13 aa, Homo sapiens
  CDR3 for beta chain variable domain of TCR clone 234939 (TRBV7-3, TRBJ2-5)
CASSEGVLETQYF

SEQ ID NO: 469879 - protein, 11 aa, Homo sapiens
  CDR3 for alpha chain variable domain of TCR clone 234940 (TRAV1-1, TRAJ22)
CGSGSARQLTF

SEQ ID NO: 469880 - protein, 15 aa, Homo sapiens
  CDR3 for beta chain variable domain of TCR clone 234940 (TRBV13, TRBJ1-3)
CASSPNRGSGNTIYF

SEQ ID NO: 469881 - protein, 15 aa, Homo sapiens
  CDR3 for alpha chain variable domain of TCR clone 234941 (TRAV23/DV6, TRAJ44)
CAAMKPTATASKLTF

SEQ ID NO: 469882 - protein, 16 aa, Homo sapiens
  CDR3 for beta chain variable domain of TCR clone 234941 (TRBV28, TRBJ2-5)
CATSGWPSRLKETQYF

SEQ ID NO: 469883 - protein, 15 aa, Homo sapiens
  CDR3 for alpha chain variable domain of TCR clone 234942 (TRAV26-2, TRAJ57)
CILRDIRGGSENLVF

SEQ ID NO: 469884 - protein, 11 aa, Homo sapiens
  CDR3 for beta chain variable domain of TCR clone 234942 (TRBV3-1, TRBJ2-7)
CASTALGEQYF

SEQ ID NO: 469885 - protein, 14 aa, Homo sapiens
  CDR3 for alpha chain variable domain of TCR clone 234943 (TRAV14/DV4, TRAJ58)
CAMRARTSGSRLTF

SEQ ID NO: 469886 - protein, 20 aa, Homo sapiens
  CDR3 for beta chain variable domain of TCR clone 234943 (TRBV7-8, TRBJ2-2)
CASSHLFPGPTIHITGELFF

SEQ ID NO: 469887 - protein, 15 aa, Homo sapiens
  CDR3 for alpha chain variable domain of TCR clone 234944 (TRAV12-2, TRAJ53)
RAVNGGGGSNYKLTF

SEQ ID NO: 469888 - protein, 13 aa, Homo sapiens
  CDR3 for beta chain variable domain of TCR clone 234944 (TRBV13, TRBJ2-5)
CASSPEVGETQYF

SEQ ID NO: 469889 - protein, 16 aa, Homo sapiens
  CDR3 for alpha chain variable domain of TCR clone 234945 (TRAV27, TRAJ53)
CAAPVGSGGSNYKLTF

SEQ ID NO: 469890 - protein, 14 aa, Homo sapiens
  CDR3 for beta chain variable domain of TCR clone 234945 (TRBV4-3, TRBJ1-5)
CASSQGGQGWHQHF

SEQ ID NO: 469891 - protein, 16 aa, Homo sapiens
  CDR3 for alpha chain variable domain of TCR clone 234946 (TRAV4, TRAJ22)
CLVGDLYSGSAKQLTF

SEQ ID NO: 469892 - protein, 17 aa, Homo sapiens
  CDR3 for beta chain variable domain of TCR clone 234946 (TRBV11-2, TRBJ2-1)
CASSLYPPGVEYNEQFF

SEQ ID NO: 469893 - protein, 14 aa, Homo sapiens
  CDR3 for alpha chain variable domain of TCR clone 234947 (TRAV1-2, TRAJ16)
CAVNRFSVGQKLLF

SEQ ID NO: 469894 - protein, 18 aa, Homo sapiens
  CDR3 for beta chain variable domain of TCR clone 234947 (TRBV20-1, TRBJ2-6)
CSAETTPTHGSGANVLTF

SEQ ID NO: 469895 - protein, 16 aa, Homo sapiens
  CDR3 for alpha chain variable domain of TCR clone 234948 (TRAV23/DV6, TRAJ9)
CAARIGGNTGGFKTIF

SEQ ID NO: 469896 - protein, 12 aa, Homo sapiens
  CDR3 for beta chain variable domain of TCR clone 234948 (TRBV6-3, TRBJ2-7)
CASSEPGFEQYF

SEQ ID NO: 469897 - protein, 13 aa, Homo sapiens
  CDR3 for alpha chain variable domain of TCR clone 234949 (TRAV21, TRAJ52)
SPAGGTSYGKLTF

SEQ ID NO: 469898 - protein, 12 aa, Homo sapiens
  CDR3 for beta chain variable domain of TCR clone 234949 (TRBV7-9, TRBJ2-7)
CASSFGSYEQYF

SEQ ID NO: 469899 - protein, 11 aa, Homo sapiens
  CDR3 for alpha chain variable domain of TCR clone 234950 (TRAV21, TRAJ41)
CAVRSGYALNF

SEQ ID NO: 469900 - protein, 13 aa, Homo sapiens
  CDR3 for beta chain variable domain of TCR clone 234950 (TRBV7-9, TRBJ1-2)
CASSLKQNDGYTF

SEQ ID NO: 469901 - protein, 13 aa, Homo sapiens
  CDR3 for alpha chain variable domain of TCR clone 234951 (TRAV21, TRAJ27)
CGARPGNAGKSTF

SEQ ID NO: 469902 - protein, 15 aa, Homo sapiens
  CDR3 for beta chain variable domain of TCR clone 234951 (TRBV29-1, TRBJ2-1)
CSGRDRKSSYNEQFF

SEQ ID NO: 469903 - protein, 15 aa, Homo sapiens
  CDR3 for alpha chain variable domain of TCR clone 234952 (TRAV22, TRAJ24)
CAVPLSTDSWGKLQF

SEQ ID NO: 469904 - protein, 14 aa, Homo sapiens
  CDR3 for beta chain variable domain of TCR clone 234952 (TRBV7-2, TRBJ2-7)
FASRSQGAAYEQYF

SEQ ID NO: 469905 - protein, 18 aa, Homo sapiens
  CDR3 for alpha chain variable domain of TCR clone 234953 (TRAV29/DV5, TRAJ52)
CAAGFRGAGGTSYGKLTF

SEQ ID NO: 469906 - protein, 17 aa, Homo sapiens
  CDR3 for beta chain variable domain of TCR clone 234953 (TRBV20-1, TRBJ2-1)
CSASSSGLAGSYNEQFF

SEQ ID NO: 469907 - protein, 11 aa, Homo sapiens
  CDR3 for alpha chain variable domain of TCR clone 234954 (TRAV2, TRAJ13)
CASGGYQKVTF

SEQ ID NO: 469908 - protein, 15 aa, Homo sapiens
  CDR3 for beta chain variable domain of TCR clone 234954 (TRBV20-1, TRBJ2-7)
CCARVPAAYFYEQYF

SEQ ID NO: 469909 - protein, 13 aa, Homo sapiens
  CDR3 for alpha chain variable domain of TCR clone 234955 (TRAV8-3, TRAJ42)
WARYGGSQGNLIF

SEQ ID NO: 469910 - protein, 14 aa, Homo sapiens
  CDR3 for beta chain variable domain of TCR clone 234955 (TRBV20-1, TRBJ2-1)
CSALDRGTYNEQFF

SEQ ID NO: 469911 - protein, 15 aa, Homo sapiens
  CDR3 for alpha chain variable domain of TCR clone 234956 (TRAV13-1, TRAJ6)
CAAIHPSGGSYIPTF

SEQ ID NO: 469912 - protein, 14 aa, Homo sapiens
  CDR3 for beta chain variable domain of TCR clone 234956 (TRBV7-9, TRBJ2-2)
CASGLASNTGELFF

SEQ ID NO: 469913 - protein, 18 aa, Homo sapiens
  CDR3 for alpha chain variable domain of TCR clone 234957 (TRAV20, TRAJ4)
CAVQPFYMFSGGYNKLIF

SEQ ID NO: 469914 - protein, 13 aa, Homo sapiens
  CDR3 for beta chain variable domain of TCR clone 234957 (TRBV19, TRBJ2-3)
CATWDKITDTQYF

SEQ ID NO: 469915 - protein, 17 aa, Homo sapiens
  CDR3 for alpha chain variable domain of TCR clone 234958 (TRAV3, TRAJ6)
CAVRDGPRGGGSYIPTF

SEQ ID NO: 469916 - protein, 15 aa, Homo sapiens
  CDR3 for beta chain variable domain of TCR clone 234958 (TRBV20-1, TRBJ1-1)
CSASWDRFLNTEAFF

SEQ ID NO: 469917 - protein, 15 aa, Homo sapiens
  CDR3 for alpha chain variable domain of TCR clone 234959 (TRAV27, TRAJ39)
ASTSVQENAGNILTF

SEQ ID NO: 469918 - protein, 14 aa, Homo sapiens
  CDR3 for beta chain variable domain of TCR clone 234959 (TRBV15, TRBJ2-7)
CATSPDRGLYEQYF

SEQ ID NO: 469919 - protein, 14 aa, Homo sapiens
  CDR3 for alpha chain variable domain of TCR clone 234960 (TRAV8-3, TRAJ35)
CAVVPQGFGNVLRC

SEQ ID NO: 469920 - protein, 15 aa, Homo sapiens
  CDR3 for beta chain variable domain of TCR clone 234960 (TRBV6-1, TRBJ2-2)
CASSAGQGYTGELFF

SEQ ID NO: 469921 - protein, 15 aa, Homo sapiens
  CDR3 for alpha chain variable domain of TCR clone 234961 (TRAV3, TRAJ22)
CAVRDRGGSARQLTF

SEQ ID NO: 469922 - protein, 15 aa, Homo sapiens
  CDR3 for beta chain variable domain of TCR clone 234961 (TRBV12-5, TRBJ2-2)
CTSGRLGGNTGELFF

SEQ ID NO: 469923 - protein, 15 aa, Homo sapiens
  CDR3 for alpha chain variable domain of TCR clone 234962 (TRAV8-2, TRAJ40)
CVVLGTTSGTYKYIF

SEQ ID NO: 469924 - protein, 15 aa, Homo sapiens
  CDR3 for beta chain variable domain of TCR clone 234962 (TRBV4-3, TRBJ1-2)
CASSRGQGRNYGYTF

SEQ ID NO: 469925 - protein, 16 aa, Homo sapiens
  CDR3 for alpha chain variable domain of TCR clone 234963 (TRAV16, TRAJ52)
CALSAAGGTSYGKLTF

SEQ ID NO: 469926 - protein, 17 aa, Homo sapiens
  CDR3 for beta chain variable domain of TCR clone 234963 (TRBV11-2, TRBJ2-1)
CASSLYPPGAEYNEQFF

SEQ ID NO: 469927 - protein, 11 aa, Homo sapiens
  CDR3 for alpha chain variable domain of TCR clone 234964 (TRAV12-2, TRAJ39)
CAVNNMLTFGG

SEQ ID NO: 469928 - protein, 16 aa, Homo sapiens
  CDR3 for beta chain variable domain of TCR clone 234964 (TRBV9, TRBJ2-7)
CASSAGPDRSPYEQYL

SEQ ID NO: 469929 - protein, 16 aa, Homo sapiens
  CDR3 for alpha chain variable domain of TCR clone 234965 (TRAV8-1, TRAJ39)
CAVNVPSYNAGNMLTF

SEQ ID NO: 469930 - protein, 15 aa, Homo sapiens
  CDR3 for beta chain variable domain of TCR clone 234965 (TRBV4-1, TRBJ2-3)
CASRSTRAGTDTQYC

SEQ ID NO: 469931 - protein, 13 aa, Homo sapiens
  CDR3 for alpha chain variable domain of TCR clone 234966 (TRAV17, TRAJ29)
CATDAFRKHTSCL

SEQ ID NO: 469932 - protein, 17 aa, Homo sapiens
  CDR3 for beta chain variable domain of TCR clone 234966 (TRBV28, TRBJ2-5)
CASSTPEGDALQETQYF

SEQ ID NO: 469933 - protein, 15 aa, Homo sapiens
  CDR3 for alpha chain variable domain of TCR clone 234967 (TRAV12-3, TRAJ6)
CAMSATTGGSYIPTF

SEQ ID NO: 469934 - protein, 14 aa, Homo sapiens
  CDR3 for beta chain variable domain of TCR clone 234967 (TRBV20-1, TRBJ2-7)
CSAPELAGVGEQYF

SEQ ID NO: 469935 - protein, 12 aa, Homo sapiens
  CDR3 for alpha chain variable domain of TCR clone 234968 (TRAV12-3, TRAJ17)
CAMTLTGNELTF

SEQ ID NO: 469936 - protein, 12 aa, Homo sapiens
  CDR3 for beta chain variable domain of TCR clone 234968 (TRBV11-2, TRBJ2-2)
CASSLPTGELFF

SEQ ID NO: 469937 - protein, 14 aa, Homo sapiens
  CDR3 for alpha chain variable domain of TCR clone 234969 (TRAV12-2, TRAJ13)
CAVKKTGGYQKVTF

SEQ ID NO: 469938 - protein, 14 aa, Homo sapiens
  CDR3 for beta chain variable domain of TCR clone 234969 (TRBV20-1, TRBJ2-1)
CSAHPGLPYNEQFF

SEQ ID NO: 469939 - protein, 14 aa, Homo sapiens
  CDR3 for alpha chain variable domain of TCR clone 234970 (TRAV38-1, TRAJ45)
CASHSGGGADGLTF

SEQ ID NO: 469940 - protein, 13 aa, Homo sapiens
  CDR3 for beta chain variable domain of TCR clone 234970 (TRBV20-1, TRBJ1-1)
CSAPPGGHTEAFF

SEQ ID NO: 469941 - protein, 16 aa, Homo sapiens
  CDR3 for alpha chain variable domain of TCR clone 234971 (TRAV26-1, TRAJ37)
CIVRGDCSGNTGKLIF

SEQ ID NO: 469942 - protein, 15 aa, Homo sapiens
  CDR3 for beta chain variable domain of TCR clone 234971 (TRBV9, TRBJ2-1)
CASSLAGSSYNEQFF

SEQ ID NO: 469943 - protein, 17 aa, Homo sapiens
  CDR3 for alpha chain variable domain of TCR clone 234972 (TRAV13-1, TRAJ52)
CAAGRNAGGTSYGKLTF

SEQ ID NO: 469944 - protein, 16 aa, Homo sapiens
  CDR3 for beta chain variable domain of TCR clone 234972 (TRBV11-2, TRBJ1-1)
CASGGRGLWTNTEAFF

SEQ ID NO: 469945 - protein, 13 aa, Homo sapiens
  CDR3 for alpha chain variable domain of TCR clone 234973 (TRAV3, TRAJ27)
CAVRPLGAGKSTF

SEQ ID NO: 469946 - protein, 13 aa, Homo sapiens
  CDR3 for beta chain variable domain of TCR clone 234973 (TRBV19, TRBJ2-1)
CATSRGVYNEQFF

SEQ ID NO: 469947 - protein, 16 aa, Homo sapiens
  CDR3 for alpha chain variable domain of TCR clone 234974 (TRAV20, TRAJ52)
CAVLPDGGTSYEKLTF

SEQ ID NO: 469948 - protein, 12 aa, Homo sapiens
  CDR3 for beta chain variable domain of TCR clone 234974 (TRBV19, TRBJ2-1)
CASSQISNEQFF

SEQ ID NO: 469949 - protein, 12 aa, Homo sapiens
  CDR3 for alpha chain variable domain of TCR clone 234975 (TRAV8-3, TRAJ20)
CAVDFNDYKLSF

SEQ ID NO: 469950 - protein, 14 aa, Homo sapiens
  CDR3 for beta chain variable domain of TCR clone 234975 (TRBV19, TRBJ2-1)
CASSMGSGRRSSSS

SEQ ID NO: 469951 - protein, 16 aa, Homo sapiens
  CDR3 for alpha chain variable domain of TCR clone 234976 (TRAV12-2, )
CAVEDIQNPDPAVYQL

SEQ ID NO: 469952 - protein, 16 aa, Homo sapiens
  CDR3 for beta chain variable domain of TCR clone 234976 (TRBV6-1, TRBJ1-2)
CASSGAWQGRSNGYTF

SEQ ID NO: 469953 - protein, 12 aa, Homo sapiens
  CDR3 for alpha chain variable domain of TCR clone 234977 (TRAV26-2, TRAJ48)
CILRNGNEKLTF

SEQ ID NO: 469954 - protein, 14 aa, Homo sapiens
  CDR3 for beta chain variable domain of TCR clone 234977 (TRBV28, TRBJ2-7)
CASSTLRGRFEQYF

SEQ ID NO: 469955 - protein, 14 aa, Homo sapiens
  CDR3 for alpha chain variable domain of TCR clone 234978 (TRAV12-2, TRAJ40)
CVVKIPSGTYKYIF

SEQ ID NO: 469956 - protein, 13 aa, Homo sapiens
  CDR3 for beta chain variable domain of TCR clone 234978 (TRBV20-1, TRBJ1-3)
CSARVQGRDTIYF

SEQ ID NO: 469957 - protein, 14 aa, Homo sapiens
  CDR3 for alpha chain variable domain of TCR clone 234979 (TRAV1-2, TRAJ16)
CAVNPFSDGQKLLF

SEQ ID NO: 469958 - protein, 16 aa, Homo sapiens
  CDR3 for beta chain variable domain of TCR clone 234979 (TRBV19, TRBJ2-3)
CASSPEWDRGTDTQYF

SEQ ID NO: 469959 - protein, 13 aa, Homo sapiens
  CDR3 for alpha chain variable domain of TCR clone 234980 (TRAV27, TRAJ11)
CAGGGSGYSTLTF

SEQ ID NO: 469960 - protein, 15 aa, Homo sapiens
  CDR3 for beta chain variable domain of TCR clone 234980 (TRBV5-1, TRBJ1-1)
CASSLGQGRLAEAFF

SEQ ID NO: 469961 - protein, 14 aa, Homo sapiens
  CDR3 for alpha chain variable domain of TCR clone 234981 (TRAV1-2, TRAJ16)
CAVNLFSDGQKLLF

SEQ ID NO: 469962 - protein, 14 aa, Homo sapiens
  CDR3 for beta chain variable domain of TCR clone 234981 (TRBV13, TRBJ2-5)
CASSLGRGQETQYF

SEQ ID NO: 469963 - protein, 15 aa, Homo sapiens
  CDR3 for alpha chain variable domain of TCR clone 234982 (TRAV26-1, TRAJ44)
CIARVPFGTASKLTF

SEQ ID NO: 469964 - protein, 17 aa, Homo sapiens
  CDR3 for beta chain variable domain of TCR clone 234982 (TRBV4-1, TRBJ2-1)
CASSQDPRGASYNEQFF

SEQ ID NO: 469965 - protein, 14 aa, Homo sapiens
  CDR3 for alpha chain variable domain of TCR clone 234983 (TRAV1-2, TRAJ8)
CAVREDTGFQKLVF

SEQ ID NO: 469966 - protein, 15 aa, Homo sapiens
  CDR3 for beta chain variable domain of TCR clone 234983 (TRBV6-6, TRBJ1-1)
CACSPRGDVETEAFL

SEQ ID NO: 469967 - protein, 14 aa, Homo sapiens
  CDR3 for alpha chain variable domain of TCR clone 234984 (TRAV9-2, TRAJ39)
CALYIYNAGNMRTF

SEQ ID NO: 469968 - protein, 14 aa, Homo sapiens
  CDR3 for beta chain variable domain of TCR clone 234984 (TRBV19, TRBJ2-7)
CASNFRDTFTGMYF

SEQ ID NO: 469969 - protein, 14 aa, Homo sapiens
  CDR3 for alpha chain variable domain of TCR clone 234985 (TRAV26-2, TRAJ31)
RILIPGNNNARLMF

SEQ ID NO: 469970 - protein, 16 aa, Homo sapiens
  CDR3 for beta chain variable domain of TCR clone 234985 (TRBV7-3, TRBJ2-1)
CASSLVSGSSNNEQFF

SEQ ID NO: 469971 - protein, 12 aa, Homo sapiens
  CDR3 for alpha chain variable domain of TCR clone 234986 (TRAV29/DV5, TRAJ49)
CAATDTGNQFYF

SEQ ID NO: 469972 - protein, 16 aa, Homo sapiens
  CDR3 for beta chain variable domain of TCR clone 234986 (TRBV9, TRBJ1-2)
CASSVEEKVSPYGYTF

SEQ ID NO: 469973 - protein, 12 aa, Homo sapiens
  CDR3 for alpha chain variable domain of TCR clone 234987 (TRAV13-1, TRAJ27)
CAAHTNAGKSTF

SEQ ID NO: 469974 - protein, 14 aa, Homo sapiens
  CDR3 for beta chain variable domain of TCR clone 234987 (TRBV19, TRBJ2-2)
CASSGEGIAGELFF

SEQ ID NO: 469975 - protein, 13 aa, Homo sapiens
  CDR3 for alpha chain variable domain of TCR clone 234988 (TRAV23/DV6, TRAJ34)
CAASIEGTDKLIF

SEQ ID NO: 469976 - protein, 15 aa, Homo sapiens
  CDR3 for beta chain variable domain of TCR clone 234988 (TRBV20-1, TRBJ2-7)
CSAESGTSGAYDQYF

SEQ ID NO: 469977 - protein, 13 aa, Homo sapiens
  CDR3 for alpha chain variable domain of TCR clone 234989 (TRAV13-2, TRAJ48)
CAEMDFGNEKLTF

SEQ ID NO: 469978 - protein, 16 aa, Homo sapiens
  CDR3 for beta chain variable domain of TCR clone 234989 (TRBV7-9, TRBJ2-1)
CASSDVAGGYYNEQFF

SEQ ID NO: 469979 - protein, 13 aa, Homo sapiens
  CDR3 for alpha chain variable domain of TCR clone 234990 (TRAV12-3, TRAJ43)
CAMIRPNNNDMRF

SEQ ID NO: 469980 - protein, 13 aa, Homo sapiens
  CDR3 for beta chain variable domain of TCR clone 234990 (TRBV7-9, TRBJ1-2)
CASSLKQNYGDTF

SEQ ID NO: 469981 - protein, 14 aa, Homo sapiens
  CDR3 for alpha chain variable domain of TCR clone 234991 (TRAV12-2, TRAJ40)
CAVKIPSGTYKYVF

SEQ ID NO: 469982 - protein, 15 aa, Homo sapiens
  CDR3 for beta chain variable domain of TCR clone 234991 (TRBV2, TRBJ2-7)
CASSEGLARSYEQYF

SEQ ID NO: 469983 - protein, 17 aa, Homo sapiens
  CDR3 for alpha chain variable domain of TCR clone 234992 (TRAV3, TRAJ6)
CALRDGPRAGGSYIPTF

SEQ ID NO: 469984 - protein, 15 aa, Homo sapiens
  CDR3 for beta chain variable domain of TCR clone 234992 (TRBV19, TRBJ1-1)
CASTSGQIQNTEAFF

SEQ ID NO: 469985 - protein, 11 aa, Homo sapiens
  CDR3 for alpha chain variable domain of TCR clone 234993 (TRAV22, TRAJ30)
CAGNRDDKIIF

SEQ ID NO: 469986 - protein, 14 aa, Homo sapiens
  CDR3 for beta chain variable domain of TCR clone 234993 (TRBV4-1, TRBJ1-2)
CASSQDGQVRGYTF

SEQ ID NO: 469987 - protein, 12 aa, Homo sapiens
  CDR3 for alpha chain variable domain of TCR clone 234994 (TRAV26-1, TRAJ17)
CIFRSAGNKLTF

SEQ ID NO: 469988 - protein, 13 aa, Homo sapiens
  CDR3 for beta chain variable domain of TCR clone 234994 (TRBV7-2, TRBJ2-7)
CASSSPSGSEQYF

SEQ ID NO: 469989 - protein, 20 aa, Homo sapiens
  CDR3 for alpha chain variable domain of TCR clone 234995 (TRAV12-1, TRAJ42)
SSVIQPPTSVKGGSQGNLLF

SEQ ID NO: 469990 - protein, 18 aa, Homo sapiens
  CDR3 for beta chain variable domain of TCR clone 234995 (TRBV11-2, TRBJ2-3)
CASSLGGASRGAPNTQYF

SEQ ID NO: 469991 - protein, 17 aa, Homo sapiens
  CDR3 for alpha chain variable domain of TCR clone 234996 (TRAV3, TRAJ6)
CAVRDCPRAGGIYIPAF

SEQ ID NO: 469992 - protein, 14 aa, Homo sapiens
  CDR3 for beta chain variable domain of TCR clone 234996 (TRBV7-2, TRBJ2-7)
CASSPKTSFYEQYF

SEQ ID NO: 469993 - protein, 13 aa, Homo sapiens
  CDR3 for alpha chain variable domain of TCR clone 234997 (TRAV13-1, TRAJ39)
CAASIWAGNMLTF

SEQ ID NO: 469994 - protein, 15 aa, Homo sapiens
  CDR3 for beta chain variable domain of TCR clone 234997 (TRBV7-9, TRBJ1-1)
CASSLIEQGGTEAFF

SEQ ID NO: 469995 - protein, 16 aa, Homo sapiens
  CDR3 for alpha chain variable domain of TCR clone 234998 (TRAV3, TRAJ37)
CAVRPHSSGNTGKLIF

SEQ ID NO: 469996 - protein, 13 aa, Homo sapiens
  CDR3 for beta chain variable domain of TCR clone 234998 (TRBV2, TRBJ1-5)
CASGTGGYQPQHF

SEQ ID NO: 469997 - protein, 16 aa, Homo sapiens
  CDR3 for alpha chain variable domain of TCR clone 234999 (TRAV3, TRAJ13)
CAVRDPNSGGYQKVTF

SEQ ID NO: 469998 - protein, 13 aa, Homo sapiens
  CDR3 for beta chain variable domain of TCR clone 234999 (TRBV7-9, TRBJ2-7)
CASSLQGSYEQNF

SEQ ID NO: 469999 - protein, 14 aa, Homo sapiens
  CDR3 for alpha chain variable domain of TCR clone 235000 (TRAV12-2, TRAJ33)
CAVTRARSNYQLIW

SEQ ID NO: 470000 - protein, 15 aa, Homo sapiens
  CDR3 for beta chain variable domain of TCR clone 235000 (TRBV20-1, TRBJ2-7)
CSARDRVSGMDEQYF

SEQ ID NO: 470001 - protein, 13 aa, Homo sapiens
  CDR3 for alpha chain variable domain of TCR clone 235001 (TRAV8-3, TRAJ43)
CAVVPYNNNDMRF

SEQ ID NO: 470002 - protein, 12 aa, Homo sapiens
  CDR3 for beta chain variable domain of TCR clone 235001 (TRBV11-2, TRBJ2-2)
CASSLGGGELFF

SEQ ID NO: 470003 - protein, 13 aa, Homo sapiens
  CDR3 for alpha chain variable domain of TCR clone 235002 (TRAV12-3, TRAJ33)
CAMSVNSNYQLIW

SEQ ID NO: 470004 - protein, 14 aa, Homo sapiens
  CDR3 for beta chain variable domain of TCR clone 235002 (TRBV7-2, TRBJ2-1)
CASSPGLAGNEQFF

SEQ ID NO: 470005 - protein, 14 aa, Homo sapiens
  CDR3 for alpha chain variable domain of TCR clone 235003 (TRAV12-2, TRAJ40)
CAVKITSRTYKYIF

SEQ ID NO: 470006 - protein, 17 aa, Homo sapiens
  CDR3 for beta chain variable domain of TCR clone 235003 (TRBV13, TRBJ2-3)
CASSRSRVAGWRNTQYF

SEQ ID NO: 470007 - protein, 21 aa, Homo sapiens
  CDR3 for alpha chain variable domain of TCR clone 235004 (TRAV23/DV6, TRAJ30)
PSLETQPPTSVQQARDDKIIF

SEQ ID NO: 470008 - protein, 12 aa, Homo sapiens
  CDR3 for beta chain variable domain of TCR clone 235004 (TRBV9, TRBJ2-2)
CASSFVTGELFF

SEQ ID NO: 470009 - protein, 15 aa, Homo sapiens
  CDR3 for alpha chain variable domain of TCR clone 235005 (TRAV21, TRAJ21)
CAVRRRTSTNFTLDL

SEQ ID NO: 470010 - protein, 17 aa, Homo sapiens
  CDR3 for beta chain variable domain of TCR clone 235005 (TRBV11-2, TRBJ2-6)
CASSQRDIFSGANVLTF

SEQ ID NO: 470011 - protein, 13 aa, Homo sapiens
  CDR3 for alpha chain variable domain of TCR clone 235006 (TRAV29/DV5, TRAJ47)
CAASAEYGNKLVF

SEQ ID NO: 470012 - protein, 13 aa, Homo sapiens
  CDR3 for beta chain variable domain of TCR clone 235006 (TRBV10-3, TRBJ2-7)
CASKLAVNYEQYF

SEQ ID NO: 470013 - protein, 12 aa, Homo sapiens
  CDR3 for alpha chain variable domain of TCR clone 235007 (TRAV13-1, TRAJ22)
DLPSGSARQLTF

SEQ ID NO: 470014 - protein, 13 aa, Homo sapiens
  CDR3 for beta chain variable domain of TCR clone 235007 (TRBV7-7, TRBJ1-5)
CASSPGKNQPQHF

SEQ ID NO: 470015 - protein, 13 aa, Homo sapiens
  CDR3 for alpha chain variable domain of TCR clone 235008 (TRAV8-1, TRAJ28)
CAVSGAGGYQFTF

SEQ ID NO: 470016 - protein, 14 aa, Homo sapiens
  CDR3 for beta chain variable domain of TCR clone 235008 (TRBV7-2, TRBJ2-2)
RASRGQGAAGELFF

SEQ ID NO: 470017 - protein, 11 aa, Homo sapiens
  CDR3 for alpha chain variable domain of TCR clone 235009 (TRAV2, TRAJ23)
CAVGTRGKLIF

SEQ ID NO: 470018 - protein, 14 aa, Homo sapiens
  CDR3 for beta chain variable domain of TCR clone 235009 (TRBV2, TRBJ2-3)
CASSEGQSTDTQYF

SEQ ID NO: 470019 - protein, 15 aa, Homo sapiens
  CDR3 for alpha chain variable domain of TCR clone 235010 (TRAV36/DV7, TRAJ53)
CAVEGSGGSNYKLTF

SEQ ID NO: 470020 - protein, 19 aa, Homo sapiens
  CDR3 for beta chain variable domain of TCR clone 235010 (TRBV19, TRBJ2-2)
CASTRPGLAGGRVTGELFF

SEQ ID NO: 470021 - protein, 16 aa, Homo sapiens
  CDR3 for alpha chain variable domain of TCR clone 235011 (TRAV12-3, TRAJ53)
CAMSPGSGGSDYKLTF

SEQ ID NO: 470022 - protein, 15 aa, Homo sapiens
  CDR3 for beta chain variable domain of TCR clone 235011 (TRBV11-3, TRBJ2-3)
CASLKDGREGDTQYF

SEQ ID NO: 470023 - protein, 14 aa, Homo sapiens
  CDR3 for alpha chain variable domain of TCR clone 235012 (TRAV12-2, TRAJ13)
CAVKKTGGYQKVTF

SEQ ID NO: 470024 - protein, 14 aa, Homo sapiens
  CDR3 for beta chain variable domain of TCR clone 235012 (TRBV19, TRBJ2-1)
CASPTFVLSGEQFY

SEQ ID NO: 470025 - protein, 13 aa, Homo sapiens
  CDR3 for alpha chain variable domain of TCR clone 235013 (TRAV21, TRAJ10)
CAVRPGGGDKPTF

SEQ ID NO: 470026 - protein, 14 aa, Homo sapiens
  CDR3 for beta chain variable domain of TCR clone 235013 (TRBV5-4, TRBJ2-7)
CASSADAGSYEQYF

SEQ ID NO: 470027 - protein, 12 aa, Homo sapiens
  CDR3 for alpha chain variable domain of TCR clone 235014 (TRAV17, TRAJ30)
CVPERRDDKIIF

SEQ ID NO: 470028 - protein, 11 aa, Homo sapiens
  CDR3 for beta chain variable domain of TCR clone 235014 (TRBV20-1, TRBJ1-2)
CSVQGAGGYSF

SEQ ID NO: 470029 - protein, 12 aa, Homo sapiens
  CDR3 for alpha chain variable domain of TCR clone 235015 (TRAV13-1, TRAJ27)
CAAHTNAGKSTF

SEQ ID NO: 470030 - protein, 14 aa, Homo sapiens
  CDR3 for beta chain variable domain of TCR clone 235015 (TRBV7-3, TRBJ2-1)
CASSLAGGTNEQFF

SEQ ID NO: 470031 - protein, 21 aa, Homo sapiens
  CDR3 for alpha chain variable domain of TCR clone 235016 (TRAV2, TRAJ23)
CAGRGDWEESLSSDRERSYLG

SEQ ID NO: 470032 - protein, 20 aa, Homo sapiens
  CDR3 for beta chain variable domain of TCR clone 235016 (TRBV3-1, TRBJ2-6)
CASSPRPGLEGGAGANVLTF

SEQ ID NO: 470033 - protein, 15 aa, Homo sapiens
  CDR3 for alpha chain variable domain of TCR clone 235017 (TRAV13-1, TRAJ32)
CAASIYGGATNKLIF

SEQ ID NO: 470034 - protein, 14 aa, Homo sapiens
  CDR3 for beta chain variable domain of TCR clone 235017 (TRBV7-9, TRBJ2-1)
CASNLASGSNEQFF

SEQ ID NO: 470035 - protein, 12 aa, Homo sapiens
  CDR3 for alpha chain variable domain of TCR clone 235018 (TRAV38-1, TRAJ32)
CAPWGATNKLIF

SEQ ID NO: 470036 - protein, 14 aa, Homo sapiens
  CDR3 for beta chain variable domain of TCR clone 235018 (TRBV29-1, TRBJ2-5)
CSVETSGSGETQYF

SEQ ID NO: 470037 - protein, 14 aa, Homo sapiens
  CDR3 for alpha chain variable domain of TCR clone 235019 (TRAV13-2, TRAJ17)
CAENSKAAGNKLTF

SEQ ID NO: 470038 - protein, 14 aa, Homo sapiens
  CDR3 for beta chain variable domain of TCR clone 235019 (TRBV18, TRBJ2-7)
CASSPRGGAYEQYF

SEQ ID NO: 470039 - protein, 17 aa, Homo sapiens
  CDR3 for alpha chain variable domain of TCR clone 235020 (TRAV8-6, TRAJ8)
CAVKEGIENTGFQKLVF

SEQ ID NO: 470040 - protein, 12 aa, Homo sapiens
  CDR3 for beta chain variable domain of TCR clone 235020 (TRBV19)
CASKDWPGGLFF

SEQ ID NO: 470041 - protein, 14 aa, Homo sapiens
  CDR3 for alpha chain variable domain of TCR clone 235021 (TRAV26-1, TRAJ29)
CIVRVEGSGNTSCL

SEQ ID NO: 470042 - protein, 14 aa, Homo sapiens
  CDR3 for beta chain variable domain of TCR clone 235021 (TRBV18, TRBJ2-5)
CASSPGVSQETQYF

SEQ ID NO: 470043 - protein, 11 aa, Homo sapiens
  CDR3 for alpha chain variable domain of TCR clone 235022 (TRAV36/DV7, TRAJ54)
CAVEGAQKLVF

SEQ ID NO: 470044 - protein, 13 aa, Homo sapiens
  CDR3 for beta chain variable domain of TCR clone 235022 (TRBV12-4, TRBJ1-5)
CASSSRSYQTQHF

SEQ ID NO: 470045 - protein, 13 aa, Homo sapiens
  CDR3 for alpha chain variable domain of TCR clone 235023 (TRAV4, TRAJ33)
CLVGDMDNYQLIW

SEQ ID NO: 470046 - protein, 15 aa, Homo sapiens
  CDR3 for beta chain variable domain of TCR clone 235023 (TRBV9, TRBJ1-6)
CASSVAGTGDSPLHF

SEQ ID NO: 470047 - protein, 12 aa, Homo sapiens
  CDR3 for alpha chain variable domain of TCR clone 235024 (TRAV1-2, TRAJ29)
CAVPSGNTPLVF

SEQ ID NO: 470048 - protein, 15 aa, Homo sapiens
  CDR3 for beta chain variable domain of TCR clone 235024 (TRBV10-2, TRBJ2-6)
CASSEQGTGANVLTF

SEQ ID NO: 470049 - protein, 16 aa, Homo sapiens
  CDR3 for alpha chain variable domain of TCR clone 235025 (TRAV30, TRAJ24)
CGTEIVDADSCGKFQF

SEQ ID NO: 470050 - protein, 14 aa, Homo sapiens
  CDR3 for beta chain variable domain of TCR clone 235025 (TRBV7-9, TRBJ2-4)
CASSLAMGGNIQYF

SEQ ID NO: 470051 - protein, 12 aa, Homo sapiens
  CDR3 for alpha chain variable domain of TCR clone 235026 (TRAV12-3, TRAJ17)
CAMTLTGNKLTF

SEQ ID NO: 470052 - protein, 17 aa, Homo sapiens
  CDR3 for beta chain variable domain of TCR clone 235026 (TRBV13, TRBJ2-3)
CASSLSRVAGGRNTQYF

SEQ ID NO: 470053 - protein, 15 aa, Homo sapiens
  CDR3 for alpha chain variable domain of TCR clone 235027 (TRAV17, TRAJ23)
CATDAEDNQGGKLIF

SEQ ID NO: 470054 - protein, 15 aa, Homo sapiens
  CDR3 for beta chain variable domain of TCR clone 235027 (TRBV20-1, TRBJ2-3)
CSATGTSGFTDTQYF

SEQ ID NO: 470055 - protein, 11 aa, Homo sapiens
  CDR3 for alpha chain variable domain of TCR clone 235028 (TRAV13-1, TRAJ20)
CSPHGLYKPSF

SEQ ID NO: 470056 - protein, 14 aa, Homo sapiens
  CDR3 for beta chain variable domain of TCR clone 235028 (TRBV28, TRBJ2-5)
CASTGAGGVETQYF

SEQ ID NO: 470057 - protein, 14 aa, Homo sapiens
  CDR3 for alpha chain variable domain of TCR clone 235029 (TRAV12-2, TRAJ13)
CAVKKTGGYQKVSF

SEQ ID NO: 470058 - protein, 12 aa, Homo sapiens
  CDR3 for beta chain variable domain of TCR clone 235029 (TRBV12-4, TRBJ1-2)
CASSFIWLHLRF

SEQ ID NO: 470059 - protein, 15 aa, Homo sapiens
  CDR3 for alpha chain variable domain of TCR clone 235030 (TRAV40, TRAJ45)
CLLGDLGGGADGLTF

SEQ ID NO: 470060 - protein, 14 aa, Homo sapiens
  CDR3 for beta chain variable domain of TCR clone 235030 (TRBV2, TRBJ2-7)
CASSLTSGGYEQYF

SEQ ID NO: 470061 - protein, 11 aa, Homo sapiens
  CDR3 for alpha chain variable domain of TCR clone 235031 (TRAV2, TRAJ13)
CASGGYQKVTF

SEQ ID NO: 470062 - protein, 13 aa, Homo sapiens
  CDR3 for beta chain variable domain of TCR clone 235031 (TRBV11-2, TRBJ1-1)
CASSLGNGAEAFF

SEQ ID NO: 470063 - protein, 16 aa, Homo sapiens
  CDR3 for alpha chain variable domain of TCR clone 235032 (TRAV30, TRAJ24)
CGTEIVDADSWGKFQF

SEQ ID NO: 470064 - protein, 12 aa, Homo sapiens
  CDR3 for beta chain variable domain of TCR clone 235032 (TRBV7-8, TRBJ1-1)
CASSLPPRGAFF

SEQ ID NO: 470065 - protein, 14 aa, Homo sapiens
  CDR3 for alpha chain variable domain of TCR clone 235033 (TRAV35, TRAJ22)
CAGLRPGSSRQLTF

SEQ ID NO: 470066 - protein, 15 aa, Homo sapiens
  CDR3 for beta chain variable domain of TCR clone 235033 (TRBV12-4, TRBJ2-5)
CASSPPTGLHGTQYF

SEQ ID NO: 470067 - protein, 14 aa, Homo sapiens
  CDR3 for alpha chain variable domain of TCR clone 235034 (TRAV12-1, TRAJ12)
CAMSEVDSSYKLIF

SEQ ID NO: 470068 - protein, 12 aa, Homo sapiens
  CDR3 for beta chain variable domain of TCR clone 235034 (TRBV18, TRBJ1-4)
CASSPSREKLFF

SEQ ID NO: 470069 - protein, 13 aa, Homo sapiens
  CDR3 for alpha chain variable domain of TCR clone 235035 (TRAV35, TRAJ44)
CAGLSGNASKLTF

SEQ ID NO: 470070 - protein, 17 aa, Homo sapiens
  CDR3 for beta chain variable domain of TCR clone 235035 (TRBV7-8, TRBJ1-2)
CASSLRPLQGHLYGYTF

SEQ ID NO: 470071 - protein, 11 aa, Homo sapiens
  CDR3 for alpha chain variable domain of TCR clone 235036 (TRAV17, TRAJ31)
CAADRTARLMV

SEQ ID NO: 470072 - protein, 14 aa, Homo sapiens
  CDR3 for beta chain variable domain of TCR clone 235036 (TRBV4-1, TRBJ2-2)
CASSQAVNTGELFF

SEQ ID NO: 470073 - protein, 15 aa, Homo sapiens
  CDR3 for alpha chain variable domain of TCR clone 235037 (TRAV35, TRAJ40)
CAGQLGTSGTYKYIL

SEQ ID NO: 470074 - protein, 16 aa, Homo sapiens
  CDR3 for beta chain variable domain of TCR clone 235037 (TRBV4-1, TRBJ2-1)
CASSQEAGQGSDEQFF

SEQ ID NO: 470075 - protein, 14 aa, Homo sapiens
  CDR3 for alpha chain variable domain of TCR clone 235038 (TRAV13-1, TRAJ44)
CAPKATGTASKLTF

SEQ ID NO: 470076 - protein, 14 aa, Homo sapiens
  CDR3 for beta chain variable domain of TCR clone 235038 (TRBV19, TRBJ2-2)
CASSTLHRSGELFF

SEQ ID NO: 470077 - protein, 12 aa, Homo sapiens
  CDR3 for alpha chain variable domain of TCR clone 235039 (TRAV21, TRAJ13)
PGPSGGYQKVTF

SEQ ID NO: 470078 - protein, 15 aa, Homo sapiens
  CDR3 for beta chain variable domain of TCR clone 235039 (TRBV7-9, TRBJ1-6)
CASGSPGRGNSPLHF

SEQ ID NO: 470079 - protein, 11 aa, Homo sapiens
  CDR3 for alpha chain variable domain of TCR clone 235040 (TRAV13-1, TRAJ39)
CASPAGNMLTF

SEQ ID NO: 470080 - protein, 14 aa, Homo sapiens
  CDR3 for beta chain variable domain of TCR clone 235040 (TRBV11-2, TRBJ1-5)
CASSLDRGRQPQHF

SEQ ID NO: 470081 - protein, 17 aa, Homo sapiens
  CDR3 for alpha chain variable domain of TCR clone 235041 (TRAV4, TRAJ42)
CLVGVLNYGGSQGNHIF

SEQ ID NO: 470082 - protein, 12 aa, Homo sapiens
  CDR3 for beta chain variable domain of TCR clone 235041 (TRBV20-1, TRBJ2-1)
CSAQYTYNEQFF

SEQ ID NO: 470083 - protein, 18 aa, Homo sapiens
  CDR3 for alpha chain variable domain of TCR clone 235042 (TRAV26-2, TRAJ45)
RILRVDKYSGGGADGLTF

SEQ ID NO: 470084 - protein, 16 aa, Homo sapiens
  CDR3 for beta chain variable domain of TCR clone 235042 (TRBV2, TRBJ1-4)
CASNFLQGATNEKLFF

SEQ ID NO: 470085 - protein, 16 aa, Homo sapiens
  CDR3 for alpha chain variable domain of TCR clone 235043 (TRAV12-3, TRAJ53)
CAMSPGSGGSNDKLTF

SEQ ID NO: 470086 - protein, 17 aa, Homo sapiens
  CDR3 for beta chain variable domain of TCR clone 235043 (TRBV28, TRBJ2-5)
CASSTPEGDALQDTQYF

SEQ ID NO: 470087 - protein, 14 aa, Homo sapiens
  CDR3 for alpha chain variable domain of TCR clone 235044 (TRAV20, TRAJ56)
CAVQFGGANSKLTF

SEQ ID NO: 470088 - protein, 17 aa, Homo sapiens
  CDR3 for beta chain variable domain of TCR clone 235044 (TRBV29-1, TRBJ2-3)
CSVEVLAGETSTDTQYF

SEQ ID NO: 470089 - protein, 14 aa, Homo sapiens
  CDR3 for alpha chain variable domain of TCR clone 235045 (TRAV22, TRAJ6)
CAGVGPGGSYIPTF

SEQ ID NO: 470090 - protein, 11 aa, Homo sapiens
  CDR3 for beta chain variable domain of TCR clone 235045 (TRBV20-1, TRBJ2-1)
CSLSSGSEQLF

SEQ ID NO: 470091 - protein, 12 aa, Homo sapiens
  CDR3 for alpha chain variable domain of TCR clone 235046 (TRAV13-1, TRAJ21)
CAAKEGVNKFYF

SEQ ID NO: 470092 - protein, 15 aa, Homo sapiens
  CDR3 for beta chain variable domain of TCR clone 235046 (TRBV15, TRBJ1-5)
CATSRDPVSNQPQHF

SEQ ID NO: 470093 - protein, 14 aa, Homo sapiens
  CDR3 for alpha chain variable domain of TCR clone 235047 (TRAV4, TRAJ26)
CLVGPHNYGQNFVF

SEQ ID NO: 470094 - protein, 17 aa, Homo sapiens
  CDR3 for beta chain variable domain of TCR clone 235047 (TRBV24-1, TRBJ2-1)
CATSDVSTSGTYNEQCF

SEQ ID NO: 470095 - protein, 12 aa, Homo sapiens
  CDR3 for alpha chain variable domain of TCR clone 235048 (TRAV13-1, TRAJ48)
CAANFENEKLTF

SEQ ID NO: 470096 - protein, 11 aa, Homo sapiens
  CDR3 for beta chain variable domain of TCR clone 235048 (TRBV20-1, TRBJ1-5)
CSAQGDQPQHF

SEQ ID NO: 470097 - protein, 14 aa, Homo sapiens
  CDR3 for alpha chain variable domain of TCR clone 235049 (TRAV35, TRAJ13)
CAGRSPWGYQKVTF

SEQ ID NO: 470098 - protein, 14 aa, Homo sapiens
  CDR3 for beta chain variable domain of TCR clone 235049 (TRBV19, TRBJ2-2)
CASSMVGLSGELFF

SEQ ID NO: 470099 - protein, 14 aa, Homo sapiens
  CDR3 for alpha chain variable domain of TCR clone 235050 (TRAV12-1, TRAJ3)
CGAARYSSDSKIIF

SEQ ID NO: 470100 - protein, 16 aa, Homo sapiens
  CDR3 for beta chain variable domain of TCR clone 235050 (TRBV4-3, TRBJ2-2)
CASSHLQGSGTGELFF

SEQ ID NO: 470101 - protein, 14 aa, Homo sapiens
  CDR3 for alpha chain variable domain of TCR clone 235051 (TRAV16, TRAJ39)
CALSKNNAGNMLTF

SEQ ID NO: 470102 - protein, 19 aa, Homo sapiens
  CDR3 for beta chain variable domain of TCR clone 235051 (TRBV6-3, TRBJ1-2)
CASSYSKGRTGPPNYGYTF

SEQ ID NO: 470103 - protein, 13 aa, Homo sapiens
  CDR3 for alpha chain variable domain of TCR clone 235052 (TRAV16, TRAJ10)
CAPAREEETNSPL

SEQ ID NO: 470104 - protein, 16 aa, Homo sapiens
  CDR3 for beta chain variable domain of TCR clone 235052 (TRBV7-3, TRBJ2-2)
CASSLKRGTLSGELFF

SEQ ID NO: 470105 - protein, 13 aa, Homo sapiens
  CDR3 for alpha chain variable domain of TCR clone 235053 (TRAV13-2, TRAJ5)
CAVMDTGRIALTF

SEQ ID NO: 470106 - protein, 12 aa, Homo sapiens
  CDR3 for beta chain variable domain of TCR clone 235053 (TRBV28, TRBJ2-7)
CASSFSSYEQYF

SEQ ID NO: 470107 - protein, 12 aa, Homo sapiens
  CDR3 for alpha chain variable domain of TCR clone 235054 (TRAV13-1, TRAJ27)
CAAHSNAGKSTF

SEQ ID NO: 470108 - protein, 14 aa, Homo sapiens
  CDR3 for beta chain variable domain of TCR clone 235054 (TRBV5-5, TRBJ2-1)
CASGTGTPYNEQFF

SEQ ID NO: 470109 - protein, 11 aa, Homo sapiens
  CDR3 for alpha chain variable domain of TCR clone 235055 (TRAV39, TRAJ33)
CAVDPWTATIS

SEQ ID NO: 470110 - protein, 16 aa, Homo sapiens
  CDR3 for beta chain variable domain of TCR clone 235055 (TRBV18, TRBJ1-4)
CASSPLVGDRAEKLFF

SEQ ID NO: 470111 - protein, 14 aa, Homo sapiens
  CDR3 for alpha chain variable domain of TCR clone 235056 (TRAV12-2, TRAJ17)
CAVLFKAAGNKLTF

SEQ ID NO: 470112 - protein, 16 aa, Homo sapiens
  CDR3 for beta chain variable domain of TCR clone 235056 (TRBV20-1, TRBJ2-1)
CSASASGYSSYNEQFF

SEQ ID NO: 470113 - protein, 14 aa, Homo sapiens
  CDR3 for alpha chain variable domain of TCR clone 235057 (TRAV13-1, TRAJ35)
CAASKGGCGNVLHC

SEQ ID NO: 470114 - protein, 13 aa, Homo sapiens
  CDR3 for beta chain variable domain of TCR clone 235057 (TRBV7-3, TRBJ1-1)
CASSQDRGAEAFF

SEQ ID NO: 470115 - protein, 14 aa, Homo sapiens
  CDR3 for alpha chain variable domain of TCR clone 235058 (TRAV1-2, TRAJ6)
CAVSLSGGSYIPTF

SEQ ID NO: 470116 - protein, 20 aa, Homo sapiens
  CDR3 for beta chain variable domain of TCR clone 235058 (TRBV7-8, TRBJ2-2)
CASSHLFPGPTIHITGELFF

SEQ ID NO: 470117 - protein, 19 aa, Homo sapiens
  CDR3 for alpha chain variable domain of TCR clone 235059 (TRAV21, TRAJ45)
CAVEAPRGDQEKVLTDSPF

SEQ ID NO: 470118 - protein, 12 aa, Homo sapiens
  CDR3 for beta chain variable domain of TCR clone 235059 (TRBV29-1, TRBJ1-3)
CSTRDSGNTIYF

SEQ ID NO: 470119 - protein, 13 aa, Homo sapiens
  CDR3 for alpha chain variable domain of TCR clone 235060 (TRAV21, TRAJ27)
CAALNTNAGKSTF

SEQ ID NO: 470120 - protein, 12 aa, Homo sapiens
  CDR3 for beta chain variable domain of TCR clone 235060 (TRBV6-3, TRBJ2-7)
CASSLTPYEQYF

SEQ ID NO: 470121 - protein, 13 aa, Homo sapiens
  CDR3 for alpha chain variable domain of TCR clone 235061 (TRAV12-1, TRAJ40)
CVAPTSGTYKYIF

SEQ ID NO: 470122 - protein, 16 aa, Homo sapiens
  CDR3 for beta chain variable domain of TCR clone 235061 (TRBV7-9, TRBJ1-2)
CASSLGFSAGEDGYTF

SEQ ID NO: 470123 - protein, 14 aa, Homo sapiens
  CDR3 for alpha chain variable domain of TCR clone 235062 (TRAV13-1, TRAJ44)
CAAKASGTASKLTF

SEQ ID NO: 470124 - protein, 12 aa, Homo sapiens
  CDR3 for beta chain variable domain of TCR clone 235062 (TRBV11-2, TRBJ2-2)
CASSLGGGELFF

SEQ ID NO: 470125 - protein, 14 aa, Homo sapiens
  CDR3 for alpha chain variable domain of TCR clone 235063 (TRAV21, TRAJ52)
CGRAGGTSYGKLTC

SEQ ID NO: 470126 - protein, 14 aa, Homo sapiens
  CDR3 for beta chain variable domain of TCR clone 235063 (TRBV19, TRBJ1-2)
CASSVLGYNYGYTF

SEQ ID NO: 470127 - protein, 14 aa, Homo sapiens
  CDR3 for alpha chain variable domain of TCR clone 235064 (TRAV2, TRAJ20)
CAVEDGTNDYKLSF

SEQ ID NO: 470128 - protein, 14 aa, Homo sapiens
  CDR3 for beta chain variable domain of TCR clone 235064 (TRBV7-2, TRBJ2-7)
CASRSQGAAYEQYF

SEQ ID NO: 470129 - protein, 10 aa, Homo sapiens
  CDR3 for alpha chain variable domain of TCR clone 235065 (TRAV13-2, TRAJ49)
CEGTGNQFYF

SEQ ID NO: 470130 - protein, 15 aa, Homo sapiens
  CDR3 for beta chain variable domain of TCR clone 235065 (TRBV11-2, TRBJ1-2)
CASSLEGVQRNGYTF

SEQ ID NO: 470131 - protein, 13 aa, Homo sapiens
  CDR3 for alpha chain variable domain of TCR clone 235066 (TRAV2, TRAJ40)
CAVVTSGTYKYMF

SEQ ID NO: 470132 - protein, 20 aa, Homo sapiens
  CDR3 for beta chain variable domain of TCR clone 235066 (TRBV7-8, TRBJ2-2)
CAGSHLFPGPTIHITGELFF

SEQ ID NO: 470133 - protein, 14 aa, Homo sapiens
  CDR3 for alpha chain variable domain of TCR clone 235067 (TRAV26-1, TRAJ8)
CIVRVDTGFQKLVF

SEQ ID NO: 470134 - protein, 13 aa, Homo sapiens
  CDR3 for beta chain variable domain of TCR clone 235067 (TRBV6-6, TRBJ2-7)
CASSPKHLAEQYF

SEQ ID NO: 470135 - protein, 15 aa, Homo sapiens
  CDR3 for alpha chain variable domain of TCR clone 235068 (TRAV8-3, TRAJ45)
CASSYSGGGADGFTL

SEQ ID NO: 470136 - protein, 13 aa, Homo sapiens
  CDR3 for beta chain variable domain of TCR clone 235068 (TRBV10-3, TRBJ2-7)
CASKLAVNYEQYF

SEQ ID NO: 470137 - protein, 14 aa, Homo sapiens
  CDR3 for alpha chain variable domain of TCR clone 235069 (TRAV17, TRAJ22)
CATSPSGSAWQLTF

SEQ ID NO: 470138 - protein, 15 aa, Homo sapiens
  CDR3 for beta chain variable domain of TCR clone 235069 (TRBV4-1, TRBJ2-5)
CASSQWDLYQETQYF

SEQ ID NO: 470139 - protein, 15 aa, Homo sapiens
  CDR3 for alpha chain variable domain of TCR clone 235070 (TRAV17, TRAJ34)
CATDPRMVDTDKLIF

SEQ ID NO: 470140 - protein, 12 aa, Homo sapiens
  CDR3 for beta chain variable domain of TCR clone 235070 (TRBV10-2, TRBJ2-3)
CASSEGPGTRYF

SEQ ID NO: 470141 - protein, 14 aa, Homo sapiens
  CDR3 for alpha chain variable domain of TCR clone 235071 (TRAV12-2, TRAJ45)
CALPERGGADGLTF

SEQ ID NO: 470142 - protein, 14 aa, Homo sapiens
  CDR3 for beta chain variable domain of TCR clone 235071 (TRBV18, TRBJ2-1)
CASSPGTSETEQFF

SEQ ID NO: 470143 - protein, 14 aa, Homo sapiens
  CDR3 for alpha chain variable domain of TCR clone 235072 (TRAV16, TRAJ40)
CALHESYYLRNLQI

SEQ ID NO: 470144 - protein, 15 aa, Homo sapiens
  CDR3 for beta chain variable domain of TCR clone 235072 (TRBV7-9, TRBJ2-7)
CASSPGGGLTYEQYF

SEQ ID NO: 470145 - protein, 16 aa, Homo sapiens
  CDR3 for alpha chain variable domain of TCR clone 235073 (TRAV3, TRAJ6)
CAVRRTPSGGSYIPTF

SEQ ID NO: 470146 - protein, 14 aa, Homo sapiens
  CDR3 for beta chain variable domain of TCR clone 235073 (TRBV4-1, TRBJ2-2)
CASSQAVNTGELFF

SEQ ID NO: 470147 - protein, 20 aa, Homo sapiens
  CDR3 for alpha chain variable domain of TCR clone 235074 (TRAV12-1, TRAJ42)
SSVIQPPTSVKGGSQGNLIF

SEQ ID NO: 470148 - protein, 13 aa, Homo sapiens
  CDR3 for beta chain variable domain of TCR clone 235074 (TRBV9, TRBJ2-1)
CASSPSGGNEQFF

SEQ ID NO: 470149 - protein, 17 aa, Homo sapiens
  CDR3 for alpha chain variable domain of TCR clone 235075 (TRAV13-1, TRAJ52)
CAASSGAGGTSYGKLTF

SEQ ID NO: 470150 - protein, 14 aa, Homo sapiens
  CDR3 for beta chain variable domain of TCR clone 235075 (TRBV5-5, TRBJ1-2)
CASSLDPYNYGYTF

SEQ ID NO: 470151 - protein, 14 aa, Homo sapiens
  CDR3 for alpha chain variable domain of TCR clone 235076 (TRAV13-2, TRAJ39)
GDSVRNNAGNMLTF

SEQ ID NO: 470152 - protein, 11 aa, Homo sapiens
  CDR3 for beta chain variable domain of TCR clone 235076 (TRBV11-2, TRBJ1-1)
CASSINTEAFF

SEQ ID NO: 470153 - protein, 16 aa, Homo sapiens
  CDR3 for alpha chain variable domain of TCR clone 235077 (TRAV30, TRAJ24)
CGTEIVDADSWGKFQF

SEQ ID NO: 470154 - protein, 15 aa, Homo sapiens
  CDR3 for beta chain variable domain of TCR clone 235077 (TRBV7-9, TRBJ1-4)
CASSARTGSNEKLFF

SEQ ID NO: 470155 - protein, 15 aa, Homo sapiens
  CDR3 for alpha chain variable domain of TCR clone 235078 (TRAV21, TRAJ40)
CAVRPQTSGTYKFIF

SEQ ID NO: 470156 - protein, 14 aa, Homo sapiens
  CDR3 for beta chain variable domain of TCR clone 235078 (TRBV7-2, TRBJ2-3)
CASSQTGSSYTQYF

SEQ ID NO: 470157 - protein, 15 aa, Homo sapiens
  CDR3 for alpha chain variable domain of TCR clone 235079 (TRAV27, TRAJ38)
CAGRFNAGNNRKLIW

SEQ ID NO: 470158 - protein, 16 aa, Homo sapiens
  CDR3 for beta chain variable domain of TCR clone 235079 (TRBV19, TRBJ2-1)
CASSKAGPSSYNEQFF

SEQ ID NO: 470159 - protein, 14 aa, Homo sapiens
  CDR3 for alpha chain variable domain of TCR clone 235080 (TRAV13-1, TRAJ10)
YAAKEPGGGNKLTF

SEQ ID NO: 470160 - protein, 14 aa, Homo sapiens
  CDR3 for beta chain variable domain of TCR clone 235080 (TRBV6-6, TRBJ2-7)
CASSDSGAGYEQYF

SEQ ID NO: 470161 - protein, 11 aa, Homo sapiens
  CDR3 for alpha chain variable domain of TCR clone 235081 (TRAV1-2, TRAJ20)
CAVANDYKLSF

SEQ ID NO: 470162 - protein, 16 aa, Homo sapiens
  CDR3 for beta chain variable domain of TCR clone 235081 (TRBV11-3, TRBJ2-5)
CASSSVVAGSTETQYF

SEQ ID NO: 470163 - protein, 14 aa, Homo sapiens
  CDR3 for alpha chain variable domain of TCR clone 235082 (TRAV12-3, TRAJ9)
CAMSPNTGRFKTIF

SEQ ID NO: 470164 - protein, 12 aa, Homo sapiens
  CDR3 for beta chain variable domain of TCR clone 235082 (TRBV19, TRBJ1-5)
CASSIAQQTQHF

SEQ ID NO: 470165 - protein, 13 aa, Homo sapiens
  CDR3 for alpha chain variable domain of TCR clone 235083 (TRAV12-3, TRAJ13)
CAMSSGGHQEVTF

SEQ ID NO: 470166 - protein, 14 aa, Homo sapiens
  CDR3 for beta chain variable domain of TCR clone 235083 (TRBV2, TRBJ2-1)
CASRTGSSYNEQFF

SEQ ID NO: 470167 - protein, 16 aa, Homo sapiens
  CDR3 for alpha chain variable domain of TCR clone 235084 (TRAV29/DV5, TRAJ30)
QCTSVQQAKRDDNIIF

SEQ ID NO: 470168 - protein, 13 aa, Homo sapiens
  CDR3 for beta chain variable domain of TCR clone 235084 (TRBV12-5, TRBJ2-3)
CASQNRGTDTQYF

SEQ ID NO: 470169 - protein, 18 aa, Homo sapiens
  CDR3 for alpha chain variable domain of TCR clone 235085 (TRAV1-2, TRAJ18)
CAVRDMGDRGSTLGRLYF

SEQ ID NO: 470170 - protein, 14 aa, Homo sapiens
  CDR3 for beta chain variable domain of TCR clone 235085 (TRBV19, TRBJ2-7)
CASTVQGRPYEQYF

SEQ ID NO: 470171 - protein, 15 aa, Homo sapiens
  CDR3 for alpha chain variable domain of TCR clone 235086 (TRAV26-1, TRAJ29)
CIVRVEGSGNTPLVF

SEQ ID NO: 470172 - protein, 17 aa, Homo sapiens
  CDR3 for beta chain variable domain of TCR clone 235086 (TRBV4-1, TRBJ2-7)
CASSRDPLGVRGGEQYF

SEQ ID NO: 470173 - protein, 10 aa, Homo sapiens
  CDR3 for alpha chain variable domain of TCR clone 235087 (TRAV1-2, TRAJ20)
CACNHYKLSF

SEQ ID NO: 470174 - protein, 16 aa, Homo sapiens
  CDR3 for beta chain variable domain of TCR clone 235087 (TRBV20-1, TRBJ2-1)
YSARDLKQGMNNEQFF

SEQ ID NO: 470175 - protein, 15 aa, Homo sapiens
  CDR3 for alpha chain variable domain of TCR clone 235088 (TRAV3, TRAJ27)
CAVRDPLTNAGKATF

SEQ ID NO: 470176 - protein, 15 aa, Homo sapiens
  CDR3 for beta chain variable domain of TCR clone 235088 (TRBV28, TRBJ2-1)
CASSIIAGGRSEQFF

SEQ ID NO: 470177 - protein, 14 aa, Homo sapiens
  CDR3 for alpha chain variable domain of TCR clone 235089 (TRAV1-2, TRAJ8)
CAVREDTGFQKLVF

SEQ ID NO: 470178 - protein, 12 aa, Homo sapiens
  CDR3 for beta chain variable domain of TCR clone 235089 (TRBV11-2, TRBJ2-2)
CASSLVGGELFF

SEQ ID NO: 470179 - protein, 12 aa, Homo sapiens
  CDR3 for alpha chain variable domain of TCR clone 235090 (TRAV25, TRAJ20)
CAVSSNDYKLSF

SEQ ID NO: 470180 - protein, 12 aa, Homo sapiens
  CDR3 for beta chain variable domain of TCR clone 235090 (TRBV5-4, TRBJ2-7)
CASSPRTEEQYF

SEQ ID NO: 470181 - protein, 14 aa, Homo sapiens
  CDR3 for alpha chain variable domain of TCR clone 235091 (TRAV12-3, TRAJ9)
CAMSPNTGGSKTIF

SEQ ID NO: 470182 - protein, 12 aa, Homo sapiens
  CDR3 for beta chain variable domain of TCR clone 235091 (TRBV11-2, TRBJ2-2)
CASSRGGGELFF

SEQ ID NO: 470183 - protein, 13 aa, Homo sapiens
  CDR3 for alpha chain variable domain of TCR clone 235092 (TRAV8-3, TRAJ20)
CAVGAQDDYKLSF

SEQ ID NO: 470184 - protein, 17 aa, Homo sapiens
  CDR3 for beta chain variable domain of TCR clone 235092 (TRBV13, TRBJ2-3)
CASSLSRVAGGRNTQYF

SEQ ID NO: 470185 - protein, 14 aa, Homo sapiens
  CDR3 for alpha chain variable domain of TCR clone 235093 (TRAV12-2, TRAJ45)
CAVNKGGGSDGLTF

SEQ ID NO: 470186 - protein, 14 aa, Homo sapiens
  CDR3 for beta chain variable domain of TCR clone 235093 (TRBV20-1, TRBJ1-1)
CSAMGGTANTEAFF

SEQ ID NO: 470187 - protein, 18 aa, Homo sapiens
  CDR3 for alpha chain variable domain of TCR clone 235094 (TRAV21, TRAJ52)
CAVRPSPAGGTSDGKLTF

SEQ ID NO: 470188 - protein, 17 aa, Homo sapiens
  CDR3 for beta chain variable domain of TCR clone 235094 (TRBV13, TRBJ2-3)
CASSLSGVAGGRNTQYF

SEQ ID NO: 470189 - protein, 10 aa, Homo sapiens
  CDR3 for alpha chain variable domain of TCR clone 235095 (TRAV13-1, TRAJ7)
LIGGNNRPAF

SEQ ID NO: 470190 - protein, 15 aa, Homo sapiens
  CDR3 for beta chain variable domain of TCR clone 235095 (TRBV7-9, TRBJ1-1)
CASSLLEQGGTEAFF

SEQ ID NO: 470191 - protein, 10 aa, Homo sapiens
  CDR3 for alpha chain variable domain of TCR clone 235096 (TRAV38-2/DV8, TRAJ21)
CAYRSNKFYF

SEQ ID NO: 470192 - protein, 14 aa, Homo sapiens
  CDR3 for beta chain variable domain of TCR clone 235096 (TRBV7-8, TRBJ2-5)
CASSATGGQETQYF

SEQ ID NO: 470193 - protein, 14 aa, Homo sapiens
  CDR3 for alpha chain variable domain of TCR clone 235097 (TRAV23/DV6, TRAJ4)
CAAPSSGGYNKLIF

SEQ ID NO: 470194 - protein, 15 aa, Homo sapiens
  CDR3 for beta chain variable domain of TCR clone 235097 (TRBV6-3, TRBJ2-7)
CASSSPGTVFYEQYF

SEQ ID NO: 470195 - protein, 12 aa, Homo sapiens
  CDR3 for alpha chain variable domain of TCR clone 235098 (TRAV27, TRAJ35)
CAGADFGTVLHC

SEQ ID NO: 470196 - protein, 16 aa, Homo sapiens
  CDR3 for beta chain variable domain of TCR clone 235098 (TRBV6-1, TRBJ2-1)
CASILRQGSSYNEQFF

SEQ ID NO: 470197 - protein, 14 aa, Homo sapiens
  CDR3 for alpha chain variable domain of TCR clone 235099 (TRAV16, TRAJ32)
CSKRYGGATNKLIF

SEQ ID NO: 470198 - protein, 13 aa, Homo sapiens
  CDR3 for beta chain variable domain of TCR clone 235099 (TRBV28, TRBJ2-7)
CASSLPSRYEQYF

SEQ ID NO: 470199 - protein, 14 aa, Homo sapiens
  CDR3 for alpha chain variable domain of TCR clone 235100 (TRAV8-3, TRAJ39)
CAVGANNAGNMLTF

SEQ ID NO: 470200 - protein, 10 aa, Homo sapiens
  CDR3 for beta chain variable domain of TCR clone 235100 (TRBV2, TRBJ2-1)
CASSGVEQFF

SEQ ID NO: 470201 - protein, 14 aa, Homo sapiens
  CDR3 for alpha chain variable domain of TCR clone 235101 (TRAV26-1, TRAJ45)
CIEVTGGGADGLTF

SEQ ID NO: 470202 - protein, 15 aa, Homo sapiens
  CDR3 for beta chain variable domain of TCR clone 235101 (TRBV4-3, TRBJ2-1)
CASSQMRGAHNEQFF

SEQ ID NO: 470203 - protein, 14 aa, Homo sapiens
  CDR3 for alpha chain variable domain of TCR clone 235102 (TRAV17, TRAJ9)
CATGEWGGDWRLQN

SEQ ID NO: 470204 - protein, 12 aa, Homo sapiens
  CDR3 for beta chain variable domain of TCR clone 235102 (TRBV11-2, TRBJ2-1)
CASSPGNNEQFF

SEQ ID NO: 470205 - protein, 14 aa, Homo sapiens
  CDR3 for alpha chain variable domain of TCR clone 235103 (TRAV17, TRAJ54)
CATDANQGAQKLVF

SEQ ID NO: 470206 - protein, 14 aa, Homo sapiens
  CDR3 for beta chain variable domain of TCR clone 235103 (TRBV7-3, TRBJ2-2)
CASSPDPSGRELFF

SEQ ID NO: 470207 - protein, 14 aa, Homo sapiens
  CDR3 for alpha chain variable domain of TCR clone 235104 (TRAV29/DV5, TRAJ44)
CAAFLVGTASKLTF

SEQ ID NO: 470208 - protein, 15 aa, Homo sapiens
  CDR3 for beta chain variable domain of TCR clone 235104 (TRBV7-3, TRBJ2-2)
CGSSETGQGTGELFF

SEQ ID NO: 470209 - protein, 14 aa, Homo sapiens
  CDR3 for alpha chain variable domain of TCR clone 235105 (TRAV8-3, TRAJ4)
CAVGAAGGYNKLIF

SEQ ID NO: 470210 - protein, 14 aa, Homo sapiens
  CDR3 for beta chain variable domain of TCR clone 235105 (TRBV7-2, TRBJ2-2)
CASRGQGAAGELFF

SEQ ID NO: 470211 - protein, 11 aa, Homo sapiens
  CDR3 for alpha chain variable domain of TCR clone 235106 (TRAV21, TRAJ34)
CAVTNTDKLIF

SEQ ID NO: 470212 - protein, 14 aa, Homo sapiens
  CDR3 for beta chain variable domain of TCR clone 235106 (TRBV7-9, TRBJ2-5)
CASSLDTAQETQYF

SEQ ID NO: 470213 - protein, 13 aa, Homo sapiens
  CDR3 for alpha chain variable domain of TCR clone 235107 (TRAV3, TRAJ21)
CAVREPDFNKFYF

SEQ ID NO: 470214 - protein, 12 aa, Homo sapiens
  CDR3 for beta chain variable domain of TCR clone 235107 (TRBV7-2, TRBJ2-1)
CASSPQDIEQFF

SEQ ID NO: 470215 - protein, 11 aa, Homo sapiens
  CDR3 for alpha chain variable domain of TCR clone 235108 (TRAV2, TRAJ13)
CASGGYQKVTF

SEQ ID NO: 470216 - protein, 12 aa, Homo sapiens
  CDR3 for beta chain variable domain of TCR clone 235108 (TRBV27, TRBJ2-7)
CASSGGFYEQYF

SEQ ID NO: 470217 - protein, 11 aa, Homo sapiens
  CDR3 for alpha chain variable domain of TCR clone 235109 (TRAV12-2, TRAJ49)
CALQGGNQFYF

SEQ ID NO: 470218 - protein, 13 aa, Homo sapiens
  CDR3 for beta chain variable domain of TCR clone 235109 (TRBV4-1, TRBJ1-1)
CASSQLGTGEAFS

SEQ ID NO: 470219 - protein, 15 aa, Homo sapiens
  CDR3 for alpha chain variable domain of TCR clone 235110 (TRAV1-2, TRAJ28)
CAVQYSGAGSYQLTF

SEQ ID NO: 470220 - protein, 12 aa, Homo sapiens
  CDR3 for beta chain variable domain of TCR clone 235110 (TRBV14, TRBJ2-5)
CASSQLKETQYF

SEQ ID NO: 470221 - protein, 14 aa, Homo sapiens
  CDR3 for alpha chain variable domain of TCR clone 235111 (TRAV12-1, TRAJ13)
CVVIDSGGYQKVTV

SEQ ID NO: 470222 - protein, 13 aa, Homo sapiens
  CDR3 for beta chain variable domain of TCR clone 235111 (TRBV20-1, TRBJ1-1)
CSAPPGGHTEAFF

SEQ ID NO: 470223 - protein, 15 aa, Homo sapiens
  CDR3 for alpha chain variable domain of TCR clone 235112 (TRAV3, TRAJ9)
CAVRARNTGGFKTIF

SEQ ID NO: 470224 - protein, 14 aa, Homo sapiens
  CDR3 for beta chain variable domain of TCR clone 235112 (TRBV7-2, TRBJ2-7)
CASRSQGAAYEQYF

SEQ ID NO: 470225 - protein, 14 aa, Homo sapiens
  CDR3 for alpha chain variable domain of TCR clone 235113 (TRAV2, TRAJ9)
CAVEERSGGFKTIF

SEQ ID NO: 470226 - protein, 16 aa, Homo sapiens
  CDR3 for beta chain variable domain of TCR clone 235113 (TRBV27, TRBJ2-2)
CASSFRGLVRTGELFF

SEQ ID NO: 470227 - protein, 17 aa, Homo sapiens
  CDR3 for alpha chain variable domain of TCR clone 235114 (TRAV14/DV4, TRAJ28)
CAMRGTSSGAGSYQLTF

SEQ ID NO: 470228 - protein, 13 aa, Homo sapiens
  CDR3 for beta chain variable domain of TCR clone 235114 (TRBV28, TRBJ2-5)
CASSFAGGAAQYF

SEQ ID NO: 470229 - protein, 14 aa, Homo sapiens
  CDR3 for alpha chain variable domain of TCR clone 235115 (TRAV12-2, TRAJ4)
CAVLIGGGYNKLIF

SEQ ID NO: 470230 - protein, 16 aa, Homo sapiens
  CDR3 for beta chain variable domain of TCR clone 235115 (TRBV10-3, TRBJ2-1)
CAISGVGDGGGGEQFF

SEQ ID NO: 470231 - protein, 13 aa, Homo sapiens
  CDR3 for alpha chain variable domain of TCR clone 235116 (TRAV8-2, TRAJ13)
CVVSDLRYQKVTF

SEQ ID NO: 470232 - protein, 14 aa, Homo sapiens
  CDR3 for beta chain variable domain of TCR clone 235116 (TRBV25-1, TRBJ1-1)
CASTHVGGNTEAFF

SEQ ID NO: 470233 - protein, 15 aa, Homo sapiens
  CDR3 for alpha chain variable domain of TCR clone 235117 (TRAV13-1, TRAJ57)
CAAGNTQGGSEKLVF

SEQ ID NO: 470234 - protein, 16 aa, Homo sapiens
  CDR3 for beta chain variable domain of TCR clone 235117 (TRBV19, TRBJ2-1)
CASSKAGPSSYNEQFF

SEQ ID NO: 470235 - protein, 16 aa, Homo sapiens
  CDR3 for alpha chain variable domain of TCR clone 235118 (TRAV13-1, TRAJ58)
CAASSPYAPSGSRLTF

SEQ ID NO: 470236 - protein, 16 aa, Homo sapiens
  CDR3 for beta chain variable domain of TCR clone 235118 (TRBV11-2, TRBJ1-2)
CASSVDTGGADYGYTF

SEQ ID NO: 470237 - protein, 15 aa, Homo sapiens
  CDR3 for alpha chain variable domain of TCR clone 235119 (TRAV29/DV5, TRAJ40)
CAASAQGSGTYKYIF

SEQ ID NO: 470238 - protein, 11 aa, Homo sapiens
  CDR3 for beta chain variable domain of TCR clone 235119 (TRBV7-8, TRBJ2-7)
CASSLSLEQYF

SEQ ID NO: 470239 - protein, 16 aa, Homo sapiens
  CDR3 for alpha chain variable domain of TCR clone 235120 (TRAV23/DV6, TRAJ9)
CAASIGGNTGGFKTTF

SEQ ID NO: 470240 - protein, 13 aa, Homo sapiens
  CDR3 for beta chain variable domain of TCR clone 235120 (TRBV12-4, TRBJ1-1)
CASSPGTGFEAFF

SEQ ID NO: 470241 - protein, 15 aa, Homo sapiens
  CDR3 for alpha chain variable domain of TCR clone 235121 (TRAV12-3, TRAJ11)
CAMSEEHSGYSTLTF

SEQ ID NO: 470242 - protein, 16 aa, Homo sapiens
  CDR3 for beta chain variable domain of TCR clone 235121 (TRBV5-1, TRBJ2-7)
CAGSLEGLAGLYEQYF

SEQ ID NO: 470243 - protein, 15 aa, Homo sapiens
  CDR3 for alpha chain variable domain of TCR clone 235122 (TRAV3, TRAJ3)
CAVRDRDSSASKIIF

SEQ ID NO: 470244 - protein, 13 aa, Homo sapiens
  CDR3 for beta chain variable domain of TCR clone 235122 (TRBV5-5, TRBJ1-2)
CASSFWRGEDYTF

SEQ ID NO: 470245 - protein, 15 aa, Homo sapiens
  CDR3 for alpha chain variable domain of TCR clone 235123 (TRAV12-3, TRAJ6)
CAMTASTGGSYIPTF

SEQ ID NO: 470246 - protein, 16 aa, Homo sapiens
  CDR3 for beta chain variable domain of TCR clone 235123 (TRBV20-1, TRBJ1-2)
CSASMGQGVANYGYTF

SEQ ID NO: 470247 - protein, 14 aa, Homo sapiens
  CDR3 for alpha chain variable domain of TCR clone 235124 (TRAV12-2, TRAJ17)
CAALFEAAGNKLTF

SEQ ID NO: 470248 - protein, 16 aa, Homo sapiens
  CDR3 for beta chain variable domain of TCR clone 235124 (TRBV20-1, TRBJ2-2)
CSASASGIPGAGELFF

SEQ ID NO: 470249 - protein, 16 aa, Homo sapiens
  CDR3 for alpha chain variable domain of TCR clone 235125 (TRAV16, TRAJ42)
CARKMNHGGSQGNLIF

SEQ ID NO: 470250 - protein, 15 aa, Homo sapiens
  CDR3 for beta chain variable domain of TCR clone 235125 (TRBV20-1, TRBJ2-7)
CSAREGRDSLYEQYF

SEQ ID NO: 470251 - protein, 17 aa, Homo sapiens
  CDR3 for alpha chain variable domain of TCR clone 235126 (TRAV16, TRAJ58)
CITVLSNGETRGSRLTF

SEQ ID NO: 470252 - protein, 17 aa, Homo sapiens
  CDR3 for beta chain variable domain of TCR clone 235126 (TRBV18, TRBJ2-1)
CASSKGLSGGADNKQFF

SEQ ID NO: 470253 - protein, 14 aa, Homo sapiens
  CDR3 for alpha chain variable domain of TCR clone 235127 (TRAV1-2, TRAJ8)
CAVREDTGFKKLVF

SEQ ID NO: 470254 - protein, 16 aa, Homo sapiens
  CDR3 for beta chain variable domain of TCR clone 235127 (TRBV5-1, TRBJ2-2)
CASSLWDTTNTGELFF

SEQ ID NO: 470255 - protein, 13 aa, Homo sapiens
  CDR3 for alpha chain variable domain of TCR clone 235128 (TRAV35, TRAJ43)
CAGYPYNNNDMRL

SEQ ID NO: 470256 - protein, 15 aa, Homo sapiens
  CDR3 for beta chain variable domain of TCR clone 235128 (TRBV25-1, TRBJ1-4)
CASIKRIATNEKLFF

SEQ ID NO: 470257 - protein, 17 aa, Homo sapiens
  CDR3 for alpha chain variable domain of TCR clone 235129 (TRAV3, TRAJ42)
CAVRDRDYGESQGNLIF

SEQ ID NO: 470258 - protein, 14 aa, Homo sapiens
  CDR3 for beta chain variable domain of TCR clone 235129 (TRBV19, TRBJ2-5)
CASSVTGQQETQYF

SEQ ID NO: 470259 - protein, 14 aa, Homo sapiens
  CDR3 for alpha chain variable domain of TCR clone 235130 (TRAV1-2, TRAJ16)
CAVNRFSDGQKLLF

SEQ ID NO: 470260 - protein, 13 aa, Homo sapiens
  CDR3 for beta chain variable domain of TCR clone 235130 (TRBV19, TRBJ2-7)
CASSTSGSYEQNF

SEQ ID NO: 470261 - protein, 12 aa, Homo sapiens
  CDR3 for alpha chain variable domain of TCR clone 235131 (TRAV13-2, TRAJ23)
CSERHRGGKLIF

SEQ ID NO: 470262 - protein, 13 aa, Homo sapiens
  CDR3 for beta chain variable domain of TCR clone 235131 (TRBV20-1, TRBJ2-2)
CSALSGGAGELFF

SEQ ID NO: 470263 - protein, 12 aa, Homo sapiens
  CDR3 for alpha chain variable domain of TCR clone 235132 (TRAV16, TRAJ10)
CSRTGGGNKLTF

SEQ ID NO: 470264 - protein, 13 aa, Homo sapiens
  CDR3 for beta chain variable domain of TCR clone 235132 (TRBV29-1, TRBJ1-1)
CSVGDSRNTESFF

SEQ ID NO: 470265 - protein, 14 aa, Homo sapiens
  CDR3 for alpha chain variable domain of TCR clone 235133 (TRAV13-1, TRAJ35)
CAASKGGFGNVLHC

SEQ ID NO: 470266 - protein, 18 aa, Homo sapiens
  CDR3 for beta chain variable domain of TCR clone 235133 (TRBV7-9, TRBJ2-7)
CASSLTTSGSRTWYEQYF

SEQ ID NO: 470267 - protein, 10 aa, Homo sapiens
  CDR3 for alpha chain variable domain of TCR clone 235134 (TRAV8-6, TRAJ20)
CAALSPGLQA

SEQ ID NO: 470268 - protein, 14 aa, Homo sapiens
  CDR3 for beta chain variable domain of TCR clone 235134 (TRBV12-5, TRBJ2-5)
CASGSRTHQETQYF

SEQ ID NO: 470269 - protein, 14 aa, Homo sapiens
  CDR3 for alpha chain variable domain of TCR clone 235135 (TRAV26-1, TRAJ38)
CIADNAGNNRKLIW

SEQ ID NO: 470270 - protein, 16 aa, Homo sapiens
  CDR3 for beta chain variable domain of TCR clone 235135 (TRBV20-1, TRBJ2-7)
CSATPGQGVLDHEQYF

SEQ ID NO: 470271 - protein, 13 aa, Homo sapiens
  CDR3 for alpha chain variable domain of TCR clone 235136 (TRAV12-2, TRAJ34)
CAVRGYNTDKLIF

SEQ ID NO: 470272 - protein, 18 aa, Homo sapiens
  CDR3 for beta chain variable domain of TCR clone 235136 (TRBV11-2, TRBJ2-3)
CASSLGGASRGAPDTQYF

SEQ ID NO: 470273 - protein, 17 aa, Homo sapiens
  CDR3 for alpha chain variable domain of TCR clone 235137 (TRAV3, TRAJ6)
CAVRDGPSAGGSYIPTF

SEQ ID NO: 470274 - protein, 14 aa, Homo sapiens
  CDR3 for beta chain variable domain of TCR clone 235137 (TRBV7-2, TRBJ2-7)
CASSPKNSFYEQYF

SEQ ID NO: 470275 - protein, 15 aa, Homo sapiens
  CDR3 for alpha chain variable domain of TCR clone 235138 (TRAV8-3, TRAJ23)
CAVGDRYNQGGKLIF

SEQ ID NO: 470276 - protein, 22 aa, Homo sapiens
  CDR3 for beta chain variable domain of TCR clone 235138 (TRBV29-1, TRBJ2-5)
TVSNMSPEDSSIYLCSAGTQNF

SEQ ID NO: 470277 - protein, 14 aa, Homo sapiens
  CDR3 for alpha chain variable domain of TCR clone 235139 (TRAV12-1, TRAJ12)
CVVTRMDSSYKLIF

SEQ ID NO: 470278 - protein, 17 aa, Homo sapiens
  CDR3 for beta chain variable domain of TCR clone 235139 (TRBV7-9, TRBJ2-3)
CASSPTVAGDLTDTQYF

SEQ ID NO: 470279 - protein, 12 aa, Homo sapiens
  CDR3 for alpha chain variable domain of TCR clone 235140 (TRAV13-2, TRAJ23)
CVERHRGGKLIF

SEQ ID NO: 470280 - protein, 16 aa, Homo sapiens
  CDR3 for beta chain variable domain of TCR clone 235140 (TRBV7-2, TRBJ2-6)
CAILSGVSSGANVLTF

SEQ ID NO: 470281 - protein, 11 aa, Homo sapiens
  CDR3 for alpha chain variable domain of TCR clone 235141 (TRAV1-2, TRAJ20)
CAVANDYNLSF

SEQ ID NO: 470282 - protein, 14 aa, Homo sapiens
  CDR3 for beta chain variable domain of TCR clone 235141 (TRBV7-9, TRBJ1-1)
CASTPLQSYTESFF

SEQ ID NO: 470283 - protein, 16 aa, Homo sapiens
  CDR3 for alpha chain variable domain of TCR clone 235142 (TRAV16, TRAJ52)
CALSGVGGTSYGKLTF

SEQ ID NO: 470284 - protein, 13 aa, Homo sapiens
  CDR3 for beta chain variable domain of TCR clone 235142 (TRBV6-1, TRBJ2-1)
CAGMDPTNNEQFF

SEQ ID NO: 470285 - protein, 23 aa, Homo sapiens
  CDR3 for alpha chain variable domain of TCR clone 235143 (TRAV21, )
CAVMGAGNNHIQNPDPAVYQLRD

SEQ ID NO: 470286 - protein, 16 aa, Homo sapiens
  CDR3 for beta chain variable domain of TCR clone 235143 (TRBV27, TRBJ2-2)
CASSSSGVSNTGELFF

SEQ ID NO: 470287 - protein, 13 aa, Homo sapiens
  CDR3 for alpha chain variable domain of TCR clone 235144 (TRAV20, TRAJ37)
CAGCSSNTVELIF

SEQ ID NO: 470288 - protein, 11 aa, Homo sapiens
  CDR3 for beta chain variable domain of TCR clone 235144 (TRBV12-4, TRBJ2-3)
CASTATDTQYF

SEQ ID NO: 470289 - protein, 18 aa, Homo sapiens
  CDR3 for alpha chain variable domain of TCR clone 235145 (TRAV12-2, )
CAVEDIQNPDPAVYQLRD

SEQ ID NO: 470290 - protein, 12 aa, Homo sapiens
  CDR3 for beta chain variable domain of TCR clone 235145 (TRBV2, TRBJ2-7)
CASNLQGYEQYF

SEQ ID NO: 470291 - protein, 14 aa, Homo sapiens
  CDR3 for alpha chain variable domain of TCR clone 235146 (TRAV12-2, TRAJ40)
CAVKIPSGTYKYIF

SEQ ID NO: 470292 - protein, 14 aa, Homo sapiens
  CDR3 for beta chain variable domain of TCR clone 235146 (TRBV7-8, TRBJ2-7)
CASSHRDRVYEQYF

SEQ ID NO: 470293 - protein, 16 aa, Homo sapiens
  CDR3 for alpha chain variable domain of TCR clone 235147 (TRAV26-1, TRAJ23)
CIVRVHPYNQGGKLTF

SEQ ID NO: 470294 - protein, 13 aa, Homo sapiens
  CDR3 for beta chain variable domain of TCR clone 235147 (TRBV20-1, TRBJ2-5)
CSARGDYQETQYF

SEQ ID NO: 470295 - protein, 12 aa, Homo sapiens
  CDR3 for alpha chain variable domain of TCR clone 235148 (TRAV17, TRAJ20)
CATQSNDYKLSF

SEQ ID NO: 470296 - protein, 14 aa, Homo sapiens
  CDR3 for beta chain variable domain of TCR clone 235148 (TRBV2, TRBJ2-3)
CASSEGQNTDTQYF

SEQ ID NO: 470297 - protein, 14 aa, Homo sapiens
  CDR3 for alpha chain variable domain of TCR clone 235149 (TRAV17, TRAJ32)
CATDPGGATNKLIF

SEQ ID NO: 470298 - protein, 14 aa, Homo sapiens
  CDR3 for beta chain variable domain of TCR clone 235149 (TRBV2, TRBJ1-5)
CASSENRGGEPQHF

SEQ ID NO: 470299 - protein, 11 aa, Homo sapiens
  CDR3 for alpha chain variable domain of TCR clone 235150 (TRAV27, TRAJ47)
CRSNQGNKLVF

SEQ ID NO: 470300 - protein, 12 aa, Homo sapiens
  CDR3 for beta chain variable domain of TCR clone 235150 (TRBV11-2, TRBJ2-1)
CASSPGNNEQFF

SEQ ID NO: 470301 - protein, 14 aa, Homo sapiens
  CDR3 for alpha chain variable domain of TCR clone 235151 (TRAV25, TRAJ35)
CARRMEGFGNVLHC

SEQ ID NO: 470302 - protein, 15 aa, Homo sapiens
  CDR3 for beta chain variable domain of TCR clone 235151 (TRBV9, TRBJ2-1)
CASSLAGSSYNEQFF

SEQ ID NO: 470303 - protein, 18 aa, Homo sapiens
  CDR3 for alpha chain variable domain of TCR clone 235152 (TRAV21, TRAJ52)
CAVRPSPAGGTSYGKLTF

SEQ ID NO: 470304 - protein, 11 aa, Homo sapiens
  CDR3 for beta chain variable domain of TCR clone 235152 (TRBV5-6, TRBJ2-5)
CASSLERTQYF

SEQ ID NO: 470305 - protein, 18 aa, Homo sapiens
  CDR3 for alpha chain variable domain of TCR clone 235153 (TRAV1-2, TRAJ18)
CAVRDMGDRGSTLGRLFF

SEQ ID NO: 470306 - protein, 16 aa, Homo sapiens
  CDR3 for beta chain variable domain of TCR clone 235153 (TRBV29-1, TRBJ1-2)
CSVEANRDIANYGYTF

SEQ ID NO: 470307 - protein, 18 aa, Homo sapiens
  CDR3 for alpha chain variable domain of TCR clone 235154 (TRAV12-3, TRAJ52)
CAMSRTNAGGTSYGKLTF

SEQ ID NO: 470308 - protein, 15 aa, Homo sapiens
  CDR3 for beta chain variable domain of TCR clone 235154 (TRBV20-1, TRBJ2-7)
CSAESGTSGAYEQYF

SEQ ID NO: 470309 - protein, 14 aa, Homo sapiens
  CDR3 for alpha chain variable domain of TCR clone 235155 (TRAV23/DV6, TRAJ22)
CAAFSSGSARQLTF

SEQ ID NO: 470310 - protein, 13 aa, Homo sapiens
  CDR3 for beta chain variable domain of TCR clone 235155 (TRBV7-3, TRBJ1-2)
CASSPGPNYGYTF

SEQ ID NO: 470311 - protein, 13 aa, Homo sapiens
  CDR3 for alpha chain variable domain of TCR clone 235156 (TRAV12-3, TRAJ33)
CAMSVNSNYQLIS

SEQ ID NO: 470312 - protein, 14 aa, Homo sapiens
  CDR3 for beta chain variable domain of TCR clone 235156 (TRBV5-1, TRBJ1-5)
CASSLGQGAQPQHF

SEQ ID NO: 470313 - protein, 10 aa, Homo sapiens
  CDR3 for alpha chain variable domain of TCR clone 235157 (TRAV36/DV7, TRAJ48)
CAVGNEKLTF

SEQ ID NO: 470314 - protein, 13 aa, Homo sapiens
  CDR3 for beta chain variable domain of TCR clone 235157 (TRBV5-4, TRBJ2-5)
CASSPVSQETQYF

SEQ ID NO: 470315 - protein, 13 aa, Homo sapiens
  CDR3 for alpha chain variable domain of TCR clone 235158 (TRAV8-3, TRAJ36)
CAVGATGANNLFF

SEQ ID NO: 470316 - protein, 13 aa, Homo sapiens
  CDR3 for beta chain variable domain of TCR clone 235158 (TRBV28, TRBJ2-1)
CASRSGGLNEQFF

SEQ ID NO: 470317 - protein, 13 aa, Homo sapiens
  CDR3 for alpha chain variable domain of TCR clone 235159 (TRAV13-1, TRAJ6)
CAASKGGSYIHTF

SEQ ID NO: 470318 - protein, 14 aa, Homo sapiens
  CDR3 for beta chain variable domain of TCR clone 235159 (TRBV7-2, TRBJ2-1)
CASSLGVGYNEQFF

SEQ ID NO: 470319 - protein, 18 aa, Homo sapiens
  CDR3 for alpha chain variable domain of TCR clone 235160 (TRAV13-1, TRAJ52)
CAAKNPNAGGTSYGKLTF

SEQ ID NO: 470320 - protein, 14 aa, Homo sapiens
  CDR3 for beta chain variable domain of TCR clone 235160 (TRBV4-2, TRBJ1-5)
CASSQDSINQPQHF

SEQ ID NO: 470321 - protein, 11 aa, Homo sapiens
  CDR3 for alpha chain variable domain of TCR clone 235161 (TRAV13-1, TRAJ43)
CAASMRNDMRF

SEQ ID NO: 470322 - protein, 12 aa, Homo sapiens
  CDR3 for beta chain variable domain of TCR clone 235161 (TRBV29-1, TRBJ2-3)
CSVTGGAVTQYF

SEQ ID NO: 470323 - protein, 14 aa, Homo sapiens
  CDR3 for alpha chain variable domain of TCR clone 235162 (TRAV25, TRAJ27)
CAGEHLTNAGKSTF

SEQ ID NO: 470324 - protein, 13 aa, Homo sapiens
  CDR3 for beta chain variable domain of TCR clone 235162 (TRBV4-1, TRBJ2-2)
CASSQENTGELFF

SEQ ID NO: 470325 - protein, 12 aa, Homo sapiens
  CDR3 for alpha chain variable domain of TCR clone 235163 (TRAV21, TRAJ39)
CAADNAGNMLTF

SEQ ID NO: 470326 - protein, 13 aa, Homo sapiens
  CDR3 for beta chain variable domain of TCR clone 235163 (TRBV6-1, TRBJ1-1)
CASSRQENTEAFF

SEQ ID NO: 470327 - protein, 13 aa, Homo sapiens
  CDR3 for alpha chain variable domain of TCR clone 235164 (TRAV30, TRAJ24)
CGTVTDSWGKLQF

SEQ ID NO: 470328 - protein, 15 aa, Homo sapiens
  CDR3 for beta chain variable domain of TCR clone 235164 (TRBV5-1, TRBJ2-1)
CASSPPRAPYNEQFF

SEQ ID NO: 470329 - protein, 12 aa, Homo sapiens
  CDR3 for alpha chain variable domain of TCR clone 235165 (TRAV12-3, TRAJ17)
CAMTPTGNKLTF

SEQ ID NO: 470330 - protein, 15 aa, Homo sapiens
  CDR3 for beta chain variable domain of TCR clone 235165 (TRBV20-1, TRBJ2-7)
CSVRDRVSGMDEQYF

SEQ ID NO: 470331 - protein, 18 aa, Homo sapiens
  CDR3 for alpha chain variable domain of TCR clone 235166 (TRAV21, TRAJ52)
CAVRPSPAGGTSYGKLTF

SEQ ID NO: 470332 - protein, 15 aa, Homo sapiens
  CDR3 for beta chain variable domain of TCR clone 235166 (TRBV4-2, TRBJ1-1)
CASSQAGTLKLSLDK

SEQ ID NO: 470333 - protein, 14 aa, Homo sapiens
  CDR3 for alpha chain variable domain of TCR clone 235167 (TRAV21, TRAJ28)
CAVGSGAGSYQLTF

SEQ ID NO: 470334 - protein, 16 aa, Homo sapiens
  CDR3 for beta chain variable domain of TCR clone 235167 (TRBV7-3, TRBJ2-2)
CASSLKRGTLSGELFF

SEQ ID NO: 470335 - protein, 15 aa, Homo sapiens
  CDR3 for alpha chain variable domain of TCR clone 235168 (TRAV35, TRAJ40)
CAGQLGTSGTYKYIF

SEQ ID NO: 470336 - protein, 14 aa, Homo sapiens
  CDR3 for beta chain variable domain of TCR clone 235168 (TRBV28, TRBJ1-2)
CASRIQGANYGYTF

SEQ ID NO: 470337 - protein, 15 aa, Homo sapiens
  CDR3 for alpha chain variable domain of TCR clone 235169 (TRAV21, TRAJ57)
CAVIITQGGSEKLVF

SEQ ID NO: 470338 - protein, 15 aa, Homo sapiens
  CDR3 for beta chain variable domain of TCR clone 235169 (TRBV27, TRBJ1-4)
CASSAQQDLNEKLFF

SEQ ID NO: 470339 - protein, 12 aa, Homo sapiens
  CDR3 for alpha chain variable domain of TCR clone 235170 (TRAV13-2, TRAJ23)
CAERHRGGKLIF

SEQ ID NO: 470340 - protein, 14 aa, Homo sapiens
  CDR3 for beta chain variable domain of TCR clone 235170 (TRBV7-8, TRBJ2-7)
CASSPRDRVYEQYF

SEQ ID NO: 470341 - protein, 13 aa, Homo sapiens
  CDR3 for alpha chain variable domain of TCR clone 235171 (TRAV30, TRAJ49)
CGTESQPVTSSIL

SEQ ID NO: 470342 - protein, 15 aa, Homo sapiens
  CDR3 for beta chain variable domain of TCR clone 235171 (TRBV20-1, TRBJ2-7)
CSARDRVSGMDEQYF

SEQ ID NO: 470343 - protein, 15 aa, Homo sapiens
  CDR3 for alpha chain variable domain of TCR clone 235172 (TRAV17, TRAJ57)
CATGPSQGGPEKLVF

SEQ ID NO: 470344 - protein, 14 aa, Homo sapiens
  CDR3 for beta chain variable domain of TCR clone 235172 (TRBV12-5, TRBJ2-5)
CASGSRTHQETKYF

SEQ ID NO: 470345 - protein, 13 aa, Homo sapiens
  CDR3 for alpha chain variable domain of TCR clone 235173 (TRAV8-3, TRAJ15)
CAVGIQAGTALIF

SEQ ID NO: 470346 - protein, 17 aa, Homo sapiens
  CDR3 for beta chain variable domain of TCR clone 235173 (TRBV20-1, TRBJ2-1)
CSARDPLAGVSYNEQVF

SEQ ID NO: 470347 - protein, 12 aa, Homo sapiens
  CDR3 for alpha chain variable domain of TCR clone 235174 (TRAV13-1, TRAJ42)
VNYGGSQGNLIF

SEQ ID NO: 470348 - protein, 12 aa, Homo sapiens
  CDR3 for beta chain variable domain of TCR clone 235174 (TRBV7-9, TRBJ1-5)
CASSSDQAPQYF

SEQ ID NO: 470349 - protein, 18 aa, Homo sapiens
  CDR3 for alpha chain variable domain of TCR clone 235175 (TRAV21, TRAJ52)
CAVRPSPAGGTSYGKLTF

SEQ ID NO: 470350 - protein, 15 aa, Homo sapiens
  CDR3 for beta chain variable domain of TCR clone 235175 (TRBV7-8, TRBJ1-2)
CASSLVRDGGLGYTF

SEQ ID NO: 470351 - protein, 13 aa, Homo sapiens
  CDR3 for alpha chain variable domain of TCR clone 235176 (TRAV20, TRAJ34)
CAVSSYNTDKLIF

SEQ ID NO: 470352 - protein, 13 aa, Homo sapiens
  CDR3 for beta chain variable domain of TCR clone 235176 (TRBV7-9, TRBJ1-2)
WASSLKQNYGYTF

SEQ ID NO: 470353 - protein, 14 aa, Homo sapiens
  CDR3 for alpha chain variable domain of TCR clone 235177 (TRAV1-2, TRAJ37)
CAVRSKSNTGKLIF

SEQ ID NO: 470354 - protein, 14 aa, Homo sapiens
  CDR3 for beta chain variable domain of TCR clone 235177 (TRBV6-3, TRBJ1-2)
CASSKGGGSYGYTF

SEQ ID NO: 470355 - protein, 15 aa, Homo sapiens
  CDR3 for alpha chain variable domain of TCR clone 235178 (TRAV8-3, TRAJ45)
CASSYSGGVADGLTF

SEQ ID NO: 470356 - protein, 15 aa, Homo sapiens
  CDR3 for beta chain variable domain of TCR clone 235178 (TRBV20-1, TRBJ2-7)
CSVRDRVSGMDEQYF

SEQ ID NO: 470357 - protein, 17 aa, Homo sapiens
  CDR3 for alpha chain variable domain of TCR clone 235179 (TRAV3, TRAJ42)
CAVRDRDYGGSQGTLIF

SEQ ID NO: 470358 - protein, 13 aa, Homo sapiens
  CDR3 for beta chain variable domain of TCR clone 235179 (TRBV10-3, TRBJ2-7)
CASKLAVNYEQYF

SEQ ID NO: 470359 - protein, 15 aa, Homo sapiens
  CDR3 for alpha chain variable domain of TCR clone 235180 (TRAV16, TRAJ10)
CALWELTGVGNKLTF

SEQ ID NO: 470360 - protein, 14 aa, Homo sapiens
  CDR3 for beta chain variable domain of TCR clone 235180 (TRBV5-5, TRBJ2-7)
CASSLGQGTYEQYF

SEQ ID NO: 470361 - protein, 12 aa, Homo sapiens
  CDR3 for alpha chain variable domain of TCR clone 235181 (TRAV12-3, TRAJ17)
CAMTLTGNNLTF

SEQ ID NO: 470362 - protein, 13 aa, Homo sapiens
  CDR3 for beta chain variable domain of TCR clone 235181 (TRBV7-3, TRBJ1-1)
CASSQDWGAEAFF

SEQ ID NO: 470363 - protein, 13 aa, Homo sapiens
  CDR3 for alpha chain variable domain of TCR clone 235182 (TRAV13-1, TRAJ9)
CAAGGTGGFKTIF

SEQ ID NO: 470364 - protein, 12 aa, Homo sapiens
  CDR3 for beta chain variable domain of TCR clone 235182 (TRBV2, TRBJ2-1)
CAYGPPGNEQFF

SEQ ID NO: 470365 - protein, 21 aa, Homo sapiens
  CDR3 for alpha chain variable domain of TCR clone 235183 (TRAV9-2, )
CALIQIGDIQNPDPAVYQLRD

SEQ ID NO: 470366 - protein, 13 aa, Homo sapiens
  CDR3 for beta chain variable domain of TCR clone 235183 (TRBV12-4, TRBJ2-1)
CASSSRAYNEQFF

SEQ ID NO: 470367 - protein, 13 aa, Homo sapiens
  CDR3 for alpha chain variable domain of TCR clone 235184 (TRAV21, TRAJ20)
CAVGLRVDYKISF

SEQ ID NO: 470368 - protein, 16 aa, Homo sapiens
  CDR3 for beta chain variable domain of TCR clone 235184 (TRBV19, TRBJ2-1)
CASSKAGPSSYNEQFF

SEQ ID NO: 470369 - protein, 16 aa, Homo sapiens
  CDR3 for alpha chain variable domain of TCR clone 235185 (TRAV30, TRAJ24)
CGTEIVDADSVVKFQF

SEQ ID NO: 470370 - protein, 15 aa, Homo sapiens
  CDR3 for beta chain variable domain of TCR clone 235185 (TRBV20-1, TRBJ2-6)
CSARDRGPGANVLTF

SEQ ID NO: 470371 - protein, 15 aa, Homo sapiens
  CDR3 for alpha chain variable domain of TCR clone 235186 (TRAV8-3, TRAJ13)
CAVAPRAGGYQKVTF

SEQ ID NO: 470372 - protein, 17 aa, Homo sapiens
  CDR3 for beta chain variable domain of TCR clone 235186 (TRBV20-1, TRBJ2-3)
CSARDEADLALTDTQYF

SEQ ID NO: 470373 - protein, 17 aa, Homo sapiens
  CDR3 for alpha chain variable domain of TCR clone 235187 (TRAV3, TRAJ6)
CALRDGPRAGGIYIPTF

SEQ ID NO: 470374 - protein, 13 aa, Homo sapiens
  CDR3 for beta chain variable domain of TCR clone 235187 (TRBV4-2, TRBJ1-1)
CASSQAGNTEAFF

SEQ ID NO: 470375 - protein, 17 aa, Homo sapiens
  CDR3 for alpha chain variable domain of TCR clone 235188 (TRAV4, TRAJ42)
CLVGVLNYGGSQGNLIF

SEQ ID NO: 470376 - protein, 14 aa, Homo sapiens
  CDR3 for beta chain variable domain of TCR clone 235188 (TRBV19, TRBJ2-7)
CASNFRDTFTGMYF

SEQ ID NO: 470377 - protein, 12 aa, Homo sapiens
  CDR3 for alpha chain variable domain of TCR clone 235189 (TRAV12-3, TRAJ17)
CAMTLTGNKLTF

SEQ ID NO: 470378 - protein, 13 aa, Homo sapiens
  CDR3 for beta chain variable domain of TCR clone 235189 (TRBV7-3, TRBJ1-1)
CASSQDWGAEAFY

SEQ ID NO: 470379 - protein, 14 aa, Homo sapiens
  CDR3 for alpha chain variable domain of TCR clone 235190 (TRAV12-2, TRAJ13)
WAVKKTGGYQKVTF

SEQ ID NO: 470380 - protein, 13 aa, Homo sapiens
  CDR3 for beta chain variable domain of TCR clone 235190 (TRBV7-9, TRBJ1-2)
CASSLKQNYGYTF

SEQ ID NO: 470381 - protein, 12 aa, Homo sapiens
  CDR3 for alpha chain variable domain of TCR clone 235191 (TRAV8-3, TRAJ26)
CAGYNYGQNFVF

SEQ ID NO: 470382 - protein, 13 aa, Homo sapiens
  CDR3 for beta chain variable domain of TCR clone 235191 (TRBV10-3, TRBJ2-7)
CASKLAVNYEQYF

SEQ ID NO: 470383 - protein, 16 aa, Homo sapiens
  CDR3 for alpha chain variable domain of TCR clone 235192 (TRAV12-2, TRAJ36)
CGTNNLFFGTGTRLTV

SEQ ID NO: 470384 - protein, 15 aa, Homo sapiens
  CDR3 for beta chain variable domain of TCR clone 235192 (TRBV9, TRBJ1-6)
CASSVAGTGDSPLHF

SEQ ID NO: 470385 - protein, 15 aa, Homo sapiens
  CDR3 for alpha chain variable domain of TCR clone 235193 (TRAV13-1, TRAJ44)
CPASRGGGTASKLTF

SEQ ID NO: 470386 - protein, 14 aa, Homo sapiens
  CDR3 for beta chain variable domain of TCR clone 235193 (TRBV7-2, TRBJ2-5)
CASSPRGSSETQYF

SEQ ID NO: 470387 - protein, 14 aa, Homo sapiens
  CDR3 for alpha chain variable domain of TCR clone 235194 (TRAV20, TRAJ29)
CALQAWVGNTPIVF

SEQ ID NO: 470388 - protein, 15 aa, Homo sapiens
  CDR3 for beta chain variable domain of TCR clone 235194 (TRBV29-1, TRBJ2-7)
CSVEFFDRGSYEQYF

SEQ ID NO: 470389 - protein, 13 aa, Homo sapiens
  CDR3 for alpha chain variable domain of TCR clone 235195 (TRAV8-3, TRAJ44)
CAVVPGTASKLTF

SEQ ID NO: 470390 - protein, 17 aa, Homo sapiens
  CDR3 for beta chain variable domain of TCR clone 235195 (TRBV7-3, TRBJ2-3)
CASSLMKRMRGADTQYF

SEQ ID NO: 470391 - protein, 14 aa, Homo sapiens
  CDR3 for alpha chain variable domain of TCR clone 235196 (TRAV3, TRAJ40)
CAVRDRRGTYKYTF

SEQ ID NO: 470392 - protein, 15 aa, Homo sapiens
  CDR3 for beta chain variable domain of TCR clone 235196 (TRBV28, TRBJ2-1)
CASSIIAGGRSEQFF

SEQ ID NO: 470393 - protein, 15 aa, Homo sapiens
  CDR3 for alpha chain variable domain of TCR clone 235197 (TRAV25, TRAJ53)
CAATGGGGSNYKLTF

SEQ ID NO: 470394 - protein, 13 aa, Homo sapiens
  CDR3 for beta chain variable domain of TCR clone 235197 (TRBV19, TRBJ1-2)
CASSVPGQDGYTF

SEQ ID NO: 470395 - protein, 13 aa, Homo sapiens
  CDR3 for alpha chain variable domain of TCR clone 235198 (TRAV2, TRAJ15)
CAVSSQAGTALIF

SEQ ID NO: 470396 - protein, 16 aa, Homo sapiens
  CDR3 for beta chain variable domain of TCR clone 235198 (TRBV20-1, TRBJ1-4)
CSAPGQGLLTNEKLFF

SEQ ID NO: 470397 - protein, 12 aa, Homo sapiens
  CDR3 for alpha chain variable domain of TCR clone 235199 (TRAV21, TRAJ9)
CAVRLGGFKTIF

SEQ ID NO: 470398 - protein, 17 aa, Homo sapiens
  CDR3 for beta chain variable domain of TCR clone 235199 (TRBV13, TRBJ2-3)
CASSLSRVAGGRNTQYF

SEQ ID NO: 470399 - protein, 15 aa, Homo sapiens
  CDR3 for alpha chain variable domain of TCR clone 235200 (TRAV14/DV4, TRAJ33)
CALREGRDSNYQLIW

SEQ ID NO: 470400 - protein, 15 aa, Homo sapiens
  CDR3 for beta chain variable domain of TCR clone 235200 (TRBV5-5, TRBJ1-5)
CASSSTPGSNQPQHF

SEQ ID NO: 470401 - protein, 14 aa, Homo sapiens
  CDR3 for alpha chain variable domain of TCR clone 235201 (TRAV16, TRAJ54)
CALSLIQGAQKLVF

SEQ ID NO: 470402 - protein, 13 aa, Homo sapiens
  CDR3 for beta chain variable domain of TCR clone 235201 (TRBV4-2, TRBJ1-1)
CASSQAGNTEAFF

SEQ ID NO: 470403 - protein, 17 aa, Homo sapiens
  CDR3 for alpha chain variable domain of TCR clone 235202 (TRAV23/DV6, TRAJ58)
CAARLLRGETSGSRLTF

SEQ ID NO: 470404 - protein, 13 aa, Homo sapiens
  CDR3 for beta chain variable domain of TCR clone 235202 (TRBV7-3, TRBJ1-2)
CASSLKRGYGYTF

SEQ ID NO: 470405 - protein, 12 aa, Homo sapiens
  CDR3 for alpha chain variable domain of TCR clone 235203 (TRAV17, TRAJ39)
CATGAAGNMLTF

SEQ ID NO: 470406 - protein, 14 aa, Homo sapiens
  CDR3 for beta chain variable domain of TCR clone 235203 (TRBV7-9, TRBJ1-2)
FASSRRGANYGYTF

SEQ ID NO: 470407 - protein, 14 aa, Homo sapiens
  CDR3 for alpha chain variable domain of TCR clone 235204 (TRAV20, TRAJ17)
CAVRREAAGNQLTF

SEQ ID NO: 470408 - protein, 13 aa, Homo sapiens
  CDR3 for beta chain variable domain of TCR clone 235204 (TRBV23-1, TRBJ2-1)
CASNRETYNEQFF

SEQ ID NO: 470409 - protein, 13 aa, Homo sapiens
  CDR3 for alpha chain variable domain of TCR clone 235205 (TRAV17, TRAJ21)
CATDRNNFNKFYF

SEQ ID NO: 470410 - protein, 12 aa, Homo sapiens
  CDR3 for beta chain variable domain of TCR clone 235205 (TRBV20-1, TRBJ1-1)
CSARGGNTEAFF

SEQ ID NO: 470411 - protein, 14 aa, Homo sapiens
  CDR3 for alpha chain variable domain of TCR clone 235206 (TRAV1-2, TRAJ16)
CAVNRFSDGQKLLF

SEQ ID NO: 470412 - protein, 16 aa, Homo sapiens
  CDR3 for beta chain variable domain of TCR clone 235206 (TRBV7-3, TRBJ1-2)
CASSLGAPVPNYGYTF

SEQ ID NO: 470413 - protein, 14 aa, Homo sapiens
  CDR3 for alpha chain variable domain of TCR clone 235207 (TRAV12-1, TRAJ33)
CVVNMPDSNYQLIW

SEQ ID NO: 470414 - protein, 12 aa, Homo sapiens
  CDR3 for beta chain variable domain of TCR clone 235207 (TRBV14, TRBJ1-1)
CASSQLKGLAFF

SEQ ID NO: 470415 - protein, 13 aa, Homo sapiens
  CDR3 for alpha chain variable domain of TCR clone 235208 (TRAV12-2, TRAJ29)
CAVMLSGNTPLVF

SEQ ID NO: 470416 - protein, 15 aa, Homo sapiens
  CDR3 for beta chain variable domain of TCR clone 235208 (TRBV20-1, TRBJ2-7)
CSARDRVSGMDEQYF

SEQ ID NO: 470417 - protein, 14 aa, Homo sapiens
  CDR3 for alpha chain variable domain of TCR clone 235209 (TRAV1-2, TRAJ16)
CAVNRFSDGQKLIF

SEQ ID NO: 470418 - protein, 16 aa, Homo sapiens
  CDR3 for beta chain variable domain of TCR clone 235209 (TRBV19, TRBJ2-1)
CASSKAGPSSYNEQFF

SEQ ID NO: 470419 - protein, 14 aa, Homo sapiens
  CDR3 for alpha chain variable domain of TCR clone 235210 (TRAV17, TRAJ34)
CATDSLEGTDKLIF

SEQ ID NO: 470420 - protein, 17 aa, Homo sapiens
  CDR3 for beta chain variable domain of TCR clone 235210 (TRBV7-3, TRBJ2-3)
CASSLMKRMRGADTQYF

SEQ ID NO: 470421 - protein, 12 aa, Homo sapiens
  CDR3 for alpha chain variable domain of TCR clone 235211 (TRAV16, TRAJ36)
CALKTGANNLFF

SEQ ID NO: 470422 - protein, 13 aa, Homo sapiens
  CDR3 for beta chain variable domain of TCR clone 235211 (TRBV6-1, TRBJ1-1)
CASSWTVDTEAFF

SEQ ID NO: 470423 - protein, 18 aa, Homo sapiens
  CDR3 for alpha chain variable domain of TCR clone 235212 (TRAV12-3, TRAJ52)
CAMSVGGAGGTRYGKLKF

SEQ ID NO: 470424 - protein, 17 aa, Homo sapiens
  CDR3 for beta chain variable domain of TCR clone 235212 (TRBV13, TRBJ2-3)
CASSLSRVAGGRNTQYF

SEQ ID NO: 470425 - protein, 16 aa, Homo sapiens
  CDR3 for alpha chain variable domain of TCR clone 235213 (TRAV1-2, TRAJ10)
CAVRGVLTGGGNKLTF

SEQ ID NO: 470426 - protein, 11 aa, Homo sapiens
  CDR3 for beta chain variable domain of TCR clone 235213 (TRBV11-2, TRBJ1-1)
CASSINTEAVF

SEQ ID NO: 470427 - protein, 17 aa, Homo sapiens
  CDR3 for alpha chain variable domain of TCR clone 235214 (TRAV3, TRAJ6)
CAVRDGPRAGGNYIPTF

SEQ ID NO: 470428 - protein, 14 aa, Homo sapiens
  CDR3 for beta chain variable domain of TCR clone 235214 (TRBV7-2, TRBJ2-7)
CASSPKTSFYEQFF

SEQ ID NO: 470429 - protein, 15 aa, Homo sapiens
  CDR3 for alpha chain variable domain of TCR clone 235215 (TRAV4, TRAJ39)
CLVGPNNNACNMLTF

SEQ ID NO: 470430 - protein, 14 aa, Homo sapiens
  CDR3 for beta chain variable domain of TCR clone 235215 (TRBV11-2, TRBJ2-5)
CASSRTGGIETQYF

SEQ ID NO: 470431 - protein, 13 aa, Homo sapiens
  CDR3 for alpha chain variable domain of TCR clone 235216 (TRAV25, TRAJ54)
CAGTIQGAQKLVF

SEQ ID NO: 470432 - protein, 15 aa, Homo sapiens
  CDR3 for beta chain variable domain of TCR clone 235216 (TRBV19, TRBJ1-5)
CASSILTGEHQPQHF

SEQ ID NO: 470433 - protein, 14 aa, Homo sapiens
  CDR3 for alpha chain variable domain of TCR clone 235217 (TRAV2, TRAJ17)
CAVVGKAAGNKLTF

SEQ ID NO: 470434 - protein, 14 aa, Homo sapiens
  CDR3 for beta chain variable domain of TCR clone 235217 (TRBV12-5, TRBJ2-5)
CASGSRTHQETQYF

SEQ ID NO: 470435 - protein, 12 aa, Homo sapiens
  CDR3 for alpha chain variable domain of TCR clone 235218 (TRAV21, TRAJ11)
CAVRGGNSTLTF

SEQ ID NO: 470436 - protein, 15 aa, Homo sapiens
  CDR3 for beta chain variable domain of TCR clone 235218 (TRBV2, TRBJ2-7)
CASSEGLARSYEQYF

SEQ ID NO: 470437 - protein, 15 aa, Homo sapiens
  CDR3 for alpha chain variable domain of TCR clone 235219 (TRAV12-2, TRAJ53)
CAVNGGGGSNYKRTF

SEQ ID NO: 470438 - protein, 17 aa, Homo sapiens
  CDR3 for beta chain variable domain of TCR clone 235219 (TRBV7-3, TRBJ2-3)
CASSLMKRMRGADTRYF

SEQ ID NO: 470439 - protein, 14 aa, Homo sapiens
  CDR3 for alpha chain variable domain of TCR clone 235220 (TRAV4, TRAJ12)
CLVGYMDSSYNLIF

SEQ ID NO: 470440 - protein, 14 aa, Homo sapiens
  CDR3 for beta chain variable domain of TCR clone 235220 (TRBV27, TRBJ1-1)
CASSPGGGATEAFF

SEQ ID NO: 470441 - protein, 17 aa, Homo sapiens
  CDR3 for alpha chain variable domain of TCR clone 235221 (TRAV4, TRAJ13)
CPVGVQGSSGGYQKVTF

SEQ ID NO: 470442 - protein, 14 aa, Homo sapiens
  CDR3 for beta chain variable domain of TCR clone 235221 (TRBV25-1, TRBJ1-1)
CASTHLGGNTEAFF

SEQ ID NO: 470443 - protein, 11 aa, Homo sapiens
  CDR3 for alpha chain variable domain of TCR clone 235222 (TRAV21, TRAJ11)
CAVNGYSTLTF

SEQ ID NO: 470444 - protein, 20 aa, Homo sapiens
  CDR3 for beta chain variable domain of TCR clone 235222 (TRBV3-1, TRBJ2-6)
CASSPRPGLEGGAGANVLTF

SEQ ID NO: 470445 - protein, 12 aa, Homo sapiens
  CDR3 for alpha chain variable domain of TCR clone 235223 (TRAV23/DV6, TRAJ53)
CAASKLGSGGSN

SEQ ID NO: 470446 - protein, 15 aa, Homo sapiens
  CDR3 for beta chain variable domain of TCR clone 235223 (TRBV6-1, TRBJ2-1)
CASSEAAYSYNEQFF

SEQ ID NO: 470447 - protein, 15 aa, Homo sapiens
  CDR3 for alpha chain variable domain of TCR clone 235224 (TRAV17, TRAJ22)
CATVAPSGSARQLTF

SEQ ID NO: 470448 - protein, 14 aa, Homo sapiens
  CDR3 for beta chain variable domain of TCR clone 235224 (TRBV20-1, TRBJ1-5)
CSARDGGSGQPRHF

SEQ ID NO: 470449 - protein, 15 aa, Homo sapiens
  CDR3 for alpha chain variable domain of TCR clone 235225 (TRAV23/DV6, TRAJ45)
CAASSAGGGADGITF

SEQ ID NO: 470450 - protein, 15 aa, Homo sapiens
  CDR3 for beta chain variable domain of TCR clone 235225 (TRBV7-9, TRBJ1-5)
CASSQGHQPNQPQHF

SEQ ID NO: 470451 - protein, 14 aa, Homo sapiens
  CDR3 for alpha chain variable domain of TCR clone 235226 (TRAV20, TRAJ47)
CAVTFGEYGNKLVF

SEQ ID NO: 470452 - protein, 13 aa, Homo sapiens
  CDR3 for beta chain variable domain of TCR clone 235226 (TRBV11-3, TRBJ1-1)
CASTGSLNTEAFF

SEQ ID NO: 470453 - protein, 13 aa, Homo sapiens
  CDR3 for alpha chain variable domain of TCR clone 235227 (TRAV2, TRAJ29)
CSAGGPGNTPLVF

SEQ ID NO: 470454 - protein, 13 aa, Homo sapiens
  CDR3 for beta chain variable domain of TCR clone 235227 (TRBV14, TRBJ1-2)
CASSEDRRYGYTF

SEQ ID NO: 470455 - protein, 12 aa, Homo sapiens
  CDR3 for alpha chain variable domain of TCR clone 235228 (TRAV16, TRAJ29)
FALSLGNTPLVF

SEQ ID NO: 470456 - protein, 14 aa, Homo sapiens
  CDR3 for beta chain variable domain of TCR clone 235228 (TRBV7-2, TRBJ2-1)
CASSLAGSWYEQFF

SEQ ID NO: 470457 - protein, 11 aa, Homo sapiens
  CDR3 for alpha chain variable domain of TCR clone 235229 (TRAV21, TRAJ34)
CAVTNTDKLIF

SEQ ID NO: 470458 - protein, 14 aa, Homo sapiens
  CDR3 for beta chain variable domain of TCR clone 235229 (TRBV7-2, TRBJ2-5)
CASSLSGGGETQYF

SEQ ID NO: 470459 - protein, 13 aa, Homo sapiens
  CDR3 for alpha chain variable domain of TCR clone 235230 (TRAV8-6, TRAJ49)
CAVSGQTGNQFYF

SEQ ID NO: 470460 - protein, 13 aa, Homo sapiens
  CDR3 for beta chain variable domain of TCR clone 235230 (TRBV7-2, TRBJ2-2)
CASSLAVTGELFF

SEQ ID NO: 470461 - protein, 14 aa, Homo sapiens
  CDR3 for alpha chain variable domain of TCR clone 235231 (TRAV12-3, TRAJ10)
SHLPLTGGGNKLTF

SEQ ID NO: 470462 - protein, 14 aa, Homo sapiens
  CDR3 for beta chain variable domain of TCR clone 235231 (TRBV2, TRBJ2-3)
CASSEGQNTDTQYF

SEQ ID NO: 470463 - protein, 15 aa, Homo sapiens
  CDR3 for alpha chain variable domain of TCR clone 235232 (TRAV14/DV4, TRAJ47)
CALREAMEYGNKLVF

SEQ ID NO: 470464 - protein, 15 aa, Homo sapiens
  CDR3 for beta chain variable domain of TCR clone 235232 (TRBV7-2, TRBJ1-5)
CASSSGQGHAQPQHF

SEQ ID NO: 470465 - protein, 17 aa, Homo sapiens
  CDR3 for alpha chain variable domain of TCR clone 235233 (TRAV36/DV7, TRAJ52)
CAVAQRAGGTSYGKLTF

SEQ ID NO: 470466 - protein, 14 aa, Homo sapiens
  CDR3 for beta chain variable domain of TCR clone 235233 (TRBV20-1, TRBJ2-7)
CSAKDRKGAYEQYF

SEQ ID NO: 470467 - protein, 17 aa, Homo sapiens
  CDR3 for alpha chain variable domain of TCR clone 235234 (TRAV38-1, TRAJ45)
CAFMRSHSGVGAYGLTF

SEQ ID NO: 470468 - protein, 15 aa, Homo sapiens
  CDR3 for beta chain variable domain of TCR clone 235234 (TRBV7-2, TRBJ2-3)
CASSLVVRGPDTQYF

SEQ ID NO: 470469 - protein, 17 aa, Homo sapiens
  CDR3 for alpha chain variable domain of TCR clone 235235 (TRAV3, TRAJ6)
CAVRDGPRAGGSYIPTF

SEQ ID NO: 470470 - protein, 12 aa, Homo sapiens
  CDR3 for beta chain variable domain of TCR clone 235235 (TRBV11-2, TRBJ2-2)
CASSLGGGEMFF

SEQ ID NO: 470471 - protein, 15 aa, Homo sapiens
  CDR3 for alpha chain variable domain of TCR clone 235236 (TRAV26-1, TRAJ29)
CIVRVEGSGNIPLVF

SEQ ID NO: 470472 - protein, 15 aa, Homo sapiens
  CDR3 for beta chain variable domain of TCR clone 235236 (TRBV7-9, TRBJ1-5)
CAGSQGHQPNQPQHF

SEQ ID NO: 470473 - protein, 14 aa, Homo sapiens
  CDR3 for alpha chain variable domain of TCR clone 235237 (TRAV14/DV4, TRAJ15)
CAMRRDQAGTALIF

SEQ ID NO: 470474 - protein, 16 aa, Homo sapiens
  CDR3 for beta chain variable domain of TCR clone 235237 (TRBV15, TRBJ2-3)
CATSRALGIVTDTQYF

SEQ ID NO: 470475 - protein, 17 aa, Homo sapiens
  CDR3 for alpha chain variable domain of TCR clone 235238 (TRAV3, TRAJ6)
CAVRYGPRAGGSYIPTF

SEQ ID NO: 470476 - protein, 13 aa, Homo sapiens
  CDR3 for beta chain variable domain of TCR clone 235238 (TRBV29-1, TRBJ1-1)
CSVGDSRNTEAFF

SEQ ID NO: 470477 - protein, 14 aa, Homo sapiens
  CDR3 for alpha chain variable domain of TCR clone 235239 (TRAV12-3, TRAJ29)
CAMSPYSGNTPLVF

SEQ ID NO: 470478 - protein, 15 aa, Homo sapiens
  CDR3 for beta chain variable domain of TCR clone 235239 (TRBV2, TRBJ2-5)
CASRIAGVGGETQYF

SEQ ID NO: 470479 - protein, 15 aa, Homo sapiens
  CDR3 for alpha chain variable domain of TCR clone 235240 (TRAV8-3, TRAJ40)
CAVGPYTSGTYKYIF

SEQ ID NO: 470480 - protein, 16 aa, Homo sapiens
  CDR3 for beta chain variable domain of TCR clone 235240 (TRBV7-2, TRBJ2-7)
CASSLDPVGGSGEQYF

SEQ ID NO: 470481 - protein, 18 aa, Homo sapiens
  CDR3 for alpha chain variable domain of TCR clone 235241 (TRAV12-3, TRAJ52)
CAMSGGGAGGTSYGKLTL

SEQ ID NO: 470482 - protein, 15 aa, Homo sapiens
  CDR3 for beta chain variable domain of TCR clone 235241 (TRBV27, TRBJ1-6)
CASSFDRGLGSPLHF

SEQ ID NO: 470483 - protein, 12 aa, Homo sapiens
  CDR3 for alpha chain variable domain of TCR clone 235242 (TRAV3, TRAJ43)
CAVRDPTMTCAL

SEQ ID NO: 470484 - protein, 12 aa, Homo sapiens
  CDR3 for beta chain variable domain of TCR clone 235242 (TRBV12-4, TRBJ2-7)
CASSLGGYEQYF

SEQ ID NO: 470485 - protein, 14 aa, Homo sapiens
  CDR3 for alpha chain variable domain of TCR clone 235243 (TRAV12-3, TRAJ10)
SHLPLTGGGNKLTF

SEQ ID NO: 470486 - protein, 12 aa, Homo sapiens
  CDR3 for beta chain variable domain of TCR clone 235243 (TRBV29-1, TRBJ1-5)
CSVGQLGQPQHF

SEQ ID NO: 470487 - protein, 15 aa, Homo sapiens
  CDR3 for alpha chain variable domain of TCR clone 235244 (TRAV3, TRAJ5)
CAVRDLAPGRRALTF

SEQ ID NO: 470488 - protein, 13 aa, Homo sapiens
  CDR3 for beta chain variable domain of TCR clone 235244 (TRBV12-4, TRBJ2-7)
CASSPTETYEQYF

SEQ ID NO: 470489 - protein, 20 aa, Homo sapiens
  CDR3 for alpha chain variable domain of TCR clone 235245 (TRAV26-1, TRAJ42)
CCVLLHRQTYYGGSQGNLIF

SEQ ID NO: 470490 - protein, 16 aa, Homo sapiens
  CDR3 for beta chain variable domain of TCR clone 235245 (TRBV4-2, TRBJ2-7)
CASSQDTSGGPSEQYF

SEQ ID NO: 470491 - protein, 14 aa, Homo sapiens
  CDR3 for alpha chain variable domain of TCR clone 235246 (TRAV1-2, TRAJ16)
CAVNRFSDGQKLLF

SEQ ID NO: 470492 - protein, 14 aa, Homo sapiens
  CDR3 for beta chain variable domain of TCR clone 235246 (TRBV4-1, TRBJ2-2)
CDSSQAVNTGELFF

SEQ ID NO: 470493 - protein, 12 aa, Homo sapiens
  CDR3 for alpha chain variable domain of TCR clone 235247 (TRAV13-1, TRAJ5)
CAAKAGRRALTF

SEQ ID NO: 470494 - protein, 13 aa, Homo sapiens
  CDR3 for beta chain variable domain of TCR clone 235247 (TRBV10-2, TRBJ2-7)
CASGASGGYEQYF

SEQ ID NO: 470495 - protein, 15 aa, Homo sapiens
  CDR3 for alpha chain variable domain of TCR clone 235248 (TRAV12-1, TRAJ44)
CVVDTPQGTASKLTF

SEQ ID NO: 470496 - protein, 17 aa, Homo sapiens
  CDR3 for beta chain variable domain of TCR clone 235248 (TRBV28, TRBJ2-5)
CASSRQGGLAGAETQYF

SEQ ID NO: 470497 - protein, 18 aa, Homo sapiens
  CDR3 for alpha chain variable domain of TCR clone 235249 (TRAV26-2, TRAJ54)
CILRDVEVGIQGAQKLVF

SEQ ID NO: 470498 - protein, 17 aa, Homo sapiens
  CDR3 for beta chain variable domain of TCR clone 235249 (TRBV20-1, TRBJ1-5)
CSASLSPGQGGNQPQHL

SEQ ID NO: 470499 - protein, 14 aa, Homo sapiens
  CDR3 for alpha chain variable domain of TCR clone 235250 (TRAV26-1, TRAJ38)
CIADNAGNNRKLIW

SEQ ID NO: 470500 - protein, 17 aa, Homo sapiens
  CDR3 for beta chain variable domain of TCR clone 235250 (TRBV15, TRBJ1-1)
CAASRVGGADGDTEAFF

SEQ ID NO: 470501 - protein, 15 aa, Homo sapiens
  CDR3 for alpha chain variable domain of TCR clone 235251 (TRAV2, TRAJ42)
CAVEGYGGSQGNLIF

SEQ ID NO: 470502 - protein, 16 aa, Homo sapiens
  CDR3 for beta chain variable domain of TCR clone 235251 (TRBV19, TRBJ2-1)
CASSMGGGSSYNEQFF

SEQ ID NO: 470503 - protein, 13 aa, Homo sapiens
  CDR3 for alpha chain variable domain of TCR clone 235252 (TRAV26-1, TRAJ48)
CIVRVVGDEKLTF

SEQ ID NO: 470504 - protein, 19 aa, Homo sapiens
  CDR3 for beta chain variable domain of TCR clone 235252 (TRBV11-3, TRBJ2-2)
WASSTRPGAKTTNTGELFF

SEQ ID NO: 470505 - protein, 14 aa, Homo sapiens
  CDR3 for alpha chain variable domain of TCR clone 235253 (TRAV17, TRAJ22)
CATSPSGSARQLTF

SEQ ID NO: 470506 - protein, 15 aa, Homo sapiens
  CDR3 for beta chain variable domain of TCR clone 235253 (TRBV19, TRBJ2-2)
CASSLNRGVTGELFF

SEQ ID NO: 470507 - protein, 14 aa, Homo sapiens
  CDR3 for alpha chain variable domain of TCR clone 235254 (TRAV8-4, TRAJ9)
CAVRLNTGGCKTIF

SEQ ID NO: 470508 - protein, 15 aa, Homo sapiens
  CDR3 for beta chain variable domain of TCR clone 235254 (TRBV10-2, TRBJ2-6)
CASSEQGTGANVLTF

SEQ ID NO: 470509 - protein, 12 aa, Homo sapiens
  CDR3 for alpha chain variable domain of TCR clone 235255 (TRAV21, TRAJ23)
CAVMLQGGKLIF

SEQ ID NO: 470510 - protein, 14 aa, Homo sapiens
  CDR3 for beta chain variable domain of TCR clone 235255 (TRBV7-9, TRBJ1-4)
CAITEGDANEKLFF

SEQ ID NO: 470511 - protein, 15 aa, Homo sapiens
  CDR3 for alpha chain variable domain of TCR clone 235256 (TRAV3, TRAJ4)
CAVRDGPGGYNKLIL

SEQ ID NO: 470512 - protein, 16 aa, Homo sapiens
  CDR3 for beta chain variable domain of TCR clone 235256 (TRBV27, TRBJ2-2)
CASSSSGVSNTGELFF

SEQ ID NO: 470513 - protein, 16 aa, Homo sapiens
  CDR3 for alpha chain variable domain of TCR clone 235257 (TRAV26-1, TRAJ23)
CIVRPHGNNQGGKLIF

SEQ ID NO: 470514 - protein, 14 aa, Homo sapiens
  CDR3 for beta chain variable domain of TCR clone 235257 (TRBV19, TRBJ2-1)
CASPAFVLSGEQFF

SEQ ID NO: 470515 - protein, 13 aa, Homo sapiens
  CDR3 for alpha chain variable domain of TCR clone 235258 (TRAV20, TRAJ21)
CAVEGDNFNKFYF

SEQ ID NO: 470516 - protein, 14 aa, Homo sapiens
  CDR3 for beta chain variable domain of TCR clone 235258 (TRBV7-3, TRBJ1-1)
CASSRQGGDTEAFF

SEQ ID NO: 470517 - protein, 13 aa, Homo sapiens
  CDR3 for alpha chain variable domain of TCR clone 235259 (TRAV8-6, TRAJ24)
CAVSSDSWGKLQF

SEQ ID NO: 470518 - protein, 14 aa, Homo sapiens
  CDR3 for beta chain variable domain of TCR clone 235259 (TRBV7-2, TRBJ2-7)
CASSPKTSFYEQYF

SEQ ID NO: 470519 - protein, 11 aa, Homo sapiens
  CDR3 for alpha chain variable domain of TCR clone 235260 (TRAV6, TRAJ41)
CALNSGYALNF

SEQ ID NO: 470520 - protein, 16 aa, Homo sapiens
  CDR3 for beta chain variable domain of TCR clone 235260 (TRBV15, TRBJ2-1)
CATSRERLAGAYEQFF

SEQ ID NO: 470521 - protein, 12 aa, Homo sapiens
  CDR3 for alpha chain variable domain of TCR clone 235261 (TRAV12-3, TRAJ17)
CAMTLTGNKLTF

SEQ ID NO: 470522 - protein, 15 aa, Homo sapiens
  CDR3 for beta chain variable domain of TCR clone 235261 (TRBV10-3, TRBJ2-1)
CAIRNGTSGHNEQLF

SEQ ID NO: 470523 - protein, 13 aa, Homo sapiens
  CDR3 for alpha chain variable domain of TCR clone 235262 (TRAV21, TRAJ27)
CAARPGNAGKSTF

SEQ ID NO: 470524 - protein, 13 aa, Homo sapiens
  CDR3 for beta chain variable domain of TCR clone 235262 (TRBV18, TRBJ2-7)
CASQTGGGYEQYF

SEQ ID NO: 470525 - protein, 14 aa, Homo sapiens
  CDR3 for alpha chain variable domain of TCR clone 235263 (TRAV23/DV6, TRAJ40)
CSARKNSGTYKYIF

SEQ ID NO: 470526 - protein, 14 aa, Homo sapiens
  CDR3 for beta chain variable domain of TCR clone 235263 (TRBV10-3, TRBJ2-5)
CAISERDYQETQYF

SEQ ID NO: 470527 - protein, 16 aa, Homo sapiens
  CDR3 for alpha chain variable domain of TCR clone 235264 (TRAV12-1, TRAJ12)
CVVNTLLMDSSYKLIF

SEQ ID NO: 470528 - protein, 13 aa, Homo sapiens
  CDR3 for beta chain variable domain of TCR clone 235264 (TRBV11-2, TRBJ2-1)
CASSPEAYNEQFF

SEQ ID NO: 470529 - protein, 11 aa, Homo sapiens
  CDR3 for alpha chain variable domain of TCR clone 235265 (TRAV2, TRAJ13)
CASGGYQKVTF

SEQ ID NO: 470530 - protein, 12 aa, Homo sapiens
  CDR3 for beta chain variable domain of TCR clone 235265 (TRBV6-3, TRBJ1-5)
CASGQGVQPQHF

SEQ ID NO: 470531 - protein, 17 aa, Homo sapiens
  CDR3 for alpha chain variable domain of TCR clone 235266 (TRAV27, TRAJ52)
CAGAGWAGGTSYGKLTF

SEQ ID NO: 470532 - protein, 16 aa, Homo sapiens
  CDR3 for beta chain variable domain of TCR clone 235266 (TRBV19, TRBJ2-1)
CASSEAGPSSYNEQFF

SEQ ID NO: 470533 - protein, 12 aa, Homo sapiens
  CDR3 for alpha chain variable domain of TCR clone 235267 (TRAV12-3, TRAJ17)
CAMTLTGNKLTF

SEQ ID NO: 470534 - protein, 13 aa, Homo sapiens
  CDR3 for beta chain variable domain of TCR clone 235267 (TRBV2, TRBJ2-2)
CASRAWRTGELFF

SEQ ID NO: 470535 - protein, 14 aa, Homo sapiens
  CDR3 for alpha chain variable domain of TCR clone 235268 (TRAV13-1, TRAJ35)
CAASNGSCGNVLTC

SEQ ID NO: 470536 - protein, 13 aa, Homo sapiens
  CDR3 for beta chain variable domain of TCR clone 235268 (TRBV7-3, TRBJ1-1)
CASSQDWGAEAFF

SEQ ID NO: 470537 - protein, 15 aa, Homo sapiens
  CDR3 for alpha chain variable domain of TCR clone 235269 (TRAV26-1, TRAJ44)
CIVRIGTGTASKLTF

SEQ ID NO: 470538 - protein, 15 aa, Homo sapiens
  CDR3 for beta chain variable domain of TCR clone 235269 (TRBV7-6, TRBJ2-1)
CASSSLAGEENEQFF

SEQ ID NO: 470539 - protein, 12 aa, Homo sapiens
  CDR3 for alpha chain variable domain of TCR clone 235270 (TRAV27, TRAJ33)
CAGDGSNYQLIW

SEQ ID NO: 470540 - protein, 17 aa, Homo sapiens
  CDR3 for beta chain variable domain of TCR clone 235270 (TRBV6-5, TRBJ2-7)
CTSVPAVTRLANYEQYF

SEQ ID NO: 470541 - protein, 14 aa, Homo sapiens
  CDR3 for alpha chain variable domain of TCR clone 235271 (TRAV8-1, TRAJ34)
CAVNQSYNTDKLIF

SEQ ID NO: 470542 - protein, 17 aa, Homo sapiens
  CDR3 for beta chain variable domain of TCR clone 235271 (TRBV7-2, TRBJ2-2)
CASSLAGRSGATGELFF

SEQ ID NO: 470543 - protein, 15 aa, Homo sapiens
  CDR3 for alpha chain variable domain of TCR clone 235272 (TRAV3, TRAJ22)
CAVRDRGGPARQLTF

SEQ ID NO: 470544 - protein, 14 aa, Homo sapiens
  CDR3 for beta chain variable domain of TCR clone 235272 (TRBV19, TRBJ2-1)
CASSRLASINEQFF

SEQ ID NO: 470545 - protein, 19 aa, Homo sapiens
  CDR3 for alpha chain variable domain of TCR clone 235273 (TRAV38-1, TRAJ53)
CAFMKHGLESGGSNYKLTF

SEQ ID NO: 470546 - protein, 13 aa, Homo sapiens
  CDR3 for beta chain variable domain of TCR clone 235273 (TRBV20-1, TRBJ1-2)
CSASTERIYGYTF

SEQ ID NO: 470547 - protein, 15 aa, Homo sapiens
  CDR3 for alpha chain variable domain of TCR clone 235274 (TRAV12-1, TRAJ53)
CVVNRSGGSNYKLTF

SEQ ID NO: 470548 - protein, 15 aa, Homo sapiens
  CDR3 for beta chain variable domain of TCR clone 235274 (TRBV20-1, TRBJ2-7)
CSARDRVSGMDEQYF

SEQ ID NO: 470549 - protein, 14 aa, Homo sapiens
  CDR3 for alpha chain variable domain of TCR clone 235275 (TRAV1-2, TRAJ8)
CAVREDTGFQKLVF

SEQ ID NO: 470550 - protein, 15 aa, Homo sapiens
  CDR3 for beta chain variable domain of TCR clone 235275 (TRBV5-7, TRBJ2-3)
CASSPGLANTDTQYF

SEQ ID NO: 470551 - protein, 14 aa, Homo sapiens
  CDR3 for alpha chain variable domain of TCR clone 235276 (TRAV13-1, TRAJ52)
CAAAGGTSYGKLTF

SEQ ID NO: 470552 - protein, 17 aa, Homo sapiens
  CDR3 for beta chain variable domain of TCR clone 235276 (TRBV19, TRBJ1-1)
CASSKSGTGGPYTEAFI

SEQ ID NO: 470553 - protein, 14 aa, Homo sapiens
  CDR3 for alpha chain variable domain of TCR clone 235277 (TRAV26-1, TRAJ26)
CIVRATVLGQNFVF

SEQ ID NO: 470554 - protein, 16 aa, Homo sapiens
  CDR3 for beta chain variable domain of TCR clone 235277 (TRBV12-4, TRBJ2-7)
CASRSTGTGPSYEQYF

SEQ ID NO: 470555 - protein, 13 aa, Homo sapiens
  CDR3 for alpha chain variable domain of TCR clone 235278 (TRAV8-1, TRAJ34)
CAVNGKGTDKLIF

SEQ ID NO: 470556 - protein, 15 aa, Homo sapiens
  CDR3 for beta chain variable domain of TCR clone 235278 (TRBV28, TRBJ2-1)
CASSIIAGGRSEQFF

SEQ ID NO: 470557 - protein, 18 aa, Homo sapiens
  CDR3 for alpha chain variable domain of TCR clone 235279 (TRAV26-2, TRAJ45)
CIPRLWGYSGGGADGLTF

SEQ ID NO: 470558 - protein, 17 aa, Homo sapiens
  CDR3 for beta chain variable domain of TCR clone 235279 (TRBV28, TRBJ2-3)
CASSPTPAGGRVDTQYF

SEQ ID NO: 470559 - protein, 12 aa, Homo sapiens
  CDR3 for alpha chain variable domain of TCR clone 235280 (TRAV17, TRAJ12)
CASLRSSYKLIF

SEQ ID NO: 470560 - protein, 16 aa, Homo sapiens
  CDR3 for beta chain variable domain of TCR clone 235280 (TRBV28, TRBJ2-7)
CASSLFFETGGPEQYF

SEQ ID NO: 470561 - protein, 12 aa, Homo sapiens
  CDR3 for alpha chain variable domain of TCR clone 235281 (TRAV21, TRAJ58)
CAAETSGPRFTF

SEQ ID NO: 470562 - protein, 15 aa, Homo sapiens
  CDR3 for beta chain variable domain of TCR clone 235281 (TRBV20-1, TRBJ2-7)
CSARDPVKGEGEQYF

SEQ ID NO: 470563 - protein, 13 aa, Homo sapiens
  CDR3 for alpha chain variable domain of TCR clone 235282 (TRAV1-1, TRAJ13)
CAVNSGCYQKVTF

SEQ ID NO: 470564 - protein, 12 aa, Homo sapiens
  CDR3 for beta chain variable domain of TCR clone 235282 (TRBV28, TRBJ2-1)
CASSVQINEQFF

SEQ ID NO: 470565 - protein, 13 aa, Homo sapiens
  CDR3 for alpha chain variable domain of TCR clone 235283 (TRAV27, TRAJ45)
CRSSGGGADGLTF

SEQ ID NO: 470566 - protein, 18 aa, Homo sapiens
  CDR3 for beta chain variable domain of TCR clone 235283 (TRBV12-4, TRBJ2-2)
CASSLVAGTRGRTGELFF

SEQ ID NO: 470567 - protein, 12 aa, Homo sapiens
  CDR3 for alpha chain variable domain of TCR clone 235284 (TRAV21, TRAJ33)
CAKMDSNYQLIW

SEQ ID NO: 470568 - protein, 18 aa, Homo sapiens
  CDR3 for beta chain variable domain of TCR clone 235284 (TRBV20-1, TRBJ2-3)
CSASGLAGGPGTTDTQYF

SEQ ID NO: 470569 - protein, 14 aa, Homo sapiens
  CDR3 for alpha chain variable domain of TCR clone 235285 (TRAV13-2, TRAJ17)
CAENSKAAGNKLTF

SEQ ID NO: 470570 - protein, 11 aa, Homo sapiens
  CDR3 for beta chain variable domain of TCR clone 235285 (TRBV6-3, TRBJ2-3)
CATGQADTQYY

SEQ ID NO: 470571 - protein, 12 aa, Homo sapiens
  CDR3 for alpha chain variable domain of TCR clone 235286 (TRAV8-4, TRAJ43)
CAVSGNNNDMRF

SEQ ID NO: 470572 - protein, 16 aa, Homo sapiens
  CDR3 for beta chain variable domain of TCR clone 235286 (TRBV7-2, TRBJ2-6)
CASSLAGRSGANVLTF

SEQ ID NO: 470573 - protein, 10 aa, Homo sapiens
  CDR3 for alpha chain variable domain of TCR clone 235287 (TRAV24, TRAJ23)
FAFLGGKLIF

SEQ ID NO: 470574 - protein, 15 aa, Homo sapiens
  CDR3 for beta chain variable domain of TCR clone 235287 (TRBV7-2, TRBJ2-1)
CASSLVAGRYNEQFF

SEQ ID NO: 470575 - protein, 16 aa, Homo sapiens
  CDR3 for alpha chain variable domain of TCR clone 235288 (TRAV12-3, TRAJ10)
CAMKKGITGGGNKLTF

SEQ ID NO: 470576 - protein, 12 aa, Homo sapiens
  CDR3 for beta chain variable domain of TCR clone 235288 (TRBV20-1, TRBJ2-7)
CSAITPTKEQYS

SEQ ID NO: 470577 - protein, 17 aa, Homo sapiens
  CDR3 for alpha chain variable domain of TCR clone 235289 (TRAV3, TRAJ6)
CAVRDGPRAGGSYIPTF

SEQ ID NO: 470578 - protein, 16 aa, Homo sapiens
  CDR3 for beta chain variable domain of TCR clone 235289 (TRBV7-3, TRBJ2-1)
CASSLVSGSSNNEQFF

SEQ ID NO: 470579 - protein, 16 aa, Homo sapiens
  CDR3 for alpha chain variable domain of TCR clone 235290 (TRAV8-3, TRAJ18)
CAVGGRQRLNPGEVIL

SEQ ID NO: 470580 - protein, 12 aa, Homo sapiens
  CDR3 for beta chain variable domain of TCR clone 235290 (TRBV28, TRBJ2-6)
CAIQAGANVLTF

SEQ ID NO: 470581 - protein, 12 aa, Homo sapiens
  CDR3 for alpha chain variable domain of TCR clone 235291 (TRAV12-1, TRAJ21)
CAVRYNFNKFYF

SEQ ID NO: 470582 - protein, 14 aa, Homo sapiens
  CDR3 for beta chain variable domain of TCR clone 235291 (TRBV28, TRBJ2-1)
CASSYYTPYNEQFF

SEQ ID NO: 470583 - protein, 16 aa, Homo sapiens
  CDR3 for alpha chain variable domain of TCR clone 235292 (TRAV14/DV4, TRAJ12)
CAMREVVMDSSDKLIF

SEQ ID NO: 470584 - protein, 14 aa, Homo sapiens
  CDR3 for beta chain variable domain of TCR clone 235292 (TRBV7-2, TRBJ2-5)
CASSFTQGQETQYF

SEQ ID NO: 470585 - protein, 15 aa, Homo sapiens
  CDR3 for alpha chain variable domain of TCR clone 235293 (TRAV3, TRAJ22)
CAVRDRGGSARQLTF

SEQ ID NO: 470586 - protein, 13 aa, Homo sapiens
  CDR3 for beta chain variable domain of TCR clone 235293 (TRBV7-9, TRBJ2-3)
CASSPGSTDTQYF

SEQ ID NO: 470587 - protein, 13 aa, Homo sapiens
  CDR3 for alpha chain variable domain of TCR clone 235294 (TRAV12-3, TRAJ52)
CAMSVGGAGGTIY

SEQ ID NO: 470588 - protein, 15 aa, Homo sapiens
  CDR3 for beta chain variable domain of TCR clone 235294 (TRBV27, TRBJ1-6)
CASSFDRGLGSPLHL

SEQ ID NO: 470589 - protein, 14 aa, Homo sapiens
  CDR3 for alpha chain variable domain of TCR clone 235295 (TRAV1-2, TRAJ16)
CAVKRSSDGQKLLF

SEQ ID NO: 470590 - protein, 15 aa, Homo sapiens
  CDR3 for beta chain variable domain of TCR clone 235295 (TRBV7-9, TRBJ1-6)
CASSSPGRGNSPLHF

SEQ ID NO: 470591 - protein, 13 aa, Homo sapiens
  CDR3 for alpha chain variable domain of TCR clone 235296 (TRAV2, TRAJ29)
CAAQHSGNTPLVF

SEQ ID NO: 470592 - protein, 14 aa, Homo sapiens
  CDR3 for beta chain variable domain of TCR clone 235296 (TRBV7-9, TRBJ2-4)
CASSLAMGGNSQYF

SEQ ID NO: 470593 - protein, 10 aa, Homo sapiens
  CDR3 for alpha chain variable domain of TCR clone 235297 (TRAV38-1, TRAJ53)
CAFMKHGLER

SEQ ID NO: 470594 - protein, 13 aa, Homo sapiens
  CDR3 for beta chain variable domain of TCR clone 235297 (TRBV19, TRBJ2-7)
CASSPRQSYEQYF

SEQ ID NO: 470595 - protein, 15 aa, Homo sapiens
  CDR3 for alpha chain variable domain of TCR clone 235298 (TRAV8-4, TRAJ3)
CAVTGENLVQQCFQD

SEQ ID NO: 470596 - protein, 16 aa, Homo sapiens
  CDR3 for beta chain variable domain of TCR clone 235298 (TRBV4-2, TRBJ1-1)
CASSQAGFAMNTEAFF

SEQ ID NO: 470597 - protein, 14 aa, Homo sapiens
  CDR3 for alpha chain variable domain of TCR clone 235299 (TRAV17, TRAJ22)
CATSPSGSAGQLTF

SEQ ID NO: 470598 - protein, 13 aa, Homo sapiens
  CDR3 for beta chain variable domain of TCR clone 235299 (TRBV10-3, TRBJ2-7)
CASKLAVNYEQYF

SEQ ID NO: 470599 - protein, 11 aa, Homo sapiens
  CDR3 for alpha chain variable domain of TCR clone 235300 (TRAV12-3, TRAJ43)
CAMSVSNDMRF

SEQ ID NO: 470600 - protein, 16 aa, Homo sapiens
  CDR3 for beta chain variable domain of TCR clone 235300 (TRBV20-1, TRBJ2-1)
CSARDSLGAVYNEQFV

SEQ ID NO: 470601 - protein, 12 aa, Homo sapiens
  CDR3 for alpha chain variable domain of TCR clone 235301 (TRAV30, TRAJ43)
CGTEERGNDMRF

SEQ ID NO: 470602 - protein, 17 aa, Homo sapiens
  CDR3 for beta chain variable domain of TCR clone 235301 (TRBV11-2, TRBJ2-1)
CASSLDPPGVEYNEQFF

SEQ ID NO: 470603 - protein, 16 aa, Homo sapiens
  CDR3 for alpha chain variable domain of TCR clone 235302 (TRAV8-3, TRAJ10)
CAVGPILTGGGNKLTF

SEQ ID NO: 470604 - protein, 13 aa, Homo sapiens
  CDR3 for beta chain variable domain of TCR clone 235302 (TRBV7-6, TRBJ2-7)
CASSLDHTHEQYF

SEQ ID NO: 470605 - protein, 18 aa, Homo sapiens
  CDR3 for alpha chain variable domain of TCR clone 235303 (TRAV3, TRAJ32)
CAVRDIRGYGGATNKLIF

SEQ ID NO: 470606 - protein, 14 aa, Homo sapiens
  CDR3 for beta chain variable domain of TCR clone 235303 (TRBV12-4, TRBJ2-2)
CQQLGVRHTGELFF

SEQ ID NO: 470607 - protein, 14 aa, Homo sapiens
  CDR3 for alpha chain variable domain of TCR clone 235304 (TRAV26-1, TRAJ21)
CIVRPPYNFNKFYF

SEQ ID NO: 470608 - protein, 16 aa, Homo sapiens
  CDR3 for beta chain variable domain of TCR clone 235304 (TRBV12-4, TRBJ1-5)
CASRQPVEGSNQPQHF

SEQ ID NO: 470609 - protein, 13 aa, Homo sapiens
  CDR3 for alpha chain variable domain of TCR clone 235305 (TRAV26-2, TRAJ57)
CILSRGGTEKLVF

SEQ ID NO: 470610 - protein, 16 aa, Homo sapiens
  CDR3 for beta chain variable domain of TCR clone 235305 (TRBV18, TRBJ1-5)
CASSPRTGGGNQPQHF

SEQ ID NO: 470611 - protein, 13 aa, Homo sapiens
  CDR3 for alpha chain variable domain of TCR clone 235306 (TRAV12-2, TRAJ20)
CAVYPSNDYKLRF

SEQ ID NO: 470612 - protein, 16 aa, Homo sapiens
  CDR3 for beta chain variable domain of TCR clone 235306 (TRBV18, TRBJ1-5)
CASSPSTGNSNQPQHF

SEQ ID NO: 470613 - protein, 10 aa, Homo sapiens
  CDR3 for alpha chain variable domain of TCR clone 235307 (TRAV23/DV6, TRAJ57)
CSASSNLSQG

SEQ ID NO: 470614 - protein, 14 aa, Homo sapiens
  CDR3 for beta chain variable domain of TCR clone 235307 (TRBV25-1, TRBJ1-1)
CASTHLGGNTEAFF

SEQ ID NO: 470615 - protein, 12 aa, Homo sapiens
  CDR3 for alpha chain variable domain of TCR clone 235308 (TRAV1-1, TRAJ8)
CAGGTGFQKLVF

SEQ ID NO: 470616 - protein, 15 aa, Homo sapiens
  CDR3 for beta chain variable domain of TCR clone 235308 (TRBV20-1, TRBJ2-7)
CSAESGTSGAYEQYF

SEQ ID NO: 470617 - protein, 12 aa, Homo sapiens
  CDR3 for alpha chain variable domain of TCR clone 235309 (TRAV26-1, TRAJ43)
CIVRPRGDYMRF

SEQ ID NO: 470618 - protein, 16 aa, Homo sapiens
  CDR3 for beta chain variable domain of TCR clone 235309 (TRBV3-1, TRBJ2-1)
CASSQGGRRSFDEQFF

SEQ ID NO: 470619 - protein, 22 aa, Homo sapiens
  CDR3 for alpha chain variable domain of TCR clone 235310 (TRAV3, )
CAVRDCLNAVNNHIQNPDPAVY

SEQ ID NO: 470620 - protein, 19 aa, Homo sapiens
  CDR3 for beta chain variable domain of TCR clone 235310 (TRBV7-2, TRBJ2-3)
CASSFLSRNWGGGTDTQYF

SEQ ID NO: 470621 - protein, 16 aa, Homo sapiens
  CDR3 for alpha chain variable domain of TCR clone 235311 (TRAV12-2, TRAJ10)
CAVNRVLTGGGNKLTF

SEQ ID NO: 470622 - protein, 15 aa, Homo sapiens
  CDR3 for beta chain variable domain of TCR clone 235311 (TRBV10-2, TRBJ2-6)
CASSEQGTGANVLTF

SEQ ID NO: 470623 - protein, 14 aa, Homo sapiens
  CDR3 for alpha chain variable domain of TCR clone 235312 (TRAV17, TRAJ11)
CATEGESGYSTLTF

SEQ ID NO: 470624 - protein, 19 aa, Homo sapiens
  CDR3 for beta chain variable domain of TCR clone 235312 (TRBV6-6, TRBJ2-1)
AAPSQTSVYFCASSYEQFF

SEQ ID NO: 470625 - protein, 17 aa, Homo sapiens
  CDR3 for alpha chain variable domain of TCR clone 235313 (TRAV3, TRAJ12)
CALRDGGRMDSSYKLIF

SEQ ID NO: 470626 - protein, 14 aa, Homo sapiens
  CDR3 for beta chain variable domain of TCR clone 235313 (TRBV10-3, TRBJ1-2)
CAIRAGTGDYGYTF

SEQ ID NO: 470627 - protein, 15 aa, Homo sapiens
  CDR3 for alpha chain variable domain of TCR clone 235314 (TRAV35, TRAJ33)
CAGQLVVDSNYQLIW

SEQ ID NO: 470628 - protein, 14 aa, Homo sapiens
  CDR3 for beta chain variable domain of TCR clone 235314 (TRBV19, TRBJ2-1)
CASPTFVLSGEQFF

SEQ ID NO: 470629 - protein, 12 aa, Homo sapiens
  CDR3 for alpha chain variable domain of TCR clone 235315 (TRAV3, TRAJ31)
CAGRPRGPRLMF

SEQ ID NO: 470630 - protein, 17 aa, Homo sapiens
  CDR3 for beta chain variable domain of TCR clone 235315 (TRBV7-9, TRBJ1-5)
CASSASQGGYSNQPQHF

SEQ ID NO: 470631 - protein, 14 aa, Homo sapiens
  CDR3 for alpha chain variable domain of TCR clone 235316 (TRAV26-1, TRAJ21)
CIVRPPYNFNKFYF

SEQ ID NO: 470632 - protein, 16 aa, Homo sapiens
  CDR3 for beta chain variable domain of TCR clone 235316 (TRBV7-2, TRBJ2-7)
CASSLEAGGPWYEQYF

SEQ ID NO: 470633 - protein, 16 aa, Homo sapiens
  CDR3 for alpha chain variable domain of TCR clone 235317 (TRAV12-3, TRAJ53)
CAISPGSGGSSYKLSF

SEQ ID NO: 470634 - protein, 11 aa, Homo sapiens
  CDR3 for beta chain variable domain of TCR clone 235317 (TRBV29-1, TRBJ2-5)
CSEDRTGTQYF

SEQ ID NO: 470635 - protein, 16 aa, Homo sapiens
  CDR3 for alpha chain variable domain of TCR clone 235318 (TRAV26-1, TRAJ32)
CIVRTNYGVATNKLIF

SEQ ID NO: 470636 - protein, 14 aa, Homo sapiens
  CDR3 for beta chain variable domain of TCR clone 235318 (TRBV6-1, TRBJ1-3)
CASVQGGGGNTIYF

SEQ ID NO: 470637 - protein, 14 aa, Homo sapiens
  CDR3 for alpha chain variable domain of TCR clone 235319 (TRAV12-2, TRAJ17)
CAALFKAAGNKLTF

SEQ ID NO: 470638 - protein, 15 aa, Homo sapiens
  CDR3 for beta chain variable domain of TCR clone 235319 (TRBV18, TRBJ2-3)
CASAPLAGETDTQYF

SEQ ID NO: 470639 - protein, 10 aa, Homo sapiens
  CDR3 for alpha chain variable domain of TCR clone 235320 (TRAV38-1, TRAJ34)
CSFMDDKLIF

SEQ ID NO: 470640 - protein, 14 aa, Homo sapiens
  CDR3 for beta chain variable domain of TCR clone 235320 (TRBV7-2, TRBJ2-2)
CASSSNSNTGELFF

SEQ ID NO: 470641 - protein, 14 aa, Homo sapiens
  CDR3 for alpha chain variable domain of TCR clone 235321 (TRAV38-1, TRAJ40)
CALRPTPGTYKYIF

SEQ ID NO: 470642 - protein, 17 aa, Homo sapiens
  CDR3 for beta chain variable domain of TCR clone 235321 (TRBV7-8, TRBJ2-6)
CASSAGTGGAGANVLTF

SEQ ID NO: 470643 - protein, 17 aa, Homo sapiens
  CDR3 for alpha chain variable domain of TCR clone 235322 (TRAV3, TRAJ42)
CAVRDRDYGGSQGNLIF

SEQ ID NO: 470644 - protein, 15 aa, Homo sapiens
  CDR3 for beta chain variable domain of TCR clone 235322 (TRBV6-6, TRBJ2-7)
CASSYSYGDSYEQYF

SEQ ID NO: 470645 - protein, 12 aa, Homo sapiens
  CDR3 for alpha chain variable domain of TCR clone 235323 (TRAV8-3, TRAJ11)
CAVHSGYSTLTF

SEQ ID NO: 470646 - protein, 15 aa, Homo sapiens
  CDR3 for beta chain variable domain of TCR clone 235323 (TRBV20-1, TRBJ1-1)
CSARKAETSNTEAFF

SEQ ID NO: 470647 - protein, 17 aa, Homo sapiens
  CDR3 for alpha chain variable domain of TCR clone 235324 (TRAV3, TRAJ42)
CAVRDRYYGGSQGNLIF

SEQ ID NO: 470648 - protein, 15 aa, Homo sapiens
  CDR3 for beta chain variable domain of TCR clone 235324 (TRBV10-3, TRBJ2-6)
CATPAAASGANVLTF

SEQ ID NO: 470649 - protein, 15 aa, Homo sapiens
  CDR3 for alpha chain variable domain of TCR clone 235325 (TRAV26-1, TRAJ48)
CIVRVGDFGDEKLTF

SEQ ID NO: 470650 - protein, 16 aa, Homo sapiens
  CDR3 for beta chain variable domain of TCR clone 235325 (TRBV4-1, TRBJ2-3)
CASSQRAGGLTDTQYF

SEQ ID NO: 470651 - protein, 15 aa, Homo sapiens
  CDR3 for alpha chain variable domain of TCR clone 235326 (TRAV8-3, TRAJ45)
CASSYSGGGADGLTF

SEQ ID NO: 470652 - protein, 13 aa, Homo sapiens
  CDR3 for beta chain variable domain of TCR clone 235326 (TRBV18, TRBJ2-1)
CASSPPSSNEQFF

SEQ ID NO: 470653 - protein, 14 aa, Homo sapiens
  CDR3 for alpha chain variable domain of TCR clone 235327 (TRAV8-1, TRAJ3)
CAVGLYSSASKIVF

SEQ ID NO: 470654 - protein, 16 aa, Homo sapiens
  CDR3 for beta chain variable domain of TCR clone 235327 (TRBV15, TRBJ1-4)
CATSRDSPPGREKLFF

SEQ ID NO: 470655 - protein, 14 aa, Homo sapiens
  CDR3 for alpha chain variable domain of TCR clone 235328 (TRAV13-2, TRAJ32)
CAENYGSATNKLIF

SEQ ID NO: 470656 - protein, 15 aa, Homo sapiens
  CDR3 for beta chain variable domain of TCR clone 235328 (TRBV12-4, TRBJ2-5)
CASTLNSGRGETQYF

SEQ ID NO: 470657 - protein, 12 aa, Homo sapiens
  CDR3 for alpha chain variable domain of TCR clone 235329 (TRAV2, TRAJ40)
CCGYLRNLQYIF

SEQ ID NO: 470658 - protein, 12 aa, Homo sapiens
  CDR3 for beta chain variable domain of TCR clone 235329 (TRBV27, TRBJ2-2)
CASKLFTGELFF

SEQ ID NO: 470659 - protein, 13 aa, Homo sapiens
  CDR3 for alpha chain variable domain of TCR clone 235330 (TRAV8-2, TRAJ13)
CVVSDLRYQKVTF

SEQ ID NO: 470660 - protein, 14 aa, Homo sapiens
  CDR3 for beta chain variable domain of TCR clone 235330 (TRBV25-1, TRBJ1-1)
CASTHLGGITEAFF

SEQ ID NO: 470661 - protein, 13 aa, Homo sapiens
  CDR3 for alpha chain variable domain of TCR clone 235331 (TRAV1-2, TRAJ9)
CTALNTGGFKTIF

SEQ ID NO: 470662 - protein, 13 aa, Homo sapiens
  CDR3 for beta chain variable domain of TCR clone 235331 (TRBV19, TRBJ1-2)
CASSAPGQDGYTF

SEQ ID NO: 470663 - protein, 17 aa, Homo sapiens
  CDR3 for alpha chain variable domain of TCR clone 235332 (TRAV26-1, TRAJ37)
CIVRVITVSSNTGKLIF

SEQ ID NO: 470664 - protein, 15 aa, Homo sapiens
  CDR3 for beta chain variable domain of TCR clone 235332 (TRBV18, TRBJ2-7)
CASSPSSTGNYEQYF

SEQ ID NO: 470665 - protein, 14 aa, Homo sapiens
  CDR3 for alpha chain variable domain of TCR clone 235333 (TRAV13-1, TRAJ5)
CAASPGSRRRALTF

SEQ ID NO: 470666 - protein, 13 aa, Homo sapiens
  CDR3 for beta chain variable domain of TCR clone 235333 (TRBV10-3, TRBJ1-2)
CAISERDSYGYTF

SEQ ID NO: 470667 - protein, 16 aa, Homo sapiens
  CDR3 for alpha chain variable domain of TCR clone 235334 (TRAV26-1, TRAJ36)
CIVRVPDQTGANNLFF

SEQ ID NO: 470668 - protein, 17 aa, Homo sapiens
  CDR3 for beta chain variable domain of TCR clone 235334 (TRBV4-3, TRBJ2-2)
CASSQDTSARSPGELFF

SEQ ID NO: 470669 - protein, 13 aa, Homo sapiens
  CDR3 for alpha chain variable domain of TCR clone 235335 (TRAV35, TRAJ33)
CAGSMDSNYQLIW

SEQ ID NO: 470670 - protein, 15 aa, Homo sapiens
  CDR3 for beta chain variable domain of TCR clone 235335 (TRBV7-2, TRBJ2-1)
CASSSGLAGGNEQFF

SEQ ID NO: 470671 - protein, 14 aa, Homo sapiens
  CDR3 for alpha chain variable domain of TCR clone 235336 (TRAV29/DV5, TRAJ6)
CAARVSGGSYIPTF

SEQ ID NO: 470672 - protein, 13 aa, Homo sapiens
  CDR3 for beta chain variable domain of TCR clone 235336 (TRBV19, TRBJ2-7)
CASSIRSSYEQYF

SEQ ID NO: 470673 - protein, 14 aa, Homo sapiens
  CDR3 for alpha chain variable domain of TCR clone 235337 (TRAV13-1, TRAJ35)
CAASKGGFGNVLHC

SEQ ID NO: 470674 - protein, 15 aa, Homo sapiens
  CDR3 for beta chain variable domain of TCR clone 235337 (TRBV18, TRBJ2-1)
CASSPGTGGSGEQFF

SEQ ID NO: 470675 - protein, 15 aa, Homo sapiens
  CDR3 for alpha chain variable domain of TCR clone 235338 (TRAV2, TRAJ9)
CAVEDRGTGGFKTIF

SEQ ID NO: 470676 - protein, 11 aa, Homo sapiens
  CDR3 for beta chain variable domain of TCR clone 235338 (TRBV24-1, TRBJ2-3)
CATSDLDTQYF

SEQ ID NO: 470677 - protein, 14 aa, Homo sapiens
  CDR3 for alpha chain variable domain of TCR clone 235339 (TRAV38-1, TRAJ39)
CAFAYNHAGNMLTF

SEQ ID NO: 470678 - protein, 15 aa, Homo sapiens
  CDR3 for beta chain variable domain of TCR clone 235339 (TRBV19, TRBJ2-6)
CASSIGPSGANVLTF

SEQ ID NO: 470679 - protein, 16 aa, Homo sapiens
  CDR3 for alpha chain variable domain of TCR clone 235340 (TRAV14/DV4, TRAJ53)
CAMRDGGGGSNYKLTF

SEQ ID NO: 470680 - protein, 18 aa, Homo sapiens
  CDR3 for beta chain variable domain of TCR clone 235340 (TRBV18, TRBJ1-3)
CASSPRGGAGPSGNTIYF

SEQ ID NO: 470681 - protein, 15 aa, Homo sapiens
  CDR3 for alpha chain variable domain of TCR clone 235341 (TRAV12-1, TRAJ44)
CVADLPTGTASKLTF

SEQ ID NO: 470682 - protein, 13 aa, Homo sapiens
  CDR3 for beta chain variable domain of TCR clone 235341 (TRBV6-5, TRBJ2-5)
YASSPQGGETQYF

SEQ ID NO: 470683 - protein, 14 aa, Homo sapiens
  CDR3 for alpha chain variable domain of TCR clone 235342 (TRAV26-2, TRAJ38)
FILYNAGNNRKLIC

SEQ ID NO: 470684 - protein, 14 aa, Homo sapiens
  CDR3 for beta chain variable domain of TCR clone 235342 (TRBV19, TRBJ2-1)
CASPTFVLSGEQFF

SEQ ID NO: 470685 - protein, 13 aa, Homo sapiens
  CDR3 for alpha chain variable domain of TCR clone 235343 (TRAV39, TRAJ48)
CAAVNFGNEKLTF

SEQ ID NO: 470686 - protein, 12 aa, Homo sapiens
  CDR3 for beta chain variable domain of TCR clone 235343 (TRBV5-5, TRBJ2-5)
CASSYFGETQSF

SEQ ID NO: 470687 - protein, 16 aa, Homo sapiens
  CDR3 for alpha chain variable domain of TCR clone 235344 (TRAV30, TRAJ24)
CGTEIVDADSWGKLQF

SEQ ID NO: 470688 - protein, 15 aa, Homo sapiens
  CDR3 for beta chain variable domain of TCR clone 235344 (TRBV7-9, TRBJ1-4)
CASGARTGGNEKLFF

SEQ ID NO: 470689 - protein, 11 aa, Homo sapiens
  CDR3 for alpha chain variable domain of TCR clone 235345 (TRAV13-1, TRAJ49)
CACVGGNQFYF

SEQ ID NO: 470690 - protein, 16 aa, Homo sapiens
  CDR3 for beta chain variable domain of TCR clone 235345 (TRBV11-2, TRBJ2-2)
CASSLRTGNLIGELFV

SEQ ID NO: 470691 - protein, 10 aa, Homo sapiens
  CDR3 for alpha chain variable domain of TCR clone 235346 (TRAV1-2, TRAJ23)
CAGHGGKLIF

SEQ ID NO: 470692 - protein, 16 aa, Homo sapiens
  CDR3 for beta chain variable domain of TCR clone 235346 (TRBV11-2, TRBJ1-1)
CASSLRQGGEHSKAFF

SEQ ID NO: 470693 - protein, 14 aa, Homo sapiens
  CDR3 for alpha chain variable domain of TCR clone 235347 (TRAV30, TRAJ33)
CDTVAPRSNYQLIW

SEQ ID NO: 470694 - protein, 18 aa, Homo sapiens
  CDR3 for beta chain variable domain of TCR clone 235347 (TRBV11-2, TRBJ2-3)
CASSLGGASRGAPNTQYF

SEQ ID NO: 470695 - protein, 15 aa, Homo sapiens
  CDR3 for alpha chain variable domain of TCR clone 235348 (TRAV35, TRAJ33)
CAGQPPRYSNYQLIW

SEQ ID NO: 470696 - protein, 17 aa, Homo sapiens
  CDR3 for beta chain variable domain of TCR clone 235348 (TRBV24-1, TRBJ2-4)
CATSDAEARGVRNIQYF

SEQ ID NO: 470697 - protein, 13 aa, Homo sapiens
  CDR3 for alpha chain variable domain of TCR clone 235349 (TRAV36/DV7, TRAJ33)
CAVDLDSNYQLIW

SEQ ID NO: 470698 - protein, 16 aa, Homo sapiens
  CDR3 for beta chain variable domain of TCR clone 235349 (TRBV15, TRBJ2-3)
CATRLSGGRAPDTQYF

SEQ ID NO: 470699 - protein, 14 aa, Homo sapiens
  CDR3 for alpha chain variable domain of TCR clone 235350 (TRAV9-2, TRAJ39)
CALYIYNAGNMLTV

SEQ ID NO: 470700 - protein, 15 aa, Homo sapiens
  CDR3 for beta chain variable domain of TCR clone 235350 (TRBV9, TRBJ1-6)
CASSVAGTGDSPLHF

SEQ ID NO: 470701 - protein, 11 aa, Homo sapiens
  CDR3 for alpha chain variable domain of TCR clone 235351 (TRAV2, TRAJ13)
CASGGYQKVTF

SEQ ID NO: 470702 - protein, 18 aa, Homo sapiens
  CDR3 for beta chain variable domain of TCR clone 235351 (TRBV20-1, TRBJ2-6)
CSADTTTTHGSGANVLTF

SEQ ID NO: 470703 - protein, 14 aa, Homo sapiens
  CDR3 for alpha chain variable domain of TCR clone 235352 (TRAV29/DV5, TRAJ44)
CAASALGTASKLTL

SEQ ID NO: 470704 - protein, 13 aa, Homo sapiens
  CDR3 for beta chain variable domain of TCR clone 235352 (TRBV29-1, TRBJ2-7)
CSVKRGGNYEQYF

SEQ ID NO: 470705 - protein, 15 aa, Homo sapiens
  CDR3 for alpha chain variable domain of TCR clone 235353 (TRAV3, TRAJ7)
CAVRDKDNGNNRLAY

SEQ ID NO: 470706 - protein, 19 aa, Homo sapiens
  CDR3 for beta chain variable domain of TCR clone 235353 (TRBV5-8, TRBJ2-3)
CASSFLGTSGSHRTDTQYF

SEQ ID NO: 470707 - protein, 16 aa, Homo sapiens
  CDR3 for alpha chain variable domain of TCR clone 235354 (TRAV12-3, TRAJ53)
CAMSPGSGGSNYKRTF

SEQ ID NO: 470708 - protein, 13 aa, Homo sapiens
  CDR3 for beta chain variable domain of TCR clone 235354 (TRBV12-4, TRBJ1-2)
CASSSGPNYGYTF

SEQ ID NO: 470709 - protein, 14 aa, Homo sapiens
  CDR3 for alpha chain variable domain of TCR clone 235355 (TRAV17, TRAJ16)
CATADFSDGQKLHF

SEQ ID NO: 470710 - protein, 12 aa, Homo sapiens
  CDR3 for beta chain variable domain of TCR clone 235355 (TRBV24-1, TRBJ1-1)
CATLYPDTEAFF

SEQ ID NO: 470711 - protein, 17 aa, Homo sapiens
  CDR3 for alpha chain variable domain of TCR clone 235356 (TRAV23/DV6, TRAJ57)
CAASSTLSQGGSAQLVF

SEQ ID NO: 470712 - protein, 14 aa, Homo sapiens
  CDR3 for beta chain variable domain of TCR clone 235356 (TRBV25-1, TRBJ1-1)
CASTHLGGNTEAFF

SEQ ID NO: 470713 - protein, 14 aa, Homo sapiens
  CDR3 for alpha chain variable domain of TCR clone 235357 (TRAV12-1, TRAJ9)
CVVTGYTGGFKTIF

SEQ ID NO: 470714 - protein, 12 aa, Homo sapiens
  CDR3 for beta chain variable domain of TCR clone 235357 (TRBV7-6, TRBJ2-5)
CASSLSQETQYF

SEQ ID NO: 470715 - protein, 15 aa, Homo sapiens
  CDR3 for alpha chain variable domain of TCR clone 235358 (TRAV12-2, TRAJ53)
CAVNGEGGSNYKLTF

SEQ ID NO: 470716 - protein, 15 aa, Homo sapiens
  CDR3 for beta chain variable domain of TCR clone 235358 (TRBV20-1, TRBJ2-7)
CSARDRVSGMDEQYF

SEQ ID NO: 470717 - protein, 16 aa, Homo sapiens
  CDR3 for alpha chain variable domain of TCR clone 235359 (TRAV17, TRAJ52)
CATDPMGGTSYGKLTF

SEQ ID NO: 470718 - protein, 16 aa, Homo sapiens
  CDR3 for beta chain variable domain of TCR clone 235359 (TRBV28, TRBJ1-4)
CASSPPYRGRSEKLFF

SEQ ID NO: 470719 - protein, 14 aa, Homo sapiens
  CDR3 for alpha chain variable domain of TCR clone 235360 (TRAV17, TRAJ11)
CATDAGSGYSTLTF

SEQ ID NO: 470720 - protein, 16 aa, Homo sapiens
  CDR3 for beta chain variable domain of TCR clone 235360 (TRBV14, TRBJ1-5)
CASSLSRVHSNQPQHF

SEQ ID NO: 470721 - protein, 15 aa, Homo sapiens
  CDR3 for alpha chain variable domain of TCR clone 235361 (TRAV3, TRAJ22)
CAVRDRGGSARKLTF

SEQ ID NO: 470722 - protein, 16 aa, Homo sapiens
  CDR3 for beta chain variable domain of TCR clone 235361 (TRBV5-4, TRBJ2-3)
CASQRPGAGGADTQYF

SEQ ID NO: 470723 - protein, 17 aa, Homo sapiens
  CDR3 for alpha chain variable domain of TCR clone 235362 (TRAV13-1, TRAJ52)
CAASSGAGGTSYGKLTF

SEQ ID NO: 470724 - protein, 12 aa, Homo sapiens
  CDR3 for beta chain variable domain of TCR clone 235362 (TRBV12-4, TRBJ2-1)
CASSPGRNEQFF

SEQ ID NO: 470725 - protein, 14 aa, Homo sapiens
  CDR3 for alpha chain variable domain of TCR clone 235363 (TRAV12-2, TRAJ40)
CAVKIPSGTYKYIF

SEQ ID NO: 470726 - protein, 15 aa, Homo sapiens
  CDR3 for beta chain variable domain of TCR clone 235363 (TRBV6-6, TRBJ2-7)
CASSYSYGGSYEQYF

SEQ ID NO: 470727 - protein, 14 aa, Homo sapiens
  CDR3 for alpha chain variable domain of TCR clone 235364 (TRAV38-1, TRAJ27)
CAFIHNTNAGKSTI

SEQ ID NO: 470728 - protein, 12 aa, Homo sapiens
  CDR3 for beta chain variable domain of TCR clone 235364 (TRBV7-8, TRBJ2-7)
CASSLGDREQYF

SEQ ID NO: 470729 - protein, 13 aa, Homo sapiens
  CDR3 for alpha chain variable domain of TCR clone 235365 (TRAV16, TRAJ28)
CALTGAGSYQLTF

SEQ ID NO: 470730 - protein, 16 aa, Homo sapiens
  CDR3 for beta chain variable domain of TCR clone 235365 (TRBV7-3, TRBJ2-2)
CASSIKRGTLSGELFF

SEQ ID NO: 470731 - protein, 13 aa, Homo sapiens
  CDR3 for alpha chain variable domain of TCR clone 235366 (TRAV8-3, TRAJ36)
CAVGATGANNLFF

SEQ ID NO: 470732 - protein, 18 aa, Homo sapiens
  CDR3 for beta chain variable domain of TCR clone 235366 (TRBV7-2, TRBJ2-3)
CASSLGGASRGAPNTQYF

SEQ ID NO: 470733 - protein, 12 aa, Homo sapiens
  CDR3 for alpha chain variable domain of TCR clone 235367 (TRAV39, TRAJ34)
CAVSYNTDKLIF

SEQ ID NO: 470734 - protein, 15 aa, Homo sapiens
  CDR3 for beta chain variable domain of TCR clone 235367 (TRBV28, TRBJ2-3)
CASSPDRQGANTQYF

SEQ ID NO: 470735 - protein, 14 aa, Homo sapiens
  CDR3 for alpha chain variable domain of TCR clone 235368 (TRAV35, TRAJ10)
CAGILTGGGKKLTF

SEQ ID NO: 470736 - protein, 16 aa, Homo sapiens
  CDR3 for beta chain variable domain of TCR clone 235368 (TRBV12-5, TRBJ2-5)
CASGPRTSGNQETQYF

SEQ ID NO: 470737 - protein, 16 aa, Homo sapiens
  CDR3 for alpha chain variable domain of TCR clone 235369 (TRAV12-3, TRAJ53)
CAMSPGRGGSHYKLKF

SEQ ID NO: 470738 - protein, 13 aa, Homo sapiens
  CDR3 for beta chain variable domain of TCR clone 235369 (TRBV7-3, TRBJ1-1)
CASSQDWGAEAFF

SEQ ID NO: 470739 - protein, 11 aa, Homo sapiens
  CDR3 for alpha chain variable domain of TCR clone 235370 (TRAV12-3, TRAJ27)
CAMANAGKSTF

SEQ ID NO: 470740 - protein, 16 aa, Homo sapiens
  CDR3 for beta chain variable domain of TCR clone 235370 (TRBV19, TRBJ2-2)
CASRSPGTGATGELFF

SEQ ID NO: 470741 - protein, 15 aa, Homo sapiens
  CDR3 for alpha chain variable domain of TCR clone 235371 (TRAV26-1, TRAJ23)
FIARVAGYQGGKLIF

SEQ ID NO: 470742 - protein, 18 aa, Homo sapiens
  CDR3 for beta chain variable domain of TCR clone 235371 (TRBV28, TRBJ2-1)
CASSSTSGRANSYNEQFF

SEQ ID NO: 470743 - protein, 17 aa, Homo sapiens
  CDR3 for alpha chain variable domain of TCR clone 235372 (TRAV26-1, TRAJ28)
CIVRVPDSGSGSYQLTF

SEQ ID NO: 470744 - protein, 17 aa, Homo sapiens
  CDR3 for beta chain variable domain of TCR clone 235372 (TRBV28, TRBJ2-7)
CASSPLPAGGKSYEQYF

SEQ ID NO: 470745 - protein, 11 aa, Homo sapiens
  CDR3 for alpha chain variable domain of TCR clone 235373 (TRAV35, TRAJ30)
CAPRGDDKIIF

SEQ ID NO: 470746 - protein, 14 aa, Homo sapiens
  CDR3 for beta chain variable domain of TCR clone 235373 (TRBV7-6, TRBJ2-1)
CASSLGGGADEQFF

SEQ ID NO: 470747 - protein, 12 aa, Homo sapiens
  CDR3 for alpha chain variable domain of TCR clone 235374 (TRAV4, TRAJ6)
CLALGGSYMPTF

SEQ ID NO: 470748 - protein, 18 aa, Homo sapiens
  CDR3 for beta chain variable domain of TCR clone 235374 (TRBV20-1, TRBJ2-3)
CSASGLAGGPGTTDTQYF

SEQ ID NO: 470749 - protein, 19 aa, Homo sapiens
  CDR3 for alpha chain variable domain of TCR clone 235375 (TRAV3, TRAJ6)
CAVRDRNPSRSGGSYIPTF

SEQ ID NO: 470750 - protein, 15 aa, Homo sapiens
  CDR3 for beta chain variable domain of TCR clone 235375 (TRBV18, TRBJ2-7)
CANSPTFMDSYEQYF

SEQ ID NO: 470751 - protein, 15 aa, Homo sapiens
  CDR3 for alpha chain variable domain of TCR clone 235376 (TRAV21, TRAJ32)
CAVNSYGGATNKLIF

SEQ ID NO: 470752 - protein, 18 aa, Homo sapiens
  CDR3 for beta chain variable domain of TCR clone 235376 (TRBV7-9, TRBJ2-1)
CASSTGLAEGSSYNEQFV

SEQ ID NO: 470753 - protein, 15 aa, Homo sapiens
  CDR3 for alpha chain variable domain of TCR clone 235377 (TRAV8-3, TRAJ45)
CASSYSGGGADGLTF

SEQ ID NO: 470754 - protein, 15 aa, Homo sapiens
  CDR3 for beta chain variable domain of TCR clone 235377 (TRBV9, TRBJ2-1)
CASSLAGSSYNEQFF

SEQ ID NO: 470755 - protein, 13 aa, Homo sapiens
  CDR3 for alpha chain variable domain of TCR clone 235378 (TRAV21, TRAJ56)
CAVRTGANSKLTF

SEQ ID NO: 470756 - protein, 15 aa, Homo sapiens
  CDR3 for beta chain variable domain of TCR clone 235378 (TRBV7-9, TRBJ1-1)
CASSHRGTVNTEGFF

SEQ ID NO: 470757 - protein, 14 aa, Homo sapiens
  CDR3 for alpha chain variable domain of TCR clone 235379 (TRAV1-2, TRAJ16)
CAVNRFSDGQKLLF

SEQ ID NO: 470758 - protein, 13 aa, Homo sapiens
  CDR3 for beta chain variable domain of TCR clone 235379 (TRBV7-2, TRBJ1-1)
CASSLTENTEAFF

SEQ ID NO: 470759 - protein, 14 aa, Homo sapiens
  CDR3 for alpha chain variable domain of TCR clone 235380 (TRAV8-3, TRAJ9)
CSVVHNTGGFKTIF

SEQ ID NO: 470760 - protein, 14 aa, Homo sapiens
  CDR3 for beta chain variable domain of TCR clone 235380 (TRBV7-3, TRBJ2-2)
CASSSGGYTGELFF

SEQ ID NO: 470761 - protein, 17 aa, Homo sapiens
  CDR3 for alpha chain variable domain of TCR clone 235381 (TRAV3, TRAJ42)
CAVRDRDYGGSQGNLIF

SEQ ID NO: 470762 - protein, 14 aa, Homo sapiens
  CDR3 for beta chain variable domain of TCR clone 235381 (TRBV7-2, TRBJ2-5)
CACSPRGSSETQYF

SEQ ID NO: 470763 - protein, 13 aa, Homo sapiens
  CDR3 for alpha chain variable domain of TCR clone 235382 (TRAV1-2, TRAJ33)
CAVREDSNYQLIW

SEQ ID NO: 470764 - protein, 16 aa, Homo sapiens
  CDR3 for beta chain variable domain of TCR clone 235382 (TRBV4-2, TRBJ2-7)
CASSQDGVERGYEQYF

SEQ ID NO: 470765 - protein, 14 aa, Homo sapiens
  CDR3 for alpha chain variable domain of TCR clone 235383 (TRAV1-2, TRAJ16)
CAVNRFSDGQKLLF

SEQ ID NO: 470766 - protein, 12 aa, Homo sapiens
  CDR3 for beta chain variable domain of TCR clone 235383 (TRBV11-3, TRBJ2-2)
CASSFGGGELFF

SEQ ID NO: 470767 - protein, 12 aa, Homo sapiens
  CDR3 for alpha chain variable domain of TCR clone 235384 (TRAV20, TRAJ23)
CAVHNEGGKLIF

SEQ ID NO: 470768 - protein, 15 aa, Homo sapiens
  CDR3 for beta chain variable domain of TCR clone 235384 (TRBV7-2, TRBJ2-1)
CASSSGLAGGNEQFF

SEQ ID NO: 470769 - protein, 12 aa, Homo sapiens
  CDR3 for alpha chain variable domain of TCR clone 235385 (TRAV12-3, TRAJ17)
CAMTLTGNKLTF

SEQ ID NO: 470770 - protein, 16 aa, Homo sapiens
  CDR3 for beta chain variable domain of TCR clone 235385 (TRBV15, TRBJ2-7)
CATSRDGGIPSYEQYF

SEQ ID NO: 470771 - protein, 16 aa, Homo sapiens
  CDR3 for alpha chain variable domain of TCR clone 235386 (TRAV3, TRAJ10)
CAVRDMRAGGGNKISF

SEQ ID NO: 470772 - protein, 15 aa, Homo sapiens
  CDR3 for beta chain variable domain of TCR clone 235386 (TRBV20-1, TRBJ2-7)
CSARVPAAYFYEQYF

SEQ ID NO: 470773 - protein, 14 aa, Homo sapiens
  CDR3 for alpha chain variable domain of TCR clone 235387 (TRAV12-2, TRAJ13)
CAVKKTGGYQKVTF

SEQ ID NO: 470774 - protein, 15 aa, Homo sapiens
  CDR3 for beta chain variable domain of TCR clone 235387 (TRBV20-1, TRBJ2-7)
CSARDRVSGMDEEYF

SEQ ID NO: 470775 - protein, 16 aa, Homo sapiens
  CDR3 for alpha chain variable domain of TCR clone 235388 (TRAV16, TRAJ4)
FALSRMFSGGYNKLIF

SEQ ID NO: 470776 - protein, 15 aa, Homo sapiens
  CDR3 for beta chain variable domain of TCR clone 235388 (TRBV4-1, TRBJ1-4)
CASSDTGGTNEKLFF

SEQ ID NO: 470777 - protein, 11 aa, Homo sapiens
  CDR3 for alpha chain variable domain of TCR clone 235389 (TRAV21, TRAJ48)
CAVDGNEKLTF

SEQ ID NO: 470778 - protein, 13 aa, Homo sapiens
  CDR3 for beta chain variable domain of TCR clone 235389 (TRBV10-1, TRBJ2-1)
CASSAGPDNEQFF

SEQ ID NO: 470779 - protein, 13 aa, Homo sapiens
  CDR3 for alpha chain variable domain of TCR clone 235390 (TRAV20, TRAJ20)
CAGQALNDYKLSF

SEQ ID NO: 470780 - protein, 13 aa, Homo sapiens
  CDR3 for beta chain variable domain of TCR clone 235390 (TRBV7-9, TRBJ1-4)
CASSLPGIEKLFF

SEQ ID NO: 470781 - protein, 12 aa, Homo sapiens
  CDR3 for alpha chain variable domain of TCR clone 235391 (TRAV27, TRAJ9)
CAGESGGFKTIF

SEQ ID NO: 470782 - protein, 15 aa, Homo sapiens
  CDR3 for beta chain variable domain of TCR clone 235391 (TRBV7-3, TRBJ2-1)
CASSLRAGSYNEQFF

SEQ ID NO: 470783 - protein, 15 aa, Homo sapiens
  CDR3 for alpha chain variable domain of TCR clone 235392 (TRAV26-1, TRAJ40)
CIDRYATSGTYKSIF

SEQ ID NO: 470784 - protein, 11 aa, Homo sapiens
  CDR3 for beta chain variable domain of TCR clone 235392 (TRBV7-9, TRBJ2-1)
CASSSQNEQFF

SEQ ID NO: 470785 - protein, 14 aa, Homo sapiens
  CDR3 for alpha chain variable domain of TCR clone 235393 (TRAV12-2, TRAJ13)
CAVKKTGGYQKVTF

SEQ ID NO: 470786 - protein, 16 aa, Homo sapiens
  CDR3 for beta chain variable domain of TCR clone 235393 (TRBV12-4, TRBJ1-5)
CASRRPVGGSNQPQHF

SEQ ID NO: 470787 - protein, 13 aa, Homo sapiens
  CDR3 for alpha chain variable domain of TCR clone 235394 (TRAV8-3, TRAJ44)
CAVVPGTASKLTF

SEQ ID NO: 470788 - protein, 14 aa, Homo sapiens
  CDR3 for beta chain variable domain of TCR clone 235394 (TRBV11-2, TRBJ2-3)
CASRRLARTDRQYF

SEQ ID NO: 470789 - protein, 17 aa, Homo sapiens
  CDR3 for alpha chain variable domain of TCR clone 235395 (TRAV4, TRAJ18)
CLVGERSVGSTLGRLYF

SEQ ID NO: 470790 - protein, 16 aa, Homo sapiens
  CDR3 for beta chain variable domain of TCR clone 235395 (TRBV20-1, TRBJ2-3)
CSARLHSAGAIDTQYF

SEQ ID NO: 470791 - protein, 13 aa, Homo sapiens
  CDR3 for alpha chain variable domain of TCR clone 235396 (TRAV2, TRAJ40)
CAVVTSGTYKYIF

SEQ ID NO: 470792 - protein, 12 aa, Homo sapiens
  CDR3 for beta chain variable domain of TCR clone 235396 (TRBV11-2, TRBJ2-1)
CASRPGNNEQFF

SEQ ID NO: 470793 - protein, 14 aa, Homo sapiens
  CDR3 for alpha chain variable domain of TCR clone 235397 (TRAV16, TRAJ33)
CALSAMDSNYQLIW

SEQ ID NO: 470794 - protein, 13 aa, Homo sapiens
  CDR3 for beta chain variable domain of TCR clone 235397 (TRBV2, TRBJ1-4)
CASSERAGEKLFF

SEQ ID NO: 470795 - protein, 11 aa, Homo sapiens
  CDR3 for alpha chain variable domain of TCR clone 235398 (TRAV12-1, TRAJ33)
CVVNSNYQLIW

SEQ ID NO: 470796 - protein, 16 aa, Homo sapiens
  CDR3 for beta chain variable domain of TCR clone 235398 (TRBV11-2, TRBJ1-2)
CASSLDTGGADYGYTF

SEQ ID NO: 470797 - protein, 15 aa, Homo sapiens
  CDR3 for alpha chain variable domain of TCR clone 235399 (TRAV12-2, TRAJ53)
CAVNGGGGGHYKLTF

SEQ ID NO: 470798 - protein, 17 aa, Homo sapiens
  CDR3 for beta chain variable domain of TCR clone 235399 (TRBV7-3, TRBJ2-3)
CASSLMKRMRGADTQYF

SEQ ID NO: 470799 - protein, 12 aa, Homo sapiens
  CDR3 for alpha chain variable domain of TCR clone 235400 (TRAV13-1, TRAJ20)
CAARQNDYKISF

SEQ ID NO: 470800 - protein, 14 aa, Homo sapiens
  CDR3 for beta chain variable domain of TCR clone 235400 (TRBV5-1, TRBJ2-7)
CASSFASGVNEQYF

SEQ ID NO: 470801 - protein, 16 aa, Homo sapiens
  CDR3 for alpha chain variable domain of TCR clone 235401 (TRAV12-2, TRAJ45)
CAVKRNPGGGADGLTF

SEQ ID NO: 470802 - protein, 17 aa, Homo sapiens
  CDR3 for beta chain variable domain of TCR clone 235401 (TRBV7-8, TRBJ2-6)
CASSAGTGGAGANVLTL

SEQ ID NO: 470803 - protein, 13 aa, Homo sapiens
  CDR3 for alpha chain variable domain of TCR clone 235402 (TRAV1-2, TRAJ9)
CAVLKTGGFKTIF

SEQ ID NO: 470804 - protein, 14 aa, Homo sapiens
  CDR3 for beta chain variable domain of TCR clone 235402 (TRBV19, TRBJ2-1)
CASPTFVLSGEQFF

SEQ ID NO: 470805 - protein, 13 aa, Homo sapiens
  CDR3 for alpha chain variable domain of TCR clone 235403 (TRAV21, TRAJ15)
CAVANQAGTALIF

SEQ ID NO: 470806 - protein, 13 aa, Homo sapiens
  CDR3 for beta chain variable domain of TCR clone 235403 (TRBV27, TRBJ2-2)
CSSLGAATGELFF

SEQ ID NO: 470807 - protein, 14 aa, Homo sapiens
  CDR3 for alpha chain variable domain of TCR clone 235404 (TRAV1-2, TRAJ16)
CAVNRFSDGQKLLF

SEQ ID NO: 470808 - protein, 16 aa, Homo sapiens
  CDR3 for beta chain variable domain of TCR clone 235404 (TRBV12-5, TRBJ2-5)
CASGPRTRGNQETQYF

SEQ ID NO: 470809 - protein, 13 aa, Homo sapiens
  CDR3 for alpha chain variable domain of TCR clone 235405 (TRAV2, TRAJ15)
CAVASQAGPALIF

SEQ ID NO: 470810 - protein, 16 aa, Homo sapiens
  CDR3 for beta chain variable domain of TCR clone 235405 (TRBV5-1, TRBJ1-1)
CASSSGGNSLNTEAFF

SEQ ID NO: 470811 - protein, 12 aa, Homo sapiens
  CDR3 for alpha chain variable domain of TCR clone 235406 (TRAV20, TRAJ54)
CAVQEVAQKLVF

SEQ ID NO: 470812 - protein, 17 aa, Homo sapiens
  CDR3 for beta chain variable domain of TCR clone 235406 (TRBV13, TRBJ2-3)
CASSLSRVAGGRNTQYF

SEQ ID NO: 470813 - protein, 16 aa, Homo sapiens
  CDR3 for alpha chain variable domain of TCR clone 235407 (TRAV12-3, TRAJ53)
CAMSPGSGGSNYKMTF

SEQ ID NO: 470814 - protein, 15 aa, Homo sapiens
  CDR3 for beta chain variable domain of TCR clone 235407 (TRBV6-1, TRBJ2-2)
CASSAGQGYTGELFF

SEQ ID NO: 470815 - protein, 13 aa, Homo sapiens
  CDR3 for alpha chain variable domain of TCR clone 235408 (TRAV26-1, TRAJ54)
CIVRVKGTQKLVF

SEQ ID NO: 470816 - protein, 15 aa, Homo sapiens
  CDR3 for beta chain variable domain of TCR clone 235408 (TRBV20-1, TRBJ2-1)
CSARPGGGPYNEQFF

SEQ ID NO: 470817 - protein, 14 aa, Homo sapiens
  CDR3 for alpha chain variable domain of TCR clone 235409 (TRAV16, TRAJ15)
CALSFNQAGTALIF

SEQ ID NO: 470818 - protein, 16 aa, Homo sapiens
  CDR3 for beta chain variable domain of TCR clone 235409 (TRBV19, TRBJ2-1)
CASSKAGPSSYNEQFF

SEQ ID NO: 470819 - protein, 15 aa, Homo sapiens
  CDR3 for alpha chain variable domain of TCR clone 235410 (TRAV3, TRAJ4)
CAVRDGTGGYNKLVF

SEQ ID NO: 470820 - protein, 13 aa, Homo sapiens
  CDR3 for beta chain variable domain of TCR clone 235410 (TRBV12-5, TRBJ1-2)
CASGVRTGNGDTF

SEQ ID NO: 470821 - protein, 14 aa, Homo sapiens
  CDR3 for alpha chain variable domain of TCR clone 235411 (TRAV17, TRAJ23)
CATALGGQGGKLIF

SEQ ID NO: 470822 - protein, 13 aa, Homo sapiens
  CDR3 for beta chain variable domain of TCR clone 235411 (TRBV5-6, TRBJ2-6)
CASTSSGANVLTF

SEQ ID NO: 470823 - protein, 15 aa, Homo sapiens
  CDR3 for alpha chain variable domain of TCR clone 235412 (TRAV12-3, TRAJ27)
CAMRAYNTNAGKSTF

SEQ ID NO: 470824 - protein, 16 aa, Homo sapiens
  CDR3 for beta chain variable domain of TCR clone 235412 (TRBV19, TRBJ2-1)
CASSKAGPSSYNEQFF

SEQ ID NO: 470825 - protein, 13 aa, Homo sapiens
  CDR3 for alpha chain variable domain of TCR clone 235413 (TRAV26-1, TRAJ34)
CIVRPWITDELIF

SEQ ID NO: 470826 - protein, 13 aa, Homo sapiens
  CDR3 for beta chain variable domain of TCR clone 235413 (TRBV5-1, TRBJ2-1)
CASSLGSYNEQFF

SEQ ID NO: 470827 - protein, 13 aa, Homo sapiens
  CDR3 for alpha chain variable domain of TCR clone 235414 (TRAV1-1, TRAJ11)
CAVLNSGYSTITF

SEQ ID NO: 470828 - protein, 17 aa, Homo sapiens
  CDR3 for beta chain variable domain of TCR clone 235414 (TRBV6-3, TRBJ2-2)
CASSSAGQGINTGELFF

SEQ ID NO: 470829 - protein, 13 aa, Homo sapiens
  CDR3 for alpha chain variable domain of TCR clone 235415 (TRAV13-1, TRAJ27)
FAASTHQCRQINL

SEQ ID NO: 470830 - protein, 16 aa, Homo sapiens
  CDR3 for beta chain variable domain of TCR clone 235415 (TRBV27, TRBJ2-2)
CASSFRGLVRTGELFF

SEQ ID NO: 470831 - protein, 12 aa, Homo sapiens
  CDR3 for alpha chain variable domain of TCR clone 235416 (TRAV12-1, TRAJ30)
CVVNPRDDKIIF

SEQ ID NO: 470832 - protein, 18 aa, Homo sapiens
  CDR3 for beta chain variable domain of TCR clone 235416 (TRBV5-1, TRBJ2-7)
CASSLAGFGGISSYEQYF

SEQ ID NO: 470833 - protein, 14 aa, Homo sapiens
  CDR3 for alpha chain variable domain of TCR clone 235417 (TRAV26-1, TRAJ48)
CIVRVPFGNEKLTF

SEQ ID NO: 470834 - protein, 15 aa, Homo sapiens
  CDR3 for beta chain variable domain of TCR clone 235417 (TRBV18, TRBJ2-1)
CASPYLSIRGDEQFF

SEQ ID NO: 470835 - protein, 14 aa, Homo sapiens
  CDR3 for alpha chain variable domain of TCR clone 235418 (TRAV2, TRAJ9)
CAVEDRSGGFKTIF

SEQ ID NO: 470836 - protein, 17 aa, Homo sapiens
  CDR3 for beta chain variable domain of TCR clone 235418 (TRBV7-3, TRBJ1-3)
CASSPLGRGTPGNTIYF

SEQ ID NO: 470837 - protein, 16 aa, Homo sapiens
  CDR3 for alpha chain variable domain of TCR clone 235419 (TRAV12-1, TRAJ22)
CVVNSISSGSARQLIF

SEQ ID NO: 470838 - protein, 16 aa, Homo sapiens
  CDR3 for beta chain variable domain of TCR clone 235419 (TRBV19, TRBJ2-1)
CASSIWGQGARNEQFF

SEQ ID NO: 470839 - protein, 14 aa, Homo sapiens
  CDR3 for alpha chain variable domain of TCR clone 235420 (TRAV21, TRAJ35)
CAVMPIGFGNVLRC

SEQ ID NO: 470840 - protein, 12 aa, Homo sapiens
  CDR3 for beta chain variable domain of TCR clone 235420 (TRBV7-9, TRBJ2-7)
CASSIKREEQYF

SEQ ID NO: 470841 - protein, 13 aa, Homo sapiens
  CDR3 for alpha chain variable domain of TCR clone 235421 (TRAV13-1, TRAJ29)
CAATFSGNTPLVF

SEQ ID NO: 470842 - protein, 16 aa, Homo sapiens
  CDR3 for beta chain variable domain of TCR clone 235421 (TRBV24-1, TRBJ2-3)
CATSDRRQDLTDTQYF

SEQ ID NO: 470843 - protein, 18 aa, Homo sapiens
  CDR3 for alpha chain variable domain of TCR clone 235422 (TRAV21, TRAJ52)
CAVRPSPAGGTSYGKLTS

SEQ ID NO: 470844 - protein, 17 aa, Homo sapiens
  CDR3 for beta chain variable domain of TCR clone 235422 (TRBV13, TRBJ2-3)
CASSLSRVAGGKNTQYF

SEQ ID NO: 470845 - protein, 15 aa, Homo sapiens
  CDR3 for alpha chain variable domain of TCR clone 235423 (TRAV8-3, TRAJ41)
CAVGSNSNSGYALNF

SEQ ID NO: 470846 - protein, 14 aa, Homo sapiens
  CDR3 for beta chain variable domain of TCR clone 235423 (TRBV15, TRBJ2-3)
CATRSGTSTDTQYF

SEQ ID NO: 470847 - protein, 13 aa, Homo sapiens
  CDR3 for alpha chain variable domain of TCR clone 235424 (TRAV13-2, TRAJ40)
CAENGSGTYKYIF

SEQ ID NO: 470848 - protein, 13 aa, Homo sapiens
  CDR3 for beta chain variable domain of TCR clone 235424 (TRBV7-9, TRBJ2-3)
CASSPRGPDTQYF

SEQ ID NO: 470849 - protein, 16 aa, Homo sapiens
  CDR3 for alpha chain variable domain of TCR clone 235425 (TRAV17, TRAJ22)
CATGPISSGSARQLTF

SEQ ID NO: 470850 - protein, 13 aa, Homo sapiens
  CDR3 for beta chain variable domain of TCR clone 235425 (TRBV11-2, TRBJ2-1)
CASSLGLAGGRFY

SEQ ID NO: 470851 - protein, 10 aa, Homo sapiens
  CDR3 for alpha chain variable domain of TCR clone 235426 (TRAV23/DV6, TRAJ57)
CAASSTLSQG

SEQ ID NO: 470852 - protein, 15 aa, Homo sapiens
  CDR3 for beta chain variable domain of TCR clone 235426 (TRBV20-1, TRBJ2-5)
CSAEGTGGLQETQYF

SEQ ID NO: 470853 - protein, 10 aa, Homo sapiens
  CDR3 for alpha chain variable domain of TCR clone 235427 (TRAV21, TRAJ43)
CAVSANDMRF

SEQ ID NO: 470854 - protein, 14 aa, Homo sapiens
  CDR3 for beta chain variable domain of TCR clone 235427 (TRBV19, TRBJ2-1)
CASPTFVLSGEQFF

SEQ ID NO: 470855 - protein, 12 aa, Homo sapiens
  CDR3 for alpha chain variable domain of TCR clone 235428 (TRAV12-3, TRAJ17)
CAMTLTGNKLTF

SEQ ID NO: 470856 - protein, 18 aa, Homo sapiens
  CDR3 for beta chain variable domain of TCR clone 235428 (TRBV4-1, TRBJ1-4)
CASSPRTGGAWTNEKLFF

SEQ ID NO: 470857 - protein, 13 aa, Homo sapiens
  CDR3 for alpha chain variable domain of TCR clone 235429 (TRAV2, TRAJ15)
CAVASQAGTALIF

SEQ ID NO: 470858 - protein, 13 aa, Homo sapiens
  CDR3 for beta chain variable domain of TCR clone 235429 (TRBV28, TRBJ1-1)
CASSKQGWTEAFF

SEQ ID NO: 470859 - protein, 15 aa, Homo sapiens
  CDR3 for alpha chain variable domain of TCR clone 235430 (TRAV12-3, TRAJ6)
CAMSATTGGNYIPTF

SEQ ID NO: 470860 - protein, 15 aa, Homo sapiens
  CDR3 for beta chain variable domain of TCR clone 235430 (TRBV5-1, TRBJ2-7)
CASSLNGGPAREQYF

SEQ ID NO: 470861 - protein, 14 aa, Homo sapiens
  CDR3 for alpha chain variable domain of TCR clone 235431 (TRAV3, TRAJ22)
CAVRDYGSARQLTF

SEQ ID NO: 470862 - protein, 13 aa, Homo sapiens
  CDR3 for beta chain variable domain of TCR clone 235431 (TRBV11-1, TRBJ2-5)
CASGNGAKETQYF

SEQ ID NO: 470863 - protein, 14 aa, Homo sapiens
  CDR3 for alpha chain variable domain of TCR clone 235432 (TRAV17, TRAJ57)
CATDPQGGSEKLVF

SEQ ID NO: 470864 - protein, 16 aa, Homo sapiens
  CDR3 for beta chain variable domain of TCR clone 235432 (TRBV27, TRBJ2-2)
CASSFRGLVRTGDLFF

SEQ ID NO: 470865 - protein, 15 aa, Homo sapiens
  CDR3 for alpha chain variable domain of TCR clone 235433 (TRAV8-3, TRAJ45)
CASSYSGGGADGSTF

SEQ ID NO: 470866 - protein, 20 aa, Homo sapiens
  CDR3 for beta chain variable domain of TCR clone 235433 (TRBV7-8, TRBJ2-2)
CASSHLFPGPTIRITGELFF

SEQ ID NO: 470867 - protein, 12 aa, Homo sapiens
  CDR3 for alpha chain variable domain of TCR clone 235434 (TRAV26-1, TRAJ43)
CIVRGNNNAMRF

SEQ ID NO: 470868 - protein, 13 aa, Homo sapiens
  CDR3 for beta chain variable domain of TCR clone 235434 (TRBV20-1, TRBJ2-3)
CSAIYPGADTQYF

SEQ ID NO: 470869 - protein, 14 aa, Homo sapiens
  CDR3 for alpha chain variable domain of TCR clone 235435 (TRAV2, TRAJ29)
CAVESYSGNTPLVF

SEQ ID NO: 470870 - protein, 16 aa, Homo sapiens
  CDR3 for beta chain variable domain of TCR clone 235435 (TRBV13, TRBJ2-2)
CASSPRTGEHTGELFF

SEQ ID NO: 470871 - protein, 22 aa, Homo sapiens
  CDR3 for alpha chain variable domain of TCR clone 235436 (TRAV2, TRAJ10)
ILQVREADAAVYYTGGGNKLTF

SEQ ID NO: 470872 - protein, 16 aa, Homo sapiens
  CDR3 for beta chain variable domain of TCR clone 235436 (TRBV5-7, TRBJ1-2)
CVSSRGVTGGSYGYTF

SEQ ID NO: 470873 - protein, 13 aa, Homo sapiens
  CDR3 for alpha chain variable domain of TCR clone 235437 (TRAV17, TRAJ5)
CAPMHTGRRALTF

SEQ ID NO: 470874 - protein, 14 aa, Homo sapiens
  CDR3 for beta chain variable domain of TCR clone 235437 (TRBV29-1, TRBJ2-7)
CSVDQRQASYEQYF

SEQ ID NO: 470875 - protein, 14 aa, Homo sapiens
  CDR3 for alpha chain variable domain of TCR clone 235438 (TRAV1-2, TRAJ16)
CAVNRFSDGQKLLF

SEQ ID NO: 470876 - protein, 13 aa, Homo sapiens
  CDR3 for beta chain variable domain of TCR clone 235438 (TRBV19, TRBJ2-7)
CASSTTGNYEQYF

SEQ ID NO: 470877 - protein, 13 aa, Homo sapiens
  CDR3 for alpha chain variable domain of TCR clone 235439 (TRAV8-4, TRAJ15)
CALTNQAGTALTF

SEQ ID NO: 470878 - protein, 13 aa, Homo sapiens
  CDR3 for beta chain variable domain of TCR clone 235439 (TRBV11-3, TRBJ2-3)
CASRPVLGDTQYF

SEQ ID NO: 470879 - protein, 12 aa, Homo sapiens
  CDR3 for alpha chain variable domain of TCR clone 235440 (TRAV1-2, TRAJ8)
CAVRTGFQKLVF

SEQ ID NO: 470880 - protein, 16 aa, Homo sapiens
  CDR3 for beta chain variable domain of TCR clone 235440 (TRBV10-3, TRBJ1-6)
CAISERRGQGNSPLHF

SEQ ID NO: 470881 - protein, 14 aa, Homo sapiens
  CDR3 for alpha chain variable domain of TCR clone 235441 (TRAV17, TRAJ6)
CATDASGGSNIPTF

SEQ ID NO: 470882 - protein, 19 aa, Homo sapiens
  CDR3 for beta chain variable domain of TCR clone 235441 (TRBV4-3, TRBJ2-7)
CASSQEFIGWQVTPYEQYF

SEQ ID NO: 470883 - protein, 15 aa, Homo sapiens
  CDR3 for alpha chain variable domain of TCR clone 235442 (TRAV13-1, TRAJ57)
CAASNTQGGSEKLVF

SEQ ID NO: 470884 - protein, 16 aa, Homo sapiens
  CDR3 for beta chain variable domain of TCR clone 235442 (TRBV19, TRBJ2-1)
CASSKEGPSSYNEQFF

SEQ ID NO: 470885 - protein, 12 aa, Homo sapiens
  CDR3 for alpha chain variable domain of TCR clone 235443 (TRAV8-3, TRAJ4)
PAFSGGYNKQIF

SEQ ID NO: 470886 - protein, 13 aa, Homo sapiens
  CDR3 for beta chain variable domain of TCR clone 235443 (TRBV20-1, TRBJ1-3)
CSAGAYSGNTIYF

SEQ ID NO: 470887 - protein, 12 aa, Homo sapiens
  CDR3 for alpha chain variable domain of TCR clone 235444 (TRAV13-1, TRAJ21)
CAAFFNFNKFYF

SEQ ID NO: 470888 - protein, 14 aa, Homo sapiens
  CDR3 for beta chain variable domain of TCR clone 235444 (TRBV4-1, TRBJ2-7)
CASRLTSGAYEQYF

SEQ ID NO: 470889 - protein, 16 aa, Homo sapiens
  CDR3 for alpha chain variable domain of TCR clone 235445 (TRAV3, TRAJ10)
RAVRDMNAGGGNKLTF

SEQ ID NO: 470890 - protein, 15 aa, Homo sapiens
  CDR3 for beta chain variable domain of TCR clone 235445 (TRBV20-1, TRBJ2-7)
CSARDRVSGMDEQYF

SEQ ID NO: 470891 - protein, 12 aa, Homo sapiens
  CDR3 for alpha chain variable domain of TCR clone 235446 (TRAV2, TRAJ31)
CAVEDNNARVMF

SEQ ID NO: 470892 - protein, 16 aa, Homo sapiens
  CDR3 for beta chain variable domain of TCR clone 235446 (TRBV10-3, TRBJ2-1)
CAISGVGDGGGGEQFF

SEQ ID NO: 470893 - protein, 16 aa, Homo sapiens
  CDR3 for alpha chain variable domain of TCR clone 235447 (TRAV30, TRAJ24)
CGTEIVDADSWGKFQF

SEQ ID NO: 470894 - protein, 14 aa, Homo sapiens
  CDR3 for beta chain variable domain of TCR clone 235447 (TRBV28, TRBJ2-7)
CASSLYGGTYEQYF

SEQ ID NO: 470895 - protein, 12 aa, Homo sapiens
  CDR3 for alpha chain variable domain of TCR clone 235448 (TRAV12-3, TRAJ17)
CAMTLTGNKLTF

SEQ ID NO: 470896 - protein, 15 aa, Homo sapiens
  CDR3 for beta chain variable domain of TCR clone 235448 (TRBV6-3, TRBJ2-7)
CASGSPGTVFYEQYF

SEQ ID NO: 470897 - protein, 14 aa, Homo sapiens
  CDR3 for alpha chain variable domain of TCR clone 235449 (TRAV3, TRAJ37)
CAVKESGNTGKLIF

SEQ ID NO: 470898 - protein, 17 aa, Homo sapiens
  CDR3 for beta chain variable domain of TCR clone 235449 (TRBV7-3, TRBJ2-3)
CASSLMKRMRGADTQYF

SEQ ID NO: 470899 - protein, 15 aa, Homo sapiens
  CDR3 for alpha chain variable domain of TCR clone 235450 (TRAV8-3, TRAJ7)
CAVGSISYGNNRLAF

SEQ ID NO: 470900 - protein, 12 aa, Homo sapiens
  CDR3 for beta chain variable domain of TCR clone 235450 (TRBV7-9, TRBJ2-7)
CASSIKREEQYF

SEQ ID NO: 470901 - protein, 12 aa, Homo sapiens
  CDR3 for alpha chain variable domain of TCR clone 235451 (TRAV30, TRAJ43)
CGPEERGNDMRF

SEQ ID NO: 470902 - protein, 11 aa, Homo sapiens
  CDR3 for beta chain variable domain of TCR clone 235451 (TRBV29-1, TRBJ2-5)
CSEDRTGTQYF

SEQ ID NO: 470903 - protein, 14 aa, Homo sapiens
  CDR3 for alpha chain variable domain of TCR clone 235452 (TRAV1-2, TRAJ8)
CAVREDTGFRKLVF

SEQ ID NO: 470904 - protein, 15 aa, Homo sapiens
  CDR3 for beta chain variable domain of TCR clone 235452 (TRBV7-3, TRBJ2-2)
CASSETGQGTGELFF

SEQ ID NO: 470905 - protein, 16 aa, Homo sapiens
  CDR3 for alpha chain variable domain of TCR clone 235453 (TRAV30, TRAJ24)
CGTEIVNADSWGKFQF

SEQ ID NO: 470906 - protein, 19 aa, Homo sapiens
  CDR3 for beta chain variable domain of TCR clone 235453 (TRBV25-1, TRBJ2-2)
CAILVYRVDRGRKTGELFF

SEQ ID NO: 470907 - protein, 21 aa, Homo sapiens
  CDR3 for alpha chain variable domain of TCR clone 235454 (TRAV1-1, TRAJ6)
CLLLLRCERFERTGGSYIPTF

SEQ ID NO: 470908 - protein, 13 aa, Homo sapiens
  CDR3 for beta chain variable domain of TCR clone 235454 (TRBV10-2, TRBJ2-7)
CASGASGGYEQYF

SEQ ID NO: 470909 - protein, 14 aa, Homo sapiens
  CDR3 for alpha chain variable domain of TCR clone 235455 (TRAV29/DV5, TRAJ13)
CSASLSGGYQKVTF

SEQ ID NO: 470910 - protein, 15 aa, Homo sapiens
  CDR3 for beta chain variable domain of TCR clone 235455 (TRBV10-1, TRBJ2-1)
CASSTGTELYNEQFF

SEQ ID NO: 470911 - protein, 14 aa, Homo sapiens
  CDR3 for alpha chain variable domain of TCR clone 235456 (TRAV26-1, TRAJ54)
CIVRRTQGAQKLEF

SEQ ID NO: 470912 - protein, 12 aa, Homo sapiens
  CDR3 for beta chain variable domain of TCR clone 235456 (TRBV29-1, TRBJ2-3)
CSVTGGADTQYF

SEQ ID NO: 470913 - protein, 14 aa, Homo sapiens
  CDR3 for alpha chain variable domain of TCR clone 235457 (TRAV1-2, TRAJ15)
CAVRDRQAGTALIF

SEQ ID NO: 470914 - protein, 14 aa, Homo sapiens
  CDR3 for beta chain variable domain of TCR clone 235457 (TRBV13, TRBJ2-5)
CASSLERVGETQYF

SEQ ID NO: 470915 - protein, 14 aa, Homo sapiens
  CDR3 for alpha chain variable domain of TCR clone 235458 (TRAV8-4, TRAJ8)
CAVSEDTGFQRLVF

SEQ ID NO: 470916 - protein, 12 aa, Homo sapiens
  CDR3 for beta chain variable domain of TCR clone 235458 (TRBV14, TRBJ1-1)
CASRPYETEAFF

SEQ ID NO: 470917 - protein, 14 aa, Homo sapiens
  CDR3 for alpha chain variable domain of TCR clone 235459 (TRAV14/DV4, TRAJ31)
CAMREGRNNARLMF

SEQ ID NO: 470918 - protein, 15 aa, Homo sapiens
  CDR3 for beta chain variable domain of TCR clone 235459 (TRBV28, TRBJ2-5)
CASSSGRTIQETQYF

SEQ ID NO: 470919 - protein, 10 aa, Homo sapiens
  CDR3 for alpha chain variable domain of TCR clone 235460 (TRAV30, TRAJ20)
CGTDDYKLSF

SEQ ID NO: 470920 - protein, 11 aa, Homo sapiens
  CDR3 for beta chain variable domain of TCR clone 235460 (TRBV19, TRBJ2-7)
CASGNSYEQYF

SEQ ID NO: 470921 - protein, 10 aa, Homo sapiens
  CDR3 for alpha chain variable domain of TCR clone 235461 (TRAV12-1, TRAJ37)
ALGNTGKLIF

SEQ ID NO: 470922 - protein, 15 aa, Homo sapiens
  CDR3 for beta chain variable domain of TCR clone 235461 (TRBV7-2, TRBJ2-3)
CASSLEQGGTDTQYF

SEQ ID NO: 470923 - protein, 12 aa, Homo sapiens
  CDR3 for alpha chain variable domain of TCR clone 235462 (TRAV12-2, TRAJ4)
GWPEGGSNKLIF

SEQ ID NO: 470924 - protein, 16 aa, Homo sapiens
  CDR3 for beta chain variable domain of TCR clone 235462 (TRBV6-1, TRBJ2-5)
CASSETLDRGAETQYF

SEQ ID NO: 470925 - protein, 13 aa, Homo sapiens
  CDR3 for alpha chain variable domain of TCR clone 235463 (TRAV16, TRAJ48)
CSPLNFGNEKLTF

SEQ ID NO: 470926 - protein, 18 aa, Homo sapiens
  CDR3 for beta chain variable domain of TCR clone 235463 (TRBV20-1, TRBJ2-6)
CSAETTPTHGSGANVLTF

SEQ ID NO: 470927 - protein, 16 aa, Homo sapiens
  CDR3 for alpha chain variable domain of TCR clone 235464 (TRAV1-2, TRAJ6)
CAVREQGTGGSYIPTF

SEQ ID NO: 470928 - protein, 12 aa, Homo sapiens
  CDR3 for beta chain variable domain of TCR clone 235464 (TRBV11-2, TRBJ2-2)
CASSLGGGELFF

SEQ ID NO: 470929 - protein, 14 aa, Homo sapiens
  CDR3 for alpha chain variable domain of TCR clone 235465 (TRAV1-2, TRAJ16)
CAVNRFSDGQKLLF

SEQ ID NO: 470930 - protein, 15 aa, Homo sapiens
  CDR3 for beta chain variable domain of TCR clone 235465 (TRBV4-1, TRBJ2-5)
CASSQWDLYQETKYF

SEQ ID NO: 470931 - protein, 18 aa, Homo sapiens
  CDR3 for alpha chain variable domain of TCR clone 235466 (TRAV21, TRAJ52)
CAVRPSPAGVTSYGKLTF

SEQ ID NO: 470932 - protein, 14 aa, Homo sapiens
  CDR3 for beta chain variable domain of TCR clone 235466 (TRBV7-2, TRBJ2-1)
CASSLEGGYNEQFF

SEQ ID NO: 470933 - protein, 12 aa, Homo sapiens
  CDR3 for alpha chain variable domain of TCR clone 235467 (TRAV13-1, TRAJ21)
CAAKEGFNKFYF

SEQ ID NO: 470934 - protein, 14 aa, Homo sapiens
  CDR3 for beta chain variable domain of TCR clone 235467 (TRBV2, TRBJ2-5)
CQQPLWAAGETQYF

SEQ ID NO: 470935 - protein, 15 aa, Homo sapiens
  CDR3 for alpha chain variable domain of TCR clone 235468 (TRAV21, TRAJ53)
CATLNSGGSNYKLTF

SEQ ID NO: 470936 - protein, 12 aa, Homo sapiens
  CDR3 for beta chain variable domain of TCR clone 235468 (TRBV14, TRBJ2-4)
CAGSNLKSIQYF

SEQ ID NO: 470937 - protein, 15 aa, Homo sapiens
  CDR3 for alpha chain variable domain of TCR clone 235469 (TRAV8-1, TRAJ6)
CAVNAGAGGSYISTF

SEQ ID NO: 470938 - protein, 14 aa, Homo sapiens
  CDR3 for beta chain variable domain of TCR clone 235469 (TRBV25-1, TRBJ1-6)
CASSLSADISPLHF

SEQ ID NO: 470939 - protein, 12 aa, Homo sapiens
  CDR3 for alpha chain variable domain of TCR clone 235470 (TRAV27, TRAJ37)
CADSGSNGKLIF

SEQ ID NO: 470940 - protein, 18 aa, Homo sapiens
  CDR3 for beta chain variable domain of TCR clone 235470 (TRBV7-9, TRBJ1-1)
CASSKPWDTMGMNAEAFF

SEQ ID NO: 470941 - protein, 14 aa, Homo sapiens
  CDR3 for alpha chain variable domain of TCR clone 235471 (TRAV12-3, TRAJ12)
CAMSEVDSSYKSIF

SEQ ID NO: 470942 - protein, 12 aa, Homo sapiens
  CDR3 for beta chain variable domain of TCR clone 235471 (TRBV18, TRBJ1-4)
CASSPSREKLFF

SEQ ID NO: 470943 - protein, 14 aa, Homo sapiens
  CDR3 for alpha chain variable domain of TCR clone 235472 (TRAV1-2, TRAJ16)
CAVNRFSDGKKLLF

SEQ ID NO: 470944 - protein, 15 aa, Homo sapiens
  CDR3 for beta chain variable domain of TCR clone 235472 (TRBV20-1, TRBJ2-2)
SAVPRTPRTPGSCFF

SEQ ID NO: 470945 - protein, 16 aa, Homo sapiens
  CDR3 for alpha chain variable domain of TCR clone 235473 (TRAV13-1, TRAJ48)
CAASIFGNFGNVKLTS

SEQ ID NO: 470946 - protein, 12 aa, Homo sapiens
  CDR3 for beta chain variable domain of TCR clone 235473 (TRBV14, TRBJ2-4)
CASSNLKSIQYF

SEQ ID NO: 470947 - protein, 12 aa, Homo sapiens
  CDR3 for alpha chain variable domain of TCR clone 235474 (TRAV13-2, TRAJ8)
CAPWLGFEKLVF

SEQ ID NO: 470948 - protein, 14 aa, Homo sapiens
  CDR3 for beta chain variable domain of TCR clone 235474 (TRBV18, TRBJ1-5)
CASSRQQRNQPQHF

SEQ ID NO: 470949 - protein, 14 aa, Homo sapiens
  CDR3 for alpha chain variable domain of TCR clone 235475 (TRAV1-2, TRAJ16)
CAVRGFSDCQKLLF

SEQ ID NO: 470950 - protein, 16 aa, Homo sapiens
  CDR3 for beta chain variable domain of TCR clone 235475 (TRBV20-1, TRBJ2-1)
CSARDHLAGGRGEQFF

SEQ ID NO: 470951 - protein, 13 aa, Homo sapiens
  CDR3 for alpha chain variable domain of TCR clone 235476 (TRAV24, TRAJ6)
CASVGGGSYIPTF

SEQ ID NO: 470952 - protein, 16 aa, Homo sapiens
  CDR3 for beta chain variable domain of TCR clone 235476 (TRBV20-1, TRBJ1-4)
CSAPGQGLLTNEKLFF

SEQ ID NO: 470953 - protein, 12 aa, Homo sapiens
  CDR3 for alpha chain variable domain of TCR clone 235477 (TRAV27, TRAJ16)
CAGACRWPEAAL

SEQ ID NO: 470954 - protein, 14 aa, Homo sapiens
  CDR3 for beta chain variable domain of TCR clone 235477 (TRBV11-2, TRBJ1-3)
CASSLAVPGNTIYF

SEQ ID NO: 470955 - protein, 13 aa, Homo sapiens
  CDR3 for alpha chain variable domain of TCR clone 235478 (TRAV27, TRAJ6)
FAGGTRGSYIPTF

SEQ ID NO: 470956 - protein, 14 aa, Homo sapiens
  CDR3 for beta chain variable domain of TCR clone 235478 (TRBV19, TRBJ2-1)
CASPTFVLSGEQFF

SEQ ID NO: 470957 - protein, 12 aa, Homo sapiens
  CDR3 for alpha chain variable domain of TCR clone 235479 (TRAV17, TRAJ20)
CATDSNDYKLSF

SEQ ID NO: 470958 - protein, 16 aa, Homo sapiens
  CDR3 for beta chain variable domain of TCR clone 235479 (TRBV7-2, TRBJ1-2)
CATSSNQDRRGHGYTF

SEQ ID NO: 470959 - protein, 15 aa, Homo sapiens
  CDR3 for alpha chain variable domain of TCR clone 235480 (TRAV3, TRAJ22)
CAVRDRGGSARQLTF

SEQ ID NO: 470960 - protein, 14 aa, Homo sapiens
  CDR3 for beta chain variable domain of TCR clone 235480 (TRBV6-3, TRBJ2-2)
CASTYTPDTGELFF

SEQ ID NO: 470961 - protein, 14 aa, Homo sapiens
  CDR3 for alpha chain variable domain of TCR clone 235481 (TRAV12-2, TRAJ53)
CRERGGGNNYKLTF

SEQ ID NO: 470962 - protein, 13 aa, Homo sapiens
  CDR3 for beta chain variable domain of TCR clone 235481 (TRBV3-1, TRBJ1-1)
CASSPGVITEAFF

SEQ ID NO: 470963 - protein, 14 aa, Homo sapiens
  CDR3 for alpha chain variable domain of TCR clone 235482 (TRAV17, TRAJ32)
CATDPGDATNKLIF

SEQ ID NO: 470964 - protein, 14 aa, Homo sapiens
  CDR3 for beta chain variable domain of TCR clone 235482 (TRBV12-5, TRBJ2-5)
CASGSRTHQETQYF

SEQ ID NO: 470965 - protein, 15 aa, Homo sapiens
  CDR3 for alpha chain variable domain of TCR clone 235483 (TRAV12-2, TRAJ53)
CAVNGGGGSNYKLTF

SEQ ID NO: 470966 - protein, 15 aa, Homo sapiens
  CDR3 for beta chain variable domain of TCR clone 235483 (TRBV11-2, TRBJ2-1)
CASSKNRGLIYEQFF

SEQ ID NO: 470967 - protein, 12 aa, Homo sapiens
  CDR3 for alpha chain variable domain of TCR clone 235484 (TRAV13-1, TRAJ20)
CAASRGDYKLSF

SEQ ID NO: 470968 - protein, 19 aa, Homo sapiens
  CDR3 for beta chain variable domain of TCR clone 235484 (TRBV25-1, TRBJ2-2)
CAILVYRVDRGRKTGELFF

SEQ ID NO: 470969 - protein, 16 aa, Homo sapiens
  CDR3 for alpha chain variable domain of TCR clone 235485 (TRAV30, TRAJ24)
CGTEIVDADSWGKSQF

SEQ ID NO: 470970 - protein, 16 aa, Homo sapiens
  CDR3 for beta chain variable domain of TCR clone 235485 (TRBV5-4, TRBJ2-3)
CASQQPGAGGADTQYF

SEQ ID NO: 470971 - protein, 14 aa, Homo sapiens
  CDR3 for alpha chain variable domain of TCR clone 235486 (TRAV29/DV5, TRAJ36)
CAARRKTGANNLFF

SEQ ID NO: 470972 - protein, 14 aa, Homo sapiens
  CDR3 for beta chain variable domain of TCR clone 235486 (TRBV7-2, TRBJ2-2)
CASRGQGAAGELFF

SEQ ID NO: 470973 - protein, 23 aa, Homo sapiens
  CDR3 for alpha chain variable domain of TCR clone 235487 (TRAV26-1, TRAJ38)
CIADNAGNNHIQSPDPAVYQLRN

SEQ ID NO: 470974 - protein, 13 aa, Homo sapiens
  CDR3 for beta chain variable domain of TCR clone 235487 (TRBV20-1, TRBJ1-1)
CSARGGGNTEAFF

SEQ ID NO: 470975 - protein, 10 aa, Homo sapiens
  CDR3 for alpha chain variable domain of TCR clone 235488 (TRAV1-2, TRAJ31)
CVSEDARLMF

SEQ ID NO: 470976 - protein, 14 aa, Homo sapiens
  CDR3 for beta chain variable domain of TCR clone 235488 (TRBV20-1, TRBJ1-1)
CSAQTRIGGTEAFF

SEQ ID NO: 470977 - protein, 12 aa, Homo sapiens
  CDR3 for alpha chain variable domain of TCR clone 235489 (TRAV12-2, TRAJ7)
CAVLRGNNRLAF

SEQ ID NO: 470978 - protein, 17 aa, Homo sapiens
  CDR3 for beta chain variable domain of TCR clone 235489 (TRBV7-9, TRBJ2-3)
CASSPTVAGDLTDTQYF

SEQ ID NO: 470979 - protein, 14 aa, Homo sapiens
  CDR3 for alpha chain variable domain of TCR clone 235490 (TRAV12-3, TRAJ10)
SHLPLPRGGSKLTF

SEQ ID NO: 470980 - protein, 14 aa, Homo sapiens
  CDR3 for beta chain variable domain of TCR clone 235490 (TRBV12-4, TRBJ1-3)
CASTLTGAGNTIYF

SEQ ID NO: 470981 - protein, 13 aa, Homo sapiens
  CDR3 for alpha chain variable domain of TCR clone 235491 (TRAV3, TRAJ30)
CAVRDRGDDKIVF

SEQ ID NO: 470982 - protein, 16 aa, Homo sapiens
  CDR3 for beta chain variable domain of TCR clone 235491 (TRBV7-3, TRBJ2-2)
CASSLKRGTLSGELFF

SEQ ID NO: 470983 - protein, 12 aa, Homo sapiens
  CDR3 for alpha chain variable domain of TCR clone 235492 (TRAV17, TRAJ12)
CATLRSSYKLIF

SEQ ID NO: 470984 - protein, 16 aa, Homo sapiens
  CDR3 for beta chain variable domain of TCR clone 235492 (TRBV28, TRBJ2-7)
CASSLFFETGGHEQYL

SEQ ID NO: 470985 - protein, 16 aa, Homo sapiens
  CDR3 for alpha chain variable domain of TCR clone 235493 (TRAV9-2, TRAJ10)
CALSEGGTGGGNKLTF

SEQ ID NO: 470986 - protein, 16 aa, Homo sapiens
  CDR3 for beta chain variable domain of TCR clone 235493 (TRBV4-2, TRBJ2-6)
CASSQARSSGANVLTF

SEQ ID NO: 470987 - protein, 15 aa, Homo sapiens
  CDR3 for alpha chain variable domain of TCR clone 235494 (TRAV21, TRAJ24)
CAARSSTDSWGKLQF

SEQ ID NO: 470988 - protein, 15 aa, Homo sapiens
  CDR3 for beta chain variable domain of TCR clone 235494 (TRBV5-1, TRBJ1-4)
FAPAAWKDGNETLFF

SEQ ID NO: 470989 - protein, 15 aa, Homo sapiens
  CDR3 for alpha chain variable domain of TCR clone 235495 (TRAV17, TRAJ23)
CATDAEDNQGGKLIF

SEQ ID NO: 470990 - protein, 13 aa, Homo sapiens
  CDR3 for beta chain variable domain of TCR clone 235495 (TRBV7-9, TRBJ1-2)
CASSLKQNYGYTF

SEQ ID NO: 470991 - protein, 16 aa, Homo sapiens
  CDR3 for alpha chain variable domain of TCR clone 235496 (TRAV17, TRAJ42)
CATDSAYGGSQGNLIF

SEQ ID NO: 470992 - protein, 12 aa, Homo sapiens
  CDR3 for beta chain variable domain of TCR clone 235496 (TRBV5-1, TRBJ2-7)
CASSLESYEQYF

SEQ ID NO: 470993 - protein, 11 aa, Homo sapiens
  CDR3 for alpha chain variable domain of TCR clone 235497 (TRAV12-2, TRAJ31)
CAILNNARLMF

SEQ ID NO: 470994 - protein, 13 aa, Homo sapiens
  CDR3 for beta chain variable domain of TCR clone 235497 (TRBV20-1, TRBJ1-1)
CSARLGRGTEAFF

SEQ ID NO: 470995 - protein, 14 aa, Homo sapiens
  CDR3 for alpha chain variable domain of TCR clone 235498 (TRAV21, TRAJ10)
CAVALTGGGNKLTF

SEQ ID NO: 470996 - protein, 13 aa, Homo sapiens
  CDR3 for beta chain variable domain of TCR clone 235498 (TRBV7-2, TRBJ1-6)
CASSLGSNSPLLF

SEQ ID NO: 470997 - protein, 17 aa, Homo sapiens
  CDR3 for alpha chain variable domain of TCR clone 235499 (TRAV38-1, TRAJ45)
CAFMRSHSGGGADGLTF

SEQ ID NO: 470998 - protein, 17 aa, Homo sapiens
  CDR3 for beta chain variable domain of TCR clone 235499 (TRBV11-2, TRBJ2-1)
CASSLYPPGVEYNEQFF

SEQ ID NO: 470999 - protein, 14 aa, Homo sapiens
  CDR3 for alpha chain variable domain of TCR clone 235500 (TRAV17, TRAJ6)
CATDASGGSYIPTF

SEQ ID NO: 471000 - protein, 15 aa, Homo sapiens
  CDR3 for beta chain variable domain of TCR clone 235500 (TRBV19, TRBJ2-7)
CASSIGGGLVNEQYF

SEQ ID NO: 471001 - protein, 12 aa, Homo sapiens
  CDR3 for alpha chain variable domain of TCR clone 235501 (TRAV1-1, TRAJ8)
CAGGTGFQKLVF

SEQ ID NO: 471002 - protein, 15 aa, Homo sapiens
  CDR3 for beta chain variable domain of TCR clone 235501 (TRBV7-9, TRBJ1-4)
CAGSRRGGFNEKLFF

SEQ ID NO: 471003 - protein, 14 aa, Homo sapiens
  CDR3 for alpha chain variable domain of TCR clone 235502 (TRAV12-2, TRAJ17)
CAVLFKAAGNKLTF

SEQ ID NO: 471004 - protein, 14 aa, Homo sapiens
  CDR3 for beta chain variable domain of TCR clone 235502 (TRBV15, TRBJ1-2)
CATSRNFDRVGYTF

SEQ ID NO: 471005 - protein, 11 aa, Homo sapiens
  CDR3 for alpha chain variable domain of TCR clone 235503 (TRAV1-1, TRAJ23)
CAVRQGGKLIF

SEQ ID NO: 471006 - protein, 15 aa, Homo sapiens
  CDR3 for beta chain variable domain of TCR clone 235503 (TRBV10-2, TRBJ2-6)
CASSEQGTGANVLTF

SEQ ID NO: 471007 - protein, 14 aa, Homo sapiens
  CDR3 for alpha chain variable domain of TCR clone 235504 (TRAV27, TRAJ23)
CAGAFDNQGGKLSF

SEQ ID NO: 471008 - protein, 15 aa, Homo sapiens
  CDR3 for beta chain variable domain of TCR clone 235504 (TRBV7-3, TRBJ2-7)
CASSLTGQGKYEQYF

SEQ ID NO: 471009 - protein, 11 aa, Homo sapiens
  CDR3 for alpha chain variable domain of TCR clone 235505 (TRAV1-1, TRAJ34)
CAAYNTDKLIF

SEQ ID NO: 471010 - protein, 15 aa, Homo sapiens
  CDR3 for beta chain variable domain of TCR clone 235505 (TRBV20-1, TRBJ2-7)
CSARDRVSGMDEQYF

SEQ ID NO: 471011 - protein, 14 aa, Homo sapiens
  CDR3 for alpha chain variable domain of TCR clone 235506 (TRAV26-1, TRAJ38)
CIADNAGNNRNLIW

SEQ ID NO: 471012 - protein, 13 aa, Homo sapiens
  CDR3 for beta chain variable domain of TCR clone 235506 (TRBV7-9, TRBJ1-2)
CASSLKQNYGYTF

SEQ ID NO: 471013 - protein, 11 aa, Homo sapiens
  CDR3 for alpha chain variable domain of TCR clone 235507 (TRAV1-1, TRAJ23)
CAVRQGGELIV

SEQ ID NO: 471014 - protein, 20 aa, Homo sapiens
  CDR3 for beta chain variable domain of TCR clone 235507 (TRBV7-8, TRBJ2-2)
CASSHLFPGPTIHITGELFF

SEQ ID NO: 471015 - protein, 17 aa, Homo sapiens
  CDR3 for alpha chain variable domain of TCR clone 235508 (TRAV3, TRAJ4)
CAQNMFLVATISGFLEQ

SEQ ID NO: 471016 - protein, 13 aa, Homo sapiens
  CDR3 for beta chain variable domain of TCR clone 235508 (TRBV12-4, TRBJ2-5)
CASSPGTEETQYF

SEQ ID NO: 471017 - protein, 23 aa, Homo sapiens
  CDR3 for alpha chain variable domain of TCR clone 235509 (TRAV12-2, TRAJ22)
CAVGFRVHPGPPIVSGSARQLTF

SEQ ID NO: 471018 - protein, 12 aa, Homo sapiens
  CDR3 for beta chain variable domain of TCR clone 235509 (TRBV11-2, TRBJ2-2)
CASSLGGGELFF

SEQ ID NO: 471019 - protein, 14 aa, Homo sapiens
  CDR3 for alpha chain variable domain of TCR clone 235510 (TRAV1-2, TRAJ16)
CSVNRFSDGQKLLF

SEQ ID NO: 471020 - protein, 14 aa, Homo sapiens
  CDR3 for beta chain variable domain of TCR clone 235510 (TRBV19, TRBJ2-1)
CASPTFVLSGEQFF

SEQ ID NO: 471021 - protein, 13 aa, Homo sapiens
  CDR3 for alpha chain variable domain of TCR clone 235511 (TRAV12-1, TRAJ34)
CVVTGYNTDKLTF

SEQ ID NO: 471022 - protein, 13 aa, Homo sapiens
  CDR3 for beta chain variable domain of TCR clone 235511 (TRBV28, TRBJ2-7)
CASKAGGVYEQYF

SEQ ID NO: 471023 - protein, 18 aa, Homo sapiens
  CDR3 for alpha chain variable domain of TCR clone 235512 (TRAV21, TRAJ52)
CAVRPSRAGGTSYGKLTF

SEQ ID NO: 471024 - protein, 12 aa, Homo sapiens
  CDR3 for beta chain variable domain of TCR clone 235512 (TRBV11-2, TRBJ2-2)
CASSLGGGELFF

SEQ ID NO: 471025 - protein, 13 aa, Homo sapiens
  CDR3 for alpha chain variable domain of TCR clone 235513 (TRAV13-2, TRAJ13)
CAERQGGYQKVTF

SEQ ID NO: 471026 - protein, 19 aa, Homo sapiens
  CDR3 for beta chain variable domain of TCR clone 235513 (TRBV4-1, TRBJ2-1)
CASSQGPLPGLGSRNEQFF

SEQ ID NO: 471027 - protein, 16 aa, Homo sapiens
  CDR3 for alpha chain variable domain of TCR clone 235514 (TRAV30, TRAJ24)
CGTEIVDADSWGKFQF

SEQ ID NO: 471028 - protein, 17 aa, Homo sapiens
  CDR3 for beta chain variable domain of TCR clone 235514 (TRBV27, TRBJ1-6)
CASSLDQLSSYNSPLHF

SEQ ID NO: 471029 - protein, 12 aa, Homo sapiens
  CDR3 for alpha chain variable domain of TCR clone 235515 (TRAV1-1, TRAJ8)
CAGSTGFQKLVF

SEQ ID NO: 471030 - protein, 13 aa, Homo sapiens
  CDR3 for beta chain variable domain of TCR clone 235515 (TRBV7-9, TRBJ1-2)
CASSLKQNYGYTF

SEQ ID NO: 471031 - protein, 18 aa, Homo sapiens
  CDR3 for alpha chain variable domain of TCR clone 235516 (TRAV13-1, TRAJ52)
CAAKNPNAGGTSYGQLTF

SEQ ID NO: 471032 - protein, 13 aa, Homo sapiens
  CDR3 for beta chain variable domain of TCR clone 235516 (TRBV12-4, TRBJ2-5)
CASRLAVQETQYF

SEQ ID NO: 471033 - protein, 15 aa, Homo sapiens
  CDR3 for alpha chain variable domain of TCR clone 235517 (TRAV3, TRAJ22)
CAVRDRGGSARQLTF

SEQ ID NO: 471034 - protein, 21 aa, Homo sapiens
  CDR3 for beta chain variable domain of TCR clone 235517 (TRBV11-1, TRBJ2-1)
CASSARERLRPEGPSYNEQFF

SEQ ID NO: 471035 - protein, 13 aa, Homo sapiens
  CDR3 for alpha chain variable domain of TCR clone 235518 (TRAV17, TRAJ13)
CATDSGGYQNVTF

SEQ ID NO: 471036 - protein, 14 aa, Homo sapiens
  CDR3 for beta chain variable domain of TCR clone 235518 (TRBV6-1, TRBJ1-1)
CASTPLQMNTEAFF

SEQ ID NO: 471037 - protein, 13 aa, Homo sapiens
  CDR3 for alpha chain variable domain of TCR clone 235519 (TRAV8-3, TRAJ6)
CTVEKGGSYIPTF

SEQ ID NO: 471038 - protein, 15 aa, Homo sapiens
  CDR3 for beta chain variable domain of TCR clone 235519 (TRBV28, TRBJ2-5)
CASSADRGRGETQYF

SEQ ID NO: 471039 - protein, 14 aa, Homo sapiens
  CDR3 for alpha chain variable domain of TCR clone 235520 (TRAV26-1, TRAJ21)
CIAHTTSPNFTLDL

SEQ ID NO: 471040 - protein, 15 aa, Homo sapiens
  CDR3 for beta chain variable domain of TCR clone 235520 (TRBV20-1, TRBJ2-7)
CSARDRVSGRDEQYF

SEQ ID NO: 471041 - protein, 15 aa, Homo sapiens
  CDR3 for alpha chain variable domain of TCR clone 235521 (TRAV3, TRAJ5)
CAVRDRKTGRRALTF

SEQ ID NO: 471042 - protein, 15 aa, Homo sapiens
  CDR3 for beta chain variable domain of TCR clone 235521 (TRBV5-8, TRBJ2-2)
CASSLDRGATGELFF

SEQ ID NO: 471043 - protein, 14 aa, Homo sapiens
  CDR3 for alpha chain variable domain of TCR clone 235522 (TRAV9-2, TRAJ39)
CALYIYNAGNMLTF

SEQ ID NO: 471044 - protein, 14 aa, Homo sapiens
  CDR3 for beta chain variable domain of TCR clone 235522 (TRBV11-3, TRBJ1-2)
CASSLGTANDGYTF

SEQ ID NO: 471045 - protein, 12 aa, Homo sapiens
  CDR3 for alpha chain variable domain of TCR clone 235523 (TRAV12-3, TRAJ17)
CAMTLTGNKLTF

SEQ ID NO: 471046 - protein, 12 aa, Homo sapiens
  CDR3 for beta chain variable domain of TCR clone 235523 (TRBV2, TRBJ2-1)
CAYGPPGYEQFF

SEQ ID NO: 471047 - protein, 14 aa, Homo sapiens
  CDR3 for alpha chain variable domain of TCR clone 235524 (TRAV25, TRAJ6)
CAGRESGGSYIPTF

SEQ ID NO: 471048 - protein, 15 aa, Homo sapiens
  CDR3 for beta chain variable domain of TCR clone 235524 (TRBV7-2, TRBJ1-2)
CASSPRAGWNYGYTF

SEQ ID NO: 471049 - protein, 21 aa, Homo sapiens
  CDR3 for alpha chain variable domain of TCR clone 235525 (TRAV26-1, TRAJ38)
CIADNAGNNPIQNPDPAVYQL

SEQ ID NO: 471050 - protein, 20 aa, Homo sapiens
  CDR3 for beta chain variable domain of TCR clone 235525 (TRBV28, TRBJ2-1)
CASTPIGRSPGLAGGNEQFF

SEQ ID NO: 471051 - protein, 12 aa, Homo sapiens
  CDR3 for alpha chain variable domain of TCR clone 235526 (TRAV17, TRAJ57)
CSTDGGSEKLVF

SEQ ID NO: 471052 - protein, 13 aa, Homo sapiens
  CDR3 for beta chain variable domain of TCR clone 235526 (TRBV7-9, TRBJ2-7)
CASSFAGAYEQNF

SEQ ID NO: 471053 - protein, 15 aa, Homo sapiens
  CDR3 for alpha chain variable domain of TCR clone 235527 (TRAV8-3, TRAJ11)
CAVGLLKSGYSTLTF

SEQ ID NO: 471054 - protein, 16 aa, Homo sapiens
  CDR3 for beta chain variable domain of TCR clone 235527 (TRBV5-1, TRBJ2-2)
CASSSYREGDTGELFF

SEQ ID NO: 471055 - protein, 15 aa, Homo sapiens
  CDR3 for alpha chain variable domain of TCR clone 235528 (TRAV12-1, TRAJ42)
CVVTRDGGSQGNLIF

SEQ ID NO: 471056 - protein, 14 aa, Homo sapiens
  CDR3 for beta chain variable domain of TCR clone 235528 (TRBV11-2, TRBJ2-3)
CASSLGGGANTQYL

SEQ ID NO: 471057 - protein, 15 aa, Homo sapiens
  CDR3 for alpha chain variable domain of TCR clone 235529 (TRAV8-3, TRAJ11)
CAVGLLNSGYSTLIF

SEQ ID NO: 471058 - protein, 11 aa, Homo sapiens
  CDR3 for beta chain variable domain of TCR clone 235529 (TRBV29-1, TRBJ2-5)
CSEDRTGTQYF

SEQ ID NO: 471059 - protein, 14 aa, Homo sapiens
  CDR3 for alpha chain variable domain of TCR clone 235530 (TRAV3, TRAJ44)
CAVNNTGTASKLTF

SEQ ID NO: 471060 - protein, 14 aa, Homo sapiens
  CDR3 for beta chain variable domain of TCR clone 235530 (TRBV11-2, TRBJ2-3)
CASSLGGGSDTQYF

SEQ ID NO: 471061 - protein, 15 aa, Homo sapiens
  CDR3 for alpha chain variable domain of TCR clone 235531 (TRAV3, TRAJ5)
CAVRDLDTGRRALTF

SEQ ID NO: 471062 - protein, 15 aa, Homo sapiens
  CDR3 for beta chain variable domain of TCR clone 235531 (TRBV11-2, TRBJ1-2)
CASSLEGVQRNGYTF

SEQ ID NO: 471063 - protein, 16 aa, Homo sapiens
  CDR3 for alpha chain variable domain of TCR clone 235532 (TRAV3, TRAJ10)
CAVRDMRAGGGNKLTF

SEQ ID NO: 471064 - protein, 17 aa, Homo sapiens
  CDR3 for beta chain variable domain of TCR clone 235532 (TRBV15, TRBJ1-2)
CATSGREIDVVNYGYTF

SEQ ID NO: 471065 - protein, 13 aa, Homo sapiens
  CDR3 for alpha chain variable domain of TCR clone 235533 (TRAV12-2, TRAJ9)
CAVQWAGGFKTIF

SEQ ID NO: 471066 - protein, 12 aa, Homo sapiens
  CDR3 for beta chain variable domain of TCR clone 235533 (TRBV7-8, TRBJ2-7)
CASSLGDREQYF

SEQ ID NO: 471067 - protein, 13 aa, Homo sapiens
  CDR3 for alpha chain variable domain of TCR clone 235534 (TRAV16, TRAJ48)
CSPLNFGTEKLTF

SEQ ID NO: 471068 - protein, 11 aa, Homo sapiens
  CDR3 for beta chain variable domain of TCR clone 235534 (TRBV7-9, TRBJ2-3)
CASSPTDTQYF

SEQ ID NO: 471069 - protein, 16 aa, Homo sapiens
  CDR3 for alpha chain variable domain of TCR clone 235535 (TRAV8-3, TRAJ13)
CAVGAYPSGGYQQVTF

SEQ ID NO: 471070 - protein, 14 aa, Homo sapiens
  CDR3 for beta chain variable domain of TCR clone 235535 (TRBV18, TRBJ2-5)
CASSPRASSETQYF

SEQ ID NO: 471071 - protein, 18 aa, Homo sapiens
  CDR3 for alpha chain variable domain of TCR clone 235536 (TRAV13-1, TRAJ52)
CAAKNPNAGGTSYGKLTF

SEQ ID NO: 471072 - protein, 13 aa, Homo sapiens
  CDR3 for beta chain variable domain of TCR clone 235536 (TRBV4-1, TRBJ1-1)
CASSQLGTGEAFF

SEQ ID NO: 471073 - protein, 14 aa, Homo sapiens
  CDR3 for alpha chain variable domain of TCR clone 235537 (TRAV13-1, TRAJ10)
CAAKEPGGGNKLTF

SEQ ID NO: 471074 - protein, 15 aa, Homo sapiens
  CDR3 for beta chain variable domain of TCR clone 235537 (TRBV7-9, TRBJ1-5)
CASSQGHQPNQPQHF

SEQ ID NO: 471075 - protein, 15 aa, Homo sapiens
  CDR3 for alpha chain variable domain of TCR clone 235538 (TRAV8-4, TRAJ3)
CAVTGENLVQQCFQD

SEQ ID NO: 471076 - protein, 11 aa, Homo sapiens
  CDR3 for beta chain variable domain of TCR clone 235538 (TRBV12-4, TRBJ2-7)
CATPEKGEQYF

SEQ ID NO: 471077 - protein, 12 aa, Homo sapiens
  CDR3 for alpha chain variable domain of TCR clone 235539 (TRAV27, TRAJ35)
CARADFGNVLHC

SEQ ID NO: 471078 - protein, 16 aa, Homo sapiens
  CDR3 for beta chain variable domain of TCR clone 235539 (TRBV6-1, TRBJ2-1)
CASILRQGSSYNEQFF

SEQ ID NO: 471079 - protein, 18 aa, Homo sapiens
  CDR3 for alpha chain variable domain of TCR clone 235540 (TRAV12-3, TRAJ52)
CAMSVGGAGGTSYGKLTF

SEQ ID NO: 471080 - protein, 19 aa, Homo sapiens
  CDR3 for beta chain variable domain of TCR clone 235540 (TRBV7-9, TRBJ2-6)
CASSLESATVLPGANVLTF

SEQ ID NO: 471081 - protein, 14 aa, Homo sapiens
  CDR3 for alpha chain variable domain of TCR clone 235541 (TRAV1-1, TRAJ35)
CAVRSIGFGNVLNC

SEQ ID NO: 471082 - protein, 14 aa, Homo sapiens
  CDR3 for beta chain variable domain of TCR clone 235541 (TRBV5-7, TRBJ2-7)
CASSGGLSSYEQYF

SEQ ID NO: 471083 - protein, 16 aa, Homo sapiens
  CDR3 for alpha chain variable domain of TCR clone 235542 (TRAV12-3, TRAJ53)
CAMSVGSGGSHYKLTF

SEQ ID NO: 471084 - protein, 11 aa, Homo sapiens
  CDR3 for beta chain variable domain of TCR clone 235542 (TRBV29-1, TRBJ2-5)
CSVASGETQYF

SEQ ID NO: 471085 - protein, 17 aa, Homo sapiens
  CDR3 for alpha chain variable domain of TCR clone 235543 (TRAV3, TRAJ28)
CAAREEYSWAGSYQLTF

SEQ ID NO: 471086 - protein, 18 aa, Homo sapiens
  CDR3 for beta chain variable domain of TCR clone 235543 (TRBV27, TRBJ2-1)
CASGNRAVGVGSKNEQFF

SEQ ID NO: 471087 - protein, 18 aa, Homo sapiens
  CDR3 for alpha chain variable domain of TCR clone 235544 (TRAV12-2, )
CAVEDIQNPDPAVYQLRD

SEQ ID NO: 471088 - protein, 18 aa, Homo sapiens
  CDR3 for beta chain variable domain of TCR clone 235544 (TRBV11-2, TRBJ2-3)
CASSLGGASRVAPNTQYF

SEQ ID NO: 471089 - protein, 16 aa, Homo sapiens
  CDR3 for alpha chain variable domain of TCR clone 235545 (TRAV3, TRAJ10)
CAVRDMRAGGGNKLTF

SEQ ID NO: 471090 - protein, 13 aa, Homo sapiens
  CDR3 for beta chain variable domain of TCR clone 235545 (TRBV12-4, TRBJ1-2)
CASSSRQGKGYTF

SEQ ID NO: 471091 - protein, 13 aa, Homo sapiens
  CDR3 for alpha chain variable domain of TCR clone 235546 (TRAV12-2, TRAJ10)
CAVPTEGGNKLTF

SEQ ID NO: 471092 - protein, 11 aa, Homo sapiens
  CDR3 for beta chain variable domain of TCR clone 235546 (TRBV6-1, TRBJ2-1)
CASISSNEQFF

SEQ ID NO: 471093 - protein, 12 aa, Homo sapiens
  CDR3 for alpha chain variable domain of TCR clone 235547 (TRAV12-3, TRAJ17)
CAMTLTANKLTF

SEQ ID NO: 471094 - protein, 16 aa, Homo sapiens
  CDR3 for beta chain variable domain of TCR clone 235547 (TRBV7-3, TRBJ2-1)
CASSLEGYRSYNEQFF

SEQ ID NO: 471095 - protein, 18 aa, Homo sapiens
  CDR3 for alpha chain variable domain of TCR clone 235548 (TRAV13-1, TRAJ52)
CAADFPNAGGTSYGKLTF

SEQ ID NO: 471096 - protein, 14 aa, Homo sapiens
  CDR3 for beta chain variable domain of TCR clone 235548 (TRBV11-2, TRBJ2-3)
CASSLYAGGDTQYF

SEQ ID NO: 471097 - protein, 11 aa, Homo sapiens
  CDR3 for alpha chain variable domain of TCR clone 235549 (TRAV21, TRAJ11)
CAVNRYSTLTI

SEQ ID NO: 471098 - protein, 16 aa, Homo sapiens
  CDR3 for beta chain variable domain of TCR clone 235549 (TRBV4-3, TRBJ2-2)
CASSHLQGSGTGELFF

SEQ ID NO: 471099 - protein, 11 aa, Homo sapiens
  CDR3 for alpha chain variable domain of TCR clone 235550 (TRAV1-2, TRAJ31)
RAVKNNARLMF

SEQ ID NO: 471100 - protein, 12 aa, Homo sapiens
  CDR3 for beta chain variable domain of TCR clone 235550 (TRBV20-1, TRBJ2-5)
CSAPRSQETQYF

SEQ ID NO: 471101 - protein, 14 aa, Homo sapiens
  CDR3 for alpha chain variable domain of TCR clone 235551 (TRAV16, TRAJ39)
CALSKNNAGNMLTF

SEQ ID NO: 471102 - protein, 15 aa, Homo sapiens
  CDR3 for beta chain variable domain of TCR clone 235551 (TRBV20-1, TRBJ2-7)
CSAIDRVSGMDEQYF

SEQ ID NO: 471103 - protein, 13 aa, Homo sapiens
  CDR3 for alpha chain variable domain of TCR clone 235552 (TRAV8-3, TRAJ44)
CAVVPGTASQLTF

SEQ ID NO: 471104 - protein, 14 aa, Homo sapiens
  CDR3 for beta chain variable domain of TCR clone 235552 (TRBV11-2, TRBJ2-3)
CASRRLARTDTQYF

SEQ ID NO: 471105 - protein, 14 aa, Homo sapiens
  CDR3 for alpha chain variable domain of TCR clone 235553 (TRAV13-1, TRAJ44)
CAAKATGTASRLTF

SEQ ID NO: 471106 - protein, 16 aa, Homo sapiens
  CDR3 for beta chain variable domain of TCR clone 235553 (TRBV7-9, TRBJ2-6)
CASSLKGPLRANVLTF

SEQ ID NO: 471107 - protein, 12 aa, Homo sapiens
  CDR3 for alpha chain variable domain of TCR clone 235554 (TRAV17, TRAJ39)
CATGAAGNMLTF

SEQ ID NO: 471108 - protein, 14 aa, Homo sapiens
  CDR3 for beta chain variable domain of TCR clone 235554 (TRBV7-9, TRBJ1-2)
CASSRQGANYDYTF

SEQ ID NO: 471109 - protein, 11 aa, Homo sapiens
  CDR3 for alpha chain variable domain of TCR clone 235555 (TRAV12-2, TRAJ30)
CAVGRDDKIIF

SEQ ID NO: 471110 - protein, 14 aa, Homo sapiens
  CDR3 for beta chain variable domain of TCR clone 235555 (TRBV19, TRBJ2-7)
CASSMGQGAIEQYF

SEQ ID NO: 471111 - protein, 17 aa, Homo sapiens
  CDR3 for alpha chain variable domain of TCR clone 235556 (TRAV16, TRAJ42)
CALSPKLYGGSQGNLIF

SEQ ID NO: 471112 - protein, 13 aa, Homo sapiens
  CDR3 for beta chain variable domain of TCR clone 235556 (TRBV19, TRBJ1-5)
CASGTRRDQPQHF

SEQ ID NO: 471113 - protein, 10 aa, Homo sapiens
  CDR3 for alpha chain variable domain of TCR clone 235557 (TRAV27, TRAJ43)
CAGANNDMRF

SEQ ID NO: 471114 - protein, 16 aa, Homo sapiens
  CDR3 for beta chain variable domain of TCR clone 235557 (TRBV27, TRBJ2-2)
CASSSTGGGDTGELFF

SEQ ID NO: 471115 - protein, 14 aa, Homo sapiens
  CDR3 for alpha chain variable domain of TCR clone 235558 (TRAV12-3, TRAJ10)
SHLPLSGGGNKLTF

SEQ ID NO: 471116 - protein, 14 aa, Homo sapiens
  CDR3 for beta chain variable domain of TCR clone 235558 (TRBV6-1, TRBJ1-3)
CASVQGGGGNTMYF

SEQ ID NO: 471117 - protein, 15 aa, Homo sapiens
  CDR3 for alpha chain variable domain of TCR clone 235559 (TRAV3, TRAJ45)
CAVRTPWGGGDGLTF

SEQ ID NO: 471118 - protein, 16 aa, Homo sapiens
  CDR3 for beta chain variable domain of TCR clone 235559 (TRBV6-1, TRBJ2-2)
CASSFGQGANTGELFF

SEQ ID NO: 471119 - protein, 12 aa, Homo sapiens
  CDR3 for alpha chain variable domain of TCR clone 235560 (TRAV13-1, TRAJ48)
CAANFGNEKVTF

SEQ ID NO: 471120 - protein, 12 aa, Homo sapiens
  CDR3 for beta chain variable domain of TCR clone 235560 (TRBV11-2, TRBJ2-1)
CASSPGNNEQFF

SEQ ID NO: 471121 - protein, 14 aa, Homo sapiens
  CDR3 for alpha chain variable domain of TCR clone 235561 (TRAV9-2, TRAJ39)
CALYICNAGNMLTF

SEQ ID NO: 471122 - protein, 16 aa, Homo sapiens
  CDR3 for beta chain variable domain of TCR clone 235561 (TRBV20-1, TRBJ2-6)
CSASSQGYDGANVLTF

SEQ ID NO: 471123 - protein, 14 aa, Homo sapiens
  CDR3 for alpha chain variable domain of TCR clone 235562 (TRAV12-2, TRAJ13)
CAVKKTGGYQKVTF

SEQ ID NO: 471124 - protein, 15 aa, Homo sapiens
  CDR3 for beta chain variable domain of TCR clone 235562 (TRBV27, TRBJ2-1)
CARSNGEGPPMSSSS

SEQ ID NO: 471125 - protein, 15 aa, Homo sapiens
  CDR3 for alpha chain variable domain of TCR clone 235563 (TRAV12-2, TRAJ53)
CAVNGGGGSNYKLTF

SEQ ID NO: 471126 - protein, 13 aa, Homo sapiens
  CDR3 for beta chain variable domain of TCR clone 235563 (TRBV7-2, TRBJ2-2)
CASSSVRAGELFF

SEQ ID NO: 471127 - protein, 14 aa, Homo sapiens
  CDR3 for alpha chain variable domain of TCR clone 235564 (TRAV13-2, TRAJ17)
CAENSKAAGNKLTF

SEQ ID NO: 471128 - protein, 15 aa, Homo sapiens
  CDR3 for beta chain variable domain of TCR clone 235564 (TRBV7-3, TRBJ2-1)
CASSLTSGSYNEQFF

SEQ ID NO: 471129 - protein, 16 aa, Homo sapiens
  CDR3 for alpha chain variable domain of TCR clone 235565 (TRAV3, TRAJ3)
CAVRDRAKSSSSKIIF

SEQ ID NO: 471130 - protein, 13 aa, Homo sapiens
  CDR3 for beta chain variable domain of TCR clone 235565 (TRBV10-3, TRBJ2-7)
CASKLAVNYEQYV

SEQ ID NO: 471131 - protein, 21 aa, Homo sapiens
  CDR3 for alpha chain variable domain of TCR clone 235566 (TRAV8-3, )
CAVVTTRIPDIQNPDPAGYQL

SEQ ID NO: 471132 - protein, 14 aa, Homo sapiens
  CDR3 for beta chain variable domain of TCR clone 235566 (TRBV11-2, TRBJ2-7)
CASSPSTTSYEQYF

SEQ ID NO: 471133 - protein, 12 aa, Homo sapiens
  CDR3 for alpha chain variable domain of TCR clone 235567 (TRAV1-1, TRAJ24)
CAVRGSWGKFQF

SEQ ID NO: 471134 - protein, 15 aa, Homo sapiens
  CDR3 for beta chain variable domain of TCR clone 235567 (TRBV6-6, TRBJ2-7)
CASSYSYGGSYEQYF

SEQ ID NO: 471135 - protein, 12 aa, Homo sapiens
  CDR3 for alpha chain variable domain of TCR clone 235568 (TRAV13-1, TRAJ15)
CAASQAGTALIF

SEQ ID NO: 471136 - protein, 15 aa, Homo sapiens
  CDR3 for beta chain variable domain of TCR clone 235568 (TRBV28, TRBJ2-5)
CASSPPWSYQETQYF

SEQ ID NO: 471137 - protein, 15 aa, Homo sapiens
  CDR3 for alpha chain variable domain of TCR clone 235569 (TRAV22, TRAJ45)
CAAKYSGGGADGLTF

SEQ ID NO: 471138 - protein, 18 aa, Homo sapiens
  CDR3 for beta chain variable domain of TCR clone 235569 (TRBV11-2, TRBJ2-3)
CASSVGGASRGAPNTQYF

SEQ ID NO: 471139 - protein, 11 aa, Homo sapiens
  CDR3 for alpha chain variable domain of TCR clone 235570 (TRAV12-1, TRAJ40)
CVVPGTYKYIF

SEQ ID NO: 471140 - protein, 13 aa, Homo sapiens
  CDR3 for beta chain variable domain of TCR clone 235570 (TRBV20-1, TRBJ1-1)
CSARGGGNTEAFF

SEQ ID NO: 471141 - protein, 13 aa, Homo sapiens
  CDR3 for alpha chain variable domain of TCR clone 235571 (TRAV35, TRAJ36)
CAWPRIGANNLFF

SEQ ID NO: 471142 - protein, 15 aa, Homo sapiens
  CDR3 for beta chain variable domain of TCR clone 235571 (TRBV28, TRBJ2-5)
CASSPSWSYQETQYF

SEQ ID NO: 471143 - protein, 21 aa, Homo sapiens
  CDR3 for alpha chain variable domain of TCR clone 235572 (TRAV17, TRAJ57)
TASRAADTASYFCANPEKLVF

SEQ ID NO: 471144 - protein, 16 aa, Homo sapiens
  CDR3 for beta chain variable domain of TCR clone 235572 (TRBV11-3, TRBJ2-3)
CANSFQGRGALDTQYF

SEQ ID NO: 471145 - protein, 14 aa, Homo sapiens
  CDR3 for alpha chain variable domain of TCR clone 235573 (TRAV8-3, TRAJ15)
CAVGRHEAGTALIF

SEQ ID NO: 471146 - protein, 13 aa, Homo sapiens
  CDR3 for beta chain variable domain of TCR clone 235573 (TRBV9, TRBJ2-7)
CASSASDSYEQYF

SEQ ID NO: 471147 - protein, 13 aa, Homo sapiens
  CDR3 for alpha chain variable domain of TCR clone 235574 (TRAV2, TRAJ40)
CVVVTSGTYKYIF

SEQ ID NO: 471148 - protein, 13 aa, Homo sapiens
  CDR3 for beta chain variable domain of TCR clone 235574 (TRBV24-1, TRBJ2-2)
CATSDWSTGELFF

SEQ ID NO: 471149 - protein, 14 aa, Homo sapiens
  CDR3 for alpha chain variable domain of TCR clone 235575 (TRAV12-3, TRAJ10)
SHLPLTGGGNKLTF

SEQ ID NO: 471150 - protein, 14 aa, Homo sapiens
  CDR3 for beta chain variable domain of TCR clone 235575 (TRBV11-3, TRBJ2-1)
CASSATTSGSIQFF

SEQ ID NO: 471151 - protein, 17 aa, Homo sapiens
  CDR3 for alpha chain variable domain of TCR clone 235576 (TRAV17, TRAJ52)
CATERPSGGTSYGKLTF

SEQ ID NO: 471152 - protein, 18 aa, Homo sapiens
  CDR3 for beta chain variable domain of TCR clone 235576 (TRBV4-1, TRBJ2-7)
CASSQDTGAGSGLNEQYF

SEQ ID NO: 471153 - protein, 14 aa, Homo sapiens
  CDR3 for alpha chain variable domain of TCR clone 235577 (TRAV3, TRAJ36)
CAVRDGTGANNLFF

SEQ ID NO: 471154 - protein, 16 aa, Homo sapiens
  CDR3 for beta chain variable domain of TCR clone 235577 (TRBV20-1, TRBJ2-6)
CSARGGPGDGANVLTF

SEQ ID NO: 471155 - protein, 19 aa, Homo sapiens
  CDR3 for alpha chain variable domain of TCR clone 235578 (TRAV9-2, TRAJ52)
CALSFPLLSGGTSYGKLTF

SEQ ID NO: 471156 - protein, 14 aa, Homo sapiens
  CDR3 for beta chain variable domain of TCR clone 235578 (TRBV7-6, TRBJ2-7)
CASSLFQDSDEQYF

SEQ ID NO: 471157 - protein, 14 aa, Homo sapiens
  CDR3 for alpha chain variable domain of TCR clone 235579 (TRAV1-2, TRAJ8)
CAVREDTGFQKLVF

SEQ ID NO: 471158 - protein, 16 aa, Homo sapiens
  CDR3 for beta chain variable domain of TCR clone 235579 (TRBV12-5, TRBJ2-5)
CASGPRTSGNQETQYL

SEQ ID NO: 471159 - protein, 11 aa, Homo sapiens
  CDR3 for alpha chain variable domain of TCR clone 235580 (TRAV12-2, TRAJ54)
CAVEGAQKLVF

SEQ ID NO: 471160 - protein, 17 aa, Homo sapiens
  CDR3 for beta chain variable domain of TCR clone 235580 (TRBV18, TRBJ1-3)
CASSPYPTGPCGNTIYF

SEQ ID NO: 471161 - protein, 15 aa, Homo sapiens
  CDR3 for alpha chain variable domain of TCR clone 235581 (TRAV1-1, TRAJ5)
CAVRHMDTGRRALTF

SEQ ID NO: 471162 - protein, 17 aa, Homo sapiens
  CDR3 for beta chain variable domain of TCR clone 235581 (TRBV28, TRBJ2-7)
CASSQGLAGGDSSEQYF

SEQ ID NO: 471163 - protein, 16 aa, Homo sapiens
  CDR3 for alpha chain variable domain of TCR clone 235582 (TRAV1-1, TRAJ29)
CAVRSTRNSGNTPLVF

SEQ ID NO: 471164 - protein, 11 aa, Homo sapiens
  CDR3 for beta chain variable domain of TCR clone 235582 (TRBV25-1, TRBJ2-1)
CATTRISEQFF

SEQ ID NO: 471165 - protein, 16 aa, Homo sapiens
  CDR3 for alpha chain variable domain of TCR clone 235583 (TRAV3, TRAJ21)
CAVRDIERGNFNKFYF

SEQ ID NO: 471166 - protein, 15 aa, Homo sapiens
  CDR3 for beta chain variable domain of TCR clone 235583 (TRBV28, TRBJ2-1)
CASSIIAGGRSEQFF

SEQ ID NO: 471167 - protein, 14 aa, Homo sapiens
  CDR3 for alpha chain variable domain of TCR clone 235584 (TRAV26-1, TRAJ38)
CIANNAGNNRKLIW

SEQ ID NO: 471168 - protein, 17 aa, Homo sapiens
  CDR3 for beta chain variable domain of TCR clone 235584 (TRBV7-9, TRBJ2-3)
CASRPTVAGDLTDTQYF

SEQ ID NO: 471169 - protein, 10 aa, Homo sapiens
  CDR3 for alpha chain variable domain of TCR clone 235585 (TRAV12-2, TRAJ27)
CGANAGKSTF

SEQ ID NO: 471170 - protein, 16 aa, Homo sapiens
  CDR3 for beta chain variable domain of TCR clone 235585 (TRBV2, TRBJ2-5)
CASSETQGVGEETQYF

SEQ ID NO: 471171 - protein, 11 aa, Homo sapiens
  CDR3 for alpha chain variable domain of TCR clone 235586 (TRAV21, TRAJ48)
CAVDGNEKLTF

SEQ ID NO: 471172 - protein, 15 aa, Homo sapiens
  CDR3 for beta chain variable domain of TCR clone 235586 (TRBV7-9, TRBJ2-7)
CASSPGGGLTYEQYF

SEQ ID NO: 471173 - protein, 12 aa, Homo sapiens
  CDR3 for alpha chain variable domain of TCR clone 235587 (TRAV12-3, TRAJ17)
CAMTLTGNKLTF

SEQ ID NO: 471174 - protein, 14 aa, Homo sapiens
  CDR3 for beta chain variable domain of TCR clone 235587 (TRBV12-4, TRBJ1-2)
CASSETGRDYGYTF

SEQ ID NO: 471175 - protein, 14 aa, Homo sapiens
  CDR3 for alpha chain variable domain of TCR clone 235588 (TRAV16, TRAJ39)
CALSKNNAGNMLTF

SEQ ID NO: 471176 - protein, 18 aa, Homo sapiens
  CDR3 for beta chain variable domain of TCR clone 235588 (TRBV11-2, TRBJ2-3)
CASSLGGASRGAPNTQYF

SEQ ID NO: 471177 - protein, 12 aa, Homo sapiens
  CDR3 for alpha chain variable domain of TCR clone 235589 (TRAV8-3, TRAJ40)
CAGTSGTYKYIF

SEQ ID NO: 471178 - protein, 14 aa, Homo sapiens
  CDR3 for beta chain variable domain of TCR clone 235589 (TRBV12-4, TRBJ2-3)
CASSGQGSTDTQYF

SEQ ID NO: 471179 - protein, 14 aa, Homo sapiens
  CDR3 for alpha chain variable domain of TCR clone 235590 (TRAV26-1, TRAJ34)
CIVRVAYNPDKLIF

SEQ ID NO: 471180 - protein, 15 aa, Homo sapiens
  CDR3 for beta chain variable domain of TCR clone 235590 (TRBV20-1, TRBJ2-7)
CSARVPAACVYEQYF

SEQ ID NO: 471181 - protein, 14 aa, Homo sapiens
  CDR3 for alpha chain variable domain of TCR clone 235591 (TRAV12-1, TRAJ3)
GGAARYSSASKIIF

SEQ ID NO: 471182 - protein, 15 aa, Homo sapiens
  CDR3 for beta chain variable domain of TCR clone 235591 (TRBV7-2, TRBJ2-6)
CASSREGSGANVLTF

SEQ ID NO: 471183 - protein, 17 aa, Homo sapiens
  CDR3 for alpha chain variable domain of TCR clone 235592 (TRAV36/DV7, TRAJ52)
CAVAQRAGGTSYGKLTF

SEQ ID NO: 471184 - protein, 14 aa, Homo sapiens
  CDR3 for beta chain variable domain of TCR clone 235592 (TRBV5-1, TRBJ2-7)
CASSLTGSGYEQYF

SEQ ID NO: 471185 - protein, 12 aa, Homo sapiens
  CDR3 for alpha chain variable domain of TCR clone 235593 (TRAV3, TRAJ31)
CAVRDGNASLMF

SEQ ID NO: 471186 - protein, 18 aa, Homo sapiens
  CDR3 for beta chain variable domain of TCR clone 235593 (TRBV7-2, TRBJ2-3)
CASSLKRKGSGITDTQYF

SEQ ID NO: 471187 - protein, 14 aa, Homo sapiens
  CDR3 for alpha chain variable domain of TCR clone 235594 (TRAV1-2, TRAJ8)
CAVREDTGFQKLVF

SEQ ID NO: 471188 - protein, 16 aa, Homo sapiens
  CDR3 for beta chain variable domain of TCR clone 235594 (TRBV7-6, TRBJ2-6)
FASSLPGLSGANVLTF

SEQ ID NO: 471189 - protein, 12 aa, Homo sapiens
  CDR3 for alpha chain variable domain of TCR clone 235595 (TRAV13-1, TRAJ49)
CAASIRSNPFYF

SEQ ID NO: 471190 - protein, 14 aa, Homo sapiens
  CDR3 for beta chain variable domain of TCR clone 235595 (TRBV7-2, TRBJ2-1)
CASSPGLAGNEQFF

SEQ ID NO: 471191 - protein, 15 aa, Homo sapiens
  CDR3 for alpha chain variable domain of TCR clone 235596 (TRAV38-1, TRAJ37)
CAFIFGSGNTGKLIF

SEQ ID NO: 471192 - protein, 12 aa, Homo sapiens
  CDR3 for beta chain variable domain of TCR clone 235596 (TRBV7-9, TRBJ2-7)
CASSFEGYEQYF

SEQ ID NO: 471193 - protein, 11 aa, Homo sapiens
  CDR3 for alpha chain variable domain of TCR clone 235597 (TRAV12-2, TRAJ29)
CAVTLRSPLVF

SEQ ID NO: 471194 - protein, 16 aa, Homo sapiens
  CDR3 for beta chain variable domain of TCR clone 235597 (TRBV29-1, TRBJ2-2)
CSVETRASGNTGELVF

SEQ ID NO: 471195 - protein, 14 aa, Homo sapiens
  CDR3 for alpha chain variable domain of TCR clone 235598 (TRAV12-1, TRAJ30)
CVVRGMNSDDKITF

SEQ ID NO: 471196 - protein, 14 aa, Homo sapiens
  CDR3 for beta chain variable domain of TCR clone 235598 (TRBV7-2, TRBJ2-1)
CASSLTSGNRRQFF

SEQ ID NO: 471197 - protein, 15 aa, Homo sapiens
  CDR3 for alpha chain variable domain of TCR clone 235599 (TRAV8-1, TRAJ17)
CAVNAEKAAGKKLTF

SEQ ID NO: 471198 - protein, 15 aa, Homo sapiens
  CDR3 for beta chain variable domain of TCR clone 235599 (TRBV28, TRBJ2-5)
CASSPPWSYQETQYF

SEQ ID NO: 471199 - protein, 14 aa, Homo sapiens
  CDR3 for alpha chain variable domain of TCR clone 235600 (TRAV13-1, TRAJ35)
CAASKGGFGNVLHC

SEQ ID NO: 471200 - protein, 15 aa, Homo sapiens
  CDR3 for beta chain variable domain of TCR clone 235600 (TRBV7-2, TRBJ1-5)
CASSLGRGAGQPQHF

SEQ ID NO: 471201 - protein, 14 aa, Homo sapiens
  CDR3 for alpha chain variable domain of TCR clone 235601 (TRAV27, TRAJ15)
CAGFDKQAGTALIF

SEQ ID NO: 471202 - protein, 11 aa, Homo sapiens
  CDR3 for beta chain variable domain of TCR clone 235601 (TRBV29-1, TRBJ1-1)
CSVEVGTRTFF

SEQ ID NO: 471203 - protein, 12 aa, Homo sapiens
  CDR3 for alpha chain variable domain of TCR clone 235602 (TRAV13-1, TRAJ21)
CAAKEGFNKFYF

SEQ ID NO: 471204 - protein, 15 aa, Homo sapiens
  CDR3 for beta chain variable domain of TCR clone 235602 (TRBV20-1, TRBJ2-7)
CSAESGTSGAYEQYF

SEQ ID NO: 471205 - protein, 14 aa, Homo sapiens
  CDR3 for alpha chain variable domain of TCR clone 235603 (TRAV2, TRAJ23)
CAVGLRNQGGKLIF

SEQ ID NO: 471206 - protein, 17 aa, Homo sapiens
  CDR3 for beta chain variable domain of TCR clone 235603 (TRBV11-2, TRBJ2-1)
CASSLYPPGVEYNEQFF

SEQ ID NO: 471207 - protein, 13 aa, Homo sapiens
  CDR3 for alpha chain variable domain of TCR clone 235604 (TRAV26-2, TRAJ37)
CIRGSNNTGKLIF

SEQ ID NO: 471208 - protein, 16 aa, Homo sapiens
  CDR3 for beta chain variable domain of TCR clone 235604 (TRBV7-2, TRBJ2-5)
CASSPGGARRGETQYF

SEQ ID NO: 471209 - protein, 15 aa, Homo sapiens
  CDR3 for alpha chain variable domain of TCR clone 235605 (TRAV17, TRAJ22)
CATVAPSGSARQLTF

SEQ ID NO: 471210 - protein, 14 aa, Homo sapiens
  CDR3 for beta chain variable domain of TCR clone 235605 (TRBV7-9, TRBJ2-2)
CASSGLADTGELFF

SEQ ID NO: 471211 - protein, 14 aa, Homo sapiens
  CDR3 for alpha chain variable domain of TCR clone 235606 (TRAV8-3, TRAJ3)
CAVVPRSSASKIVF

SEQ ID NO: 471212 - protein, 16 aa, Homo sapiens
  CDR3 for beta chain variable domain of TCR clone 235606 (TRBV4-1, TRBJ2-3)
CASSQLTSGGGDTQYF

SEQ ID NO: 471213 - protein, 11 aa, Homo sapiens
  CDR3 for alpha chain variable domain of TCR clone 235607 (TRAV2, TRAJ33)
CAVESNYQLIW

SEQ ID NO: 471214 - protein, 16 aa, Homo sapiens
  CDR3 for beta chain variable domain of TCR clone 235607 (TRBV28, TRBJ2-7)
CASSLFFETGGPEQYF

SEQ ID NO: 471215 - protein, 12 aa, Homo sapiens
  CDR3 for alpha chain variable domain of TCR clone 235608 (TRAV12-3, TRAJ17)
CTMTLTGNKLTF

SEQ ID NO: 471216 - protein, 14 aa, Homo sapiens
  CDR3 for beta chain variable domain of TCR clone 235608 (TRBV20-1, TRBJ2-1)
CSAQIGGSANEQFF

SEQ ID NO: 471217 - protein, 14 aa, Homo sapiens
  CDR3 for alpha chain variable domain of TCR clone 235609 (TRAV1-2, TRAJ16)
CAVNRFSDGQQLLF

SEQ ID NO: 471218 - protein, 13 aa, Homo sapiens
  CDR3 for beta chain variable domain of TCR clone 235609 (TRBV19, TRBJ2-7)
CASSTSGSYEQYF

SEQ ID NO: 471219 - protein, 17 aa, Homo sapiens
  CDR3 for alpha chain variable domain of TCR clone 235610 (TRAV3, TRAJ38)
CAVRSCLNAGNNRKLIW

SEQ ID NO: 471220 - protein, 16 aa, Homo sapiens
  CDR3 for beta chain variable domain of TCR clone 235610 (TRBV20-1, TRBJ1-4)
CSAPGQGLLTNEKLFF

SEQ ID NO: 471221 - protein, 13 aa, Homo sapiens
  CDR3 for alpha chain variable domain of TCR clone 235611 (TRAV2, TRAJ40)
CAVVTSGTYKYIF

SEQ ID NO: 471222 - protein, 11 aa, Homo sapiens
  CDR3 for beta chain variable domain of TCR clone 235611 (TRBV11-2, TRBJ2-2)
CASSLPGELFS

SEQ ID NO: 471223 - protein, 14 aa, Homo sapiens
  CDR3 for alpha chain variable domain of TCR clone 235612 (TRAV12-3, TRAJ10)
SHLPLTGGVNKLTF

SEQ ID NO: 471224 - protein, 14 aa, Homo sapiens
  CDR3 for beta chain variable domain of TCR clone 235612 (TRBV6-1, TRBJ1-3)
CASVQGGGGNTIYF

SEQ ID NO: 471225 - protein, 10 aa, Homo sapiens
  CDR3 for alpha chain variable domain of TCR clone 235613 (TRAV1-2, TRAJ31)
CAFFDARLMF

SEQ ID NO: 471226 - protein, 13 aa, Homo sapiens
  CDR3 for beta chain variable domain of TCR clone 235613 (TRBV19, TRBJ2-5)
CASSMGGAGTQYF

SEQ ID NO: 471227 - protein, 13 aa, Homo sapiens
  CDR3 for alpha chain variable domain of TCR clone 235614 (TRAV23/DV6, TRAJ29)
CAARNSGNTPLVF

SEQ ID NO: 471228 - protein, 15 aa, Homo sapiens
  CDR3 for beta chain variable domain of TCR clone 235614 (TRBV5-1, TRBJ1-1)
CASSSRTGRNTEAFC

SEQ ID NO: 471229 - protein, 15 aa, Homo sapiens
  CDR3 for alpha chain variable domain of TCR clone 235615 (TRAV8-3, TRAJ11)
CAVGLLNSGYSTLTF

SEQ ID NO: 471230 - protein, 16 aa, Homo sapiens
  CDR3 for beta chain variable domain of TCR clone 235615 (TRBV7-9, TRBJ1-2)
CASSLGFSSGEHGYTF

SEQ ID NO: 471231 - protein, 16 aa, Homo sapiens
  CDR3 for alpha chain variable domain of TCR clone 235616 (TRAV3, TRAJ37)
CAVRSHGSGNTGKLIF

SEQ ID NO: 471232 - protein, 13 aa, Homo sapiens
  CDR3 for beta chain variable domain of TCR clone 235616 (TRBV2, TRBJ1-5)
CASGTGGYQPQHF

SEQ ID NO: 471233 - protein, 12 aa, Homo sapiens
  CDR3 for alpha chain variable domain of TCR clone 235617 (TRAV2, TRAJ33)
CAVPDSNYQLIW

SEQ ID NO: 471234 - protein, 14 aa, Homo sapiens
  CDR3 for beta chain variable domain of TCR clone 235617 (TRBV12-4, TRBJ2-7)
CASSPRQDLYEQYF

SEQ ID NO: 471235 - protein, 13 aa, Homo sapiens
  CDR3 for alpha chain variable domain of TCR clone 235618 (TRAV12-2, TRAJ39)
CSVNNNAGNMLTF

SEQ ID NO: 471236 - protein, 13 aa, Homo sapiens
  CDR3 for beta chain variable domain of TCR clone 235618 (TRBV2, TRBJ1-5)
CATAGAGNQHQHF

SEQ ID NO: 471237 - protein, 14 aa, Homo sapiens
  CDR3 for alpha chain variable domain of TCR clone 235619 (TRAV1-2, TRAJ16)
CAVNRFSDCQRLLF

SEQ ID NO: 471238 - protein, 16 aa, Homo sapiens
  CDR3 for beta chain variable domain of TCR clone 235619 (TRBV25-1, TRBJ1-1)
CASSGDRDRGRIEAFF

SEQ ID NO: 471239 - protein, 17 aa, Homo sapiens
  CDR3 for alpha chain variable domain of TCR clone 235620 (TRAV3, TRAJ28)
CAVREAYSGAGSYQLTF

SEQ ID NO: 471240 - protein, 18 aa, Homo sapiens
  CDR3 for beta chain variable domain of TCR clone 235620 (TRBV27, TRBJ2-1)
CASGNRTVGVGSKNEQFF

SEQ ID NO: 471241 - protein, 13 aa, Homo sapiens
  CDR3 for alpha chain variable domain of TCR clone 235621 (TRAV16, TRAJ22)
SAMLAGSARQLTF

SEQ ID NO: 471242 - protein, 13 aa, Homo sapiens
  CDR3 for beta chain variable domain of TCR clone 235621 (TRBV12-5, TRBJ2-3)
CASGDRQSDTQYF

SEQ ID NO: 471243 - protein, 12 aa, Homo sapiens
  CDR3 for alpha chain variable domain of TCR clone 235622 (TRAV13-2, TRAJ23)
CAERHTGGKLIF

SEQ ID NO: 471244 - protein, 18 aa, Homo sapiens
  CDR3 for beta chain variable domain of TCR clone 235622 (TRBV18, TRBJ1-3)
CASSPRGGAGPSGNTIYF

SEQ ID NO: 471245 - protein, 15 aa, Homo sapiens
  CDR3 for alpha chain variable domain of TCR clone 235623 (TRAV8-4, TRAJ12)
CAVSDRVDSSYKLIF

SEQ ID NO: 471246 - protein, 15 aa, Homo sapiens
  CDR3 for beta chain variable domain of TCR clone 235623 (TRBV11-2, TRBJ2-7)
CASSTPGLTRGEQYF

SEQ ID NO: 471247 - protein, 11 aa, Homo sapiens
  CDR3 for alpha chain variable domain of TCR clone 235624 (TRAV8-3, TRAJ49)
CAVGGGNQFYF

SEQ ID NO: 471248 - protein, 16 aa, Homo sapiens
  CDR3 for beta chain variable domain of TCR clone 235624 (TRBV28, TRBJ2-7)
CASSFPDRRLTYEQYF

SEQ ID NO: 471249 - protein, 10 aa, Homo sapiens
  CDR3 for alpha chain variable domain of TCR clone 235625 (TRAV13-2, TRAJ5)
CRTGRRALTF

SEQ ID NO: 471250 - protein, 15 aa, Homo sapiens
  CDR3 for beta chain variable domain of TCR clone 235625 (TRBV11-3, TRBJ2-1)
CASSLAGTGINEQFF

SEQ ID NO: 471251 - protein, 13 aa, Homo sapiens
  CDR3 for alpha chain variable domain of TCR clone 235626 (TRAV13-2, TRAJ53)
CAENIGSNYKLTF

SEQ ID NO: 471252 - protein, 13 aa, Homo sapiens
  CDR3 for beta chain variable domain of TCR clone 235626 (TRBV4-1, TRBJ2-2)
CASNQENTGELFF

SEQ ID NO: 471253 - protein, 17 aa, Homo sapiens
  CDR3 for alpha chain variable domain of TCR clone 235627 (TRAV14/DV4, TRAJ53)
CNERGPSSGGSNYKLTF

SEQ ID NO: 471254 - protein, 13 aa, Homo sapiens
  CDR3 for beta chain variable domain of TCR clone 235627 (TRBV7-2, TRBJ1-4)
CASSLAGLEKLFF

SEQ ID NO: 471255 - protein, 16 aa, Homo sapiens
  CDR3 for alpha chain variable domain of TCR clone 235628 (TRAV30, TRAJ24)
CGTEIVDADSWGKFQF

SEQ ID NO: 471256 - protein, 13 aa, Homo sapiens
  CDR3 for beta chain variable domain of TCR clone 235628 (TRBV6-5, TRBJ1-5)
CASSLYSNQTQHF

SEQ ID NO: 471257 - protein, 12 aa, Homo sapiens
  CDR3 for alpha chain variable domain of TCR clone 235629 (TRAV2, TRAJ9)
CAVGAGGFKTIF

SEQ ID NO: 471258 - protein, 14 aa, Homo sapiens
  CDR3 for beta chain variable domain of TCR clone 235629 (TRBV12-5, TRBJ2-5)
CASGSRTHQDTQYF

SEQ ID NO: 471259 - protein, 16 aa, Homo sapiens
  CDR3 for alpha chain variable domain of TCR clone 235630 (TRAV8-3, TRAJ8)
CAVPRDGSTGFQKLVF

SEQ ID NO: 471260 - protein, 14 aa, Homo sapiens
  CDR3 for beta chain variable domain of TCR clone 235630 (TRBV4-1, TRBJ2-2)
CASSQAVNTGELFF

SEQ ID NO: 471261 - protein, 14 aa, Homo sapiens
  CDR3 for alpha chain variable domain of TCR clone 235631 (TRAV1-2, TRAJ8)
CAVREDTGFQKLVF

SEQ ID NO: 471262 - protein, 14 aa, Homo sapiens
  CDR3 for beta chain variable domain of TCR clone 235631 (TRBV2, TRBJ2-1)
CASSDGPNYNEQFF

SEQ ID NO: 471263 - protein, 15 aa, Homo sapiens
  CDR3 for alpha chain variable domain of TCR clone 235632 (TRAV13-1, TRAJ11)
YAASNRNSGYSTLTF

SEQ ID NO: 471264 - protein, 11 aa, Homo sapiens
  CDR3 for beta chain variable domain of TCR clone 235632 (TRBV20-1, TRBJ2-7)
CSARLSYEQYF

SEQ ID NO: 471265 - protein, 11 aa, Homo sapiens
  CDR3 for alpha chain variable domain of TCR clone 235633 (TRAV2, TRAJ13)
CASGGYQKVTL

SEQ ID NO: 471266 - protein, 19 aa, Homo sapiens
  CDR3 for beta chain variable domain of TCR clone 235633 (TRBV25-1, TRBJ2-2)
CAILVYRVDRGRKTGELFF

SEQ ID NO: 471267 - protein, 13 aa, Homo sapiens
  CDR3 for alpha chain variable domain of TCR clone 235634 (TRAV14/DV4, TRAJ26)
CAMREAYVQNFVF

SEQ ID NO: 471268 - protein, 19 aa, Homo sapiens
  CDR3 for beta chain variable domain of TCR clone 235634 (TRBV13, TRBJ2-6)
CASSLVHRDRGAGANVLTF

SEQ ID NO: 471269 - protein, 11 aa, Homo sapiens
  CDR3 for alpha chain variable domain of TCR clone 235635 (TRAV1-2, TRAJ20)
CAVANDYKLSF

SEQ ID NO: 471270 - protein, 15 aa, Homo sapiens
  CDR3 for beta chain variable domain of TCR clone 235635 (TRBV29-1, TRBJ2-1)
CSVGRHALFYNEQFF

SEQ ID NO: 471271 - protein, 10 aa, Homo sapiens
  CDR3 for alpha chain variable domain of TCR clone 235636 (TRAV8-2, )
CVVSELRRTQ

SEQ ID NO: 471272 - protein, 11 aa, Homo sapiens
  CDR3 for beta chain variable domain of TCR clone 235636 (TRBV20-1, TRBJ2-7)
CSARLSYEQYF

SEQ ID NO: 471273 - protein, 18 aa, Homo sapiens
  CDR3 for alpha chain variable domain of TCR clone 235637 (TRAV21, TRAJ52)
CAVRPSPAGGTSYGKLTF

SEQ ID NO: 471274 - protein, 14 aa, Homo sapiens
  CDR3 for beta chain variable domain of TCR clone 235637 (TRBV4-1, TRBJ2-2)
CASSQAVNIGELFF

SEQ ID NO: 471275 - protein, 18 aa, Homo sapiens
  CDR3 for alpha chain variable domain of TCR clone 235638 (TRAV21, TRAJ52)
CAVRPSPAGGTSYGKLTF

SEQ ID NO: 471276 - protein, 17 aa, Homo sapiens
  CDR3 for beta chain variable domain of TCR clone 235638 (TRBV13, TRBJ2-3)
CASSISRGAGGRNTQYF

SEQ ID NO: 471277 - protein, 12 aa, Homo sapiens
  CDR3 for alpha chain variable domain of TCR clone 235639 (TRAV17, TRAJ49)
CATVTTGNQFYL

SEQ ID NO: 471278 - protein, 13 aa, Homo sapiens
  CDR3 for beta chain variable domain of TCR clone 235639 (TRBV7-2, TRBJ2-2)
CTSSLAVTGELFF

SEQ ID NO: 471279 - protein, 14 aa, Homo sapiens
  CDR3 for alpha chain variable domain of TCR clone 235640 (TRAV12-3, TRAJ10)
SHLPLTGGGNKLTF

SEQ ID NO: 471280 - protein, 15 aa, Homo sapiens
  CDR3 for beta chain variable domain of TCR clone 235640 (TRBV27, TRBJ1-5)
CASSLGIGFDQPQHF

SEQ ID NO: 471281 - protein, 14 aa, Homo sapiens
  CDR3 for alpha chain variable domain of TCR clone 235641 (TRAV1-2, TRAJ16)
CAVNRFSDGQKLLF

SEQ ID NO: 471282 - protein, 16 aa, Homo sapiens
  CDR3 for beta chain variable domain of TCR clone 235641 (TRBV12-4, TRBJ1-5)
CDSSRPVGGSNQPQHF

SEQ ID NO: 471283 - protein, 13 aa, Homo sapiens
  CDR3 for alpha chain variable domain of TCR clone 235642 (TRAV12-1, TRAJ49)
CVVTPFTGNQFFF

SEQ ID NO: 471284 - protein, 13 aa, Homo sapiens
  CDR3 for beta chain variable domain of TCR clone 235642 (TRBV20-1, TRBJ1-1)
CSARGGANTEAFF

SEQ ID NO: 471285 - protein, 14 aa, Homo sapiens
  CDR3 for alpha chain variable domain of TCR clone 235643 (TRAV13-1, TRAJ15)
CAASTNQAGTAQIF

SEQ ID NO: 471286 - protein, 11 aa, Homo sapiens
  CDR3 for beta chain variable domain of TCR clone 235643 (TRBV7-2, TRBJ2-1)
CASSLRDNEFF

SEQ ID NO: 471287 - protein, 13 aa, Homo sapiens
  CDR3 for alpha chain variable domain of TCR clone 235644 (TRAV30, TRAJ20)
CGTEDRSDYKLSF

SEQ ID NO: 471288 - protein, 13 aa, Homo sapiens
  CDR3 for beta chain variable domain of TCR clone 235644 (TRBV7-3, TRBJ1-1)
CASSQDWGAEAFF

SEQ ID NO: 471289 - protein, 15 aa, Homo sapiens
  CDR3 for alpha chain variable domain of TCR clone 235645 (TRAV26-1, TRAJ29)
CIVRVEGSGNTPLVF

SEQ ID NO: 471290 - protein, 15 aa, Homo sapiens
  CDR3 for beta chain variable domain of TCR clone 235645 (TRBV19, TRBJ2-1)
CASSIVRGEGREQFF

SEQ ID NO: 471291 - protein, 13 aa, Homo sapiens
  CDR3 for alpha chain variable domain of TCR clone 235646 (TRAV12-1, TRAJ40)
CVVPTSGTYKYIF

SEQ ID NO: 471292 - protein, 17 aa, Homo sapiens
  CDR3 for beta chain variable domain of TCR clone 235646 (TRBV11-2, TRBJ2-1)
CASSLYPPGVEYNEQFF

SEQ ID NO: 471293 - protein, 15 aa, Homo sapiens
  CDR3 for alpha chain variable domain of TCR clone 235647 (TRAV12-3, TRAJ6)
CAMSATTGGSYIPTF

SEQ ID NO: 471294 - protein, 15 aa, Homo sapiens
  CDR3 for beta chain variable domain of TCR clone 235647 (TRBV19, TRBJ2-4)
CASRGPRRGENSQYF

SEQ ID NO: 471295 - protein, 11 aa, Homo sapiens
  CDR3 for alpha chain variable domain of TCR clone 235648 (TRAV2, TRAJ21)
CAVFNFNKFYF

SEQ ID NO: 471296 - protein, 15 aa, Homo sapiens
  CDR3 for beta chain variable domain of TCR clone 235648 (TRBV7-9, TRBJ2-1)
CASSLGWGRANEQFF

SEQ ID NO: 471297 - protein, 14 aa, Homo sapiens
  CDR3 for alpha chain variable domain of TCR clone 235649 (TRAV30, TRAJ33)
CGTVAPRSNYQLIW

SEQ ID NO: 471298 - protein, 14 aa, Homo sapiens
  CDR3 for beta chain variable domain of TCR clone 235649 (TRBV19, TRBJ2-1)
CASPTFGLSGEQFF

SEQ ID NO: 471299 - protein, 13 aa, Homo sapiens
  CDR3 for alpha chain variable domain of TCR clone 235650 (TRAV29/DV5, TRAJ31)
CAASRNNNARPMF

SEQ ID NO: 471300 - protein, 15 aa, Homo sapiens
  CDR3 for beta chain variable domain of TCR clone 235650 (TRBV27, TRBJ2-1)
CASSNGGGSSNEQFF

SEQ ID NO: 471301 - protein, 15 aa, Homo sapiens
  CDR3 for alpha chain variable domain of TCR clone 235651 (TRAV20, TRAJ50)
CAVRQMKTPYDKVIF

SEQ ID NO: 471302 - protein, 17 aa, Homo sapiens
  CDR3 for beta chain variable domain of TCR clone 235651 (TRBV28, TRBJ2-7)
CASSPLHRASGVYEQYF

SEQ ID NO: 471303 - protein, 14 aa, Homo sapiens
  CDR3 for alpha chain variable domain of TCR clone 235652 (TRAV23/DV6, TRAJ40)
CAASLTSGTYKYIF

SEQ ID NO: 471304 - protein, 14 aa, Homo sapiens
  CDR3 for beta chain variable domain of TCR clone 235652 (TRBV5-1, TRBJ2-3)
RASSRGQGGGTQYF

SEQ ID NO: 471305 - protein, 12 aa, Homo sapiens
  CDR3 for alpha chain variable domain of TCR clone 235653 (TRAV12-1, TRAJ40)
CVVYSGTYKYIF

SEQ ID NO: 471306 - protein, 15 aa, Homo sapiens
  CDR3 for beta chain variable domain of TCR clone 235653 (TRBV20-1, TRBJ2-5)
CSAPPRTGFGETQYF

SEQ ID NO: 471307 - protein, 15 aa, Homo sapiens
  CDR3 for alpha chain variable domain of TCR clone 235654 (TRAV12-3, TRAJ6)
CAMSATTGGSYIPTF

SEQ ID NO: 471308 - protein, 17 aa, Homo sapiens
  CDR3 for beta chain variable domain of TCR clone 235654 (TRBV13, TRBJ2-3)
CASSLSRVAGGRNTQDF

SEQ ID NO: 471309 - protein, 14 aa, Homo sapiens
  CDR3 for alpha chain variable domain of TCR clone 235655 (TRAV16, TRAJ3)
CALSQYSSASKIIF

SEQ ID NO: 471310 - protein, 16 aa, Homo sapiens
  CDR3 for beta chain variable domain of TCR clone 235655 (TRBV27, TRBJ2-2)
CASSFRGLVRTGELFF

SEQ ID NO: 471311 - protein, 14 aa, Homo sapiens
  CDR3 for alpha chain variable domain of TCR clone 235656 (TRAV3, TRAJ21)
CAVRDAHNFNKFYF

SEQ ID NO: 471312 - protein, 17 aa, Homo sapiens
  CDR3 for beta chain variable domain of TCR clone 235656 (TRBV20-1, TRBJ1-6)
CSARGGYTFSYNSPLHF

SEQ ID NO: 471313 - protein, 15 aa, Homo sapiens
  CDR3 for alpha chain variable domain of TCR clone 235657 (TRAV26-1, TRAJ48)
CIARWSWFGNEKLTF

SEQ ID NO: 471314 - protein, 12 aa, Homo sapiens
  CDR3 for beta chain variable domain of TCR clone 235657 (TRBV19, TRBJ2-5)
CASRIAEETQYF

SEQ ID NO: 471315 - protein, 14 aa, Homo sapiens
  CDR3 for alpha chain variable domain of TCR clone 235658 (TRAV13-2, TRAJ11)
CAETGNSGYSTLTL

SEQ ID NO: 471316 - protein, 11 aa, Homo sapiens
  CDR3 for beta chain variable domain of TCR clone 235658 (TRBV10-3, TRBJ2-7)
CAISEGLEQYF

SEQ ID NO: 471317 - protein, 14 aa, Homo sapiens
  CDR3 for alpha chain variable domain of TCR clone 235659 (TRAV8-4, TRAJ48)
WAVSETFGNEKLTF

SEQ ID NO: 471318 - protein, 14 aa, Homo sapiens
  CDR3 for beta chain variable domain of TCR clone 235659 (TRBV13, TRBJ2-7)
CASSLKGASYEQYF

SEQ ID NO: 471319 - protein, 12 aa, Homo sapiens
  CDR3 for alpha chain variable domain of TCR clone 235660 (TRAV1-2, TRAJ26)
CAVRYYGQNFFF

SEQ ID NO: 471320 - protein, 14 aa, Homo sapiens
  CDR3 for beta chain variable domain of TCR clone 235660 (TRBV11-1, TRBJ2-7)
RASSFRQGSYEQYF

SEQ ID NO: 471321 - protein, 13 aa, Homo sapiens
  CDR3 for alpha chain variable domain of TCR clone 235661 (TRAV8-6, TRAJ50)
CAVIKTSYDTVIF

SEQ ID NO: 471322 - protein, 15 aa, Homo sapiens
  CDR3 for beta chain variable domain of TCR clone 235661 (TRBV7-2, TRBJ2-2)
CASRRPGQNTGELFF

SEQ ID NO: 471323 - protein, 13 aa, Homo sapiens
  CDR3 for alpha chain variable domain of TCR clone 235662 (TRAV3, TRAJ8)
CAVRFTGFQKLVF

SEQ ID NO: 471324 - protein, 13 aa, Homo sapiens
  CDR3 for beta chain variable domain of TCR clone 235662 (TRBV2, TRBJ2-2)
CASSKKNTGELFF

SEQ ID NO: 471325 - protein, 14 aa, Homo sapiens
  CDR3 for alpha chain variable domain of TCR clone 235663 (TRAV9-2, TRAJ39)
CALYIHNAGNMLTF

SEQ ID NO: 471326 - protein, 13 aa, Homo sapiens
  CDR3 for beta chain variable domain of TCR clone 235663 (TRBV5-1, TRBJ2-7)
CASSTGQGAKQYF

SEQ ID NO: 471327 - protein, 17 aa, Homo sapiens
  CDR3 for alpha chain variable domain of TCR clone 235664 (TRAV17, TRAJ52)
CATERPSGGTSFGKLTF

SEQ ID NO: 471328 - protein, 13 aa, Homo sapiens
  CDR3 for beta chain variable domain of TCR clone 235664 (TRBV7-9, TRBJ1-2)
CASSLKQNYGYTF

SEQ ID NO: 471329 - protein, 16 aa, Homo sapiens
  CDR3 for alpha chain variable domain of TCR clone 235665 (TRAV2, TRAJ29)
LTTVLRGIQGNTPLVF

SEQ ID NO: 471330 - protein, 15 aa, Homo sapiens
  CDR3 for beta chain variable domain of TCR clone 235665 (TRBV6-3, TRBJ2-7)
CASSSPGTVFYEQYF

SEQ ID NO: 471331 - protein, 12 aa, Homo sapiens
  CDR3 for alpha chain variable domain of TCR clone 235666 (TRAV2, TRAJ37)
CAVTMNTGKLIF

SEQ ID NO: 471332 - protein, 15 aa, Homo sapiens
  CDR3 for beta chain variable domain of TCR clone 235666 (TRBV5-1, TRBJ2-5)
CASSFGGPPEETQYF

SEQ ID NO: 471333 - protein, 14 aa, Homo sapiens
  CDR3 for alpha chain variable domain of TCR clone 235667 (TRAV2, TRAJ37)
CAVDFTSNTGKLIF

SEQ ID NO: 471334 - protein, 13 aa, Homo sapiens
  CDR3 for beta chain variable domain of TCR clone 235667 (TRBV20-1, TRBJ1-1)
CSAPLGGGTDAFF

SEQ ID NO: 471335 - protein, 13 aa, Homo sapiens
  CDR3 for alpha chain variable domain of TCR clone 235668 (TRAV12-2, TRAJ9)
FAVKWAGGFKTIF

SEQ ID NO: 471336 - protein, 12 aa, Homo sapiens
  CDR3 for beta chain variable domain of TCR clone 235668 (TRBV7-8, TRBJ2-7)
CASSLGDREQYF

SEQ ID NO: 471337 - protein, 15 aa, Homo sapiens
  CDR3 for alpha chain variable domain of TCR clone 235669 (TRAV26-2, TRAJ28)
CILVESGAGSYQLTF

SEQ ID NO: 471338 - protein, 16 aa, Homo sapiens
  CDR3 for beta chain variable domain of TCR clone 235669 (TRBV4-2, TRBJ1-2)
CASSQEIGGASYGYTF

SEQ ID NO: 471339 - protein, 15 aa, Homo sapiens
  CDR3 for alpha chain variable domain of TCR clone 235670 (TRAV17, TRAJ23)
CATDAEDNQGGKLIL

SEQ ID NO: 471340 - protein, 14 aa, Homo sapiens
  CDR3 for beta chain variable domain of TCR clone 235670 (TRBV11-2, TRBJ1-2)
CASSLGTANYGYTF

SEQ ID NO: 471341 - protein, 13 aa, Homo sapiens
  CDR3 for alpha chain variable domain of TCR clone 235671 (TRAV36/DV7, TRAJ34)
CAGRPYNTDKLIF

SEQ ID NO: 471342 - protein, 15 aa, Homo sapiens
  CDR3 for beta chain variable domain of TCR clone 235671 (TRBV27, TRBJ1-6)
CASSSDRGLGSPLHF

SEQ ID NO: 471343 - protein, 15 aa, Homo sapiens
  CDR3 for alpha chain variable domain of TCR clone 235672 (TRAV8-3, TRAJ23)
CAVGDRYNQGGKLIF

SEQ ID NO: 471344 - protein, 17 aa, Homo sapiens
  CDR3 for beta chain variable domain of TCR clone 235672 (TRBV5-1, TRBJ2-5)
CASSLLGLAANQETQYF

SEQ ID NO: 471345 - protein, 12 aa, Homo sapiens
  CDR3 for alpha chain variable domain of TCR clone 235673 (TRAV13-1, TRAJ21)
CAAKEGFNKFYF

SEQ ID NO: 471346 - protein, 16 aa, Homo sapiens
  CDR3 for beta chain variable domain of TCR clone 235673 (TRBV7-2, TRBJ2-6)
CASSVAGRSGANALTF

SEQ ID NO: 471347 - protein, 12 aa, Homo sapiens
  CDR3 for alpha chain variable domain of TCR clone 235674 (TRAV16, TRAJ26)
CALRSYGQNFVF

SEQ ID NO: 471348 - protein, 13 aa, Homo sapiens
  CDR3 for beta chain variable domain of TCR clone 235674 (TRBV10-3, TRBJ2-1)
CHSSDLAYNEQFF

SEQ ID NO: 471349 - protein, 14 aa, Homo sapiens
  CDR3 for alpha chain variable domain of TCR clone 235675 (TRAV26-1, TRAJ38)
CIADNAGNNRKLIW

SEQ ID NO: 471350 - protein, 15 aa, Homo sapiens
  CDR3 for beta chain variable domain of TCR clone 235675 (TRBV20-1, TRBJ2-1)
CSARDLQEGPNEQFF

SEQ ID NO: 471351 - protein, 13 aa, Homo sapiens
  CDR3 for alpha chain variable domain of TCR clone 235676 (TRAV8-3, TRAJ48)
CAVVPFGNEKLTF

SEQ ID NO: 471352 - protein, 12 aa, Homo sapiens
  CDR3 for beta chain variable domain of TCR clone 235676 (TRBV5-1, TRBJ2-7)
CASSLDSYEQYF

SEQ ID NO: 471353 - protein, 13 aa, Homo sapiens
  CDR3 for alpha chain variable domain of TCR clone 235677 (TRAV12-3, TRAJ35)
CAMAIGFGNVLHC

SEQ ID NO: 471354 - protein, 14 aa, Homo sapiens
  CDR3 for beta chain variable domain of TCR clone 235677 (TRBV11-2, TRBJ1-2)
CASSLYRGNYGYTF

SEQ ID NO: 471355 - protein, 15 aa, Homo sapiens
  CDR3 for alpha chain variable domain of TCR clone 235678 (TRAV3, TRAJ10)
CAVRDGTGGGNKLTS

SEQ ID NO: 471356 - protein, 15 aa, Homo sapiens
  CDR3 for beta chain variable domain of TCR clone 235678 (TRBV4-2, TRBJ1-4)
CASSLVQREVEKLFF

SEQ ID NO: 471357 - protein, 14 aa, Homo sapiens
  CDR3 for alpha chain variable domain of TCR clone 235679 (TRAV1-2, TRAJ16)
CAVNRFSDGQQLLF

SEQ ID NO: 471358 - protein, 17 aa, Homo sapiens
  CDR3 for beta chain variable domain of TCR clone 235679 (TRBV20-1, TRBJ2-2)
CSASGSGQGGLTGELFF

SEQ ID NO: 471359 - protein, 12 aa, Homo sapiens
  CDR3 for alpha chain variable domain of TCR clone 235680 (TRAV3, TRAJ26)
CAVRDYGQNFVF

SEQ ID NO: 471360 - protein, 16 aa, Homo sapiens
  CDR3 for beta chain variable domain of TCR clone 235680 (TRBV11-2, TRBJ1-2)
CASSPSGREANYGYTC

SEQ ID NO: 471361 - protein, 13 aa, Homo sapiens
  CDR3 for alpha chain variable domain of TCR clone 235681 (TRAV3, TRAJ20)
CAVRDGSDYKLSF

SEQ ID NO: 471362 - protein, 16 aa, Homo sapiens
  CDR3 for beta chain variable domain of TCR clone 235681 (TRBV4-1, TRBJ2-5)
CASSQTSGGPLETQYF

SEQ ID NO: 471363 - protein, 15 aa, Homo sapiens
  CDR3 for alpha chain variable domain of TCR clone 235682 (TRAV16, TRAJ48)
CALFISNFGNEKLTF

SEQ ID NO: 471364 - protein, 12 aa, Homo sapiens
  CDR3 for beta chain variable domain of TCR clone 235682 (TRBV19, TRBJ1-1)
CASSLSDTEAFF

SEQ ID NO: 471365 - protein, 12 aa, Homo sapiens
  CDR3 for alpha chain variable domain of TCR clone 235683 (TRAV1-2, TRAJ24)
CAVGGSWGQFQF

SEQ ID NO: 471366 - protein, 15 aa, Homo sapiens
  CDR3 for beta chain variable domain of TCR clone 235683 (TRBV6-1, TRBJ2-7)
CASSEGVGNPYEQYF

SEQ ID NO: 471367 - protein, 14 aa, Homo sapiens
  CDR3 for alpha chain variable domain of TCR clone 235684 (TRAV1-2, TRAJ16)
CAVNRFSDGQKLLF

SEQ ID NO: 471368 - protein, 15 aa, Homo sapiens
  CDR3 for beta chain variable domain of TCR clone 235684 (TRBV11-2, TRBJ2-5)
CASSLGGGQEETQYF

SEQ ID NO: 471369 - protein, 15 aa, Homo sapiens
  CDR3 for alpha chain variable domain of TCR clone 235685 (TRAV4, TRAJ8)
CLVGEQHTGFQKLVC

SEQ ID NO: 471370 - protein, 15 aa, Homo sapiens
  CDR3 for beta chain variable domain of TCR clone 235685 (TRBV7-9, TRBJ2-5)
CASSNRDYLQETQYF

SEQ ID NO: 471371 - protein, 11 aa, Homo sapiens
  CDR3 for alpha chain variable domain of TCR clone 235686 (TRAV3, TRAJ21)
CAVGNFNKFYF

SEQ ID NO: 471372 - protein, 17 aa, Homo sapiens
  CDR3 for beta chain variable domain of TCR clone 235686 (TRBV5-1, TRBJ2-5)
CASAVTRQVGNKETQYF

SEQ ID NO: 471373 - protein, 19 aa, Homo sapiens
  CDR3 for alpha chain variable domain of TCR clone 235687 (TRAV40, )
CLPIPDIQNPDPAVYQLRD

SEQ ID NO: 471374 - protein, 18 aa, Homo sapiens
  CDR3 for beta chain variable domain of TCR clone 235687 (TRBV11-2, TRBJ2-3)
CASSLGGASRGAPNTQYF

SEQ ID NO: 471375 - protein, 15 aa, Homo sapiens
  CDR3 for alpha chain variable domain of TCR clone 235688 (TRAV8-3, TRAJ11)
CAVGLLNSGYSTLTF

SEQ ID NO: 471376 - protein, 14 aa, Homo sapiens
  CDR3 for beta chain variable domain of TCR clone 235688 (TRBV19, TRBJ1-4)
CASSMGRHNEKLFF

SEQ ID NO: 471377 - protein, 12 aa, Homo sapiens
  CDR3 for alpha chain variable domain of TCR clone 235689 (TRAV8-3, TRAJ43)
CAVGAGNNDIGF

SEQ ID NO: 471378 - protein, 14 aa, Homo sapiens
  CDR3 for beta chain variable domain of TCR clone 235689 (TRBV4-2, TRBJ1-5)
CASSRDRGNQPQHF

SEQ ID NO: 471379 - protein, 16 aa, Homo sapiens
  CDR3 for alpha chain variable domain of TCR clone 235690 (TRAV4, TRAJ6)
CLVGGYASGGSYIPTF

SEQ ID NO: 471380 - protein, 15 aa, Homo sapiens
  CDR3 for beta chain variable domain of TCR clone 235690 (TRBV14, TRBJ2-5)
CASSQGDRDQETQYF

SEQ ID NO: 471381 - protein, 18 aa, Homo sapiens
  CDR3 for alpha chain variable domain of TCR clone 235691 (TRAV13-1, TRAJ52)
CAASKRSAGGTSYGKLTF

SEQ ID NO: 471382 - protein, 17 aa, Homo sapiens
  CDR3 for beta chain variable domain of TCR clone 235691 (TRBV28, TRBJ1-1)
CASSLSGTGYENTEAFF

SEQ ID NO: 471383 - protein, 17 aa, Homo sapiens
  CDR3 for alpha chain variable domain of TCR clone 235692 (TRAV4, TRAJ42)
CLVGVLNYGGSQGNLIF

SEQ ID NO: 471384 - protein, 12 aa, Homo sapiens
  CDR3 for beta chain variable domain of TCR clone 235692 (TRBV20-1, TRBJ2-1)
CSAQYSYNEQFF

SEQ ID NO: 471385 - protein, 14 aa, Homo sapiens
  CDR3 for alpha chain variable domain of TCR clone 235693 (TRAV8-3, TRAJ44)
CAVGNTGTASKLTF

SEQ ID NO: 471386 - protein, 15 aa, Homo sapiens
  CDR3 for beta chain variable domain of TCR clone 235693 (TRBV20-1, TRBJ1-5)
CSAFKNGQRNQPQHF

SEQ ID NO: 471387 - protein, 18 aa, Homo sapiens
  CDR3 for alpha chain variable domain of TCR clone 235694 (TRAV38-2/DV8, TRAJ42)
CAYRSADLTGGSQGNLIF

SEQ ID NO: 471388 - protein, 17 aa, Homo sapiens
  CDR3 for beta chain variable domain of TCR clone 235694 (TRBV7-3, TRBJ2-2)
CASCLSGTSGGTGELFF

SEQ ID NO: 471389 - protein, 14 aa, Homo sapiens
  CDR3 for alpha chain variable domain of TCR clone 235695 (TRAV17, TRAJ17)
CATVVRGAGNKLTF

SEQ ID NO: 471390 - protein, 14 aa, Homo sapiens
  CDR3 for beta chain variable domain of TCR clone 235695 (TRBV12-4, TRBJ2-7)
CASSVSGADYEQYF

SEQ ID NO: 471391 - protein, 14 aa, Homo sapiens
  CDR3 for alpha chain variable domain of TCR clone 235696 (TRAV12-3, TRAJ15)
CAMIPPQAGTARIF

SEQ ID NO: 471392 - protein, 12 aa, Homo sapiens
  CDR3 for beta chain variable domain of TCR clone 235696 (TRBV11-2, TRBJ2-2)
CASSLGGGELFF

SEQ ID NO: 471393 - protein, 14 aa, Homo sapiens
  CDR3 for alpha chain variable domain of TCR clone 235697 (TRAV1-2, TRAJ16)
CAINRFSDGQKLLF

SEQ ID NO: 471394 - protein, 15 aa, Homo sapiens
  CDR3 for beta chain variable domain of TCR clone 235697 (TRBV5-5, TRBJ1-5)
CASSSTPGSNQPQHF

SEQ ID NO: 471395 - protein, 17 aa, Homo sapiens
  CDR3 for alpha chain variable domain of TCR clone 235698 (TRAV12-1, TRAJ4)
CVVNKDLVATISRFLEK

SEQ ID NO: 471396 - protein, 16 aa, Homo sapiens
  CDR3 for beta chain variable domain of TCR clone 235698 (TRBV11-3, TRBJ2-5)
CASSSVVAGSTETQYF

SEQ ID NO: 471397 - protein, 12 aa, Homo sapiens
  CDR3 for alpha chain variable domain of TCR clone 235699 (TRAV16, TRAJ10)
CSRTGGGNKLTF

SEQ ID NO: 471398 - protein, 14 aa, Homo sapiens
  CDR3 for beta chain variable domain of TCR clone 235699 (TRBV7-2, TRBJ1-1)
CASSFLTGTTEDFF

SEQ ID NO: 471399 - protein, 14 aa, Homo sapiens
  CDR3 for alpha chain variable domain of TCR clone 235700 (TRAV16, TRAJ33)
CALSAMDSNYQLIR

SEQ ID NO: 471400 - protein, 16 aa, Homo sapiens
  CDR3 for beta chain variable domain of TCR clone 235700 (TRBV25-1, TRBJ2-7)
CASSELTGGGICEQYF

SEQ ID NO: 471401 - protein, 13 aa, Homo sapiens
  CDR3 for alpha chain variable domain of TCR clone 235701 (TRAV1-1, TRAJ13)
CAANSGGYQKVTF

SEQ ID NO: 471402 - protein, 19 aa, Homo sapiens
  CDR3 for beta chain variable domain of TCR clone 235701 (TRBV7-2, TRBJ2-3)
CASSFLSRNWGGGTDTQYF

SEQ ID NO: 471403 - protein, 14 aa, Homo sapiens
  CDR3 for alpha chain variable domain of TCR clone 235702 (TRAV1-1, TRAJ27)
CAVIYNTNAGKSTF

SEQ ID NO: 471404 - protein, 12 aa, Homo sapiens
  CDR3 for beta chain variable domain of TCR clone 235702 (TRBV20-1, TRBJ2-5)
CRVAGAGETQYF

SEQ ID NO: 471405 - protein, 13 aa, Homo sapiens
  CDR3 for alpha chain variable domain of TCR clone 235703 (TRAV3, TRAJ29)
CAVRVWGNTPLVF

SEQ ID NO: 471406 - protein, 15 aa, Homo sapiens
  CDR3 for beta chain variable domain of TCR clone 235703 (TRBV12-4, TRBJ2-5)
CASIGRTGEGETQYF

SEQ ID NO: 471407 - protein, 13 aa, Homo sapiens
  CDR3 for alpha chain variable domain of TCR clone 235704 (TRAV27, TRAJ29)
CAGAHSGKTPLVF

SEQ ID NO: 471408 - protein, 20 aa, Homo sapiens
  CDR3 for beta chain variable domain of TCR clone 235704 (TRBV7-8, TRBJ2-2)
CASSHLFPGPTIHITGELFF

SEQ ID NO: 471409 - protein, 13 aa, Homo sapiens
  CDR3 for alpha chain variable domain of TCR clone 235705 (TRAV3, TRAJ21)
CAVRDPDFNKFYF

SEQ ID NO: 471410 - protein, 18 aa, Homo sapiens
  CDR3 for beta chain variable domain of TCR clone 235705 (TRBV11-2, TRBJ2-3)
CASSLGGASRGAPNTQYF

SEQ ID NO: 471411 - protein, 18 aa, Homo sapiens
  CDR3 for alpha chain variable domain of TCR clone 235706 (TRAV3, TRAJ17)
CAVGARRGGRSCRQQANF

SEQ ID NO: 471412 - protein, 14 aa, Homo sapiens
  CDR3 for beta chain variable domain of TCR clone 235706 (TRBV4-1, TRBJ2-2)
CASSQAVNTGELFL

SEQ ID NO: 471413 - protein, 16 aa, Homo sapiens
  CDR3 for alpha chain variable domain of TCR clone 235707 (TRAV26-1, TRAJ22)
CIVRVSFRFCKATDLW

SEQ ID NO: 471414 - protein, 13 aa, Homo sapiens
  CDR3 for beta chain variable domain of TCR clone 235707 (TRBV27, TRBJ2-1)
CASRTLGVGEQFF

SEQ ID NO: 471415 - protein, 14 aa, Homo sapiens
  CDR3 for alpha chain variable domain of TCR clone 235708 (TRAV1-2, TRAJ16)
CAVNRFSDGQKLLF

SEQ ID NO: 471416 - protein, 14 aa, Homo sapiens
  CDR3 for beta chain variable domain of TCR clone 235708 (TRBV7-3, TRBJ1-1)
CASSLKGGKTEAFF

SEQ ID NO: 471417 - protein, 13 aa, Homo sapiens
  CDR3 for alpha chain variable domain of TCR clone 235709 (TRAV12-3, TRAJ58)
CAMSVTSGSRLTF

SEQ ID NO: 471418 - protein, 17 aa, Homo sapiens
  CDR3 for beta chain variable domain of TCR clone 235709 (TRBV20-1, TRBJ2-2)
CSASGSGQGGLTGELFF

SEQ ID NO: 471419 - protein, 15 aa, Homo sapiens
  CDR3 for alpha chain variable domain of TCR clone 235710 (TRAV8-3, TRAJ45)
CASSYSGGGADGLTF

SEQ ID NO: 471420 - protein, 14 aa, Homo sapiens
  CDR3 for beta chain variable domain of TCR clone 235710 (TRBV29-1, TRBJ2-1)
CSVEFRGIPFEQFF

SEQ ID NO: 471421 - protein, 11 aa, Homo sapiens
  CDR3 for alpha chain variable domain of TCR clone 235711 (TRAV1-1, TRAJ30)
CAQNRDDKIIF

SEQ ID NO: 471422 - protein, 14 aa, Homo sapiens
  CDR3 for beta chain variable domain of TCR clone 235711 (TRBV7-8, TRBJ2-7)
CASSPGLAEYEQYF

SEQ ID NO: 471423 - protein, 16 aa, Homo sapiens
  CDR3 for alpha chain variable domain of TCR clone 235712 (TRAV27, TRAJ52)
CAGAPAGGTSYGKLTF

SEQ ID NO: 471424 - protein, 12 aa, Homo sapiens
  CDR3 for beta chain variable domain of TCR clone 235712 (TRBV27, TRBJ2-1)
CASRGFYNKQFF

SEQ ID NO: 471425 - protein, 14 aa, Homo sapiens
  CDR3 for alpha chain variable domain of TCR clone 235713 (TRAV23/DV6, TRAJ22)
CAASVSGSARQLTF

SEQ ID NO: 471426 - protein, 16 aa, Homo sapiens
  CDR3 for beta chain variable domain of TCR clone 235713 (TRBV7-3, TRBJ2-2)
CASSLKRGTLSGELFF

SEQ ID NO: 471427 - protein, 14 aa, Homo sapiens
  CDR3 for alpha chain variable domain of TCR clone 235714 (TRAV21, TRAJ48)
CAVIAHFGNEKLTF

SEQ ID NO: 471428 - protein, 18 aa, Homo sapiens
  CDR3 for beta chain variable domain of TCR clone 235714 (TRBV11-2, TRBJ2-3)
CASSLGGASRGAPNTQYF

SEQ ID NO: 471429 - protein, 11 aa, Homo sapiens
  CDR3 for alpha chain variable domain of TCR clone 235715 (TRAV12-3, TRAJ27)
CAMANAGKSTF

SEQ ID NO: 471430 - protein, 12 aa, Homo sapiens
  CDR3 for beta chain variable domain of TCR clone 235715 (TRBV28, TRBJ2-3)
CASSLYRDTQYF

SEQ ID NO: 471431 - protein, 12 aa, Homo sapiens
  CDR3 for alpha chain variable domain of TCR clone 235716 (TRAV13-1, TRAJ49)
CAARPMGNQFYF

SEQ ID NO: 471432 - protein, 17 aa, Homo sapiens
  CDR3 for beta chain variable domain of TCR clone 235716 (TRBV11-2, TRBJ2-1)
CASSLYPPGVEYNEQFF

SEQ ID NO: 471433 - protein, 10 aa, Homo sapiens
  CDR3 for alpha chain variable domain of TCR clone 235717 (TRAV36/DV7, TRAJ48)
CAVGNEKLTF

SEQ ID NO: 471434 - protein, 13 aa, Homo sapiens
  CDR3 for beta chain variable domain of TCR clone 235717 (TRBV4-1, TRBJ1-1)
CASSRKMNTEAFF

SEQ ID NO: 471435 - protein, 14 aa, Homo sapiens
  CDR3 for alpha chain variable domain of TCR clone 235718 (TRAV8-4, TRAJ54)
CAVSEVLGAQKLVF

SEQ ID NO: 471436 - protein, 17 aa, Homo sapiens
  CDR3 for beta chain variable domain of TCR clone 235718 (TRBV11-2, TRBJ2-1)
CASSLYPPGVEYNEQFF

SEQ ID NO: 471437 - protein, 14 aa, Homo sapiens
  CDR3 for alpha chain variable domain of TCR clone 235719 (TRAV1-2, TRAJ16)
CAVNRFSDGQKLPF

SEQ ID NO: 471438 - protein, 15 aa, Homo sapiens
  CDR3 for beta chain variable domain of TCR clone 235719 (TRBV5-1, TRBJ2-7)
CASSLNGGPAREQYF

SEQ ID NO: 471439 - protein, 13 aa, Homo sapiens
  CDR3 for alpha chain variable domain of TCR clone 235720 (TRAV3, TRAJ27)
CAVRPLGAGKSTF

SEQ ID NO: 471440 - protein, 12 aa, Homo sapiens
  CDR3 for beta chain variable domain of TCR clone 235720 (TRBV7-9, TRBJ2-3)
CQQPRVHNTQYF

SEQ ID NO: 471441 - protein, 13 aa, Homo sapiens
  CDR3 for alpha chain variable domain of TCR clone 235721 (TRAV12-3, TRAJ40)
CAMSDSGTYKYIC

SEQ ID NO: 471442 - protein, 14 aa, Homo sapiens
  CDR3 for beta chain variable domain of TCR clone 235721 (TRBV7-2, TRBJ1-5)
CASSTQGAGQPQHF

SEQ ID NO: 471443 - protein, 16 aa, Homo sapiens
  CDR3 for alpha chain variable domain of TCR clone 235722 (TRAV8-3, TRAJ8)
CAVPRDGNTGFQKLLF

SEQ ID NO: 471444 - protein, 14 aa, Homo sapiens
  CDR3 for beta chain variable domain of TCR clone 235722 (TRBV4-1, TRBJ2-2)
CASSQAVNTGELFF

SEQ ID NO: 471445 - protein, 15 aa, Homo sapiens
  CDR3 for alpha chain variable domain of TCR clone 235723 (TRAV12-1, TRAJ9)
CVVSFGDTGGFKTIF

SEQ ID NO: 471446 - protein, 16 aa, Homo sapiens
  CDR3 for beta chain variable domain of TCR clone 235723 (TRBV19, TRBJ2-2)
CASRSPGTGATGELFF

SEQ ID NO: 471447 - protein, 15 aa, Homo sapiens
  CDR3 for alpha chain variable domain of TCR clone 235724 (TRAV12-1, TRAJ45)
CVVLSGGGGADGLTF

SEQ ID NO: 471448 - protein, 15 aa, Homo sapiens
  CDR3 for beta chain variable domain of TCR clone 235724 (TRBV19, TRBJ2-1)
CASSLPGVPLDEQFF

SEQ ID NO: 471449 - protein, 15 aa, Homo sapiens
  CDR3 for alpha chain variable domain of TCR clone 235725 (TRAV12-1, TRAJ43)
CVVNRGRYNNNDMRF

SEQ ID NO: 471450 - protein, 14 aa, Homo sapiens
  CDR3 for beta chain variable domain of TCR clone 235725 (TRBV7-6, TRBJ2-3)
CASSLGTVTDTQYF

SEQ ID NO: 471451 - protein, 17 aa, Homo sapiens
  CDR3 for alpha chain variable domain of TCR clone 235726 (TRAV38-2/DV8, TRAJ38)
CAYSSARGAGNNRKLIW

SEQ ID NO: 471452 - protein, 13 aa, Homo sapiens
  CDR3 for beta chain variable domain of TCR clone 235726 (TRBV6-5, TRBJ2-1)
CASRGRVGNEQFF

SEQ ID NO: 471453 - protein, 17 aa, Homo sapiens
  CDR3 for alpha chain variable domain of TCR clone 235727 (TRAV3, TRAJ38)
CAVRDCLNAGTNRKLIW

SEQ ID NO: 471454 - protein, 13 aa, Homo sapiens
  CDR3 for beta chain variable domain of TCR clone 235727 (TRBV23-1, TRBJ1-4)
CASRGKFNEKLFF

SEQ ID NO: 471455 - protein, 15 aa, Homo sapiens
  CDR3 for alpha chain variable domain of TCR clone 235728 (TRAV21, TRAJ53)
CATLNSGGSNYKLTF

SEQ ID NO: 471456 - protein, 17 aa, Homo sapiens
  CDR3 for beta chain variable domain of TCR clone 235728 (TRBV4-1, TRBJ2-3)
CASSQVYVSGGTDTQYF

SEQ ID NO: 471457 - protein, 15 aa, Homo sapiens
  CDR3 for alpha chain variable domain of TCR clone 235729 (TRAV8-1, TRAJ13)
CAVSKGVTRKLPLEL

SEQ ID NO: 471458 - protein, 18 aa, Homo sapiens
  CDR3 for beta chain variable domain of TCR clone 235729 (TRBV11-2, TRBJ2-7)
CASSWRTVQTGQSYEQYF

SEQ ID NO: 471459 - protein, 17 aa, Homo sapiens
  CDR3 for alpha chain variable domain of TCR clone 235730 (TRAV14/DV4, TRAJ4)
CAMREASGRGGYNKLIF

SEQ ID NO: 471460 - protein, 15 aa, Homo sapiens
  CDR3 for beta chain variable domain of TCR clone 235730 (TRBV7-9, TRBJ1-5)
CASSFGTGNNQPQHF

SEQ ID NO: 471461 - protein, 12 aa, Homo sapiens
  CDR3 for alpha chain variable domain of TCR clone 235731 (TRAV29/DV5, TRAJ15)
CASNQAVTALIF

SEQ ID NO: 471462 - protein, 15 aa, Homo sapiens
  CDR3 for beta chain variable domain of TCR clone 235731 (TRBV11-2, TRBJ2-2)
CASSSDRVNAGEMFF

SEQ ID NO: 471463 - protein, 11 aa, Homo sapiens
  CDR3 for alpha chain variable domain of TCR clone 235732 (TRAV12-1, TRAJ30)
CVVNGQDKIIF

SEQ ID NO: 471464 - protein, 12 aa, Homo sapiens
  CDR3 for beta chain variable domain of TCR clone 235732 (TRBV27, TRBJ2-2)
CASKLFTGELVF

SEQ ID NO: 471465 - protein, 18 aa, Homo sapiens
  CDR3 for alpha chain variable domain of TCR clone 235733 (TRAV21, TRAJ52)
CAVRPSPAGGTSYGKLTF

SEQ ID NO: 471466 - protein, 13 aa, Homo sapiens
  CDR3 for beta chain variable domain of TCR clone 235733 (TRBV7-9, TRBJ2-1)
CASSLDVGNEQFF

SEQ ID NO: 471467 - protein, 15 aa, Homo sapiens
  CDR3 for alpha chain variable domain of TCR clone 235734 (TRAV13-2, TRAJ40)
CAENRSRQGTYKYIF

SEQ ID NO: 471468 - protein, 15 aa, Homo sapiens
  CDR3 for beta chain variable domain of TCR clone 235734 (TRBV19, TRBJ2-1)
CASSMGWSSNNEQFF

SEQ ID NO: 471469 - protein, 14 aa, Homo sapiens
  CDR3 for alpha chain variable domain of TCR clone 235735 (TRAV1-2, TRAJ16)
CAVRSASDGQKLLV

SEQ ID NO: 471470 - protein, 17 aa, Homo sapiens
  CDR3 for beta chain variable domain of TCR clone 235735 (TRBV7-3, TRBJ2-3)
CASSLMKRMRGADTQYF

SEQ ID NO: 471471 - protein, 16 aa, Homo sapiens
  CDR3 for alpha chain variable domain of TCR clone 235736 (TRAV30, TRAJ24)
CGTEIVDADSWGKFQF

SEQ ID NO: 471472 - protein, 15 aa, Homo sapiens
  CDR3 for beta chain variable domain of TCR clone 235736 (TRBV28, TRBJ2-1)
CASSIRAGGRSEQFF

SEQ ID NO: 471473 - protein, 11 aa, Homo sapiens
  CDR3 for alpha chain variable domain of TCR clone 235737 (TRAV12-2, TRAJ31)
CAILNNARLIF

SEQ ID NO: 471474 - protein, 13 aa, Homo sapiens
  CDR3 for beta chain variable domain of TCR clone 235737 (TRBV20-1, TRBJ1-1)
CSARLGQGTEAFF

SEQ ID NO: 471475 - protein, 14 aa, Homo sapiens
  CDR3 for alpha chain variable domain of TCR clone 235738 (TRAV13-1, TRAJ32)
CAARGSGATNKLIF

SEQ ID NO: 471476 - protein, 14 aa, Homo sapiens
  CDR3 for beta chain variable domain of TCR clone 235738 (TRBV28, TRBJ2-1)
CASSIQGTVGEQFF

SEQ ID NO: 471477 - protein, 11 aa, Homo sapiens
  CDR3 for alpha chain variable domain of TCR clone 235739 (TRAV17, TRAJ43)
CATPRSNDMRF

SEQ ID NO: 471478 - protein, 18 aa, Homo sapiens
  CDR3 for beta chain variable domain of TCR clone 235739 (TRBV25-1, TRBJ1-2)
CASSGLQNGQGLIFGYTF

SEQ ID NO: 471479 - protein, 14 aa, Homo sapiens
  CDR3 for alpha chain variable domain of TCR clone 235740 (TRAV1-2, TRAJ16)
CAVNRFSDGQKLLF

SEQ ID NO: 471480 - protein, 13 aa, Homo sapiens
  CDR3 for beta chain variable domain of TCR clone 235740 (TRBV19, TRBJ2-7)
CASRKAGWSEQYF

SEQ ID NO: 471481 - protein, 17 aa, Homo sapiens
  CDR3 for alpha chain variable domain of TCR clone 235741 (TRAV4, TRAJ18)
CLVGERSVGSTLGRLYF

SEQ ID NO: 471482 - protein, 16 aa, Homo sapiens
  CDR3 for beta chain variable domain of TCR clone 235741 (TRBV19, TRBJ2-1)
CASSKAGPSSYNEQLF

SEQ ID NO: 471483 - protein, 12 aa, Homo sapiens
  CDR3 for alpha chain variable domain of TCR clone 235742 (TRAV23/DV6, TRAJ53)
CAASKLGSGGSN

SEQ ID NO: 471484 - protein, 13 aa, Homo sapiens
  CDR3 for beta chain variable domain of TCR clone 235742 (TRBV13, TRBJ2-1)
CASILGGRGEQFF

SEQ ID NO: 471485 - protein, 10 aa, Homo sapiens
  CDR3 for alpha chain variable domain of TCR clone 235743 (TRAV9-2, TRAJ49)
CSLTGNQFYF

SEQ ID NO: 471486 - protein, 16 aa, Homo sapiens
  CDR3 for beta chain variable domain of TCR clone 235743 (TRBV19, TRBJ2-3)
CASSPGAASRTDTQYF

SEQ ID NO: 471487 - protein, 15 aa, Homo sapiens
  CDR3 for alpha chain variable domain of TCR clone 235744 (TRAV29/DV5, TRAJ42)
CAAKTDGGSQGNLVF

SEQ ID NO: 471488 - protein, 15 aa, Homo sapiens
  CDR3 for beta chain variable domain of TCR clone 235744 (TRBV5-1, TRBJ2-2)
GASSSQGGNTGELFF

SEQ ID NO: 471489 - protein, 14 aa, Homo sapiens
  CDR3 for alpha chain variable domain of TCR clone 235745 (TRAV1-2, TRAJ8)
WAVREDTGFQKLVF

SEQ ID NO: 471490 - protein, 16 aa, Homo sapiens
  CDR3 for beta chain variable domain of TCR clone 235745 (TRBV12-5, TRBJ2-5)
CASGPRTSGNQETQYF

SEQ ID NO: 471491 - protein, 12 aa, Homo sapiens
  CDR3 for alpha chain variable domain of TCR clone 235746 (TRAV13-1, TRAJ27)
CAAHTNAGKSTF

SEQ ID NO: 471492 - protein, 13 aa, Homo sapiens
  CDR3 for beta chain variable domain of TCR clone 235746 (TRBV4-2, TRBJ1-1)
CASSQTGNTEAFF

SEQ ID NO: 471493 - protein, 15 aa, Homo sapiens
  CDR3 for alpha chain variable domain of TCR clone 235747 (TRAV20, TRAJ53)
CAVQASGGSNYKLTL

SEQ ID NO: 471494 - protein, 12 aa, Homo sapiens
  CDR3 for beta chain variable domain of TCR clone 235747 (TRBV7-6, TRBJ2-5)
CASSLSQETQYF

SEQ ID NO: 471495 - protein, 16 aa, Homo sapiens
  CDR3 for alpha chain variable domain of TCR clone 235748 (TRAV30, TRAJ24)
CGTEIVDADSWGKFQF

SEQ ID NO: 471496 - protein, 13 aa, Homo sapiens
  CDR3 for beta chain variable domain of TCR clone 235748 (TRBV19, TRBJ1-2)
CASSVSGQDGYTF

SEQ ID NO: 471497 - protein, 14 aa, Homo sapiens
  CDR3 for alpha chain variable domain of TCR clone 235749 (TRAV12-2, TRAJ3)
CAVSLYSSASKIIF

SEQ ID NO: 471498 - protein, 14 aa, Homo sapiens
  CDR3 for beta chain variable domain of TCR clone 235749 (TRBV27, TRBJ2-1)
CAGSIAETYNEQFV

SEQ ID NO: 471499 - protein, 18 aa, Homo sapiens
  CDR3 for alpha chain variable domain of TCR clone 235750 (TRAV26-2, TRAJ33)
CCVLLHPEEPASNYQLIW

SEQ ID NO: 471500 - protein, 13 aa, Homo sapiens
  CDR3 for beta chain variable domain of TCR clone 235750 (TRBV24-1, TRBJ2-2)
CATSEWSTGELFF

SEQ ID NO: 471501 - protein, 13 aa, Homo sapiens
  CDR3 for alpha chain variable domain of TCR clone 235751 (TRAV12-3, TRAJ20)
CAMRRPNDYKLSF

SEQ ID NO: 471502 - protein, 15 aa, Homo sapiens
  CDR3 for beta chain variable domain of TCR clone 235751 (TRBV9, TRBJ2-3)
CASSVAGGRSDTQYF

SEQ ID NO: 471503 - protein, 14 aa, Homo sapiens
  CDR3 for alpha chain variable domain of TCR clone 235752 (TRAV1-2, TRAJ8)
CAVREDTGFPKLVF

SEQ ID NO: 471504 - protein, 13 aa, Homo sapiens
  CDR3 for beta chain variable domain of TCR clone 235752 (TRBV27, TRBJ2-7)
CASSLTTGYEQYF

SEQ ID NO: 471505 - protein, 14 aa, Homo sapiens
  CDR3 for alpha chain variable domain of TCR clone 235753 (TRAV1-2, TRAJ16)
SAVNRFSDGQKLLF

SEQ ID NO: 471506 - protein, 13 aa, Homo sapiens
  CDR3 for beta chain variable domain of TCR clone 235753 (TRBV29-1, TRBJ1-1)
CSVGDSRNTEAFF

SEQ ID NO: 471507 - protein, 17 aa, Homo sapiens
  CDR3 for alpha chain variable domain of TCR clone 235754 (TRAV16, TRAJ42)
FALSPKLYGGSQGNLIF

SEQ ID NO: 471508 - protein, 13 aa, Homo sapiens
  CDR3 for beta chain variable domain of TCR clone 235754 (TRBV19, TRBJ1-5)
CASSTRRDQHQHF

SEQ ID NO: 471509 - protein, 18 aa, Homo sapiens
  CDR3 for alpha chain variable domain of TCR clone 235755 (TRAV21, TRAJ52)
CAVRPSPAGGTSYGTLTF

SEQ ID NO: 471510 - protein, 13 aa, Homo sapiens
  CDR3 for beta chain variable domain of TCR clone 235755 (TRBV19, TRBJ1-2)
CASSVPGQDGYTF

SEQ ID NO: 471511 - protein, 14 aa, Homo sapiens
  CDR3 for alpha chain variable domain of TCR clone 235756 (TRAV1-2, TRAJ8)
CAVREDTGFQKLVF

SEQ ID NO: 471512 - protein, 15 aa, Homo sapiens
  CDR3 for beta chain variable domain of TCR clone 235756 (TRBV5-1, TRBJ2-5)
CASSFKGGDQETQYF

SEQ ID NO: 471513 - protein, 14 aa, Homo sapiens
  CDR3 for alpha chain variable domain of TCR clone 235757 (TRAV17, TRAJ37)
CATDGSRNTGKLIF

SEQ ID NO: 471514 - protein, 13 aa, Homo sapiens
  CDR3 for beta chain variable domain of TCR clone 235757 (TRBV19, TRBJ1-4)
CASSRGDNEKLFF

SEQ ID NO: 471515 - protein, 11 aa, Homo sapiens
  CDR3 for alpha chain variable domain of TCR clone 235758 (TRAV12-3, TRAJ49)
CAANIGNQFYF

SEQ ID NO: 471516 - protein, 12 aa, Homo sapiens
  CDR3 for beta chain variable domain of TCR clone 235758 (TRBV6-3, TRBJ2-7)
CASSEPGFEQYF

SEQ ID NO: 471517 - protein, 14 aa, Homo sapiens
  CDR3 for alpha chain variable domain of TCR clone 235759 (TRAV21, TRAJ45)
CAVSSGGGADGLTF

SEQ ID NO: 471518 - protein, 15 aa, Homo sapiens
  CDR3 for beta chain variable domain of TCR clone 235759 (TRBV6-1, TRBJ2-4)
CASSEAVWTINIRYF

SEQ ID NO: 471519 - protein, 14 aa, Homo sapiens
  CDR3 for alpha chain variable domain of TCR clone 235760 (TRAV3, TRAJ21)
CAVRDAYNFNKFYF

SEQ ID NO: 471520 - protein, 15 aa, Homo sapiens
  CDR3 for beta chain variable domain of TCR clone 235760 (TRBV7-2, TRBJ2-1)
CASTHGTGIYNEQFF

SEQ ID NO: 471521 - protein, 15 aa, Homo sapiens
  CDR3 for alpha chain variable domain of TCR clone 235761 (TRAV9-2, TRAJ49)
CALSPPDHTGNQFYL

SEQ ID NO: 471522 - protein, 14 aa, Homo sapiens
  CDR3 for beta chain variable domain of TCR clone 235761 (TRBV12-4, TRBJ1-1)
CASSLGTGGTEAFF

SEQ ID NO: 471523 - protein, 16 aa, Homo sapiens
  CDR3 for alpha chain variable domain of TCR clone 235762 (TRAV30, TRAJ24)
CGTEIVDADSWGKFQF

SEQ ID NO: 471524 - protein, 14 aa, Homo sapiens
  CDR3 for beta chain variable domain of TCR clone 235762 (TRBV7-3, TRBJ2-2)
CASSLNSNTGELFF

SEQ ID NO: 471525 - protein, 18 aa, Homo sapiens
  CDR3 for alpha chain variable domain of TCR clone 235763 (TRAV26-1, TRAJ23)
CIVRVGLEVWNQGGKLIF

SEQ ID NO: 471526 - protein, 15 aa, Homo sapiens
  CDR3 for beta chain variable domain of TCR clone 235763 (TRBV6-1, TRBJ1-3)
CASSDFGFSGNTIYF

SEQ ID NO: 471527 - protein, 14 aa, Homo sapiens
  CDR3 for alpha chain variable domain of TCR clone 235764 (TRAV12-1, TRAJ38)
CVVHNAGNNRKLIW

SEQ ID NO: 471528 - protein, 13 aa, Homo sapiens
  CDR3 for beta chain variable domain of TCR clone 235764 (TRBV7-2, TRBJ2-2)
CASSLAVTGELFF

SEQ ID NO: 471529 - protein, 16 aa, Homo sapiens
  CDR3 for alpha chain variable domain of TCR clone 235765 (TRAV3, TRAJ10)
CAVRDMNAGGGNKLTF

SEQ ID NO: 471530 - protein, 15 aa, Homo sapiens
  CDR3 for beta chain variable domain of TCR clone 235765 (TRBV20-1, TRBJ2-7)
CSARDRVAGMDEQYF

SEQ ID NO: 471531 - protein, 14 aa, Homo sapiens
  CDR3 for alpha chain variable domain of TCR clone 235766 (TRAV12-2, TRAJ13)
CAVKKTGGYQKVTF

SEQ ID NO: 471532 - protein, 14 aa, Homo sapiens
  CDR3 for beta chain variable domain of TCR clone 235766 (TRBV7-6, TRBJ1-6)
CASSQAGGGSPLHF

SEQ ID NO: 471533 - protein, 16 aa, Homo sapiens
  CDR3 for alpha chain variable domain of TCR clone 235767 (TRAV3, TRAJ32)
CSVRDMGGGATNKLIF

SEQ ID NO: 471534 - protein, 11 aa, Homo sapiens
  CDR3 for beta chain variable domain of TCR clone 235767 (TRBV12-4, TRBJ2-1)
CASSRLNEQFF

SEQ ID NO: 471535 - protein, 13 aa, Homo sapiens
  CDR3 for alpha chain variable domain of TCR clone 235768 (TRAV8-2, TRAJ45)
CVVSLVQEEVLTD

SEQ ID NO: 471536 - protein, 16 aa, Homo sapiens
  CDR3 for beta chain variable domain of TCR clone 235768 (TRBV7-2, TRBJ1-2)
CASSLVRDTVKYGYTF

SEQ ID NO: 471537 - protein, 15 aa, Homo sapiens
  CDR3 for alpha chain variable domain of TCR clone 235769 (TRAV20, TRAJ4)
CAVEGSSGGYNKLIF

SEQ ID NO: 471538 - protein, 14 aa, Homo sapiens
  CDR3 for beta chain variable domain of TCR clone 235769 (TRBV7-8, TRBJ2-7)
CASTLGGARGEQYF

SEQ ID NO: 471539 - protein, 13 aa, Homo sapiens
  CDR3 for alpha chain variable domain of TCR clone 235770 (TRAV3, TRAJ15)
WSVRDQAGTALIF

SEQ ID NO: 471540 - protein, 15 aa, Homo sapiens
  CDR3 for beta chain variable domain of TCR clone 235770 (TRBV11-1, TRBJ2-7)
CASSLNYGASYEQYV

SEQ ID NO: 471541 - protein, 11 aa, Homo sapiens
  CDR3 for alpha chain variable domain of TCR clone 235771 (TRAV13-2, TRAJ36)
CAETGANNLFF

SEQ ID NO: 471542 - protein, 15 aa, Homo sapiens
  CDR3 for beta chain variable domain of TCR clone 235771 (TRBV7-9, TRBJ2-4)
CATEGLGGTFSTSAP

SEQ ID NO: 471543 - protein, 15 aa, Homo sapiens
  CDR3 for alpha chain variable domain of TCR clone 235772 (TRAV13-1, TRAJ32)
CAASIYGVATNKLIF

SEQ ID NO: 471544 - protein, 15 aa, Homo sapiens
  CDR3 for beta chain variable domain of TCR clone 235772 (TRBV12-4, TRBJ2-5)
CASSPPTGLQETQYF

SEQ ID NO: 471545 - protein, 17 aa, Homo sapiens
  CDR3 for alpha chain variable domain of TCR clone 235773 (TRAV3, TRAJ42)
CAVRDRYYGGSQGNLIF

SEQ ID NO: 471546 - protein, 16 aa, Homo sapiens
  CDR3 for beta chain variable domain of TCR clone 235773 (TRBV7-3, TRBJ2-2)
CASSLKRGTLSGELFF

SEQ ID NO: 471547 - protein, 13 aa, Homo sapiens
  CDR3 for alpha chain variable domain of TCR clone 235774 (TRAV1-2, TRAJ9)
CAALNTGGFKTIF

SEQ ID NO: 471548 - protein, 13 aa, Homo sapiens
  CDR3 for beta chain variable domain of TCR clone 235774 (TRBV19, TRBJ2-7)
CASSPRQSYEQYF

SEQ ID NO: 471549 - protein, 15 aa, Homo sapiens
  CDR3 for alpha chain variable domain of TCR clone 235775 (TRAV12-3, TRAJ6)
CAMSATTDGSYIPTF

SEQ ID NO: 471550 - protein, 16 aa, Homo sapiens
  CDR3 for beta chain variable domain of TCR clone 235775 (TRBV20-1, TRBJ1-2)
CSASMGQGVANYGYTF

SEQ ID NO: 471551 - protein, 15 aa, Homo sapiens
  CDR3 for alpha chain variable domain of TCR clone 235776 (TRAV23/DV6, TRAJ13)
CAAWPGGGGYQKVTF

SEQ ID NO: 471552 - protein, 17 aa, Homo sapiens
  CDR3 for beta chain variable domain of TCR clone 235776 (TRBV19, TRBJ2-7)
CASSISFYDSYPSEQYF

SEQ ID NO: 471553 - protein, 15 aa, Homo sapiens
  CDR3 for alpha chain variable domain of TCR clone 235777 (TRAV3, TRAJ32)
CAVSSYGGATNKLIF

SEQ ID NO: 471554 - protein, 13 aa, Homo sapiens
  CDR3 for beta chain variable domain of TCR clone 235777 (TRBV20-1, TRBJ2-7)
CSARPSTNWEQYF

SEQ ID NO: 471555 - protein, 14 aa, Homo sapiens
  CDR3 for alpha chain variable domain of TCR clone 235778 (TRAV1-2, TRAJ8)
GAVREDTGFQKLVF

SEQ ID NO: 471556 - protein, 13 aa, Homo sapiens
  CDR3 for beta chain variable domain of TCR clone 235778 (TRBV12-5, TRBJ2-3)
CASGDRQSDTQYF

SEQ ID NO: 471557 - protein, 11 aa, Homo sapiens
  CDR3 for alpha chain variable domain of TCR clone 235779 (TRAV2, TRAJ33)
CAVESNYQLIW

SEQ ID NO: 471558 - protein, 15 aa, Homo sapiens
  CDR3 for beta chain variable domain of TCR clone 235779 (TRBV3-1, TRBJ2-5)
CASSANLGGPETQYF

SEQ ID NO: 471559 - protein, 13 aa, Homo sapiens
  CDR3 for alpha chain variable domain of TCR clone 235780 (TRAV17, TRAJ8)
CATGPVGFQKLVF

SEQ ID NO: 471560 - protein, 15 aa, Homo sapiens
  CDR3 for beta chain variable domain of TCR clone 235780 (TRBV20-1, TRBJ2-5)
CSAVRLPSGQETQYF

SEQ ID NO: 471561 - protein, 16 aa, Homo sapiens
  CDR3 for alpha chain variable domain of TCR clone 235781 (TRAV23/DV6, TRAJ9)
CAASIGGNTGGFKTIL

SEQ ID NO: 471562 - protein, 14 aa, Homo sapiens
  CDR3 for beta chain variable domain of TCR clone 235781 (TRBV7-2, TRBJ2-7)
CASSPKTSFYEQYF

SEQ ID NO: 471563 - protein, 15 aa, Homo sapiens
  CDR3 for alpha chain variable domain of TCR clone 235782 (TRAV12-1, TRAJ44)
CVVDEYTGTARKLTF

SEQ ID NO: 471564 - protein, 14 aa, Homo sapiens
  CDR3 for beta chain variable domain of TCR clone 235782 (TRBV5-1, TRBJ1-2)
CASSVEPVNYRYTF

SEQ ID NO: 471565 - protein, 13 aa, Homo sapiens
  CDR3 for alpha chain variable domain of TCR clone 235783 (TRAV21, TRAJ27)
CAARPGNAGKSTF

SEQ ID NO: 471566 - protein, 15 aa, Homo sapiens
  CDR3 for beta chain variable domain of TCR clone 235783 (TRBV2, TRBJ2-3)
CASSDAGGPQDTQYF

SEQ ID NO: 471567 - protein, 15 aa, Homo sapiens
  CDR3 for alpha chain variable domain of TCR clone 235784 (TRAV21, TRAJ53)
CATLNSGGSNYKLTF

SEQ ID NO: 471568 - protein, 16 aa, Homo sapiens
  CDR3 for beta chain variable domain of TCR clone 235784 (TRBV11-2, TRBJ2-7)
CASSLATTGVNYEQYF

SEQ ID NO: 471569 - protein, 18 aa, Homo sapiens
  CDR3 for alpha chain variable domain of TCR clone 235785 (TRAV21, TRAJ52)
CAVRPSPAGGTSCGKLTF

SEQ ID NO: 471570 - protein, 15 aa, Homo sapiens
  CDR3 for beta chain variable domain of TCR clone 235785 (TRBV20-1, TRBJ2-7)
CSARDRVSGMDEQYF

SEQ ID NO: 471571 - protein, 14 aa, Homo sapiens
  CDR3 for alpha chain variable domain of TCR clone 235786 (TRAV2, TRAJ37)
CAVDFTSNTGKLIF

SEQ ID NO: 471572 - protein, 13 aa, Homo sapiens
  CDR3 for beta chain variable domain of TCR clone 235786 (TRBV14, TRBJ1-1)
CASSQEAGTEAFF

SEQ ID NO: 471573 - protein, 12 aa, Homo sapiens
  CDR3 for alpha chain variable domain of TCR clone 235787 (TRAV13-2, TRAJ8)
CAPWLGFQKLVF

SEQ ID NO: 471574 - protein, 12 aa, Homo sapiens
  CDR3 for beta chain variable domain of TCR clone 235787 (TRBV20-1, TRBJ2-7)
CSVLQNEHEQYF

SEQ ID NO: 471575 - protein, 16 aa, Homo sapiens
  CDR3 for alpha chain variable domain of TCR clone 235788 (TRAV17, TRAJ28)
CATNEYSGAGSYQLTF

SEQ ID NO: 471576 - protein, 13 aa, Homo sapiens
  CDR3 for beta chain variable domain of TCR clone 235788 (TRBV7-9, TRBJ1-2)
CASRTGPNYGYTF

SEQ ID NO: 471577 - protein, 19 aa, Homo sapiens
  CDR3 for alpha chain variable domain of TCR clone 235789 (TRAV3, TRAJ6)
CAVRDRNPSRSGGCYIPTF

SEQ ID NO: 471578 - protein, 15 aa, Homo sapiens
  CDR3 for beta chain variable domain of TCR clone 235789 (TRBV18, TRBJ2-7)
CASSPTFMDSYEQYF

SEQ ID NO: 471579 - protein, 15 aa, Homo sapiens
  CDR3 for alpha chain variable domain of TCR clone 235790 (TRAV23/DV6, TRAJ33)
CAASNSGGGNYQVIW

SEQ ID NO: 471580 - protein, 14 aa, Homo sapiens
  CDR3 for beta chain variable domain of TCR clone 235790 (TRBV7-2, TRBJ2-7)
CASSLYPGRYEQYF

SEQ ID NO: 471581 - protein, 11 aa, Homo sapiens
  CDR3 for alpha chain variable domain of TCR clone 235791 (TRAV13-1, TRAJ5)
CAPKGRRALTF

SEQ ID NO: 471582 - protein, 14 aa, Homo sapiens
  CDR3 for beta chain variable domain of TCR clone 235791 (TRBV9, TRBJ2-3)
CASSVGLSTDTQYF

SEQ ID NO: 471583 - protein, 16 aa, Homo sapiens
  CDR3 for alpha chain variable domain of TCR clone 235792 (TRAV8-6, TRAJ39)
CAVMPMNNNAGNMLTF

SEQ ID NO: 471584 - protein, 16 aa, Homo sapiens
  CDR3 for beta chain variable domain of TCR clone 235792 (TRBV15, TRBJ2-5)
CATSRYLEAAQETQYY

SEQ ID NO: 471585 - protein, 15 aa, Homo sapiens
  CDR3 for alpha chain variable domain of TCR clone 235793 (TRAV16, TRAJ16)
CALQGGGSDGQKLLF

SEQ ID NO: 471586 - protein, 14 aa, Homo sapiens
  CDR3 for beta chain variable domain of TCR clone 235793 (TRBV12-5, TRBJ2-5)
CASGLRTHQETQYF

SEQ ID NO: 471587 - protein, 12 aa, Homo sapiens
  CDR3 for alpha chain variable domain of TCR clone 235794 (TRAV8-6, TRAJ43)
CAVSHNNNDMRF

SEQ ID NO: 471588 - protein, 13 aa, Homo sapiens
  CDR3 for beta chain variable domain of TCR clone 235794 (TRBV7-3, TRBJ1-1)
CASSQDWGAEAFF

SEQ ID NO: 471589 - protein, 13 aa, Homo sapiens
  CDR3 for alpha chain variable domain of TCR clone 235795 (TRAV8-6, TRAJ50)
CAVNKTSYDKVIF

SEQ ID NO: 471590 - protein, 15 aa, Homo sapiens
  CDR3 for beta chain variable domain of TCR clone 235795 (TRBV7-2, TRBJ2-2)
CASRRPGQNTGELFF

SEQ ID NO: 471591 - protein, 15 aa, Homo sapiens
  CDR3 for alpha chain variable domain of TCR clone 235796 (TRAV2, TRAJ9)
CAVEDRGIGGFKTIF

SEQ ID NO: 471592 - protein, 14 aa, Homo sapiens
  CDR3 for beta chain variable domain of TCR clone 235796 (TRBV4-1, TRBJ2-2)
CASSQAVNTGELFF

SEQ ID NO: 471593 - protein, 15 aa, Homo sapiens
  CDR3 for alpha chain variable domain of TCR clone 235797 (TRAV17, TRAJ22)
CATVAPSGSARQLTF

SEQ ID NO: 471594 - protein, 14 aa, Homo sapiens
  CDR3 for beta chain variable domain of TCR clone 235797 (TRBV4-1, TRBJ2-2)
CASSQAVNTGEMFF

SEQ ID NO: 471595 - protein, 13 aa, Homo sapiens
  CDR3 for alpha chain variable domain of TCR clone 235798 (TRAV17, TRAJ5)
CATGATGRRALTF

SEQ ID NO: 471596 - protein, 13 aa, Homo sapiens
  CDR3 for beta chain variable domain of TCR clone 235798 (TRBV19, TRBJ1-5)
CASSIEPVQPQHF

SEQ ID NO: 471597 - protein, 16 aa, Homo sapiens
  CDR3 for alpha chain variable domain of TCR clone 235799 (TRAV9-2, TRAJ53)
CALRKNRGGSNYKLTF

SEQ ID NO: 471598 - protein, 14 aa, Homo sapiens
  CDR3 for beta chain variable domain of TCR clone 235799 (TRBV28, TRBJ2-1)
CASSLNWRNNEQFF

SEQ ID NO: 471599 - protein, 11 aa, Homo sapiens
  CDR3 for alpha chain variable domain of TCR clone 235800 (TRAV4, TRAJ28)
CLVGDNRAETL

SEQ ID NO: 471600 - protein, 13 aa, Homo sapiens
  CDR3 for beta chain variable domain of TCR clone 235800 (TRBV20-1, TRBJ2-7)
CSATNTSGYEQYF

SEQ ID NO: 471601 - protein, 15 aa, Homo sapiens
  CDR3 for alpha chain variable domain of TCR clone 235801 (TRAV17, TRAJ57)
CATGPSPGGSEKLVF

SEQ ID NO: 471602 - protein, 11 aa, Homo sapiens
  CDR3 for beta chain variable domain of TCR clone 235801 (TRBV29-1, TRBJ2-5)
CSEDRTGTQYF

SEQ ID NO: 471603 - protein, 13 aa, Homo sapiens
  CDR3 for alpha chain variable domain of TCR clone 235802 (TRAV16, TRAJ20)
CALGPSNDYKLSF

SEQ ID NO: 471604 - protein, 17 aa, Homo sapiens
  CDR3 for beta chain variable domain of TCR clone 235802 (TRBV20-1, TRBJ2-3)
CSASLLGRGGSADTQYF

SEQ ID NO: 471605 - protein, 11 aa, Homo sapiens
  CDR3 for alpha chain variable domain of TCR clone 235803 (TRAV1-1, TRAJ23)
CAVCQGGKLIF

SEQ ID NO: 471606 - protein, 16 aa, Homo sapiens
  CDR3 for beta chain variable domain of TCR clone 235803 (TRBV6-1, TRBJ2-5)
CASSETLDRGAETQYF

SEQ ID NO: 471607 - protein, 13 aa, Homo sapiens
  CDR3 for alpha chain variable domain of TCR clone 235804 (TRAV12-1, TRAJ33)
CGDDPDSNYQLTW

SEQ ID NO: 471608 - protein, 15 aa, Homo sapiens
  CDR3 for beta chain variable domain of TCR clone 235804 (TRBV27, TRBJ2-1)
CASSNGGGSSNEQFF

SEQ ID NO: 471609 - protein, 17 aa, Homo sapiens
  CDR3 for alpha chain variable domain of TCR clone 235805 (TRAV3, TRAJ42)
CAVRDRDYGGSQGNLIF

SEQ ID NO: 471610 - protein, 16 aa, Homo sapiens
  CDR3 for beta chain variable domain of TCR clone 235805 (TRBV6-4, TRBJ1-2)
CASSEAVGDPNYGYTF

SEQ ID NO: 471611 - protein, 14 aa, Homo sapiens
  CDR3 for alpha chain variable domain of TCR clone 235806 (TRAV23/DV6, TRAJ37)
CAASTFSNTGKLIF

SEQ ID NO: 471612 - protein, 13 aa, Homo sapiens
  CDR3 for beta chain variable domain of TCR clone 235806 (TRBV7-7, TRBJ1-1)
CASSLGANTEAFF

SEQ ID NO: 471613 - protein, 16 aa, Homo sapiens
  CDR3 for alpha chain variable domain of TCR clone 235807 (TRAV12-3, TRAJ18)
CTMRGSRGSTLGRLYF

SEQ ID NO: 471614 - protein, 19 aa, Homo sapiens
  CDR3 for beta chain variable domain of TCR clone 235807 (TRBV6-3, TRBJ2-7)
CASSYRIGLAGGVSGEQYF

SEQ ID NO: 471615 - protein, 12 aa, Homo sapiens
  CDR3 for alpha chain variable domain of TCR clone 235808 (TRAV26-1, TRAJ36)
CIVRVRADNLFF

SEQ ID NO: 471616 - protein, 14 aa, Homo sapiens
  CDR3 for beta chain variable domain of TCR clone 235808 (TRBV18, TRBJ2-7)
CASSPRGGAYEQYF

SEQ ID NO: 471617 - protein, 14 aa, Homo sapiens
  CDR3 for alpha chain variable domain of TCR clone 235809 (TRAV1-2, TRAJ16)
CAVNRFSAGQKLLF

SEQ ID NO: 471618 - protein, 17 aa, Homo sapiens
  CDR3 for beta chain variable domain of TCR clone 235809 (TRBV7-3, TRBJ2-3)
CASSLMKRMRGADTQYF

SEQ ID NO: 471619 - protein, 15 aa, Homo sapiens
  CDR3 for alpha chain variable domain of TCR clone 235810 (TRAV8-3, TRAJ27)
CAVGPPKTNAGKSTF

SEQ ID NO: 471620 - protein, 16 aa, Homo sapiens
  CDR3 for beta chain variable domain of TCR clone 235810 (TRBV19, TRBJ2-2)
CASRSPGTGATGELFF

SEQ ID NO: 471621 - protein, 14 aa, Homo sapiens
  CDR3 for alpha chain variable domain of TCR clone 235811 (TRAV8-3, TRAJ4)
CAGGAAGGYNKLIF

SEQ ID NO: 471622 - protein, 15 aa, Homo sapiens
  CDR3 for beta chain variable domain of TCR clone 235811 (TRBV6-5, TRBJ2-1)
CASSSDAGAGNAQFF

SEQ ID NO: 471623 - protein, 14 aa, Homo sapiens
  CDR3 for alpha chain variable domain of TCR clone 235812 (TRAV38-1, TRAJ29)
CAFITPSGNTPLVF

SEQ ID NO: 471624 - protein, 19 aa, Homo sapiens
  CDR3 for beta chain variable domain of TCR clone 235812 (TRBV18, TRBJ2-7)
CASSPRGGGLRTVLRAGHQ

SEQ ID NO: 471625 - protein, 13 aa, Homo sapiens
  CDR3 for alpha chain variable domain of TCR clone 235813 (TRAV1-2, TRAJ6)
CAVPKGGSYIPTF

SEQ ID NO: 471626 - protein, 15 aa, Homo sapiens
  CDR3 for beta chain variable domain of TCR clone 235813 (TRBV6-3, TRBJ2-7)
CASSSPGTVFYEQYF

SEQ ID NO: 471627 - protein, 14 aa, Homo sapiens
  CDR3 for alpha chain variable domain of TCR clone 235814 (TRAV17, TRAJ45)
CATASGGGADGLTF

SEQ ID NO: 471628 - protein, 15 aa, Homo sapiens
  CDR3 for beta chain variable domain of TCR clone 235814 (TRBV11-2, TRBJ2-1)
CASSRNRGIMYEQFF

SEQ ID NO: 471629 - protein, 21 aa, Homo sapiens
  CDR3 for alpha chain variable domain of TCR clone 235815 (TRAV20, )
CAVTGANNIQNPYPAVYQLRD

SEQ ID NO: 471630 - protein, 14 aa, Homo sapiens
  CDR3 for beta chain variable domain of TCR clone 235815 (TRBV20-1, TRBJ2-5)
CSALVPGYQETQYF

SEQ ID NO: 471631 - protein, 16 aa, Homo sapiens
  CDR3 for alpha chain variable domain of TCR clone 235816 (TRAV3, TRAJ10)
CAVRDMRAGGGNTLTF

SEQ ID NO: 471632 - protein, 15 aa, Homo sapiens
  CDR3 for beta chain variable domain of TCR clone 235816 (TRBV11-2, TRBJ1-6)
CASTGFGTAVSPPHF

SEQ ID NO: 471633 - protein, 11 aa, Homo sapiens
  CDR3 for alpha chain variable domain of TCR clone 235817 (TRAV23/DV6, TRAJ58)
CAARLLRGETS

SEQ ID NO: 471634 - protein, 18 aa, Homo sapiens
  CDR3 for beta chain variable domain of TCR clone 235817 (TRBV20-1, TRBJ2-6)
CSAETTPTHGSGANVLTF

SEQ ID NO: 471635 - protein, 14 aa, Homo sapiens
  CDR3 for alpha chain variable domain of TCR clone 235818 (TRAV16, TRAJ17)
CAPRIKAAGNKLTF

SEQ ID NO: 471636 - protein, 17 aa, Homo sapiens
  CDR3 for beta chain variable domain of TCR clone 235818 (TRBV7-2, TRBJ2-3)
CARSSYSGTRRADTQYF

SEQ ID NO: 471637 - protein, 12 aa, Homo sapiens
  CDR3 for alpha chain variable domain of TCR clone 235819 (TRAV21, TRAJ49)
CAVNDGGNQFHF

SEQ ID NO: 471638 - protein, 14 aa, Homo sapiens
  CDR3 for beta chain variable domain of TCR clone 235819 (TRBV18, TRBJ2-7)
CASSPRGGSYEQYF

SEQ ID NO: 471639 - protein, 13 aa, Homo sapiens
  CDR3 for alpha chain variable domain of TCR clone 235820 (TRAV12-3, TRAJ13)
CAMSSGGYQKVAF

SEQ ID NO: 471640 - protein, 13 aa, Homo sapiens
  CDR3 for beta chain variable domain of TCR clone 235820 (TRBV20-1, TRBJ1-1)
CSARGGGNTEAFF

SEQ ID NO: 471641 - protein, 17 aa, Homo sapiens
  CDR3 for alpha chain variable domain of TCR clone 235821 (TRAV13-1, TRAJ31)
CAPRDRLMFGDGTQLVG

SEQ ID NO: 471642 - protein, 12 aa, Homo sapiens
  CDR3 for beta chain variable domain of TCR clone 235821 (TRBV7-9, TRBJ2-7)
CASSLEGYERYF

SEQ ID NO: 471643 - protein, 15 aa, Homo sapiens
  CDR3 for alpha chain variable domain of TCR clone 235822 (TRAV12-2, TRAJ53)
CAVNGGGGSNYKLTF

SEQ ID NO: 471644 - protein, 19 aa, Homo sapiens
  CDR3 for beta chain variable domain of TCR clone 235822 (TRBV27, TRBJ2-2)
CASRPGTGQPSRDTGELFF

SEQ ID NO: 471645 - protein, 18 aa, Homo sapiens
  CDR3 for alpha chain variable domain of TCR clone 235823 (TRAV26-1, TRAJ23)
CIVRVGLEVWNQGGKLIF

SEQ ID NO: 471646 - protein, 15 aa, Homo sapiens
  CDR3 for beta chain variable domain of TCR clone 235823 (TRBV29-1, TRBJ2-7)
CSVEFFDRGSYEQYF

SEQ ID NO: 471647 - protein, 12 aa, Homo sapiens
  CDR3 for alpha chain variable domain of TCR clone 235824 (TRAV22, TRAJ36)
CAVGTGANNLFF

SEQ ID NO: 471648 - protein, 17 aa, Homo sapiens
  CDR3 for beta chain variable domain of TCR clone 235824 (TRBV15, TRBJ1-4)
CATSRYGRGDPNEKLFF

SEQ ID NO: 471649 - protein, 14 aa, Homo sapiens
  CDR3 for alpha chain variable domain of TCR clone 235825 (TRAV1-2, TRAJ16)
CAVNRFSDGQKLLF

SEQ ID NO: 471650 - protein, 13 aa, Homo sapiens
  CDR3 for beta chain variable domain of TCR clone 235825 (TRBV28, TRBJ2-7)
CASKAGGVYEQYF

SEQ ID NO: 471651 - protein, 13 aa, Homo sapiens
  CDR3 for alpha chain variable domain of TCR clone 235826 (TRAV12-1, TRAJ12)
CVVNIESSYKLIF

SEQ ID NO: 471652 - protein, 18 aa, Homo sapiens
  CDR3 for beta chain variable domain of TCR clone 235826 (TRBV7-9, TRBJ2-7)
CASSLTTSGSRTWYEQYF

SEQ ID NO: 471653 - protein, 17 aa, Homo sapiens
  CDR3 for alpha chain variable domain of TCR clone 235827 (TRAV3, TRAJ38)
CAVRDCLNAGNNRKLIW

SEQ ID NO: 471654 - protein, 16 aa, Homo sapiens
  CDR3 for beta chain variable domain of TCR clone 235827 (TRBV5-5, TRBJ1-5)
CASSDRESISPSILVM

SEQ ID NO: 471655 - protein, 12 aa, Homo sapiens
  CDR3 for alpha chain variable domain of TCR clone 235828 (TRAV12-3, TRAJ17)
CAMTLTGNKLTF

SEQ ID NO: 471656 - protein, 13 aa, Homo sapiens
  CDR3 for beta chain variable domain of TCR clone 235828 (TRBV7-3, TRBJ2-1)
CASSPGSYNEQFF

SEQ ID NO: 471657 - protein, 16 aa, Homo sapiens
  CDR3 for alpha chain variable domain of TCR clone 235829 (TRAV3, TRAJ10)
CAVRDMRAGGGNKLTF

SEQ ID NO: 471658 - protein, 16 aa, Homo sapiens
  CDR3 for beta chain variable domain of TCR clone 235829 (TRBV12-5, TRBJ2-5)
CASGLRTSGNQETQYF

SEQ ID NO: 471659 - protein, 13 aa, Homo sapiens
  CDR3 for alpha chain variable domain of TCR clone 235830 (TRAV17, TRAJ58)
CATDNRGGSRLTF

SEQ ID NO: 471660 - protein, 14 aa, Homo sapiens
  CDR3 for beta chain variable domain of TCR clone 235830 (TRBV25-1, TRBJ1-1)
CASTHLGGNTEAFF

SEQ ID NO: 471661 - protein, 15 aa, Homo sapiens
  CDR3 for alpha chain variable domain of TCR clone 235831 (TRAV3, TRAJ9)
CAVRDSNTGGFKTIF

SEQ ID NO: 471662 - protein, 16 aa, Homo sapiens
  CDR3 for beta chain variable domain of TCR clone 235831 (TRBV15, TRBJ2-5)
CATSPTTGQGMVTQYF

SEQ ID NO: 471663 - protein, 13 aa, Homo sapiens
  CDR3 for alpha chain variable domain of TCR clone 235832 (TRAV12-1, TRAJ17)
CVVNKAAGNKLTF

SEQ ID NO: 471664 - protein, 16 aa, Homo sapiens
  CDR3 for beta chain variable domain of TCR clone 235832 (TRBV12-5, TRBJ2-5)
CASGPRTSGNQETQYF

SEQ ID NO: 471665 - protein, 13 aa, Homo sapiens
  CDR3 for alpha chain variable domain of TCR clone 235833 (TRAV27, TRAJ45)
CRSSGGGADGLTF

SEQ ID NO: 471666 - protein, 16 aa, Homo sapiens
  CDR3 for beta chain variable domain of TCR clone 235833 (TRBV20-1, TRBJ2-1)
CSARSTSESSYNEQFF

SEQ ID NO: 471667 - protein, 11 aa, Homo sapiens
  CDR3 for alpha chain variable domain of TCR clone 235834 (TRAV12-3, TRAJ49)
CAMSSGNQFYF

SEQ ID NO: 471668 - protein, 17 aa, Homo sapiens
  CDR3 for beta chain variable domain of TCR clone 235834 (TRBV5-6, TRBJ2-7)
CASSLWRVLAGAYEQYF

SEQ ID NO: 471669 - protein, 16 aa, Homo sapiens
  CDR3 for alpha chain variable domain of TCR clone 235835 (TRAV1-2, TRAJ35)
CAVRGLTIGFGNVLHW

SEQ ID NO: 471670 - protein, 13 aa, Homo sapiens
  CDR3 for beta chain variable domain of TCR clone 235835 (TRBV6-6, TRBJ2-1)
CASSLHQGDEQFF

SEQ ID NO: 471671 - protein, 14 aa, Homo sapiens
  CDR3 for alpha chain variable domain of TCR clone 235836 (TRAV12-2, TRAJ24)
CAVTPADSWGKLQF

SEQ ID NO: 471672 - protein, 15 aa, Homo sapiens
  CDR3 for beta chain variable domain of TCR clone 235836 (TRBV7-9, TRBJ1-5)
CASSQGHQPNQPQHF

SEQ ID NO: 471673 - protein, 11 aa, Homo sapiens
  CDR3 for alpha chain variable domain of TCR clone 235837 (TRAV12-2, TRAJ3)
CAVKRASKKIF

SEQ ID NO: 471674 - protein, 14 aa, Homo sapiens
  CDR3 for beta chain variable domain of TCR clone 235837 (TRBV6-5, TRBJ1-1)
CASNRQRSDTEAFF

SEQ ID NO: 471675 - protein, 20 aa, Homo sapiens
  CDR3 for alpha chain variable domain of TCR clone 235838 (TRAV26-1, TRAJ42)
CCVLLHRQTYYGGSQGNLIF

SEQ ID NO: 471676 - protein, 15 aa, Homo sapiens
  CDR3 for beta chain variable domain of TCR clone 235838 (TRBV7-3, TRBJ2-2)
CQSLKRGTLSGELFF

SEQ ID NO: 471677 - protein, 14 aa, Homo sapiens
  CDR3 for alpha chain variable domain of TCR clone 235839 (TRAV17, TRAJ6)
CATDPSGGSYIPTF

SEQ ID NO: 471678 - protein, 13 aa, Homo sapiens
  CDR3 for beta chain variable domain of TCR clone 235839 (TRBV4-1, TRBJ2-7)
CASSQGAPYEQYF

SEQ ID NO: 471679 - protein, 14 aa, Homo sapiens
  CDR3 for alpha chain variable domain of TCR clone 235840 (TRAV17, TRAJ34)
CATDSLVGTDKPIF

SEQ ID NO: 471680 - protein, 13 aa, Homo sapiens
  CDR3 for beta chain variable domain of TCR clone 235840 (TRBV11-2, TRBJ2-7)
CASSGTRPYEQYF

SEQ ID NO: 471681 - protein, 12 aa, Homo sapiens
  CDR3 for alpha chain variable domain of TCR clone 235841 (TRAV8-4, TRAJ43)
CAVSVNNNDMRF

SEQ ID NO: 471682 - protein, 14 aa, Homo sapiens
  CDR3 for beta chain variable domain of TCR clone 235841 (TRBV4-1, TRBJ2-2)
CASSHAVNTGELFF

SEQ ID NO: 471683 - protein, 13 aa, Homo sapiens
  CDR3 for alpha chain variable domain of TCR clone 235842 (TRAV22, TRAJ29)
CAVGGSGNTPLVF

SEQ ID NO: 471684 - protein, 15 aa, Homo sapiens
  CDR3 for beta chain variable domain of TCR clone 235842 (TRBV7-3, TRBJ2-1)
CASSLTSGSYNEQFF

SEQ ID NO: 471685 - protein, 14 aa, Homo sapiens
  CDR3 for alpha chain variable domain of TCR clone 235843 (TRAV12-1, TRAJ23)
CVVIVSNQGGKLIF

SEQ ID NO: 471686 - protein, 15 aa, Homo sapiens
  CDR3 for beta chain variable domain of TCR clone 235843 (TRBV20-1, TRBJ1-5)
CSAKPPGQGPQPQHF

SEQ ID NO: 471687 - protein, 12 aa, Homo sapiens
  CDR3 for alpha chain variable domain of TCR clone 235844 (TRAV12-3, TRAJ17)
CAMTLTGNKLTF

SEQ ID NO: 471688 - protein, 15 aa, Homo sapiens
  CDR3 for beta chain variable domain of TCR clone 235844 (TRBV6-6, TRBJ2-5)
CDSSPGGGLEETQYF

SEQ ID NO: 471689 - protein, 13 aa, Homo sapiens
  CDR3 for alpha chain variable domain of TCR clone 235845 (TRAV2, TRAJ29)
CAVYSSGSTPLVF

SEQ ID NO: 471690 - protein, 14 aa, Homo sapiens
  CDR3 for beta chain variable domain of TCR clone 235845 (TRBV7-9, TRBJ1-1)
CASSLGGLKTEAFF

SEQ ID NO: 471691 - protein, 13 aa, Homo sapiens
  CDR3 for alpha chain variable domain of TCR clone 235846 (TRAV25, TRAJ26)
CAGMDNYGQNFVF

SEQ ID NO: 471692 - protein, 18 aa, Homo sapiens
  CDR3 for beta chain variable domain of TCR clone 235846 (TRBV7-3, TRBJ2-5)
CASSFRGGGDPVLRARHA

SEQ ID NO: 471693 - protein, 20 aa, Homo sapiens
  CDR3 for alpha chain variable domain of TCR clone 235847 (TRAV12-1, TRAJ42)
SSVIQPPTSVKGGSQGNLIF

SEQ ID NO: 471694 - protein, 14 aa, Homo sapiens
  CDR3 for beta chain variable domain of TCR clone 235847 (TRBV7-2, TRBJ1-2)
GRVSLCQQGNRYTF

SEQ ID NO: 471695 - protein, 15 aa, Homo sapiens
  CDR3 for alpha chain variable domain of TCR clone 235848 (TRAV27, TRAJ38)
CAARRNARNNRKRIW

SEQ ID NO: 471696 - protein, 13 aa, Homo sapiens
  CDR3 for beta chain variable domain of TCR clone 235848 (TRBV12-5, TRBJ2-3)
CASGDRQSDTQYF

SEQ ID NO: 471697 - protein, 13 aa, Homo sapiens
  CDR3 for alpha chain variable domain of TCR clone 235849 (TRAV21, TRAJ27)
CAARPGNAGKSTF

SEQ ID NO: 471698 - protein, 15 aa, Homo sapiens
  CDR3 for beta chain variable domain of TCR clone 235849 (TRBV9, TRBJ1-6)
CASSVAGTGDSPLLF

SEQ ID NO: 471699 - protein, 20 aa, Homo sapiens
  CDR3 for alpha chain variable domain of TCR clone 235850 (TRAV26-1, TRAJ57)
CCVLLHRQIETQGGSEKLFF

SEQ ID NO: 471700 - protein, 16 aa, Homo sapiens
  CDR3 for beta chain variable domain of TCR clone 235850 (TRBV4-2, TRBJ2-7)
CASSQEELAGTYEQYF

SEQ ID NO: 471701 - protein, 18 aa, Homo sapiens
  CDR3 for alpha chain variable domain of TCR clone 235851 (TRAV12-3, TRAJ10)
SPVIQPPTSDGRRKQLTF

SEQ ID NO: 471702 - protein, 12 aa, Homo sapiens
  CDR3 for beta chain variable domain of TCR clone 235851 (TRBV7-3, TRBJ2-5)
CASSSPGGTQYF

SEQ ID NO: 471703 - protein, 18 aa, Homo sapiens
  CDR3 for alpha chain variable domain of TCR clone 235852 (TRAV26-2, TRAJ45)
CILRVDKYSGGGADGLTY

SEQ ID NO: 471704 - protein, 15 aa, Homo sapiens
  CDR3 for beta chain variable domain of TCR clone 235852 (TRBV5-7, TRBJ1-2)
CASSLGVAANYGYTF

SEQ ID NO: 471705 - protein, 12 aa, Homo sapiens
  CDR3 for alpha chain variable domain of TCR clone 235853 (TRAV12-3, TRAJ17)
CAMTLTGNKLTF

SEQ ID NO: 471706 - protein, 15 aa, Homo sapiens
  CDR3 for beta chain variable domain of TCR clone 235853 (TRBV20-1, TRBJ2-7)
RSARDRVSGMDGQYF

SEQ ID NO: 471707 - protein, 14 aa, Homo sapiens
  CDR3 for alpha chain variable domain of TCR clone 235854 (TRAV21, TRAJ37)
CPRPGSGNTGKLIF

SEQ ID NO: 471708 - protein, 14 aa, Homo sapiens
  CDR3 for beta chain variable domain of TCR clone 235854 (TRBV7-2, TRBJ2-7)
CASRSQGAAYEQYF

SEQ ID NO: 471709 - protein, 18 aa, Homo sapiens
  CDR3 for alpha chain variable domain of TCR clone 235855 (TRAV26-2, TRAJ54)
CIPRDVEVGNQGAQKLVF

SEQ ID NO: 471710 - protein, 16 aa, Homo sapiens
  CDR3 for beta chain variable domain of TCR clone 235855 (TRBV6-1, TRBJ2-5)
CASSETLDRGAETQYF

SEQ ID NO: 471711 - protein, 14 aa, Homo sapiens
  CDR3 for alpha chain variable domain of TCR clone 235856 (TRAV8-3, TRAJ4)
CAVGAAGGCTKLIF

SEQ ID NO: 471712 - protein, 15 aa, Homo sapiens
  CDR3 for beta chain variable domain of TCR clone 235856 (TRBV6-5, TRBJ2-1)
CASSYDAGAGNEQFF

SEQ ID NO: 471713 - protein, 14 aa, Homo sapiens
  CDR3 for alpha chain variable domain of TCR clone 235857 (TRAV16, TRAJ26)
CITVLSAYGQNFVF

SEQ ID NO: 471714 - protein, 14 aa, Homo sapiens
  CDR3 for beta chain variable domain of TCR clone 235857 (TRBV7-2, TRBJ2-7)
CASRSHGAAYEQYF

SEQ ID NO: 471715 - protein, 11 aa, Homo sapiens
  CDR3 for alpha chain variable domain of TCR clone 235858 (TRAV16, TRAJ20)
CALSEGFKTAL

SEQ ID NO: 471716 - protein, 13 aa, Homo sapiens
  CDR3 for beta chain variable domain of TCR clone 235858 (TRBV7-3, TRBJ2-1)
CASSLDSYNEQFF

SEQ ID NO: 471717 - protein, 16 aa, Homo sapiens
  CDR3 for alpha chain variable domain of TCR clone 235859 (TRAV12-3, TRAJ53)
CAMSPGSGGSNYKLTF

SEQ ID NO: 471718 - protein, 15 aa, Homo sapiens
  CDR3 for beta chain variable domain of TCR clone 235859 (TRBV5-1, TRBJ2-6)
CASSLDPSGANVLTF

SEQ ID NO: 471719 - protein, 13 aa, Homo sapiens
  CDR3 for alpha chain variable domain of TCR clone 235860 (TRAV12-1, TRAJ42)
CGGVGGSQGNLIF

SEQ ID NO: 471720 - protein, 15 aa, Homo sapiens
  CDR3 for beta chain variable domain of TCR clone 235860 (TRBV12-5, TRBJ2-2)
CASGFQGSGTRELFF

SEQ ID NO: 471721 - protein, 12 aa, Homo sapiens
  CDR3 for alpha chain variable domain of TCR clone 235861 (TRAV2, TRAJ34)
CAVERNIDKLIF

SEQ ID NO: 471722 - protein, 14 aa, Homo sapiens
  CDR3 for beta chain variable domain of TCR clone 235861 (TRBV7-9, TRBJ2-1)
CASSDNSGYNEQFF

SEQ ID NO: 471723 - protein, 14 aa, Homo sapiens
  CDR3 for alpha chain variable domain of TCR clone 235862 (TRAV23/DV6, TRAJ9)
CASKYWRLQNYLWS

SEQ ID NO: 471724 - protein, 14 aa, Homo sapiens
  CDR3 for beta chain variable domain of TCR clone 235862 (TRBV6-1, TRBJ2-7)
CAITRTGDYYEQYF

SEQ ID NO: 471725 - protein, 14 aa, Homo sapiens
  CDR3 for alpha chain variable domain of TCR clone 235863 (TRAV12-2, TRAJ13)
CAVKKTGGYQNVTF

SEQ ID NO: 471726 - protein, 15 aa, Homo sapiens
  CDR3 for beta chain variable domain of TCR clone 235863 (TRBV20-1, TRBJ1-1)
CSASWDRFLNTEAFF

SEQ ID NO: 471727 - protein, 14 aa, Homo sapiens
  CDR3 for alpha chain variable domain of TCR clone 235864 (TRAV35, TRAJ24)
CAGPRRDSWGKLQF

SEQ ID NO: 471728 - protein, 17 aa, Homo sapiens
  CDR3 for beta chain variable domain of TCR clone 235864 (TRBV28, TRBJ2-5)
CASSFGGEWGGQETQYF

SEQ ID NO: 471729 - protein, 11 aa, Homo sapiens
  CDR3 for alpha chain variable domain of TCR clone 235865 (TRAV3, TRAJ21)
CAVGNFNKFYF

SEQ ID NO: 471730 - protein, 14 aa, Homo sapiens
  CDR3 for beta chain variable domain of TCR clone 235865 (TRBV19, TRBJ2-7)
CASSIVAGPTEQYF

SEQ ID NO: 471731 - protein, 14 aa, Homo sapiens
  CDR3 for alpha chain variable domain of TCR clone 235866 (TRAV16, TRAJ32)
CALKSGGATNKLIF

SEQ ID NO: 471732 - protein, 14 aa, Homo sapiens
  CDR3 for beta chain variable domain of TCR clone 235866 (TRBV7-2, TRBJ2-7)
CASRSQGAAYEQYF

SEQ ID NO: 471733 - protein, 12 aa, Homo sapiens
  CDR3 for alpha chain variable domain of TCR clone 235867 (TRAV21, TRAJ39)
CAADNAGNMLTF

SEQ ID NO: 471734 - protein, 15 aa, Homo sapiens
  CDR3 for beta chain variable domain of TCR clone 235867 (TRBV28, TRBJ2-1)
CASSIIAGGRSEQFF

SEQ ID NO: 471735 - protein, 15 aa, Homo sapiens
  CDR3 for alpha chain variable domain of TCR clone 235868 (TRAV21, TRAJ40)
CAVRPQTSGTHKYIF

SEQ ID NO: 471736 - protein, 15 aa, Homo sapiens
  CDR3 for beta chain variable domain of TCR clone 235868 (TRBV5-1, TRBJ2-3)
CASSVTSGSTDTQYF

SEQ ID NO: 471737 - protein, 11 aa, Homo sapiens
  CDR3 for alpha chain variable domain of TCR clone 235869 (TRAV1-1, TRAJ23)
CAVRQGGKLIF

SEQ ID NO: 471738 - protein, 12 aa, Homo sapiens
  CDR3 for beta chain variable domain of TCR clone 235869 (TRBV24-1, TRBJ1-1)
CATSDSDRGAFF

SEQ ID NO: 471739 - protein, 15 aa, Homo sapiens
  CDR3 for alpha chain variable domain of TCR clone 235870 (TRAV2, TRAJ15)
CAVEDREQAGTALIF

SEQ ID NO: 471740 - protein, 17 aa, Homo sapiens
  CDR3 for beta chain variable domain of TCR clone 235870 (TRBV7-8, TRBJ2-6)
CASSPGTGGAGANVLTF

SEQ ID NO: 471741 - protein, 11 aa, Homo sapiens
  CDR3 for alpha chain variable domain of TCR clone 235871 (TRAV1-2, TRAJ20)
CAVANDYKLSF

SEQ ID NO: 471742 - protein, 18 aa, Homo sapiens
  CDR3 for beta chain variable domain of TCR clone 235871 (TRBV20-1, TRBJ2-6)
CCAETTTTRGSGANVLTF

SEQ ID NO: 471743 - protein, 15 aa, Homo sapiens
  CDR3 for alpha chain variable domain of TCR clone 235872 (TRAV2, TRAJ22)
CAVPSRGGSARQLTF

SEQ ID NO: 471744 - protein, 19 aa, Homo sapiens
  CDR3 for beta chain variable domain of TCR clone 235872 (TRBV5-1, TRBJ2-3)
CASSLWLAGGITTTDTQYF

SEQ ID NO: 471745 - protein, 12 aa, Homo sapiens
  CDR3 for alpha chain variable domain of TCR clone 235873 (TRAV1-1, TRAJ43)
CAPRVSSNDMRF

SEQ ID NO: 471746 - protein, 12 aa, Homo sapiens
  CDR3 for beta chain variable domain of TCR clone 235873 (TRBV11-2, TRBJ2-1)
CASSPGNNEQFF

SEQ ID NO: 471747 - protein, 15 aa, Homo sapiens
  CDR3 for alpha chain variable domain of TCR clone 235874 (TRAV20, TRAJ41)
CAVQANSNSGYALNF

SEQ ID NO: 471748 - protein, 18 aa, Homo sapiens
  CDR3 for beta chain variable domain of TCR clone 235874 (TRBV7-9, TRBJ2-7)
CASSLTTRGSRTWYEQYF

SEQ ID NO: 471749 - protein, 15 aa, Homo sapiens
  CDR3 for alpha chain variable domain of TCR clone 235875 (TRAV3, TRAJ22)
CAVRDRGGSARHLTF

SEQ ID NO: 471750 - protein, 15 aa, Homo sapiens
  CDR3 for beta chain variable domain of TCR clone 235875 (TRBV27, TRBJ2-1)
CASSNGGGSSNEQFF

SEQ ID NO: 471751 - protein, 15 aa, Homo sapiens
  CDR3 for alpha chain variable domain of TCR clone 235876 (TRAV25, TRAJ52)
CAGRPGGTSYGKLTF

SEQ ID NO: 471752 - protein, 17 aa, Homo sapiens
  CDR3 for beta chain variable domain of TCR clone 235876 (TRBV18, TRBJ2-2)
CASSPSDPWQNTGELFF

SEQ ID NO: 471753 - protein, 14 aa, Homo sapiens
  CDR3 for alpha chain variable domain of TCR clone 235877 (TRAV1-1, TRAJ27)
CAVIYNTNAGKSTF

SEQ ID NO: 471754 - protein, 16 aa, Homo sapiens
  CDR3 for beta chain variable domain of TCR clone 235877 (TRBV19, TRBJ2-7)
CASSISAGGALYEQYF

SEQ ID NO: 471755 - protein, 15 aa, Homo sapiens
  CDR3 for alpha chain variable domain of TCR clone 235878 (TRAV17, TRAJ23)
CATDAEDNQGGKLIF

SEQ ID NO: 471756 - protein, 11 aa, Homo sapiens
  CDR3 for beta chain variable domain of TCR clone 235878 (TRBV7-8, TRBJ2-7)
CASSLSLEQYF

SEQ ID NO: 471757 - protein, 14 aa, Homo sapiens
  CDR3 for alpha chain variable domain of TCR clone 235879 (TRAV16, TRAJ15)
CALSGPQAGTALIF

SEQ ID NO: 471758 - protein, 14 aa, Homo sapiens
  CDR3 for beta chain variable domain of TCR clone 235879 (TRBV12-4, TRBJ1-1)
CASSLGTGGTEAFF

SEQ ID NO: 471759 - protein, 15 aa, Homo sapiens
  CDR3 for alpha chain variable domain of TCR clone 235880 (TRAV3, TRAJ5)
CAVRDLDTGRRGLTF

SEQ ID NO: 471760 - protein, 14 aa, Homo sapiens
  CDR3 for beta chain variable domain of TCR clone 235880 (TRBV25-1, TRBJ1-4)
CASSGGGQPEKLFF

SEQ ID NO: 471761 - protein, 14 aa, Homo sapiens
  CDR3 for alpha chain variable domain of TCR clone 235881 (TRAV1-2, TRAJ16)
CAVNRFSDGQKLLF

SEQ ID NO: 471762 - protein, 15 aa, Homo sapiens
  CDR3 for beta chain variable domain of TCR clone 235881 (TRBV11-3, TRBJ2-1)
CASSPGDREGNEQFF

SEQ ID NO: 471763 - protein, 15 aa, Homo sapiens
  CDR3 for alpha chain variable domain of TCR clone 235882 (TRAV12-3, TRAJ6)
CAMSATSGGSYIPTF

SEQ ID NO: 471764 - protein, 11 aa, Homo sapiens
  CDR3 for beta chain variable domain of TCR clone 235882 (TRBV20-1, TRBJ1-5)
CSAQEYQPQHF

SEQ ID NO: 471765 - protein, 13 aa, Homo sapiens
  CDR3 for alpha chain variable domain of TCR clone 235883 (TRAV12-1, TRAJ11)
CVVTRGGYSTLTF

SEQ ID NO: 471766 - protein, 13 aa, Homo sapiens
  CDR3 for beta chain variable domain of TCR clone 235883 (TRBV20-1, TRBJ1-2)
CSARYQGAYGYTF

SEQ ID NO: 471767 - protein, 13 aa, Homo sapiens
  CDR3 for alpha chain variable domain of TCR clone 235884 (TRAV21, TRAJ20)
CAVGLRVDYKLSF

SEQ ID NO: 471768 - protein, 13 aa, Homo sapiens
  CDR3 for beta chain variable domain of TCR clone 235884 (TRBV19, TRBJ2-5)
CASSIGQVTDFFL

SEQ ID NO: 471769 - protein, 14 aa, Homo sapiens
  CDR3 for alpha chain variable domain of TCR clone 235885 (TRAV13-1, TRAJ35)
CAASKGGFGNVLHC

SEQ ID NO: 471770 - protein, 15 aa, Homo sapiens
  CDR3 for beta chain variable domain of TCR clone 235885 (TRBV7-8, TRBJ2-1)
CASSLSIGGRQEQFF

SEQ ID NO: 471771 - protein, 16 aa, Homo sapiens
  CDR3 for alpha chain variable domain of TCR clone 235886 (TRAV4, TRAJ37)
CLVGWFGSSNTGKQIF

SEQ ID NO: 471772 - protein, 15 aa, Homo sapiens
  CDR3 for beta chain variable domain of TCR clone 235886 (TRBV12-4, TRBJ2-3)
CASSLAERPTDTQYF

SEQ ID NO: 471773 - protein, 12 aa, Homo sapiens
  CDR3 for alpha chain variable domain of TCR clone 235887 (TRAV23/DV6, TRAJ17)
CARGSCRQQANF

SEQ ID NO: 471774 - protein, 14 aa, Homo sapiens
  CDR3 for beta chain variable domain of TCR clone 235887 (TRBV7-2, TRBJ1-2)
CASSQTWSTYGYTF

SEQ ID NO: 471775 - protein, 14 aa, Homo sapiens
  CDR3 for alpha chain variable domain of TCR clone 235888 (TRAV1-2, TRAJ8)
CAVREDAGFQKLVF

SEQ ID NO: 471776 - protein, 14 aa, Homo sapiens
  CDR3 for beta chain variable domain of TCR clone 235888 (TRBV19, TRBJ2-1)
CASPTFVLSGEQFF

SEQ ID NO: 471777 - protein, 15 aa, Homo sapiens
  CDR3 for alpha chain variable domain of TCR clone 235889 (TRAV16, TRAJ42)
CSSGLLGGSQGNLIF

SEQ ID NO: 471778 - protein, 15 aa, Homo sapiens
  CDR3 for beta chain variable domain of TCR clone 235889 (TRBV5-1, TRBJ2-1)
CASSPGGLAGNEQFF

SEQ ID NO: 471779 - protein, 11 aa, Homo sapiens
  CDR3 for alpha chain variable domain of TCR clone 235890 (TRAV2, TRAJ13)
CASGGYQKVTF

SEQ ID NO: 471780 - protein, 12 aa, Homo sapiens
  CDR3 for beta chain variable domain of TCR clone 235890 (TRBV7-6, TRBJ2-5)
CASSLSQETQYF

SEQ ID NO: 471781 - protein, 14 aa, Homo sapiens
  CDR3 for alpha chain variable domain of TCR clone 235891 (TRAV8-3, TRAJ39)
CAVGANNAGNLLTF

SEQ ID NO: 471782 - protein, 16 aa, Homo sapiens
  CDR3 for beta chain variable domain of TCR clone 235891 (TRBV12-5, TRBJ2-5)
CASGPRTSGNQETQYF

SEQ ID NO: 471783 - protein, 15 aa, Homo sapiens
  CDR3 for alpha chain variable domain of TCR clone 235892 (TRAV17, TRAJ16)
CATALRFSDGQKLLF

SEQ ID NO: 471784 - protein, 15 aa, Homo sapiens
  CDR3 for beta chain variable domain of TCR clone 235892 (TRBV10-3, TRBJ2-7)
CATREQGLRSYEQYF

SEQ ID NO: 471785 - protein, 11 aa, Homo sapiens
  CDR3 for alpha chain variable domain of TCR clone 235893 (TRAV12-1, TRAJ34)
CVVNKGRELIF

SEQ ID NO: 471786 - protein, 13 aa, Homo sapiens
  CDR3 for beta chain variable domain of TCR clone 235893 (TRBV27, TRBJ2-7)
CASSFVSSYEQYF

SEQ ID NO: 471787 - protein, 15 aa, Homo sapiens
  CDR3 for alpha chain variable domain of TCR clone 235894 (TRAV12-2, TRAJ52)
CAVTSGGNSYGKLTF

SEQ ID NO: 471788 - protein, 15 aa, Homo sapiens
  CDR3 for beta chain variable domain of TCR clone 235894 (TRBV7-2, TRBJ2-1)
CASSPGFISGNEQFF

SEQ ID NO: 471789 - protein, 18 aa, Homo sapiens
  CDR3 for alpha chain variable domain of TCR clone 235895 (TRAV12-3, TRAJ52)
CAMSRTNAGGTSYGKLTF

SEQ ID NO: 471790 - protein, 11 aa, Homo sapiens
  CDR3 for beta chain variable domain of TCR clone 235895 (TRBV19, TRBJ1-2)
CASSISSGYTF

SEQ ID NO: 471791 - protein, 15 aa, Homo sapiens
  CDR3 for alpha chain variable domain of TCR clone 235896 (TRAV21, TRAJ4)
CCEAPFSGGYNKLIF

SEQ ID NO: 471792 - protein, 16 aa, Homo sapiens
  CDR3 for beta chain variable domain of TCR clone 235896 (TRBV25-1, TRBJ1-2)
CASSELEGARGYGYTF

SEQ ID NO: 471793 - protein, 14 aa, Homo sapiens
  CDR3 for alpha chain variable domain of TCR clone 235897 (TRAV12-2, TRAJ40)
CAVKIPSGTYKYIF

SEQ ID NO: 471794 - protein, 15 aa, Homo sapiens
  CDR3 for beta chain variable domain of TCR clone 235897 (TRBV29-1, TRBJ2-1)
CSVGRHALFYNEQFF

SEQ ID NO: 471795 - protein, 12 aa, Homo sapiens
  CDR3 for alpha chain variable domain of TCR clone 235898 (TRAV27, TRAJ35)
CAGADFGNVLHC

SEQ ID NO: 471796 - protein, 16 aa, Homo sapiens
  CDR3 for beta chain variable domain of TCR clone 235898 (TRBV6-1, TRBJ2-1)
CDSILRQGSSYNEQFF

SEQ ID NO: 471797 - protein, 11 aa, Homo sapiens
  CDR3 for alpha chain variable domain of TCR clone 235899 (TRAV13-1, TRAJ23)
CAASSRGKLIF

SEQ ID NO: 471798 - protein, 13 aa, Homo sapiens
  CDR3 for beta chain variable domain of TCR clone 235899 (TRBV20-1, TRBJ1-1)
CSARVGGNTEAFF

SEQ ID NO: 471799 - protein, 12 aa, Homo sapiens
  CDR3 for alpha chain variable domain of TCR clone 235900 (TRAV12-3, TRAJ20)
CAMVRGDYKLSF

SEQ ID NO: 471800 - protein, 15 aa, Homo sapiens
  CDR3 for beta chain variable domain of TCR clone 235900 (TRBV28, TRBJ1-5)
CASSRTGGYVQPQHF

SEQ ID NO: 471801 - protein, 13 aa, Homo sapiens
  CDR3 for alpha chain variable domain of TCR clone 235901 (TRAV13-1, TRAJ21)
CAASKGNFNKFYF

SEQ ID NO: 471802 - protein, 13 aa, Homo sapiens
  CDR3 for beta chain variable domain of TCR clone 235901 (TRBV19, TRBJ1-2)
CASSVPGQDGYTL

SEQ ID NO: 471803 - protein, 15 aa, Homo sapiens
  CDR3 for alpha chain variable domain of TCR clone 235902 (TRAV3, TRAJ11)
CAVRDRGSGYSTLTV

SEQ ID NO: 471804 - protein, 13 aa, Homo sapiens
  CDR3 for beta chain variable domain of TCR clone 235902 (TRBV7-9, TRBJ1-2)
CASSLKQNYGYTF

SEQ ID NO: 471805 - protein, 19 aa, Homo sapiens
  CDR3 for alpha chain variable domain of TCR clone 235903 (TRAV13-1, TRAJ52)
CAASPYQNAGGTSYGKLTF

SEQ ID NO: 471806 - protein, 14 aa, Homo sapiens
  CDR3 for beta chain variable domain of TCR clone 235903 (TRBV19, TRBJ2-7)
CASTVQGRPHEQYF

SEQ ID NO: 471807 - protein, 12 aa, Homo sapiens
  CDR3 for alpha chain variable domain of TCR clone 235904 (TRAV12-3, TRAJ17)
CAMTLTDNKLTF

SEQ ID NO: 471808 - protein, 15 aa, Homo sapiens
  CDR3 for beta chain variable domain of TCR clone 235904 (TRBV6-4, TRBJ2-1)
CASSDSTGGYNEQFF

SEQ ID NO: 471809 - protein, 17 aa, Homo sapiens
  CDR3 for alpha chain variable domain of TCR clone 235905 (TRAV35, TRAJ38)
CAGQLQRNAGNNRKLIL

SEQ ID NO: 471810 - protein, 15 aa, Homo sapiens
  CDR3 for beta chain variable domain of TCR clone 235905 (TRBV7-9, TRBJ2-1)
CASSLGLAVGTEQFF

SEQ ID NO: 471811 - protein, 10 aa, Homo sapiens
  CDR3 for alpha chain variable domain of TCR clone 235906 (TRAV1-2, TRAJ34)
CAVNTDKLIF

SEQ ID NO: 471812 - protein, 18 aa, Homo sapiens
  CDR3 for beta chain variable domain of TCR clone 235906 (TRBV7-9, TRBJ2-7)
CASSLTASGSRTWYEQYF

SEQ ID NO: 471813 - protein, 17 aa, Homo sapiens
  CDR3 for alpha chain variable domain of TCR clone 235907 (TRAV4, TRAJ18)
CLVVAAGRGSTLGRLYF

SEQ ID NO: 471814 - protein, 17 aa, Homo sapiens
  CDR3 for beta chain variable domain of TCR clone 235907 (TRBV28, TRBJ2-2)
CASSLATGMGDAGELSF

SEQ ID NO: 471815 - protein, 16 aa, Homo sapiens
  CDR3 for alpha chain variable domain of TCR clone 235908 (TRAV27, TRAJ48)
TAAQPGDTGLYLPLTF

SEQ ID NO: 471816 - protein, 14 aa, Homo sapiens
  CDR3 for beta chain variable domain of TCR clone 235908 (TRBV11-2, TRBJ2-3)
CASSRLARTDTQYI

SEQ ID NO: 471817 - protein, 13 aa, Homo sapiens
  CDR3 for alpha chain variable domain of TCR clone 235909 (TRAV6, TRAJ45)
SPFSGGGADGLTF

SEQ ID NO: 471818 - protein, 15 aa, Homo sapiens
  CDR3 for beta chain variable domain of TCR clone 235909 (TRBV7-9, TRBJ1-5)
CASSQGHQPNQPQHF

SEQ ID NO: 471819 - protein, 17 aa, Homo sapiens
  CDR3 for alpha chain variable domain of TCR clone 235910 (TRAV8-4, TRAJ3)
CAVTGETLVQQCFPYNL

SEQ ID NO: 471820 - protein, 16 aa, Homo sapiens
  CDR3 for beta chain variable domain of TCR clone 235910 (TRBV4-2, TRBJ1-1)
CASSQAGFGMNTEAFF

SEQ ID NO: 471821 - protein, 13 aa, Homo sapiens
  CDR3 for alpha chain variable domain of TCR clone 235911 (TRAV12-1, TRAJ33)
CGDAPDSNYQLIW

SEQ ID NO: 471822 - protein, 15 aa, Homo sapiens
  CDR3 for beta chain variable domain of TCR clone 235911 (TRBV20-1, TRBJ2-7)
CSARVPAAYFYEQYF

SEQ ID NO: 471823 - protein, 12 aa, Homo sapiens
  CDR3 for alpha chain variable domain of TCR clone 235912 (TRAV27, TRAJ42)
CAGGGSQGNLIF

SEQ ID NO: 471824 - protein, 14 aa, Homo sapiens
  CDR3 for beta chain variable domain of TCR clone 235912 (TRBV12-5, TRBJ2-5)
CASGSRTHQETQYF

SEQ ID NO: 471825 - protein, 10 aa, Homo sapiens
  CDR3 for alpha chain variable domain of TCR clone 235913 (TRAV16, TRAJ22)
SAMYLRQLTF

SEQ ID NO: 471826 - protein, 12 aa, Homo sapiens
  CDR3 for beta chain variable domain of TCR clone 235913 (TRBV7-8, TRBJ2-7)
CASSLGDREQYF

SEQ ID NO: 471827 - protein, 12 aa, Homo sapiens
  CDR3 for alpha chain variable domain of TCR clone 235914 (TRAV13-1, TRAJ27)
CAAHTNAGKSTF

SEQ ID NO: 471828 - protein, 14 aa, Homo sapiens
  CDR3 for beta chain variable domain of TCR clone 235914 (TRBV25-1, TRBJ1-6)
CASSLSADISPLHF

SEQ ID NO: 471829 - protein, 14 aa, Homo sapiens
  CDR3 for alpha chain variable domain of TCR clone 235915 (TRAV23/DV6, TRAJ37)
CAASTSSNTGKLIF

SEQ ID NO: 471830 - protein, 13 aa, Homo sapiens
  CDR3 for beta chain variable domain of TCR clone 235915 (TRBV11-2, TRBJ2-7)
CASSGTRPYEQYF

SEQ ID NO: 471831 - protein, 15 aa, Homo sapiens
  CDR3 for alpha chain variable domain of TCR clone 235916 (TRAV23/DV6, TRAJ45)
CAASSAGGGADGLTF

SEQ ID NO: 471832 - protein, 15 aa, Homo sapiens
  CDR3 for beta chain variable domain of TCR clone 235916 (TRBV19, TRBJ1-6)
CASSTQGAVGSPLHF

SEQ ID NO: 471833 - protein, 15 aa, Homo sapiens
  CDR3 for alpha chain variable domain of TCR clone 235917 (TRAV8-3, TRAJ7)
CAVGSISYGNNRLAF

SEQ ID NO: 471834 - protein, 16 aa, Homo sapiens
  CDR3 for beta chain variable domain of TCR clone 235917 (TRBV7-3, TRBJ2-1)
CASSLEGYRSYNEQFF

SEQ ID NO: 471835 - protein, 14 aa, Homo sapiens
  CDR3 for alpha chain variable domain of TCR clone 235918 (TRAV2, TRAJ43)
TTVLWRTNNNDMRF

SEQ ID NO: 471836 - protein, 15 aa, Homo sapiens
  CDR3 for beta chain variable domain of TCR clone 235918 (TRBV7-3, TRBJ2-1)
CASSPTGGGEVEQFF

SEQ ID NO: 471837 - protein, 14 aa, Homo sapiens
  CDR3 for alpha chain variable domain of TCR clone 235919 (TRAV3, TRAJ22)
CAVRDYGSVRQLTF

SEQ ID NO: 471838 - protein, 13 aa, Homo sapiens
  CDR3 for beta chain variable domain of TCR clone 235919 (TRBV11-2, TRBJ2-5)
CASGHGAKETQYF

SEQ ID NO: 471839 - protein, 12 aa, Homo sapiens
  CDR3 for alpha chain variable domain of TCR clone 235920 (TRAV13-2, TRAJ23)
CAERHRGGKLIF

SEQ ID NO: 471840 - protein, 13 aa, Homo sapiens
  CDR3 for beta chain variable domain of TCR clone 235920 (TRBV18, TRBJ1-1)
CASSGGRNTEAFF

SEQ ID NO: 471841 - protein, 15 aa, Homo sapiens
  CDR3 for alpha chain variable domain of TCR clone 235921 (TRAV12-2, TRAJ53)
CAVNGGRGSNYKLTF

SEQ ID NO: 471842 - protein, 15 aa, Homo sapiens
  CDR3 for beta chain variable domain of TCR clone 235921 (TRBV20-1, TRBJ2-7)
CCARDRVSGMDEQYF

SEQ ID NO: 471843 - protein, 19 aa, Homo sapiens
  CDR3 for alpha chain variable domain of TCR clone 235922 (TRAV1-2, TRAJ26)
CLLPLCCERPDNYGQNFVF

SEQ ID NO: 471844 - protein, 15 aa, Homo sapiens
  CDR3 for beta chain variable domain of TCR clone 235922 (TRBV9, TRBJ1-6)
CASSVAGTGDSALHF

SEQ ID NO: 471845 - protein, 13 aa, Homo sapiens
  CDR3 for alpha chain variable domain of TCR clone 235923 (TRAV25, TRAJ10)
CAGRTGGGNKLTF

SEQ ID NO: 471846 - protein, 15 aa, Homo sapiens
  CDR3 for beta chain variable domain of TCR clone 235923 (TRBV19, TRBJ1-1)
CASTSGQIQNTEAFF

SEQ ID NO: 471847 - protein, 12 aa, Homo sapiens
  CDR3 for alpha chain variable domain of TCR clone 235924 (TRAV8-6, TRAJ36)
CAVSDWLGQTTS

SEQ ID NO: 471848 - protein, 16 aa, Homo sapiens
  CDR3 for beta chain variable domain of TCR clone 235924 (TRBV12-5, TRBJ2-5)
CASGPRTSGNQETQYF

SEQ ID NO: 471849 - protein, 13 aa, Homo sapiens
  CDR3 for alpha chain variable domain of TCR clone 235925 (TRAV3, TRAJ21)
CAVREPDFNKFYF

SEQ ID NO: 471850 - protein, 15 aa, Homo sapiens
  CDR3 for beta chain variable domain of TCR clone 235925 (TRBV11-2, TRBJ2-1)
CASSSPSTRYNEQFF

SEQ ID NO: 471851 - protein, 15 aa, Homo sapiens
  CDR3 for alpha chain variable domain of TCR clone 235926 (TRAV8-3, TRAJ27)
CAVCPSKTNAGKSTF

SEQ ID NO: 471852 - protein, 16 aa, Homo sapiens
  CDR3 for beta chain variable domain of TCR clone 235926 (TRBV11-2, TRBJ2-7)
CASSLAPTGVNYEQYF

SEQ ID NO: 471853 - protein, 11 aa, Homo sapiens
  CDR3 for alpha chain variable domain of TCR clone 235927 (TRAV2, TRAJ21)
CAVFNFNKFYF

SEQ ID NO: 471854 - protein, 16 aa, Homo sapiens
  CDR3 for beta chain variable domain of TCR clone 235927 (TRBV27, TRBJ2-2)
CASSFRGLVRTGELFF

SEQ ID NO: 471855 - protein, 14 aa, Homo sapiens
  CDR3 for alpha chain variable domain of TCR clone 235928 (TRAV12-2, TRAJ45)
CAVYSGGGADGLTF

SEQ ID NO: 471856 - protein, 16 aa, Homo sapiens
  CDR3 for beta chain variable domain of TCR clone 235928 (TRBV7-2, TRBJ2-3)
CASSESGPTGTDTQYF

SEQ ID NO: 471857 - protein, 11 aa, Homo sapiens
  CDR3 for alpha chain variable domain of TCR clone 235929 (TRAV13-1, TRAJ23)
CAASSRGKLIF

SEQ ID NO: 471858 - protein, 11 aa, Homo sapiens
  CDR3 for beta chain variable domain of TCR clone 235929 (TRBV7-8, TRBJ2-7)
CASSLSLEQYF

SEQ ID NO: 471859 - protein, 15 aa, Homo sapiens
  CDR3 for alpha chain variable domain of TCR clone 235930 (TRAV25, TRAJ52)
CAGRPDGTSYGKLTF

SEQ ID NO: 471860 - protein, 17 aa, Homo sapiens
  CDR3 for beta chain variable domain of TCR clone 235930 (TRBV7-8, TRBJ2-6)
RASSAGTGGVGANVLTF

SEQ ID NO: 471861 - protein, 16 aa, Homo sapiens
  CDR3 for alpha chain variable domain of TCR clone 235931 (TRAV3, TRAJ10)
CAVRDMRAGGGNKLTF

SEQ ID NO: 471862 - protein, 13 aa, Homo sapiens
  CDR3 for beta chain variable domain of TCR clone 235931 (TRBV20-1, TRBJ2-7)
CSARAGSPYEQYF

SEQ ID NO: 471863 - protein, 13 aa, Homo sapiens
  CDR3 for alpha chain variable domain of TCR clone 235932 (TRAV9-2, TRAJ3)
CAPLYSSASKIIF

SEQ ID NO: 471864 - protein, 14 aa, Homo sapiens
  CDR3 for beta chain variable domain of TCR clone 235932 (TRBV18, TRBJ1-2)
CASSPPGQAYGYTF

SEQ ID NO: 471865 - protein, 13 aa, Homo sapiens
  CDR3 for alpha chain variable domain of TCR clone 235933 (TRAV3, TRAJ4)
CAVRDGGYNKLFF

SEQ ID NO: 471866 - protein, 14 aa, Homo sapiens
  CDR3 for beta chain variable domain of TCR clone 235933 (TRBV12-4, TRBJ1-2)
CASSSSAAGSSYTF

SEQ ID NO: 471867 - protein, 14 aa, Homo sapiens
  CDR3 for alpha chain variable domain of TCR clone 235934 (TRAV4, TRAJ17)
CLVGPQAAGNQLTF

SEQ ID NO: 471868 - protein, 19 aa, Homo sapiens
  CDR3 for beta chain variable domain of TCR clone 235934 (TRBV6-5, TRBJ2-1)
CASRSGGLAGESSYNEQFF

SEQ ID NO: 471869 - protein, 14 aa, Homo sapiens
  CDR3 for alpha chain variable domain of TCR clone 235935 (TRAV12-2, TRAJ40)
CAVKIPSGTYKYIF

SEQ ID NO: 471870 - protein, 14 aa, Homo sapiens
  CDR3 for beta chain variable domain of TCR clone 235935 (TRBV28, TRBJ2-1)
CASSLNGRNNEQFF

SEQ ID NO: 471871 - protein, 14 aa, Homo sapiens
  CDR3 for alpha chain variable domain of TCR clone 235936 (TRAV12-2, TRAJ36)
CAVKISTGANNLVF

SEQ ID NO: 471872 - protein, 14 aa, Homo sapiens
  CDR3 for beta chain variable domain of TCR clone 235936 (TRBV25-1, TRBJ1-2)
CASSDTTGVVGYTF

SEQ ID NO: 471873 - protein, 18 aa, Homo sapiens
  CDR3 for alpha chain variable domain of TCR clone 235937 (TRAV21, TRAJ52)
CAVRPSPAGGTSYLKLTF

SEQ ID NO: 471874 - protein, 17 aa, Homo sapiens
  CDR3 for beta chain variable domain of TCR clone 235937 (TRBV13, TRBJ2-3)
CASSLSRVAGGRNTQYF

SEQ ID NO: 471875 - protein, 12 aa, Homo sapiens
  CDR3 for alpha chain variable domain of TCR clone 235938 (TRAV12-3, TRAJ17)
CAMTLTGNKLTF

SEQ ID NO: 471876 - protein, 12 aa, Homo sapiens
  CDR3 for beta chain variable domain of TCR clone 235938 (TRBV2, TRBJ2-1)
CDYGPPGNEQFF

SEQ ID NO: 471877 - protein, 12 aa, Homo sapiens
  CDR3 for alpha chain variable domain of TCR clone 235939 (TRAV25, TRAJ5)
CAGGGGRGALTF

SEQ ID NO: 471878 - protein, 15 aa, Homo sapiens
  CDR3 for beta chain variable domain of TCR clone 235939 (TRBV20-1, TRBJ2-7)
CSARDRVSGMDEQYF

SEQ ID NO: 471879 - protein, 16 aa, Homo sapiens
  CDR3 for alpha chain variable domain of TCR clone 235940 (TRAV3, TRAJ5)
CAVRNLMDTGRRALTF

SEQ ID NO: 471880 - protein, 13 aa, Homo sapiens
  CDR3 for beta chain variable domain of TCR clone 235940 (TRBV2, TRBJ2-1)
CASISGGNNEQFF

SEQ ID NO: 471881 - protein, 15 aa, Homo sapiens
  CDR3 for alpha chain variable domain of TCR clone 235941 (TRAV26-1, TRAJ15)
CIVRAANQAGTALIL

SEQ ID NO: 471882 - protein, 18 aa, Homo sapiens
  CDR3 for beta chain variable domain of TCR clone 235941 (TRBV15, TRBJ2-3)
CATSRDGARSWDTDTQYF

SEQ ID NO: 471883 - protein, 13 aa, Homo sapiens
  CDR3 for alpha chain variable domain of TCR clone 235942 (TRAV13-1, TRAJ5)
CAASVTGRRALTF

SEQ ID NO: 471884 - protein, 15 aa, Homo sapiens
  CDR3 for beta chain variable domain of TCR clone 235942 (TRBV7-2, TRBJ1-2)
CASSPRAGWNYGYTF

SEQ ID NO: 471885 - protein, 16 aa, Homo sapiens
  CDR3 for alpha chain variable domain of TCR clone 235943 (TRAV21, TRAJ37)
CAVRPMGSSNTGKLIF

SEQ ID NO: 471886 - protein, 13 aa, Homo sapiens
  CDR3 for beta chain variable domain of TCR clone 235943 (TRBV7-9, TRBJ2-5)
CASLSPGQETQYF

SEQ ID NO: 471887 - protein, 13 aa, Homo sapiens
  CDR3 for alpha chain variable domain of TCR clone 235944 (TRAV36/DV7, TRAJ54)
CALDIQGAQKLVF

SEQ ID NO: 471888 - protein, 14 aa, Homo sapiens
  CDR3 for beta chain variable domain of TCR clone 235944 (TRBV19, TRBJ2-7)
CASNFRDTFTGMYF

SEQ ID NO: 471889 - protein, 14 aa, Homo sapiens
  CDR3 for alpha chain variable domain of TCR clone 235945 (TRAV1-2, TRAJ16)
CAVNRFSDGQKLLF

SEQ ID NO: 471890 - protein, 14 aa, Homo sapiens
  CDR3 for beta chain variable domain of TCR clone 235945 (TRBV7-2, TRBJ1-1)
CASSLLTGTNEAFF

SEQ ID NO: 471891 - protein, 13 aa, Homo sapiens
  CDR3 for alpha chain variable domain of TCR clone 235946 (TRAV16, TRAJ58)
CALRCASGSRLTF

SEQ ID NO: 471892 - protein, 16 aa, Homo sapiens
  CDR3 for beta chain variable domain of TCR clone 235946 (TRBV18, TRBJ2-2)
CASSPPRTANTGELFF

SEQ ID NO: 471893 - protein, 20 aa, Homo sapiens
  CDR3 for alpha chain variable domain of TCR clone 235947 (TRAV27, TRAJ30)
CAGEGEMTRSSLEKGHDFIF

SEQ ID NO: 471894 - protein, 12 aa, Homo sapiens
  CDR3 for beta chain variable domain of TCR clone 235947 (TRBV12-4, TRBJ2-7)
CASSLGGYEQYF

SEQ ID NO: 471895 - protein, 17 aa, Homo sapiens
  CDR3 for alpha chain variable domain of TCR clone 235948 (TRAV23/DV6, TRAJ12)
CAAIDPGAMDSSYKLIF

SEQ ID NO: 471896 - protein, 12 aa, Homo sapiens
  CDR3 for beta chain variable domain of TCR clone 235948 (TRBV10-3, TRBJ2-2)
CAIRENTGELFF

SEQ ID NO: 471897 - protein, 14 aa, Homo sapiens
  CDR3 for alpha chain variable domain of TCR clone 235949 (TRAV4, TRAJ17)
CLVGDMAAGNKLTF

SEQ ID NO: 471898 - protein, 13 aa, Homo sapiens
  CDR3 for beta chain variable domain of TCR clone 235949 (TRBV18, TRBJ2-7)
CAIQSGGGYEQYF

SEQ ID NO: 471899 - protein, 13 aa, Homo sapiens
  CDR3 for alpha chain variable domain of TCR clone 235950 (TRAV23/DV6, TRAJ34)
CAASIEGTDKLIF

SEQ ID NO: 471900 - protein, 14 aa, Homo sapiens
  CDR3 for beta chain variable domain of TCR clone 235950 (TRBV4-1, TRBJ2-2)
CASSQAVNTGELFF

SEQ ID NO: 471901 - protein, 12 aa, Homo sapiens
  CDR3 for alpha chain variable domain of TCR clone 235951 (TRAV36/DV7, TRAJ50)
CAVEPENLLRQG

SEQ ID NO: 471902 - protein, 19 aa, Homo sapiens
  CDR3 for beta chain variable domain of TCR clone 235951 (TRBV2, TRBJ2-2)
CASSQPGLAGGGNTGELFF

SEQ ID NO: 471903 - protein, 18 aa, Homo sapiens
  CDR3 for alpha chain variable domain of TCR clone 235952 (TRAV21, TRAJ52)
CAVRPSPAGGTSYGKLTF

SEQ ID NO: 471904 - protein, 15 aa, Homo sapiens
  CDR3 for beta chain variable domain of TCR clone 235952 (TRBV20-1, TRBJ2-7)
CSARDRVSGMDEQYL

SEQ ID NO: 471905 - protein, 14 aa, Homo sapiens
  CDR3 for alpha chain variable domain of TCR clone 235953 (TRAV12-3, TRAJ43)
CAMSLGGAWTRLTV

SEQ ID NO: 471906 - protein, 17 aa, Homo sapiens
  CDR3 for beta chain variable domain of TCR clone 235953 (TRBV11-2, TRBJ2-1)
CASSLYPPGVEYNEQFF

SEQ ID NO: 471907 - protein, 13 aa, Homo sapiens
  CDR3 for alpha chain variable domain of TCR clone 235954 (TRAV8-6, TRAJ49)
CAVITNTGNQFYF

SEQ ID NO: 471908 - protein, 17 aa, Homo sapiens
  CDR3 for beta chain variable domain of TCR clone 235954 (TRBV25-1, TRBJ2-7)
CASSDARVVFSSYEQYF

SEQ ID NO: 471909 - protein, 16 aa, Homo sapiens
  CDR3 for alpha chain variable domain of TCR clone 235955 (TRAV8-3, TRAJ18)
CAVGARRGSTLGRLYF

SEQ ID NO: 471910 - protein, 12 aa, Homo sapiens
  CDR3 for beta chain variable domain of TCR clone 235955 (TRBV11-2, TRBJ2-2)
CASSLGGGELFF

SEQ ID NO: 471911 - protein, 19 aa, Homo sapiens
  CDR3 for alpha chain variable domain of TCR clone 235956 (TRAV38-1, TRAJ53)
CAFMKHGLESGGSNYKLTF

SEQ ID NO: 471912 - protein, 16 aa, Homo sapiens
  CDR3 for beta chain variable domain of TCR clone 235956 (TRBV11-2, TRBJ2-7)
CASSPTTGGVSYEQYF

SEQ ID NO: 471913 - protein, 15 aa, Homo sapiens
  CDR3 for alpha chain variable domain of TCR clone 235957 (TRAV12-2, TRAJ38)
CAVNKEAGNNRKLIW

SEQ ID NO: 471914 - protein, 13 aa, Homo sapiens
  CDR3 for beta chain variable domain of TCR clone 235957 (TRBV2, TRBJ2-3)
CASIIPASDTQYF

SEQ ID NO: 471915 - protein, 14 aa, Homo sapiens
  CDR3 for alpha chain variable domain of TCR clone 235958 (TRAV8-1, TRAJ49)
CASSIANTGNQFYF

SEQ ID NO: 471916 - protein, 13 aa, Homo sapiens
  CDR3 for beta chain variable domain of TCR clone 235958 (TRBV12-4, TRBJ1-2)
CASSLRQGKGYTF

SEQ ID NO: 471917 - protein, 16 aa, Homo sapiens
  CDR3 for alpha chain variable domain of TCR clone 235959 (TRAV13-1, TRAJ22)
CAAKGGRSGSARQLTF

SEQ ID NO: 471918 - protein, 15 aa, Homo sapiens
  CDR3 for beta chain variable domain of TCR clone 235959 (TRBV9, TRBJ1-6)
YASSVAGTGDSPLHF

SEQ ID NO: 471919 - protein, 14 aa, Homo sapiens
  CDR3 for alpha chain variable domain of TCR clone 235960 (TRAV12-2, TRAJ13)
CAVKKTGGYHKVTF

SEQ ID NO: 471920 - protein, 14 aa, Homo sapiens
  CDR3 for beta chain variable domain of TCR clone 235960 (TRBV19, TRBJ2-1)
CASPTFVLSSEQFF

SEQ ID NO: 471921 - protein, 15 aa, Homo sapiens
  CDR3 for alpha chain variable domain of TCR clone 235961 (TRAV8-4, TRAJ36)
CAVRKSWTGANHLFF

SEQ ID NO: 471922 - protein, 17 aa, Homo sapiens
  CDR3 for beta chain variable domain of TCR clone 235961 (TRBV3-1, TRBJ2-2)
CASSQDSQGPNTGELFF

SEQ ID NO: 471923 - protein, 14 aa, Homo sapiens
  CDR3 for alpha chain variable domain of TCR clone 235962 (TRAV12-2, TRAJ40)
CAVKIPSGTYKYIF

SEQ ID NO: 471924 - protein, 14 aa, Homo sapiens
  CDR3 for beta chain variable domain of TCR clone 235962 (TRBV7-8, TRBJ2-7)
CARRPRDRVYEQYF

SEQ ID NO: 471925 - protein, 13 aa, Homo sapiens
  CDR3 for alpha chain variable domain of TCR clone 235963 (TRAV8-4, TRAJ10)
CAAFTGGGNKLTF

SEQ ID NO: 471926 - protein, 15 aa, Homo sapiens
  CDR3 for beta chain variable domain of TCR clone 235963 (TRBV2, TRBJ2-3)
CASCDFEKATDTQYF

SEQ ID NO: 471927 - protein, 16 aa, Homo sapiens
  CDR3 for alpha chain variable domain of TCR clone 235964 (TRAV3, TRAJ10)
CAVGDMRAGGGNKLTF

SEQ ID NO: 471928 - protein, 12 aa, Homo sapiens
  CDR3 for beta chain variable domain of TCR clone 235964 (TRBV7-6, TRBJ2-3)
CASSTGTDTQYF

SEQ ID NO: 471929 - protein, 12 aa, Homo sapiens
  CDR3 for alpha chain variable domain of TCR clone 235965 (TRAV17, TRAJ57)
CATDGGSEKLVF

SEQ ID NO: 471930 - protein, 13 aa, Homo sapiens
  CDR3 for beta chain variable domain of TCR clone 235965 (TRBV7-9, TRBJ2-7)
CASSFAGAYEQSF

SEQ ID NO: 471931 - protein, 14 aa, Homo sapiens
  CDR3 for alpha chain variable domain of TCR clone 235966 (TRAV38-1, TRAJ45)
CAYYSGGGAYGLTF

SEQ ID NO: 471932 - protein, 20 aa, Homo sapiens
  CDR3 for beta chain variable domain of TCR clone 235966 (TRBV28, TRBJ2-1)
CASTPIGRSPGLAGGNEQLF

SEQ ID NO: 471933 - protein, 13 aa, Homo sapiens
  CDR3 for alpha chain variable domain of TCR clone 235967 (TRAV26-1, TRAJ30)
FIVNMNRDDKIIF

SEQ ID NO: 471934 - protein, 16 aa, Homo sapiens
  CDR3 for beta chain variable domain of TCR clone 235967 (TRBV16, TRBJ2-7)
CASSRPAGGSSYEQYF

SEQ ID NO: 471935 - protein, 12 aa, Homo sapiens
  CDR3 for alpha chain variable domain of TCR clone 235968 (TRAV38-1, TRAJ47)
CAFETYGNKLVF

SEQ ID NO: 471936 - protein, 15 aa, Homo sapiens
  CDR3 for beta chain variable domain of TCR clone 235968 (TRBV7-3, TRBJ2-1)
CASSQRGGALIEQFF

SEQ ID NO: 471937 - protein, 11 aa, Homo sapiens
  CDR3 for alpha chain variable domain of TCR clone 235969 (TRAV17, TRAJ9)
CATTGGFKTVF

SEQ ID NO: 471938 - protein, 14 aa, Homo sapiens
  CDR3 for beta chain variable domain of TCR clone 235969 (TRBV7-9, TRBJ2-2)
CASSGLSDAGELFF

SEQ ID NO: 471939 - protein, 13 aa, Homo sapiens
  CDR3 for alpha chain variable domain of TCR clone 235970 (TRAV1-2, TRAJ9)
CAALNTGGFKTIF

SEQ ID NO: 471940 - protein, 15 aa, Homo sapiens
  CDR3 for beta chain variable domain of TCR clone 235970 (TRBV7-9, TRBJ2-7)
CASSLPMGQANEQYF

SEQ ID NO: 471941 - protein, 16 aa, Homo sapiens
  CDR3 for alpha chain variable domain of TCR clone 235971 (TRAV16, TRAJ52)
CALSAAGGTSYGKLTF

SEQ ID NO: 471942 - protein, 14 aa, Homo sapiens
  CDR3 for beta chain variable domain of TCR clone 235971 (TRBV5-1, TRBJ2-7)
CASSRGESLYEQYF

SEQ ID NO: 471943 - protein, 11 aa, Homo sapiens
  CDR3 for alpha chain variable domain of TCR clone 235972 (TRAV12-3, TRAJ27)
CAMANAGKSTF

SEQ ID NO: 471944 - protein, 14 aa, Homo sapiens
  CDR3 for beta chain variable domain of TCR clone 235972 (TRBV10-3, TRBJ2-5)
CAIKSGGQGETQYF

SEQ ID NO: 471945 - protein, 12 aa, Homo sapiens
  CDR3 for alpha chain variable domain of TCR clone 235973 (TRAV12-3, TRAJ17)
CAMTLTGNKLTF

SEQ ID NO: 471946 - protein, 15 aa, Homo sapiens
  CDR3 for beta chain variable domain of TCR clone 235973 (TRBV20-1, TRBJ2-7)
CSARERVSGMGGGGG

SEQ ID NO: 471947 - protein, 14 aa, Homo sapiens
  CDR3 for alpha chain variable domain of TCR clone 235974 (TRAV1-2, TRAJ24)
CAVLTTDSWGKFQF

SEQ ID NO: 471948 - protein, 21 aa, Homo sapiens
  CDR3 for beta chain variable domain of TCR clone 235974 (TRBV6-5, TRBJ1-3)
CASSYWEKVAQGMSSGNTIYF

SEQ ID NO: 471949 - protein, 14 aa, Homo sapiens
  CDR3 for alpha chain variable domain of TCR clone 235975 (TRAV1-2, TRAJ8)
CAAREDTGFQKLVF

SEQ ID NO: 471950 - protein, 15 aa, Homo sapiens
  CDR3 for beta chain variable domain of TCR clone 235975 (TRBV4-1, TRBJ2-7)
CASSQNTGRLYEQYF

SEQ ID NO: 471951 - protein, 14 aa, Homo sapiens
  CDR3 for alpha chain variable domain of TCR clone 235976 (TRAV26-1, TRAJ38)
CIADNAGNNRKLSW

SEQ ID NO: 471952 - protein, 13 aa, Homo sapiens
  CDR3 for beta chain variable domain of TCR clone 235976 (TRBV15, TRBJ1-6)
CATSGGLNSPLHF

SEQ ID NO: 471953 - protein, 16 aa, Homo sapiens
  CDR3 for alpha chain variable domain of TCR clone 235977 (TRAV3, TRAJ10)
CAVRDMRAGGGNKLTF

SEQ ID NO: 471954 - protein, 17 aa, Homo sapiens
  CDR3 for beta chain variable domain of TCR clone 235977 (TRBV11-3, TRBJ2-1)
CASSLYPPGVEYNEQFF

SEQ ID NO: 471955 - protein, 17 aa, Homo sapiens
  CDR3 for alpha chain variable domain of TCR clone 235978 (TRAV23/DV6, TRAJ57)
CAASSTLSQGGSEKLVF

SEQ ID NO: 471956 - protein, 14 aa, Homo sapiens
  CDR3 for beta chain variable domain of TCR clone 235978 (TRBV28, TRBJ2-3)
CASSWRGRADTQYF

SEQ ID NO: 471957 - protein, 14 aa, Homo sapiens
  CDR3 for alpha chain variable domain of TCR clone 235979 (TRAV12-3, TRAJ10)
SHLPLTGGGNKLTF

SEQ ID NO: 471958 - protein, 15 aa, Homo sapiens
  CDR3 for beta chain variable domain of TCR clone 235979 (TRBV7-3, TRBJ2-1)
CASSPTGGGEVEQFL

SEQ ID NO: 471959 - protein, 13 aa, Homo sapiens
  CDR3 for alpha chain variable domain of TCR clone 235980 (TRAV2, TRAJ15)
CAVASQAGTALIF

SEQ ID NO: 471960 - protein, 13 aa, Homo sapiens
  CDR3 for beta chain variable domain of TCR clone 235980 (TRBV4-3, TRBJ1-5)
CASSQDYNGPQHF

SEQ ID NO: 471961 - protein, 16 aa, Homo sapiens
  CDR3 for alpha chain variable domain of TCR clone 235981 (TRAV3, TRAJ6)
CAVRRTPSGGSYIPTF

SEQ ID NO: 471962 - protein, 15 aa, Homo sapiens
  CDR3 for beta chain variable domain of TCR clone 235981 (TRBV7-2, TRBJ1-1)
CASSFAGDRDTEAFF

SEQ ID NO: 471963 - protein, 12 aa, Homo sapiens
  CDR3 for alpha chain variable domain of TCR clone 235982 (TRAV21, TRAJ27)
CAPPGNEGKSTF

SEQ ID NO: 471964 - protein, 13 aa, Homo sapiens
  CDR3 for beta chain variable domain of TCR clone 235982 (TRBV2, TRBJ1-1)
CARNPTGGFHAFF

SEQ ID NO: 471965 - protein, 15 aa, Homo sapiens
  CDR3 for alpha chain variable domain of TCR clone 235983 (TRAV27, TRAJ38)
CAARRNAGNNRKLIW

SEQ ID NO: 471966 - protein, 16 aa, Homo sapiens
  CDR3 for beta chain variable domain of TCR clone 235983 (TRBV7-2, TRBJ2-3)
CASSLVALYSTDTQYF

SEQ ID NO: 471967 - protein, 16 aa, Homo sapiens
  CDR3 for alpha chain variable domain of TCR clone 235984 (TRAV30, TRAJ24)
CGTEIVDADSWGKFQF

SEQ ID NO: 471968 - protein, 12 aa, Homo sapiens
  CDR3 for beta chain variable domain of TCR clone 235984 (TRBV11-2, TRBJ2-2)
CASSLVGGELFF

SEQ ID NO: 471969 - protein, 15 aa, Homo sapiens
  CDR3 for alpha chain variable domain of TCR clone 235985 (TRAV17, TRAJ57)
CATGPSQGGSEKLGF

SEQ ID NO: 471970 - protein, 13 aa, Homo sapiens
  CDR3 for beta chain variable domain of TCR clone 235985 (TRBV7-9, TRBJ1-2)
CASSLKQNYGYTF

SEQ ID NO: 471971 - protein, 13 aa, Homo sapiens
  CDR3 for alpha chain variable domain of TCR clone 235986 (TRAV8-3, TRAJ48)
CCGCNCGNEKLTF

SEQ ID NO: 471972 - protein, 12 aa, Homo sapiens
  CDR3 for beta chain variable domain of TCR clone 235986 (TRBV7-2, TRBJ2-5)
CASSPYQETQYF

SEQ ID NO: 471973 - protein, 15 aa, Homo sapiens
  CDR3 for alpha chain variable domain of TCR clone 235987 (TRAV26-1, TRAJ37)
CIVRVATGNTGKLIF

SEQ ID NO: 471974 - protein, 14 aa, Homo sapiens
  CDR3 for beta chain variable domain of TCR clone 235987 (TRBV7-2, TRBJ2-7)
CASRSQGAAYEQYF

SEQ ID NO: 471975 - protein, 12 aa, Homo sapiens
  CDR3 for alpha chain variable domain of TCR clone 235988 (TRAV13-1, TRAJ27)
CAAHTNAGKSTF

SEQ ID NO: 471976 - protein, 14 aa, Homo sapiens
  CDR3 for beta chain variable domain of TCR clone 235988 (TRBV19, TRBJ2-2)
CTSSGQGIAGELCF

SEQ ID NO: 471977 - protein, 23 aa, Homo sapiens
  CDR3 for alpha chain variable domain of TCR clone 235989 (TRAV26-1, TRAJ38)
CIADNAGNNHIQNPDPAVYQLRD

SEQ ID NO: 471978 - protein, 15 aa, Homo sapiens
  CDR3 for beta chain variable domain of TCR clone 235989 (TRBV19, TRBJ1-1)
CASSRGGALNTEAFF

SEQ ID NO: 471979 - protein, 14 aa, Homo sapiens
  CDR3 for alpha chain variable domain of TCR clone 235990 (TRAV12-3, TRAJ10)
SHLPLTGGGNKLTF

SEQ ID NO: 471980 - protein, 18 aa, Homo sapiens
  CDR3 for beta chain variable domain of TCR clone 235990 (TRBV11-2, TRBJ2-6)
CASSLNPFLGTGANDLTF

SEQ ID NO: 471981 - protein, 16 aa, Homo sapiens
  CDR3 for alpha chain variable domain of TCR clone 235991 (TRAV3, TRAJ21)
CAVRDIERGNSNKFYF

SEQ ID NO: 471982 - protein, 16 aa, Homo sapiens
  CDR3 for beta chain variable domain of TCR clone 235991 (TRBV12-4, TRBJ1-5)
CASSRPVGGSNQPQHF

SEQ ID NO: 471983 - protein, 13 aa, Homo sapiens
  CDR3 for alpha chain variable domain of TCR clone 235992 (TRAV2, TRAJ15)
CAVASQAGTALTF

SEQ ID NO: 471984 - protein, 15 aa, Homo sapiens
  CDR3 for beta chain variable domain of TCR clone 235992 (TRBV20-1, TRBJ2-7)
CSARDRVSGMDEQYF

SEQ ID NO: 471985 - protein, 14 aa, Homo sapiens
  CDR3 for alpha chain variable domain of TCR clone 235993 (TRAV9-2, TRAJ57)
CALSGQGGSEKLVF

SEQ ID NO: 471986 - protein, 16 aa, Homo sapiens
  CDR3 for beta chain variable domain of TCR clone 235993 (TRBV7-9, TRBJ2-5)
CASSPSGQGVKGTQYF

SEQ ID NO: 471987 - protein, 17 aa, Homo sapiens
  CDR3 for alpha chain variable domain of TCR clone 235994 (TRAV3, TRAJ6)
CAVRDGPRAGGSYIPTF

SEQ ID NO: 471988 - protein, 14 aa, Homo sapiens
  CDR3 for beta chain variable domain of TCR clone 235994 (TRBV5-5, TRBJ1-5)
CASSGQGVDQPQHF

SEQ ID NO: 471989 - protein, 14 aa, Homo sapiens
  CDR3 for alpha chain variable domain of TCR clone 235995 (TRAV20, TRAJ22)
CAVALGGSARQLIF

SEQ ID NO: 471990 - protein, 15 aa, Homo sapiens
  CDR3 for beta chain variable domain of TCR clone 235995 (TRBV7-2, TRBJ1-1)
CASSFAGDRDTEAFF

SEQ ID NO: 471991 - protein, 18 aa, Homo sapiens
  CDR3 for alpha chain variable domain of TCR clone 235996 (TRAV21, TRAJ52)
CTVRPSPAGGTSDGKLTF

SEQ ID NO: 471992 - protein, 17 aa, Homo sapiens
  CDR3 for beta chain variable domain of TCR clone 235996 (TRBV13, TRBJ2-3)
CASSLSRVAGGRNTQYF

SEQ ID NO: 471993 - protein, 17 aa, Homo sapiens
  CDR3 for alpha chain variable domain of TCR clone 235997 (TRAV23/DV6, TRAJ58)
CAARLLRGETSGPRLTF

SEQ ID NO: 471994 - protein, 14 aa, Homo sapiens
  CDR3 for beta chain variable domain of TCR clone 235997 (TRBV2, TRBJ2-7)
CASSLTSGGYEQYF

SEQ ID NO: 471995 - protein, 12 aa, Homo sapiens
  CDR3 for alpha chain variable domain of TCR clone 235998 (TRAV1-1, TRAJ9)
CAVDTGGFNTIF

SEQ ID NO: 471996 - protein, 14 aa, Homo sapiens
  CDR3 for beta chain variable domain of TCR clone 235998 (TRBV7-8, TRBJ2-5)
CASSATGGQENQYF

SEQ ID NO: 471997 - protein, 11 aa, Homo sapiens
  CDR3 for alpha chain variable domain of TCR clone 235999 (TRAV2, TRAJ33)
CAVASNYQLIW

SEQ ID NO: 471998 - protein, 14 aa, Homo sapiens
  CDR3 for beta chain variable domain of TCR clone 235999 (TRBV19, TRBJ2-1)
CASPTFVLSGEQFF

SEQ ID NO: 471999 - protein, 14 aa, Homo sapiens
  CDR3 for alpha chain variable domain of TCR clone 236000 (TRAV20, TRAJ56)
CAVQFGGANSKLTF

SEQ ID NO: 472000 - protein, 17 aa, Homo sapiens
  CDR3 for beta chain variable domain of TCR clone 236000 (TRBV4-1, TRBJ1-4)
CASSQEGPRGVEEKLFF

SEQ ID NO: 472001 - protein, 12 aa, Homo sapiens
  CDR3 for alpha chain variable domain of TCR clone 236001 (TRAV30, TRAJ39)
CGRGNAGNMLTF

SEQ ID NO: 472002 - protein, 14 aa, Homo sapiens
  CDR3 for beta chain variable domain of TCR clone 236001 (TRBV7-8, TRBJ2-3)
CASSLEAGTDTQYF

SEQ ID NO: 472003 - protein, 13 aa, Homo sapiens
  CDR3 for alpha chain variable domain of TCR clone 236002 (TRAV8-4, TRAJ49)
CAVSDPGGNPFYF

SEQ ID NO: 472004 - protein, 15 aa, Homo sapiens
  CDR3 for beta chain variable domain of TCR clone 236002 (TRBV12-4, TRBJ1-3)
CASSLGLQKGNTIYF

SEQ ID NO: 472005 - protein, 16 aa, Homo sapiens
  CDR3 for alpha chain variable domain of TCR clone 236003 (TRAV23/DV6, TRAJ52)
YAARPSGGTSYGKLTF

SEQ ID NO: 472006 - protein, 14 aa, Homo sapiens
  CDR3 for beta chain variable domain of TCR clone 236003 (TRBV20-1, TRBJ2-3)
CSARDASSTDTQYF

SEQ ID NO: 472007 - protein, 12 aa, Homo sapiens
  CDR3 for alpha chain variable domain of TCR clone 236004 (TRAV3, TRAJ26)
CAVRDYGQYFVF

SEQ ID NO: 472008 - protein, 16 aa, Homo sapiens
  CDR3 for beta chain variable domain of TCR clone 236004 (TRBV11-2, TRBJ1-2)
SASSPSGREANYGYTF

SEQ ID NO: 472009 - protein, 16 aa, Homo sapiens
  CDR3 for alpha chain variable domain of TCR clone 236005 (TRAV23/DV6, )
CADIQNPDPAVYQLRD

SEQ ID NO: 472010 - protein, 13 aa, Homo sapiens
  CDR3 for beta chain variable domain of TCR clone 236005 (TRBV12-5, TRBJ2-3)
CASGDRQSDTQYF

SEQ ID NO: 472011 - protein, 14 aa, Homo sapiens
  CDR3 for alpha chain variable domain of TCR clone 236006 (TRAV1-2, TRAJ8)
CAVREDTGFQKLVF

SEQ ID NO: 472012 - protein, 15 aa, Homo sapiens
  CDR3 for beta chain variable domain of TCR clone 236006 (TRBV19, TRBJ2-3)
CASSMSTTRTDTQYF

SEQ ID NO: 472013 - protein, 11 aa, Homo sapiens
  CDR3 for alpha chain variable domain of TCR clone 236007 (TRAV3, TRAJ21)
CAVGNFNKFYF

SEQ ID NO: 472014 - protein, 16 aa, Homo sapiens
  CDR3 for beta chain variable domain of TCR clone 236007 (TRBV7-6, TRBJ2-1)
CASSAPGSSSYNEQFF

SEQ ID NO: 472015 - protein, 12 aa, Homo sapiens
  CDR3 for alpha chain variable domain of TCR clone 236008 (TRAV12-3, TRAJ17)
CAMTLTGNNLTF

SEQ ID NO: 472016 - protein, 15 aa, Homo sapiens
  CDR3 for beta chain variable domain of TCR clone 236008 (TRBV20-1, TRBJ2-7)
CSARDRVSGMDEPYF

SEQ ID NO: 472017 - protein, 14 aa, Homo sapiens
  CDR3 for alpha chain variable domain of TCR clone 236009 (TRAV12-2, TRAJ17)
CAVLFKAAGNKLTS

SEQ ID NO: 472018 - protein, 17 aa, Homo sapiens
  CDR3 for beta chain variable domain of TCR clone 236009 (TRBV20-1, TRBJ2-2)
CSASGSGQGGLTGELFL

SEQ ID NO: 472019 - protein, 13 aa, Homo sapiens
  CDR3 for alpha chain variable domain of TCR clone 236010 (TRAV13-2, TRAJ22)
CLGWIGSARQLTF

SEQ ID NO: 472020 - protein, 15 aa, Homo sapiens
  CDR3 for beta chain variable domain of TCR clone 236010 (TRBV7-2, TRBJ2-3)
CASSSTGLETDTQYF

SEQ ID NO: 472021 - protein, 16 aa, Homo sapiens
  CDR3 for alpha chain variable domain of TCR clone 236011 (TRAV30, TRAJ24)
CVTEIVDADSWGKFQF

SEQ ID NO: 472022 - protein, 13 aa, Homo sapiens
  CDR3 for beta chain variable domain of TCR clone 236011 (TRBV28, TRBJ2-7)
CASRWTGTYEQYF

SEQ ID NO: 472023 - protein, 15 aa, Homo sapiens
  CDR3 for alpha chain variable domain of TCR clone 236012 (TRAV26-1, TRAJ13)
FIVRASRGGYQKVTF

SEQ ID NO: 472024 - protein, 14 aa, Homo sapiens
  CDR3 for beta chain variable domain of TCR clone 236012 (TRBV20-1, TRBJ2-3)
CSARGGTSTDTQYF

SEQ ID NO: 472025 - protein, 14 aa, Homo sapiens
  CDR3 for alpha chain variable domain of TCR clone 236013 (TRAV12-3, TRAJ9)
CAMSPNTGGFKTIF

SEQ ID NO: 472026 - protein, 16 aa, Homo sapiens
  CDR3 for beta chain variable domain of TCR clone 236013 (TRBV13, TRBJ2-2)
CASSPRTGEHTGELFF

SEQ ID NO: 472027 - protein, 13 aa, Homo sapiens
  CDR3 for alpha chain variable domain of TCR clone 236014 (TRAV13-1, TRAJ4)
CAASIGGYNKRIF

SEQ ID NO: 472028 - protein, 16 aa, Homo sapiens
  CDR3 for beta chain variable domain of TCR clone 236014 (TRBV20-1, TRBJ2-1)
CSAPGLAGSYSDEQFF

SEQ ID NO: 472029 - protein, 11 aa, Homo sapiens
  CDR3 for alpha chain variable domain of TCR clone 236015 (TRAV12-2, TRAJ48)
CASNEKLTFGT

SEQ ID NO: 472030 - protein, 14 aa, Homo sapiens
  CDR3 for beta chain variable domain of TCR clone 236015 (TRBV7-9, TRBJ2-2)
CASSLGHRTGELFF

SEQ ID NO: 472031 - protein, 13 aa, Homo sapiens
  CDR3 for alpha chain variable domain of TCR clone 236016 (TRAV8-6, TRAJ54)
CAVEAQGAQKLVF

SEQ ID NO: 472032 - protein, 15 aa, Homo sapiens
  CDR3 for beta chain variable domain of TCR clone 236016 (TRBV6-1, TRBJ2-6)
CASSSRPSGANVLTF

SEQ ID NO: 472033 - protein, 14 aa, Homo sapiens
  CDR3 for alpha chain variable domain of TCR clone 236017 (TRAV26-1, TRAJ57)
CIVITQGGYEKLVF

SEQ ID NO: 472034 - protein, 16 aa, Homo sapiens
  CDR3 for beta chain variable domain of TCR clone 236017 (TRBV7-6, TRBJ2-1)
CASSLLTSGSINEQFF

SEQ ID NO: 472035 - protein, 14 aa, Homo sapiens
  CDR3 for alpha chain variable domain of TCR clone 236018 (TRAV13-1, TRAJ22)
CAASNGGSARQLTF

SEQ ID NO: 472036 - protein, 16 aa, Homo sapiens
  CDR3 for beta chain variable domain of TCR clone 236018 (TRBV7-3, TRBJ2-2)
CASSLKRGTLSGELFF

SEQ ID NO: 472037 - protein, 14 aa, Homo sapiens
  CDR3 for alpha chain variable domain of TCR clone 236019 (TRAV20, TRAJ56)
CAVQSGGANSKLTF

SEQ ID NO: 472038 - protein, 14 aa, Homo sapiens
  CDR3 for beta chain variable domain of TCR clone 236019 (TRBV20-1, TRBJ2-7)
CSAKRGRRSYEQYF

SEQ ID NO: 472039 - protein, 12 aa, Homo sapiens
  CDR3 for alpha chain variable domain of TCR clone 236020 (TRAV12-3, TRAJ20)
CAMVRGDYKLSF

SEQ ID NO: 472040 - protein, 20 aa, Homo sapiens
  CDR3 for beta chain variable domain of TCR clone 236020 (TRBV7-8, TRBJ2-2)
CASSHLFPGPTIHITGELFF

SEQ ID NO: 472041 - protein, 12 aa, Homo sapiens
  CDR3 for alpha chain variable domain of TCR clone 236021 (TRAV8-3, TRAJ40)
CAVTSGTNKYIF

SEQ ID NO: 472042 - protein, 14 aa, Homo sapiens
  CDR3 for beta chain variable domain of TCR clone 236021 (TRBV12-4, TRBJ2-3)
CASSGQGSTDTQYF

SEQ ID NO: 472043 - protein, 16 aa, Homo sapiens
  CDR3 for alpha chain variable domain of TCR clone 236022 (TRAV12-3, TRAJ53)
CAMSPGSGGSNYKLTL

SEQ ID NO: 472044 - protein, 13 aa, Homo sapiens
  CDR3 for beta chain variable domain of TCR clone 236022 (TRBV4-2, TRBJ1-1)
CASSQAGNTEAFF

SEQ ID NO: 472045 - protein, 13 aa, Homo sapiens
  CDR3 for alpha chain variable domain of TCR clone 236023 (TRAV12-1, TRAJ26)
CVVRGNYGQNFVF

SEQ ID NO: 472046 - protein, 16 aa, Homo sapiens
  CDR3 for beta chain variable domain of TCR clone 236023 (TRBV4-2, TRBJ2-7)
CASSQDGVERGYEQYF

SEQ ID NO: 472047 - protein, 14 aa, Homo sapiens
  CDR3 for alpha chain variable domain of TCR clone 236024 (TRAV17, TRAJ22)
CATDAIGSARQLTF

SEQ ID NO: 472048 - protein, 14 aa, Homo sapiens
  CDR3 for beta chain variable domain of TCR clone 236024 (TRBV7-2, TRBJ2-2)
CASRGQGAAGELFF

SEQ ID NO: 472049 - protein, 13 aa, Homo sapiens
  CDR3 for alpha chain variable domain of TCR clone 236025 (TRAV41, TRAJ57)
CAVKEGGSEKLVF

SEQ ID NO: 472050 - protein, 15 aa, Homo sapiens
  CDR3 for beta chain variable domain of TCR clone 236025 (TRBV5-1, TRBJ2-1)
CASSPPRAPYNEQFF

SEQ ID NO: 472051 - protein, 14 aa, Homo sapiens
  CDR3 for alpha chain variable domain of TCR clone 236026 (TRAV12-3, TRAJ57)
CAMSAWGGSEKLVF

SEQ ID NO: 472052 - protein, 14 aa, Homo sapiens
  CDR3 for beta chain variable domain of TCR clone 236026 (TRBV7-8, TRBJ2-7)
CASSPRDMVYEQYF

SEQ ID NO: 472053 - protein, 16 aa, Homo sapiens
  CDR3 for alpha chain variable domain of TCR clone 236027 (TRAV12-2, TRAJ18)
CAVFAGRGSTLGRLYF

SEQ ID NO: 472054 - protein, 13 aa, Homo sapiens
  CDR3 for beta chain variable domain of TCR clone 236027 (TRBV2, TRBJ2-7)
CANALAGDYEQYF

SEQ ID NO: 472055 - protein, 11 aa, Homo sapiens
  CDR3 for alpha chain variable domain of TCR clone 236028 (TRAV12-2, TRAJ43)
CASPIGNDMRF

SEQ ID NO: 472056 - protein, 13 aa, Homo sapiens
  CDR3 for beta chain variable domain of TCR clone 236028 (TRBV7-3, TRBJ1-2)
CASSLKRGYGYIF

SEQ ID NO: 472057 - protein, 18 aa, Homo sapiens
  CDR3 for alpha chain variable domain of TCR clone 236029 (TRAV29/DV5, TRAJ52)
CAAGFRVAGGTSYGKLTF

SEQ ID NO: 472058 - protein, 17 aa, Homo sapiens
  CDR3 for beta chain variable domain of TCR clone 236029 (TRBV20-1, TRBJ2-3)
CSARSAGLAGVTDTQYF

SEQ ID NO: 472059 - protein, 16 aa, Homo sapiens
  CDR3 for alpha chain variable domain of TCR clone 236030 (TRAV3, TRAJ5)
CAVRNLMDTGRRALTF

SEQ ID NO: 472060 - protein, 18 aa, Homo sapiens
  CDR3 for beta chain variable domain of TCR clone 236030 (TRBV4-2, TRBJ2-7)
CASSQEGLANSYESTSGR

SEQ ID NO: 472061 - protein, 13 aa, Homo sapiens
  CDR3 for alpha chain variable domain of TCR clone 236031 (TRAV13-1, TRAJ21)
CAASIYNFNKFYF

SEQ ID NO: 472062 - protein, 13 aa, Homo sapiens
  CDR3 for beta chain variable domain of TCR clone 236031 (TRBV19, TRBJ2-2)
CASSIWSTGELFF

SEQ ID NO: 472063 - protein, 11 aa, Homo sapiens
  CDR3 for alpha chain variable domain of TCR clone 236032 (TRAV1-2, TRAJ40)
CAVPGTCKYIF

SEQ ID NO: 472064 - protein, 16 aa, Homo sapiens
  CDR3 for beta chain variable domain of TCR clone 236032 (TRBV29-1, TRBJ2-7)
CSVEVVRTSGSYEQYF

SEQ ID NO: 472065 - protein, 11 aa, Homo sapiens
  CDR3 for alpha chain variable domain of TCR clone 236033 (TRAV12-2, TRAJ29)
CAVTLRSPLVF

SEQ ID NO: 472066 - protein, 16 aa, Homo sapiens
  CDR3 for beta chain variable domain of TCR clone 236033 (TRBV19, TRBJ1-5)
CASSIDLGGPRQTQHF

SEQ ID NO: 472067 - protein, 17 aa, Homo sapiens
  CDR3 for alpha chain variable domain of TCR clone 236034 (TRAV13-1, TRAJ52)
CAASSGAGGTIYGKLTF

SEQ ID NO: 472068 - protein, 15 aa, Homo sapiens
  CDR3 for beta chain variable domain of TCR clone 236034 (TRBV12-4, TRBJ1-5)
CANTRGSGFGQPQHF

SEQ ID NO: 472069 - protein, 14 aa, Homo sapiens
  CDR3 for alpha chain variable domain of TCR clone 236035 (TRAV29/DV5, TRAJ44)
CAAFLVGTASKLTF

SEQ ID NO: 472070 - protein, 16 aa, Homo sapiens
  CDR3 for beta chain variable domain of TCR clone 236035 (TRBV24-1, TRBJ2-3)
CATSDRRQDLTDTQYF

SEQ ID NO: 472071 - protein, 15 aa, Homo sapiens
  CDR3 for alpha chain variable domain of TCR clone 236036 (TRAV17, TRAJ22)
CATVAPSGSERQLTF

SEQ ID NO: 472072 - protein, 16 aa, Homo sapiens
  CDR3 for beta chain variable domain of TCR clone 236036 (TRBV10-3, TRBJ2-7)
CAISADFADRPYEQYF

SEQ ID NO: 472073 - protein, 14 aa, Homo sapiens
  CDR3 for alpha chain variable domain of TCR clone 236037 (TRAV1-1, TRAJ27)
CAVIYNTNAGKSTF

SEQ ID NO: 472074 - protein, 14 aa, Homo sapiens
  CDR3 for beta chain variable domain of TCR clone 236037 (TRBV19, TRBJ2-7)
CASSLRDRGYEQYF

SEQ ID NO: 472075 - protein, 13 aa, Homo sapiens
  CDR3 for alpha chain variable domain of TCR clone 236038 (TRAV12-3, TRAJ54)
CAMTLQGAQQLVF

SEQ ID NO: 472076 - protein, 14 aa, Homo sapiens
  CDR3 for beta chain variable domain of TCR clone 236038 (TRBV4-1, TRBJ2-2)
CASSQAVNTGELFF

SEQ ID NO: 472077 - protein, 16 aa, Homo sapiens
  CDR3 for alpha chain variable domain of TCR clone 236039 (TRAV21, TRAJ37)
CAVRPRGSSNAGKLIF

SEQ ID NO: 472078 - protein, 13 aa, Homo sapiens
  CDR3 for beta chain variable domain of TCR clone 236039 (TRBV7-3, TRBJ1-1)
CASSQDWGAEAFF

SEQ ID NO: 472079 - protein, 12 aa, Homo sapiens
  CDR3 for alpha chain variable domain of TCR clone 236040 (TRAV13-2, TRAJ8)
CAPWVGFQKLVF

SEQ ID NO: 472080 - protein, 12 aa, Homo sapiens
  CDR3 for beta chain variable domain of TCR clone 236040 (TRBV29-1, TRBJ2-3)
CSVTGGADTQYF

SEQ ID NO: 472081 - protein, 18 aa, Homo sapiens
  CDR3 for alpha chain variable domain of TCR clone 236041 (TRAV26-1, TRAJ52)
CIVDPVGAGGTSYGKLTF

SEQ ID NO: 472082 - protein, 17 aa, Homo sapiens
  CDR3 for beta chain variable domain of TCR clone 236041 (TRBV6-1, TRBJ1-1)
CASLARGGGGFNTEAFF

SEQ ID NO: 472083 - protein, 12 aa, Homo sapiens
  CDR3 for alpha chain variable domain of TCR clone 236042 (TRAV17, TRAJ48)
CALNIGNEKLTF

SEQ ID NO: 472084 - protein, 13 aa, Homo sapiens
  CDR3 for beta chain variable domain of TCR clone 236042 (TRBV6-5, TRBJ2-5)
CASSSPGGETQYF

SEQ ID NO: 472085 - protein, 15 aa, Homo sapiens
  CDR3 for alpha chain variable domain of TCR clone 236043 (TRAV35, TRAJ42)
CAGQGYGGSQGNLIF

SEQ ID NO: 472086 - protein, 15 aa, Homo sapiens
  CDR3 for beta chain variable domain of TCR clone 236043 (TRBV20-1, TRBJ2-7)
CSARDRVSGMDEQYF

SEQ ID NO: 472087 - protein, 18 aa, Homo sapiens
  CDR3 for alpha chain variable domain of TCR clone 236044 (TRAV21, TRAJ52)
CAWRPSPAGGTSYGKLTF

SEQ ID NO: 472088 - protein, 17 aa, Homo sapiens
  CDR3 for beta chain variable domain of TCR clone 236044 (TRBV13, TRBJ2-3)
CASSLSRVAGGRNTQYF

SEQ ID NO: 472089 - protein, 14 aa, Homo sapiens
  CDR3 for alpha chain variable domain of TCR clone 236045 (TRAV1-2, TRAJ16)
CAVRSASDGQKLLF

SEQ ID NO: 472090 - protein, 11 aa, Homo sapiens
  CDR3 for beta chain variable domain of TCR clone 236045 (TRBV11-2, TRBJ2-2)
CASSLPGELFF

SEQ ID NO: 472091 - protein, 13 aa, Homo sapiens
  CDR3 for alpha chain variable domain of TCR clone 236046 (TRAV12-3, TRAJ53)
CAMRGGRNYKLTF

SEQ ID NO: 472092 - protein, 13 aa, Homo sapiens
  CDR3 for beta chain variable domain of TCR clone 236046 (TRBV18, TRBJ2-5)
CASSLQGQETQYF

SEQ ID NO: 472093 - protein, 14 aa, Homo sapiens
  CDR3 for alpha chain variable domain of TCR clone 236047 (TRAV20, TRAJ17)
CAVRREAAGNKLTF

SEQ ID NO: 472094 - protein, 12 aa, Homo sapiens
  CDR3 for beta chain variable domain of TCR clone 236047 (TRBV5-1, TRBJ2-7)
CASSLDSYEQYF

SEQ ID NO: 472095 - protein, 15 aa, Homo sapiens
  CDR3 for alpha chain variable domain of TCR clone 236048 (TRAV13-1, TRAJ32)
CAASIYGGTTNKLIF

SEQ ID NO: 472096 - protein, 12 aa, Homo sapiens
  CDR3 for beta chain variable domain of TCR clone 236048 (TRBV7-6, TRBJ2-3)
CASSTGTDTQYF

SEQ ID NO: 472097 - protein, 12 aa, Homo sapiens
  CDR3 for alpha chain variable domain of TCR clone 236049 (TRAV8-3, TRAJ20)
CAVGANDYNLSF

SEQ ID NO: 472098 - protein, 16 aa, Homo sapiens
  CDR3 for beta chain variable domain of TCR clone 236049 (TRBV19, TRBJ2-2)
CAGRSPGTGATGELFF

SEQ ID NO: 472099 - protein, 15 aa, Homo sapiens
  CDR3 for alpha chain variable domain of TCR clone 236050 (TRAV12-2, TRAJ53)
CAVNGGGGSNYKLSF

SEQ ID NO: 472100 - protein, 13 aa, Homo sapiens
  CDR3 for beta chain variable domain of TCR clone 236050 (TRBV3-1, TRBJ1-1)
RASSPGVITEAFF

SEQ ID NO: 472101 - protein, 14 aa, Homo sapiens
  CDR3 for alpha chain variable domain of TCR clone 236051 (TRAV26-1, TRAJ45)
CIVRVVGGADGLTF

SEQ ID NO: 472102 - protein, 16 aa, Homo sapiens
  CDR3 for beta chain variable domain of TCR clone 236051 (TRBV7-9, TRBJ1-1)
CASSLTQVRSNTEAFY

SEQ ID NO: 472103 - protein, 14 aa, Homo sapiens
  CDR3 for alpha chain variable domain of TCR clone 236052 (TRAV35, TRAJ50)
CAGHRKTSYYKVIF

SEQ ID NO: 472104 - protein, 13 aa, Homo sapiens
  CDR3 for beta chain variable domain of TCR clone 236052 (TRBV7-7, TRBJ2-3)
CASSLSRADTQDF

SEQ ID NO: 472105 - protein, 12 aa, Homo sapiens
  CDR3 for alpha chain variable domain of TCR clone 236053 (TRAV25, TRAJ38)
CAGTGNNRKLIW

SEQ ID NO: 472106 - protein, 13 aa, Homo sapiens
  CDR3 for beta chain variable domain of TCR clone 236053 (TRBV4-1, TRBJ2-5)
CASSLTRGETQYF

SEQ ID NO: 472107 - protein, 13 aa, Homo sapiens
  CDR3 for alpha chain variable domain of TCR clone 236054 (TRAV17, TRAJ9)
CATDYTGGFKNIF

SEQ ID NO: 472108 - protein, 16 aa, Homo sapiens
  CDR3 for beta chain variable domain of TCR clone 236054 (TRBV2, TRBJ2-4)
CASSEAPGGEQNIQYF

SEQ ID NO: 472109 - protein, 14 aa, Homo sapiens
  CDR3 for alpha chain variable domain of TCR clone 236055 (TRAV20, TRAJ10)
CAVRVEGGGDKLTF

SEQ ID NO: 472110 - protein, 18 aa, Homo sapiens
  CDR3 for beta chain variable domain of TCR clone 236055 (TRBV24-1, TRBJ2-1)
CATSDLMFRGRGVHEQFF

SEQ ID NO: 472111 - protein, 16 aa, Homo sapiens
  CDR3 for alpha chain variable domain of TCR clone 236056 (TRAV12-3, TRAJ28)
CAMRAKSGAGSYQLTF

SEQ ID NO: 472112 - protein, 16 aa, Homo sapiens
  CDR3 for beta chain variable domain of TCR clone 236056 (TRBV7-2, TRBJ1-3)
CASSRLEASSGNTIYF

SEQ ID NO: 472113 - protein, 11 aa, Homo sapiens
  CDR3 for alpha chain variable domain of TCR clone 236057 (TRAV1-1, TRAJ20)
CAVRDNYKLSF

SEQ ID NO: 472114 - protein, 18 aa, Homo sapiens
  CDR3 for beta chain variable domain of TCR clone 236057 (TRBV20-1, TRBJ2-6)
CSAETTPTHGSGANVLTF

SEQ ID NO: 472115 - protein, 14 aa, Homo sapiens
  CDR3 for alpha chain variable domain of TCR clone 236058 (TRAV12-2, TRAJ40)
CAAKIPSGTYKYIF

SEQ ID NO: 472116 - protein, 14 aa, Homo sapiens
  CDR3 for beta chain variable domain of TCR clone 236058 (TRBV20-1, TRBJ1-1)
CNAQTRIGGTEAFF

SEQ ID NO: 472117 - protein, 16 aa, Homo sapiens
  CDR3 for alpha chain variable domain of TCR clone 236059 (TRAV8-3, TRAJ10)
CAVGPGATGGGNKLTF

SEQ ID NO: 472118 - protein, 13 aa, Homo sapiens
  CDR3 for beta chain variable domain of TCR clone 236059 (TRBV18, TRBJ1-1)
CASSPGPSGEAFF

SEQ ID NO: 472119 - protein, 16 aa, Homo sapiens
  CDR3 for alpha chain variable domain of TCR clone 236060 (TRAV4, TRAJ18)
CCVLLIGGSTLGRLYF

SEQ ID NO: 472120 - protein, 13 aa, Homo sapiens
  CDR3 for beta chain variable domain of TCR clone 236060 (TRBV10-2, TRBJ1-1)
CASNDQMNTEAFF

SEQ ID NO: 472121 - protein, 12 aa, Homo sapiens
  CDR3 for alpha chain variable domain of TCR clone 236061 (TRAV27, TRAJ17)
CAAATAGNKLTF

SEQ ID NO: 472122 - protein, 15 aa, Homo sapiens
  CDR3 for beta chain variable domain of TCR clone 236061 (TRBV5-1, TRBJ2-3)
CASRNQAGSTDTQYF

SEQ ID NO: 472123 - protein, 13 aa, Homo sapiens
  CDR3 for alpha chain variable domain of TCR clone 236062 (TRAV1-2, TRAJ11)
CAVRDSGYSTLTF

SEQ ID NO: 472124 - protein, 16 aa, Homo sapiens
  CDR3 for beta chain variable domain of TCR clone 236062 (TRBV5-1, TRBJ2-7)
CASSWGTGGRAWGQYF

SEQ ID NO: 472125 - protein, 18 aa, Homo sapiens
  CDR3 for alpha chain variable domain of TCR clone 236063 (TRAV21, TRAJ52)
CAVRPSPVGGTSYGKLTF

SEQ ID NO: 472126 - protein, 15 aa, Homo sapiens
  CDR3 for beta chain variable domain of TCR clone 236063 (TRBV20-1, TRBJ2-7)
CSARDRVSGMDEQYF

SEQ ID NO: 472127 - protein, 12 aa, Homo sapiens
  CDR3 for alpha chain variable domain of TCR clone 236064 (TRAV21, TRAJ37)
CAVRGNTGKLIF

SEQ ID NO: 472128 - protein, 14 aa, Homo sapiens
  CDR3 for beta chain variable domain of TCR clone 236064 (TRBV19, TRBJ2-1)
CASEVTGARKAHFC

SEQ ID NO: 472129 - protein, 12 aa, Homo sapiens
  CDR3 for alpha chain variable domain of TCR clone 236065 (TRAV12-2, TRAJ7)
CAVMRGNNRLAF

SEQ ID NO: 472130 - protein, 13 aa, Homo sapiens
  CDR3 for beta chain variable domain of TCR clone 236065 (TRBV19, TRBJ1-3)
CASRLSLGNTIYF

SEQ ID NO: 472131 - protein, 12 aa, Homo sapiens
  CDR3 for alpha chain variable domain of TCR clone 236066 (TRAV13-2, TRAJ23)
CAERHRGGKLIF

SEQ ID NO: 472132 - protein, 15 aa, Homo sapiens
  CDR3 for beta chain variable domain of TCR clone 236066 (TRBV5-1, TRBJ2-7)
CASSLNGGPAREQYF

SEQ ID NO: 472133 - protein, 10 aa, Homo sapiens
  CDR3 for alpha chain variable domain of TCR clone 236067 (TRAV1-2, TRAJ20)
CACNDYKLSF

SEQ ID NO: 472134 - protein, 17 aa, Homo sapiens
  CDR3 for beta chain variable domain of TCR clone 236067 (TRBV7-3, TRBJ2-3)
CASSLMKSMRGADTQYF

SEQ ID NO: 472135 - protein, 14 aa, Homo sapiens
  CDR3 for alpha chain variable domain of TCR clone 236068 (TRAV16, TRAJ26)
CALSGCNYGQNFVF

SEQ ID NO: 472136 - protein, 14 aa, Homo sapiens
  CDR3 for beta chain variable domain of TCR clone 236068 (TRBV7-8, TRBJ2-3)
CASSLEAGTDTQYF

SEQ ID NO: 472137 - protein, 13 aa, Homo sapiens
  CDR3 for alpha chain variable domain of TCR clone 236069 (TRAV12-2, TRAJ20)
CAVYPSNDYKLSF

SEQ ID NO: 472138 - protein, 13 aa, Homo sapiens
  CDR3 for beta chain variable domain of TCR clone 236069 (TRBV4-1, TRBJ1-1)
CASSGGQRGEAFF

SEQ ID NO: 472139 - protein, 11 aa, Homo sapiens
  CDR3 for alpha chain variable domain of TCR clone 236070 (TRAV9-2, TRAJ58)
CALTSGSRLTF

SEQ ID NO: 472140 - protein, 20 aa, Homo sapiens
  CDR3 for beta chain variable domain of TCR clone 236070 (TRBV20-1, TRBJ2-5)
CSARDLQGARPRGREETQYF

SEQ ID NO: 472141 - protein, 14 aa, Homo sapiens
  CDR3 for alpha chain variable domain of TCR clone 236071 (TRAV8-3, TRAJ4)
CAVGAAGGDNKLIF

SEQ ID NO: 472142 - protein, 15 aa, Homo sapiens
  CDR3 for beta chain variable domain of TCR clone 236071 (TRBV6-5, TRBJ2-1)
CASSYEAGAGNEQFF

SEQ ID NO: 472143 - protein, 13 aa, Homo sapiens
  CDR3 for alpha chain variable domain of TCR clone 236072 (TRAV2, TRAJ15)
CAVASQAATALIF

SEQ ID NO: 472144 - protein, 13 aa, Homo sapiens
  CDR3 for beta chain variable domain of TCR clone 236072 (TRBV4-2, TRBJ1-1)
CASSQAGNTEAFF

SEQ ID NO: 472145 - protein, 12 aa, Homo sapiens
  CDR3 for alpha chain variable domain of TCR clone 236073 (TRAV36/DV7, TRAJ54)
CAVVRGAQKLVI

SEQ ID NO: 472146 - protein, 14 aa, Homo sapiens
  CDR3 for beta chain variable domain of TCR clone 236073 (TRBV7-3, TRBJ1-1)
CASSLKGGNTEAFF

SEQ ID NO: 472147 - protein, 19 aa, Homo sapiens
  CDR3 for alpha chain variable domain of TCR clone 236074 (TRAV26-1, TRAJ52)
CIVRAHRNAGGTSYGKLTF

SEQ ID NO: 472148 - protein, 15 aa, Homo sapiens
  CDR3 for beta chain variable domain of TCR clone 236074 (TRBV12-4, TRBJ2-5)
CASSPRTGLQETQYF

SEQ ID NO: 472149 - protein, 16 aa, Homo sapiens
  CDR3 for alpha chain variable domain of TCR clone 236075 (TRAV29/DV5, TRAJ40)
CAAPRFRTEGTYKYIF

SEQ ID NO: 472150 - protein, 14 aa, Homo sapiens
  CDR3 for beta chain variable domain of TCR clone 236075 (TRBV25-1, TRBJ1-1)
CASTHLGGNTEAFF

SEQ ID NO: 472151 - protein, 14 aa, Homo sapiens
  CDR3 for alpha chain variable domain of TCR clone 236076 (TRAV12-2, TRAJ15)
CAPHTGQAGTALIL

SEQ ID NO: 472152 - protein, 13 aa, Homo sapiens
  CDR3 for beta chain variable domain of TCR clone 236076 (TRBV15, TRBJ2-7)
CATSTTGHYEQYF

SEQ ID NO: 472153 - protein, 17 aa, Homo sapiens
  CDR3 for alpha chain variable domain of TCR clone 236077 (TRAV27, TRAJ26)
CAGARAPLDNYGQNFVF

SEQ ID NO: 472154 - protein, 17 aa, Homo sapiens
  CDR3 for beta chain variable domain of TCR clone 236077 (TRBV20-1, TRBJ2-2)
CSASGSGQGGLTGELFF

SEQ ID NO: 472155 - protein, 11 aa, Homo sapiens
  CDR3 for alpha chain variable domain of TCR clone 236078 (TRAV12-1, TRAJ15)
CVFNAGTALIF

SEQ ID NO: 472156 - protein, 16 aa, Homo sapiens
  CDR3 for beta chain variable domain of TCR clone 236078 (TRBV28, TRBJ2-1)
CASSSRVRDSYNEQFF

SEQ ID NO: 472157 - protein, 13 aa, Homo sapiens
  CDR3 for alpha chain variable domain of TCR clone 236079 (TRAV13-2, TRAJ40)
CAEFTSGTYKYIF

SEQ ID NO: 472158 - protein, 14 aa, Homo sapiens
  CDR3 for beta chain variable domain of TCR clone 236079 (TRBV10-2, TRBJ1-5)
CASSSTGRKQPQHS

SEQ ID NO: 472159 - protein, 14 aa, Homo sapiens
  CDR3 for alpha chain variable domain of TCR clone 236080 (TRAV29/DV5, TRAJ40)
CAAKKYSGTYKYIF

SEQ ID NO: 472160 - protein, 15 aa, Homo sapiens
  CDR3 for beta chain variable domain of TCR clone 236080 (TRBV5-1, TRBJ2-1)
CASSPPRAPYNEQFF

SEQ ID NO: 472161 - protein, 13 aa, Homo sapiens
  CDR3 for alpha chain variable domain of TCR clone 236081 (TRAV1-1, TRAJ9)
CAAKNTGGFKTIF

SEQ ID NO: 472162 - protein, 14 aa, Homo sapiens
  CDR3 for beta chain variable domain of TCR clone 236081 (TRBV7-6, TRBJ2-3)
CASGVAGGTDTQYF

SEQ ID NO: 472163 - protein, 14 aa, Homo sapiens
  CDR3 for alpha chain variable domain of TCR clone 236082 (TRAV13-2, TRAJ11)
CAETGNSGYSTLTF

SEQ ID NO: 472164 - protein, 14 aa, Homo sapiens
  CDR3 for beta chain variable domain of TCR clone 236082 (TRBV7-6, TRBJ2-3)
CASSLGTVTDTQYF

SEQ ID NO: 472165 - protein, 16 aa, Homo sapiens
  CDR3 for alpha chain variable domain of TCR clone 236083 (TRAV21, TRAJ33)
CAVSPASMDSNYQLIW

SEQ ID NO: 472166 - protein, 17 aa, Homo sapiens
  CDR3 for beta chain variable domain of TCR clone 236083 (TRBV2, TRBJ1-4)
CARSKRELTQGEEKLFF

SEQ ID NO: 472167 - protein, 16 aa, Homo sapiens
  CDR3 for alpha chain variable domain of TCR clone 236084 (TRAV30, TRAJ24)
CGTEIVDADSWGKFQF

SEQ ID NO: 472168 - protein, 16 aa, Homo sapiens
  CDR3 for beta chain variable domain of TCR clone 236084 (TRBV12-5, TRBJ2-5)
CASGPRTSGNQETQCF

SEQ ID NO: 472169 - protein, 10 aa, Homo sapiens
  CDR3 for alpha chain variable domain of TCR clone 236085 (TRAV26-1, TRAJ22)
CIVSLNFFWF

SEQ ID NO: 472170 - protein, 15 aa, Homo sapiens
  CDR3 for beta chain variable domain of TCR clone 236085 (TRBV4-2, TRBJ1-2)
CARSQKTGGRDGYTF

SEQ ID NO: 472171 - protein, 15 aa, Homo sapiens
  CDR3 for alpha chain variable domain of TCR clone 236086 (TRAV8-3, TRAJ45)
CASSYSGGGADGLTF

SEQ ID NO: 472172 - protein, 12 aa, Homo sapiens
  CDR3 for beta chain variable domain of TCR clone 236086 (TRBV12-4, TRBJ2-7)
CASSVGGYEQYF

SEQ ID NO: 472173 - protein, 14 aa, Homo sapiens
  CDR3 for alpha chain variable domain of TCR clone 236087 (TRAV27, TRAJ22)
CAGVVPGSARQLTF

SEQ ID NO: 472174 - protein, 15 aa, Homo sapiens
  CDR3 for beta chain variable domain of TCR clone 236087 (TRBV9, TRBJ1-6)
CASSVAGTGDSPLHF

SEQ ID NO: 472175 - protein, 13 aa, Homo sapiens
  CDR3 for alpha chain variable domain of TCR clone 236088 (TRAV27, TRAJ41)
CAGEGNSGYALNF

SEQ ID NO: 472176 - protein, 17 aa, Homo sapiens
  CDR3 for beta chain variable domain of TCR clone 236088 (TRBV7-6, TRBJ2-5)
CASSPGLADPWGETQYF

SEQ ID NO: 472177 - protein, 11 aa, Homo sapiens
  CDR3 for alpha chain variable domain of TCR clone 236089 (TRAV1-1, TRAJ23)
CAVRQGGKLII

SEQ ID NO: 472178 - protein, 20 aa, Homo sapiens
  CDR3 for beta chain variable domain of TCR clone 236089 (TRBV7-8, TRBJ2-2)
CTSSHLFPGPTIHITGELFF

SEQ ID NO: 472179 - protein, 14 aa, Homo sapiens
  CDR3 for alpha chain variable domain of TCR clone 236090 (TRAV35, TRAJ38)
CAGSNAGNNRKLIW

SEQ ID NO: 472180 - protein, 16 aa, Homo sapiens
  CDR3 for beta chain variable domain of TCR clone 236090 (TRBV19, TRBJ2-2)
CASSFPGQGLAGELFF

SEQ ID NO: 472181 - protein, 16 aa, Homo sapiens
  CDR3 for alpha chain variable domain of TCR clone 236091 (TRAV2, TRAJ13)
CAARILGVTRKLPLEL

SEQ ID NO: 472182 - protein, 14 aa, Homo sapiens
  CDR3 for beta chain variable domain of TCR clone 236091 (TRBV19, TRBJ2-1)
CASEVTRARNEHFF

SEQ ID NO: 472183 - protein, 12 aa, Homo sapiens
  CDR3 for alpha chain variable domain of TCR clone 236092 (TRAV13-2, TRAJ8)
CAPWLGFQKLVF

SEQ ID NO: 472184 - protein, 14 aa, Homo sapiens
  CDR3 for beta chain variable domain of TCR clone 236092 (TRBV7-8, TRBJ1-5)
CASSLGAFNQPQHF

SEQ ID NO: 472185 - protein, 15 aa, Homo sapiens
  CDR3 for alpha chain variable domain of TCR clone 236093 (TRAV17, TRAJ57)
CATGPSQGGSEKLVF

SEQ ID NO: 472186 - protein, 14 aa, Homo sapiens
  CDR3 for beta chain variable domain of TCR clone 236093 (TRBV12-5, TRBJ2-5)
CATGSRTHQETQYF

SEQ ID NO: 472187 - protein, 17 aa, Homo sapiens
  CDR3 for alpha chain variable domain of TCR clone 236094 (TRAV3, TRAJ38)
CAVRDCLNAGNNRKLIW

SEQ ID NO: 472188 - protein, 14 aa, Homo sapiens
  CDR3 for beta chain variable domain of TCR clone 236094 (TRBV11-2, TRBJ2-3)
CASSRLARTDTQYF

SEQ ID NO: 472189 - protein, 16 aa, Homo sapiens
  CDR3 for alpha chain variable domain of TCR clone 236095 (TRAV22, TRAJ45)
CAVERGKRGGADGLTF

SEQ ID NO: 472190 - protein, 16 aa, Homo sapiens
  CDR3 for beta chain variable domain of TCR clone 236095 (TRBV20-1, TRBJ2-2)
CSASASGIPGAGELFF

SEQ ID NO: 472191 - protein, 11 aa, Homo sapiens
  CDR3 for alpha chain variable domain of TCR clone 236096 (TRAV27, TRAJ47)
SIVEYGNKLVF

SEQ ID NO: 472192 - protein, 18 aa, Homo sapiens
  CDR3 for beta chain variable domain of TCR clone 236096 (TRBV2, TRBJ2-1)
CARRGLAGGPRTYNEQFF

SEQ ID NO: 472193 - protein, 13 aa, Homo sapiens
  CDR3 for alpha chain variable domain of TCR clone 236097 (TRAV26-1, TRAJ52)
CIVGGTNYGKLTF

SEQ ID NO: 472194 - protein, 14 aa, Homo sapiens
  CDR3 for beta chain variable domain of TCR clone 236097 (TRBV19, TRBJ2-1)
CASPTFVLSGEQFF

SEQ ID NO: 472195 - protein, 16 aa, Homo sapiens
  CDR3 for alpha chain variable domain of TCR clone 236098 (TRAV3, TRAJ10)
CAVRDMRAGRGNTLTF

SEQ ID NO: 472196 - protein, 19 aa, Homo sapiens
  CDR3 for beta chain variable domain of TCR clone 236098 (TRBV6-3, TRBJ1-2)
CASSYSKGRTGPPNYGYTF

SEQ ID NO: 472197 - protein, 15 aa, Homo sapiens
  CDR3 for alpha chain variable domain of TCR clone 236099 (TRAV38-2/DV8, TRAJ39)
CAYRTSNNAGNMLTF

SEQ ID NO: 472198 - protein, 15 aa, Homo sapiens
  CDR3 for beta chain variable domain of TCR clone 236099 (TRBV27, TRBJ1-6)
CASSFDGGLGSPLHF

SEQ ID NO: 472199 - protein, 13 aa, Homo sapiens
  CDR3 for alpha chain variable domain of TCR clone 236100 (TRAV2, TRAJ38)
CAYGAGNNRKLIW

SEQ ID NO: 472200 - protein, 13 aa, Homo sapiens
  CDR3 for beta chain variable domain of TCR clone 236100 (TRBV6-1, TRBJ1-6)
CASSRSWDSPLHF

SEQ ID NO: 472201 - protein, 15 aa, Homo sapiens
  CDR3 for alpha chain variable domain of TCR clone 236101 (TRAV25, TRAJ52)
CAGRPGGTSYGKLTF

SEQ ID NO: 472202 - protein, 17 aa, Homo sapiens
  CDR3 for beta chain variable domain of TCR clone 236101 (TRBV7-8, TRBJ2-6)
CASRAGTGGAGANGLTF

SEQ ID NO: 472203 - protein, 17 aa, Homo sapiens
  CDR3 for alpha chain variable domain of TCR clone 236102 (TRAV26-1, TRAJ37)
CIVRVITVSSNTGKLIF

SEQ ID NO: 472204 - protein, 13 aa, Homo sapiens
  CDR3 for beta chain variable domain of TCR clone 236102 (TRBV19, TRBJ2-7)
CASRKAGGSEQYF

SEQ ID NO: 472205 - protein, 16 aa, Homo sapiens
  CDR3 for alpha chain variable domain of TCR clone 236103 (TRAV8-3, TRAJ52)
CAVQPAGGTSYGKLTL

SEQ ID NO: 472206 - protein, 15 aa, Homo sapiens
  CDR3 for beta chain variable domain of TCR clone 236103 (TRBV11-2, TRBJ2-7)
CASSLAGGVATEQYF

SEQ ID NO: 472207 - protein, 16 aa, Homo sapiens
  CDR3 for alpha chain variable domain of TCR clone 236104 (TRAV4, TRAJ5)
CLVGPDHGHWQESTYF

SEQ ID NO: 472208 - protein, 15 aa, Homo sapiens
  CDR3 for beta chain variable domain of TCR clone 236104 (TRBV27, TRBJ2-5)
CASSLIPSGGETQYF

SEQ ID NO: 472209 - protein, 14 aa, Homo sapiens
  CDR3 for alpha chain variable domain of TCR clone 236105 (TRAV16, TRAJ40)
CAPHESYYLRNLQI

SEQ ID NO: 472210 - protein, 12 aa, Homo sapiens
  CDR3 for beta chain variable domain of TCR clone 236105 (TRBV7-3, TRBJ2-3)
CASSSLTDTQYF

SEQ ID NO: 472211 - protein, 11 aa, Homo sapiens
  CDR3 for alpha chain variable domain of TCR clone 236106 (TRAV12-3, TRAJ49)
CAANTGNQFFF

SEQ ID NO: 472212 - protein, 15 aa, Homo sapiens
  CDR3 for beta chain variable domain of TCR clone 236106 (TRBV11-2, TRBJ2-1)
CAGSLGTSGLNEQFF

SEQ ID NO: 472213 - protein, 13 aa, Homo sapiens
  CDR3 for alpha chain variable domain of TCR clone 236107 (TRAV21, TRAJ27)
CAARPGNACKSTF

SEQ ID NO: 472214 - protein, 14 aa, Homo sapiens
  CDR3 for beta chain variable domain of TCR clone 236107 (TRBV7-6, TRBJ2-3)
CASSLGTATDTQYF

SEQ ID NO: 472215 - protein, 14 aa, Homo sapiens
  CDR3 for alpha chain variable domain of TCR clone 236108 (TRAV12-2, TRAJ40)
CAVKIPSGTYKYII

SEQ ID NO: 472216 - protein, 14 aa, Homo sapiens
  CDR3 for beta chain variable domain of TCR clone 236108 (TRBV7-8, TRBJ2-7)
CASSPRDRVYEQYF

SEQ ID NO: 472217 - protein, 12 aa, Homo sapiens
  CDR3 for alpha chain variable domain of TCR clone 236109 (TRAV17, TRAJ57)
CATDGGSEKLVF

SEQ ID NO: 472218 - protein, 16 aa, Homo sapiens
  CDR3 for beta chain variable domain of TCR clone 236109 (TRBV13, TRBJ2-2)
CASSPRTGEHTGELFF

SEQ ID NO: 472219 - protein, 16 aa, Homo sapiens
  CDR3 for alpha chain variable domain of TCR clone 236110 (TRAV3, TRAJ37)
CAVRPHGSGNTGKLTF

SEQ ID NO: 472220 - protein, 17 aa, Homo sapiens
  CDR3 for beta chain variable domain of TCR clone 236110 (TRBV20-1, TRBJ2-1)
CSASSSGLAGSYNEQFF

SEQ ID NO: 472221 - protein, 13 aa, Homo sapiens
  CDR3 for alpha chain variable domain of TCR clone 236111 (TRAV1-2, TRAJ20)
CAVRDGNDYKLSF

SEQ ID NO: 472222 - protein, 17 aa, Homo sapiens
  CDR3 for beta chain variable domain of TCR clone 236111 (TRBV13, TRBJ2-3)
CASSLSRVAGGRNTQYF

SEQ ID NO: 472223 - protein, 11 aa, Homo sapiens
  CDR3 for alpha chain variable domain of TCR clone 236112 (TRAV8-3, TRAJ49)
CAVNTGNQFYF

SEQ ID NO: 472224 - protein, 13 aa, Homo sapiens
  CDR3 for beta chain variable domain of TCR clone 236112 (TRBV4-1, TRBJ2-2)
CASSQENTGELFF

SEQ ID NO: 472225 - protein, 21 aa, Homo sapiens
  CDR3 for alpha chain variable domain of TCR clone 236113 (TRAV13-1, TRAJ32)
CAASNGWWCYKQAHLWNWLSA

SEQ ID NO: 472226 - protein, 17 aa, Homo sapiens
  CDR3 for beta chain variable domain of TCR clone 236113 (TRBV15, TRBJ1-2)
CATSGRGIDVVNYGYTF

SEQ ID NO: 472227 - protein, 14 aa, Homo sapiens
  CDR3 for alpha chain variable domain of TCR clone 236114 (TRAV26-1, TRAJ34)
CIVRVANNTDKLIF

SEQ ID NO: 472228 - protein, 15 aa, Homo sapiens
  CDR3 for beta chain variable domain of TCR clone 236114 (TRBV20-1, TRBJ2-7)
CSARVPAAYCYEQYF

SEQ ID NO: 472229 - protein, 14 aa, Homo sapiens
  CDR3 for alpha chain variable domain of TCR clone 236115 (TRAV8-3, TRAJ30)
CAVGDMNRDDKIIF

SEQ ID NO: 472230 - protein, 17 aa, Homo sapiens
  CDR3 for beta chain variable domain of TCR clone 236115 (TRBV19, TRBJ2-2)
CAISRNPGGFGTGELFF

SEQ ID NO: 472231 - protein, 12 aa, Homo sapiens
  CDR3 for alpha chain variable domain of TCR clone 236116 (TRAV17, TRAJ12)
CATLRSSYKLIF

SEQ ID NO: 472232 - protein, 17 aa, Homo sapiens
  CDR3 for beta chain variable domain of TCR clone 236116 (TRBV7-3, TRBJ2-2)
CASSLSGTSGGTGELFF

SEQ ID NO: 472233 - protein, 14 aa, Homo sapiens
  CDR3 for alpha chain variable domain of TCR clone 236117 (TRAV38-1, TRAJ29)
CAFITPSGNTPLFL

SEQ ID NO: 472234 - protein, 14 aa, Homo sapiens
  CDR3 for beta chain variable domain of TCR clone 236117 (TRBV18, TRBJ2-7)
CASSPRGGAYEQYF

SEQ ID NO: 472235 - protein, 10 aa, Homo sapiens
  CDR3 for alpha chain variable domain of TCR clone 236118 (TRAV12-2, TRAJ27)
CGANAGKSTF

SEQ ID NO: 472236 - protein, 15 aa, Homo sapiens
  CDR3 for beta chain variable domain of TCR clone 236118 (TRBV5-5, TRBJ1-5)
CASSSTPGSNQTQHF

SEQ ID NO: 472237 - protein, 14 aa, Homo sapiens
  CDR3 for alpha chain variable domain of TCR clone 236119 (TRAV14/DV4, TRAJ32)
SNVLPLTPTNKLIF

SEQ ID NO: 472238 - protein, 13 aa, Homo sapiens
  CDR3 for beta chain variable domain of TCR clone 236119 (TRBV7-9, TRBJ1-2)
CASSLKQNYGYTF

SEQ ID NO: 472239 - protein, 15 aa, Homo sapiens
  CDR3 for alpha chain variable domain of TCR clone 236120 (TRAV3, TRAJ4)
CAVRDGTGGYNKLTF

SEQ ID NO: 472240 - protein, 16 aa, Homo sapiens
  CDR3 for beta chain variable domain of TCR clone 236120 (TRBV27, TRBJ2-2)
CASSSSGVSNTGELFF

SEQ ID NO: 472241 - protein, 15 aa, Homo sapiens
  CDR3 for alpha chain variable domain of TCR clone 236121 (TRAV40, TRAJ53)
CLLANSGGSNYKLTF

SEQ ID NO: 472242 - protein, 15 aa, Homo sapiens
  CDR3 for beta chain variable domain of TCR clone 236121 (TRBV7-6, TRBJ2-2)
CAIRRTSGNTGELFF

SEQ ID NO: 472243 - protein, 12 aa, Homo sapiens
  CDR3 for alpha chain variable domain of TCR clone 236122 (TRAV13-1, TRAJ48)
CAARVGGEKLTF

SEQ ID NO: 472244 - protein, 14 aa, Homo sapiens
  CDR3 for beta chain variable domain of TCR clone 236122 (TRBV20-1, TRBJ2-7)
CSSSSTSGTYEQYF

SEQ ID NO: 472245 - protein, 12 aa, Homo sapiens
  CDR3 for alpha chain variable domain of TCR clone 236123 (TRAV1-1, TRAJ39)
CAVPVVGNMLTF

SEQ ID NO: 472246 - protein, 15 aa, Homo sapiens
  CDR3 for beta chain variable domain of TCR clone 236123 (TRBV7-3, TRBJ2-2)
CASSETGRGTGELFF

SEQ ID NO: 472247 - protein, 14 aa, Homo sapiens
  CDR3 for alpha chain variable domain of TCR clone 236124 (TRAV27, TRAJ40)
CAGSLLRGTYKYTF

SEQ ID NO: 472248 - protein, 15 aa, Homo sapiens
  CDR3 for beta chain variable domain of TCR clone 236124 (TRBV6-3, TRBJ1-4)
CASSSPGQENEKLFF

SEQ ID NO: 472249 - protein, 13 aa, Homo sapiens
  CDR3 for alpha chain variable domain of TCR clone 236125 (TRAV27, TRAJ56)
CAGKPGANSKLTF

SEQ ID NO: 472250 - protein, 19 aa, Homo sapiens
  CDR3 for beta chain variable domain of TCR clone 236125 (TRBV25-1, TRBJ2-2)
CAILVYRVDRGRKTGELFF

SEQ ID NO: 472251 - protein, 16 aa, Homo sapiens
  CDR3 for alpha chain variable domain of TCR clone 236126 (TRAV12-3, TRAJ53)
CAMSPGSGGSNYKLTF

SEQ ID NO: 472252 - protein, 13 aa, Homo sapiens
  CDR3 for beta chain variable domain of TCR clone 236126 (TRBV13, TRBJ2-7)
CASSQGVSYEQYF

SEQ ID NO: 472253 - protein, 15 aa, Homo sapiens
  CDR3 for alpha chain variable domain of TCR clone 236127 (TRAV26-1, TRAJ52)
CIVSDLGTSYGKLTF

SEQ ID NO: 472254 - protein, 13 aa, Homo sapiens
  CDR3 for beta chain variable domain of TCR clone 236127 (TRBV7-9, TRBJ2-3)
CASSPGSTDTQYF

SEQ ID NO: 472255 - protein, 16 aa, Homo sapiens
  CDR3 for alpha chain variable domain of TCR clone 236128 (TRAV14/DV4, TRAJ53)
CAMREGGGGSNYKLTF

SEQ ID NO: 472256 - protein, 16 aa, Homo sapiens
  CDR3 for beta chain variable domain of TCR clone 236128 (TRBV12-5, TRBJ2-5)
CASGPRTSRNQETQYF

SEQ ID NO: 472257 - protein, 14 aa, Homo sapiens
  CDR3 for alpha chain variable domain of TCR clone 236129 (TRAV12-3, TRAJ10)
SHLPLTVGGNKLTF

SEQ ID NO: 472258 - protein, 12 aa, Homo sapiens
  CDR3 for beta chain variable domain of TCR clone 236129 (TRBV7-9, TRBJ2-7)
CATRTDAYEQYF

SEQ ID NO: 472259 - protein, 14 aa, Homo sapiens
  CDR3 for alpha chain variable domain of TCR clone 236130 (TRAV13-1, TRAJ35)
CAASKVGFGNVLHC

SEQ ID NO: 472260 - protein, 14 aa, Homo sapiens
  CDR3 for beta chain variable domain of TCR clone 236130 (TRBV7-8, TRBJ2-5)
CASSATGGQETQYF

SEQ ID NO: 472261 - protein, 14 aa, Homo sapiens
  CDR3 for alpha chain variable domain of TCR clone 236131 (TRAV26-1, TRAJ21)
CIVRPPYNFNKFYF

SEQ ID NO: 472262 - protein, 13 aa, Homo sapiens
  CDR3 for beta chain variable domain of TCR clone 236131 (TRBV11-2, TRBJ2-5)
CASSFSSQETQYF

SEQ ID NO: 472263 - protein, 16 aa, Homo sapiens
  CDR3 for alpha chain variable domain of TCR clone 236132 (TRAV1-2, TRAJ16)
CAPPGFQMARSCSLQG

SEQ ID NO: 472264 - protein, 15 aa, Homo sapiens
  CDR3 for beta chain variable domain of TCR clone 236132 (TRBV7-2, TRBJ2-2)
CASSTRTGYTGELFF

SEQ ID NO: 472265 - protein, 16 aa, Homo sapiens
  CDR3 for alpha chain variable domain of TCR clone 236133 (TRAV30, TRAJ24)
CGTEIVDADSWGKFQF

SEQ ID NO: 472266 - protein, 15 aa, Homo sapiens
  CDR3 for beta chain variable domain of TCR clone 236133 (TRBV28, TRBJ2-1)
CASSMIAGGRSEQFF

SEQ ID NO: 472267 - protein, 12 aa, Homo sapiens
  CDR3 for alpha chain variable domain of TCR clone 236134 (TRAV3, TRAJ21)
CAVISNFNKFYF

SEQ ID NO: 472268 - protein, 13 aa, Homo sapiens
  CDR3 for beta chain variable domain of TCR clone 236134 (TRBV3-1, TRBJ1-1)
CASSPGVITEAFF

SEQ ID NO: 472269 - protein, 13 aa, Homo sapiens
  CDR3 for alpha chain variable domain of TCR clone 236135 (TRAV2, TRAJ15)
CAVASQAGTALIF

SEQ ID NO: 472270 - protein, 20 aa, Homo sapiens
  CDR3 for beta chain variable domain of TCR clone 236135 (TRBV7-8, TRBJ2-1)
CASSLAHRLAGVRSYNEQFF

SEQ ID NO: 472271 - protein, 13 aa, Homo sapiens
  CDR3 for alpha chain variable domain of TCR clone 236136 (TRAV2, TRAJ40)
CAVVTSGTYKYIF

SEQ ID NO: 472272 - protein, 17 aa, Homo sapiens
  CDR3 for beta chain variable domain of TCR clone 236136 (TRBV6-1, TRBJ1-1)
CASSPGTGGRIGTEAFF

SEQ ID NO: 472273 - protein, 11 aa, Homo sapiens
  CDR3 for alpha chain variable domain of TCR clone 236137 (TRAV1-2, TRAJ31)
CASHNNARLMF

SEQ ID NO: 472274 - protein, 13 aa, Homo sapiens
  CDR3 for beta chain variable domain of TCR clone 236137 (TRBV7-9, TRBJ1-2)
CASSVKQNYGYTF

SEQ ID NO: 472275 - protein, 17 aa, Homo sapiens
  CDR3 for alpha chain variable domain of TCR clone 236138 (TRAV3, TRAJ42)
CAVRDRDYGGSQGNLIF

SEQ ID NO: 472276 - protein, 16 aa, Homo sapiens
  CDR3 for beta chain variable domain of TCR clone 236138 (TRBV7-2, TRBJ2-3)
CASSLVALYSTDTQYF

SEQ ID NO: 472277 - protein, 17 aa, Homo sapiens
  CDR3 for alpha chain variable domain of TCR clone 236139 (TRAV3, TRAJ6)
CAVRDGPRAGGSYIPTF

SEQ ID NO: 472278 - protein, 14 aa, Homo sapiens
  CDR3 for beta chain variable domain of TCR clone 236139 (TRBV19, TRBJ2-1)
CTSSLAGTYNEQFF

SEQ ID NO: 472279 - protein, 14 aa, Homo sapiens
  CDR3 for alpha chain variable domain of TCR clone 236140 (TRAV9-2, TRAJ39)
CALYIYNAGNMLTF

SEQ ID NO: 472280 - protein, 15 aa, Homo sapiens
  CDR3 for beta chain variable domain of TCR clone 236140 (TRBV6-6, TRBJ2-5)
CASSPGGGLEETQYF

SEQ ID NO: 472281 - protein, 12 aa, Homo sapiens
  CDR3 for alpha chain variable domain of TCR clone 236141 (TRAV30, TRAJ43)
CGTEERGNDMRF

SEQ ID NO: 472282 - protein, 15 aa, Homo sapiens
  CDR3 for beta chain variable domain of TCR clone 236141 (TRBV6-5, TRBJ2-1)
CASSYDAGAGNEQFF

SEQ ID NO: 472283 - protein, 17 aa, Homo sapiens
  CDR3 for alpha chain variable domain of TCR clone 236142 (TRAV3, TRAJ7)
CAVRDMSPLEGTTDSLL

SEQ ID NO: 472284 - protein, 17 aa, Homo sapiens
  CDR3 for beta chain variable domain of TCR clone 236142 (TRBV7-3, TRBJ2-3)
CASSLMKRMRGADTQYF

SEQ ID NO: 472285 - protein, 16 aa, Homo sapiens
  CDR3 for alpha chain variable domain of TCR clone 236143 (TRAV30, TRAJ24)
CGAEIVDADSWGKFQF

SEQ ID NO: 472286 - protein, 14 aa, Homo sapiens
  CDR3 for beta chain variable domain of TCR clone 236143 (TRBV12-5, TRBJ2-5)
CASGSRKHQETQYF

SEQ ID NO: 472287 - protein, 14 aa, Homo sapiens
  CDR3 for alpha chain variable domain of TCR clone 236144 (TRAV17, TRAJ56)
CATVPAGANSKLTF

SEQ ID NO: 472288 - protein, 13 aa, Homo sapiens
  CDR3 for beta chain variable domain of TCR clone 236144 (TRBV19, TRBJ1-2)
CASSQGQVYGYTF

SEQ ID NO: 472289 - protein, 13 aa, Homo sapiens
  CDR3 for alpha chain variable domain of TCR clone 236145 (TRAV17, TRAJ40)
CAGALGGTYKYIF

SEQ ID NO: 472290 - protein, 13 aa, Homo sapiens
  CDR3 for beta chain variable domain of TCR clone 236145 (TRBV7-2, TRBJ2-7)
CASSFAGAYEQYF

SEQ ID NO: 472291 - protein, 14 aa, Homo sapiens
  CDR3 for alpha chain variable domain of TCR clone 236146 (TRAV12-1, TRAJ6)
CVVPTSGGSYIPTF

SEQ ID NO: 472292 - protein, 15 aa, Homo sapiens
  CDR3 for beta chain variable domain of TCR clone 236146 (TRBV12-4, TRBJ2-5)
CASSPPTGLQETQYF

SEQ ID NO: 472293 - protein, 13 aa, Homo sapiens
  CDR3 for alpha chain variable domain of TCR clone 236147 (TRAV38-2/DV8, TRAJ34)
CAYRTWNTDKLIF

SEQ ID NO: 472294 - protein, 15 aa, Homo sapiens
  CDR3 for beta chain variable domain of TCR clone 236147 (TRBV7-9, TRBJ1-6)
CASSSPGRGNSPLHF

SEQ ID NO: 472295 - protein, 13 aa, Homo sapiens
  CDR3 for alpha chain variable domain of TCR clone 236148 (TRAV27, TRAJ45)
CRSSGGGADGLTF

SEQ ID NO: 472296 - protein, 15 aa, Homo sapiens
  CDR3 for beta chain variable domain of TCR clone 236148 (TRBV28, TRBJ1-5)
CASSDQVYSNQPQHF

SEQ ID NO: 472297 - protein, 14 aa, Homo sapiens
  CDR3 for alpha chain variable domain of TCR clone 236149 (TRAV23/DV6, TRAJ23)
CAAGPYNQGGKLIF

SEQ ID NO: 472298 - protein, 14 aa, Homo sapiens
  CDR3 for beta chain variable domain of TCR clone 236149 (TRBV6-3, TRBJ2-5)
CASSYSGRLSGQCF

SEQ ID NO: 472299 - protein, 12 aa, Homo sapiens
  CDR3 for alpha chain variable domain of TCR clone 236150 (TRAV13-1, TRAJ5)
CAAKAGRRALTF

SEQ ID NO: 472300 - protein, 13 aa, Homo sapiens
  CDR3 for beta chain variable domain of TCR clone 236150 (TRBV7-9, TRBJ1-2)
CASSLKQNYGYPF

SEQ ID NO: 472301 - protein, 12 aa, Homo sapiens
  CDR3 for alpha chain variable domain of TCR clone 236151 (TRAV12-3, TRAJ17)
CAMTPTGNKLTF

SEQ ID NO: 472302 - protein, 15 aa, Homo sapiens
  CDR3 for beta chain variable domain of TCR clone 236151 (TRBV20-1, TRBJ2-7)
CSARDRVYGMDEQYF

SEQ ID NO: 472303 - protein, 16 aa, Homo sapiens
  CDR3 for alpha chain variable domain of TCR clone 236152 (TRAV16, TRAJ52)
CALSGVGGTSYGKLTF

SEQ ID NO: 472304 - protein, 12 aa, Homo sapiens
  CDR3 for beta chain variable domain of TCR clone 236152 (TRBV11-2, TRBJ2-1)
CASSPGNNEQFF

SEQ ID NO: 472305 - protein, 17 aa, Homo sapiens
  CDR3 for alpha chain variable domain of TCR clone 236153 (TRAV3, TRAJ38)
CAVRDCLNAGNNRKLIW

SEQ ID NO: 472306 - protein, 13 aa, Homo sapiens
  CDR3 for beta chain variable domain of TCR clone 236153 (TRBV12-4, TRBJ2-7)
CASSPTETYEQYF

SEQ ID NO: 472307 - protein, 16 aa, Homo sapiens
  CDR3 for alpha chain variable domain of TCR clone 236154 (TRAV12-2, TRAJ6)
CAAPLAGSGGSYIPTF

SEQ ID NO: 472308 - protein, 14 aa, Homo sapiens
  CDR3 for beta chain variable domain of TCR clone 236154 (TRBV11-2, TRBJ2-5)
CASSGHSLQETQYF

SEQ ID NO: 472309 - protein, 14 aa, Homo sapiens
  CDR3 for alpha chain variable domain of TCR clone 236155 (TRAV13-1, TRAJ10)
CAAKEPGGGNKLTF

SEQ ID NO: 472310 - protein, 17 aa, Homo sapiens
  CDR3 for beta chain variable domain of TCR clone 236155 (TRBV7-3, TRBJ2-5)
CASSLGSGRSGSETQYF

SEQ ID NO: 472311 - protein, 11 aa, Homo sapiens
  CDR3 for alpha chain variable domain of TCR clone 236156 (TRAV2, TRAJ13)
CASGGYQKVTF

SEQ ID NO: 472312 - protein, 11 aa, Homo sapiens
  CDR3 for beta chain variable domain of TCR clone 236156 (TRBV7-9, TRBJ2-3)
CASSPPDTQYF

SEQ ID NO: 472313 - protein, 13 aa, Homo sapiens
  CDR3 for alpha chain variable domain of TCR clone 236157 (TRAV21, TRAJ26)
CAVLDNYGQDFVF

SEQ ID NO: 472314 - protein, 16 aa, Homo sapiens
  CDR3 for beta chain variable domain of TCR clone 236157 (TRBV29-1, TRBJ2-2)
CSVETRASGNTGELFF

SEQ ID NO: 472315 - protein, 14 aa, Homo sapiens
  CDR3 for alpha chain variable domain of TCR clone 236158 (TRAV13-1, TRAJ44)
CAAKGTGTASKLTF

SEQ ID NO: 472316 - protein, 16 aa, Homo sapiens
  CDR3 for beta chain variable domain of TCR clone 236158 (TRBV7-9, TRBJ2-6)
CASSLKGPLRANDLTF

SEQ ID NO: 472317 - protein, 18 aa, Homo sapiens
  CDR3 for alpha chain variable domain of TCR clone 236159 (TRAV16, TRAJ52)
CALSGVDAGGTSCGKLTF

SEQ ID NO: 472318 - protein, 15 aa, Homo sapiens
  CDR3 for beta chain variable domain of TCR clone 236159 (TRBV11-3, TRBJ2-3)
CASSAGTVVTNTQYF

SEQ ID NO: 472319 - protein, 13 aa, Homo sapiens
  CDR3 for alpha chain variable domain of TCR clone 236160 (TRAV27, TRAJ45)
CRSSGGGSDGLTF

SEQ ID NO: 472320 - protein, 13 aa, Homo sapiens
  CDR3 for beta chain variable domain of TCR clone 236160 (TRBV11-2, TRBJ2-5)
CASSSTGEETQYF

SEQ ID NO: 472321 - protein, 15 aa, Homo sapiens
  CDR3 for alpha chain variable domain of TCR clone 236161 (TRAV12-2, TRAJ53)
CAVNGGRGSTYKLTF

SEQ ID NO: 472322 - protein, 16 aa, Homo sapiens
  CDR3 for beta chain variable domain of TCR clone 236161 (TRBV7-3, TRBJ2-3)
CASSLSGYRPEDTQYF

SEQ ID NO: 472323 - protein, 14 aa, Homo sapiens
  CDR3 for alpha chain variable domain of TCR clone 236162 (TRAV17, TRAJ49)
CATDARDTGNQFYF

SEQ ID NO: 472324 - protein, 12 aa, Homo sapiens
  CDR3 for beta chain variable domain of TCR clone 236162 (TRBV7-9, TRBJ1-1)
CASSVVRGEAFF

SEQ ID NO: 472325 - protein, 15 aa, Homo sapiens
  CDR3 for alpha chain variable domain of TCR clone 236163 (TRAV17, TRAJ6)
CDTDLPSGGSYIPTF

SEQ ID NO: 472326 - protein, 16 aa, Homo sapiens
  CDR3 for beta chain variable domain of TCR clone 236163 (TRBV4-1, TRBJ2-7)
CASSQDPTGYSYEQYF

SEQ ID NO: 472327 - protein, 13 aa, Homo sapiens
  CDR3 for alpha chain variable domain of TCR clone 236164 (TRAV27, TRAJ45)
CRSSGGGADGLTF

SEQ ID NO: 472328 - protein, 12 aa, Homo sapiens
  CDR3 for beta chain variable domain of TCR clone 236164 (TRBV7-8, TRBJ2-7)
CASSLGDREQYF

SEQ ID NO: 472329 - protein, 13 aa, Homo sapiens
  CDR3 for alpha chain variable domain of TCR clone 236165 (TRAV17, TRAJ54)
CAAGIQGAQKLVF

SEQ ID NO: 472330 - protein, 14 aa, Homo sapiens
  CDR3 for beta chain variable domain of TCR clone 236165 (TRBV11-2, TRBJ1-2)
CASSLGTANYGYTS

SEQ ID NO: 472331 - protein, 14 aa, Homo sapiens
  CDR3 for alpha chain variable domain of TCR clone 236166 (TRAV13-1, TRAJ44)
CAAKATGTASKLTF

SEQ ID NO: 472332 - protein, 14 aa, Homo sapiens
  CDR3 for beta chain variable domain of TCR clone 236166 (TRBV10-2, TRBJ1-3)
CASRPPAAENTIYF

SEQ ID NO: 472333 - protein, 15 aa, Homo sapiens
  CDR3 for alpha chain variable domain of TCR clone 236167 (TRAV27, TRAJ38)
CAGRFNAGNNRKLLW

SEQ ID NO: 472334 - protein, 13 aa, Homo sapiens
  CDR3 for beta chain variable domain of TCR clone 236167 (TRBV12-5, TRBJ2-3)
CASQNRGTETQYF

SEQ ID NO: 472335 - protein, 13 aa, Homo sapiens
  CDR3 for alpha chain variable domain of TCR clone 236168 (TRAV3, TRAJ27)
CAVRPLGAGKSTC

SEQ ID NO: 472336 - protein, 15 aa, Homo sapiens
  CDR3 for beta chain variable domain of TCR clone 236168 (TRBV9, TRBJ1-6)
CASSVAGTGDSPLHF

SEQ ID NO: 472337 - protein, 16 aa, Homo sapiens
  CDR3 for alpha chain variable domain of TCR clone 236169 (TRAV1-2, TRAJ10)
CAVRGLLTGGGNKLTF

SEQ ID NO: 472338 - protein, 20 aa, Homo sapiens
  CDR3 for beta chain variable domain of TCR clone 236169 (TRBV7-8, TRBJ2-2)
CASSHLFPGPTIHITGELFF

SEQ ID NO: 472339 - protein, 11 aa, Homo sapiens
  CDR3 for alpha chain variable domain of TCR clone 236170 (TRAV2, TRAJ13)
CASGGYQKVTF

SEQ ID NO: 472340 - protein, 15 aa, Homo sapiens
  CDR3 for beta chain variable domain of TCR clone 236170 (TRBV7-2, TRBJ2-1)
CASRKTGSSYNERFF

SEQ ID NO: 472341 - protein, 12 aa, Homo sapiens
  CDR3 for alpha chain variable domain of TCR clone 236171 (TRAV12-3, TRAJ3)
CAIDSSACKIIF

SEQ ID NO: 472342 - protein, 17 aa, Homo sapiens
  CDR3 for beta chain variable domain of TCR clone 236171 (TRBV7-9, TRBJ2-3)
CASSLEEAGAYPDTQYF

SEQ ID NO: 472343 - protein, 14 aa, Homo sapiens
  CDR3 for alpha chain variable domain of TCR clone 236172 (TRAV12-2, TRAJ5)
CAVNRSTGRRALTF

SEQ ID NO: 472344 - protein, 15 aa, Homo sapiens
  CDR3 for beta chain variable domain of TCR clone 236172 (TRBV10-3, TRBJ1-3)
CAISDSQGAGNTIYF

SEQ ID NO: 472345 - protein, 14 aa, Homo sapiens
  CDR3 for alpha chain variable domain of TCR clone 236173 (TRAV1-2, TRAJ16)
CAVNRFSDGQKLLI

SEQ ID NO: 472346 - protein, 14 aa, Homo sapiens
  CDR3 for beta chain variable domain of TCR clone 236173 (TRBV7-2, TRBJ2-5)
CASSPLGQSETQYF

SEQ ID NO: 472347 - protein, 15 aa, Homo sapiens
  CDR3 for alpha chain variable domain of TCR clone 236174 (TRAV12-2, TRAJ50)
CAVNGLETSSGKVTF

SEQ ID NO: 472348 - protein, 13 aa, Homo sapiens
  CDR3 for beta chain variable domain of TCR clone 236174 (TRBV7-7, TRBJ2-5)
CASSRSGQETQYF

SEQ ID NO: 472349 - protein, 17 aa, Homo sapiens
  CDR3 for alpha chain variable domain of TCR clone 236175 (TRAV3, TRAJ6)
CAVRDGPRAGGGSIPTF

SEQ ID NO: 472350 - protein, 14 aa, Homo sapiens
  CDR3 for beta chain variable domain of TCR clone 236175 (TRBV7-2, TRBJ2-7)
CASSPKTSFYEQYF

SEQ ID NO: 472351 - protein, 12 aa, Homo sapiens
  CDR3 for alpha chain variable domain of TCR clone 236176 (TRAV8-4, TRAJ43)
CAVSVNNNDMRF

SEQ ID NO: 472352 - protein, 21 aa, Homo sapiens
  CDR3 for beta chain variable domain of TCR clone 236176 (TRBV11-2, TRBJ1-2)
LRTRPCISVPAAWTANYRYTF

SEQ ID NO: 472353 - protein, 14 aa, Homo sapiens
  CDR3 for alpha chain variable domain of TCR clone 236177 (TRAV6, TRAJ17)
CAQDIEAAGNKLTF

SEQ ID NO: 472354 - protein, 17 aa, Homo sapiens
  CDR3 for beta chain variable domain of TCR clone 236177 (TRBV2, TRBJ1-5)
CASSVGTGMRGYQPQHF

SEQ ID NO: 472355 - protein, 12 aa, Homo sapiens
  CDR3 for alpha chain variable domain of TCR clone 236178 (TRAV2, TRAJ29)
CAVDSGSTPLVF

SEQ ID NO: 472356 - protein, 14 aa, Homo sapiens
  CDR3 for beta chain variable domain of TCR clone 236178 (TRBV7-8, TRBJ2-7)
CASSLRGSSYEQYF

SEQ ID NO: 472357 - protein, 18 aa, Homo sapiens
  CDR3 for alpha chain variable domain of TCR clone 236179 (TRAV21, TRAJ52)
CAVRPSPAGGTSYGNLTF

SEQ ID NO: 472358 - protein, 14 aa, Homo sapiens
  CDR3 for beta chain variable domain of TCR clone 236179 (TRBV4-1, TRBJ2-2)
CASSHAVNTGELFF

SEQ ID NO: 472359 - protein, 14 aa, Homo sapiens
  CDR3 for alpha chain variable domain of TCR clone 236180 (TRAV30, TRAJ33)
CGTVAPRSNYQLIW

SEQ ID NO: 472360 - protein, 18 aa, Homo sapiens
  CDR3 for beta chain variable domain of TCR clone 236180 (TRBV11-2, TRBJ2-3)
CARSLGGASRGAPNTQYF

SEQ ID NO: 472361 - protein, 13 aa, Homo sapiens
  CDR3 for alpha chain variable domain of TCR clone 236181 (TRAV26-1, TRAJ48)
CIVRVVGDEKLTF

SEQ ID NO: 472362 - protein, 16 aa, Homo sapiens
  CDR3 for beta chain variable domain of TCR clone 236181 (TRBV12-5, TRBJ2-5)
CASSPRTSGNQETQYF

SEQ ID NO: 472363 - protein, 15 aa, Homo sapiens
  CDR3 for alpha chain variable domain of TCR clone 236182 (TRAV1-2, TRAJ12)
CADARWMDSSYKLIF

SEQ ID NO: 472364 - protein, 11 aa, Homo sapiens
  CDR3 for beta chain variable domain of TCR clone 236182 (TRBV29-1, TRBJ2-5)
CSEDRAGTQYF

SEQ ID NO: 472365 - protein, 15 aa, Homo sapiens
  CDR3 for alpha chain variable domain of TCR clone 236183 (TRAV26-1, TRAJ29)
CIVRVEGAGNTPLVF

SEQ ID NO: 472366 - protein, 15 aa, Homo sapiens
  CDR3 for beta chain variable domain of TCR clone 236183 (TRBV7-9, TRBJ1-5)
CASSQGHKPNQPQHF

SEQ ID NO: 472367 - protein, 12 aa, Homo sapiens
  CDR3 for alpha chain variable domain of TCR clone 236184 (TRAV6, TRAJ9)
CALHTGGSKTIF

SEQ ID NO: 472368 - protein, 14 aa, Homo sapiens
  CDR3 for beta chain variable domain of TCR clone 236184 (TRBV7-9, TRBJ2-1)
CASSQGQAEAEQFF

SEQ ID NO: 472369 - protein, 11 aa, Homo sapiens
  CDR3 for alpha chain variable domain of TCR clone 236185 (TRAV2, TRAJ13)
CAAGGYQKVTF

SEQ ID NO: 472370 - protein, 13 aa, Homo sapiens
  CDR3 for beta chain variable domain of TCR clone 236185 (TRBV9, TRBJ2-3)
CASSVGGRDTQYF

SEQ ID NO: 472371 - protein, 23 aa, Homo sapiens
  CDR3 for alpha chain variable domain of TCR clone 236186 (TRAV12-2, TRAJ43)
SLLIRDSQPSDTATYLSAFDMRF

SEQ ID NO: 472372 - protein, 18 aa, Homo sapiens
  CDR3 for beta chain variable domain of TCR clone 236186 (TRBV20-1, TRBJ2-3)
CSASGLAGGPGTTDTQYF

SEQ ID NO: 472373 - protein, 13 aa, Homo sapiens
  CDR3 for alpha chain variable domain of TCR clone 236187 (TRAV8-2, TRAJ21)
CVVSSYNFNKFYF

SEQ ID NO: 472374 - protein, 15 aa, Homo sapiens
  CDR3 for beta chain variable domain of TCR clone 236187 (TRBV2, TRBJ2-5)
CASSSSVAGGETQYF

SEQ ID NO: 472375 - protein, 14 aa, Homo sapiens
  CDR3 for alpha chain variable domain of TCR clone 236188 (TRAV12-2, TRAJ40)
CAVKIPSGTYKYIF

SEQ ID NO: 472376 - protein, 13 aa, Homo sapiens
  CDR3 for beta chain variable domain of TCR clone 236188 (TRBV27, TRBJ1-1)
CASSLSIGAEAFF

SEQ ID NO: 472377 - protein, 12 aa, Homo sapiens
  CDR3 for alpha chain variable domain of TCR clone 236189 (TRAV8-3, TRAJ41)
CAVALFGYALNF

SEQ ID NO: 472378 - protein, 15 aa, Homo sapiens
  CDR3 for beta chain variable domain of TCR clone 236189 (TRBV11-2, TRBJ2-1)
CASSKNRGLIYEQFF

SEQ ID NO: 472379 - protein, 14 aa, Homo sapiens
  CDR3 for alpha chain variable domain of TCR clone 236190 (TRAV38-1, TRAJ45)
CASHSGGGADGLTF

SEQ ID NO: 472380 - protein, 12 aa, Homo sapiens
  CDR3 for beta chain variable domain of TCR clone 236190 (TRBV9, TRBJ2-2)
CASSAYTGELFF

SEQ ID NO: 472381 - protein, 14 aa, Homo sapiens
  CDR3 for alpha chain variable domain of TCR clone 236191 (TRAV13-1, TRAJ39)
CAASEGNAGNMLTF

SEQ ID NO: 472382 - protein, 13 aa, Homo sapiens
  CDR3 for beta chain variable domain of TCR clone 236191 (TRBV7-9, TRBJ2-2)
CASSLEPTGELFF

SEQ ID NO: 472383 - protein, 14 aa, Homo sapiens
  CDR3 for alpha chain variable domain of TCR clone 236192 (TRAV12-1, TRAJ38)
CGELKAGNNRKLIW

SEQ ID NO: 472384 - protein, 15 aa, Homo sapiens
  CDR3 for beta chain variable domain of TCR clone 236192 (TRBV18, TRBJ2-1)
CASSPPGASYNEQFF

SEQ ID NO: 472385 - protein, 14 aa, Homo sapiens
  CDR3 for alpha chain variable domain of TCR clone 236193 (TRAV35, TRAJ50)
CAGNRKTSYDKVIF

SEQ ID NO: 472386 - protein, 13 aa, Homo sapiens
  CDR3 for beta chain variable domain of TCR clone 236193 (TRBV7-7, TRBJ2-3)
CASSLSRADTQYF

SEQ ID NO: 472387 - protein, 16 aa, Homo sapiens
  CDR3 for alpha chain variable domain of TCR clone 236194 (TRAV26-2, TRAJ48)
CILRPPVNFGKEKLTF

SEQ ID NO: 472388 - protein, 15 aa, Homo sapiens
  CDR3 for beta chain variable domain of TCR clone 236194 (TRBV20-1, TRBJ2-3)
CSARVEGTYTDTQYF

SEQ ID NO: 472389 - protein, 13 aa, Homo sapiens
  CDR3 for alpha chain variable domain of TCR clone 236195 (TRAV1-1, TRAJ13)
CAVNSGGYQKVTF

SEQ ID NO: 472390 - protein, 12 aa, Homo sapiens
  CDR3 for beta chain variable domain of TCR clone 236195 (TRBV28, TRBJ2-1)
CASSVQINEQFC

SEQ ID NO: 472391 - protein, 18 aa, Homo sapiens
  CDR3 for alpha chain variable domain of TCR clone 236196 (TRAV17, TRAJ45)
CATSPDLYSGGGADGLTF

SEQ ID NO: 472392 - protein, 15 aa, Homo sapiens
  CDR3 for beta chain variable domain of TCR clone 236196 (TRBV11-2, TRBJ2-1)
CASSKNRGLIYEKFF

SEQ ID NO: 472393 - protein, 11 aa, Homo sapiens
  CDR3 for alpha chain variable domain of TCR clone 236197 (TRAV21, TRAJ34)
CAHYNTNKLIF

SEQ ID NO: 472394 - protein, 15 aa, Homo sapiens
  CDR3 for beta chain variable domain of TCR clone 236197 (TRBV7-9, TRBJ2-1)
CASSLGWGRANEQFF

SEQ ID NO: 472395 - protein, 17 aa, Homo sapiens
  CDR3 for alpha chain variable domain of TCR clone 236198 (TRAV8-4, TRAJ45)
CAVSEGGSGGGADGLTF

SEQ ID NO: 472396 - protein, 15 aa, Homo sapiens
  CDR3 for beta chain variable domain of TCR clone 236198 (TRBV7-3, TRBJ2-2)
CASSETGQGTGELVF

SEQ ID NO: 472397 - protein, 16 aa, Homo sapiens
  CDR3 for alpha chain variable domain of TCR clone 236199 (TRAV21, TRAJ33)
CAVSPASMDSNYQLIW

SEQ ID NO: 472398 - protein, 17 aa, Homo sapiens
  CDR3 for beta chain variable domain of TCR clone 236199 (TRBV2, TRBJ1-4)
CASSTRELTRGEEKLFF

SEQ ID NO: 472399 - protein, 13 aa, Homo sapiens
  CDR3 for alpha chain variable domain of TCR clone 236200 (TRAV8-3, TRAJ43)
CAVVPDNNNDMRF

SEQ ID NO: 472400 - protein, 14 aa, Homo sapiens
  CDR3 for beta chain variable domain of TCR clone 236200 (TRBV19, TRBJ2-1)
CASPTCVLSGEQFF

SEQ ID NO: 472401 - protein, 13 aa, Homo sapiens
  CDR3 for alpha chain variable domain of TCR clone 236201 (TRAV13-1, TRAJ11)
CAAVLAGYSTLTF

SEQ ID NO: 472402 - protein, 17 aa, Homo sapiens
  CDR3 for beta chain variable domain of TCR clone 236201 (TRBV25-1, TRBJ2-7)
CDSSDARVVFSSYEQYF

SEQ ID NO: 472403 - protein, 14 aa, Homo sapiens
  CDR3 for alpha chain variable domain of TCR clone 236202 (TRAV26-1, TRAJ44)
CISPPPGTASKLTF

SEQ ID NO: 472404 - protein, 16 aa, Homo sapiens
  CDR3 for beta chain variable domain of TCR clone 236202 (TRBV19, TRBJ2-1)
CASSKAGPSSYNEQFF

SEQ ID NO: 472405 - protein, 16 aa, Homo sapiens
  CDR3 for alpha chain variable domain of TCR clone 236203 (TRAV3, TRAJ10)
CAVRDMRAGGGNRPTF

SEQ ID NO: 472406 - protein, 14 aa, Homo sapiens
  CDR3 for beta chain variable domain of TCR clone 236203 (TRBV25-1, TRBJ1-1)
CASTHLGGNTEAFF

SEQ ID NO: 472407 - protein, 12 aa, Homo sapiens
  CDR3 for alpha chain variable domain of TCR clone 236204 (TRAV1-1, TRAJ8)
CAGGTGFQKLVF

SEQ ID NO: 472408 - protein, 11 aa, Homo sapiens
  CDR3 for beta chain variable domain of TCR clone 236204 (TRBV10-3, TRBJ2-7)
CAISEGLEQYF

SEQ ID NO: 472409 - protein, 15 aa, Homo sapiens
  CDR3 for alpha chain variable domain of TCR clone 236205 (TRAV14/DV4, TRAJ12)
CAMREERDSSYKSIF

SEQ ID NO: 472410 - protein, 16 aa, Homo sapiens
  CDR3 for beta chain variable domain of TCR clone 236205 (TRBV9, TRBJ1-2)
CASSVELGGTGDGYTF

SEQ ID NO: 472411 - protein, 12 aa, Homo sapiens
  CDR3 for alpha chain variable domain of TCR clone 236206 (TRAV12-2, TRAJ9)
CAVFTGGFKTIF

SEQ ID NO: 472412 - protein, 12 aa, Homo sapiens
  CDR3 for beta chain variable domain of TCR clone 236206 (TRBV2, TRBJ2-1)
CAYGPPGNEQFF

SEQ ID NO: 472413 - protein, 11 aa, Homo sapiens
  CDR3 for alpha chain variable domain of TCR clone 236207 (TRAV12-2, TRAJ21)
CAVRNFNKFYF

SEQ ID NO: 472414 - protein, 14 aa, Homo sapiens
  CDR3 for beta chain variable domain of TCR clone 236207 (TRBV19, TRBJ2-1)
CASPTFVLSGEQFF

SEQ ID NO: 472415 - protein, 16 aa, Homo sapiens
  CDR3 for alpha chain variable domain of TCR clone 236208 (TRAV16, TRAJ54)
CALSPPLIQGAQKLVF

SEQ ID NO: 472416 - protein, 14 aa, Homo sapiens
  CDR3 for beta chain variable domain of TCR clone 236208 (TRBV18, TRBJ2-7)
CASSPRGGTYEQYF

SEQ ID NO: 472417 - protein, 15 aa, Homo sapiens
  CDR3 for alpha chain variable domain of TCR clone 236209 (TRAV1-1, TRAJ22)
CAVRVSSSSARQQTF

SEQ ID NO: 472418 - protein, 15 aa, Homo sapiens
  CDR3 for beta chain variable domain of TCR clone 236209 (TRBV20-1, TRBJ2-7)
CSARDRVSGMDEQYF

SEQ ID NO: 472419 - protein, 16 aa, Homo sapiens
  CDR3 for alpha chain variable domain of TCR clone 236210 (TRAV26-1, )
CIDIQNPDPAVYHLRD

SEQ ID NO: 472420 - protein, 19 aa, Homo sapiens
  CDR3 for beta chain variable domain of TCR clone 236210 (TRBV19, TRBJ2-5)
CASSIGQVTDFFLGETQYF

SEQ ID NO: 472421 - protein, 14 aa, Homo sapiens
  CDR3 for alpha chain variable domain of TCR clone 236211 (TRAV1-1, TRAJ21)
CAVRTSRNFNKFYF

SEQ ID NO: 472422 - protein, 16 aa, Homo sapiens
  CDR3 for beta chain variable domain of TCR clone 236211 (TRBV20-1, TRBJ2-7)
CSASTSGRLSSYEQYF

SEQ ID NO: 472423 - protein, 13 aa, Homo sapiens
  CDR3 for alpha chain variable domain of TCR clone 236212 (TRAV27, TRAJ45)
CRSSGGGADGLTF

SEQ ID NO: 472424 - protein, 17 aa, Homo sapiens
  CDR3 for beta chain variable domain of TCR clone 236212 (TRBV10-3, TRBJ2-4)
CTSVPSVNKGSKNIQYV

SEQ ID NO: 472425 - protein, 13 aa, Homo sapiens
  CDR3 for alpha chain variable domain of TCR clone 236213 (TRAV13-1, TRAJ21)
CAASIYNFNKFYF

SEQ ID NO: 472426 - protein, 20 aa, Homo sapiens
  CDR3 for beta chain variable domain of TCR clone 236213 (TRBV19, TRBJ2-1)
CASSISRTVTSTRLNNEQFF

SEQ ID NO: 472427 - protein, 14 aa, Homo sapiens
  CDR3 for alpha chain variable domain of TCR clone 236214 (TRAV26-1, TRAJ38)
CIADNAGNNRKLIL

SEQ ID NO: 472428 - protein, 13 aa, Homo sapiens
  CDR3 for beta chain variable domain of TCR clone 236214 (TRBV20-1, TRBJ1-1)
CSARGGGNTEAIF

SEQ ID NO: 472429 - protein, 12 aa, Homo sapiens
  CDR3 for alpha chain variable domain of TCR clone 236215 (TRAV1-1, TRAJ30)
CAVRGRDDKIIF

SEQ ID NO: 472430 - protein, 16 aa, Homo sapiens
  CDR3 for beta chain variable domain of TCR clone 236215 (TRBV12-4, TRBJ2-7)
CASSLIGGTGTYEQYF

SEQ ID NO: 472431 - protein, 12 aa, Homo sapiens
  CDR3 for alpha chain variable domain of TCR clone 236216 (TRAV2, TRAJ9)
CAVGAGGFKTIF

SEQ ID NO: 472432 - protein, 16 aa, Homo sapiens
  CDR3 for beta chain variable domain of TCR clone 236216 (TRBV7-2, TRBJ2-6)
CASSERRASGANVLTF

SEQ ID NO: 472433 - protein, 14 aa, Homo sapiens
  CDR3 for alpha chain variable domain of TCR clone 236217 (TRAV2, TRAJ41)
CAVGASNSGYALNF

SEQ ID NO: 472434 - protein, 13 aa, Homo sapiens
  CDR3 for beta chain variable domain of TCR clone 236217 (TRBV4-1, TRBJ2-1)
CASSQEVQYEQFF

SEQ ID NO: 472435 - protein, 14 aa, Homo sapiens
  CDR3 for alpha chain variable domain of TCR clone 236218 (TRAV1-2, TRAJ8)
CAVREDTGFQKLVF

SEQ ID NO: 472436 - protein, 14 aa, Homo sapiens
  CDR3 for beta chain variable domain of TCR clone 236218 (TRBV15, TRBJ2-3)
CATRSGTSTDTQYV

SEQ ID NO: 472437 - protein, 14 aa, Homo sapiens
  CDR3 for alpha chain variable domain of TCR clone 236219 (TRAV27, TRAJ49)
CAGRPEGTGNQSYF

SEQ ID NO: 472438 - protein, 15 aa, Homo sapiens
  CDR3 for beta chain variable domain of TCR clone 236219 (TRBV19, TRBJ2-1)
CASSIQATSYNEQFF

SEQ ID NO: 472439 - protein, 12 aa, Homo sapiens
  CDR3 for alpha chain variable domain of TCR clone 236220 (TRAV17, TRAJ49)
CATVTTGNQFYF

SEQ ID NO: 472440 - protein, 15 aa, Homo sapiens
  CDR3 for beta chain variable domain of TCR clone 236220 (TRBV9, TRBJ1-6)
CASSVAGTGDSPLHF

SEQ ID NO: 472441 - protein, 14 aa, Homo sapiens
  CDR3 for alpha chain variable domain of TCR clone 236221 (TRAV1-2, TRAJ8)
CAVREDTGFQKLVF

SEQ ID NO: 472442 - protein, 16 aa, Homo sapiens
  CDR3 for beta chain variable domain of TCR clone 236221 (TRBV7-6, TRBJ2-3)
CASSARTSRGTDTQYF

SEQ ID NO: 472443 - protein, 10 aa, Homo sapiens
  CDR3 for alpha chain variable domain of TCR clone 236222 (TRAV23/DV6, TRAJ57)
CAASSTLSQG

SEQ ID NO: 472444 - protein, 14 aa, Homo sapiens
  CDR3 for beta chain variable domain of TCR clone 236222 (TRBV7-9, TRBJ2-7)
CASSSRLVLHEQYF

SEQ ID NO: 472445 - protein, 11 aa, Homo sapiens
  CDR3 for alpha chain variable domain of TCR clone 236223 (TRAV21, TRAJ23)
CAPQRSGKLIF

SEQ ID NO: 472446 - protein, 14 aa, Homo sapiens
  CDR3 for beta chain variable domain of TCR clone 236223 (TRBV12-4, TRBJ1-1)
CASTWTGHDTEAFF

SEQ ID NO: 472447 - protein, 12 aa, Homo sapiens
  CDR3 for alpha chain variable domain of TCR clone 236224 (TRAV1-2, TRAJ29)
CAVPSGNTPLVF

SEQ ID NO: 472448 - protein, 17 aa, Homo sapiens
  CDR3 for beta chain variable domain of TCR clone 236224 (TRBV28, TRBJ2-5)
CASSTPEGDALQETQYF

SEQ ID NO: 472449 - protein, 14 aa, Homo sapiens
  CDR3 for alpha chain variable domain of TCR clone 236225 (TRAV2, TRAJ41)
CAAGTSNSGYALNF

SEQ ID NO: 472450 - protein, 13 aa, Homo sapiens
  CDR3 for beta chain variable domain of TCR clone 236225 (TRBV4-1, TRBJ2-1)
CASSQEVQYEQFF

SEQ ID NO: 472451 - protein, 16 aa, Homo sapiens
  CDR3 for alpha chain variable domain of TCR clone 236226 (TRAV4, TRAJ37)
CLVGSFGSSNTGKLIF

SEQ ID NO: 472452 - protein, 15 aa, Homo sapiens
  CDR3 for beta chain variable domain of TCR clone 236226 (TRBV12-4, TRBJ2-3)
CASSLAERPTDTQYL

SEQ ID NO: 472453 - protein, 13 aa, Homo sapiens
  CDR3 for alpha chain variable domain of TCR clone 236227 (TRAV2, TRAJ40)
CVVVTSGTYKYIL

SEQ ID NO: 472454 - protein, 14 aa, Homo sapiens
  CDR3 for beta chain variable domain of TCR clone 236227 (TRBV19, TRBJ2-1)
CASPTFVLSGEQFF

SEQ ID NO: 472455 - protein, 11 aa, Homo sapiens
  CDR3 for alpha chain variable domain of TCR clone 236228 (TRAV12-1, TRAJ15)
CVVKAGTALIF

SEQ ID NO: 472456 - protein, 16 aa, Homo sapiens
  CDR3 for beta chain variable domain of TCR clone 236228 (TRBV28, TRBJ2-1)
CASSSRVRDSYNEQFF

SEQ ID NO: 472457 - protein, 12 aa, Homo sapiens
  CDR3 for alpha chain variable domain of TCR clone 236229 (TRAV13-1, TRAJ9)
CAAETGGFKTIF

SEQ ID NO: 472458 - protein, 13 aa, Homo sapiens
  CDR3 for beta chain variable domain of TCR clone 236229 (TRBV28, TRBJ2-2)
CASSYPGKGELFF

SEQ ID NO: 472459 - protein, 14 aa, Homo sapiens
  CDR3 for alpha chain variable domain of TCR clone 236230 (TRAV1-2, TRAJ16)
CAVNRFSDGQKLLF

SEQ ID NO: 472460 - protein, 14 aa, Homo sapiens
  CDR3 for beta chain variable domain of TCR clone 236230 (TRBV25-1, TRBJ1-1)
CASTHLGGNTEDFF

SEQ ID NO: 472461 - protein, 16 aa, Homo sapiens
  CDR3 for alpha chain variable domain of TCR clone 236231 (TRAV29/DV5, TRAJ39)
CAASLLFNNAGNMLTF

SEQ ID NO: 472462 - protein, 16 aa, Homo sapiens
  CDR3 for beta chain variable domain of TCR clone 236231 (TRBV19, TRBJ2-6)
CASSMSGLSGASVLTF

SEQ ID NO: 472463 - protein, 14 aa, Homo sapiens
  CDR3 for alpha chain variable domain of TCR clone 236232 (TRAV3, TRAJ27)
CAVRDDTNAGKSTF

SEQ ID NO: 472464 - protein, 15 aa, Homo sapiens
  CDR3 for beta chain variable domain of TCR clone 236232 (TRBV5-8, TRBJ1-5)
CASSLVRTGNQPQHF

SEQ ID NO: 472465 - protein, 14 aa, Homo sapiens
  CDR3 for alpha chain variable domain of TCR clone 236233 (TRAV2, TRAJ9)
CAVEDRSGGCKTIF

SEQ ID NO: 472466 - protein, 18 aa, Homo sapiens
  CDR3 for beta chain variable domain of TCR clone 236233 (TRBV20-1, TRBJ2-5)
CSQTGDSGRLGGKETQYF

SEQ ID NO: 472467 - protein, 14 aa, Homo sapiens
  CDR3 for alpha chain variable domain of TCR clone 236234 (TRAV13-2, TRAJ17)
RAENSKAAGNKLTF

SEQ ID NO: 472468 - protein, 11 aa, Homo sapiens
  CDR3 for beta chain variable domain of TCR clone 236234 (TRBV6-3, TRBJ2-3)
CATGQADTQYF

SEQ ID NO: 472469 - protein, 14 aa, Homo sapiens
  CDR3 for alpha chain variable domain of TCR clone 236235 (TRAV1-2, TRAJ16)
CAVNRFSDGQKLLF

SEQ ID NO: 472470 - protein, 19 aa, Homo sapiens
  CDR3 for beta chain variable domain of TCR clone 236235 (TRBV25-1, TRBJ2-2)
CAILVYRVHRGRKTGELFF

SEQ ID NO: 472471 - protein, 15 aa, Homo sapiens
  CDR3 for alpha chain variable domain of TCR clone 236236 (TRAV13-1, TRAJ17)
CAASIERAAGNKLTF

SEQ ID NO: 472472 - protein, 15 aa, Homo sapiens
  CDR3 for beta chain variable domain of TCR clone 236236 (TRBV13, TRBJ1-5)
CASSRTGRGHQHQHF

SEQ ID NO: 472473 - protein, 14 aa, Homo sapiens
  CDR3 for alpha chain variable domain of TCR clone 236237 (TRAV12-2, TRAJ9)
CAVNALEGGFKTIF

SEQ ID NO: 472474 - protein, 17 aa, Homo sapiens
  CDR3 for beta chain variable domain of TCR clone 236237 (TRBV7-8, TRBJ2-6)
CASSAGTGGAGANVLTF

SEQ ID NO: 472475 - protein, 13 aa, Homo sapiens
  CDR3 for alpha chain variable domain of TCR clone 236238 (TRAV3, TRAJ30)
CAVRDRGDGKIIF

SEQ ID NO: 472476 - protein, 16 aa, Homo sapiens
  CDR3 for beta chain variable domain of TCR clone 236238 (TRBV7-3, TRBJ2-2)
CASSLKRGTLSGELFF

SEQ ID NO: 472477 - protein, 16 aa, Homo sapiens
  CDR3 for alpha chain variable domain of TCR clone 236239 (TRAV16, TRAJ52)
CALSAAGGTSYGKLTF

SEQ ID NO: 472478 - protein, 15 aa, Homo sapiens
  CDR3 for beta chain variable domain of TCR clone 236239 (TRBV7-9, TRBJ2-3)
CASSSSGGATDTQYF

SEQ ID NO: 472479 - protein, 17 aa, Homo sapiens
  CDR3 for alpha chain variable domain of TCR clone 236240 (TRAV29/DV5, TRAJ40)
CTASVIYTTSGTYKYIF

SEQ ID NO: 472480 - protein, 13 aa, Homo sapiens
  CDR3 for beta chain variable domain of TCR clone 236240 (TRBV6-1, TRBJ2-1)
CASSHDRNNEQFF

SEQ ID NO: 472481 - protein, 13 aa, Homo sapiens
  CDR3 for alpha chain variable domain of TCR clone 236241 (TRAV13-1, TRAJ5)
CAARVTGRRALTF

SEQ ID NO: 472482 - protein, 16 aa, Homo sapiens
  CDR3 for beta chain variable domain of TCR clone 236241 (TRBV19, TRBJ2-2)
CASRSPGTGATGELFF

SEQ ID NO: 472483 - protein, 16 aa, Homo sapiens
  CDR3 for alpha chain variable domain of TCR clone 236242 (TRAV21, TRAJ37)
CAVRTAGSSNTGKLIF

SEQ ID NO: 472484 - protein, 13 aa, Homo sapiens
  CDR3 for beta chain variable domain of TCR clone 236242 (TRBV7-9, TRBJ2-5)
CASLPAGRGTQYF

SEQ ID NO: 472485 - protein, 13 aa, Homo sapiens
  CDR3 for alpha chain variable domain of TCR clone 236243 (TRAV35, TRAJ13)
CAGRAGGYQKVTF

SEQ ID NO: 472486 - protein, 15 aa, Homo sapiens
  CDR3 for beta chain variable domain of TCR clone 236243 (TRBV19, TRBJ1-1)
CASTSGQIQNTEAFF

SEQ ID NO: 472487 - protein, 16 aa, Homo sapiens
  CDR3 for alpha chain variable domain of TCR clone 236244 (TRAV30, TRAJ24)
CGTEIVYADSWGKFQF

SEQ ID NO: 472488 - protein, 12 aa, Homo sapiens
  CDR3 for beta chain variable domain of TCR clone 236244 (TRBV11-2, TRBJ2-2)
CASSLPTGELFF

SEQ ID NO: 472489 - protein, 14 aa, Homo sapiens
  CDR3 for alpha chain variable domain of TCR clone 236245 (TRAV26-1, TRAJ26)
CIVRATFLGQNFVF

SEQ ID NO: 472490 - protein, 12 aa, Homo sapiens
  CDR3 for beta chain variable domain of TCR clone 236245 (TRBV12-4, TRBJ2-3)
CASSSTTDTQYF

SEQ ID NO: 472491 - protein, 14 aa, Homo sapiens
  CDR3 for alpha chain variable domain of TCR clone 236246 (TRAV8-3, TRAJ6)
CALGASGGSYIPTF

SEQ ID NO: 472492 - protein, 17 aa, Homo sapiens
  CDR3 for beta chain variable domain of TCR clone 236246 (TRBV18, TRBJ2-2)
CASSPSDPWQNTGELFF

SEQ ID NO: 472493 - protein, 14 aa, Homo sapiens
  CDR3 for alpha chain variable domain of TCR clone 236247 (TRAV38-1, TRAJ40)
CALSPTSGTYKNIF

SEQ ID NO: 472494 - protein, 14 aa, Homo sapiens
  CDR3 for beta chain variable domain of TCR clone 236247 (TRBV25-1, TRBJ1-1)
CASTHLGGNTEAFF

SEQ ID NO: 472495 - protein, 14 aa, Homo sapiens
  CDR3 for alpha chain variable domain of TCR clone 236248 (TRAV14/DV4, TRAJ9)
CAMRESTGGFKTIF

SEQ ID NO: 472496 - protein, 15 aa, Homo sapiens
  CDR3 for beta chain variable domain of TCR clone 236248 (TRBV19, TRBJ1-6)
CASSTQGAVGSPLHF

SEQ ID NO: 472497 - protein, 18 aa, Homo sapiens
  CDR3 for alpha chain variable domain of TCR clone 236249 (TRAV21, TRAJ52)
CAVRPSPAGGTSYGKLPF

SEQ ID NO: 472498 - protein, 14 aa, Homo sapiens
  CDR3 for beta chain variable domain of TCR clone 236249 (TRBV11-2, TRBJ1-5)
CASSLDRGRQPQHF

SEQ ID NO: 472499 - protein, 14 aa, Homo sapiens
  CDR3 for alpha chain variable domain of TCR clone 236250 (TRAV20, TRAJ42)
CAVQAGGSQGNLIF

SEQ ID NO: 472500 - protein, 12 aa, Homo sapiens
  CDR3 for beta chain variable domain of TCR clone 236250 (TRBV11-2, TRBJ2-5)
CASSPPAETQYF

SEQ ID NO: 472501 - protein, 18 aa, Homo sapiens
  CDR3 for alpha chain variable domain of TCR clone 236251 (TRAV21, TRAJ13)
CAVPRSFWGLPESYLCNW

SEQ ID NO: 472502 - protein, 15 aa, Homo sapiens
  CDR3 for beta chain variable domain of TCR clone 236251 (TRBV27, TRBJ2-5)
CASSLYPRGGETQYF

SEQ ID NO: 472503 - protein, 14 aa, Homo sapiens
  CDR3 for alpha chain variable domain of TCR clone 236252 (TRAV1-2, TRAJ8)
CAVREDTGFQKLGF

SEQ ID NO: 472504 - protein, 16 aa, Homo sapiens
  CDR3 for beta chain variable domain of TCR clone 236252 (TRBV29-1, TRBJ2-6)
CSVEDITYSGANVLTF

SEQ ID NO: 472505 - protein, 15 aa, Homo sapiens
  CDR3 for alpha chain variable domain of TCR clone 236253 (TRAV2, TRAJ37)
CAVEDGSSNTGKLIF

SEQ ID NO: 472506 - protein, 13 aa, Homo sapiens
  CDR3 for beta chain variable domain of TCR clone 236253 (TRBV20-1, TRBJ1-6)
CSTFREGNSPLDF

SEQ ID NO: 472507 - protein, 15 aa, Homo sapiens
  CDR3 for alpha chain variable domain of TCR clone 236254 (TRAV27, TRAJ38)
CAAHRNAGNNRKLIW

SEQ ID NO: 472508 - protein, 13 aa, Homo sapiens
  CDR3 for beta chain variable domain of TCR clone 236254 (TRBV7-9, TRBJ1-2)
CASSLKQNYGYTF

SEQ ID NO: 472509 - protein, 13 aa, Homo sapiens
  CDR3 for alpha chain variable domain of TCR clone 236255 (TRAV20, TRAJ48)
CAVQGVGNEKLTF

SEQ ID NO: 472510 - protein, 14 aa, Homo sapiens
  CDR3 for beta chain variable domain of TCR clone 236255 (TRBV27, TRBJ2-7)
CASSFRDWPYEQYF

SEQ ID NO: 472511 - protein, 12 aa, Homo sapiens
  CDR3 for alpha chain variable domain of TCR clone 236256 (TRAV26-1, TRAJ53)
CIEGGSNYKLTF

SEQ ID NO: 472512 - protein, 14 aa, Homo sapiens
  CDR3 for beta chain variable domain of TCR clone 236256 (TRBV7-2, TRBJ2-7)
CASSPKTSFYEQYF

SEQ ID NO: 472513 - protein, 11 aa, Homo sapiens
  CDR3 for alpha chain variable domain of TCR clone 236257 (TRAV2, TRAJ33)
CSVESNYQLIW

SEQ ID NO: 472514 - protein, 13 aa, Homo sapiens
  CDR3 for beta chain variable domain of TCR clone 236257 (TRBV7-3, TRBJ2-5)
CASSFRGGETQYF

SEQ ID NO: 472515 - protein, 15 aa, Homo sapiens
  CDR3 for alpha chain variable domain of TCR clone 236258 (TRAV12-3, TRAJ6)
CAMSATTGGSYIPKF

SEQ ID NO: 472516 - protein, 16 aa, Homo sapiens
  CDR3 for beta chain variable domain of TCR clone 236258 (TRBV20-1, TRBJ1-2)
RSASMGQGVANYGYTF

SEQ ID NO: 472517 - protein, 14 aa, Homo sapiens
  CDR3 for alpha chain variable domain of TCR clone 236259 (TRAV12-1, TRAJ3)
CVVNPGSSASKILF

SEQ ID NO: 472518 - protein, 14 aa, Homo sapiens
  CDR3 for beta chain variable domain of TCR clone 236259 (TRBV20-1, TRBJ2-3)
CSARGGTSTDTQYF

SEQ ID NO: 472519 - protein, 14 aa, Homo sapiens
  CDR3 for alpha chain variable domain of TCR clone 236260 (TRAV35, TRAJ40)
CAGSTTSGTYKYIF

SEQ ID NO: 472520 - protein, 16 aa, Homo sapiens
  CDR3 for beta chain variable domain of TCR clone 236260 (TRBV10-3, TRBJ2-1)
CAISGVGDGGGGEQFF

SEQ ID NO: 472521 - protein, 13 aa, Homo sapiens
  CDR3 for alpha chain variable domain of TCR clone 236261 (TRAV3, TRAJ15)
CAVRDQAGTALIF

SEQ ID NO: 472522 - protein, 12 aa, Homo sapiens
  CDR3 for beta chain variable domain of TCR clone 236261 (TRBV6-3, TRBJ2-7)
CASGYNPLEQYF

SEQ ID NO: 472523 - protein, 14 aa, Homo sapiens
  CDR3 for alpha chain variable domain of TCR clone 236262 (TRAV12-1, TRAJ9)
CVVNRRTGGFKTIF

SEQ ID NO: 472524 - protein, 16 aa, Homo sapiens
  CDR3 for beta chain variable domain of TCR clone 236262 (TRBV4-1, TRBJ2-3)
CASSQSTSGADDTQYF

SEQ ID NO: 472525 - protein, 12 aa, Homo sapiens
  CDR3 for alpha chain variable domain of TCR clone 236263 (TRAV1-1, TRAJ8)
CAGGIGFQKLVF

SEQ ID NO: 472526 - protein, 13 aa, Homo sapiens
  CDR3 for beta chain variable domain of TCR clone 236263 (TRBV20-1, TRBJ2-5)
CSAATELQETQYF

SEQ ID NO: 472527 - protein, 15 aa, Homo sapiens
  CDR3 for alpha chain variable domain of TCR clone 236264 (TRAV23/DV6, TRAJ45)
CAASSAGGGADGLNF

SEQ ID NO: 472528 - protein, 16 aa, Homo sapiens
  CDR3 for beta chain variable domain of TCR clone 236264 (TRBV6-6, TRBJ2-5)
CASSYDWAGGSETQYF

SEQ ID NO: 472529 - protein, 15 aa, Homo sapiens
  CDR3 for alpha chain variable domain of TCR clone 236265 (TRAV19, TRAJ53)
CALSSSGGSNYKLTF

SEQ ID NO: 472530 - protein, 12 aa, Homo sapiens
  CDR3 for beta chain variable domain of TCR clone 236265 (TRBV14, TRBJ2-7)
CASSRLKGEQYF

SEQ ID NO: 472531 - protein, 14 aa, Homo sapiens
  CDR3 for alpha chain variable domain of TCR clone 236266 (TRAV35, TRAJ22)
CAGLRPGSARQLTF

SEQ ID NO: 472532 - protein, 15 aa, Homo sapiens
  CDR3 for beta chain variable domain of TCR clone 236266 (TRBV7-2, TRBJ2-5)
CASSFLRGGEETQYF

SEQ ID NO: 472533 - protein, 15 aa, Homo sapiens
  CDR3 for alpha chain variable domain of TCR clone 236267 (TRAV8-3, TRAJ42)
CAGTNYGGSQGNLIF

SEQ ID NO: 472534 - protein, 15 aa, Homo sapiens
  CDR3 for beta chain variable domain of TCR clone 236267 (TRBV11-3, TRBJ2-3)
CASLKDGREGDTQYF

SEQ ID NO: 472535 - protein, 18 aa, Homo sapiens
  CDR3 for alpha chain variable domain of TCR clone 236268 (TRAV26-2, TRAJ54)
CILRDVEGGIQGAQKLVF

SEQ ID NO: 472536 - protein, 13 aa, Homo sapiens
  CDR3 for beta chain variable domain of TCR clone 236268 (TRBV7-9, TRBJ1-2)
CASSLKQNYGYTF

SEQ ID NO: 472537 - protein, 16 aa, Homo sapiens
  CDR3 for alpha chain variable domain of TCR clone 236269 (TRAV3, TRAJ37)
CAVRGKGSGNTGKLIF

SEQ ID NO: 472538 - protein, 11 aa, Homo sapiens
  CDR3 for beta chain variable domain of TCR clone 236269 (TRBV12-4, TRBJ2-3)
CASTATDTQYF

SEQ ID NO: 472539 - protein, 18 aa, Homo sapiens
  CDR3 for alpha chain variable domain of TCR clone 236270 (TRAV26-1, TRAJ22)
CIVKVALISSGSARQLTF

SEQ ID NO: 472540 - protein, 13 aa, Homo sapiens
  CDR3 for beta chain variable domain of TCR clone 236270 (TRBV13, TRBJ2-5)
CASSPEVGETQYF

SEQ ID NO: 472541 - protein, 12 aa, Homo sapiens
  CDR3 for alpha chain variable domain of TCR clone 236271 (TRAV13-2, TRAJ47)
CAGRGIWKPTGL

SEQ ID NO: 472542 - protein, 15 aa, Homo sapiens
  CDR3 for beta chain variable domain of TCR clone 236271 (TRBV20-1, TRBJ2-3)
CSASSGGPRTDTQYF

SEQ ID NO: 472543 - protein, 14 aa, Homo sapiens
  CDR3 for alpha chain variable domain of TCR clone 236272 (TRAV12-1, TRAJ23)
CVVIVYNPGGKLIF

SEQ ID NO: 472544 - protein, 13 aa, Homo sapiens
  CDR3 for beta chain variable domain of TCR clone 236272 (TRBV11-2, TRBJ2-5)
CASSFSSQETQYF

SEQ ID NO: 472545 - protein, 15 aa, Homo sapiens
  CDR3 for alpha chain variable domain of TCR clone 236273 (TRAV8-3, TRAJ45)
CASSYSGGGADGLTF

SEQ ID NO: 472546 - protein, 12 aa, Homo sapiens
  CDR3 for beta chain variable domain of TCR clone 236273 (TRBV10-3, TRBJ2-7)
CASTSGTYEQYF

SEQ ID NO: 472547 - protein, 12 aa, Homo sapiens
  CDR3 for alpha chain variable domain of TCR clone 236274 (TRAV21, TRAJ58)
CAAETSGSRLTF

SEQ ID NO: 472548 - protein, 13 aa, Homo sapiens
  CDR3 for beta chain variable domain of TCR clone 236274 (TRBV7-9, TRBJ2-7)
CASSFAGAYEQYF

SEQ ID NO: 472549 - protein, 18 aa, Homo sapiens
  CDR3 for alpha chain variable domain of TCR clone 236275 (TRAV21, TRAJ52)
CAVRPSPAGGTSNGKLTF

SEQ ID NO: 472550 - protein, 13 aa, Homo sapiens
  CDR3 for beta chain variable domain of TCR clone 236275 (TRBV20-1, TRBJ1-1)
CSARVGGNTEAFF

SEQ ID NO: 472551 - protein, 16 aa, Homo sapiens
  CDR3 for alpha chain variable domain of TCR clone 236276 (TRAV17, TRAJ36)
CATVSLNWGKQPLLWD

SEQ ID NO: 472552 - protein, 13 aa, Homo sapiens
  CDR3 for beta chain variable domain of TCR clone 236276 (TRBV7-2, TRBJ2-2)
CASSLAVTGELFF

SEQ ID NO: 472553 - protein, 16 aa, Homo sapiens
  CDR3 for alpha chain variable domain of TCR clone 236277 (TRAV3, TRAJ28)
CAVLPRSGAGSYQLTF

SEQ ID NO: 472554 - protein, 13 aa, Homo sapiens
  CDR3 for beta chain variable domain of TCR clone 236277 (TRBV12-4, TRBJ1-2)
CASSLRQGKGYTF

SEQ ID NO: 472555 - protein, 12 aa, Homo sapiens
  CDR3 for alpha chain variable domain of TCR clone 236278 (TRAV13-2, TRAJ23)
CAERHRGGKLIF

SEQ ID NO: 472556 - protein, 14 aa, Homo sapiens
  CDR3 for beta chain variable domain of TCR clone 236278 (TRBV20-1, TRBJ2-4)
CSASGRVGENIQYV

SEQ ID NO: 472557 - protein, 12 aa, Homo sapiens
  CDR3 for alpha chain variable domain of TCR clone 236279 (TRAV27, TRAJ35)
CAGADFGNVLHC

SEQ ID NO: 472558 - protein, 14 aa, Homo sapiens
  CDR3 for beta chain variable domain of TCR clone 236279 (TRBV7-8, TRBJ1-2)
CASSPDSLSYGYTF

SEQ ID NO: 472559 - protein, 12 aa, Homo sapiens
  CDR3 for alpha chain variable domain of TCR clone 236280 (TRAV12-3, TRAJ20)
CAMVRGDYKLSF

SEQ ID NO: 472560 - protein, 15 aa, Homo sapiens
  CDR3 for beta chain variable domain of TCR clone 236280 (TRBV5-1, TRBJ2-5)
CASSFKGGDQETQYF

SEQ ID NO: 472561 - protein, 16 aa, Homo sapiens
  CDR3 for alpha chain variable domain of TCR clone 236281 (TRAV30, TRAJ24)
CGTEIVDADSWGKFQF

SEQ ID NO: 472562 - protein, 17 aa, Homo sapiens
  CDR3 for beta chain variable domain of TCR clone 236281 (TRBV7-9, TRBJ2-3)
CASSLEEAGAYPDTQYF

SEQ ID NO: 472563 - protein, 17 aa, Homo sapiens
  CDR3 for alpha chain variable domain of TCR clone 236282 (TRAV3, TRAJ6)
CAARDGPRAGGSYIPTF

SEQ ID NO: 472564 - protein, 16 aa, Homo sapiens
  CDR3 for beta chain variable domain of TCR clone 236282 (TRBV5-1, TRBJ1-3)
CASSPWAPSSGNTIYF

SEQ ID NO: 472565 - protein, 16 aa, Homo sapiens
  CDR3 for alpha chain variable domain of TCR clone 236283 (TRAV30, TRAJ24)
CGTEIVDADSWGKFQF

SEQ ID NO: 472566 - protein, 16 aa, Homo sapiens
  CDR3 for beta chain variable domain of TCR clone 236283 (TRBV13, TRBJ2-5)
CASSRGAGIRQETQYF

SEQ ID NO: 472567 - protein, 15 aa, Homo sapiens
  CDR3 for alpha chain variable domain of TCR clone 236284 (TRAV2, TRAJ9)
CAVEDRGTGGFKTIF

SEQ ID NO: 472568 - protein, 13 aa, Homo sapiens
  CDR3 for beta chain variable domain of TCR clone 236284 (TRBV4-1, TRBJ2-1)
CASSQAGGDEQFF

SEQ ID NO: 472569 - protein, 14 aa, Homo sapiens
  CDR3 for alpha chain variable domain of TCR clone 236285 (TRAV26-1, TRAJ38)
CIADNAGNNRKLNW

SEQ ID NO: 472570 - protein, 14 aa, Homo sapiens
  CDR3 for beta chain variable domain of TCR clone 236285 (TRBV20-1, TRBJ1-1)
CSAQTRIGGTEAFF

SEQ ID NO: 472571 - protein, 14 aa, Homo sapiens
  CDR3 for alpha chain variable domain of TCR clone 236286 (TRAV12-3, TRAJ58)
CAMSTETSGSRLTC

SEQ ID NO: 472572 - protein, 13 aa, Homo sapiens
  CDR3 for beta chain variable domain of TCR clone 236286 (TRBV27, TRBJ2-3)
CASSWGRTDTQYF

SEQ ID NO: 472573 - protein, 14 aa, Homo sapiens
  CDR3 for alpha chain variable domain of TCR clone 236287 (TRAV17, TRAJ16)
CATADFSDCQKLLF

SEQ ID NO: 472574 - protein, 15 aa, Homo sapiens
  CDR3 for beta chain variable domain of TCR clone 236287 (TRBV18, TRBJ2-1)
CASSPPSASYSEQFF

SEQ ID NO: 472575 - protein, 12 aa, Homo sapiens
  CDR3 for alpha chain variable domain of TCR clone 236288 (TRAV17, TRAJ12)
CATLRSSYKLIF

SEQ ID NO: 472576 - protein, 16 aa, Homo sapiens
  CDR3 for beta chain variable domain of TCR clone 236288 (TRBV28, TRBJ2-7)
CASSLFFVTGGPEQYF

SEQ ID NO: 472577 - protein, 13 aa, Homo sapiens
  CDR3 for alpha chain variable domain of TCR clone 236289 (TRAV12-1, TRAJ16)
CVVNGPDGQKRLF

SEQ ID NO: 472578 - protein, 13 aa, Homo sapiens
  CDR3 for beta chain variable domain of TCR clone 236289 (TRBV2, TRBJ1-1)
CARNPTGGFHAFF

SEQ ID NO: 472579 - protein, 11 aa, Homo sapiens
  CDR3 for alpha chain variable domain of TCR clone 236290 (TRAV30, TRAJ58)
CGILSGSRLTF

SEQ ID NO: 472580 - protein, 16 aa, Homo sapiens
  CDR3 for beta chain variable domain of TCR clone 236290 (TRBV6-1, TRBJ2-1)
CASILRQGSSYNEQFF

SEQ ID NO: 472581 - protein, 11 aa, Homo sapiens
  CDR3 for alpha chain variable domain of TCR clone 236291 (TRAV3, TRAJ21)
CAVGNFNKFYF

SEQ ID NO: 472582 - protein, 15 aa, Homo sapiens
  CDR3 for beta chain variable domain of TCR clone 236291 (TRBV4-1, TRBJ2-3)
CASSRRQGIPDTQYF

SEQ ID NO: 472583 - protein, 14 aa, Homo sapiens
  CDR3 for alpha chain variable domain of TCR clone 236292 (TRAV12-1, TRAJ17)
CVVNYKAAGNKLTF

SEQ ID NO: 472584 - protein, 16 aa, Homo sapiens
  CDR3 for beta chain variable domain of TCR clone 236292 (TRBV12-4, TRBJ1-5)
CASSRPVRGSNQPQHF

SEQ ID NO: 472585 - protein, 15 aa, Homo sapiens
  CDR3 for alpha chain variable domain of TCR clone 236293 (TRAV1-1, TRAJ5)
CAVRHMDTGRRALTF

SEQ ID NO: 472586 - protein, 14 aa, Homo sapiens
  CDR3 for beta chain variable domain of TCR clone 236293 (TRBV12-5, TRBJ2-5)
CASGSRTHQETQYF

SEQ ID NO: 472587 - protein, 13 aa, Homo sapiens
  CDR3 for alpha chain variable domain of TCR clone 236294 (TRAV16, TRAJ27)
CALSGGNAGKSTF

SEQ ID NO: 472588 - protein, 13 aa, Homo sapiens
  CDR3 for beta chain variable domain of TCR clone 236294 (TRBV12-4, TRBJ2-1)
CASSFHSGSEQFF

SEQ ID NO: 472589 - protein, 13 aa, Homo sapiens
  CDR3 for alpha chain variable domain of TCR clone 236295 (TRAV27, TRAJ45)
CRSPGGGADGLTF

SEQ ID NO: 472590 - protein, 17 aa, Homo sapiens
  CDR3 for beta chain variable domain of TCR clone 236295 (TRBV11-2, TRBJ2-1)
CASSLYPPGVAYNEQFF

SEQ ID NO: 472591 - protein, 13 aa, Homo sapiens
  CDR3 for alpha chain variable domain of TCR clone 236296 (TRAV13-2, TRAJ13)
CAEGPGGYQKVTF

SEQ ID NO: 472592 - protein, 14 aa, Homo sapiens
  CDR3 for beta chain variable domain of TCR clone 236296 (TRBV23-1, TRBJ2-5)
CASSFLRSQETQYV

SEQ ID NO: 472593 - protein, 11 aa, Homo sapiens
  CDR3 for alpha chain variable domain of TCR clone 236297 (TRAV16, TRAJ33)
CALHSNYQLIW

SEQ ID NO: 472594 - protein, 15 aa, Homo sapiens
  CDR3 for beta chain variable domain of TCR clone 236297 (TRBV4-1, TRBJ2-7)
CASNQQGQGFDEQYF

SEQ ID NO: 472595 - protein, 11 aa, Homo sapiens
  CDR3 for alpha chain variable domain of TCR clone 236298 (TRAV13-2, TRAJ23)
CAESPRGKLIF

SEQ ID NO: 472596 - protein, 15 aa, Homo sapiens
  CDR3 for beta chain variable domain of TCR clone 236298 (TRBV28, TRBJ2-1)
CASSGLAEVDNGQFF

SEQ ID NO: 472597 - protein, 11 aa, Homo sapiens
  CDR3 for alpha chain variable domain of TCR clone 236299 (TRAV8-3, TRAJ23)
CAVVYRGKLIF

SEQ ID NO: 472598 - protein, 19 aa, Homo sapiens
  CDR3 for beta chain variable domain of TCR clone 236299 (TRBV7-2, TRBJ2-3)
CASSFLSRNWGGGTDTQYF

SEQ ID NO: 472599 - protein, 19 aa, Homo sapiens
  CDR3 for alpha chain variable domain of TCR clone 236300 (TRAV13-1, TRAJ52)
CAASTYQNAGGTSYGKLTF

SEQ ID NO: 472600 - protein, 13 aa, Homo sapiens
  CDR3 for beta chain variable domain of TCR clone 236300 (TRBV15, TRBJ2-7)
CATSTTGHYEQYF

SEQ ID NO: 472601 - protein, 12 aa, Homo sapiens
  CDR3 for alpha chain variable domain of TCR clone 236301 (TRAV8-3, TRAJ20)
CAVGGGDHKLSF

SEQ ID NO: 472602 - protein, 14 aa, Homo sapiens
  CDR3 for beta chain variable domain of TCR clone 236301 (TRBV5-1, TRBJ2-7)
CASSRGESLYEQYF

SEQ ID NO: 472603 - protein, 13 aa, Homo sapiens
  CDR3 for alpha chain variable domain of TCR clone 236302 (TRAV3, TRAJ35)
CGMRKSFGNVLHC

SEQ ID NO: 472604 - protein, 14 aa, Homo sapiens
  CDR3 for beta chain variable domain of TCR clone 236302 (TRBV6-5, TRBJ1-4)
CASSYRAAEEKLFC

SEQ ID NO: 472605 - protein, 16 aa, Homo sapiens
  CDR3 for alpha chain variable domain of TCR clone 236303 (TRAV30, TRAJ48)
CGTEIKSNFGNEKLTC

SEQ ID NO: 472606 - protein, 17 aa, Homo sapiens
  CDR3 for beta chain variable domain of TCR clone 236303 (TRBV27, TRBJ2-1)
CASSSERGGQSADEQFF

SEQ ID NO: 472607 - protein, 12 aa, Homo sapiens
  CDR3 for alpha chain variable domain of TCR clone 236304 (TRAV16, TRAJ26)
CVLRSYGQNFVL

SEQ ID NO: 472608 - protein, 14 aa, Homo sapiens
  CDR3 for beta chain variable domain of TCR clone 236304 (TRBV10-3, TRBJ2-1)
CAISSDLAYNEQFF

SEQ ID NO: 472609 - protein, 12 aa, Homo sapiens
  CDR3 for alpha chain variable domain of TCR clone 236305 (TRAV1-1, TRAJ8)
CAGGTGFQKLVF

SEQ ID NO: 472610 - protein, 17 aa, Homo sapiens
  CDR3 for beta chain variable domain of TCR clone 236305 (TRBV28, TRBJ2-5)
CASSTPEGDALQETQYF

SEQ ID NO: 472611 - protein, 13 aa, Homo sapiens
  CDR3 for alpha chain variable domain of TCR clone 236306 (TRAV26-2, TRAJ43)
CILRAVNNNDMRF

SEQ ID NO: 472612 - protein, 16 aa, Homo sapiens
  CDR3 for beta chain variable domain of TCR clone 236306 (TRBV4-3, TRBJ2-1)
CASSPALDRGVNEQFF

SEQ ID NO: 472613 - protein, 15 aa, Homo sapiens
  CDR3 for alpha chain variable domain of TCR clone 236307 (TRAV8-3, TRAJ23)
CAVGDRYNQGGKLIF

SEQ ID NO: 472614 - protein, 15 aa, Homo sapiens
  CDR3 for beta chain variable domain of TCR clone 236307 (TRBV29-1, TRBJ2-5)
EDSSIYLCSAGTRYF

SEQ ID NO: 472615 - protein, 12 aa, Homo sapiens
  CDR3 for alpha chain variable domain of TCR clone 236308 (TRAV36/DV7, TRAJ54)
CAVVRGAQKLVF

SEQ ID NO: 472616 - protein, 13 aa, Homo sapiens
  CDR3 for beta chain variable domain of TCR clone 236308 (TRBV20-1, TRBJ1-1)
CSARSGGNTEAFF

SEQ ID NO: 472617 - protein, 14 aa, Homo sapiens
  CDR3 for alpha chain variable domain of TCR clone 236309 (TRAV3, TRAJ8)
CAVSLNTSFQKLVF

SEQ ID NO: 472618 - protein, 14 aa, Homo sapiens
  CDR3 for beta chain variable domain of TCR clone 236309 (TRBV6-6, TRBJ1-5)
CASVDSGFNQPQHF

SEQ ID NO: 472619 - protein, 14 aa, Homo sapiens
  CDR3 for alpha chain variable domain of TCR clone 236310 (TRAV12-2, TRAJ13)
CAVKKTGGYQKVTF

SEQ ID NO: 472620 - protein, 14 aa, Homo sapiens
  CDR3 for beta chain variable domain of TCR clone 236310 (TRBV2, TRBJ2-5)
CASSEVLAQETQYF

SEQ ID NO: 472621 - protein, 13 aa, Homo sapiens
  CDR3 for alpha chain variable domain of TCR clone 236311 (TRAV13-1, TRAJ21)
CAASIYNFNKFYF

SEQ ID NO: 472622 - protein, 16 aa, Homo sapiens
  CDR3 for beta chain variable domain of TCR clone 236311 (TRBV12-4, TRBJ2-7)
CASSLIGGTGTYEQYF

SEQ ID NO: 472623 - protein, 12 aa, Homo sapiens
  CDR3 for alpha chain variable domain of TCR clone 236312 (TRAV8-3, TRAJ40)
CAVTSGTYIYIF

SEQ ID NO: 472624 - protein, 14 aa, Homo sapiens
  CDR3 for beta chain variable domain of TCR clone 236312 (TRBV12-4, TRBJ2-3)
CASSGQGSTDTQYF

SEQ ID NO: 472625 - protein, 12 aa, Homo sapiens
  CDR3 for alpha chain variable domain of TCR clone 236313 (TRAV2, TRAJ26)
CAGSPGRLWSEF

SEQ ID NO: 472626 - protein, 16 aa, Homo sapiens
  CDR3 for beta chain variable domain of TCR clone 236313 (TRBV13, TRBJ2-2)
CASGPRTGEHTGELFF

SEQ ID NO: 472627 - protein, 18 aa, Homo sapiens
  CDR3 for alpha chain variable domain of TCR clone 236314 (TRAV21, TRAJ52)
CAVRPSPAGGTSYGKLPF

SEQ ID NO: 472628 - protein, 16 aa, Homo sapiens
  CDR3 for beta chain variable domain of TCR clone 236314 (TRBV13, TRBJ2-2)
CASSPRTGEHTGELFF

SEQ ID NO: 472629 - protein, 12 aa, Homo sapiens
  CDR3 for alpha chain variable domain of TCR clone 236315 (TRAV10, TRAJ43)
CVVVRVGNDMRF

SEQ ID NO: 472630 - protein, 12 aa, Homo sapiens
  CDR3 for beta chain variable domain of TCR clone 236315 (TRBV11-2, TRBJ2-2)
CASSLGGGELFF

SEQ ID NO: 472631 - protein, 13 aa, Homo sapiens
  CDR3 for alpha chain variable domain of TCR clone 236316 (TRAV36/DV7, TRAJ49)
CAGDSNTGNQFYF

SEQ ID NO: 472632 - protein, 17 aa, Homo sapiens
  CDR3 for beta chain variable domain of TCR clone 236316 (TRBV24-1, TRBJ2-1)
CATSDVSTSGTYNEQFF

SEQ ID NO: 472633 - protein, 13 aa, Homo sapiens
  CDR3 for alpha chain variable domain of TCR clone 236317 (TRAV9-2, TRAJ49)
CALRHFTGNQFYF

SEQ ID NO: 472634 - protein, 16 aa, Homo sapiens
  CDR3 for beta chain variable domain of TCR clone 236317 (TRBV7-9, TRBJ2-1)
CASSTRLGSSYNEQFF

SEQ ID NO: 472635 - protein, 13 aa, Homo sapiens
  CDR3 for alpha chain variable domain of TCR clone 236318 (TRAV23/DV6, TRAJ58)
CAASEIGGSRLTF

SEQ ID NO: 472636 - protein, 15 aa, Homo sapiens
  CDR3 for beta chain variable domain of TCR clone 236318 (TRBV19, TRBJ1-1)
CASTSRQIQNTEAFF

SEQ ID NO: 472637 - protein, 14 aa, Homo sapiens
  CDR3 for alpha chain variable domain of TCR clone 236319 (TRAV13-1, TRAJ35)
CAASKGGFGNVPHG

SEQ ID NO: 472638 - protein, 13 aa, Homo sapiens
  CDR3 for beta chain variable domain of TCR clone 236319 (TRBV7-3, TRBJ1-1)
CASSQDWGAEAFF

SEQ ID NO: 472639 - protein, 12 aa, Homo sapiens
  CDR3 for alpha chain variable domain of TCR clone 236320 (TRAV13-1, TRAJ9)
CASHTGGFKTIF

SEQ ID NO: 472640 - protein, 18 aa, Homo sapiens
  CDR3 for beta chain variable domain of TCR clone 236320 (TRBV11-2, TRBJ2-3)
CAISLGGASRGAPNTQYF

SEQ ID NO: 472641 - protein, 17 aa, Homo sapiens
  CDR3 for alpha chain variable domain of TCR clone 236321 (TRAV3, TRAJ38)
CAVRDCLNAGNNRKLIW

SEQ ID NO: 472642 - protein, 15 aa, Homo sapiens
  CDR3 for beta chain variable domain of TCR clone 236321 (TRBV7-8, TRBJ2-1)
CASSLADSLYNEQFF

SEQ ID NO: 472643 - protein, 15 aa, Homo sapiens
  CDR3 for alpha chain variable domain of TCR clone 236322 (TRAV27, TRAJ33)
CAGADIMDSNYQLIW

SEQ ID NO: 472644 - protein, 13 aa, Homo sapiens
  CDR3 for beta chain variable domain of TCR clone 236322 (TRBV28, TRBJ1-2)
CASSLQERGGDTF

SEQ ID NO: 472645 - protein, 15 aa, Homo sapiens
  CDR3 for alpha chain variable domain of TCR clone 236323 (TRAV41, TRAJ32)
CAVRWPGGATNKLIF

SEQ ID NO: 472646 - protein, 11 aa, Homo sapiens
  CDR3 for beta chain variable domain of TCR clone 236323 (TRBV19, TRBJ1-1)
CASSIGSEAFF

SEQ ID NO: 472647 - protein, 12 aa, Homo sapiens
  CDR3 for alpha chain variable domain of TCR clone 236324 (TRAV29/DV5, TRAJ15)
CASNQAGPALLF

SEQ ID NO: 472648 - protein, 15 aa, Homo sapiens
  CDR3 for beta chain variable domain of TCR clone 236324 (TRBV11-2, TRBJ2-2)
CASSSDRVNAGELFF

SEQ ID NO: 472649 - protein, 13 aa, Homo sapiens
  CDR3 for alpha chain variable domain of TCR clone 236325 (TRAV3, TRAJ41)
CAVSSNSVYALNF

SEQ ID NO: 472650 - protein, 13 aa, Homo sapiens
  CDR3 for beta chain variable domain of TCR clone 236325 (TRBV20-1, TRBJ2-2)
CSALSGGAGELFF

SEQ ID NO: 472651 - protein, 16 aa, Homo sapiens
  CDR3 for alpha chain variable domain of TCR clone 236326 (TRAV3, TRAJ10)
CAVRDMRAGGGNKRTV

SEQ ID NO: 472652 - protein, 19 aa, Homo sapiens
  CDR3 for beta chain variable domain of TCR clone 236326 (TRBV6-3, TRBJ1-2)
CASSYSKGRTGPPNYGYTF

SEQ ID NO: 472653 - protein, 13 aa, Homo sapiens
  CDR3 for alpha chain variable domain of TCR clone 236327 (TRAV27, TRAJ42)
CAGARGSQANLIF

SEQ ID NO: 472654 - protein, 14 aa, Homo sapiens
  CDR3 for beta chain variable domain of TCR clone 236327 (TRBV20-1, TRBJ1-1)
CSAQTRIEGTEAFF

SEQ ID NO: 472655 - protein, 15 aa, Homo sapiens
  CDR3 for alpha chain variable domain of TCR clone 236328 (TRAV25, TRAJ52)
CAGTSGGTSYGKLTF

SEQ ID NO: 472656 - protein, 13 aa, Homo sapiens
  CDR3 for beta chain variable domain of TCR clone 236328 (TRBV12-4, TRBJ2-2)
CASSITGSGELFF

SEQ ID NO: 472657 - protein, 15 aa, Homo sapiens
  CDR3 for alpha chain variable domain of TCR clone 236329 (TRAV21, TRAJ45)
CAVSYSGGGADGLTF

SEQ ID NO: 472658 - protein, 13 aa, Homo sapiens
  CDR3 for beta chain variable domain of TCR clone 236329 (TRBV20-1, TRBJ2-5)
CSAATELKETQYF

SEQ ID NO: 472659 - protein, 15 aa, Homo sapiens
  CDR3 for alpha chain variable domain of TCR clone 236330 (TRAV27, TRAJ33)
CAGADIMDSNYQLIW

SEQ ID NO: 472660 - protein, 15 aa, Homo sapiens
  CDR3 for beta chain variable domain of TCR clone 236330 (TRBV7-2, TRBJ2-2)
CASSPTGANTGELFF

SEQ ID NO: 472661 - protein, 13 aa, Homo sapiens
  CDR3 for alpha chain variable domain of TCR clone 236331 (TRAV8-3, TRAJ21)
CAVGAYNFNKFYF

SEQ ID NO: 472662 - protein, 15 aa, Homo sapiens
  CDR3 for beta chain variable domain of TCR clone 236331 (TRBV9, TRBJ1-6)
CASSVAGTGDSPLHF

SEQ ID NO: 472663 - protein, 12 aa, Homo sapiens
  CDR3 for alpha chain variable domain of TCR clone 236332 (TRAV13-1, TRAJ27)
CAAHTNAGQSTF

SEQ ID NO: 472664 - protein, 15 aa, Homo sapiens
  CDR3 for beta chain variable domain of TCR clone 236332 (TRBV7-9, TRBJ1-6)
CASSSPGRGNSPLHF

SEQ ID NO: 472665 - protein, 14 aa, Homo sapiens
  CDR3 for alpha chain variable domain of TCR clone 236333 (TRAV12-2, TRAJ40)
CAVKIPSGTYKYIF

SEQ ID NO: 472666 - protein, 14 aa, Homo sapiens
  CDR3 for beta chain variable domain of TCR clone 236333 (TRBV20-1, TRBJ1-1)
CSAQTRVGGNEAFF

SEQ ID NO: 472667 - protein, 12 aa, Homo sapiens
  CDR3 for alpha chain variable domain of TCR clone 236334 (TRAV38-2/DV8, TRAJ48)
CDLLSGNEKLTF

SEQ ID NO: 472668 - protein, 15 aa, Homo sapiens
  CDR3 for beta chain variable domain of TCR clone 236334 (TRBV6-1, TRBJ2-1)
CASSELRGQYNEQFF

SEQ ID NO: 472669 - protein, 16 aa, Homo sapiens
  CDR3 for alpha chain variable domain of TCR clone 236335 (TRAV20, TRAJ16)
CAVQDKRFSDGQKLLF

SEQ ID NO: 472670 - protein, 14 aa, Homo sapiens
  CDR3 for beta chain variable domain of TCR clone 236335 (TRBV11-2, TRBJ2-7)
CASSLGAGAYEQYF

SEQ ID NO: 472671 - protein, 14 aa, Homo sapiens
  CDR3 for alpha chain variable domain of TCR clone 236336 (TRAV35, TRAJ40)
CAGSTTSGTYRYIF

SEQ ID NO: 472672 - protein, 13 aa, Homo sapiens
  CDR3 for beta chain variable domain of TCR clone 236336 (TRBV20-1, TRBJ1-6)
CSAPLGVGSPLHF

SEQ ID NO: 472673 - protein, 20 aa, Homo sapiens
  CDR3 for alpha chain variable domain of TCR clone 236337 (TRAV12-1, TRAJ9)
CVVHTGGFKTILEQEQDYLL

SEQ ID NO: 472674 - protein, 16 aa, Homo sapiens
  CDR3 for beta chain variable domain of TCR clone 236337 (TRBV6-1, TRBJ2-1)
CASSARLAGSYNEQFF

SEQ ID NO: 472675 - protein, 16 aa, Homo sapiens
  CDR3 for alpha chain variable domain of TCR clone 236338 (TRAV3, TRAJ37)
CSVRGKGSGNTGNLIF

SEQ ID NO: 472676 - protein, 15 aa, Homo sapiens
  CDR3 for beta chain variable domain of TCR clone 236338 (TRBV7-9, TRBJ1-6)
CASSSPGRGNSPLHF

SEQ ID NO: 472677 - protein, 14 aa, Homo sapiens
  CDR3 for alpha chain variable domain of TCR clone 236339 (TRAV8-2, TRAJ11)
CVVSEKSGYSTLTF

SEQ ID NO: 472678 - protein, 16 aa, Homo sapiens
  CDR3 for beta chain variable domain of TCR clone 236339 (TRBV28, TRBJ2-1)
CASSSPEYHRDNGQFF

SEQ ID NO: 472679 - protein, 18 aa, Homo sapiens
  CDR3 for alpha chain variable domain of TCR clone 236340 (TRAV26-1, TRAJ37)
CIVRVDMHGSSNTGKLIF

SEQ ID NO: 472680 - protein, 15 aa, Homo sapiens
  CDR3 for beta chain variable domain of TCR clone 236340 (TRBV20-1, TRBJ2-7)
CSARVLASPLYEQFF

SEQ ID NO: 472681 - protein, 14 aa, Homo sapiens
  CDR3 for alpha chain variable domain of TCR clone 236341 (TRAV2, TRAJ9)
CAVEDRSGGFKTIF

SEQ ID NO: 472682 - protein, 12 aa, Homo sapiens
  CDR3 for beta chain variable domain of TCR clone 236341 (TRBV19, TRBJ1-1)
CASSIGTEEAFF

SEQ ID NO: 472683 - protein, 14 aa, Homo sapiens
  CDR3 for alpha chain variable domain of TCR clone 236342 (TRAV26-1, TRAJ38)
CIADNAGNNRKLIW

SEQ ID NO: 472684 - protein, 16 aa, Homo sapiens
  CDR3 for beta chain variable domain of TCR clone 236342 (TRBV15, TRBJ1-1)
CHQQSGGADGDTEAFF

SEQ ID NO: 472685 - protein, 15 aa, Homo sapiens
  CDR3 for alpha chain variable domain of TCR clone 236343 (TRAV2, TRAJ37)
CAVVDGSSNTGKLIF

SEQ ID NO: 472686 - protein, 13 aa, Homo sapiens
  CDR3 for beta chain variable domain of TCR clone 236343 (TRBV20-1, TRBJ1-6)
CSTFREGNSPLHF

SEQ ID NO: 472687 - protein, 13 aa, Homo sapiens
  CDR3 for alpha chain variable domain of TCR clone 236344 (TRAV20, TRAJ29)
CAVQAVGNTPLVF

SEQ ID NO: 472688 - protein, 15 aa, Homo sapiens
  CDR3 for beta chain variable domain of TCR clone 236344 (TRBV10-2, TRBJ2-5)
CASRGSGGPQGTQYF

SEQ ID NO: 472689 - protein, 11 aa, Homo sapiens
  CDR3 for alpha chain variable domain of TCR clone 236345 (TRAV12-2, TRAJ36)
CAVDGANYLFF

SEQ ID NO: 472690 - protein, 13 aa, Homo sapiens
  CDR3 for beta chain variable domain of TCR clone 236345 (TRBV7-2, TRBJ2-7)
CASSSPSGSEQYF

SEQ ID NO: 472691 - protein, 13 aa, Homo sapiens
  CDR3 for alpha chain variable domain of TCR clone 236346 (TRAV36/DV7, TRAJ43)
CADVETITMTCAL

SEQ ID NO: 472692 - protein, 15 aa, Homo sapiens
  CDR3 for beta chain variable domain of TCR clone 236346 (TRBV19, TRBJ1-5)
CASSIVWADNQPQHF

SEQ ID NO: 472693 - protein, 12 aa, Homo sapiens
  CDR3 for alpha chain variable domain of TCR clone 236347 (TRAV21, TRAJ49)
CAVNDGGNQFYF

SEQ ID NO: 472694 - protein, 14 aa, Homo sapiens
  CDR3 for beta chain variable domain of TCR clone 236347 (TRBV6-1, TRBJ1-3)
CASVQGGGGNTMYF

SEQ ID NO: 472695 - protein, 16 aa, Homo sapiens
  CDR3 for alpha chain variable domain of TCR clone 236348 (TRAV21, TRAJ37)
CAVRTAGSSNTGKLIF

SEQ ID NO: 472696 - protein, 13 aa, Homo sapiens
  CDR3 for beta chain variable domain of TCR clone 236348 (TRBV7-9, TRBJ2-5)
CASLPSGRETQYL

SEQ ID NO: 472697 - protein, 15 aa, Homo sapiens
  CDR3 for alpha chain variable domain of TCR clone 236349 (TRAV23/DV6, TRAJ17)
CARGSCRQQANFRRR

SEQ ID NO: 472698 - protein, 14 aa, Homo sapiens
  CDR3 for beta chain variable domain of TCR clone 236349 (TRBV7-2, TRBJ1-2)
CASSQTGSTYGYTF

SEQ ID NO: 472699 - protein, 13 aa, Homo sapiens
  CDR3 for alpha chain variable domain of TCR clone 236350 (TRAV20, TRAJ26)
CAVPTSYGQNFVF

SEQ ID NO: 472700 - protein, 16 aa, Homo sapiens
  CDR3 for beta chain variable domain of TCR clone 236350 (TRBV28, TRBJ2-7)
CASSYPQGRDVYEQYF

SEQ ID NO: 472701 - protein, 12 aa, Homo sapiens
  CDR3 for alpha chain variable domain of TCR clone 236351 (TRAV29/DV5, TRAJ34)
CAARHNTDKLIF

SEQ ID NO: 472702 - protein, 17 aa, Homo sapiens
  CDR3 for beta chain variable domain of TCR clone 236351 (TRBV11-2, TRBJ2-1)
CASSLYPPGVEYNEQFF

SEQ ID NO: 472703 - protein, 14 aa, Homo sapiens
  CDR3 for alpha chain variable domain of TCR clone 236352 (TRAV17, TRAJ34)
CATDSLEGTDKLIF

SEQ ID NO: 472704 - protein, 13 aa, Homo sapiens
  CDR3 for beta chain variable domain of TCR clone 236352 (TRBV11-2, TRBJ2-7)
CSSSGTRPYEQYF

SEQ ID NO: 472705 - protein, 12 aa, Homo sapiens
  CDR3 for alpha chain variable domain of TCR clone 236353 (TRAV1-2, TRAJ26)
CAVRYYGQNFVF

SEQ ID NO: 472706 - protein, 15 aa, Homo sapiens
  CDR3 for beta chain variable domain of TCR clone 236353 (TRBV28, TRBJ2-1)
CVSSIIAGGRSEQFF

SEQ ID NO: 472707 - protein, 14 aa, Homo sapiens
  CDR3 for alpha chain variable domain of TCR clone 236354 (TRAV12-2, TRAJ15)
CAPHTGQAGTALIF

SEQ ID NO: 472708 - protein, 13 aa, Homo sapiens
  CDR3 for beta chain variable domain of TCR clone 236354 (TRBV10-3, TRBJ1-2)
CAISERDSYGYTF

SEQ ID NO: 472709 - protein, 16 aa, Homo sapiens
  CDR3 for alpha chain variable domain of TCR clone 236355 (TRAV16, TRAJ4)
CALSRRFSGGYNKLIF

SEQ ID NO: 472710 - protein, 12 aa, Homo sapiens
  CDR3 for beta chain variable domain of TCR clone 236355 (TRBV29-1, TRBJ2-3)
CSVTGGADTQYF

SEQ ID NO: 472711 - protein, 15 aa, Homo sapiens
  CDR3 for alpha chain variable domain of TCR clone 236356 (TRAV21, TRAJ32)
CAVNSYGGATNKLIF

SEQ ID NO: 472712 - protein, 18 aa, Homo sapiens
  CDR3 for beta chain variable domain of TCR clone 236356 (TRBV7-9, TRBJ2-1)
CASSSGLAEGSSYNEQFF

SEQ ID NO: 472713 - protein, 17 aa, Homo sapiens
  CDR3 for alpha chain variable domain of TCR clone 236357 (TRAV35, TRAJ28)
CAGLQVYSGAGSFQLTF

SEQ ID NO: 472714 - protein, 15 aa, Homo sapiens
  CDR3 for beta chain variable domain of TCR clone 236357 (TRBV2, TRBJ1-2)
CASSEIGGANYGYTF

SEQ ID NO: 472715 - protein, 14 aa, Homo sapiens
  CDR3 for alpha chain variable domain of TCR clone 236358 (TRAV13-1, TRAJ44)
CAAKATGTASKLTF

SEQ ID NO: 472716 - protein, 14 aa, Homo sapiens
  CDR3 for beta chain variable domain of TCR clone 236358 (TRBV11-3, TRBJ2-7)
CASSPDRNTYEQYF

SEQ ID NO: 472717 - protein, 10 aa, Homo sapiens
  CDR3 for alpha chain variable domain of TCR clone 236359 (TRAV8-2, TRAJ29)
CTGGNTPLVF

SEQ ID NO: 472718 - protein, 16 aa, Homo sapiens
  CDR3 for beta chain variable domain of TCR clone 236359 (TRBV13, TRBJ2-2)
CASSPRTGEHTGELFF

SEQ ID NO: 472719 - protein, 14 aa, Homo sapiens
  CDR3 for alpha chain variable domain of TCR clone 236360 (TRAV8-1, TRAJ3)
CAVGLYSSASKIIF

SEQ ID NO: 472720 - protein, 14 aa, Homo sapiens
  CDR3 for beta chain variable domain of TCR clone 236360 (TRBV7-9, TRBJ2-2)
CASSGLADTGELFF

SEQ ID NO: 472721 - protein, 14 aa, Homo sapiens
  CDR3 for alpha chain variable domain of TCR clone 236361 (TRAV8-3, TRAJ6)
CAVGATGGSYIPTF

SEQ ID NO: 472722 - protein, 13 aa, Homo sapiens
  CDR3 for beta chain variable domain of TCR clone 236361 (TRBV19, TRBJ2-7)
CASSPRQSYEQYF

SEQ ID NO: 472723 - protein, 15 aa, Homo sapiens
  CDR3 for alpha chain variable domain of TCR clone 236362 (TRAV3, TRAJ20)
CAVRDIKLSDYKLSF

SEQ ID NO: 472724 - protein, 17 aa, Homo sapiens
  CDR3 for beta chain variable domain of TCR clone 236362 (TRBV7-9, TRBJ2-6)
CASSFGAGYSGANVLTF

SEQ ID NO: 472725 - protein, 12 aa, Homo sapiens
  CDR3 for alpha chain variable domain of TCR clone 236363 (TRAV16, TRAJ10)
CSRTGGGNKLTF

SEQ ID NO: 472726 - protein, 11 aa, Homo sapiens
  CDR3 for beta chain variable domain of TCR clone 236363 (TRBV29-1, TRBJ2-5)
CREDRTGTQYF

SEQ ID NO: 472727 - protein, 13 aa, Homo sapiens
  CDR3 for alpha chain variable domain of TCR clone 236364 (TRAV35, TRAJ48)
CVGHEFGNEKLTF

SEQ ID NO: 472728 - protein, 14 aa, Homo sapiens
  CDR3 for beta chain variable domain of TCR clone 236364 (TRBV19, TRBJ2-1)
CASPTFVLSGEQFF

SEQ ID NO: 472729 - protein, 12 aa, Homo sapiens
  CDR3 for alpha chain variable domain of TCR clone 236365 (TRAV13-1, TRAJ53)
CAAGGSNYKLTF

SEQ ID NO: 472730 - protein, 12 aa, Homo sapiens
  CDR3 for beta chain variable domain of TCR clone 236365 (TRBV11-2, TRBJ2-2)
CARSLGGGELFF

SEQ ID NO: 472731 - protein, 11 aa, Homo sapiens
  CDR3 for alpha chain variable domain of TCR clone 236366 (TRAV16, TRAJ33)
CALHSNYQLIW

SEQ ID NO: 472732 - protein, 15 aa, Homo sapiens
  CDR3 for beta chain variable domain of TCR clone 236366 (TRBV4-1, TRBJ2-7)
CASSQLGQGFDEQYF

SEQ ID NO: 472733 - protein, 16 aa, Homo sapiens
  CDR3 for alpha chain variable domain of TCR clone 236367 (TRAV26-2, TRAJ48)
CILRDVSNFGNEKLTF

SEQ ID NO: 472734 - protein, 15 aa, Homo sapiens
  CDR3 for beta chain variable domain of TCR clone 236367 (TRBV7-2, TRBJ2-1)
CASSFQADEYNEQFF

SEQ ID NO: 472735 - protein, 13 aa, Homo sapiens
  CDR3 for alpha chain variable domain of TCR clone 236368 (TRAV21, TRAJ27)
CAARPGNSGKSTF

SEQ ID NO: 472736 - protein, 13 aa, Homo sapiens
  CDR3 for beta chain variable domain of TCR clone 236368 (TRBV13, TRBJ2-1)
CASILGGRGEQFF

SEQ ID NO: 472737 - protein, 20 aa, Homo sapiens
  CDR3 for alpha chain variable domain of TCR clone 236369 (TRAV14/DV4, TRAJ53)
CAMREGYWGSSGGSNYKLKF

SEQ ID NO: 472738 - protein, 17 aa, Homo sapiens
  CDR3 for beta chain variable domain of TCR clone 236369 (TRBV13, TRBJ2-3)
CASSLSRVAGGWNTQYF

SEQ ID NO: 472739 - protein, 11 aa, Homo sapiens
  CDR3 for alpha chain variable domain of TCR clone 236370 (TRAV8-4, TRAJ13)
CAVTLLGVTRK

SEQ ID NO: 472740 - protein, 14 aa, Homo sapiens
  CDR3 for beta chain variable domain of TCR clone 236370 (TRBV7-2, TRBJ1-2)
CASSQTGSTYGYTF

SEQ ID NO: 472741 - protein, 15 aa, Homo sapiens
  CDR3 for alpha chain variable domain of TCR clone 236371 (TRAV21, TRAJ53)
CATLNSGGSNYKLTF

SEQ ID NO: 472742 - protein, 13 aa, Homo sapiens
  CDR3 for beta chain variable domain of TCR clone 236371 (TRBV24-1, TRBJ1-4)
CATNNGRSEKLFF

SEQ ID NO: 472743 - protein, 16 aa, Homo sapiens
  CDR3 for alpha chain variable domain of TCR clone 236372 (TRAV30, TRAJ24)
CGTEIVDADSWGKLQC

SEQ ID NO: 472744 - protein, 14 aa, Homo sapiens
  CDR3 for beta chain variable domain of TCR clone 236372 (TRBV12-5, TRBJ2-5)
CASGSRTHQETQYF

SEQ ID NO: 472745 - protein, 17 aa, Homo sapiens
  CDR3 for alpha chain variable domain of TCR clone 236373 (TRAV3, TRAJ6)
CALRDGPRAGGSYIPTF

SEQ ID NO: 472746 - protein, 14 aa, Homo sapiens
  CDR3 for beta chain variable domain of TCR clone 236373 (TRBV20-1, TRBJ2-2)
CSAPDTANTGELFF

SEQ ID NO: 472747 - protein, 14 aa, Homo sapiens
  CDR3 for alpha chain variable domain of TCR clone 236374 (TRAV26-1, TRAJ38)
CIADNAGNNRKLIW

SEQ ID NO: 472748 - protein, 14 aa, Homo sapiens
  CDR3 for beta chain variable domain of TCR clone 236374 (TRBV15, TRBJ2-3)
CATRSGTSTDTQYF

SEQ ID NO: 472749 - protein, 14 aa, Homo sapiens
  CDR3 for alpha chain variable domain of TCR clone 236375 (TRAV20, TRAJ56)
CAVQFGGANSKLTF

SEQ ID NO: 472750 - protein, 13 aa, Homo sapiens
  CDR3 for beta chain variable domain of TCR clone 236375 (TRBV19, TRBJ2-5)
CASSETAPETQYF

SEQ ID NO: 472751 - protein, 14 aa, Homo sapiens
  CDR3 for alpha chain variable domain of TCR clone 236376 (TRAV26-1, TRAJ22)
CIVRVSGSARQLTF

SEQ ID NO: 472752 - protein, 14 aa, Homo sapiens
  CDR3 for beta chain variable domain of TCR clone 236376 (TRBV11-2, TRBJ1-2)
CASSSGQAGDGYTF

SEQ ID NO: 472753 - protein, 13 aa, Homo sapiens
  CDR3 for alpha chain variable domain of TCR clone 236377 (TRAV17, TRAJ4)
CATKSGGYNKLIF

SEQ ID NO: 472754 - protein, 14 aa, Homo sapiens
  CDR3 for beta chain variable domain of TCR clone 236377 (TRBV20-1, TRBJ1-5)
CSARDDRGDQPQHF

SEQ ID NO: 472755 - protein, 16 aa, Homo sapiens
  CDR3 for alpha chain variable domain of TCR clone 236378 (TRAV3, TRAJ37)
CAVRGKGSGNTGKLIF

SEQ ID NO: 472756 - protein, 13 aa, Homo sapiens
  CDR3 for beta chain variable domain of TCR clone 236378 (TRBV14, TRBJ2-7)
CASSQDRRYAQYF

SEQ ID NO: 472757 - protein, 15 aa, Homo sapiens
  CDR3 for alpha chain variable domain of TCR clone 236379 (TRAV12-1, TRAJ6)
CVVNCPLRRKLHTYI

SEQ ID NO: 472758 - protein, 13 aa, Homo sapiens
  CDR3 for beta chain variable domain of TCR clone 236379 (TRBV7-3, TRBJ2-1)
CASSPGAYKEQFF

SEQ ID NO: 472759 - protein, 15 aa, Homo sapiens
  CDR3 for alpha chain variable domain of TCR clone 236380 (TRAV12-2, TRAJ23)
CAVKPIYNQGGKLIF

SEQ ID NO: 472760 - protein, 15 aa, Homo sapiens
  CDR3 for beta chain variable domain of TCR clone 236380 (TRBV5-1, TRBJ1-2)
CASSLVGGQSQGDTF

SEQ ID NO: 472761 - protein, 16 aa, Homo sapiens
  CDR3 for alpha chain variable domain of TCR clone 236381 (TRAV12-1, TRAJ12)
CLVNTLLMDSSYKLIF

SEQ ID NO: 472762 - protein, 13 aa, Homo sapiens
  CDR3 for beta chain variable domain of TCR clone 236381 (TRBV11-2, TRBJ2-1)
CASSSEAHNEQFF

SEQ ID NO: 472763 - protein, 14 aa, Homo sapiens
  CDR3 for alpha chain variable domain of TCR clone 236382 (TRAV29/DV5, TRAJ44)
CAAFLVGTASKLPF

SEQ ID NO: 472764 - protein, 18 aa, Homo sapiens
  CDR3 for beta chain variable domain of TCR clone 236382 (TRBV7-9, TRBJ1-1)
CASSKPWDTMGMNTEAFF

SEQ ID NO: 472765 - protein, 21 aa, Homo sapiens
  CDR3 for alpha chain variable domain of TCR clone 236383 (TRAV3, )
CAVRPTPDIQNPDPAVYQLRD

SEQ ID NO: 472766 - protein, 17 aa, Homo sapiens
  CDR3 for beta chain variable domain of TCR clone 236383 (TRBV13, TRBJ2-3)
CASSLSRVAGGRNTQYF

SEQ ID NO: 472767 - protein, 13 aa, Homo sapiens
  CDR3 for alpha chain variable domain of TCR clone 236384 (TRAV26-1, TRAJ48)
CIVRVVGDETLTF

SEQ ID NO: 472768 - protein, 14 aa, Homo sapiens
  CDR3 for beta chain variable domain of TCR clone 236384 (TRBV7-3, TRBJ2-7)
CASSLKADSYEQYF

SEQ ID NO: 472769 - protein, 14 aa, Homo sapiens
  CDR3 for alpha chain variable domain of TCR clone 236385 (TRAV26-1, TRAJ38)
CIADNAGNNRKLIL

SEQ ID NO: 472770 - protein, 15 aa, Homo sapiens
  CDR3 for beta chain variable domain of TCR clone 236385 (TRBV4-1, TRBJ1-1)
CTSSQEWGHYTEAFF

SEQ ID NO: 472771 - protein, 14 aa, Homo sapiens
  CDR3 for alpha chain variable domain of TCR clone 236386 (TRAV2, TRAJ21)
CAVEDLNNFNKFYF

SEQ ID NO: 472772 - protein, 16 aa, Homo sapiens
  CDR3 for beta chain variable domain of TCR clone 236386 (TRBV28, TRBJ1-2)
CASSHGQGVYKDGYTF

SEQ ID NO: 472773 - protein, 12 aa, Homo sapiens
  CDR3 for alpha chain variable domain of TCR clone 236387 (TRAV21, TRAJ20)
CCGLRVDYKLSF

SEQ ID NO: 472774 - protein, 13 aa, Homo sapiens
  CDR3 for beta chain variable domain of TCR clone 236387 (TRBV6-1, TRBJ1-1)
CASSREGNTGAFF

SEQ ID NO: 472775 - protein, 15 aa, Homo sapiens
  CDR3 for alpha chain variable domain of TCR clone 236388 (TRAV10, TRAJ40)
PTCVVSALGTYKYIF

SEQ ID NO: 472776 - protein, 13 aa, Homo sapiens
  CDR3 for beta chain variable domain of TCR clone 236388 (TRBV20-1, TRBJ2-3)
CSARLAGTDTQYF

SEQ ID NO: 472777 - protein, 17 aa, Homo sapiens
  CDR3 for alpha chain variable domain of TCR clone 236389 (TRAV26-2, TRAJ37)
CILRELVGSSNTGKLIF

SEQ ID NO: 472778 - protein, 15 aa, Homo sapiens
  CDR3 for beta chain variable domain of TCR clone 236389 (TRBV9, TRBJ1-6)
CASSVAGTGDSPLHF

SEQ ID NO: 472779 - protein, 12 aa, Homo sapiens
  CDR3 for alpha chain variable domain of TCR clone 236390 (TRAV13-1, TRAJ9)
CASHTGGVKTIF

SEQ ID NO: 472780 - protein, 18 aa, Homo sapiens
  CDR3 for beta chain variable domain of TCR clone 236390 (TRBV11-2, TRBJ2-3)
CASSLEGASRGAPNTQYF

SEQ ID NO: 472781 - protein, 14 aa, Homo sapiens
  CDR3 for alpha chain variable domain of TCR clone 236391 (TRAV13-1, TRAJ44)
CAAKATGTASKLTF

SEQ ID NO: 472782 - protein, 14 aa, Homo sapiens
  CDR3 for beta chain variable domain of TCR clone 236391 (TRBV19, TRBJ2-2)
CANSTLHRSGELFF

SEQ ID NO: 472783 - protein, 13 aa, Homo sapiens
  CDR3 for alpha chain variable domain of TCR clone 236392 (TRAV8-4, TRAJ30)
CAVSVNRDDKIIF

SEQ ID NO: 472784 - protein, 13 aa, Homo sapiens
  CDR3 for beta chain variable domain of TCR clone 236392 (TRBV3-1, TRBJ2-2)
CASLASGSGELFF

SEQ ID NO: 472785 - protein, 14 aa, Homo sapiens
  CDR3 for alpha chain variable domain of TCR clone 236393 (TRAV13-1, TRAJ35)
CAASKGGFGNVLHC

SEQ ID NO: 472786 - protein, 17 aa, Homo sapiens
  CDR3 for beta chain variable domain of TCR clone 236393 (TRBV5-1, TRBJ1-6)
CASSPSLQGSDNSPLHF

SEQ ID NO: 472787 - protein, 13 aa, Homo sapiens
  CDR3 for alpha chain variable domain of TCR clone 236394 (TRAV21, TRAJ15)
CAVANQAGTVLIF

SEQ ID NO: 472788 - protein, 14 aa, Homo sapiens
  CDR3 for beta chain variable domain of TCR clone 236394 (TRBV27, TRBJ2-2)
CASSLGAATGELFF

SEQ ID NO: 472789 - protein, 13 aa, Homo sapiens
  CDR3 for alpha chain variable domain of TCR clone 236395 (TRAV13-2, TRAJ48)
CAEMDFGNEKLTF

SEQ ID NO: 472790 - protein, 14 aa, Homo sapiens
  CDR3 for beta chain variable domain of TCR clone 236395 (TRBV11-3, TRBJ2-3)
CASSLSGSTDTQYF

SEQ ID NO: 472791 - protein, 13 aa, Homo sapiens
  CDR3 for alpha chain variable domain of TCR clone 236396 (TRAV2, TRAJ40)
CAVVTSGTYKYIF

SEQ ID NO: 472792 - protein, 15 aa, Homo sapiens
  CDR3 for beta chain variable domain of TCR clone 236396 (TRBV11-2, TRBJ2-1)
CASSLGPDSYNEQFF

SEQ ID NO: 472793 - protein, 13 aa, Homo sapiens
  CDR3 for alpha chain variable domain of TCR clone 236397 (TRAV17, TRAJ21)
CATDGGNFNKFYF

SEQ ID NO: 472794 - protein, 16 aa, Homo sapiens
  CDR3 for beta chain variable domain of TCR clone 236397 (TRBV25-1, TRBJ1-1)
CASTHLGGNTEASLDK

SEQ ID NO: 472795 - protein, 12 aa, Homo sapiens
  CDR3 for alpha chain variable domain of TCR clone 236398 (TRAV12-1, TRAJ31)
CVVSLLRARILF

SEQ ID NO: 472796 - protein, 15 aa, Homo sapiens
  CDR3 for beta chain variable domain of TCR clone 236398 (TRBV3-1, TRBJ1-2)
CASSHTGQGGYGYTF

SEQ ID NO: 472797 - protein, 14 aa, Homo sapiens
  CDR3 for alpha chain variable domain of TCR clone 236399 (TRAV13-1, TRAJ23)
CAASRLGRGGKLIL

SEQ ID NO: 472798 - protein, 14 aa, Homo sapiens
  CDR3 for beta chain variable domain of TCR clone 236399 (TRBV20-1, TRBJ1-1)
SAVLHLGGGTEAFF

SEQ ID NO: 472799 - protein, 14 aa, Homo sapiens
  CDR3 for alpha chain variable domain of TCR clone 236400 (TRAV12-3, TRAJ29)
CAMILLSGNTPLVF

SEQ ID NO: 472800 - protein, 16 aa, Homo sapiens
  CDR3 for beta chain variable domain of TCR clone 236400 (TRBV28, TRBJ2-7)
CASSSGTSGGGYEQYF

SEQ ID NO: 472801 - protein, 15 aa, Homo sapiens
  CDR3 for alpha chain variable domain of TCR clone 236401 (TRAV3, TRAJ4)
FAVRDGTGGYNKLMF

SEQ ID NO: 472802 - protein, 16 aa, Homo sapiens
  CDR3 for beta chain variable domain of TCR clone 236401 (TRBV27, TRBJ2-2)
CASSSSGVSNTGELFF

SEQ ID NO: 472803 - protein, 14 aa, Homo sapiens
  CDR3 for alpha chain variable domain of TCR clone 236402 (TRAV12-2, TRAJ13)
CDVKKTGGYQKVTF

SEQ ID NO: 472804 - protein, 15 aa, Homo sapiens
  CDR3 for beta chain variable domain of TCR clone 236402 (TRBV7-2, TRBJ2-1)
CASSSGLAGGDEQFF

SEQ ID NO: 472805 - protein, 14 aa, Homo sapiens
  CDR3 for alpha chain variable domain of TCR clone 236403 (TRAV29/DV5, TRAJ36)
SAARRKTGANNLSF

SEQ ID NO: 472806 - protein, 14 aa, Homo sapiens
  CDR3 for beta chain variable domain of TCR clone 236403 (TRBV7-2, TRBJ2-7)
CASSPKTSFYEQYF

SEQ ID NO: 472807 - protein, 17 aa, Homo sapiens
  CDR3 for alpha chain variable domain of TCR clone 236404 (TRAV36/DV7, TRAJ52)
CAVAQRAGGTSYGKLTF

SEQ ID NO: 472808 - protein, 14 aa, Homo sapiens
  CDR3 for beta chain variable domain of TCR clone 236404 (TRBV6-1, TRBJ1-3)
CAIVQGGGGNTIYC

SEQ ID NO: 472809 - protein, 15 aa, Homo sapiens
  CDR3 for alpha chain variable domain of TCR clone 236405 (TRAV27, TRAJ38)
CAGRFNAGNIRKLIL

SEQ ID NO: 472810 - protein, 13 aa, Homo sapiens
  CDR3 for beta chain variable domain of TCR clone 236405 (TRBV20-1, TRBJ2-1)
TSGALPPGNEQFF

SEQ ID NO: 472811 - protein, 11 aa, Homo sapiens
  CDR3 for alpha chain variable domain of TCR clone 236406 (TRAV21, TRAJ48)
CAVDGNEKLTF

SEQ ID NO: 472812 - protein, 16 aa, Homo sapiens
  CDR3 for beta chain variable domain of TCR clone 236406 (TRBV19, TRBJ2-1)
CASRSKGTRSYNEQFF

SEQ ID NO: 472813 - protein, 11 aa, Homo sapiens
  CDR3 for alpha chain variable domain of TCR clone 236407 (TRAV13-1, TRAJ20)
CSPHGLYKLSF

SEQ ID NO: 472814 - protein, 14 aa, Homo sapiens
  CDR3 for beta chain variable domain of TCR clone 236407 (TRBV28, TRBJ2-5)
CASTGAGGVEAQYF

SEQ ID NO: 472815 - protein, 13 aa, Homo sapiens
  CDR3 for alpha chain variable domain of TCR clone 236408 (TRAV8-6, TRAJ49)
CAVITNTGNQFYF

SEQ ID NO: 472816 - protein, 17 aa, Homo sapiens
  CDR3 for beta chain variable domain of TCR clone 236408 (TRBV7-3, TRBJ2-2)
CASSLSGTSGGTGELFF

SEQ ID NO: 472817 - protein, 14 aa, Homo sapiens
  CDR3 for alpha chain variable domain of TCR clone 236409 (TRAV35, TRAJ22)
CAGLRPGSARQLTF

SEQ ID NO: 472818 - protein, 15 aa, Homo sapiens
  CDR3 for beta chain variable domain of TCR clone 236409 (TRBV5-5, TRBJ1-5)
CASSSTPGSNQPQHF

SEQ ID NO: 472819 - protein, 13 aa, Homo sapiens
  CDR3 for alpha chain variable domain of TCR clone 236410 (TRAV8-6, TRAJ50)
CAVIKTSYDKVIF

SEQ ID NO: 472820 - protein, 12 aa, Homo sapiens
  CDR3 for beta chain variable domain of TCR clone 236410 (TRBV11-2, TRBJ2-1)
CASSPGNNEQFF

SEQ ID NO: 472821 - protein, 15 aa, Homo sapiens
  CDR3 for alpha chain variable domain of TCR clone 236411 (TRAV2, TRAJ35)
CAVEPEGGFGNVLHC

SEQ ID NO: 472822 - protein, 15 aa, Homo sapiens
  CDR3 for beta chain variable domain of TCR clone 236411 (TRBV27, TRBJ2-1)
CASSNGGGSSNEQFF

SEQ ID NO: 472823 - protein, 14 aa, Homo sapiens
  CDR3 for alpha chain variable domain of TCR clone 236412 (TRAV1-2, TRAJ12)
CAVSGTDSSYKLIF

SEQ ID NO: 472824 - protein, 15 aa, Homo sapiens
  CDR3 for beta chain variable domain of TCR clone 236412 (TRBV2, TRBJ2-4)
CASSGTNLAKNRQYF

SEQ ID NO: 472825 - protein, 12 aa, Homo sapiens
  CDR3 for alpha chain variable domain of TCR clone 236413 (TRAV13-1, TRAJ17)
CAARTAGNKLTF

SEQ ID NO: 472826 - protein, 17 aa, Homo sapiens
  CDR3 for beta chain variable domain of TCR clone 236413 (TRBV7-6, TRBJ1-1)
CASSPQGGANTEAFLDK

SEQ ID NO: 472827 - protein, 13 aa, Homo sapiens
  CDR3 for alpha chain variable domain of TCR clone 236414 (TRAV23/DV6, TRAJ27)
CAASKPMQANQPF

SEQ ID NO: 472828 - protein, 14 aa, Homo sapiens
  CDR3 for beta chain variable domain of TCR clone 236414 (TRBV5-4, TRBJ1-1)
CASSLDSRRDEDFF

SEQ ID NO: 472829 - protein, 16 aa, Homo sapiens
  CDR3 for alpha chain variable domain of TCR clone 236415 (TRAV4, TRAJ9)
CLVGDPNRPGGSKTIF

SEQ ID NO: 472830 - protein, 14 aa, Homo sapiens
  CDR3 for beta chain variable domain of TCR clone 236415 (TRBV20-1, TRBJ1-1)
CSAQTRIGGTEAFF

SEQ ID NO: 472831 - protein, 12 aa, Homo sapiens
  CDR3 for alpha chain variable domain of TCR clone 236416 (TRAV2, TRAJ32)
CAVGGAINKLIF

SEQ ID NO: 472832 - protein, 15 aa, Homo sapiens
  CDR3 for beta chain variable domain of TCR clone 236416 (TRBV7-2, TRBJ2-1)
CASSSRTSREDEQFF

SEQ ID NO: 472833 - protein, 14 aa, Homo sapiens
  CDR3 for alpha chain variable domain of TCR clone 236417 (TRAV12-3, TRAJ10)
IHLPLTGGGNKLTF

SEQ ID NO: 472834 - protein, 15 aa, Homo sapiens
  CDR3 for beta chain variable domain of TCR clone 236417 (TRBV10-3, TRBJ1-3)
CAISDSQGAGNTIYF

SEQ ID NO: 472835 - protein, 11 aa, Homo sapiens
  CDR3 for alpha chain variable domain of TCR clone 236418 (TRAV2, TRAJ13)
CASGGYQKVTF

SEQ ID NO: 472836 - protein, 15 aa, Homo sapiens
  CDR3 for beta chain variable domain of TCR clone 236418 (TRBV6-1, TRBJ2-5)
CASSEGWGIQETQYF

SEQ ID NO: 472837 - protein, 13 aa, Homo sapiens
  CDR3 for alpha chain variable domain of TCR clone 236419 (TRAV1-2, TRAJ9)
CAVLNTGGFKTIF

SEQ ID NO: 472838 - protein, 14 aa, Homo sapiens
  CDR3 for beta chain variable domain of TCR clone 236419 (TRBV11-2, TRBJ2-1)
CASSLSGPYNEQFF

SEQ ID NO: 472839 - protein, 16 aa, Homo sapiens
  CDR3 for alpha chain variable domain of TCR clone 236420 (TRAV8-3, TRAJ52)
CAVQLAGGTSYGKLTF

SEQ ID NO: 472840 - protein, 15 aa, Homo sapiens
  CDR3 for beta chain variable domain of TCR clone 236420 (TRBV11-2, TRBJ2-7)
CASSLAGGVATEQYL

SEQ ID NO: 472841 - protein, 14 aa, Homo sapiens
  CDR3 for alpha chain variable domain of TCR clone 236421 (TRAV1-2, TRAJ16)
CAVNRFSDGEKLLF

SEQ ID NO: 472842 - protein, 13 aa, Homo sapiens
  CDR3 for beta chain variable domain of TCR clone 236421 (TRBV11-2, TRBJ2-1)
CASSLGLAGGRFF

SEQ ID NO: 472843 - protein, 17 aa, Homo sapiens
  CDR3 for alpha chain variable domain of TCR clone 236422 (TRAV3, TRAJ6)
CAVRDGPRAGGSYIPTF

SEQ ID NO: 472844 - protein, 16 aa, Homo sapiens
  CDR3 for beta chain variable domain of TCR clone 236422 (TRBV12-4, TRBJ2-7)
CASSLSGGTGTYEQYF

SEQ ID NO: 472845 - protein, 12 aa, Homo sapiens
  CDR3 for alpha chain variable domain of TCR clone 236423 (TRAV13-1, TRAJ48)
CAAHFGNEKLTF

SEQ ID NO: 472846 - protein, 16 aa, Homo sapiens
  CDR3 for beta chain variable domain of TCR clone 236423 (TRBV11-2, TRBJ2-7)
CASSPTTGGVSYEQYF

SEQ ID NO: 472847 - protein, 15 aa, Homo sapiens
  CDR3 for alpha chain variable domain of TCR clone 236424 (TRAV3, TRAJ36)
CAVRASETGANNLFF

SEQ ID NO: 472848 - protein, 15 aa, Homo sapiens
  CDR3 for beta chain variable domain of TCR clone 236424 (TRBV3-1, TRBJ2-1)
CASSQDYTPRGEQFF

SEQ ID NO: 472849 - protein, 14 aa, Homo sapiens
  CDR3 for alpha chain variable domain of TCR clone 236425 (TRAV2, TRAJ9)
CAVEDRSGGFTTIF

SEQ ID NO: 472850 - protein, 12 aa, Homo sapiens
  CDR3 for beta chain variable domain of TCR clone 236425 (TRBV11-2, TRBJ2-1)
CASSPGNNEQFF

SEQ ID NO: 472851 - protein, 13 aa, Homo sapiens
  CDR3 for alpha chain variable domain of TCR clone 236426 (TRAV25, TRAJ30)
CAGRVDRDDKIIF

SEQ ID NO: 472852 - protein, 15 aa, Homo sapiens
  CDR3 for beta chain variable domain of TCR clone 236426 (TRBV7-2, TRBJ1-1)
CASSFAGDRDTEAFS

SEQ ID NO: 472853 - protein, 11 aa, Homo sapiens
  CDR3 for alpha chain variable domain of TCR clone 236427 (TRAV12-3, TRAJ43)
CAMSVSNDMRF

SEQ ID NO: 472854 - protein, 13 aa, Homo sapiens
  CDR3 for beta chain variable domain of TCR clone 236427 (TRBV20-1, TRBJ1-1)
CSARGGGNTEAFF

SEQ ID NO: 472855 - protein, 15 aa, Homo sapiens
  CDR3 for alpha chain variable domain of TCR clone 236428 (TRAV25, TRAJ10)
CAGPLPTGGGNKLTF

SEQ ID NO: 472856 - protein, 15 aa, Homo sapiens
  CDR3 for beta chain variable domain of TCR clone 236428 (TRBV12-5, TRBJ2-2)
CASGRLGGNTGELFF

SEQ ID NO: 472857 - protein, 12 aa, Homo sapiens
  CDR3 for alpha chain variable domain of TCR clone 236429 (TRAV2, TRAJ31)
CAVEEGNARLVI

SEQ ID NO: 472858 - protein, 18 aa, Homo sapiens
  CDR3 for beta chain variable domain of TCR clone 236429 (TRBV7-9, TRBJ2-3)
CASSLDLAGLATPDTQYF

SEQ ID NO: 472859 - protein, 17 aa, Homo sapiens
  CDR3 for alpha chain variable domain of TCR clone 236430 (TRAV27, TRAJ42)
CAERVIYYGGSQGNLIF

SEQ ID NO: 472860 - protein, 14 aa, Homo sapiens
  CDR3 for beta chain variable domain of TCR clone 236430 (TRBV6-6, TRBJ2-3)
CASTLQREADTQYF

SEQ ID NO: 472861 - protein, 14 aa, Homo sapiens
  CDR3 for alpha chain variable domain of TCR clone 236431 (TRAV12-1, TRAJ43)
CVVNGRSNNNDMRF

SEQ ID NO: 472862 - protein, 13 aa, Homo sapiens
  CDR3 for beta chain variable domain of TCR clone 236431 (TRBV2, TRBJ1-4)
CASSELGVEKLFV

SEQ ID NO: 472863 - protein, 14 aa, Homo sapiens
  CDR3 for alpha chain variable domain of TCR clone 236432 (TRAV17, TRAJ12)
CATDREDSSYKLIF

SEQ ID NO: 472864 - protein, 14 aa, Homo sapiens
  CDR3 for beta chain variable domain of TCR clone 236432 (TRBV4-1, TRBJ2-7)
CASSQGRDSPEQYF

SEQ ID NO: 472865 - protein, 16 aa, Homo sapiens
  CDR3 for alpha chain variable domain of TCR clone 236433 (TRAV1-2, TRAJ10)
CAVRGVLTGGGNKLTF

SEQ ID NO: 472866 - protein, 12 aa, Homo sapiens
  CDR3 for beta chain variable domain of TCR clone 236433 (TRBV12-4, TRBJ2-7)
CASSLGGYEQHF

SEQ ID NO: 472867 - protein, 13 aa, Homo sapiens
  CDR3 for alpha chain variable domain of TCR clone 236434 (TRAV20, TRAJ20)
CAVQAGSGYKPSF

SEQ ID NO: 472868 - protein, 13 aa, Homo sapiens
  CDR3 for beta chain variable domain of TCR clone 236434 (TRBV12-5, TRBJ2-3)
CASGDRQSDTQYF

SEQ ID NO: 472869 - protein, 13 aa, Homo sapiens
  CDR3 for alpha chain variable domain of TCR clone 236435 (TRAV21, TRAJ27)
CAARPGHAGKSTF

SEQ ID NO: 472870 - protein, 13 aa, Homo sapiens
  CDR3 for beta chain variable domain of TCR clone 236435 (TRBV7-9, TRBJ1-2)
CASSLKQNYGYTF

SEQ ID NO: 472871 - protein, 18 aa, Homo sapiens
  CDR3 for alpha chain variable domain of TCR clone 236436 (TRAV13-1, TRAJ17)
CAASIHGGCRQQANCWRR

SEQ ID NO: 472872 - protein, 14 aa, Homo sapiens
  CDR3 for beta chain variable domain of TCR clone 236436 (TRBV20-1, TRBJ2-4)
CSARDRGQGGIQYF

SEQ ID NO: 472873 - protein, 14 aa, Homo sapiens
  CDR3 for alpha chain variable domain of TCR clone 236437 (TRAV12-2, TRAJ17)
CAALFKAACNKLTF

SEQ ID NO: 472874 - protein, 16 aa, Homo sapiens
  CDR3 for beta chain variable domain of TCR clone 236437 (TRBV20-1, TRBJ2-2)
CSASASGIPGAGELFF

SEQ ID NO: 472875 - protein, 11 aa, Homo sapiens
  CDR3 for alpha chain variable domain of TCR clone 236438 (TRAV21, TRAJ48)
CAVDGHGKLTF

SEQ ID NO: 472876 - protein, 16 aa, Homo sapiens
  CDR3 for beta chain variable domain of TCR clone 236438 (TRBV12-4, TRBJ1-5)
CASSSGPRGSNQPQHF

SEQ ID NO: 472877 - protein, 13 aa, Homo sapiens
  CDR3 for alpha chain variable domain of TCR clone 236439 (TRAV21, TRAJ27)
CAALNTNAGKSTC

SEQ ID NO: 472878 - protein, 14 aa, Homo sapiens
  CDR3 for beta chain variable domain of TCR clone 236439 (TRBV27, TRBJ1-1)
CASSLLSGLAEAFF

SEQ ID NO: 472879 - protein, 14 aa, Homo sapiens
  CDR3 for alpha chain variable domain of TCR clone 236440 (TRAV12-2, TRAJ45)
CSVNKGGGADGLTF

SEQ ID NO: 472880 - protein, 14 aa, Homo sapiens
  CDR3 for beta chain variable domain of TCR clone 236440 (TRBV20-1, TRBJ1-1)
CSAMGGTANTEAFF

SEQ ID NO: 472881 - protein, 15 aa, Homo sapiens
  CDR3 for alpha chain variable domain of TCR clone 236441 (TRAV12-3, TRAJ6)
CAMSATTGGSHIPTF

SEQ ID NO: 472882 - protein, 16 aa, Homo sapiens
  CDR3 for beta chain variable domain of TCR clone 236441 (TRBV20-1, TRBJ1-2)
CSASMGQGVANCGYTF

SEQ ID NO: 472883 - protein, 17 aa, Homo sapiens
  CDR3 for alpha chain variable domain of TCR clone 236442 (TRAV3, TRAJ6)
CAVRDGPRAGGSYIPTL

SEQ ID NO: 472884 - protein, 14 aa, Homo sapiens
  CDR3 for beta chain variable domain of TCR clone 236442 (TRBV7-3, TRBJ2-1)
CASSTSGGWDEQFF

SEQ ID NO: 472885 - protein, 18 aa, Homo sapiens
  CDR3 for alpha chain variable domain of TCR clone 236443 (TRAV26-1, TRAJ52)
CIVRVAGAGGPSYGKLTF

SEQ ID NO: 472886 - protein, 13 aa, Homo sapiens
  CDR3 for beta chain variable domain of TCR clone 236443 (TRBV7-8, TRBJ1-2)
CASSAQSYYGYSF

SEQ ID NO: 472887 - protein, 14 aa, Homo sapiens
  CDR3 for alpha chain variable domain of TCR clone 236444 (TRAV12-2, TRAJ44)
CAVNPAGTASTLTF

SEQ ID NO: 472888 - protein, 13 aa, Homo sapiens
  CDR3 for beta chain variable domain of TCR clone 236444 (TRBV20-1, TRBJ1-6)
CSAPLGVGSPLLF

SEQ ID NO: 472889 - protein, 14 aa, Homo sapiens
  CDR3 for alpha chain variable domain of TCR clone 236445 (TRAV1-2, TRAJ16)
CAVNRFSDGQKLLF

SEQ ID NO: 472890 - protein, 14 aa, Homo sapiens
  CDR3 for beta chain variable domain of TCR clone 236445 (TRBV7-9, TRBJ2-1)
CASSPRDSLYEQFC

SEQ ID NO: 472891 - protein, 13 aa, Homo sapiens
  CDR3 for alpha chain variable domain of TCR clone 236446 (TRAV27, TRAJ41)
CAGEGNSGYALNF

SEQ ID NO: 472892 - protein, 16 aa, Homo sapiens
  CDR3 for beta chain variable domain of TCR clone 236446 (TRBV11-2, TRBJ2-7)
CASSPTTGGVSYEQYF

SEQ ID NO: 472893 - protein, 14 aa, Homo sapiens
  CDR3 for alpha chain variable domain of TCR clone 236447 (TRAV36/DV7, TRAJ44)
CCGANTGSASKLTF

SEQ ID NO: 472894 - protein, 14 aa, Homo sapiens
  CDR3 for beta chain variable domain of TCR clone 236447 (TRBV20-1, TRBJ1-3)
CSASPTGAGNTIYF

SEQ ID NO: 472895 - protein, 13 aa, Homo sapiens
  CDR3 for alpha chain variable domain of TCR clone 236448 (TRAV12-1, TRAJ39)
CVALNNAGNMLTF

SEQ ID NO: 472896 - protein, 17 aa, Homo sapiens
  CDR3 for beta chain variable domain of TCR clone 236448 (TRBV11-2, TRBJ2-1)
CASSLYPPGVEYNEQFF

SEQ ID NO: 472897 - protein, 11 aa, Homo sapiens
  CDR3 for alpha chain variable domain of TCR clone 236449 (TRAV23/DV6, TRAJ58)
CAARLLRGETS

SEQ ID NO: 472898 - protein, 15 aa, Homo sapiens
  CDR3 for beta chain variable domain of TCR clone 236449 (TRBV6-1, TRBJ2-1)
CASSELRGQYNEQFF

SEQ ID NO: 472899 - protein, 16 aa, Homo sapiens
  CDR3 for alpha chain variable domain of TCR clone 236450 (TRAV3, TRAJ37)
CAVRRKGSGNTGKLIF

SEQ ID NO: 472900 - protein, 21 aa, Homo sapiens
  CDR3 for beta chain variable domain of TCR clone 236450 (TRBV15, TRBJ2-1)
AWGTQPCTCVPPAEVDTARFF

SEQ ID NO: 472901 - protein, 14 aa, Homo sapiens
  CDR3 for alpha chain variable domain of TCR clone 236451 (TRAV12-1, TRAJ17)
CVVNYKAAGNKLTF

SEQ ID NO: 472902 - protein, 15 aa, Homo sapiens
  CDR3 for beta chain variable domain of TCR clone 236451 (TRBV2, TRBJ2-1)
CASSELAGSYNEQFF

SEQ ID NO: 472903 - protein, 13 aa, Homo sapiens
  CDR3 for alpha chain variable domain of TCR clone 236452 (TRAV1-2, TRAJ9)
CAALNTGGFKTIF

SEQ ID NO: 472904 - protein, 15 aa, Homo sapiens
  CDR3 for beta chain variable domain of TCR clone 236452 (TRBV27, TRBJ2-7)
CASSLRNEQGYEQYF

SEQ ID NO: 472905 - protein, 13 aa, Homo sapiens
  CDR3 for alpha chain variable domain of TCR clone 236453 (TRAV13-2, TRAJ39)
CAENKNAGNMLTI

SEQ ID NO: 472906 - protein, 14 aa, Homo sapiens
  CDR3 for beta chain variable domain of TCR clone 236453 (TRBV19, TRBJ2-5)
CASSMTGQQETQYF

SEQ ID NO: 472907 - protein, 14 aa, Homo sapiens
  CDR3 for alpha chain variable domain of TCR clone 236454 (TRAV12-2, TRAJ13)
CAVKKTGGYQTVTF

SEQ ID NO: 472908 - protein, 11 aa, Homo sapiens
  CDR3 for beta chain variable domain of TCR clone 236454 (TRBV29-1, TRBJ2-5)
CSEDRTGTQYF

SEQ ID NO: 472909 - protein, 15 aa, Homo sapiens
  CDR3 for alpha chain variable domain of TCR clone 236455 (TRAV17, TRAJ52)
CATGAGGTSYGKLTF

SEQ ID NO: 472910 - protein, 14 aa, Homo sapiens
  CDR3 for beta chain variable domain of TCR clone 236455 (TRBV28, TRBJ1-5)
CASSLGFLVKPQHF

SEQ ID NO: 472911 - protein, 23 aa, Homo sapiens
  CDR3 for alpha chain variable domain of TCR clone 236456 (TRAV8-4, TRAJ38)
CAVRNAGNNHIQNPDPAVYQLRD

SEQ ID NO: 472912 - protein, 16 aa, Homo sapiens
  CDR3 for beta chain variable domain of TCR clone 236456 (TRBV6-1, TRBJ2-5)
CASSETLDRGAETQYF

SEQ ID NO: 472913 - protein, 18 aa, Homo sapiens
  CDR3 for alpha chain variable domain of TCR clone 236457 (TRAV29/DV5, TRAJ52)
CAAGFRGAGGTSYVNLTF

SEQ ID NO: 472914 - protein, 17 aa, Homo sapiens
  CDR3 for beta chain variable domain of TCR clone 236457 (TRBV20-1, TRBJ2-3)
CSARSAGLAGVTDTQYF

SEQ ID NO: 472915 - protein, 12 aa, Homo sapiens
  CDR3 for alpha chain variable domain of TCR clone 236458 (TRAV16, TRAJ10)
CSRTGGGNKLTF

SEQ ID NO: 472916 - protein, 12 aa, Homo sapiens
  CDR3 for beta chain variable domain of TCR clone 236458 (TRBV7-8, TRBJ2-7)
CASSLGDREQYF

SEQ ID NO: 472917 - protein, 13 aa, Homo sapiens
  CDR3 for alpha chain variable domain of TCR clone 236459 (TRAV3, TRAJ36)
CAVRDTGANNLFF

SEQ ID NO: 472918 - protein, 13 aa, Homo sapiens
  CDR3 for beta chain variable domain of TCR clone 236459 (TRBV7-8, TRBJ2-7)
CASSFAGLYEQYF

SEQ ID NO: 472919 - protein, 14 aa, Homo sapiens
  CDR3 for alpha chain variable domain of TCR clone 236460 (TRAV12-3, TRAJ42)
CAMNYAGSQGNLIF

SEQ ID NO: 472920 - protein, 15 aa, Homo sapiens
  CDR3 for beta chain variable domain of TCR clone 236460 (TRBV5-7, TRBJ1-5)
CASSYGKLWDQPQHF

SEQ ID NO: 472921 - protein, 15 aa, Homo sapiens
  CDR3 for alpha chain variable domain of TCR clone 236461 (TRAV1-2, TRAJ30)
CAVRPHGNRDDKIIF

SEQ ID NO: 472922 - protein, 13 aa, Homo sapiens
  CDR3 for beta chain variable domain of TCR clone 236461 (TRBV4-1, TRBJ2-7)
RASSQGQAYEQYF

SEQ ID NO: 472923 - protein, 14 aa, Homo sapiens
  CDR3 for alpha chain variable domain of TCR clone 236462 (TRAV12-2, TRAJ9)
CAVSFGTGGFKTIF

SEQ ID NO: 472924 - protein, 14 aa, Homo sapiens
  CDR3 for beta chain variable domain of TCR clone 236462 (TRBV11-2, TRBJ2-5)
CASSRTGGIETQYF

SEQ ID NO: 472925 - protein, 13 aa, Homo sapiens
  CDR3 for alpha chain variable domain of TCR clone 236463 (TRAV12-3, TRAJ7)
CAMSASGNNRLAF

SEQ ID NO: 472926 - protein, 14 aa, Homo sapiens
  CDR3 for beta chain variable domain of TCR clone 236463 (TRBV13, TRBJ2-5)
CASSLGPKGETQYF

SEQ ID NO: 472927 - protein, 16 aa, Homo sapiens
  CDR3 for alpha chain variable domain of TCR clone 236464 (TRAV16, TRAJ24)
CALSGGSTDSWGQLQF

SEQ ID NO: 472928 - protein, 15 aa, Homo sapiens
  CDR3 for beta chain variable domain of TCR clone 236464 (TRBV27, TRBJ2-1)
CASSNGGGSSNEQFF

SEQ ID NO: 472929 - protein, 14 aa, Homo sapiens
  CDR3 for alpha chain variable domain of TCR clone 236465 (TRAV12-3, TRAJ10)
SHLPLTGGGNKLTF

SEQ ID NO: 472930 - protein, 14 aa, Homo sapiens
  CDR3 for beta chain variable domain of TCR clone 236465 (TRBV7-9, TRBJ2-5)
CASSLVGGEETQYF

SEQ ID NO: 472931 - protein, 16 aa, Homo sapiens
  CDR3 for alpha chain variable domain of TCR clone 236466 (TRAV3, TRAJ37)
CSVRPHGSGNTGKLII

SEQ ID NO: 472932 - protein, 16 aa, Homo sapiens
  CDR3 for beta chain variable domain of TCR clone 236466 (TRBV9, TRBJ1-2)
CASSVEEKVSPYGYTF

SEQ ID NO: 472933 - protein, 13 aa, Homo sapiens
  CDR3 for alpha chain variable domain of TCR clone 236467 (TRAV17, TRAJ22)
CAHHSGSARQLTF

SEQ ID NO: 472934 - protein, 16 aa, Homo sapiens
  CDR3 for beta chain variable domain of TCR clone 236467 (TRBV4-1, TRBJ1-2)
CASSQDAGQVPCGYTF

SEQ ID NO: 472935 - protein, 13 aa, Homo sapiens
  CDR3 for alpha chain variable domain of TCR clone 236468 (TRAV17, TRAJ54)
CAAGIQGAQKLGF

SEQ ID NO: 472936 - protein, 14 aa, Homo sapiens
  CDR3 for beta chain variable domain of TCR clone 236468 (TRBV11-2, TRBJ1-2)
CASSLGTANYGYNF

SEQ ID NO: 472937 - protein, 14 aa, Homo sapiens
  CDR3 for alpha chain variable domain of TCR clone 236469 (TRAV12-2, TRAJ40)
CAVKIPSGTYKYIF

SEQ ID NO: 472938 - protein, 13 aa, Homo sapiens
  CDR3 for beta chain variable domain of TCR clone 236469 (TRBV7-9, TRBJ1-2)
GASSLKQNYGYTF

SEQ ID NO: 472939 - protein, 16 aa, Homo sapiens
  CDR3 for alpha chain variable domain of TCR clone 236470 (TRAV8-3, TRAJ42)
CAVGEGNGGSQGNLIF

SEQ ID NO: 472940 - protein, 15 aa, Homo sapiens
  CDR3 for beta chain variable domain of TCR clone 236470 (TRBV5-1, TRBJ2-7)
CASSLGDFTTYEQYF

SEQ ID NO: 472941 - protein, 13 aa, Homo sapiens
  CDR3 for alpha chain variable domain of TCR clone 236471 (TRAV2, TRAJ40)
CAVVTSGTYKYIF

SEQ ID NO: 472942 - protein, 16 aa, Homo sapiens
  CDR3 for beta chain variable domain of TCR clone 236471 (TRBV7-9, TRBJ1-3)
CASSLGVGSSGNTIYF

SEQ ID NO: 472943 - protein, 16 aa, Homo sapiens
  CDR3 for alpha chain variable domain of TCR clone 236472 (TRAV30, TRAJ24)
CGTEIVDEDSWGKFQL

SEQ ID NO: 472944 - protein, 14 aa, Homo sapiens
  CDR3 for beta chain variable domain of TCR clone 236472 (TRBV12-5, TRBJ2-5)
CASGSRTHQETQYF

SEQ ID NO: 472945 - protein, 16 aa, Homo sapiens
  CDR3 for alpha chain variable domain of TCR clone 236473 (TRAV4, TRAJ22)
CLVGDLYSGSSRQLTF

SEQ ID NO: 472946 - protein, 16 aa, Homo sapiens
  CDR3 for beta chain variable domain of TCR clone 236473 (TRBV7-9, TRBJ2-3)
CASSPWREVGTDTQYF

SEQ ID NO: 472947 - protein, 16 aa, Homo sapiens
  CDR3 for alpha chain variable domain of TCR clone 236474 (TRAV8-3, TRAJ10)
CAVGPILTGGGNKLTF

SEQ ID NO: 472948 - protein, 14 aa, Homo sapiens
  CDR3 for beta chain variable domain of TCR clone 236474 (TRBV19, TRBJ2-1)
CASPTFVLSGEQFF

SEQ ID NO: 472949 - protein, 12 aa, Homo sapiens
  CDR3 for alpha chain variable domain of TCR clone 236475 (TRAV16, TRAJ22)
FSLEVSARQLTF

SEQ ID NO: 472950 - protein, 14 aa, Homo sapiens
  CDR3 for beta chain variable domain of TCR clone 236475 (TRBV11-2, TRBJ2-3)
CASSSIASTDTQYF

SEQ ID NO: 472951 - protein, 13 aa, Homo sapiens
  CDR3 for alpha chain variable domain of TCR clone 236476 (TRAV35, TRAJ32)
CAGVGGATNKLIF

SEQ ID NO: 472952 - protein, 15 aa, Homo sapiens
  CDR3 for beta chain variable domain of TCR clone 236476 (TRBV20-1, TRBJ2-7)
CSARDRVSGMDEQYF

SEQ ID NO: 472953 - protein, 14 aa, Homo sapiens
  CDR3 for alpha chain variable domain of TCR clone 236477 (TRAV17, TRAJ53)
CATDAGGSNYKLTL

SEQ ID NO: 472954 - protein, 16 aa, Homo sapiens
  CDR3 for beta chain variable domain of TCR clone 236477 (TRBV4-1, TRBJ1-1)
CASSQDAGIGNTEAFF

SEQ ID NO: 472955 - protein, 15 aa, Homo sapiens
  CDR3 for alpha chain variable domain of TCR clone 236478 (TRAV2, TRAJ11)
CAVVGRNSGYGTLTF

SEQ ID NO: 472956 - protein, 16 aa, Homo sapiens
  CDR3 for beta chain variable domain of TCR clone 236478 (TRBV12-5, TRBJ2-5)
CASGPRTSGNQETQYF

SEQ ID NO: 472957 - protein, 12 aa, Homo sapiens
  CDR3 for alpha chain variable domain of TCR clone 236479 (TRAV12-1, TRAJ16)
CVVFRDGQKLLF

SEQ ID NO: 472958 - protein, 13 aa, Homo sapiens
  CDR3 for beta chain variable domain of TCR clone 236479 (TRBV19, TRBJ1-2)
CASSVPGQNGYTF

SEQ ID NO: 472959 - protein, 12 aa, Homo sapiens
  CDR3 for alpha chain variable domain of TCR clone 236480 (TRAV2, TRAJ33)
CAVPDSNYQLIW

SEQ ID NO: 472960 - protein, 16 aa, Homo sapiens
  CDR3 for beta chain variable domain of TCR clone 236480 (TRBV7-2, TRBJ2-1)
CASSLLAQLFSKGQFF

SEQ ID NO: 472961 - protein, 13 aa, Homo sapiens
  CDR3 for alpha chain variable domain of TCR clone 236481 (TRAV12-3, TRAJ13)
CAVSSGGYQKVTF

SEQ ID NO: 472962 - protein, 15 aa, Homo sapiens
  CDR3 for beta chain variable domain of TCR clone 236481 (TRBV6-3, TRBJ1-5)
CASRVDRWSNQPQHF

SEQ ID NO: 472963 - protein, 14 aa, Homo sapiens
  CDR3 for alpha chain variable domain of TCR clone 236482 (TRAV8-6, TRAJ36)
CAVSDWLGQTTSSF

SEQ ID NO: 472964 - protein, 15 aa, Homo sapiens
  CDR3 for beta chain variable domain of TCR clone 236482 (TRBV9, TRBJ1-6)
CASSVAGTGDSPLHF

SEQ ID NO: 472965 - protein, 12 aa, Homo sapiens
  CDR3 for alpha chain variable domain of TCR clone 236483 (TRAV17, TRAJ20)
CATYSNDYKLSF

SEQ ID NO: 472966 - protein, 14 aa, Homo sapiens
  CDR3 for beta chain variable domain of TCR clone 236483 (TRBV4-1, TRBJ2-2)
CASSQAVNTGELFF

SEQ ID NO: 472967 - protein, 12 aa, Homo sapiens
  CDR3 for alpha chain variable domain of TCR clone 236484 (TRAV16, TRAJ27)
CAPSTNAGKSTF

SEQ ID NO: 472968 - protein, 14 aa, Homo sapiens
  CDR3 for beta chain variable domain of TCR clone 236484 (TRBV7-3, TRBJ2-2)
CASSSGGYTGELFF

SEQ ID NO: 472969 - protein, 16 aa, Homo sapiens
  CDR3 for alpha chain variable domain of TCR clone 236485 (TRAV8-1, TRAJ42)
CAVTSRYGGSQGNLIF

SEQ ID NO: 472970 - protein, 12 aa, Homo sapiens
  CDR3 for beta chain variable domain of TCR clone 236485 (TRBV6-3, TRBJ2-7)
CASSLGRRGLCF

SEQ ID NO: 472971 - protein, 17 aa, Homo sapiens
  CDR3 for alpha chain variable domain of TCR clone 236486 (TRAV4, TRAJ42)
CLVGVLNFGGSQENLIF

SEQ ID NO: 472972 - protein, 12 aa, Homo sapiens
  CDR3 for beta chain variable domain of TCR clone 236486 (TRBV20-1, TRBJ2-1)
CSAQYTYNEQFF

SEQ ID NO: 472973 - protein, 14 aa, Homo sapiens
  CDR3 for alpha chain variable domain of TCR clone 236487 (TRAV12-2, TRAJ53)
CAVKGGGSNYKLTF

SEQ ID NO: 472974 - protein, 14 aa, Homo sapiens
  CDR3 for beta chain variable domain of TCR clone 236487 (TRBV7-7, TRBJ2-2)
CATRQDSDTGQLFF

SEQ ID NO: 472975 - protein, 11 aa, Homo sapiens
  CDR3 for alpha chain variable domain of TCR clone 236488 (TRAV12-3, TRAJ27)
CAMANAGKSTF

SEQ ID NO: 472976 - protein, 12 aa, Homo sapiens
  CDR3 for beta chain variable domain of TCR clone 236488 (TRBV9, TRBJ2-7)
CASSVAEYYEHF

SEQ ID NO: 472977 - protein, 14 aa, Homo sapiens
  CDR3 for alpha chain variable domain of TCR clone 236489 (TRAV8-1, TRAJ34)
CALPRGTTSSSLGL

SEQ ID NO: 472978 - protein, 14 aa, Homo sapiens
  CDR3 for beta chain variable domain of TCR clone 236489 (TRBV7-2, TRBJ2-7)
CASSPKTSFYEQYF

SEQ ID NO: 472979 - protein, 14 aa, Homo sapiens
  CDR3 for alpha chain variable domain of TCR clone 236490 (TRAV13-1, TRAJ10)
CAAKEPGGGNKLTF

SEQ ID NO: 472980 - protein, 20 aa, Homo sapiens
  CDR3 for beta chain variable domain of TCR clone 236490 (TRBV7-8, TRBJ2-2)
CASSHLFPGPTIHITGELFF

SEQ ID NO: 472981 - protein, 13 aa, Homo sapiens
  CDR3 for alpha chain variable domain of TCR clone 236491 (TRAV12-2, TRAJ52)
CAVSGTSYGKLTF

SEQ ID NO: 472982 - protein, 17 aa, Homo sapiens
  CDR3 for beta chain variable domain of TCR clone 236491 (TRBV11-2, TRBJ2-1)
CASSLYPTGVEYNEQFF

SEQ ID NO: 472983 - protein, 15 aa, Homo sapiens
  CDR3 for alpha chain variable domain of TCR clone 236492 (TRAV8-3, TRAJ40)
CAAPFLGSGTYKYIF

SEQ ID NO: 472984 - protein, 13 aa, Homo sapiens
  CDR3 for beta chain variable domain of TCR clone 236492 (TRBV10-3, TRBJ2-7)
CASKLAVNYEQYF

SEQ ID NO: 472985 - protein, 17 aa, Homo sapiens
  CDR3 for alpha chain variable domain of TCR clone 236493 (TRAV3, TRAJ6)
CAVRDGPRAGGSYIPTF

SEQ ID NO: 472986 - protein, 16 aa, Homo sapiens
  CDR3 for beta chain variable domain of TCR clone 236493 (TRBV5-1, TRBJ1-3)
CASSPWAPSSGNTIYV

SEQ ID NO: 472987 - protein, 15 aa, Homo sapiens
  CDR3 for alpha chain variable domain of TCR clone 236494 (TRAV27, TRAJ38)
CAARRNAGNNRKRIW

SEQ ID NO: 472988 - protein, 14 aa, Homo sapiens
  CDR3 for beta chain variable domain of TCR clone 236494 (TRBV7-2, TRBJ2-7)
CASSPKTSFYEQYF

SEQ ID NO: 472989 - protein, 14 aa, Homo sapiens
  CDR3 for alpha chain variable domain of TCR clone 236495 (TRAV17, TRAJ6)
CATDASGGSYIPTF

SEQ ID NO: 472990 - protein, 17 aa, Homo sapiens
  CDR3 for beta chain variable domain of TCR clone 236495 (TRBV6-3, TRBJ2-2)
CASSYAGQGINTGELFF

SEQ ID NO: 472991 - protein, 12 aa, Homo sapiens
  CDR3 for alpha chain variable domain of TCR clone 236496 (TRAV1-1, TRAJ20)
CAVRDDDYKLSF

SEQ ID NO: 472992 - protein, 18 aa, Homo sapiens
  CDR3 for beta chain variable domain of TCR clone 236496 (TRBV20-1, TRBJ2-3)
CSASGLAGGPGTTDTQYF

SEQ ID NO: 472993 - protein, 13 aa, Homo sapiens
  CDR3 for alpha chain variable domain of TCR clone 236497 (TRAV20, TRAJ37)
CAGCSSNTGKLIF

SEQ ID NO: 472994 - protein, 21 aa, Homo sapiens
  CDR3 for beta chain variable domain of TCR clone 236497 (TRBV4-2, TRBJ2-3)
PCSQKSRPCISVPAAPDTQYF

SEQ ID NO: 472995 - protein, 14 aa, Homo sapiens
  CDR3 for alpha chain variable domain of TCR clone 236498 (TRAV26-1, TRAJ39)
CIVSGSRAGNMLTF

SEQ ID NO: 472996 - protein, 14 aa, Homo sapiens
  CDR3 for beta chain variable domain of TCR clone 236498 (TRBV25-1, TRBJ1-1)
CASTHLGGNTEAFF

SEQ ID NO: 472997 - protein, 14 aa, Homo sapiens
  CDR3 for alpha chain variable domain of TCR clone 236499 (TRAV29/DV5, TRAJ32)
CAAAYGGATNKLIF

SEQ ID NO: 472998 - protein, 16 aa, Homo sapiens
  CDR3 for beta chain variable domain of TCR clone 236499 (TRBV7-9, TRBJ1-3)
CASSQTSGLRMGTIYF

SEQ ID NO: 472999 - protein, 18 aa, Homo sapiens
  CDR3 for alpha chain variable domain of TCR clone 236500 (TRAV26-2, TRAJ33)
CCVLLHPEEPASNYQLIW

SEQ ID NO: 473000 - protein, 16 aa, Homo sapiens
  CDR3 for beta chain variable domain of TCR clone 236500 (TRBV19, TRBJ1-1)
CASSPTRFWPGTEAFF

SEQ ID NO: 473001 - protein, 14 aa, Homo sapiens
  CDR3 for alpha chain variable domain of TCR clone 236501 (TRAV12-2, TRAJ40)
YAVTIPSGTYKYIF

SEQ ID NO: 473002 - protein, 13 aa, Homo sapiens
  CDR3 for beta chain variable domain of TCR clone 236501 (TRBV7-9, TRBJ1-2)
CASSLKQNYGYTF

SEQ ID NO: 473003 - protein, 17 aa, Homo sapiens
  CDR3 for alpha chain variable domain of TCR clone 236502 (TRAV3, TRAJ6)
CAVRDGPRAGGSYIPTF

SEQ ID NO: 473004 - protein, 12 aa, Homo sapiens
  CDR3 for beta chain variable domain of TCR clone 236502 (TRBV28, TRBJ2-5)
CASSGQTETQYF

SEQ ID NO: 473005 - protein, 13 aa, Homo sapiens
  CDR3 for alpha chain variable domain of TCR clone 236503 (TRAV8-3, TRAJ44)
CAVVPGTASKLTF

SEQ ID NO: 473006 - protein, 15 aa, Homo sapiens
  CDR3 for beta chain variable domain of TCR clone 236503 (TRBV7-9, TRBJ2-1)
CASSFVGAGKNEQFF

SEQ ID NO: 473007 - protein, 13 aa, Homo sapiens
  CDR3 for alpha chain variable domain of TCR clone 236504 (TRAV3, TRAJ34)
CAVRAGEHRQAHL

SEQ ID NO: 473008 - protein, 15 aa, Homo sapiens
  CDR3 for beta chain variable domain of TCR clone 236504 (TRBV6-3, TRBJ2-7)
CASSSPGTVFYEQYF

SEQ ID NO: 473009 - protein, 14 aa, Homo sapiens
  CDR3 for alpha chain variable domain of TCR clone 236505 (TRAV8-2, TRAJ37)
CVVSISGNTGKLIF

SEQ ID NO: 473010 - protein, 11 aa, Homo sapiens
  CDR3 for beta chain variable domain of TCR clone 236505 (TRBV18, TRBJ2-5)
CASSPREAQYS

SEQ ID NO: 473011 - protein, 18 aa, Homo sapiens
  CDR3 for alpha chain variable domain of TCR clone 236506 (TRAV21, TRAJ52)
CAVRPSPAGGTSYGKLTF

SEQ ID NO: 473012 - protein, 15 aa, Homo sapiens
  CDR3 for beta chain variable domain of TCR clone 236506 (TRBV20-1, TRBJ2-3)
CSAEPLAGHGDTQYL

SEQ ID NO: 473013 - protein, 15 aa, Homo sapiens
  CDR3 for alpha chain variable domain of TCR clone 236507 (TRAV2, TRAJ45)
CAVDGTGGGADGLIF

SEQ ID NO: 473014 - protein, 16 aa, Homo sapiens
  CDR3 for beta chain variable domain of TCR clone 236507 (TRBV6-5, TRBJ2-1)
CASSYSLSGGYNEQFF

SEQ ID NO: 473015 - protein, 16 aa, Homo sapiens
  CDR3 for alpha chain variable domain of TCR clone 236508 (TRAV17, TRAJ22)
CATGPISSGSARQLTF

SEQ ID NO: 473016 - protein, 14 aa, Homo sapiens
  CDR3 for beta chain variable domain of TCR clone 236508 (TRBV4-1, TRBJ2-2)
CASSQAVNTGELFF

SEQ ID NO: 473017 - protein, 18 aa, Homo sapiens
  CDR3 for alpha chain variable domain of TCR clone 236509 (TRAV26-1, TRAJ23)
CIVRVGLEVRNQGGKLIF

SEQ ID NO: 473018 - protein, 15 aa, Homo sapiens
  CDR3 for beta chain variable domain of TCR clone 236509 (TRBV10-3, TRBJ2-3)
CAISDWDRDTDTQYF

SEQ ID NO: 473019 - protein, 12 aa, Homo sapiens
  CDR3 for alpha chain variable domain of TCR clone 236510 (TRAV20, TRAJ57)
CAVGGGSEKLVF

SEQ ID NO: 473020 - protein, 15 aa, Homo sapiens
  CDR3 for beta chain variable domain of TCR clone 236510 (TRBV6-3, TRBJ2-7)
CASSSPGTVFYEQYF

SEQ ID NO: 473021 - protein, 13 aa, Homo sapiens
  CDR3 for alpha chain variable domain of TCR clone 236511 (TRAV13-2, TRAJ13)
CAERPGGYKKVTF

SEQ ID NO: 473022 - protein, 15 aa, Homo sapiens
  CDR3 for beta chain variable domain of TCR clone 236511 (TRBV11-3, TRBJ2-7)
CASSPGPASSYEQYF

SEQ ID NO: 473023 - protein, 13 aa, Homo sapiens
  CDR3 for alpha chain variable domain of TCR clone 236512 (TRAV24, TRAJ44)
CALLTGTASKLTF

SEQ ID NO: 473024 - protein, 16 aa, Homo sapiens
  CDR3 for beta chain variable domain of TCR clone 236512 (TRBV2, TRBJ2-3)
CASSTSVDGVTDTQYF

SEQ ID NO: 473025 - protein, 11 aa, Homo sapiens
  CDR3 for alpha chain variable domain of TCR clone 236513 (TRAV23/DV6, TRAJ58)
CAARLLRGETS

SEQ ID NO: 473026 - protein, 13 aa, Homo sapiens
  CDR3 for beta chain variable domain of TCR clone 236513 (TRBV28, TRBJ1-3)
CASSLLGRSTIYF

SEQ ID NO: 473027 - protein, 16 aa, Homo sapiens
  CDR3 for alpha chain variable domain of TCR clone 236514 (TRAV16, TRAJ4)
CALSRMFSGGYNKLIF

SEQ ID NO: 473028 - protein, 12 aa, Homo sapiens
  CDR3 for beta chain variable domain of TCR clone 236514 (TRBV29-1, TRBJ2-3)
CSVTEGADTQYF

SEQ ID NO: 473029 - protein, 13 aa, Homo sapiens
  CDR3 for alpha chain variable domain of TCR clone 236515 (TRAV12-3, TRAJ47)
CAMKKEYGNKLDF

SEQ ID NO: 473030 - protein, 16 aa, Homo sapiens
  CDR3 for beta chain variable domain of TCR clone 236515 (TRBV3-1, TRBJ2-6)
CASSLTWVSGANVLTF

SEQ ID NO: 473031 - protein, 14 aa, Homo sapiens
  CDR3 for alpha chain variable domain of TCR clone 236516 (TRAV20, TRAJ10)
CAVRVEGGGDKLTF

SEQ ID NO: 473032 - protein, 13 aa, Homo sapiens
  CDR3 for beta chain variable domain of TCR clone 236516 (TRBV13, TRBJ2-2)
CASSPGLTGELFF

SEQ ID NO: 473033 - protein, 14 aa, Homo sapiens
  CDR3 for alpha chain variable domain of TCR clone 236517 (TRAV12-3, TRAJ10)
SHLPLTGGGNKLTF

SEQ ID NO: 473034 - protein, 13 aa, Homo sapiens
  CDR3 for beta chain variable domain of TCR clone 236517 (TRBV9, TRBJ2-1)
CGSSPSGGNEQFF

SEQ ID NO: 473035 - protein, 13 aa, Homo sapiens
  CDR3 for alpha chain variable domain of TCR clone 236518 (TRAV13-1, TRAJ49)
CAAMLYTGNQFYF

SEQ ID NO: 473036 - protein, 15 aa, Homo sapiens
  CDR3 for beta chain variable domain of TCR clone 236518 (TRBV12-4, TRBJ1-5)
CASTRGSGFEQPQHF

SEQ ID NO: 473037 - protein, 17 aa, Homo sapiens
  CDR3 for alpha chain variable domain of TCR clone 236519 (TRAV2, TRAJ36)
CAVEDRGNWGKKPLLWD

SEQ ID NO: 473038 - protein, 14 aa, Homo sapiens
  CDR3 for beta chain variable domain of TCR clone 236519 (TRBV7-9, TRBJ2-5)
CASSLDTAQETQYF

SEQ ID NO: 473039 - protein, 17 aa, Homo sapiens
  CDR3 for alpha chain variable domain of TCR clone 236520 (TRAV3, TRAJ6)
CAVRDGPRAGGSYLPTF

SEQ ID NO: 473040 - protein, 14 aa, Homo sapiens
  CDR3 for beta chain variable domain of TCR clone 236520 (TRBV7-2, TRBJ2-7)
CASSPKTSVYEQYF

SEQ ID NO: 473041 - protein, 15 aa, Homo sapiens
  CDR3 for alpha chain variable domain of TCR clone 236521 (TRAV23/DV6, TRAJ37)
CAAGEGSSNTDTLIF

SEQ ID NO: 473042 - protein, 17 aa, Homo sapiens
  CDR3 for beta chain variable domain of TCR clone 236521 (TRBV20-1, TRBJ2-7)
CSATRAGGVAGVEEQYF

SEQ ID NO: 473043 - protein, 16 aa, Homo sapiens
  CDR3 for alpha chain variable domain of TCR clone 236522 (TRAV3, TRAJ37)
CAVRGKGSGNTGKLIF

SEQ ID NO: 473044 - protein, 16 aa, Homo sapiens
  CDR3 for beta chain variable domain of TCR clone 236522 (TRBV10-3, TRBJ2-2)
CAINSRASGSGGELFF

SEQ ID NO: 473045 - protein, 14 aa, Homo sapiens
  CDR3 for alpha chain variable domain of TCR clone 236523 (TRAV35, TRAJ33)
CAGSSQDSNYQLIW

SEQ ID NO: 473046 - protein, 14 aa, Homo sapiens
  CDR3 for beta chain variable domain of TCR clone 236523 (TRBV18, TRBJ2-5)
CASSPGVSQETQYF

SEQ ID NO: 473047 - protein, 13 aa, Homo sapiens
  CDR3 for alpha chain variable domain of TCR clone 236524 (TRAV29/DV5, TRAJ29)
CAASAAGNTPLVF

SEQ ID NO: 473048 - protein, 14 aa, Homo sapiens
  CDR3 for beta chain variable domain of TCR clone 236524 (TRBV19, TRBJ2-3)
CASSAPRGTDTQYY

SEQ ID NO: 473049 - protein, 12 aa, Homo sapiens
  CDR3 for alpha chain variable domain of TCR clone 236525 (TRAV29/DV5, TRAJ49)
CAATDTGNHFYF

SEQ ID NO: 473050 - protein, 19 aa, Homo sapiens
  CDR3 for beta chain variable domain of TCR clone 236525 (TRBV25-1, TRBJ2-2)
CAILVYRVDRGRKTGELFF

SEQ ID NO: 473051 - protein, 13 aa, Homo sapiens
  CDR3 for alpha chain variable domain of TCR clone 236526 (TRAV8-4, TRAJ44)
CAVCTVTASKLTF

SEQ ID NO: 473052 - protein, 15 aa, Homo sapiens
  CDR3 for beta chain variable domain of TCR clone 236526 (TRBV14, TRBJ2-1)
CASSQMGLHFNEQFF

SEQ ID NO: 473053 - protein, 13 aa, Homo sapiens
  CDR3 for alpha chain variable domain of TCR clone 236527 (TRAV21, TRAJ20)
CTVGLRVDYKLSF

SEQ ID NO: 473054 - protein, 14 aa, Homo sapiens
  CDR3 for beta chain variable domain of TCR clone 236527 (TRBV4-1, TRBJ2-2)
CASSQAVNTGELFF

SEQ ID NO: 473055 - protein, 13 aa, Homo sapiens
  CDR3 for alpha chain variable domain of TCR clone 236528 (TRAV27, TRAJ41)
CAGEGNSGYARNF

SEQ ID NO: 473056 - protein, 15 aa, Homo sapiens
  CDR3 for beta chain variable domain of TCR clone 236528 (TRBV11-2, TRBJ2-2)
CASSSDRVNAGELFF

SEQ ID NO: 473057 - protein, 15 aa, Homo sapiens
  CDR3 for alpha chain variable domain of TCR clone 236529 (TRAV16, TRAJ17)
CALSGNKAAGNKLTF

SEQ ID NO: 473058 - protein, 19 aa, Homo sapiens
  CDR3 for beta chain variable domain of TCR clone 236529 (TRBV7-2, TRBJ2-3)
CASSLVGTSGRDLPDTQYF

SEQ ID NO: 473059 - protein, 14 aa, Homo sapiens
  CDR3 for alpha chain variable domain of TCR clone 236530 (TRAV12-2, TRAJ40)
CAVKIPAGTYKYIF

SEQ ID NO: 473060 - protein, 20 aa, Homo sapiens
  CDR3 for beta chain variable domain of TCR clone 236530 (TRBV28, TRBJ2-1)
CASTPIGRSPGLAGGNEQFF

SEQ ID NO: 473061 - protein, 15 aa, Homo sapiens
  CDR3 for alpha chain variable domain of TCR clone 236531 (TRAV12-1, TRAJ36)
CVVNEHQTGANNLFF

SEQ ID NO: 473062 - protein, 12 aa, Homo sapiens
  CDR3 for beta chain variable domain of TCR clone 236531 (TRBV29-1, TRBJ2-3)
CGVTGGADTQYF

SEQ ID NO: 473063 - protein, 14 aa, Homo sapiens
  CDR3 for alpha chain variable domain of TCR clone 236532 (TRAV16, TRAJ48)
CALTPGFRNEKLTF

SEQ ID NO: 473064 - protein, 14 aa, Homo sapiens
  CDR3 for beta chain variable domain of TCR clone 236532 (TRBV7-2, TRBJ2-7)
CASSSISGFSEQYF

SEQ ID NO: 473065 - protein, 15 aa, Homo sapiens
  CDR3 for alpha chain variable domain of TCR clone 236533 (TRAV4, TRAJ28)
FLVEGSGAGSYQLTF

SEQ ID NO: 473066 - protein, 15 aa, Homo sapiens
  CDR3 for beta chain variable domain of TCR clone 236533 (TRBV9, TRBJ2-3)
CASSVRGLAVDTQYF

SEQ ID NO: 473067 - protein, 13 aa, Homo sapiens
  CDR3 for alpha chain variable domain of TCR clone 236534 (TRAV17, TRAJ5)
CATGDTVRRALTF

SEQ ID NO: 473068 - protein, 13 aa, Homo sapiens
  CDR3 for beta chain variable domain of TCR clone 236534 (TRBV19, TRBJ1-5)
CASSIEPVQPQHF

SEQ ID NO: 473069 - protein, 14 aa, Homo sapiens
  CDR3 for alpha chain variable domain of TCR clone 236535 (TRAV8-2, TRAJ11)
CVVSEKSGYSTLTF

SEQ ID NO: 473070 - protein, 16 aa, Homo sapiens
  CDR3 for beta chain variable domain of TCR clone 236535 (TRBV28, TRBJ2-1)
CASSSPEYPRDSEQFF

SEQ ID NO: 473071 - protein, 16 aa, Homo sapiens
  CDR3 for alpha chain variable domain of TCR clone 236536 (TRAV26-1, TRAJ23)
CIVRGANSNQGGRLIF

SEQ ID NO: 473072 - protein, 16 aa, Homo sapiens
  CDR3 for beta chain variable domain of TCR clone 236536 (TRBV10-3, TRBJ2-1)
CAISGVGDGGGGEQFF

SEQ ID NO: 473073 - protein, 14 aa, Homo sapiens
  CDR3 for alpha chain variable domain of TCR clone 236537 (TRAV12-1, TRAJ23)
CVMIVYNQGGKLIF

SEQ ID NO: 473074 - protein, 15 aa, Homo sapiens
  CDR3 for beta chain variable domain of TCR clone 236537 (TRBV20-1, TRBJ1-5)
CSAKPPGQGPQPQHF

SEQ ID NO: 473075 - protein, 10 aa, Homo sapiens
  CDR3 for alpha chain variable domain of TCR clone 236538 (TRAV4, TRAJ38)
CLVGDPPHNA

SEQ ID NO: 473076 - protein, 15 aa, Homo sapiens
  CDR3 for beta chain variable domain of TCR clone 236538 (TRBV7-6, TRBJ2-2)
CASSFEGGRPGELFF

SEQ ID NO: 473077 - protein, 14 aa, Homo sapiens
  CDR3 for alpha chain variable domain of TCR clone 236539 (TRAV21, TRAJ17)
CAVRSKAAGNKLTF

SEQ ID NO: 473078 - protein, 13 aa, Homo sapiens
  CDR3 for beta chain variable domain of TCR clone 236539 (TRBV4-2, TRBJ1-1)
CASSQAGNTEAFF

SEQ ID NO: 473079 - protein, 13 aa, Homo sapiens
  CDR3 for alpha chain variable domain of TCR clone 236540 (TRAV21, TRAJ56)
CAVRTGANSNLTF

SEQ ID NO: 473080 - protein, 15 aa, Homo sapiens
  CDR3 for beta chain variable domain of TCR clone 236540 (TRBV7-9, TRBJ1-1)
CASSHRGTVNTEAFF

SEQ ID NO: 473081 - protein, 14 aa, Homo sapiens
  CDR3 for alpha chain variable domain of TCR clone 236541 (TRAV12-1, TRAJ30)
CVVKIGGRDDKTIF

SEQ ID NO: 473082 - protein, 14 aa, Homo sapiens
  CDR3 for beta chain variable domain of TCR clone 236541 (TRBV20-1, TRBJ2-1)
CSAQIGGSANEQFF

SEQ ID NO: 473083 - protein, 15 aa, Homo sapiens
  CDR3 for alpha chain variable domain of TCR clone 236542 (TRAV3, TRAJ5)
FAGRDLDTGRRALTF

SEQ ID NO: 473084 - protein, 13 aa, Homo sapiens
  CDR3 for beta chain variable domain of TCR clone 236542 (TRBV12-4, TRBJ2-7)
CASSPTETYEQYF

SEQ ID NO: 473085 - protein, 15 aa, Homo sapiens
  CDR3 for alpha chain variable domain of TCR clone 236543 (TRAV20, TRAJ41)
CAVQANSNAGYALNF

SEQ ID NO: 473086 - protein, 18 aa, Homo sapiens
  CDR3 for beta chain variable domain of TCR clone 236543 (TRBV7-9, TRBJ2-7)
CASSLTTSGSRTWYEQYF

SEQ ID NO: 473087 - protein, 16 aa, Homo sapiens
  CDR3 for alpha chain variable domain of TCR clone 236544 (TRAV12-3, TRAJ53)
CAMSPGSGGNNYKLTF

SEQ ID NO: 473088 - protein, 11 aa, Homo sapiens
  CDR3 for beta chain variable domain of TCR clone 236544 (TRBV29-1, TRBJ2-5)
CSEDRTGTQYF

SEQ ID NO: 473089 - protein, 17 aa, Homo sapiens
  CDR3 for alpha chain variable domain of TCR clone 236545 (TRAV3, TRAJ6)
CAVRDGPRAGGSYIPNF

SEQ ID NO: 473090 - protein, 15 aa, Homo sapiens
  CDR3 for beta chain variable domain of TCR clone 236545 (TRBV5-8, TRBJ2-2)
CASSLDRGATGELFF

SEQ ID NO: 473091 - protein, 12 aa, Homo sapiens
  CDR3 for alpha chain variable domain of TCR clone 236546 (TRAV12-3, TRAJ17)
CAMMLTGNKLTF

SEQ ID NO: 473092 - protein, 13 aa, Homo sapiens
  CDR3 for beta chain variable domain of TCR clone 236546 (TRBV23-1, TRBJ1-4)
CASRGKFNEKLFF

SEQ ID NO: 473093 - protein, 12 aa, Homo sapiens
  CDR3 for alpha chain variable domain of TCR clone 236547 (TRAV2, TRAJ33)
CAFMDSHFQLIW

SEQ ID NO: 473094 - protein, 16 aa, Homo sapiens
  CDR3 for beta chain variable domain of TCR clone 236547 (TRBV2, TRBJ2-7)
CASSEPWTGPSYEQYF

SEQ ID NO: 473095 - protein, 13 aa, Homo sapiens
  CDR3 for alpha chain variable domain of TCR clone 236548 (TRAV8-3, TRAJ43)
CAVVPYNNNDMRF

SEQ ID NO: 473096 - protein, 17 aa, Homo sapiens
  CDR3 for beta chain variable domain of TCR clone 236548 (TRBV7-7, TRBJ1-1)
CASIGDRPNRGVTEAFF

SEQ ID NO: 473097 - protein, 13 aa, Homo sapiens
  CDR3 for alpha chain variable domain of TCR clone 236549 (TRAV13-1, TRAJ12)
CAASPDSSYKLIF

SEQ ID NO: 473098 - protein, 16 aa, Homo sapiens
  CDR3 for beta chain variable domain of TCR clone 236549 (TRBV15, TRBJ2-1)
CATSRERLAGAYEQFV

SEQ ID NO: 473099 - protein, 14 aa, Homo sapiens
  CDR3 for alpha chain variable domain of TCR clone 236550 (TRAV8-2, TRAJ4)
CVVSPSGGYNKLIF

SEQ ID NO: 473100 - protein, 17 aa, Homo sapiens
  CDR3 for beta chain variable domain of TCR clone 236550 (TRBV7-9, TRBJ2-3)
CASSPTVAGDLTDTQYF

SEQ ID NO: 473101 - protein, 17 aa, Homo sapiens
  CDR3 for alpha chain variable domain of TCR clone 236551 (TRAV13-1, TRAJ52)
CAASSGAGGTSYGKLTF

SEQ ID NO: 473102 - protein, 15 aa, Homo sapiens
  CDR3 for beta chain variable domain of TCR clone 236551 (TRBV2, TRBJ2-5)
CASSELAGSYNEQFF

SEQ ID NO: 473103 - protein, 14 aa, Homo sapiens
  CDR3 for alpha chain variable domain of TCR clone 236552 (TRAV8-3, TRAJ4)
CAVGAAGGYNKLIF

SEQ ID NO: 473104 - protein, 18 aa, Homo sapiens
  CDR3 for beta chain variable domain of TCR clone 236552 (TRBV7-9, TRBJ2-7)
CASSLTTSGSRTWYEQYF

SEQ ID NO: 473105 - protein, 14 aa, Homo sapiens
  CDR3 for alpha chain variable domain of TCR clone 236553 (TRAV16, TRAJ17)
CALSGRAASNKLTF

SEQ ID NO: 473106 - protein, 15 aa, Homo sapiens
  CDR3 for beta chain variable domain of TCR clone 236553 (TRBV3-1, TRBJ1-2)
CASSPTRLPEGGDTF

SEQ ID NO: 473107 - protein, 13 aa, Homo sapiens
  CDR3 for alpha chain variable domain of TCR clone 236554 (TRAV25, TRAJ48)
CAGPKGGNEKSTF

SEQ ID NO: 473108 - protein, 15 aa, Homo sapiens
  CDR3 for beta chain variable domain of TCR clone 236554 (TRBV9, TRBJ2-6)
CASSVLWNGANDLTF

SEQ ID NO: 473109 - protein, 12 aa, Homo sapiens
  CDR3 for alpha chain variable domain of TCR clone 236555 (TRAV16, TRAJ56)
CAPTVANSKLTF

SEQ ID NO: 473110 - protein, 12 aa, Homo sapiens
  CDR3 for beta chain variable domain of TCR clone 236555 (TRBV29-1, TRBJ2-3)
CSVTGGADTHYF

SEQ ID NO: 473111 - protein, 13 aa, Homo sapiens
  CDR3 for alpha chain variable domain of TCR clone 236556 (TRAV1-1, TRAJ9)
CAAQNTGGFKTIF

SEQ ID NO: 473112 - protein, 16 aa, Homo sapiens
  CDR3 for beta chain variable domain of TCR clone 236556 (TRBV20-1, TRBJ1-4)
CSAPGQGLLTNEKLFF

SEQ ID NO: 473113 - protein, 12 aa, Homo sapiens
  CDR3 for alpha chain variable domain of TCR clone 236557 (TRAV1-1, TRAJ39)
CAVPVVGNMLTS

SEQ ID NO: 473114 - protein, 15 aa, Homo sapiens
  CDR3 for beta chain variable domain of TCR clone 236557 (TRBV19, TRBJ1-6)
CASSTQGAVGSPLHF

SEQ ID NO: 473115 - protein, 17 aa, Homo sapiens
  CDR3 for alpha chain variable domain of TCR clone 236558 (TRAV12-2, TRAJ53)
CAPLPDSQEGSNYKLTF

SEQ ID NO: 473116 - protein, 14 aa, Homo sapiens
  CDR3 for beta chain variable domain of TCR clone 236558 (TRBV7-2, TRBJ2-7)
CASSLDPGPYEQYF

SEQ ID NO: 473117 - protein, 18 aa, Homo sapiens
  CDR3 for alpha chain variable domain of TCR clone 236559 (TRAV26-2, TRAJ54)
CILRDVEVGIQGAQKLVF

SEQ ID NO: 473118 - protein, 14 aa, Homo sapiens
  CDR3 for beta chain variable domain of TCR clone 236559 (TRBV11-2, TRBJ1-3)
CASSLAVPGNTMYF

SEQ ID NO: 473119 - protein, 16 aa, Homo sapiens
  CDR3 for alpha chain variable domain of TCR clone 236560 (TRAV17, TRAJ22)
CATGPISSGSARQLTF

SEQ ID NO: 473120 - protein, 13 aa, Homo sapiens
  CDR3 for beta chain variable domain of TCR clone 236560 (TRBV11-2, TRBJ2-1)
CASSLGLAVGRFF

SEQ ID NO: 473121 - protein, 21 aa, Homo sapiens
  CDR3 for alpha chain variable domain of TCR clone 236561 (TRAV1-1, TRAJ6)
CLLLLRCERLERTGGSYIPTF

SEQ ID NO: 473122 - protein, 17 aa, Homo sapiens
  CDR3 for beta chain variable domain of TCR clone 236561 (TRBV11-2, TRBJ2-1)
CASSLYPPGVEYNEQFF

SEQ ID NO: 473123 - protein, 13 aa, Homo sapiens
  CDR3 for alpha chain variable domain of TCR clone 236562 (TRAV20, TRAJ49)
CAVQARTGNQFYF

SEQ ID NO: 473124 - protein, 13 aa, Homo sapiens
  CDR3 for beta chain variable domain of TCR clone 236562 (TRBV12-4, TRBJ2-5)
CASRLAVQETQYF

SEQ ID NO: 473125 - protein, 15 aa, Homo sapiens
  CDR3 for alpha chain variable domain of TCR clone 236563 (TRAV12-3, TRAJ6)
CAMSATSGGSYIPTF

SEQ ID NO: 473126 - protein, 13 aa, Homo sapiens
  CDR3 for beta chain variable domain of TCR clone 236563 (TRBV27, TRBJ1-4)
CASSLMGDEKLFF

SEQ ID NO: 473127 - protein, 14 aa, Homo sapiens
  CDR3 for alpha chain variable domain of TCR clone 236564 (TRAV1-2, TRAJ16)
CAVNRFSDGEKLLF

SEQ ID NO: 473128 - protein, 14 aa, Homo sapiens
  CDR3 for beta chain variable domain of TCR clone 236564 (TRBV11-1, TRBJ2-7)
CASSFRQGSYEQYF

SEQ ID NO: 473129 - protein, 13 aa, Homo sapiens
  CDR3 for alpha chain variable domain of TCR clone 236565 (TRAV13-1, TRAJ6)
CAARRGGSYIPTF

SEQ ID NO: 473130 - protein, 16 aa, Homo sapiens
  CDR3 for beta chain variable domain of TCR clone 236565 (TRBV4-1, TRBJ1-2)
CASSQDAGQVLYGYTF

SEQ ID NO: 473131 - protein, 13 aa, Homo sapiens
  CDR3 for alpha chain variable domain of TCR clone 236566 (TRAV12-2, TRAJ20)
CAVYPSNDYKLSF

SEQ ID NO: 473132 - protein, 17 aa, Homo sapiens
  CDR3 for beta chain variable domain of TCR clone 236566 (TRBV20-1, TRBJ2-1)
CSASSSGLAGSYNEQFF

SEQ ID NO: 473133 - protein, 14 aa, Homo sapiens
  CDR3 for alpha chain variable domain of TCR clone 236567 (TRAV8-2, TRAJ4)
CVVSPSGGYNKLIF

SEQ ID NO: 473134 - protein, 15 aa, Homo sapiens
  CDR3 for beta chain variable domain of TCR clone 236567 (TRBV4-1, TRBJ2-5)
CASSQWDLYQETQYF

SEQ ID NO: 473135 - protein, 17 aa, Homo sapiens
  CDR3 for alpha chain variable domain of TCR clone 236568 (TRAV3, TRAJ6)
CAVRDGPRAGGSYIPTF

SEQ ID NO: 473136 - protein, 16 aa, Homo sapiens
  CDR3 for beta chain variable domain of TCR clone 236568 (TRBV7-2, TRBJ2-7)
CASSLDPGGGSGEQYF

SEQ ID NO: 473137 - protein, 22 aa, Homo sapiens
  CDR3 for alpha chain variable domain of TCR clone 236569 (TRAV23/DV6, TRAJ17)
PSLETKPPTSVHGGAAGNKLTF

SEQ ID NO: 473138 - protein, 14 aa, Homo sapiens
  CDR3 for beta chain variable domain of TCR clone 236569 (TRBV7-2, TRBJ1-2)
CASSQTGSTYGYTF

SEQ ID NO: 473139 - protein, 15 aa, Homo sapiens
  CDR3 for alpha chain variable domain of TCR clone 236570 (TRAV21, TRAJ53)
CAVRQSGGSNYKLTF

SEQ ID NO: 473140 - protein, 12 aa, Homo sapiens
  CDR3 for beta chain variable domain of TCR clone 236570 (TRBV7-9, TRBJ2-7)
YASSIKREEQYF

SEQ ID NO: 473141 - protein, 15 aa, Homo sapiens
  CDR3 for alpha chain variable domain of TCR clone 236571 (TRAV4, TRAJ39)
CLVGPNNNAGNMLTF

SEQ ID NO: 473142 - protein, 15 aa, Homo sapiens
  CDR3 for beta chain variable domain of TCR clone 236571 (TRBV7-2, TRBJ2-1)
CASSSGLAGGNEQFF

SEQ ID NO: 473143 - protein, 10 aa, Homo sapiens
  CDR3 for alpha chain variable domain of TCR clone 236572 (TRAV20, TRAJ22)
CAAPARQLTS

SEQ ID NO: 473144 - protein, 14 aa, Homo sapiens
  CDR3 for beta chain variable domain of TCR clone 236572 (TRBV19, TRBJ2-1)
CASSMGSGATEQFF

SEQ ID NO: 473145 - protein, 15 aa, Homo sapiens
  CDR3 for alpha chain variable domain of TCR clone 236573 (TRAV2, TRAJ9)
CAVEDLGIGGFKTIF

SEQ ID NO: 473146 - protein, 16 aa, Homo sapiens
  CDR3 for beta chain variable domain of TCR clone 236573 (TRBV24-1, TRBJ2-3)
CATSDPGTGATDTQYF

SEQ ID NO: 473147 - protein, 14 aa, Homo sapiens
  CDR3 for alpha chain variable domain of TCR clone 236574 (TRAV12-2, TRAJ45)
CALPERGGADGLTF

SEQ ID NO: 473148 - protein, 15 aa, Homo sapiens
  CDR3 for beta chain variable domain of TCR clone 236574 (TRBV20-1, TRBJ2-5)
CSAEGTGGLQETQYF

SEQ ID NO: 473149 - protein, 10 aa, Homo sapiens
  CDR3 for alpha chain variable domain of TCR clone 236575 (TRAV27, TRAJ28)
RGAGSYQLTF

SEQ ID NO: 473150 - protein, 13 aa, Homo sapiens
  CDR3 for beta chain variable domain of TCR clone 236575 (TRBV7-3, TRBJ2-3)
CASSPRGSQTQYF

SEQ ID NO: 473151 - protein, 14 aa, Homo sapiens
  CDR3 for alpha chain variable domain of TCR clone 236576 (TRAV21, TRAJ9)
CCGGGGTGGFITIF

SEQ ID NO: 473152 - protein, 13 aa, Homo sapiens
  CDR3 for beta chain variable domain of TCR clone 236576 (TRBV12-4, TRBJ1-2)
CASSSGLTVISTF

SEQ ID NO: 473153 - protein, 18 aa, Homo sapiens
  CDR3 for alpha chain variable domain of TCR clone 236577 (TRAV12-2, )
CAVEDIQNPDPAVYQLRD

SEQ ID NO: 473154 - protein, 14 aa, Homo sapiens
  CDR3 for beta chain variable domain of TCR clone 236577 (TRBV7-6, TRBJ2-3)
CASSLGTVTDTQYF

SEQ ID NO: 473155 - protein, 15 aa, Homo sapiens
  CDR3 for alpha chain variable domain of TCR clone 236578 (TRAV1-1, TRAJ5)
CAVRHMDTVRRALTF

SEQ ID NO: 473156 - protein, 17 aa, Homo sapiens
  CDR3 for beta chain variable domain of TCR clone 236578 (TRBV28, TRBJ2-7)
CASSPGLAGGDSSEQYF

SEQ ID NO: 473157 - protein, 13 aa, Homo sapiens
  CDR3 for alpha chain variable domain of TCR clone 236579 (TRAV2, TRAJ15)
CAVASQAGTALIF

SEQ ID NO: 473158 - protein, 13 aa, Homo sapiens
  CDR3 for beta chain variable domain of TCR clone 236579 (TRBV7-6, TRBJ2-3)
RAGSLRSDNTQYF

SEQ ID NO: 473159 - protein, 14 aa, Homo sapiens
  CDR3 for alpha chain variable domain of TCR clone 236580 (TRAV1-2, TRAJ16)
CAVNRFSDGQKLLF

SEQ ID NO: 473160 - protein, 15 aa, Homo sapiens
  CDR3 for beta chain variable domain of TCR clone 236580 (TRBV3-1, TRBJ2-5)
CASSANLGGPETQFF

SEQ ID NO: 473161 - protein, 13 aa, Homo sapiens
  CDR3 for alpha chain variable domain of TCR clone 236581 (TRAV2, TRAJ5)
CAVPDTGRRALTF

SEQ ID NO: 473162 - protein, 14 aa, Homo sapiens
  CDR3 for beta chain variable domain of TCR clone 236581 (TRBV12-4, TRBJ1-1)
CASSLGTGGTEAFF

SEQ ID NO: 473163 - protein, 14 aa, Homo sapiens
  CDR3 for alpha chain variable domain of TCR clone 236582 (TRAV3, TRAJ28)
CCEGPLAGSYQLTF

SEQ ID NO: 473164 - protein, 12 aa, Homo sapiens
  CDR3 for beta chain variable domain of TCR clone 236582 (TRBV11-2, TRBJ2-2)
CASSLGGGELFF

SEQ ID NO: 473165 - protein, 14 aa, Homo sapiens
  CDR3 for alpha chain variable domain of TCR clone 236583 (TRAV17, TRAJ57)
CATDPQGGSEKLVF

SEQ ID NO: 473166 - protein, 15 aa, Homo sapiens
  CDR3 for beta chain variable domain of TCR clone 236583 (TRBV6-3, TRBJ2-7)
YASSSPGTVFYEQYF

SEQ ID NO: 473167 - protein, 14 aa, Homo sapiens
  CDR3 for alpha chain variable domain of TCR clone 236584 (TRAV12-2, TRAJ40)
CAVKIPSGTYKYIF

SEQ ID NO: 473168 - protein, 14 aa, Homo sapiens
  CDR3 for beta chain variable domain of TCR clone 236584 (TRBV20-1, TRBJ1-1)
CGAQTRSGGTEAFF

SEQ ID NO: 473169 - protein, 14 aa, Homo sapiens
  CDR3 for alpha chain variable domain of TCR clone 236585 (TRAV26-1, TRAJ38)
CIADNAGKNRKLIW

SEQ ID NO: 473170 - protein, 14 aa, Homo sapiens
  CDR3 for beta chain variable domain of TCR clone 236585 (TRBV4-1, TRBJ2-2)
CASSQAVNTGELFF

SEQ ID NO: 473171 - protein, 14 aa, Homo sapiens
  CDR3 for alpha chain variable domain of TCR clone 236586 (TRAV38-2/DV8, TRAJ23)
CAYRSQNQGGKLIF

SEQ ID NO: 473172 - protein, 13 aa, Homo sapiens
  CDR3 for beta chain variable domain of TCR clone 236586 (TRBV24-1, TRBJ2-1)
CATSAGPYIEQFF

SEQ ID NO: 473173 - protein, 16 aa, Homo sapiens
  CDR3 for alpha chain variable domain of TCR clone 236587 (TRAV3, TRAJ10)
CAVGDMRAGGGNKLTF

SEQ ID NO: 473174 - protein, 14 aa, Homo sapiens
  CDR3 for beta chain variable domain of TCR clone 236587 (TRBV11-2, TRBJ2-7)
CASSSTGEGYEQYF

SEQ ID NO: 473175 - protein, 16 aa, Homo sapiens
  CDR3 for alpha chain variable domain of TCR clone 236588 (TRAV3, TRAJ10)
CAVRDMRAGGGNKLTF

SEQ ID NO: 473176 - protein, 14 aa, Homo sapiens
  CDR3 for beta chain variable domain of TCR clone 236588 (TRBV7-2, TRBJ2-7)
CASSPKTSFYEQYV

SEQ ID NO: 473177 - protein, 16 aa, Homo sapiens
  CDR3 for alpha chain variable domain of TCR clone 236589 (TRAV30, TRAJ24)
CGTEIVDADSWGKFQF

SEQ ID NO: 473178 - protein, 12 aa, Homo sapiens
  CDR3 for beta chain variable domain of TCR clone 236589 (TRBV11-2, TRBJ2-1)
CASSPRNNEQFF

SEQ ID NO: 473179 - protein, 11 aa, Homo sapiens
  CDR3 for alpha chain variable domain of TCR clone 236590 (TRAV1-1, TRAJ23)
CAVRQGGKLIF

SEQ ID NO: 473180 - protein, 15 aa, Homo sapiens
  CDR3 for beta chain variable domain of TCR clone 236590 (TRBV27, TRBJ1-6)
CASSFDRGLGSPLHF

SEQ ID NO: 473181 - protein, 14 aa, Homo sapiens
  CDR3 for alpha chain variable domain of TCR clone 236591 (TRAV1-2, TRAJ16)
CAVNRYSDGQKLLF

SEQ ID NO: 473182 - protein, 13 aa, Homo sapiens
  CDR3 for beta chain variable domain of TCR clone 236591 (TRBV7-3, TRBJ1-1)
CASSQDWGAEAFF

SEQ ID NO: 473183 - protein, 14 aa, Homo sapiens
  CDR3 for alpha chain variable domain of TCR clone 236592 (TRAV12-2, TRAJ13)
CAAKKTGGYQKVTF

SEQ ID NO: 473184 - protein, 13 aa, Homo sapiens
  CDR3 for beta chain variable domain of TCR clone 236592 (TRBV7-9, TRBJ1-2)
CASSLKQNYGYTF

SEQ ID NO: 473185 - protein, 14 aa, Homo sapiens
  CDR3 for alpha chain variable domain of TCR clone 236593 (TRAV25, TRAJ22)
CAVRSSGSARQLTF

SEQ ID NO: 473186 - protein, 15 aa, Homo sapiens
  CDR3 for beta chain variable domain of TCR clone 236593 (TRBV6-3, TRBJ2-7)
CASSSPGTVFYEQYF

SEQ ID NO: 473187 - protein, 12 aa, Homo sapiens
  CDR3 for alpha chain variable domain of TCR clone 236594 (TRAV1-1, TRAJ23)
CAVTNQGGKLIF

SEQ ID NO: 473188 - protein, 17 aa, Homo sapiens
  CDR3 for beta chain variable domain of TCR clone 236594 (TRBV4-1, TRBJ2-5)
CASSQDPSGGPQETQYF

SEQ ID NO: 473189 - protein, 15 aa, Homo sapiens
  CDR3 for alpha chain variable domain of TCR clone 236595 (TRAV8-3, TRAJ11)
CAVGLLNSGYSTLTF

SEQ ID NO: 473190 - protein, 15 aa, Homo sapiens
  CDR3 for beta chain variable domain of TCR clone 236595 (TRBV7-8, TRBJ2-1)
CASSFQADEYNEQFF

SEQ ID NO: 473191 - protein, 14 aa, Homo sapiens
  CDR3 for alpha chain variable domain of TCR clone 236596 (TRAV12-3, TRAJ10)
SHLPLTGGGNKLIF

SEQ ID NO: 473192 - protein, 15 aa, Homo sapiens
  CDR3 for beta chain variable domain of TCR clone 236596 (TRBV7-9, TRBJ1-6)
CASSSPGRGNSPLHF

SEQ ID NO: 473193 - protein, 15 aa, Homo sapiens
  CDR3 for alpha chain variable domain of TCR clone 236597 (TRAV40, TRAJ45)
CLPGDLGGGDDGLTF

SEQ ID NO: 473194 - protein, 12 aa, Homo sapiens
  CDR3 for beta chain variable domain of TCR clone 236597 (TRBV11-2, TRBJ2-2)
CASSLGGGELFF

SEQ ID NO: 473195 - protein, 12 aa, Homo sapiens
  CDR3 for alpha chain variable domain of TCR clone 236598 (TRAV12-3, TRAJ17)
CAMTLTGNKLTF

SEQ ID NO: 473196 - protein, 12 aa, Homo sapiens
  CDR3 for beta chain variable domain of TCR clone 236598 (TRBV11-2, TRBJ2-1)
CARSPGNNEQFF

SEQ ID NO: 473197 - protein, 17 aa, Homo sapiens
  CDR3 for alpha chain variable domain of TCR clone 236599 (TRAV8-1, TRAJ43)
CAVTNDMRFGAGTRLTV

SEQ ID NO: 473198 - protein, 17 aa, Homo sapiens
  CDR3 for beta chain variable domain of TCR clone 236599 (TRBV5-4, TRBJ2-1)
CASSSAGGRGPYNKQFF

SEQ ID NO: 473199 - protein, 11 aa, Homo sapiens
  CDR3 for alpha chain variable domain of TCR clone 236600 (TRAV12-2, TRAJ49)
CALQGGNQFYF

SEQ ID NO: 473200 - protein, 14 aa, Homo sapiens
  CDR3 for beta chain variable domain of TCR clone 236600 (TRBV7-2, TRBJ2-7)
CASSPKTSFYERYF

SEQ ID NO: 473201 - protein, 15 aa, Homo sapiens
  CDR3 for alpha chain variable domain of TCR clone 236601 (TRAV8-3, TRAJ41)
CAVGSNSNSGDAINF

SEQ ID NO: 473202 - protein, 17 aa, Homo sapiens
  CDR3 for beta chain variable domain of TCR clone 236601 (TRBV25-1, TRBJ2-1)
CASSAYGQGRGVYEQFF

SEQ ID NO: 473203 - protein, 16 aa, Homo sapiens
  CDR3 for alpha chain variable domain of TCR clone 236602 (TRAV3, TRAJ28)
CAVLPRSGAGSYPLTF

SEQ ID NO: 473204 - protein, 13 aa, Homo sapiens
  CDR3 for beta chain variable domain of TCR clone 236602 (TRBV12-4, TRBJ2-5)
CASRLAVQETQYF

SEQ ID NO: 473205 - protein, 13 aa, Homo sapiens
  CDR3 for alpha chain variable domain of TCR clone 236603 (TRAV17, TRAJ26)
CATVDNYGQNFVF

SEQ ID NO: 473206 - protein, 16 aa, Homo sapiens
  CDR3 for beta chain variable domain of TCR clone 236603 (TRBV2, TRBJ2-1)
CASSVGGSRSYNEQFF

SEQ ID NO: 473207 - protein, 15 aa, Homo sapiens
  CDR3 for alpha chain variable domain of TCR clone 236604 (TRAV2, TRAJ37)
CAVGDGSSNTGKLIF

SEQ ID NO: 473208 - protein, 13 aa, Homo sapiens
  CDR3 for beta chain variable domain of TCR clone 236604 (TRBV20-1, TRBJ2-7)
CSAQTGLSYERYF

SEQ ID NO: 473209 - protein, 17 aa, Homo sapiens
  CDR3 for alpha chain variable domain of TCR clone 236605 (TRAV3, TRAJ6)
CAVRDGPRAGGSSIPTF

SEQ ID NO: 473210 - protein, 15 aa, Homo sapiens
  CDR3 for beta chain variable domain of TCR clone 236605 (TRBV7-6, TRBJ2-3)
CASSPIIYSTDTQYF

SEQ ID NO: 473211 - protein, 13 aa, Homo sapiens
  CDR3 for alpha chain variable domain of TCR clone 236606 (TRAV8-3, TRAJ43)
CAVVPYNNNDMRF

SEQ ID NO: 473212 - protein, 16 aa, Homo sapiens
  CDR3 for beta chain variable domain of TCR clone 236606 (TRBV4-3, TRBJ2-2)
CASSHLQGSGTEELFF

SEQ ID NO: 473213 - protein, 16 aa, Homo sapiens
  CDR3 for alpha chain variable domain of TCR clone 236607 (TRAV3, TRAJ37)
CAVRPHGSGNTGKLIF

SEQ ID NO: 473214 - protein, 14 aa, Homo sapiens
  CDR3 for beta chain variable domain of TCR clone 236607 (TRBV7-2, TRBJ1-2)
CASSQTGSTYGYTF

SEQ ID NO: 473215 - protein, 10 aa, Homo sapiens
  CDR3 for alpha chain variable domain of TCR clone 236608 (TRAV8-1, TRAJ21)
CAVNVTKFYF

SEQ ID NO: 473216 - protein, 16 aa, Homo sapiens
  CDR3 for beta chain variable domain of TCR clone 236608 (TRBV7-2, TRBJ1-5)
CASSPWGPEGNQPQHF

SEQ ID NO: 473217 - protein, 13 aa, Homo sapiens
  CDR3 for alpha chain variable domain of TCR clone 236609 (TRAV13-1, TRAJ5)
CEASDTVRRALTF

SEQ ID NO: 473218 - protein, 12 aa, Homo sapiens
  CDR3 for beta chain variable domain of TCR clone 236609 (TRBV28, TRBJ2-3)
CASSLYRDTQYF

SEQ ID NO: 473219 - protein, 14 aa, Homo sapiens
  CDR3 for alpha chain variable domain of TCR clone 236610 (TRAV1-2, TRAJ8)
CAVREDTGFQKLVF

SEQ ID NO: 473220 - protein, 16 aa, Homo sapiens
  CDR3 for beta chain variable domain of TCR clone 236610 (TRBV15, TRBJ2-3)
CATSRDLWIVTDTQYF

SEQ ID NO: 473221 - protein, 15 aa, Homo sapiens
  CDR3 for alpha chain variable domain of TCR clone 236611 (TRAV12-2, TRAJ53)
CAVNGGGRSNYKLTF

SEQ ID NO: 473222 - protein, 12 aa, Homo sapiens
  CDR3 for beta chain variable domain of TCR clone 236611 (TRBV7-9, TRBJ2-7)
CATRTDAYEQYF

SEQ ID NO: 473223 - protein, 15 aa, Homo sapiens
  CDR3 for alpha chain variable domain of TCR clone 236612 (TRAV26-1, TRAJ29)
CIVRDEGSGKTPLVF

SEQ ID NO: 473224 - protein, 15 aa, Homo sapiens
  CDR3 for beta chain variable domain of TCR clone 236612 (TRBV7-9, TRBJ1-5)
CASSQGHQPNQPQHF

SEQ ID NO: 473225 - protein, 18 aa, Homo sapiens
  CDR3 for alpha chain variable domain of TCR clone 236613 (TRAV1-2, TRAJ18)
CAVRDMGDRGSTLGRLYF

SEQ ID NO: 473226 - protein, 14 aa, Homo sapiens
  CDR3 for beta chain variable domain of TCR clone 236613 (TRBV12-4, TRBJ2-5)
CASSLWQKQETQYF

SEQ ID NO: 473227 - protein, 12 aa, Homo sapiens
  CDR3 for alpha chain variable domain of TCR clone 236614 (TRAV36/DV7, TRAJ50)
CAVEPENLLRQG

SEQ ID NO: 473228 - protein, 15 aa, Homo sapiens
  CDR3 for beta chain variable domain of TCR clone 236614 (TRBV7-3, TRBJ2-1)
CASSPTGGGEVEQFF

SEQ ID NO: 473229 - protein, 16 aa, Homo sapiens
  CDR3 for alpha chain variable domain of TCR clone 236615 (TRAV29/DV5, TRAJ39)
CAASLLFINAGNMLTF

SEQ ID NO: 473230 - protein, 16 aa, Homo sapiens
  CDR3 for beta chain variable domain of TCR clone 236615 (TRBV19, TRBJ2-6)
CASSMSGLSGANVLTF

SEQ ID NO: 473231 - protein, 14 aa, Homo sapiens
  CDR3 for alpha chain variable domain of TCR clone 236616 (TRAV8-2, TRAJ4)
CAVSPSGGYNKLIF

SEQ ID NO: 473232 - protein, 15 aa, Homo sapiens
  CDR3 for beta chain variable domain of TCR clone 236616 (TRBV6-6, TRBJ2-7)
CASSYSYGGSYEQYF

SEQ ID NO: 473233 - protein, 18 aa, Homo sapiens
  CDR3 for alpha chain variable domain of TCR clone 236617 (TRAV12-2, )
CAVEDIQNPDPAVYQLRD

SEQ ID NO: 473234 - protein, 17 aa, Homo sapiens
  CDR3 for beta chain variable domain of TCR clone 236617 (TRBV10-3, TRBJ2-6)
CAISESTAPSGANVLTF

SEQ ID NO: 473235 - protein, 11 aa, Homo sapiens
  CDR3 for alpha chain variable domain of TCR clone 236618 (TRAV29/DV5, TRAJ49)
CAAVPGNQFYF

SEQ ID NO: 473236 - protein, 17 aa, Homo sapiens
  CDR3 for beta chain variable domain of TCR clone 236618 (TRBV4-2, TRBJ1-1)
CASTQFGGGSGNTEAVF

SEQ ID NO: 473237 - protein, 14 aa, Homo sapiens
  CDR3 for alpha chain variable domain of TCR clone 236619 (TRAV12-2, TRAJ5)
CAVNRSRAGEHLLL

SEQ ID NO: 473238 - protein, 12 aa, Homo sapiens
  CDR3 for beta chain variable domain of TCR clone 236619 (TRBV19, TRBJ1-5)
CASSIAQQPQHF

SEQ ID NO: 473239 - protein, 14 aa, Homo sapiens
  CDR3 for alpha chain variable domain of TCR clone 236620 (TRAV12-3, TRAJ10)
SHLPLTGGGNKLTF

SEQ ID NO: 473240 - protein, 16 aa, Homo sapiens
  CDR3 for beta chain variable domain of TCR clone 236620 (TRBV27, TRBJ2-5)
CASSSQTSGFQETQYF

SEQ ID NO: 473241 - protein, 14 aa, Homo sapiens
  CDR3 for alpha chain variable domain of TCR clone 236621 (TRAV38-1, TRAJ45)
FAYYSGGGADGLTF

SEQ ID NO: 473242 - protein, 20 aa, Homo sapiens
  CDR3 for beta chain variable domain of TCR clone 236621 (TRBV28, TRBJ2-1)
CASTPIGRSAGLAGGNEQFF

SEQ ID NO: 473243 - protein, 13 aa, Homo sapiens
  CDR3 for alpha chain variable domain of TCR clone 236622 (TRAV29/DV5, TRAJ54)
CAAHLQGAQKLVF

SEQ ID NO: 473244 - protein, 17 aa, Homo sapiens
  CDR3 for beta chain variable domain of TCR clone 236622 (TRBV5-1, TRBJ2-7)
CASSKPEGREASYEQYF

SEQ ID NO: 473245 - protein, 16 aa, Homo sapiens
  CDR3 for alpha chain variable domain of TCR clone 236623 (TRAV21, TRAJ17)
CAVMPGEEAAGNKLTF

SEQ ID NO: 473246 - protein, 16 aa, Homo sapiens
  CDR3 for beta chain variable domain of TCR clone 236623 (TRBV2, TRBJ2-7)
CASSEPWTGPSYEQYF

SEQ ID NO: 473247 - protein, 18 aa, Homo sapiens
  CDR3 for alpha chain variable domain of TCR clone 236624 (TRAV26-1, TRAJ37)
CIVRVDMHGSSNTGKLIF

SEQ ID NO: 473248 - protein, 15 aa, Homo sapiens
  CDR3 for beta chain variable domain of TCR clone 236624 (TRBV20-1, TRBJ2-7)
CSDRVLASPLYEQYF

SEQ ID NO: 473249 - protein, 14 aa, Homo sapiens
  CDR3 for alpha chain variable domain of TCR clone 236625 (TRAV1-2, TRAJ27)
CAVRSGTNAGKSTC

SEQ ID NO: 473250 - protein, 15 aa, Homo sapiens
  CDR3 for beta chain variable domain of TCR clone 236625 (TRBV7-9, TRBJ1-4)
CASSARTGGNEKLFF

SEQ ID NO: 473251 - protein, 12 aa, Homo sapiens
  CDR3 for alpha chain variable domain of TCR clone 236626 (TRAV29/DV5, TRAJ34)
CAASGNTDKLIF

SEQ ID NO: 473252 - protein, 14 aa, Homo sapiens
  CDR3 for beta chain variable domain of TCR clone 236626 (TRBV25-1, TRBJ1-1)
CASTHLGGNTEAFF

SEQ ID NO: 473253 - protein, 16 aa, Homo sapiens
  CDR3 for alpha chain variable domain of TCR clone 236627 (TRAV30, TRAJ24)
CGTEIVDADSWGKFQF

SEQ ID NO: 473254 - protein, 13 aa, Homo sapiens
  CDR3 for beta chain variable domain of TCR clone 236627 (TRBV7-7, TRBJ1-1)
CASSLGANTEAFC

SEQ ID NO: 473255 - protein, 14 aa, Homo sapiens
  CDR3 for alpha chain variable domain of TCR clone 236628 (TRAV29/DV5, TRAJ48)
CAAAANFGNEKLTF

SEQ ID NO: 473256 - protein, 14 aa, Homo sapiens
  CDR3 for beta chain variable domain of TCR clone 236628 (TRBV11-2, TRBJ2-3)
CASSRLARTDTQYF

SEQ ID NO: 473257 - protein, 14 aa, Homo sapiens
  CDR3 for alpha chain variable domain of TCR clone 236629 (TRAV21, TRAJ37)
CAVKGSSNTGKLIF

SEQ ID NO: 473258 - protein, 14 aa, Homo sapiens
  CDR3 for beta chain variable domain of TCR clone 236629 (TRBV7-6, TRBJ2-3)
CASSLGTVTDTQYF

SEQ ID NO: 473259 - protein, 14 aa, Homo sapiens
  CDR3 for alpha chain variable domain of TCR clone 236630 (TRAV8-2, TRAJ11)
CVVSEKSGYSTLTF

SEQ ID NO: 473260 - protein, 16 aa, Homo sapiens
  CDR3 for beta chain variable domain of TCR clone 236630 (TRBV28, TRBJ2-1)
CVSSSPEYPRDNEQFF

SEQ ID NO: 473261 - protein, 13 aa, Homo sapiens
  CDR3 for alpha chain variable domain of TCR clone 236631 (TRAV27, TRAJ42)
CAGARGSQGNLIF

SEQ ID NO: 473262 - protein, 15 aa, Homo sapiens
  CDR3 for beta chain variable domain of TCR clone 236631 (TRBV27, TRBJ1-6)
CASSFDRGLGSPLHF

SEQ ID NO: 473263 - protein, 17 aa, Homo sapiens
  CDR3 for alpha chain variable domain of TCR clone 236632 (TRAV38-1, TRAJ45)
CAFMRSHSGGGADGLTF

SEQ ID NO: 473264 - protein, 16 aa, Homo sapiens
  CDR3 for beta chain variable domain of TCR clone 236632 (TRBV12-5, TRBJ2-5)
CASGPRTSGNQETQYF

SEQ ID NO: 473265 - protein, 14 aa, Homo sapiens
  CDR3 for alpha chain variable domain of TCR clone 236633 (TRAV12-2, TRAJ13)
CAVKKTGGYQKVTF

SEQ ID NO: 473266 - protein, 14 aa, Homo sapiens
  CDR3 for beta chain variable domain of TCR clone 236633 (TRBV5-7, TRBJ1-2)
CASSLVRGDYGYTF

SEQ ID NO: 473267 - protein, 14 aa, Homo sapiens
  CDR3 for alpha chain variable domain of TCR clone 236634 (TRAV1-2, TRAJ16)
CAVNRFSDGQKLLF

SEQ ID NO: 473268 - protein, 14 aa, Homo sapiens
  CDR3 for beta chain variable domain of TCR clone 236634 (TRBV7-9, TRBJ1-4)
CAITEGEANGKLFF

SEQ ID NO: 473269 - protein, 14 aa, Homo sapiens
  CDR3 for alpha chain variable domain of TCR clone 236635 (TRAV12-3, TRAJ10)
SHLPLTGGGNKLTF

SEQ ID NO: 473270 - protein, 14 aa, Homo sapiens
  CDR3 for beta chain variable domain of TCR clone 236635 (TRBV7-2, TRBJ2-2)
CSSSLNSNTGELFF

SEQ ID NO: 473271 - protein, 14 aa, Homo sapiens
  CDR3 for alpha chain variable domain of TCR clone 236636 (TRAV20, TRAJ29)
CAVQAWVGNTPLVF

SEQ ID NO: 473272 - protein, 16 aa, Homo sapiens
  CDR3 for beta chain variable domain of TCR clone 236636 (TRBV12-4, TRBJ1-5)
CASSRPVGGSNQPQHF

SEQ ID NO: 473273 - protein, 14 aa, Homo sapiens
  CDR3 for alpha chain variable domain of TCR clone 236637 (TRAV4, TRAJ9)
CLVGSGSGGFKTIF

SEQ ID NO: 473274 - protein, 15 aa, Homo sapiens
  CDR3 for beta chain variable domain of TCR clone 236637 (TRBV7-2, TRBJ2-1)
CASSLASGRVNEQFF

SEQ ID NO: 473275 - protein, 14 aa, Homo sapiens
  CDR3 for alpha chain variable domain of TCR clone 236638 (TRAV2, TRAJ20)
CAVEDGTSDYKLSF

SEQ ID NO: 473276 - protein, 13 aa, Homo sapiens
  CDR3 for beta chain variable domain of TCR clone 236638 (TRBV7-2, TRBJ1-1)
CASSRNTNTEAFF

SEQ ID NO: 473277 - protein, 13 aa, Homo sapiens
  CDR3 for alpha chain variable domain of TCR clone 236639 (TRAV1-2, TRAJ11)
SAVRDSGYSTLTF

SEQ ID NO: 473278 - protein, 17 aa, Homo sapiens
  CDR3 for beta chain variable domain of TCR clone 236639 (TRBV7-8, TRBJ2-6)
CASSAGTGGAGANVLTF

SEQ ID NO: 473279 - protein, 15 aa, Homo sapiens
  CDR3 for alpha chain variable domain of TCR clone 236640 (TRAV8-3, TRAJ27)
CAVGPSKTNAGKSTF

SEQ ID NO: 473280 - protein, 16 aa, Homo sapiens
  CDR3 for beta chain variable domain of TCR clone 236640 (TRBV2, TRBJ1-3)
CASSGQGPSSGNTIYF

SEQ ID NO: 473281 - protein, 12 aa, Homo sapiens
  CDR3 for alpha chain variable domain of TCR clone 236641 (TRAV3, TRAJ7)
CADLLWEQQTRF

SEQ ID NO: 473282 - protein, 12 aa, Homo sapiens
  CDR3 for beta chain variable domain of TCR clone 236641 (TRBV7-3, TRBJ2-5)
CQQLPGGETQYV

SEQ ID NO: 473283 - protein, 15 aa, Homo sapiens
  CDR3 for alpha chain variable domain of TCR clone 236642 (TRAV13-1, TRAJ57)
QVPPLSQGGSEKLVF

SEQ ID NO: 473284 - protein, 13 aa, Homo sapiens
  CDR3 for beta chain variable domain of TCR clone 236642 (TRBV15, TRBJ1-6)
CATSGGLNSPLHF

SEQ ID NO: 473285 - protein, 15 aa, Homo sapiens
  CDR3 for alpha chain variable domain of TCR clone 236643 (TRAV3, TRAJ22)
CAVRDRGGSARHLNF

SEQ ID NO: 473286 - protein, 16 aa, Homo sapiens
  CDR3 for beta chain variable domain of TCR clone 236643 (TRBV4-2, TRBJ2-4)
CASSQELRRAKNIQYF

SEQ ID NO: 473287 - protein, 15 aa, Homo sapiens
  CDR3 for alpha chain variable domain of TCR clone 236644 (TRAV3, TRAJ4)
CAQNMFSGGYNKLIF

SEQ ID NO: 473288 - protein, 16 aa, Homo sapiens
  CDR3 for beta chain variable domain of TCR clone 236644 (TRBV6-1, TRBJ2-5)
CASSETLDRGAETQYF

SEQ ID NO: 473289 - protein, 16 aa, Homo sapiens
  CDR3 for alpha chain variable domain of TCR clone 236645 (TRAV29/DV5, TRAJ39)
CAASLLFNNAGNMLTF

SEQ ID NO: 473290 - protein, 16 aa, Homo sapiens
  CDR3 for beta chain variable domain of TCR clone 236645 (TRBV19, TRBJ2-6)
CACSMSGLSGANVLTF

SEQ ID NO: 473291 - protein, 17 aa, Homo sapiens
  CDR3 for alpha chain variable domain of TCR clone 236646 (TRAV8-1, TRAJ43)
CAVTNDMRFGAGTRLTV

SEQ ID NO: 473292 - protein, 16 aa, Homo sapiens
  CDR3 for beta chain variable domain of TCR clone 236646 (TRBV5-4, TRBJ2-1)
CQQLRGWGGPYNEQFF

SEQ ID NO: 473293 - protein, 13 aa, Homo sapiens
  CDR3 for alpha chain variable domain of TCR clone 236647 (TRAV13-1, TRAJ39)
CAASRWAGDMLAF

SEQ ID NO: 473294 - protein, 15 aa, Homo sapiens
  CDR3 for beta chain variable domain of TCR clone 236647 (TRBV7-9, TRBJ1-1)
CASSLLEQGGTEAFF

SEQ ID NO: 473295 - protein, 10 aa, Homo sapiens
  CDR3 for alpha chain variable domain of TCR clone 236648 (TRAV13-2, TRAJ24)
TTDSWGKLQF

SEQ ID NO: 473296 - protein, 13 aa, Homo sapiens
  CDR3 for beta chain variable domain of TCR clone 236648 (TRBV29-1, TRBJ2-1)
CSVEGGRVNEQLF

SEQ ID NO: 473297 - protein, 12 aa, Homo sapiens
  CDR3 for alpha chain variable domain of TCR clone 236649 (TRAV3, TRAJ26)
CAVRDYGQNFVF

SEQ ID NO: 473298 - protein, 14 aa, Homo sapiens
  CDR3 for beta chain variable domain of TCR clone 236649 (TRBV12-5, TRBJ2-5)
CASGSRTHQETQYF

SEQ ID NO: 473299 - protein, 16 aa, Homo sapiens
  CDR3 for alpha chain variable domain of TCR clone 236650 (TRAV12-3, TRAJ53)
CAMSPGRGGSNYKLTF

SEQ ID NO: 473300 - protein, 16 aa, Homo sapiens
  CDR3 for beta chain variable domain of TCR clone 236650 (TRBV7-9, TRBJ1-2)
CASSLGFSSGEDGYTF

SEQ ID NO: 473301 - protein, 14 aa, Homo sapiens
  CDR3 for alpha chain variable domain of TCR clone 236651 (TRAV26-1, TRAJ39)
CIVRGSRAGNMLTF

SEQ ID NO: 473302 - protein, 13 aa, Homo sapiens
  CDR3 for beta chain variable domain of TCR clone 236651 (TRBV12-4, TRBJ1-2)
CASSLRQGKGYTF

SEQ ID NO: 473303 - protein, 17 aa, Homo sapiens
  CDR3 for alpha chain variable domain of TCR clone 236652 (TRAV13-1, )
CAANIQNPDPAGYQLRD

SEQ ID NO: 473304 - protein, 14 aa, Homo sapiens
  CDR3 for beta chain variable domain of TCR clone 236652 (TRBV19, TRBJ2-7)
CASSIGPNSYEQYF

SEQ ID NO: 473305 - protein, 16 aa, Homo sapiens
  CDR3 for alpha chain variable domain of TCR clone 236653 (TRAV26-1, TRAJ40)
CIVRALTTSGTYKYIF

SEQ ID NO: 473306 - protein, 19 aa, Homo sapiens
  CDR3 for beta chain variable domain of TCR clone 236653 (TRBV25-1, TRBJ2-2)
CAILVYRVDRGRKTGELFF

SEQ ID NO: 473307 - protein, 12 aa, Homo sapiens
  CDR3 for alpha chain variable domain of TCR clone 236654 (TRAV13-1, TRAJ21)
CAAKEGFNKFYF

SEQ ID NO: 473308 - protein, 12 aa, Homo sapiens
  CDR3 for beta chain variable domain of TCR clone 236654 (TRBV12-5, TRBJ2-5)
CASGQGVETQYF

SEQ ID NO: 473309 - protein, 13 aa, Homo sapiens
  CDR3 for alpha chain variable domain of TCR clone 236655 (TRAV13-1, TRAJ33)
CAESRAGNYQLIW

SEQ ID NO: 473310 - protein, 12 aa, Homo sapiens
  CDR3 for beta chain variable domain of TCR clone 236655 (TRBV11-2, TRBJ1-2)
CASSREGDGYTF

SEQ ID NO: 473311 - protein, 15 aa, Homo sapiens
  CDR3 for alpha chain variable domain of TCR clone 236656 (TRAV30, TRAJ13)
CGTQGVTGGYQKVTF

SEQ ID NO: 473312 - protein, 17 aa, Homo sapiens
  CDR3 for beta chain variable domain of TCR clone 236656 (TRBV20-1, TRBJ2-2)
CCARVKRTHVRSGELFF

SEQ ID NO: 473313 - protein, 18 aa, Homo sapiens
  CDR3 for alpha chain variable domain of TCR clone 236657 (TRAV13-1, TRAJ52)
CAASKRRAVGTSYGKLTF

SEQ ID NO: 473314 - protein, 15 aa, Homo sapiens
  CDR3 for beta chain variable domain of TCR clone 236657 (TRBV5-1, TRBJ2-2)
CASSSQGGNTGELFF

SEQ ID NO: 473315 - protein, 13 aa, Homo sapiens
  CDR3 for alpha chain variable domain of TCR clone 236658 (TRAV8-4, TRAJ48)
CAVSLFGNEKLTF

SEQ ID NO: 473316 - protein, 15 aa, Homo sapiens
  CDR3 for beta chain variable domain of TCR clone 236658 (TRBV20-1, TRBJ2-7)
CSASKGLAESYEQYF

SEQ ID NO: 473317 - protein, 14 aa, Homo sapiens
  CDR3 for alpha chain variable domain of TCR clone 236659 (TRAV12-1, TRAJ26)
CVVKGSNYGQKFVF

SEQ ID NO: 473318 - protein, 17 aa, Homo sapiens
  CDR3 for beta chain variable domain of TCR clone 236659 (TRBV11-2, TRBJ2-6)
CASSQRDIFSGANVLTF

SEQ ID NO: 473319 - protein, 11 aa, Homo sapiens
  CDR3 for alpha chain variable domain of TCR clone 236660 (TRAV1-1, TRAJ23)
CAVRQGGKLIF

SEQ ID NO: 473320 - protein, 16 aa, Homo sapiens
  CDR3 for beta chain variable domain of TCR clone 236660 (TRBV7-2, TRBJ1-6)
CASSSFESSYNSPLHF

SEQ ID NO: 473321 - protein, 15 aa, Homo sapiens
  CDR3 for alpha chain variable domain of TCR clone 236661 (TRAV12-1, TRAJ44)
CVVDTPQVTASKLTF

SEQ ID NO: 473322 - protein, 14 aa, Homo sapiens
  CDR3 for beta chain variable domain of TCR clone 236661 (TRBV7-9, TRBJ2-1)
CASSPRDSLYEQFF

SEQ ID NO: 473323 - protein, 15 aa, Homo sapiens
  CDR3 for alpha chain variable domain of TCR clone 236662 (TRAV8-4, TRAJ37)
CAVSRGSGNTGKLSF

SEQ ID NO: 473324 - protein, 16 aa, Homo sapiens
  CDR3 for beta chain variable domain of TCR clone 236662 (TRBV7-3, TRBJ2-3)
CASSLSGYRPEDTQYF

SEQ ID NO: 473325 - protein, 12 aa, Homo sapiens
  CDR3 for alpha chain variable domain of TCR clone 236663 (TRAV13-1, TRAJ48)
CAANFGNEKLTF

SEQ ID NO: 473326 - protein, 13 aa, Homo sapiens
  CDR3 for beta chain variable domain of TCR clone 236663 (TRBV7-7, TRBJ2-5)
CASSRSGQETQYF

SEQ ID NO: 473327 - protein, 15 aa, Homo sapiens
  CDR3 for alpha chain variable domain of TCR clone 236664 (TRAV12-3, TRAJ49)
CAMTALGNTGNQFYF

SEQ ID NO: 473328 - protein, 14 aa, Homo sapiens
  CDR3 for beta chain variable domain of TCR clone 236664 (TRBV19, TRBJ2-1)
CARGARSFQWEQFF

SEQ ID NO: 473329 - protein, 13 aa, Homo sapiens
  CDR3 for alpha chain variable domain of TCR clone 236665 (TRAV27, TRAJ8)
CAGGPTGFQKLVF

SEQ ID NO: 473330 - protein, 16 aa, Homo sapiens
  CDR3 for beta chain variable domain of TCR clone 236665 (TRBV6-6, TRBJ1-5)
CASSYSTLVGNQPQHF

SEQ ID NO: 473331 - protein, 17 aa, Homo sapiens
  CDR3 for alpha chain variable domain of TCR clone 236666 (TRAV3, TRAJ42)
CAVRDRDYGGSQGNLIS

SEQ ID NO: 473332 - protein, 15 aa, Homo sapiens
  CDR3 for beta chain variable domain of TCR clone 236666 (TRBV27, TRBJ1-6)
RASSFDRGLGSPLHF

SEQ ID NO: 473333 - protein, 15 aa, Homo sapiens
  CDR3 for alpha chain variable domain of TCR clone 236667 (TRAV3, TRAJ22)
CAVRDRGGSARQLTF

SEQ ID NO: 473334 - protein, 14 aa, Homo sapiens
  CDR3 for beta chain variable domain of TCR clone 236667 (TRBV28, TRBJ1-4)
CASSFGTFDEKLFF

SEQ ID NO: 473335 - protein, 14 aa, Homo sapiens
  CDR3 for alpha chain variable domain of TCR clone 236668 (TRAV1-2, TRAJ8)
CAVREDTGFQKLVF

SEQ ID NO: 473336 - protein, 18 aa, Homo sapiens
  CDR3 for beta chain variable domain of TCR clone 236668 (TRBV11-2, TRBJ2-6)
CASSLNPFLGTGANDLTF

SEQ ID NO: 473337 - protein, 14 aa, Homo sapiens
  CDR3 for alpha chain variable domain of TCR clone 236669 (TRAV24, TRAJ16)
CAFPPFSDGQKLLY

SEQ ID NO: 473338 - protein, 12 aa, Homo sapiens
  CDR3 for beta chain variable domain of TCR clone 236669 (TRBV19, TRBJ1-1)
CASTSGGGEAFF

SEQ ID NO: 473339 - protein, 15 aa, Homo sapiens
  CDR3 for alpha chain variable domain of TCR clone 236670 (TRAV12-1, TRAJ42)
CVVTRDGGSQGNLIF

SEQ ID NO: 473340 - protein, 14 aa, Homo sapiens
  CDR3 for beta chain variable domain of TCR clone 236670 (TRBV11-2, TRBJ2-3)
CASSLGGGANTQYL

SEQ ID NO: 473341 - protein, 12 aa, Homo sapiens
  CDR3 for alpha chain variable domain of TCR clone 236671 (TRAV35, TRAJ30)
CAGLNRDDTIIF

SEQ ID NO: 473342 - protein, 16 aa, Homo sapiens
  CDR3 for beta chain variable domain of TCR clone 236671 (TRBV12-5, TRBJ2-5)
CASGPRTSGNQETQYF

SEQ ID NO: 473343 - protein, 15 aa, Homo sapiens
  CDR3 for alpha chain variable domain of TCR clone 236672 (TRAV26-1, TRAJ22)
CIVRVSFWFCKATDL

SEQ ID NO: 473344 - protein, 16 aa, Homo sapiens
  CDR3 for beta chain variable domain of TCR clone 236672 (TRBV6-1, TRBJ2-5)
CASSETLDRGAETQYF

SEQ ID NO: 473345 - protein, 16 aa, Homo sapiens
  CDR3 for alpha chain variable domain of TCR clone 236673 (TRAV30, TRAJ24)
CGTETVDADSWGKFQF

SEQ ID NO: 473346 - protein, 12 aa, Homo sapiens
  CDR3 for beta chain variable domain of TCR clone 236673 (TRBV7-6, TRBJ2-7)
CASSLADSEQYF

SEQ ID NO: 473347 - protein, 16 aa, Homo sapiens
  CDR3 for alpha chain variable domain of TCR clone 236674 (TRAV12-3, TRAJ53)
CAMSPGSGGSNYKLTF

SEQ ID NO: 473348 - protein, 14 aa, Homo sapiens
  CDR3 for beta chain variable domain of TCR clone 236674 (TRBV7-2, TRBJ2-2)
CASSLDSNTGELFF

SEQ ID NO: 473349 - protein, 14 aa, Homo sapiens
  CDR3 for alpha chain variable domain of TCR clone 236675 (TRAV16, TRAJ39)
CALSKNNSGNMLTF

SEQ ID NO: 473350 - protein, 16 aa, Homo sapiens
  CDR3 for beta chain variable domain of TCR clone 236675 (TRBV6-6, TRBJ2-1)
CASSYSFSGSYNEQFF

SEQ ID NO: 473351 - protein, 13 aa, Homo sapiens
  CDR3 for alpha chain variable domain of TCR clone 236676 (TRAV3, TRAJ27)
CAVRPLGAGKSSF

SEQ ID NO: 473352 - protein, 14 aa, Homo sapiens
  CDR3 for beta chain variable domain of TCR clone 236676 (TRBV7-3, TRBJ1-1)
CASSLKGGNTEAFF

SEQ ID NO: 473353 - protein, 13 aa, Homo sapiens
  CDR3 for alpha chain variable domain of TCR clone 236677 (TRAV2, TRAJ24)
CAVPTDSWGKLQF

SEQ ID NO: 473354 - protein, 15 aa, Homo sapiens
  CDR3 for beta chain variable domain of TCR clone 236677 (TRBV6-3, TRBJ2-2)
CASSCLATLTGELFF

SEQ ID NO: 473355 - protein, 15 aa, Homo sapiens
  CDR3 for alpha chain variable domain of TCR clone 236678 (TRAV8-4, TRAJ48)
CAESAAYFGNEKLTF

SEQ ID NO: 473356 - protein, 12 aa, Homo sapiens
  CDR3 for beta chain variable domain of TCR clone 236678 (TRBV3-1, TRBJ2-5)
CASSQRGETQYF

SEQ ID NO: 473357 - protein, 13 aa, Homo sapiens
  CDR3 for alpha chain variable domain of TCR clone 236679 (TRAV35, TRAJ42)
CAGFPGSHGNPIF

SEQ ID NO: 473358 - protein, 14 aa, Homo sapiens
  CDR3 for beta chain variable domain of TCR clone 236679 (TRBV4-1, TRBJ2-2)
CASSQAVNTGELFF

SEQ ID NO: 473359 - protein, 14 aa, Homo sapiens
  CDR3 for alpha chain variable domain of TCR clone 236680 (TRAV12-1, TRAJ15)
CLPPANQAGTALIF

SEQ ID NO: 473360 - protein, 13 aa, Homo sapiens
  CDR3 for beta chain variable domain of TCR clone 236680 (TRBV7-2, TRBJ2-4)
CASRREHANIQYF

SEQ ID NO: 473361 - protein, 10 aa, Homo sapiens
  CDR3 for alpha chain variable domain of TCR clone 236681 (TRAV30, TRAJ48)
CGIGNEKLTL

SEQ ID NO: 473362 - protein, 14 aa, Homo sapiens
  CDR3 for beta chain variable domain of TCR clone 236681 (TRBV6-1, TRBJ1-3)
CASVQGGGGNTIYF

SEQ ID NO: 473363 - protein, 13 aa, Homo sapiens
  CDR3 for alpha chain variable domain of TCR clone 236682 (TRAV17, TRAJ15)
CATDARAGTALIF

SEQ ID NO: 473364 - protein, 13 aa, Homo sapiens
  CDR3 for beta chain variable domain of TCR clone 236682 (TRBV12-5, TRBJ2-3)
CASQNRGTDTQYF

SEQ ID NO: 473365 - protein, 14 aa, Homo sapiens
  CDR3 for alpha chain variable domain of TCR clone 236683 (TRAV20, TRAJ56)
CAVQFGGANSKLTF

SEQ ID NO: 473366 - protein, 14 aa, Homo sapiens
  CDR3 for beta chain variable domain of TCR clone 236683 (TRBV2, TRBJ2-7)
CASSLTSGGYEQYF

SEQ ID NO: 473367 - protein, 17 aa, Homo sapiens
  CDR3 for alpha chain variable domain of TCR clone 236684 (TRAV13-1, TRAJ52)
CAASSGAGGTSYGNLTF

SEQ ID NO: 473368 - protein, 14 aa, Homo sapiens
  CDR3 for beta chain variable domain of TCR clone 236684 (TRBV12-4, TRBJ2-3)
CASTIAGWGDTQYF

SEQ ID NO: 473369 - protein, 14 aa, Homo sapiens
  CDR3 for alpha chain variable domain of TCR clone 236685 (TRAV1-2, TRAJ16)
CAVNRFSDGQKLLF

SEQ ID NO: 473370 - protein, 15 aa, Homo sapiens
  CDR3 for beta chain variable domain of TCR clone 236685 (TRBV7-2, TRBJ2-7)
CASSLSSGRTYEQYF

SEQ ID NO: 473371 - protein, 18 aa, Homo sapiens
  CDR3 for alpha chain variable domain of TCR clone 236686 (TRAV13-1, TRAJ52)
CAAKNPNAGGTSYGKLTF

SEQ ID NO: 473372 - protein, 15 aa, Homo sapiens
  CDR3 for beta chain variable domain of TCR clone 236686 (TRBV9, TRBJ1-6)
CASSVAGTGDSPRHF

SEQ ID NO: 473373 - protein, 12 aa, Homo sapiens
  CDR3 for alpha chain variable domain of TCR clone 236687 (TRAV13-1, TRAJ15)
CAASQAGTALSF

SEQ ID NO: 473374 - protein, 14 aa, Homo sapiens
  CDR3 for beta chain variable domain of TCR clone 236687 (TRBV19, TRBJ2-2)
CASSTLHRSGELFF

SEQ ID NO: 473375 - protein, 12 aa, Homo sapiens
  CDR3 for alpha chain variable domain of TCR clone 236688 (TRAV3, TRAJ31)
CAVRDGNARLMF

SEQ ID NO: 473376 - protein, 18 aa, Homo sapiens
  CDR3 for beta chain variable domain of TCR clone 236688 (TRBV7-2, TRBJ2-3)
CASSLRREGSGMTDTQYF

SEQ ID NO: 473377 - protein, 13 aa, Homo sapiens
  CDR3 for alpha chain variable domain of TCR clone 236689 (TRAV8-3, TRAJ4)
WVFYSGGYNKLIF

SEQ ID NO: 473378 - protein, 16 aa, Homo sapiens
  CDR3 for beta chain variable domain of TCR clone 236689 (TRBV7-8, TRBJ2-3)
CASSTEGRRETDTQYF

SEQ ID NO: 473379 - protein, 13 aa, Homo sapiens
  CDR3 for alpha chain variable domain of TCR clone 236690 (TRAV39, TRAJ53)
CAVDKGSNYKLTF

SEQ ID NO: 473380 - protein, 15 aa, Homo sapiens
  CDR3 for beta chain variable domain of TCR clone 236690 (TRBV19, TRBJ1-2)
CASSVGQVLNYGYTF

SEQ ID NO: 473381 - protein, 14 aa, Homo sapiens
  CDR3 for alpha chain variable domain of TCR clone 236691 (TRAV26-1, TRAJ44)
CIVRPTGTASKLTF

SEQ ID NO: 473382 - protein, 15 aa, Homo sapiens
  CDR3 for beta chain variable domain of TCR clone 236691 (TRBV18, TRBJ2-1)
CASSPPSASYNEQFF

SEQ ID NO: 473383 - protein, 17 aa, Homo sapiens
  CDR3 for alpha chain variable domain of TCR clone 236692 (TRAV3, TRAJ42)
SSVRDRDYGGSQGNLIF

SEQ ID NO: 473384 - protein, 15 aa, Homo sapiens
  CDR3 for beta chain variable domain of TCR clone 236692 (TRBV2, TRBJ2-7)
CASSEGLARSYEQYF

SEQ ID NO: 473385 - protein, 13 aa, Homo sapiens
  CDR3 for alpha chain variable domain of TCR clone 236693 (TRAV13-2, TRAJ22)
CRDLSGSARQLTF

SEQ ID NO: 473386 - protein, 15 aa, Homo sapiens
  CDR3 for beta chain variable domain of TCR clone 236693 (TRBV11-3, TRBJ2-1)
CASSLAGQTYNEQFF

SEQ ID NO: 473387 - protein, 23 aa, Homo sapiens
  CDR3 for alpha chain variable domain of TCR clone 236694 (TRAV12-2, TRAJ22)
CAVSFRVHPGPPIVSGSARQLTF

SEQ ID NO: 473388 - protein, 13 aa, Homo sapiens
  CDR3 for beta chain variable domain of TCR clone 236694 (TRBV19, TRBJ1-2)
CASSQGQVYGYTF

SEQ ID NO: 473389 - protein, 12 aa, Homo sapiens
  CDR3 for alpha chain variable domain of TCR clone 236695 (TRAV12-2, TRAJ31)
CAGNTPDARLMF

SEQ ID NO: 473390 - protein, 12 aa, Homo sapiens
  CDR3 for beta chain variable domain of TCR clone 236695 (TRBV12-4, TRBJ2-7)
CASSLGGYEQYF

SEQ ID NO: 473391 - protein, 16 aa, Homo sapiens
  CDR3 for alpha chain variable domain of TCR clone 236696 (TRAV35, TRAJ37)
CWAFLRGSSNTGKLIF

SEQ ID NO: 473392 - protein, 13 aa, Homo sapiens
  CDR3 for beta chain variable domain of TCR clone 236696 (TRBV2, TRBJ1-2)
CASSVRGNYSYTF

SEQ ID NO: 473393 - protein, 12 aa, Homo sapiens
  CDR3 for alpha chain variable domain of TCR clone 236697 (TRAV12-3, TRAJ31)
CAMSVPNARLMF

SEQ ID NO: 473394 - protein, 12 aa, Homo sapiens
  CDR3 for beta chain variable domain of TCR clone 236697 (TRBV11-2, TRBJ2-1)
CDSSVQREGQFF

SEQ ID NO: 473395 - protein, 14 aa, Homo sapiens
  CDR3 for alpha chain variable domain of TCR clone 236698 (TRAV12-1, TRAJ15)
CLPPANQAGTALTF

SEQ ID NO: 473396 - protein, 13 aa, Homo sapiens
  CDR3 for beta chain variable domain of TCR clone 236698 (TRBV7-2, TRBJ2-4)
CASSREHANIQYF

SEQ ID NO: 473397 - protein, 17 aa, Homo sapiens
  CDR3 for alpha chain variable domain of TCR clone 236699 (TRAV4, TRAJ13)
CLVGVQGSSGGYQKVTF

SEQ ID NO: 473398 - protein, 13 aa, Homo sapiens
  CDR3 for beta chain variable domain of TCR clone 236699 (TRBV19, TRBJ2-5)
CASSETAPETQYF

SEQ ID NO: 473399 - protein, 13 aa, Homo sapiens
  CDR3 for alpha chain variable domain of TCR clone 236700 (TRAV8-6, TRAJ8)
CAVSNTGFQKLVF

SEQ ID NO: 473400 - protein, 17 aa, Homo sapiens
  CDR3 for beta chain variable domain of TCR clone 236700 (TRBV13, TRBJ2-3)
CASSLSRVAGGRNTQYF

SEQ ID NO: 473401 - protein, 13 aa, Homo sapiens
  CDR3 for alpha chain variable domain of TCR clone 236701 (TRAV12-1, TRAJ49)
CVVTPFTGNQFYF

SEQ ID NO: 473402 - protein, 13 aa, Homo sapiens
  CDR3 for beta chain variable domain of TCR clone 236701 (TRBV20-1, TRBJ1-1)
CSARGGANSEAFF

SEQ ID NO: 473403 - protein, 13 aa, Homo sapiens
  CDR3 for alpha chain variable domain of TCR clone 236702 (TRAV2, TRAJ15)
CAVASQAGTALIF

SEQ ID NO: 473404 - protein, 15 aa, Homo sapiens
  CDR3 for beta chain variable domain of TCR clone 236702 (TRBV7-8, TRBJ1-5)
CASSLEGSGNQRQHF

SEQ ID NO: 473405 - protein, 15 aa, Homo sapiens
  CDR3 for alpha chain variable domain of TCR clone 236703 (TRAV12-3, TRAJ27)
CAMRAYNTNAGKSTF

SEQ ID NO: 473406 - protein, 14 aa, Homo sapiens
  CDR3 for beta chain variable domain of TCR clone 236703 (TRBV7-2, TRBJ1-6)
CASSLQGANSPLHF

SEQ ID NO: 473407 - protein, 12 aa, Homo sapiens
  CDR3 for alpha chain variable domain of TCR clone 236704 (TRAV12-3, TRAJ17)
CAMTLTGNKLTF

SEQ ID NO: 473408 - protein, 14 aa, Homo sapiens
  CDR3 for beta chain variable domain of TCR clone 236704 (TRBV20-1, TRBJ2-7)
CSAISREASYEQYF

SEQ ID NO: 473409 - protein, 13 aa, Homo sapiens
  CDR3 for alpha chain variable domain of TCR clone 236705 (TRAV21, TRAJ52)
CAVMPSPAGGTSY

SEQ ID NO: 473410 - protein, 17 aa, Homo sapiens
  CDR3 for beta chain variable domain of TCR clone 236705 (TRBV13, TRBJ2-3)
CASSLSRVAGGRNTQYF

SEQ ID NO: 473411 - protein, 16 aa, Homo sapiens
  CDR3 for alpha chain variable domain of TCR clone 236706 (TRAV8-4, TRAJ48)
CAVSGLPRFGNEKLTF

SEQ ID NO: 473412 - protein, 14 aa, Homo sapiens
  CDR3 for beta chain variable domain of TCR clone 236706 (TRBV4-1, TRBJ2-2)
CASSQAVNTGELFF

SEQ ID NO: 473413 - protein, 16 aa, Homo sapiens
  CDR3 for alpha chain variable domain of TCR clone 236707 (TRAV3, TRAJ21)
CAVRDIERGNFNKFYF

SEQ ID NO: 473414 - protein, 15 aa, Homo sapiens
  CDR3 for beta chain variable domain of TCR clone 236707 (TRBV20-1, TRBJ2-7)
CSARDPTEVGHEQYF

SEQ ID NO: 473415 - protein, 21 aa, Homo sapiens
  CDR3 for alpha chain variable domain of TCR clone 236708 (TRAV1-1, TRAJ6)
CLLLLRCERLERTGGSYIPTF

SEQ ID NO: 473416 - protein, 14 aa, Homo sapiens
  CDR3 for beta chain variable domain of TCR clone 236708 (TRBV20-1, TRBJ1-1)
CSARAVNGYTEAFF

SEQ ID NO: 473417 - protein, 13 aa, Homo sapiens
  CDR3 for alpha chain variable domain of TCR clone 236709 (TRAV21, TRAJ57)
CAVTQGGSEKLVF

SEQ ID NO: 473418 - protein, 14 aa, Homo sapiens
  CDR3 for beta chain variable domain of TCR clone 236709 (TRBV2, TRBJ1-5)
CASSENRGGQPQHF

SEQ ID NO: 473419 - protein, 21 aa, Homo sapiens
  CDR3 for alpha chain variable domain of TCR clone 236710 (TRAV8-3, TRAJ6)
CAVGGEEATYRHLEEEPALLF

SEQ ID NO: 473420 - protein, 14 aa, Homo sapiens
  CDR3 for beta chain variable domain of TCR clone 236710 (TRBV5-1, TRBJ2-7)
CASSRGESLYEQYF

SEQ ID NO: 473421 - protein, 12 aa, Homo sapiens
  CDR3 for alpha chain variable domain of TCR clone 236711 (TRAV12-2, TRAJ9)
CAVNTGGFKTIF

SEQ ID NO: 473422 - protein, 12 aa, Homo sapiens
  CDR3 for beta chain variable domain of TCR clone 236711 (TRBV5-4, TRBJ2-5)
CASSSTRETQYF

SEQ ID NO: 473423 - protein, 13 aa, Homo sapiens
  CDR3 for alpha chain variable domain of TCR clone 236712 (TRAV2, TRAJ40)
CAVVTSGTYNYIF

SEQ ID NO: 473424 - protein, 15 aa, Homo sapiens
  CDR3 for beta chain variable domain of TCR clone 236712 (TRBV18, TRBJ1-1)
CAGSPRQGENTEAFF

SEQ ID NO: 473425 - protein, 15 aa, Homo sapiens
  CDR3 for alpha chain variable domain of TCR clone 236713 (TRAV21, TRAJ53)
CATLNSGGSNYKMPF

SEQ ID NO: 473426 - protein, 16 aa, Homo sapiens
  CDR3 for beta chain variable domain of TCR clone 236713 (TRBV9, TRBJ2-1)
CASSVGGGGNYNEQFF

SEQ ID NO: 473427 - protein, 14 aa, Homo sapiens
  CDR3 for alpha chain variable domain of TCR clone 236714 (TRAV21, TRAJ48)
CAVIAHFGNEKLTF

SEQ ID NO: 473428 - protein, 14 aa, Homo sapiens
  CDR3 for beta chain variable domain of TCR clone 236714 (TRBV12-5, TRBJ2-5)
CASGSRTHQETQYF

SEQ ID NO: 473429 - protein, 15 aa, Homo sapiens
  CDR3 for alpha chain variable domain of TCR clone 236715 (TRAV12-2, TRAJ50)
CAVNGLETSYDKVIF

SEQ ID NO: 473430 - protein, 17 aa, Homo sapiens
  CDR3 for beta chain variable domain of TCR clone 236715 (TRBV7-9, TRBJ2-3)
CASSPTVAGDLTDTQYF

SEQ ID NO: 473431 - protein, 14 aa, Homo sapiens
  CDR3 for alpha chain variable domain of TCR clone 236716 (TRAV17, TRAJ22)
CATSPSGSARQLTF

SEQ ID NO: 473432 - protein, 16 aa, Homo sapiens
  CDR3 for beta chain variable domain of TCR clone 236716 (TRBV29-1, TRBJ2-7)
CSVEDAEDGTAYEQYF

SEQ ID NO: 473433 - protein, 11 aa, Homo sapiens
  CDR3 for alpha chain variable domain of TCR clone 236717 (TRAV35, TRAJ22)
CAGPGVGQLTF

SEQ ID NO: 473434 - protein, 20 aa, Homo sapiens
  CDR3 for beta chain variable domain of TCR clone 236717 (TRBV28, TRBJ2-1)
CASTPIGRSPGLAGGNEQFF

SEQ ID NO: 473435 - protein, 12 aa, Homo sapiens
  CDR3 for alpha chain variable domain of TCR clone 236718 (TRAV17, TRAJ4)
CATDGGYNKLIF

SEQ ID NO: 473436 - protein, 14 aa, Homo sapiens
  CDR3 for beta chain variable domain of TCR clone 236718 (TRBV7-2, TRBJ2-2)
CASRGQGAAGELFF

SEQ ID NO: 473437 - protein, 11 aa, Homo sapiens
  CDR3 for alpha chain variable domain of TCR clone 236719 (TRAV3, TRAJ21)
CAVGNVNKFYF

SEQ ID NO: 473438 - protein, 15 aa, Homo sapiens
  CDR3 for beta chain variable domain of TCR clone 236719 (TRBV7-2, TRBJ1-2)
CASSLVSGGDYGYTF

SEQ ID NO: 473439 - protein, 13 aa, Homo sapiens
  CDR3 for alpha chain variable domain of TCR clone 236720 (TRAV30, TRAJ24)
CGTVTDSWGKLQF

SEQ ID NO: 473440 - protein, 13 aa, Homo sapiens
  CDR3 for beta chain variable domain of TCR clone 236720 (TRBV10-3, TRBJ2-7)
CASKLAVNYERYF

SEQ ID NO: 473441 - protein, 13 aa, Homo sapiens
  CDR3 for alpha chain variable domain of TCR clone 236721 (TRAV13-1, TRAJ33)
FAASRAGNYQLIW

SEQ ID NO: 473442 - protein, 12 aa, Homo sapiens
  CDR3 for beta chain variable domain of TCR clone 236721 (TRBV11-2, TRBJ1-2)
CASSREGDGYTF

SEQ ID NO: 473443 - protein, 18 aa, Homo sapiens
  CDR3 for alpha chain variable domain of TCR clone 236722 (TRAV26-1, TRAJ27)
CIVRPSFNYNANAGKSTF

SEQ ID NO: 473444 - protein, 14 aa, Homo sapiens
  CDR3 for beta chain variable domain of TCR clone 236722 (TRBV10-3, TRBJ1-6)
CAISVDGDESPLHF

SEQ ID NO: 473445 - protein, 12 aa, Homo sapiens
  CDR3 for alpha chain variable domain of TCR clone 236723 (TRAV20, TRAJ56)
CAVTGATSKLTF

SEQ ID NO: 473446 - protein, 14 aa, Homo sapiens
  CDR3 for beta chain variable domain of TCR clone 236723 (TRBV13, TRBJ2-7)
CASSLKGASYEQYF

SEQ ID NO: 473447 - protein, 16 aa, Homo sapiens
  CDR3 for alpha chain variable domain of TCR clone 236724 (TRAV8-3, TRAJ13)
CAVGASPSGGYQKVTF

SEQ ID NO: 473448 - protein, 15 aa, Homo sapiens
  CDR3 for beta chain variable domain of TCR clone 236724 (TRBV19, TRBJ1-5)
CASSIVWADNQPQHF

SEQ ID NO: 473449 - protein, 13 aa, Homo sapiens
  CDR3 for alpha chain variable domain of TCR clone 236725 (TRAV3, TRAJ8)
CAVRFTGFQKLVF

SEQ ID NO: 473450 - protein, 12 aa, Homo sapiens
  CDR3 for beta chain variable domain of TCR clone 236725 (TRBV2, TRBJ1-2)
CVSSGQTYGYTF

SEQ ID NO: 473451 - protein, 12 aa, Homo sapiens
  CDR3 for alpha chain variable domain of TCR clone 236726 (TRAV12-3, TRAJ17)
CAMTLTGNKLTF

SEQ ID NO: 473452 - protein, 12 aa, Homo sapiens
  CDR3 for beta chain variable domain of TCR clone 236726 (TRBV7-6, TRBJ2-3)
CASSTGTDTQYF

SEQ ID NO: 473453 - protein, 13 aa, Homo sapiens
  CDR3 for alpha chain variable domain of TCR clone 236727 (TRAV8-3, TRAJ48)
CAVVPFGNEKLTF

SEQ ID NO: 473454 - protein, 16 aa, Homo sapiens
  CDR3 for beta chain variable domain of TCR clone 236727 (TRBV28, TRBJ2-7)
CASSSGTSGRGYEQYF

SEQ ID NO: 473455 - protein, 19 aa, Homo sapiens
  CDR3 for alpha chain variable domain of TCR clone 236728 (TRAV2, TRAJ20)
ILQVREADAAVYRDCKLSF

SEQ ID NO: 473456 - protein, 15 aa, Homo sapiens
  CDR3 for beta chain variable domain of TCR clone 236728 (TRBV7-9, TRBJ2-2)
CASRPEGTSTGELFF

SEQ ID NO: 473457 - protein, 14 aa, Homo sapiens
  CDR3 for alpha chain variable domain of TCR clone 236729 (TRAV8-4, TRAJ13)
CAVTLSVGDQKVTF

SEQ ID NO: 473458 - protein, 14 aa, Homo sapiens
  CDR3 for beta chain variable domain of TCR clone 236729 (TRBV7-2, TRBJ1-2)
CASSQTGSTYGYTF

SEQ ID NO: 473459 - protein, 12 aa, Homo sapiens
  CDR3 for alpha chain variable domain of TCR clone 236730 (TRAV13-1, TRAJ49)
CAAPHTGNQFYF

SEQ ID NO: 473460 - protein, 17 aa, Homo sapiens
  CDR3 for beta chain variable domain of TCR clone 236730 (TRBV25-1, TRBJ2-7)
CASSDARVVFSSYEQYF

SEQ ID NO: 473461 - protein, 16 aa, Homo sapiens
  CDR3 for alpha chain variable domain of TCR clone 236731 (TRAV30, TRAJ24)
CGTEVVDADSWGKFQF

SEQ ID NO: 473462 - protein, 16 aa, Homo sapiens
  CDR3 for beta chain variable domain of TCR clone 236731 (TRBV20-1, TRBJ1-1)
CSARALTQGMNTEAFF

SEQ ID NO: 473463 - protein, 12 aa, Homo sapiens
  CDR3 for alpha chain variable domain of TCR clone 236732 (TRAV12-3, TRAJ17)
CAMTLTGNKLTF

SEQ ID NO: 473464 - protein, 12 aa, Homo sapiens
  CDR3 for beta chain variable domain of TCR clone 236732 (TRBV11-2, TRBJ2-7)
CASSLATYEQYF

SEQ ID NO: 473465 - protein, 11 aa, Homo sapiens
  CDR3 for alpha chain variable domain of TCR clone 236733 (TRAV12-3, TRAJ43)
CAMSVSNDMCL

SEQ ID NO: 473466 - protein, 13 aa, Homo sapiens
  CDR3 for beta chain variable domain of TCR clone 236733 (TRBV20-1, TRBJ1-1)
CSAPLGGGTEAFF

SEQ ID NO: 473467 - protein, 14 aa, Homo sapiens
  CDR3 for alpha chain variable domain of TCR clone 236734 (TRAV12-2, TRAJ11)
CAVEGGAGYSTLTF

SEQ ID NO: 473468 - protein, 14 aa, Homo sapiens
  CDR3 for beta chain variable domain of TCR clone 236734 (TRBV7-2, TRBJ2-7)
CASRSQGAAYEQYF

SEQ ID NO: 473469 - protein, 10 aa, Homo sapiens
  CDR3 for alpha chain variable domain of TCR clone 236735 (TRAV25, TRAJ20)
CAVNDYKLSF

SEQ ID NO: 473470 - protein, 13 aa, Homo sapiens
  CDR3 for beta chain variable domain of TCR clone 236735 (TRBV6-3, TRBJ2-7)
CASSFCGGYEQYF

SEQ ID NO: 473471 - protein, 15 aa, Homo sapiens
  CDR3 for alpha chain variable domain of TCR clone 236736 (TRAV27, TRAJ50)
CAGVGRGTSYDKVIF

SEQ ID NO: 473472 - protein, 13 aa, Homo sapiens
  CDR3 for beta chain variable domain of TCR clone 236736 (TRBV7-3, TRBJ1-1)
CASSQDWGAEAFF

SEQ ID NO: 473473 - protein, 16 aa, Homo sapiens
  CDR3 for alpha chain variable domain of TCR clone 236737 (TRAV3, TRAJ27)
CAVRDPQCTNAGKSTF

SEQ ID NO: 473474 - protein, 17 aa, Homo sapiens
  CDR3 for beta chain variable domain of TCR clone 236737 (TRBV4-1, TRBJ2-7)
CASSQGRGLQTSYEQYF

SEQ ID NO: 473475 - protein, 15 aa, Homo sapiens
  CDR3 for alpha chain variable domain of TCR clone 236738 (TRAV25, TRAJ53)
CPTSNSGGSNYKLTF

SEQ ID NO: 473476 - protein, 17 aa, Homo sapiens
  CDR3 for beta chain variable domain of TCR clone 236738 (TRBV20-1, TRBJ2-1)
CSASSSGLAGSYNEQFF

SEQ ID NO: 473477 - protein, 16 aa, Homo sapiens
  CDR3 for alpha chain variable domain of TCR clone 236739 (TRAV3, TRAJ10)
CAVRDMRAGGGNKLTF

SEQ ID NO: 473478 - protein, 15 aa, Homo sapiens
  CDR3 for beta chain variable domain of TCR clone 236739 (TRBV7-2, TRBJ1-5)
CVSSRGQGDNQPQHF

SEQ ID NO: 473479 - protein, 15 aa, Homo sapiens
  CDR3 for alpha chain variable domain of TCR clone 236740 (TRAV8-6, TRAJ27)
CAVREVNTNAGKSTF

SEQ ID NO: 473480 - protein, 17 aa, Homo sapiens
  CDR3 for beta chain variable domain of TCR clone 236740 (TRBV11-2, TRBJ2-1)
CASSLYPPGVEYNEQFF

SEQ ID NO: 473481 - protein, 15 aa, Homo sapiens
  CDR3 for alpha chain variable domain of TCR clone 236741 (TRAV8-3, TRAJ15)
CAVGAPNQAGTALNF

SEQ ID NO: 473482 - protein, 14 aa, Homo sapiens
  CDR3 for beta chain variable domain of TCR clone 236741 (TRBV20-1, TRBJ2-1)
CSPNDEASYNEQFF

SEQ ID NO: 473483 - protein, 13 aa, Homo sapiens
  CDR3 for alpha chain variable domain of TCR clone 236742 (TRAV2, TRAJ40)
CAVVTSGTYKYTF

SEQ ID NO: 473484 - protein, 14 aa, Homo sapiens
  CDR3 for beta chain variable domain of TCR clone 236742 (TRBV19, TRBJ2-1)
CASPTFVLSGDQFF

SEQ ID NO: 473485 - protein, 13 aa, Homo sapiens
  CDR3 for alpha chain variable domain of TCR clone 236743 (TRAV3, TRAJ30)
CAVRDRGDDKIIF

SEQ ID NO: 473486 - protein, 16 aa, Homo sapiens
  CDR3 for beta chain variable domain of TCR clone 236743 (TRBV5-1, TRBJ1-1)
CASSRTTGDTEAFLDK

SEQ ID NO: 473487 - protein, 15 aa, Homo sapiens
  CDR3 for alpha chain variable domain of TCR clone 236744 (TRAV13-1, TRAJ50)
CAAKGSETFYGKVMF

SEQ ID NO: 473488 - protein, 13 aa, Homo sapiens
  CDR3 for beta chain variable domain of TCR clone 236744 (TRBV20-1, TRBJ2-3)
CSARAGGRDTQYF

SEQ ID NO: 473489 - protein, 16 aa, Homo sapiens
  CDR3 for alpha chain variable domain of TCR clone 236745 (TRAV16, TRAJ57)
CAPYLITQGGSEKLVF

SEQ ID NO: 473490 - protein, 17 aa, Homo sapiens
  CDR3 for beta chain variable domain of TCR clone 236745 (TRBV24-1, TRBJ2-4)
CATSDAEARVVRNIQYF

SEQ ID NO: 473491 - protein, 13 aa, Homo sapiens
  CDR3 for alpha chain variable domain of TCR clone 236746 (TRAV13-1, TRAJ6)
CTARRGGSYIPTF

SEQ ID NO: 473492 - protein, 16 aa, Homo sapiens
  CDR3 for beta chain variable domain of TCR clone 236746 (TRBV7-9, TRBJ2-2)
CASSLATGVGTGELFF

SEQ ID NO: 473493 - protein, 15 aa, Homo sapiens
  CDR3 for alpha chain variable domain of TCR clone 236747 (TRAV12-2, TRAJ53)
CAVNGGGGSNYKRTF

SEQ ID NO: 473494 - protein, 12 aa, Homo sapiens
  CDR3 for beta chain variable domain of TCR clone 236747 (TRBV11-2, TRBJ2-1)
CASSPGNNEQFF

SEQ ID NO: 473495 - protein, 11 aa, Homo sapiens
  CDR3 for alpha chain variable domain of TCR clone 236748 (TRAV12-3, TRAJ27)
CAMANSGKSTF

SEQ ID NO: 473496 - protein, 14 aa, Homo sapiens
  CDR3 for beta chain variable domain of TCR clone 236748 (TRBV12-5, TRBJ2-5)
CASGSRTHQETQYF

SEQ ID NO: 473497 - protein, 14 aa, Homo sapiens
  CDR3 for alpha chain variable domain of TCR clone 236749 (TRAV8-6, TRAJ12)
CAVKAADSSDKLIF

SEQ ID NO: 473498 - protein, 15 aa, Homo sapiens
  CDR3 for beta chain variable domain of TCR clone 236749 (TRBV5-1, TRBJ2-5)
CASSLGLAEQETQYF

SEQ ID NO: 473499 - protein, 13 aa, Homo sapiens
  CDR3 for alpha chain variable domain of TCR clone 236750 (TRAV1-2, TRAJ9)
CAALNTGGFKTIF

SEQ ID NO: 473500 - protein, 13 aa, Homo sapiens
  CDR3 for beta chain variable domain of TCR clone 236750 (TRBV29-1, TRBJ2-1)
CSVEGGRVNEQFF

SEQ ID NO: 473501 - protein, 12 aa, Homo sapiens
  CDR3 for alpha chain variable domain of TCR clone 236751 (TRAV13-1, TRAJ21)
CAAKEGFNKFYF

SEQ ID NO: 473502 - protein, 15 aa, Homo sapiens
  CDR3 for beta chain variable domain of TCR clone 236751 (TRBV19, TRBJ2-7)
CASSPDSPTSSTSGR

SEQ ID NO: 473503 - protein, 13 aa, Homo sapiens
  CDR3 for alpha chain variable domain of TCR clone 236752 (TRAV8-3, TRAJ44)
CAVVPGTASKLTF

SEQ ID NO: 473504 - protein, 14 aa, Homo sapiens
  CDR3 for beta chain variable domain of TCR clone 236752 (TRBV11-2, TRBJ2-7)
CASSSTGEGYEQYF

SEQ ID NO: 473505 - protein, 17 aa, Homo sapiens
  CDR3 for alpha chain variable domain of TCR clone 236753 (TRAV3, TRAJ28)
CAVREAYSGAGSYQLTF

SEQ ID NO: 473506 - protein, 12 aa, Homo sapiens
  CDR3 for beta chain variable domain of TCR clone 236753 (TRBV5-1, TRBJ2-7)
CASSLDSYEQYF

SEQ ID NO: 473507 - protein, 12 aa, Homo sapiens
  CDR3 for alpha chain variable domain of TCR clone 236754 (TRAV12-3, TRAJ17)
CAMTLTGNKLTF

SEQ ID NO: 473508 - protein, 15 aa, Homo sapiens
  CDR3 for beta chain variable domain of TCR clone 236754 (TRBV19, TRBJ2-1)
CASSILGRAEMSSSS

SEQ ID NO: 473509 - protein, 15 aa, Homo sapiens
  CDR3 for alpha chain variable domain of TCR clone 236755 (TRAV8-6, TRAJ10)
CAASDQAGGGNKLTF

SEQ ID NO: 473510 - protein, 15 aa, Homo sapiens
  CDR3 for beta chain variable domain of TCR clone 236755 (TRBV3-1, TRBJ2-5)
CASSANLGGPETQYF

SEQ ID NO: 473511 - protein, 11 aa, Homo sapiens
  CDR3 for alpha chain variable domain of TCR clone 236756 (TRAV36/DV7, TRAJ45)
SGGGGADGLTF

SEQ ID NO: 473512 - protein, 16 aa, Homo sapiens
  CDR3 for beta chain variable domain of TCR clone 236756 (TRBV7-9, TRBJ2-5)
CASSPSGQGVKGTQYF

SEQ ID NO: 473513 - protein, 12 aa, Homo sapiens
  CDR3 for alpha chain variable domain of TCR clone 236757 (TRAV23/DV6, TRAJ27)
CAASKSAGKSTF

SEQ ID NO: 473514 - protein, 13 aa, Homo sapiens
  CDR3 for beta chain variable domain of TCR clone 236757 (TRBV28, TRBJ2-7)
CASSLPSRYEQYF

SEQ ID NO: 473515 - protein, 12 aa, Homo sapiens
  CDR3 for alpha chain variable domain of TCR clone 236758 (TRAV25, TRAJ53)
CHSGGSNYKLTF

SEQ ID NO: 473516 - protein, 15 aa, Homo sapiens
  CDR3 for beta chain variable domain of TCR clone 236758 (TRBV5-1, TRBJ2-2)
CASSWTSPNTGELFF

SEQ ID NO: 473517 - protein, 10 aa, Homo sapiens
  CDR3 for alpha chain variable domain of TCR clone 236759 (TRAV16, TRAJ26)
CAPEELWSEF

SEQ ID NO: 473518 - protein, 15 aa, Homo sapiens
  CDR3 for beta chain variable domain of TCR clone 236759 (TRBV7-2, TRBJ2-3)
CASSLTGTNTDTQYF

SEQ ID NO: 473519 - protein, 13 aa, Homo sapiens
  CDR3 for alpha chain variable domain of TCR clone 236760 (TRAV29/DV5, TRAJ36)
CAASATGANNLFF

SEQ ID NO: 473520 - protein, 12 aa, Homo sapiens
  CDR3 for beta chain variable domain of TCR clone 236760 (TRBV3-1, TRBJ2-1)
CASSQGSSGQFF

SEQ ID NO: 473521 - protein, 11 aa, Homo sapiens
  CDR3 for alpha chain variable domain of TCR clone 236761 (TRAV8-1, TRAJ7)
CAVNSYNRLAF

SEQ ID NO: 473522 - protein, 11 aa, Homo sapiens
  CDR3 for beta chain variable domain of TCR clone 236761 (TRBV12-4, TRBJ2-3)
CASTATNTQYF

SEQ ID NO: 473523 - protein, 14 aa, Homo sapiens
  CDR3 for alpha chain variable domain of TCR clone 236762 (TRAV12-1, TRAJ24)
CVVRSTDSWGKFQF

SEQ ID NO: 473524 - protein, 13 aa, Homo sapiens
  CDR3 for beta chain variable domain of TCR clone 236762 (TRBV2, TRBJ2-3)
CASILAGGQGQYL

SEQ ID NO: 473525 - protein, 13 aa, Homo sapiens
  CDR3 for alpha chain variable domain of TCR clone 236763 (TRAV27, TRAJ29)
CAAVGLGNTPLVF

SEQ ID NO: 473526 - protein, 14 aa, Homo sapiens
  CDR3 for beta chain variable domain of TCR clone 236763 (TRBV2, TRBJ1-2)
CASRAPGADYGYTF

SEQ ID NO: 473527 - protein, 19 aa, Homo sapiens
  CDR3 for alpha chain variable domain of TCR clone 236764 (TRAV2, TRAJ20)
ILQVRETDAAVYRDCKLSF

SEQ ID NO: 473528 - protein, 14 aa, Homo sapiens
  CDR3 for beta chain variable domain of TCR clone 236764 (TRBV5-1, TRBJ2-7)
CASSRGESLYEQYF

SEQ ID NO: 473529 - protein, 18 aa, Homo sapiens
  CDR3 for alpha chain variable domain of TCR clone 236765 (TRAV21, TRAJ52)
CAVRPSPAGGTSYGKLTF

SEQ ID NO: 473530 - protein, 13 aa, Homo sapiens
  CDR3 for beta chain variable domain of TCR clone 236765 (TRBV7-2, TRBJ2-3)
CASSFPGTDTQYF

SEQ ID NO: 473531 - protein, 14 aa, Homo sapiens
  CDR3 for alpha chain variable domain of TCR clone 236766 (TRAV12-3, TRAJ58)
CAMSTETSGSRVTF

SEQ ID NO: 473532 - protein, 12 aa, Homo sapiens
  CDR3 for beta chain variable domain of TCR clone 236766 (TRBV7-8, TRBJ2-7)
CASSLGDREQYF

SEQ ID NO: 473533 - protein, 13 aa, Homo sapiens
  CDR3 for alpha chain variable domain of TCR clone 236767 (TRAV16, TRAJ5)
CALTNTGRRALTV

SEQ ID NO: 473534 - protein, 15 aa, Homo sapiens
  CDR3 for beta chain variable domain of TCR clone 236767 (TRBV11-2, TRBJ2-4)
CASSRSGTGINIQYF

SEQ ID NO: 473535 - protein, 14 aa, Homo sapiens
  CDR3 for alpha chain variable domain of TCR clone 236768 (TRAV8-3, TRAJ4)
CAVGASGGYNKLIF

SEQ ID NO: 473536 - protein, 15 aa, Homo sapiens
  CDR3 for beta chain variable domain of TCR clone 236768 (TRBV7-6, TRBJ2-2)
CASSSHGLASGELFF

SEQ ID NO: 473537 - protein, 13 aa, Homo sapiens
  CDR3 for alpha chain variable domain of TCR clone 236769 (TRAV1-2, TRAJ9)
CAALNTGGFKTIF

SEQ ID NO: 473538 - protein, 13 aa, Homo sapiens
  CDR3 for beta chain variable domain of TCR clone 236769 (TRBV19, TRBJ1-2)
CASSVPGQGGYTV

SEQ ID NO: 473539 - protein, 12 aa, Homo sapiens
  CDR3 for alpha chain variable domain of TCR clone 236770 (TRAV21, TRAJ23)
CAVMLQGGKLIF

SEQ ID NO: 473540 - protein, 15 aa, Homo sapiens
  CDR3 for beta chain variable domain of TCR clone 236770 (TRBV3-1, TRBJ2-1)
CASSQDYTPRGEQFF

SEQ ID NO: 473541 - protein, 14 aa, Homo sapiens
  CDR3 for alpha chain variable domain of TCR clone 236771 (TRAV21, TRAJ37)
CAVKGYSNTGKLIF

SEQ ID NO: 473542 - protein, 14 aa, Homo sapiens
  CDR3 for beta chain variable domain of TCR clone 236771 (TRBV7-2, TRBJ2-1)
CASSRGGARNEQFF

SEQ ID NO: 473543 - protein, 14 aa, Homo sapiens
  CDR3 for alpha chain variable domain of TCR clone 236772 (TRAV17, TRAJ22)
CATSPSGSARHLTF

SEQ ID NO: 473544 - protein, 19 aa, Homo sapiens
  CDR3 for beta chain variable domain of TCR clone 236772 (TRBV25-1, TRBJ2-2)
CAILVYRVDRGRKTGELFF

SEQ ID NO: 473545 - protein, 17 aa, Homo sapiens
  CDR3 for alpha chain variable domain of TCR clone 236773 (TRAV3, TRAJ12)
CAVRDGGRMDSIYKLIF

SEQ ID NO: 473546 - protein, 14 aa, Homo sapiens
  CDR3 for beta chain variable domain of TCR clone 236773 (TRBV7-9, TRBJ1-2)
CASSRQGANYGYTF

SEQ ID NO: 473547 - protein, 11 aa, Homo sapiens
  CDR3 for alpha chain variable domain of TCR clone 236774 (TRAV21, TRAJ31)
CAVRNNARLRF

SEQ ID NO: 473548 - protein, 15 aa, Homo sapiens
  CDR3 for beta chain variable domain of TCR clone 236774 (TRBV20-1, TRBJ2-7)
CSARDRVSGMDEQYF

SEQ ID NO: 473549 - protein, 16 aa, Homo sapiens
  CDR3 for alpha chain variable domain of TCR clone 236775 (TRAV30, TRAJ44)
CGTEDKRTGTASKLTF

SEQ ID NO: 473550 - protein, 16 aa, Homo sapiens
  CDR3 for beta chain variable domain of TCR clone 236775 (TRBV7-3, TRBJ2-2)
CASSLKRGTLSGELFF

SEQ ID NO: 473551 - protein, 15 aa, Homo sapiens
  CDR3 for alpha chain variable domain of TCR clone 236776 (TRAV3, TRAJ20)
CAVRDIKLSDYKLSF

SEQ ID NO: 473552 - protein, 15 aa, Homo sapiens
  CDR3 for beta chain variable domain of TCR clone 236776 (TRBV12-4, TRBJ2-3)
CASSLVAGAADTQYF

SEQ ID NO: 473553 - protein, 12 aa, Homo sapiens
  CDR3 for alpha chain variable domain of TCR clone 236777 (TRAV23/DV6, TRAJ16)
CAARGRGQKLLF

SEQ ID NO: 473554 - protein, 15 aa, Homo sapiens
  CDR3 for beta chain variable domain of TCR clone 236777 (TRBV15, TRBJ2-1)
CATSRPGQGLHEQLF

SEQ ID NO: 473555 - protein, 14 aa, Homo sapiens
  CDR3 for alpha chain variable domain of TCR clone 236778 (TRAV8-4, TRAJ8)
RAVSVGTGFQKLVF

SEQ ID NO: 473556 - protein, 14 aa, Homo sapiens
  CDR3 for beta chain variable domain of TCR clone 236778 (TRBV2, TRBJ2-3)
CQQWGGTGTDTQYF

SEQ ID NO: 473557 - protein, 13 aa, Homo sapiens
  CDR3 for alpha chain variable domain of TCR clone 236779 (TRAV8-3, TRAJ44)
CAVVPGTASKLTF

SEQ ID NO: 473558 - protein, 14 aa, Homo sapiens
  CDR3 for beta chain variable domain of TCR clone 236779 (TRBV10-2, TRBJ1-5)
CASSSTGRNQPQHF

SEQ ID NO: 473559 - protein, 13 aa, Homo sapiens
  CDR3 for alpha chain variable domain of TCR clone 236780 (TRAV12-2, TRAJ52)
CAVSGTSYGKLTF

SEQ ID NO: 473560 - protein, 15 aa, Homo sapiens
  CDR3 for beta chain variable domain of TCR clone 236780 (TRBV7-2, TRBJ2-3)
CASSLRGGSTDTQYF

SEQ ID NO: 473561 - protein, 16 aa, Homo sapiens
  CDR3 for alpha chain variable domain of TCR clone 236781 (TRAV26-1, TRAJ32)
CIVRTNYGGATNKLIF

SEQ ID NO: 473562 - protein, 16 aa, Homo sapiens
  CDR3 for beta chain variable domain of TCR clone 236781 (TRBV18, TRBJ1-5)
CASSPSTGNSNQPQHF

SEQ ID NO: 473563 - protein, 18 aa, Homo sapiens
  CDR3 for alpha chain variable domain of TCR clone 236782 (TRAV21, TRAJ52)
CSVRPSPAGGTSYGKLTF

SEQ ID NO: 473564 - protein, 14 aa, Homo sapiens
  CDR3 for beta chain variable domain of TCR clone 236782 (TRBV7-2, TRBJ2-1)
CASSLEGGYNEQFF

SEQ ID NO: 473565 - protein, 15 aa, Homo sapiens
  CDR3 for alpha chain variable domain of TCR clone 236783 (TRAV17, TRAJ57)
CATGPSQAGSGKLVF

SEQ ID NO: 473566 - protein, 16 aa, Homo sapiens
  CDR3 for beta chain variable domain of TCR clone 236783 (TRBV12-4, TRBJ1-5)
CASSRPVGGSNQPQHF

SEQ ID NO: 473567 - protein, 14 aa, Homo sapiens
  CDR3 for alpha chain variable domain of TCR clone 236784 (TRAV8-2, TRAJ17)
CAVSEGAAGNKLTF

SEQ ID NO: 473568 - protein, 13 aa, Homo sapiens
  CDR3 for beta chain variable domain of TCR clone 236784 (TRBV19, TRBJ2-1)
CASSIYRVNEQFF

SEQ ID NO: 473569 - protein, 12 aa, Homo sapiens
  CDR3 for alpha chain variable domain of TCR clone 236785 (TRAV23/DV6, TRAJ30)
CAASKGDDKTIF

SEQ ID NO: 473570 - protein, 17 aa, Homo sapiens
  CDR3 for beta chain variable domain of TCR clone 236785 (TRBV13, TRBJ2-3)
CASSLSRVAGGRNTQYF

SEQ ID NO: 473571 - protein, 16 aa, Homo sapiens
  CDR3 for alpha chain variable domain of TCR clone 236786 (TRAV1-2, TRAJ40)
CAVRGSRTAGTYKYIF

SEQ ID NO: 473572 - protein, 14 aa, Homo sapiens
  CDR3 for beta chain variable domain of TCR clone 236786 (TRBV4-1, TRBJ2-3)
CASSQDSGTDTQYF

SEQ ID NO: 473573 - protein, 14 aa, Homo sapiens
  CDR3 for alpha chain variable domain of TCR clone 236787 (TRAV12-2, TRAJ40)
CAVKIPSGTYKYIF

SEQ ID NO: 473574 - protein, 16 aa, Homo sapiens
  CDR3 for beta chain variable domain of TCR clone 236787 (TRBV28, TRBJ2-7)
CASSSGTSGRGYEQYF

SEQ ID NO: 473575 - protein, 16 aa, Homo sapiens
  CDR3 for alpha chain variable domain of TCR clone 236788 (TRAV30, TRAJ24)
CGTEIVDADSWGKFQF

SEQ ID NO: 473576 - protein, 15 aa, Homo sapiens
  CDR3 for beta chain variable domain of TCR clone 236788 (TRBV7-8, TRBJ2-5)
CASSFQSSGEETQYF

SEQ ID NO: 473577 - protein, 16 aa, Homo sapiens
  CDR3 for alpha chain variable domain of TCR clone 236789 (TRAV14/DV4, TRAJ53)
CAMREGVGGSNYKLTF

SEQ ID NO: 473578 - protein, 14 aa, Homo sapiens
  CDR3 for beta chain variable domain of TCR clone 236789 (TRBV20-1, TRBJ2-7)
CSAKTGTGGYEQYF

SEQ ID NO: 473579 - protein, 12 aa, Homo sapiens
  CDR3 for alpha chain variable domain of TCR clone 236790 (TRAV1-2, TRAJ24)
CAVGGSWGKFQF

SEQ ID NO: 473580 - protein, 19 aa, Homo sapiens
  CDR3 for beta chain variable domain of TCR clone 236790 (TRBV25-1, TRBJ2-2)
CAILVYRVDRGRKTGELFF

SEQ ID NO: 473581 - protein, 22 aa, Homo sapiens
  CDR3 for alpha chain variable domain of TCR clone 236791 (TRAV3, TRAJ38)
CAVRDCLNAGNNHIQNPDPAVY

SEQ ID NO: 473582 - protein, 15 aa, Homo sapiens
  CDR3 for beta chain variable domain of TCR clone 236791 (TRBV4-1, TRBJ1-4)
CASSDTGGTNEKLFF

SEQ ID NO: 473583 - protein, 15 aa, Homo sapiens
  CDR3 for alpha chain variable domain of TCR clone 236792 (TRAV23/DV6, TRAJ18)
CAARYRGSTLGRLYF

SEQ ID NO: 473584 - protein, 12 aa, Homo sapiens
  CDR3 for beta chain variable domain of TCR clone 236792 (TRBV7-9, TRBJ1-4)
CASSTDREKLFF

SEQ ID NO: 473585 - protein, 15 aa, Homo sapiens
  CDR3 for alpha chain variable domain of TCR clone 236793 (TRAV21, TRAJ53)
CATLNSGGSNYKLTF

SEQ ID NO: 473586 - protein, 14 aa, Homo sapiens
  CDR3 for beta chain variable domain of TCR clone 236793 (TRBV20-1, TRBJ2-1)
CSAQIGGSANEKFF

SEQ ID NO: 473587 - protein, 14 aa, Homo sapiens
  CDR3 for alpha chain variable domain of TCR clone 236794 (TRAV1-2, TRAJ8)
CAVREDTGFQKLVF

SEQ ID NO: 473588 - protein, 15 aa, Homo sapiens
  CDR3 for beta chain variable domain of TCR clone 236794 (TRBV7-3, TRBJ2-2)
CASRGPGQNTGELFF

SEQ ID NO: 473589 - protein, 13 aa, Homo sapiens
  CDR3 for alpha chain variable domain of TCR clone 236795 (TRAV12-2, TRAJ30)
CAVNLNRDDKIIF

SEQ ID NO: 473590 - protein, 12 aa, Homo sapiens
  CDR3 for beta chain variable domain of TCR clone 236795 (TRBV12-4, TRBJ2-1)
CASSPGRNEQFF

SEQ ID NO: 473591 - protein, 14 aa, Homo sapiens
  CDR3 for alpha chain variable domain of TCR clone 236796 (TRAV26-1, TRAJ38)
CIADNAGNNRRLIW

SEQ ID NO: 473592 - protein, 13 aa, Homo sapiens
  CDR3 for beta chain variable domain of TCR clone 236796 (TRBV20-1, TRBJ1-1)
CSARGEGNTEAFF

SEQ ID NO: 473593 - protein, 15 aa, Homo sapiens
  CDR3 for alpha chain variable domain of TCR clone 236797 (TRAV17, TRAJ57)
CATGPSQGGSEKLVT

SEQ ID NO: 473594 - protein, 16 aa, Homo sapiens
  CDR3 for beta chain variable domain of TCR clone 236797 (TRBV12-4, TRBJ1-5)
CASSRPVGGSNQPQHF

SEQ ID NO: 473595 - protein, 11 aa, Homo sapiens
  CDR3 for alpha chain variable domain of TCR clone 236798 (TRAV12-3, TRAJ43)
CAMSVSNDMRF

SEQ ID NO: 473596 - protein, 14 aa, Homo sapiens
  CDR3 for beta chain variable domain of TCR clone 236798 (TRBV20-1, TRBJ1-1)
SAVLHWGGGTEAFF

SEQ ID NO: 473597 - protein, 11 aa, Homo sapiens
  CDR3 for alpha chain variable domain of TCR clone 236799 (TRAV4, TRAJ28)
CLVGDNRAETL

SEQ ID NO: 473598 - protein, 14 aa, Homo sapiens
  CDR3 for beta chain variable domain of TCR clone 236799 (TRBV6-6, TRBJ2-5)
CASTLGSDMQTQYF

SEQ ID NO: 473599 - protein, 12 aa, Homo sapiens
  CDR3 for alpha chain variable domain of TCR clone 236800 (TRAV17, TRAJ12)
RATLRSSYKLIF

SEQ ID NO: 473600 - protein, 16 aa, Homo sapiens
  CDR3 for beta chain variable domain of TCR clone 236800 (TRBV28, TRBJ2-7)
CASSLFFETGGPEQNF

SEQ ID NO: 473601 - protein, 14 aa, Homo sapiens
  CDR3 for alpha chain variable domain of TCR clone 236801 (TRAV1-2, TRAJ16)
CAVNRFSDGQKLLF

SEQ ID NO: 473602 - protein, 13 aa, Homo sapiens
  CDR3 for beta chain variable domain of TCR clone 236801 (TRBV10-3, TRBJ2-7)
CTSKLAVNYEQYF

SEQ ID NO: 473603 - protein, 14 aa, Homo sapiens
  CDR3 for alpha chain variable domain of TCR clone 236802 (TRAV25, TRAJ22)
CAFRSSGSARQSTF

SEQ ID NO: 473604 - protein, 16 aa, Homo sapiens
  CDR3 for beta chain variable domain of TCR clone 236802 (TRBV4-2, TRBJ1-1)
CASSPSPGRAAPEAFF

SEQ ID NO: 473605 - protein, 15 aa, Homo sapiens
  CDR3 for alpha chain variable domain of TCR clone 236803 (TRAV12-1, TRAJ5)
CVVNMLETGRRALTF

SEQ ID NO: 473606 - protein, 15 aa, Homo sapiens
  CDR3 for beta chain variable domain of TCR clone 236803 (TRBV12-4, TRBJ1-2)
CASSPITGGGYGYTF

SEQ ID NO: 473607 - protein, 19 aa, Homo sapiens
  CDR3 for alpha chain variable domain of TCR clone 236804 (TRAV2, TRAJ20)
ILQVREADAAVYRDCKLSF

SEQ ID NO: 473608 - protein, 14 aa, Homo sapiens
  CDR3 for beta chain variable domain of TCR clone 236804 (TRBV7-3, TRBJ1-1)
CASSLKGGNTEAFF

SEQ ID NO: 473609 - protein, 15 aa, Homo sapiens
  CDR3 for alpha chain variable domain of TCR clone 236805 (TRAV21, TRAJ37)
CAVGPTLSNTGKLIF

SEQ ID NO: 473610 - protein, 11 aa, Homo sapiens
  CDR3 for beta chain variable domain of TCR clone 236805 (TRBV19, TRBJ1-1)
CASSIGSEAFF

SEQ ID NO: 473611 - protein, 17 aa, Homo sapiens
  CDR3 for alpha chain variable domain of TCR clone 236806 (TRAV36/DV7, TRAJ42)
CAVDKINYGGSQGNLIF

SEQ ID NO: 473612 - protein, 19 aa, Homo sapiens
  CDR3 for beta chain variable domain of TCR clone 236806 (TRBV19, TRBJ2-2)
CASTRPGLAGGRVTGELFF

SEQ ID NO: 473613 - protein, 13 aa, Homo sapiens
  CDR3 for alpha chain variable domain of TCR clone 236807 (TRAV9-2, TRAJ53)
CALSGGSNYKLTF

SEQ ID NO: 473614 - protein, 13 aa, Homo sapiens
  CDR3 for beta chain variable domain of TCR clone 236807 (TRBV12-4, TRBJ2-7)
CASSPTETYEQYF

SEQ ID NO: 473615 - protein, 18 aa, Homo sapiens
  CDR3 for alpha chain variable domain of TCR clone 236808 (TRAV21, TRAJ52)
CAMSRTNAGGTSYGKLTF

SEQ ID NO: 473616 - protein, 17 aa, Homo sapiens
  CDR3 for beta chain variable domain of TCR clone 236808 (TRBV7-3, TRBJ2-3)
CASSLVKRMRGADTQYF

SEQ ID NO: 473617 - protein, 17 aa, Homo sapiens
  CDR3 for alpha chain variable domain of TCR clone 236809 (TRAV3, TRAJ12)
CAVRDGGRMDSSYKLIF

SEQ ID NO: 473618 - protein, 14 aa, Homo sapiens
  CDR3 for beta chain variable domain of TCR clone 236809 (TRBV7-9, TRBJ1-2)
CASSRQGANHGYTF

SEQ ID NO: 473619 - protein, 14 aa, Homo sapiens
  CDR3 for alpha chain variable domain of TCR clone 236810 (TRAV1-2, TRAJ8)
CAVREDTGFQKLVF

SEQ ID NO: 473620 - protein, 12 aa, Homo sapiens
  CDR3 for beta chain variable domain of TCR clone 236810 (TRBV5-1, TRBJ2-7)
CASSDSTYEQYF

SEQ ID NO: 473621 - protein, 13 aa, Homo sapiens
  CDR3 for alpha chain variable domain of TCR clone 236811 (TRAV26-2, TRAJ43)
CILRAVNNNDMRF

SEQ ID NO: 473622 - protein, 15 aa, Homo sapiens
  CDR3 for beta chain variable domain of TCR clone 236811 (TRBV10-3, TRBJ1-4)
CAISENSPSGEKLFF

SEQ ID NO: 473623 - protein, 14 aa, Homo sapiens
  CDR3 for alpha chain variable domain of TCR clone 236812 (TRAV29/DV5, TRAJ45)
CAASFRGGADGLTF

SEQ ID NO: 473624 - protein, 11 aa, Homo sapiens
  CDR3 for beta chain variable domain of TCR clone 236812 (TRBV11-2, TRBJ2-2)
CAISLHGELFF

SEQ ID NO: 473625 - protein, 12 aa, Homo sapiens
  CDR3 for alpha chain variable domain of TCR clone 236813 (TRAV2, TRAJ10)
CASTGGGSKLTF

SEQ ID NO: 473626 - protein, 16 aa, Homo sapiens
  CDR3 for beta chain variable domain of TCR clone 236813 (TRBV7-3, TRBJ2-2)
CASSLKRGTLSGELFF

SEQ ID NO: 473627 - protein, 10 aa, Homo sapiens
  CDR3 for alpha chain variable domain of TCR clone 236814 (TRAV30, TRAJ24)
DADSWGKFQF

SEQ ID NO: 473628 - protein, 12 aa, Homo sapiens
  CDR3 for beta chain variable domain of TCR clone 236814 (TRBV11-2, TRBJ2-2)
CASSLGGGELFF

SEQ ID NO: 473629 - protein, 14 aa, Homo sapiens
  CDR3 for alpha chain variable domain of TCR clone 236815 (TRAV35, TRAJ22)
CDGLRPGSARQLTF

SEQ ID NO: 473630 - protein, 14 aa, Homo sapiens
  CDR3 for beta chain variable domain of TCR clone 236815 (TRBV5-1, TRBJ2-7)
CASSRGESLYEQYF

SEQ ID NO: 473631 - protein, 12 aa, Homo sapiens
  CDR3 for alpha chain variable domain of TCR clone 236816 (TRAV13-2, TRAJ23)
YAERHRGGKLIF

SEQ ID NO: 473632 - protein, 16 aa, Homo sapiens
  CDR3 for beta chain variable domain of TCR clone 236816 (TRBV20-1, TRBJ1-4)
CSAPGQGLLANEKLFF

SEQ ID NO: 473633 - protein, 10 aa, Homo sapiens
  CDR3 for alpha chain variable domain of TCR clone 236817 (TRAV13-1, TRAJ30)
CAARDDKIIF

SEQ ID NO: 473634 - protein, 12 aa, Homo sapiens
  CDR3 for beta chain variable domain of TCR clone 236817 (TRBV7-9, TRBJ1-2)
CASSLDREPTMA

SEQ ID NO: 473635 - protein, 15 aa, Homo sapiens
  CDR3 for alpha chain variable domain of TCR clone 236818 (TRAV4, TRAJ39)
CLVGPNNNAGNMLTF

SEQ ID NO: 473636 - protein, 16 aa, Homo sapiens
  CDR3 for beta chain variable domain of TCR clone 236818 (TRBV27, TRBJ2-2)
CASSFRGVVRTGELFF

SEQ ID NO: 473637 - protein, 11 aa, Homo sapiens
  CDR3 for alpha chain variable domain of TCR clone 236819 (TRAV2, TRAJ33)
CAVESNYQLIW

SEQ ID NO: 473638 - protein, 15 aa, Homo sapiens
  CDR3 for beta chain variable domain of TCR clone 236819 (TRBV19, TRBJ1-1)
CASTSGQIQNTEAIF

SEQ ID NO: 473639 - protein, 11 aa, Homo sapiens
  CDR3 for alpha chain variable domain of TCR clone 236820 (TRAV2, TRAJ33)
CALESNYQLIL

SEQ ID NO: 473640 - protein, 15 aa, Homo sapiens
  CDR3 for beta chain variable domain of TCR clone 236820 (TRBV19, TRBJ1-1)
CASTSGQIQNTEAFL

SEQ ID NO: 473641 - protein, 15 aa, Homo sapiens
  CDR3 for alpha chain variable domain of TCR clone 236821 (TRAV35, TRAJ40)
CAGQLGTSGTYKYIF

SEQ ID NO: 473642 - protein, 14 aa, Homo sapiens
  CDR3 for beta chain variable domain of TCR clone 236821 (TRBV7-3, TRBJ2-1)
GASSLAGGTNEQFF

SEQ ID NO: 473643 - protein, 14 aa, Homo sapiens
  CDR3 for alpha chain variable domain of TCR clone 236822 (TRAV38-1, TRAJ43)
CAFMKHNNNNDMRF

SEQ ID NO: 473644 - protein, 15 aa, Homo sapiens
  CDR3 for beta chain variable domain of TCR clone 236822 (TRBV9, TRBJ1-6)
CASSVAGTGESPLHF

SEQ ID NO: 473645 - protein, 12 aa, Homo sapiens
  CDR3 for alpha chain variable domain of TCR clone 236823 (TRAV12-1, TRAJ40)
CVVYSGTYKYIF

SEQ ID NO: 473646 - protein, 18 aa, Homo sapiens
  CDR3 for beta chain variable domain of TCR clone 236823 (TRBV11-2, TRBJ2-3)
CASSFGGASRGATNTQYF

SEQ ID NO: 473647 - protein, 12 aa, Homo sapiens
  CDR3 for alpha chain variable domain of TCR clone 236824 (TRAV12-3, TRAJ17)
CAMTLTGNKLTF

SEQ ID NO: 473648 - protein, 16 aa, Homo sapiens
  CDR3 for beta chain variable domain of TCR clone 236824 (TRBV28, TRBJ1-5)
CASSLAGQGWNQPQHF

SEQ ID NO: 473649 - protein, 15 aa, Homo sapiens
  CDR3 for alpha chain variable domain of TCR clone 236825 (TRAV8-2, TRAJ27)
CVVSDRGTNAGKSTF

SEQ ID NO: 473650 - protein, 15 aa, Homo sapiens
  CDR3 for beta chain variable domain of TCR clone 236825 (TRBV12-4, TRBJ2-5)
CASSGTGQAQETQYF

SEQ ID NO: 473651 - protein, 13 aa, Homo sapiens
  CDR3 for alpha chain variable domain of TCR clone 236826 (TRAV8-6, TRAJ8)
CAFMNTGFQKLVF

SEQ ID NO: 473652 - protein, 15 aa, Homo sapiens
  CDR3 for beta chain variable domain of TCR clone 236826 (TRBV28, TRBJ2-5)
CARSSGRVIQETQYF

SEQ ID NO: 473653 - protein, 11 aa, Homo sapiens
  CDR3 for alpha chain variable domain of TCR clone 236827 (TRAV13-1, TRAJ20)
CAASNDYKRSF

SEQ ID NO: 473654 - protein, 15 aa, Homo sapiens
  CDR3 for beta chain variable domain of TCR clone 236827 (TRBV6-3, TRBJ2-7)
CASSSAGTVFYEQYF

SEQ ID NO: 473655 - protein, 13 aa, Homo sapiens
  CDR3 for alpha chain variable domain of TCR clone 236828 (TRAV12-1, TRAJ11)
CVVNRAGYSTLTF

SEQ ID NO: 473656 - protein, 15 aa, Homo sapiens
  CDR3 for beta chain variable domain of TCR clone 236828 (TRBV28, TRBJ1-1)
CASTSTRGLNTEAFF

SEQ ID NO: 473657 - protein, 14 aa, Homo sapiens
  CDR3 for alpha chain variable domain of TCR clone 236829 (TRAV1-2, TRAJ16)
CAVNRFSEGQKLLF

SEQ ID NO: 473658 - protein, 17 aa, Homo sapiens
  CDR3 for beta chain variable domain of TCR clone 236829 (TRBV28, TRBJ2-5)
CASSTPEGDALQETQYF

SEQ ID NO: 473659 - protein, 16 aa, Homo sapiens
  CDR3 for alpha chain variable domain of TCR clone 236830 (TRAV3, TRAJ10)
CAVRDMRAGGGNKLTF

SEQ ID NO: 473660 - protein, 12 aa, Homo sapiens
  CDR3 for beta chain variable domain of TCR clone 236830 (TRBV14, TRBJ2-4)
CASSNLKSIQYF

SEQ ID NO: 473661 - protein, 13 aa, Homo sapiens
  CDR3 for alpha chain variable domain of TCR clone 236831 (TRAV12-3, TRAJ21)
CAPGPHNFNKFYF

SEQ ID NO: 473662 - protein, 15 aa, Homo sapiens
  CDR3 for beta chain variable domain of TCR clone 236831 (TRBV2, TRBJ2-5)
CASSERGGYRETQYF

SEQ ID NO: 473663 - protein, 13 aa, Homo sapiens
  CDR3 for alpha chain variable domain of TCR clone 236832 (TRAV12-3, TRAJ13)
CAMGTGGYQKVTF

SEQ ID NO: 473664 - protein, 15 aa, Homo sapiens
  CDR3 for beta chain variable domain of TCR clone 236832 (TRBV10-2, TRBJ2-6)
CASSEQGTGANVLTF

SEQ ID NO: 473665 - protein, 11 aa, Homo sapiens
  CDR3 for alpha chain variable domain of TCR clone 236833 (TRAV2, TRAJ13)
CASGGYQKVTF

SEQ ID NO: 473666 - protein, 13 aa, Homo sapiens
  CDR3 for beta chain variable domain of TCR clone 236833 (TRBV19, TRBJ1-2)
CTSSVPGQDGYTF

SEQ ID NO: 473667 - protein, 11 aa, Homo sapiens
  CDR3 for alpha chain variable domain of TCR clone 236834 (TRAV17, TRAJ9)
CATTGGFKTIF

SEQ ID NO: 473668 - protein, 12 aa, Homo sapiens
  CDR3 for beta chain variable domain of TCR clone 236834 (TRBV12-5, TRBJ2-5)
CASGQGVETQYF

SEQ ID NO: 473669 - protein, 12 aa, Homo sapiens
  CDR3 for alpha chain variable domain of TCR clone 236835 (TRAV12-3, TRAJ17)
CAMTLTGNKLTF

SEQ ID NO: 473670 - protein, 15 aa, Homo sapiens
  CDR3 for beta chain variable domain of TCR clone 236835 (TRBV20-1, TRBJ2-7)
YSAGDRVSGMDEQYF

SEQ ID NO: 473671 - protein, 13 aa, Homo sapiens
  CDR3 for alpha chain variable domain of TCR clone 236836 (TRAV1-1, TRAJ10)
RAVNSGGYQKVTF

SEQ ID NO: 473672 - protein, 12 aa, Homo sapiens
  CDR3 for beta chain variable domain of TCR clone 236836 (TRBV28, TRBJ2-1)
CASSVQINEQFF

SEQ ID NO: 473673 - protein, 12 aa, Homo sapiens
  CDR3 for alpha chain variable domain of TCR clone 236837 (TRAV12-3, TRAJ20)
CAMVIGDYKLSF

SEQ ID NO: 473674 - protein, 13 aa, Homo sapiens
  CDR3 for beta chain variable domain of TCR clone 236837 (TRBV23-1, TRBJ1-4)
CASRGKFNEKLFF

SEQ ID NO: 473675 - protein, 18 aa, Homo sapiens
  CDR3 for alpha chain variable domain of TCR clone 236838 (TRAV16, TRAJ52)
CALSGVDAGGTSYGKLTF

SEQ ID NO: 473676 - protein, 13 aa, Homo sapiens
  CDR3 for beta chain variable domain of TCR clone 236838 (TRBV10-3, TRBJ2-7)
CASKLAVNYEQYF

SEQ ID NO: 473677 - protein, 15 aa, Homo sapiens
  CDR3 for alpha chain variable domain of TCR clone 236839 (TRAV4, TRAJ39)
CLVGPNNNAGNMLTF

SEQ ID NO: 473678 - protein, 14 aa, Homo sapiens
  CDR3 for beta chain variable domain of TCR clone 236839 (TRBV19, TRBJ2-7)
CASYFRDTFTGMYF

SEQ ID NO: 473679 - protein, 15 aa, Homo sapiens
  CDR3 for alpha chain variable domain of TCR clone 236840 (TRAV3, TRAJ7)
CAVRDKDNGNNRLAF

SEQ ID NO: 473680 - protein, 14 aa, Homo sapiens
  CDR3 for beta chain variable domain of TCR clone 236840 (TRBV18, TRBJ2-1)
CASSPQGRFNEQFF

SEQ ID NO: 473681 - protein, 14 aa, Homo sapiens
  CDR3 for alpha chain variable domain of TCR clone 236841 (TRAV12-2, TRAJ17)
CAVLFKAAGNKLTF

SEQ ID NO: 473682 - protein, 14 aa, Homo sapiens
  CDR3 for beta chain variable domain of TCR clone 236841 (TRBV15, TRBJ1-2)
CATSRDFGRVGYTF

SEQ ID NO: 473683 - protein, 17 aa, Homo sapiens
  CDR3 for alpha chain variable domain of TCR clone 236842 (TRAV3, TRAJ6)
CAVRDGPRAGGSYIPTF

SEQ ID NO: 473684 - protein, 16 aa, Homo sapiens
  CDR3 for beta chain variable domain of TCR clone 236842 (TRBV4-2, TRBJ2-1)
CASSQETATPYNEQFF

SEQ ID NO: 473685 - protein, 10 aa, Homo sapiens
  CDR3 for alpha chain variable domain of TCR clone 236843 (TRAV23/DV6, TRAJ43)
CAAAVAALEQ

SEQ ID NO: 473686 - protein, 13 aa, Homo sapiens
  CDR3 for beta chain variable domain of TCR clone 236843 (TRBV6-5, TRBJ2-5)
CASSPQGGETQYF

SEQ ID NO: 473687 - protein, 15 aa, Homo sapiens
  CDR3 for alpha chain variable domain of TCR clone 236844 (TRAV38-2/DV8, TRAJ48)
CAYRSGGFGNEKLTF

SEQ ID NO: 473688 - protein, 16 aa, Homo sapiens
  CDR3 for beta chain variable domain of TCR clone 236844 (TRBV28, TRBJ2-7)
CASSPWVATGELSQYF

SEQ ID NO: 473689 - protein, 13 aa, Homo sapiens
  CDR3 for alpha chain variable domain of TCR clone 236845 (TRAV21, TRAJ20)
CAVGLRVDYKLSC

SEQ ID NO: 473690 - protein, 12 aa, Homo sapiens
  CDR3 for beta chain variable domain of TCR clone 236845 (TRBV27, TRBJ2-5)
CASSPTGETQYF

SEQ ID NO: 473691 - protein, 15 aa, Homo sapiens
  CDR3 for alpha chain variable domain of TCR clone 236846 (TRAV27, TRAJ37)
CAGIHGSSSTGKLIF

SEQ ID NO: 473692 - protein, 13 aa, Homo sapiens
  CDR3 for beta chain variable domain of TCR clone 236846 (TRBV19, TRBJ2-1)
CASSIRSSWEQFF

SEQ ID NO: 473693 - protein, 11 aa, Homo sapiens
  CDR3 for alpha chain variable domain of TCR clone 236847 (TRAV2, TRAJ13)
CASGGYQKVTF

SEQ ID NO: 473694 - protein, 17 aa, Homo sapiens
  CDR3 for beta chain variable domain of TCR clone 236847 (TRBV7-9, TRBJ2-1)
CASSLVASYPSYNEQFF

SEQ ID NO: 473695 - protein, 14 aa, Homo sapiens
  CDR3 for alpha chain variable domain of TCR clone 236848 (TRAV23/DV6, TRAJ39)
CAASIGNAGNMLPF

SEQ ID NO: 473696 - protein, 16 aa, Homo sapiens
  CDR3 for beta chain variable domain of TCR clone 236848 (TRBV12-5, TRBJ2-5)
CASGPRTSGNQETQYF

SEQ ID NO: 473697 - protein, 14 aa, Homo sapiens
  CDR3 for alpha chain variable domain of TCR clone 236849 (TRAV1-1, TRAJ27)
CAVIYTTNTGKSTF

SEQ ID NO: 473698 - protein, 13 aa, Homo sapiens
  CDR3 for beta chain variable domain of TCR clone 236849 (TRBV12-5, TRBJ1-2)
CASGVRTGNGYTF

SEQ ID NO: 473699 - protein, 15 aa, Homo sapiens
  CDR3 for alpha chain variable domain of TCR clone 236850 (TRAV21, TRAJ53)
CATLNSGGSNYKLTF

SEQ ID NO: 473700 - protein, 14 aa, Homo sapiens
  CDR3 for beta chain variable domain of TCR clone 236850 (TRBV7-2, TRBJ2-7)
CASSPRTSFYEQYF

SEQ ID NO: 473701 - protein, 12 aa, Homo sapiens
  CDR3 for alpha chain variable domain of TCR clone 236851 (TRAV2, TRAJ9)
CAVGAGGFKTIF

SEQ ID NO: 473702 - protein, 15 aa, Homo sapiens
  CDR3 for beta chain variable domain of TCR clone 236851 (TRBV19, TRBJ2-3)
CAAGDTNAPNDTQYF

SEQ ID NO: 473703 - protein, 13 aa, Homo sapiens
  CDR3 for alpha chain variable domain of TCR clone 236852 (TRAV3, TRAJ27)
CAVRPLGAGKSTF

SEQ ID NO: 473704 - protein, 16 aa, Homo sapiens
  CDR3 for beta chain variable domain of TCR clone 236852 (TRBV11-2, TRBJ2-7)
CASSTVTAPKTYEQYF

SEQ ID NO: 473705 - protein, 13 aa, Homo sapiens
  CDR3 for alpha chain variable domain of TCR clone 236853 (TRAV9-2, TRAJ53)
CALSGGSTYKLTF

SEQ ID NO: 473706 - protein, 17 aa, Homo sapiens
  CDR3 for beta chain variable domain of TCR clone 236853 (TRBV11-2, TRBJ2-1)
CASSLYPPGVEYNEQFF

SEQ ID NO: 473707 - protein, 10 aa, Homo sapiens
  CDR3 for alpha chain variable domain of TCR clone 236854 (TRAV8-3, TRAJ43)
CAVALATMRF

SEQ ID NO: 473708 - protein, 14 aa, Homo sapiens
  CDR3 for beta chain variable domain of TCR clone 236854 (TRBV4-2, TRBJ2-1)
CASGLDRAYNEQFF

SEQ ID NO: 473709 - protein, 13 aa, Homo sapiens
  CDR3 for alpha chain variable domain of TCR clone 236855 (TRAV12-2, TRAJ39)
CAMNNNAGNMHTF

SEQ ID NO: 473710 - protein, 13 aa, Homo sapiens
  CDR3 for beta chain variable domain of TCR clone 236855 (TRBV2, TRBJ1-5)
CATAGPGNQPQHF

SEQ ID NO: 473711 - protein, 13 aa, Homo sapiens
  CDR3 for alpha chain variable domain of TCR clone 236856 (TRAV8-1, TRAJ23)
CAWRDNEGGKLIF

SEQ ID NO: 473712 - protein, 10 aa, Homo sapiens
  CDR3 for beta chain variable domain of TCR clone 236856 (TRBV2, TRBJ2-5)
CASSAATQYF

SEQ ID NO: 473713 - protein, 14 aa, Homo sapiens
  CDR3 for alpha chain variable domain of TCR clone 236857 (TRAV13-1, TRAJ35)
CAASKGGVGNVLHC

SEQ ID NO: 473714 - protein, 13 aa, Homo sapiens
  CDR3 for beta chain variable domain of TCR clone 236857 (TRBV7-3, TRBJ1-1)
CASSQDWGDEAFF

SEQ ID NO: 473715 - protein, 11 aa, Homo sapiens
  CDR3 for alpha chain variable domain of TCR clone 236858 (TRAV13-1, TRAJ30)
CAASRDDKIIF

SEQ ID NO: 473716 - protein, 13 aa, Homo sapiens
  CDR3 for beta chain variable domain of TCR clone 236858 (TRBV24-1, TRBJ2-2)
CATSDWSTGELFF

SEQ ID NO: 473717 - protein, 14 aa, Homo sapiens
  CDR3 for alpha chain variable domain of TCR clone 236859 (TRAV1-2, TRAJ16)
CAVNRFSDDQKLLF

SEQ ID NO: 473718 - protein, 15 aa, Homo sapiens
  CDR3 for beta chain variable domain of TCR clone 236859 (TRBV9, TRBJ1-6)
CASSVAGTGDSPLLF

SEQ ID NO: 473719 - protein, 14 aa, Homo sapiens
  CDR3 for alpha chain variable domain of TCR clone 236860 (TRAV30, TRAJ26)
CGTEIVSYGQNFVF

SEQ ID NO: 473720 - protein, 13 aa, Homo sapiens
  CDR3 for beta chain variable domain of TCR clone 236860 (TRBV19, TRBJ1-3)
CASRLSLGNTMDF

SEQ ID NO: 473721 - protein, 16 aa, Homo sapiens
  CDR3 for alpha chain variable domain of TCR clone 236861 (TRAV30, TRAJ24)
CGTEIVDADSWGKFQF

SEQ ID NO: 473722 - protein, 13 aa, Homo sapiens
  CDR3 for beta chain variable domain of TCR clone 236861 (TRBV7-2, TRBJ1-4)
CASSLAGLGKLFF

SEQ ID NO: 473723 - protein, 16 aa, Homo sapiens
  CDR3 for alpha chain variable domain of TCR clone 236862 (TRAV16, TRAJ52)
CALSGVGGTSYGKLTF

SEQ ID NO: 473724 - protein, 14 aa, Homo sapiens
  CDR3 for beta chain variable domain of TCR clone 236862 (TRBV19, TRBJ1-2)
CASNLQGQAYGYTF

SEQ ID NO: 473725 - protein, 12 aa, Homo sapiens
  CDR3 for alpha chain variable domain of TCR clone 236863 (TRAV1-1, TRAJ9)
CAVDTGGFKTIF

SEQ ID NO: 473726 - protein, 19 aa, Homo sapiens
  CDR3 for beta chain variable domain of TCR clone 236863 (TRBV7-2, TRBJ2-3)
CASSFLSRNWGGGTDTQYF

SEQ ID NO: 473727 - protein, 12 aa, Homo sapiens
  CDR3 for alpha chain variable domain of TCR clone 236864 (TRAV13-1, TRAJ21)
CAAKEGFNKFYF

SEQ ID NO: 473728 - protein, 13 aa, Homo sapiens
  CDR3 for beta chain variable domain of TCR clone 236864 (TRBV7-2, TRBJ1-1)
CAISRNTNTEAFF

SEQ ID NO: 473729 - protein, 13 aa, Homo sapiens
  CDR3 for alpha chain variable domain of TCR clone 236865 (TRAV35, TRAJ36)
CAGPRIGANNLFF

SEQ ID NO: 473730 - protein, 15 aa, Homo sapiens
  CDR3 for beta chain variable domain of TCR clone 236865 (TRBV28, TRBJ2-5)
CASSPPWSYEETQYF

SEQ ID NO: 473731 - protein, 14 aa, Homo sapiens
  CDR3 for alpha chain variable domain of TCR clone 236866 (TRAV38-2/DV8, TRAJ30)
RAYMDGLGGDKIIF

SEQ ID NO: 473732 - protein, 15 aa, Homo sapiens
  CDR3 for beta chain variable domain of TCR clone 236866 (TRBV7-9, TRBJ2-2)
CASRPADRDTGELFF

SEQ ID NO: 473733 - protein, 12 aa, Homo sapiens
  CDR3 for alpha chain variable domain of TCR clone 236867 (TRAV2, TRAJ10)
CCGPGGGNKLTF

SEQ ID NO: 473734 - protein, 14 aa, Homo sapiens
  CDR3 for beta chain variable domain of TCR clone 236867 (TRBV20-1, TRBJ2-3)
CSAGGRRGTDTQYF

SEQ ID NO: 473735 - protein, 18 aa, Homo sapiens
  CDR3 for alpha chain variable domain of TCR clone 236868 (TRAV13-1, TRAJ52)
CAASKRSAGGTSYGKLTF

SEQ ID NO: 473736 - protein, 14 aa, Homo sapiens
  CDR3 for beta chain variable domain of TCR clone 236868 (TRBV7-2, TRBJ2-5)
CASSIGGELKTQYF

SEQ ID NO: 473737 - protein, 13 aa, Homo sapiens
  CDR3 for alpha chain variable domain of TCR clone 236869 (TRAV12-3, TRAJ5)
CAMRPTGRRALTF

SEQ ID NO: 473738 - protein, 14 aa, Homo sapiens
  CDR3 for beta chain variable domain of TCR clone 236869 (TRBV7-2, TRBJ1-2)
CASSQTGSTYGYTF

SEQ ID NO: 473739 - protein, 13 aa, Homo sapiens
  CDR3 for alpha chain variable domain of TCR clone 236870 (TRAV17, TRAJ9)
CATDYTGGFKTIL

SEQ ID NO: 473740 - protein, 15 aa, Homo sapiens
  CDR3 for beta chain variable domain of TCR clone 236870 (TRBV7-8, TRBJ2-1)
CASSLHGGPYNEQFF

SEQ ID NO: 473741 - protein, 11 aa, Homo sapiens
  CDR3 for alpha chain variable domain of TCR clone 236871 (TRAV20, TRAJ34)
CRTKGTDKLIF

SEQ ID NO: 473742 - protein, 16 aa, Homo sapiens
  CDR3 for beta chain variable domain of TCR clone 236871 (TRBV18, TRBJ2-7)
CASSPTVGQGTYEQYF

SEQ ID NO: 473743 - protein, 13 aa, Homo sapiens
  CDR3 for alpha chain variable domain of TCR clone 236872 (TRAV1-2, TRAJ9)
CAALNTGGFNTIF

SEQ ID NO: 473744 - protein, 15 aa, Homo sapiens
  CDR3 for beta chain variable domain of TCR clone 236872 (TRBV24-1, TRBJ2-1)
CATSGSGGFYNEQFF

SEQ ID NO: 473745 - protein, 12 aa, Homo sapiens
  CDR3 for alpha chain variable domain of TCR clone 236873 (TRAV13-1, TRAJ16)
CAADSDGQKLLF

SEQ ID NO: 473746 - protein, 16 aa, Homo sapiens
  CDR3 for beta chain variable domain of TCR clone 236873 (TRBV7-2, TRBJ2-1)
CASSLVAGAGYNEQFF

SEQ ID NO: 473747 - protein, 16 aa, Homo sapiens
  CDR3 for alpha chain variable domain of TCR clone 236874 (TRAV8-6, TRAJ58)
CAVSDHTETSGSRLTF

SEQ ID NO: 473748 - protein, 14 aa, Homo sapiens
  CDR3 for beta chain variable domain of TCR clone 236874 (TRBV7-2, TRBJ1-5)
CDSSPRGGPQPQHF

SEQ ID NO: 473749 - protein, 14 aa, Homo sapiens
  CDR3 for alpha chain variable domain of TCR clone 236875 (TRAV17, TRAJ34)
CATDSLEGTDKLIF

SEQ ID NO: 473750 - protein, 11 aa, Homo sapiens
  CDR3 for beta chain variable domain of TCR clone 236875 (TRBV11-2, TRBJ2-2)
CASSLPGELFF

SEQ ID NO: 473751 - protein, 13 aa, Homo sapiens
  CDR3 for alpha chain variable domain of TCR clone 236876 (TRAV12-3, TRAJ41)
CAIAPNPGYALNF

SEQ ID NO: 473752 - protein, 14 aa, Homo sapiens
  CDR3 for beta chain variable domain of TCR clone 236876 (TRBV7-2, TRBJ1-3)
CASSLGTAGNTIYF

SEQ ID NO: 473753 - protein, 14 aa, Homo sapiens
  CDR3 for alpha chain variable domain of TCR clone 236877 (TRAV1-2, TRAJ8)
CAVREDTGFKKLVF

SEQ ID NO: 473754 - protein, 16 aa, Homo sapiens
  CDR3 for beta chain variable domain of TCR clone 236877 (TRBV29-1, TRBJ2-6)
CSVEDITYSGANVLTF

SEQ ID NO: 473755 - protein, 13 aa, Homo sapiens
  CDR3 for alpha chain variable domain of TCR clone 236878 (TRAV3, TRAJ36)
CAVKRTGANNLFF

SEQ ID NO: 473756 - protein, 14 aa, Homo sapiens
  CDR3 for beta chain variable domain of TCR clone 236878 (TRBV25-1, TRBJ1-1)
CASTHLGGNTEAFF

SEQ ID NO: 473757 - protein, 12 aa, Homo sapiens
  CDR3 for alpha chain variable domain of TCR clone 236879 (TRAV8-4, TRAJ43)
CAVSVNNNDMRF

SEQ ID NO: 473758 - protein, 16 aa, Homo sapiens
  CDR3 for beta chain variable domain of TCR clone 236879 (TRBV7-2, TRBJ2-6)
CASSLPGRSGANVLTF

SEQ ID NO: 473759 - protein, 17 aa, Homo sapiens
  CDR3 for alpha chain variable domain of TCR clone 236880 (TRAV13-1, TRAJ28)
CAASPPYSGAGSYQLTF

SEQ ID NO: 473760 - protein, 13 aa, Homo sapiens
  CDR3 for beta chain variable domain of TCR clone 236880 (TRBV23-1, TRAJ28)
CASRGKFNEKLFF

SEQ ID NO: 473761 - protein, 13 aa, Homo sapiens
  CDR3 for alpha chain variable domain of TCR clone 236881 (TRAV12-3, TRAJ33)
CAMSVNSNYQLIW

SEQ ID NO: 473762 - protein, 16 aa, Homo sapiens
  CDR3 for beta chain variable domain of TCR clone 236881 (TRBV5-1, TRBJ2-2)
CASSSRTGGRTGELFF

SEQ ID NO: 473763 - protein, 16 aa, Homo sapiens
  CDR3 for alpha chain variable domain of TCR clone 236882 (TRAV3, TRAJ4)
CAVRPSPSGGYNKLIF

SEQ ID NO: 473764 - protein, 12 aa, Homo sapiens
  CDR3 for beta chain variable domain of TCR clone 236882 (TRBV7-9, TRBJ2-7)
CAGSQGVYEQYF

SEQ ID NO: 473765 - protein, 12 aa, Homo sapiens
  CDR3 for alpha chain variable domain of TCR clone 236883 (TRAV12-3, TRAJ17)
CAMTLTGNKLTF

SEQ ID NO: 473766 - protein, 14 aa, Homo sapiens
  CDR3 for beta chain variable domain of TCR clone 236883 (TRBV19, TRBJ1-5)
CASSLSGGSQPQHF

SEQ ID NO: 473767 - protein, 20 aa, Homo sapiens
  CDR3 for alpha chain variable domain of TCR clone 236884 (TRAV26-1, TRAJ37)
CCVLLHRQINGSRNPGKLIF

SEQ ID NO: 473768 - protein, 13 aa, Homo sapiens
  CDR3 for beta chain variable domain of TCR clone 236884 (TRBV20-1, TRBJ2-7)
CSARTSGNYEQYF

SEQ ID NO: 473769 - protein, 10 aa, Homo sapiens
  CDR3 for alpha chain variable domain of TCR clone 236885 (TRAV8-3, TRAJ44)
CTGTASNLTF

SEQ ID NO: 473770 - protein, 15 aa, Homo sapiens
  CDR3 for beta chain variable domain of TCR clone 236885 (TRBV6-5, TRBJ1-2)
CASSYSQAFNYGYTF

SEQ ID NO: 473771 - protein, 15 aa, Homo sapiens
  CDR3 for alpha chain variable domain of TCR clone 236886 (TRAV26-1, TRAJ15)
CIVRAANQAGTPLIF

SEQ ID NO: 473772 - protein, 15 aa, Homo sapiens
  CDR3 for beta chain variable domain of TCR clone 236886 (TRBV20-1, TRBJ1-1)
CSARSAATSNTEAFF

SEQ ID NO: 473773 - protein, 16 aa, Homo sapiens
  CDR3 for alpha chain variable domain of TCR clone 236887 (TRAV30, TRAJ24)
CGTEIVDADSWGKFQF

SEQ ID NO: 473774 - protein, 14 aa, Homo sapiens
  CDR3 for beta chain variable domain of TCR clone 236887 (TRBV7-9, TRBJ1-2)
CASSRQGANYGDTF

SEQ ID NO: 473775 - protein, 15 aa, Homo sapiens
  CDR3 for alpha chain variable domain of TCR clone 236888 (TRAV4, TRAJ10)
CLVGDVEGGGNKLTF

SEQ ID NO: 473776 - protein, 15 aa, Homo sapiens
  CDR3 for beta chain variable domain of TCR clone 236888 (TRBV7-2, TRBJ2-7)
CASSLTGQGTYEQYF

SEQ ID NO: 473777 - protein, 14 aa, Homo sapiens
  CDR3 for alpha chain variable domain of TCR clone 236889 (TRAV2, TRAJ9)
CAVEDRSGGFKTIL

SEQ ID NO: 473778 - protein, 14 aa, Homo sapiens
  CDR3 for beta chain variable domain of TCR clone 236889 (TRBV12-5, TRBJ2-5)
CASGSRTHQETQYF

SEQ ID NO: 473779 - protein, 15 aa, Homo sapiens
  CDR3 for alpha chain variable domain of TCR clone 236890 (TRAV3, TRAJ8)
CAVRDNETGFQKLVF

SEQ ID NO: 473780 - protein, 13 aa, Homo sapiens
  CDR3 for beta chain variable domain of TCR clone 236890 (TRBV6-1, TRBJ1-1)
CASSRQGNTEAFF

SEQ ID NO: 473781 - protein, 14 aa, Homo sapiens
  CDR3 for alpha chain variable domain of TCR clone 236891 (TRAV17, TRAJ35)
CATDRPGFGNVPHC

SEQ ID NO: 473782 - protein, 19 aa, Homo sapiens
  CDR3 for beta chain variable domain of TCR clone 236891 (TRBV11-3, TRBJ2-2)
CASSTRPGAKTTNTGELCF

SEQ ID NO: 473783 - protein, 18 aa, Homo sapiens
  CDR3 for alpha chain variable domain of TCR clone 236892 (TRAV29/DV5, TRAJ52)
CAAGFRGAGGTSYGKLTF

SEQ ID NO: 473784 - protein, 15 aa, Homo sapiens
  CDR3 for beta chain variable domain of TCR clone 236892 (TRBV9, TRBJ1-6)
CASSVAGTGDSLLHF

SEQ ID NO: 473785 - protein, 14 aa, Homo sapiens
  CDR3 for alpha chain variable domain of TCR clone 236893 (TRAV2, TRAJ9)
FAVEDRSGGFKTIF

SEQ ID NO: 473786 - protein, 14 aa, Homo sapiens
  CDR3 for beta chain variable domain of TCR clone 236893 (TRBV12-4, TRBJ1-3)
CASGQTVSGNTIYF

SEQ ID NO: 473787 - protein, 12 aa, Homo sapiens
  CDR3 for alpha chain variable domain of TCR clone 236894 (TRAV12-3, TRAJ17)
CAMTLTGNKLTF

SEQ ID NO: 473788 - protein, 15 aa, Homo sapiens
  CDR3 for beta chain variable domain of TCR clone 236894 (TRBV6-6, TRBJ2-5)
CASSPGGGLEENQYF

SEQ ID NO: 473789 - protein, 10 aa, Homo sapiens
  CDR3 for alpha chain variable domain of TCR clone 236895 (TRAV12-3, TRAJ49)
CAMNDDQFYF

SEQ ID NO: 473790 - protein, 13 aa, Homo sapiens
  CDR3 for beta chain variable domain of TCR clone 236895 (TRBV4-1, TRBJ2-3)
CASSQPPTDTQYF

SEQ ID NO: 473791 - protein, 13 aa, Homo sapiens
  CDR3 for alpha chain variable domain of TCR clone 236896 (TRAV13-1, TRAJ5)
CAASDTGRRALTF

SEQ ID NO: 473792 - protein, 16 aa, Homo sapiens
  CDR3 for beta chain variable domain of TCR clone 236896 (TRBV7-7, TRBJ2-3)
CASSPGTSGSTDTQYF

SEQ ID NO: 473793 - protein, 11 aa, Homo sapiens
  CDR3 for alpha chain variable domain of TCR clone 236897 (TRAV27, TRAJ47)
SIVEYGNKLVF

SEQ ID NO: 473794 - protein, 18 aa, Homo sapiens
  CDR3 for beta chain variable domain of TCR clone 236897 (TRBV2, TRBJ2-1)
CASMGLAGGPRTYNEQFF

SEQ ID NO: 473795 - protein, 12 aa, Homo sapiens
  CDR3 for alpha chain variable domain of TCR clone 236898 (TRAV12-3, TRAJ43)
CAISSNNNDMRF

SEQ ID NO: 473796 - protein, 15 aa, Homo sapiens
  CDR3 for beta chain variable domain of TCR clone 236898 (TRBV27, TRBJ1-4)
CASSPRHASNEKLFF

SEQ ID NO: 473797 - protein, 12 aa, Homo sapiens
  CDR3 for alpha chain variable domain of TCR clone 236899 (TRAV12-3, TRAJ17)
CAMTLTGNKLTF

SEQ ID NO: 473798 - protein, 14 aa, Homo sapiens
  CDR3 for beta chain variable domain of TCR clone 236899 (TRBV2, TRBJ2-5)
CASKRDGTTETQYF

SEQ ID NO: 473799 - protein, 14 aa, Homo sapiens
  CDR3 for alpha chain variable domain of TCR clone 236900 (TRAV35, TRAJ42)
CAARYGGSQGNLIF

SEQ ID NO: 473800 - protein, 15 aa, Homo sapiens
  CDR3 for beta chain variable domain of TCR clone 236900 (TRBV7-9, TRBJ2-1)
CASSLGWGRANEQFF

SEQ ID NO: 473801 - protein, 16 aa, Homo sapiens
  CDR3 for alpha chain variable domain of TCR clone 236901 (TRAV35, TRAJ28)
CAGQRYSGAVSYQLTF

SEQ ID NO: 473802 - protein, 13 aa, Homo sapiens
  CDR3 for beta chain variable domain of TCR clone 236901 (TRBV19, TRBJ1-2)
CASSQGQVYGYTF

SEQ ID NO: 473803 - protein, 15 aa, Homo sapiens
  CDR3 for alpha chain variable domain of TCR clone 236902 (TRAV20, TRAJ6)
CAVRLQSGGSYIPTF

SEQ ID NO: 473804 - protein, 14 aa, Homo sapiens
  CDR3 for beta chain variable domain of TCR clone 236902 (TRBV25-1, TRBJ1-1)
CASTHLGGNTEAFF

SEQ ID NO: 473805 - protein, 12 aa, Homo sapiens
  CDR3 for alpha chain variable domain of TCR clone 236903 (TRAV38-2/DV8, TRAJ48)
CALLSGNEKLTF

SEQ ID NO: 473806 - protein, 22 aa, Homo sapiens
  CDR3 for beta chain variable domain of TCR clone 236903 (TRBV11-2, TRBJ1-4)
CASSLDITRRGIPRKDNEKLFF

SEQ ID NO: 473807 - protein, 12 aa, Homo sapiens
  CDR3 for alpha chain variable domain of TCR clone 236904 (TRAV8-6, TRAJ57)
CAVQGGSEKLLF

SEQ ID NO: 473808 - protein, 11 aa, Homo sapiens
  CDR3 for beta chain variable domain of TCR clone 236904 (TRBV19, TRBJ1-1)
CASSIGSEAFF

SEQ ID NO: 473809 - protein, 20 aa, Homo sapiens
  CDR3 for alpha chain variable domain of TCR clone 236905 (TRAV26-1, TRAJ42)
CCVLLHPQTYYGGSQGNLIF

SEQ ID NO: 473810 - protein, 16 aa, Homo sapiens
  CDR3 for beta chain variable domain of TCR clone 236905 (TRBV7-3, TRBJ2-2)
CASSLKRGTLSGELFF

SEQ ID NO: 473811 - protein, 14 aa, Homo sapiens
  CDR3 for alpha chain variable domain of TCR clone 236906 (TRAV12-1, TRAJ34)
CVVNLDYNTDKLMF

SEQ ID NO: 473812 - protein, 17 aa, Homo sapiens
  CDR3 for beta chain variable domain of TCR clone 236906 (TRBV20-1, TRBJ2-7)
CSAAGTSGGGSSYEQYF

SEQ ID NO: 473813 - protein, 13 aa, Homo sapiens
  CDR3 for alpha chain variable domain of TCR clone 236907 (TRAV1-2, TRAJ17)
CAVGKAAGNKLTF

SEQ ID NO: 473814 - protein, 16 aa, Homo sapiens
  CDR3 for beta chain variable domain of TCR clone 236907 (TRBV24-1, TRBJ2-3)
CATSDPGTGATDTQYF

SEQ ID NO: 473815 - protein, 13 aa, Homo sapiens
  CDR3 for alpha chain variable domain of TCR clone 236908 (TRAV13-1, TRAJ39)
CAASIWAGNMLTF

SEQ ID NO: 473816 - protein, 15 aa, Homo sapiens
  CDR3 for beta chain variable domain of TCR clone 236908 (TRBV7-9, TRBJ1-1)
CASSVLEQGGTEAFF

SEQ ID NO: 473817 - protein, 14 aa, Homo sapiens
  CDR3 for alpha chain variable domain of TCR clone 236909 (TRAV12-2, TRAJ17)
CAVSIKAAGNKLTF

SEQ ID NO: 473818 - protein, 13 aa, Homo sapiens
  CDR3 for beta chain variable domain of TCR clone 236909 (TRBV4-1, TRBJ2-2)
CASSQENTGELFF

SEQ ID NO: 473819 - protein, 15 aa, Homo sapiens
  CDR3 for alpha chain variable domain of TCR clone 236910 (TRAV12-3, TRAJ6)
CAMSAASGGSYIPTF

SEQ ID NO: 473820 - protein, 13 aa, Homo sapiens
  CDR3 for beta chain variable domain of TCR clone 236910 (TRBV20-1, TRBJ1-2)
CIASPEFNYGYTF

SEQ ID NO: 473821 - protein, 14 aa, Homo sapiens
  CDR3 for alpha chain variable domain of TCR clone 236911 (TRAV12-2, TRAJ13)
CAVKKTGGYQKVTF

SEQ ID NO: 473822 - protein, 18 aa, Homo sapiens
  CDR3 for beta chain variable domain of TCR clone 236911 (TRBV11-2, TRBJ2-6)
CASSLNPFLGTGANDLTF

SEQ ID NO: 473823 - protein, 15 aa, Homo sapiens
  CDR3 for alpha chain variable domain of TCR clone 236912 (TRAV12-2, TRAJ53)
CAVNGGGGSNYKLTF

SEQ ID NO: 473824 - protein, 14 aa, Homo sapiens
  CDR3 for beta chain variable domain of TCR clone 236912 (TRBV18, TRBJ2-7)
CAGSPRGGAYEQYF

SEQ ID NO: 473825 - protein, 13 aa, Homo sapiens
  CDR3 for alpha chain variable domain of TCR clone 236913 (TRAV1-2, TRAJ9)
CAALTTGGFKTIF

SEQ ID NO: 473826 - protein, 14 aa, Homo sapiens
  CDR3 for beta chain variable domain of TCR clone 236913 (TRBV13, TRBJ2-3)
CASSSGSPTDTQYF

SEQ ID NO: 473827 - protein, 13 aa, Homo sapiens
  CDR3 for alpha chain variable domain of TCR clone 236914 (TRAV8-6, TRAJ8)
CAVSNTGFQKLVF

SEQ ID NO: 473828 - protein, 12 aa, Homo sapiens
  CDR3 for beta chain variable domain of TCR clone 236914 (TRBV24-1, TRBJ2-3)
CATSDSTDTQYF

SEQ ID NO: 473829 - protein, 14 aa, Homo sapiens
  CDR3 for alpha chain variable domain of TCR clone 236915 (TRAV26-1, TRAJ26)
CIVRATFLGQNFVF

SEQ ID NO: 473830 - protein, 16 aa, Homo sapiens
  CDR3 for beta chain variable domain of TCR clone 236915 (TRBV12-4, TRBJ2-7)
CASRSTGTGPSCEKYF

SEQ ID NO: 473831 - protein, 16 aa, Homo sapiens
  CDR3 for alpha chain variable domain of TCR clone 236916 (TRAV20, TRAJ52)
CAVLPDGGTSYGKLTF

SEQ ID NO: 473832 - protein, 15 aa, Homo sapiens
  CDR3 for beta chain variable domain of TCR clone 236916 (TRBV7-2, TRBJ2-1)
CASSSGLAGGNEQFF

SEQ ID NO: 473833 - protein, 16 aa, Homo sapiens
  CDR3 for alpha chain variable domain of TCR clone 236917 (TRAV1-2, TRAJ10)
CAVRGVLTGGGNKLTF

SEQ ID NO: 473834 - protein, 16 aa, Homo sapiens
  CDR3 for beta chain variable domain of TCR clone 236917 (TRBV15, TRBJ1-5)
CHQQGPPGTRNQPQHF

SEQ ID NO: 473835 - protein, 15 aa, Homo sapiens
  CDR3 for alpha chain variable domain of TCR clone 236918 (TRAV8-3, TRAJ40)
CAAPSLGSGTYKYIF

SEQ ID NO: 473836 - protein, 16 aa, Homo sapiens
  CDR3 for beta chain variable domain of TCR clone 236918 (TRBV7-3, TRBJ2-3)
CASSLSGYRPEGTQDF

SEQ ID NO: 473837 - protein, 14 aa, Homo sapiens
  CDR3 for alpha chain variable domain of TCR clone 236919 (TRAV12-2, TRAJ17)
CAVLFKAAGNKLTF

SEQ ID NO: 473838 - protein, 13 aa, Homo sapiens
  CDR3 for beta chain variable domain of TCR clone 236919 (TRBV5-7, TRBJ2-3)
CASSLGRTDTQYF

SEQ ID NO: 473839 - protein, 16 aa, Homo sapiens
  CDR3 for alpha chain variable domain of TCR clone 236920 (TRAV30, TRAJ24)
VGTEIVHADSWGKFQF

SEQ ID NO: 473840 - protein, 14 aa, Homo sapiens
  CDR3 for beta chain variable domain of TCR clone 236920 (TRBV12-5, TRBJ2-5)
CASGSRTHQETQYF

SEQ ID NO: 473841 - protein, 13 aa, Homo sapiens
  CDR3 for alpha chain variable domain of TCR clone 236921 (TRAV2, TRAJ15)
CAVASQAGTALIF

SEQ ID NO: 473842 - protein, 15 aa, Homo sapiens
  CDR3 for beta chain variable domain of TCR clone 236921 (TRBV7-3, TRBJ2-1)
CASSQRGGALIEQFF

SEQ ID NO: 473843 - protein, 14 aa, Homo sapiens
  CDR3 for alpha chain variable domain of TCR clone 236922 (TRAV16, TRAJ17)
CALSGRAAANKLTF

SEQ ID NO: 473844 - protein, 15 aa, Homo sapiens
  CDR3 for beta chain variable domain of TCR clone 236922 (TRBV3-1, TRBJ1-2)
CASSPTRLPEGGYTF

SEQ ID NO: 473845 - protein, 15 aa, Homo sapiens
  CDR3 for alpha chain variable domain of TCR clone 236923 (TRAV9-2, TRAJ42)
CALSDPGGCQGNLIF

SEQ ID NO: 473846 - protein, 13 aa, Homo sapiens
  CDR3 for beta chain variable domain of TCR clone 236923 (TRBV6-5, TRBJ2-5)
CATAPSPQETQYF

SEQ ID NO: 473847 - protein, 12 aa, Homo sapiens
  CDR3 for alpha chain variable domain of TCR clone 236924 (TRAV3, TRAJ20)
CAVRDHDYKLSF

SEQ ID NO: 473848 - protein, 15 aa, Homo sapiens
  CDR3 for beta chain variable domain of TCR clone 236924 (TRBV9, TRBJ1-6)
CASIVAGTGDSPLHF

SEQ ID NO: 473849 - protein, 16 aa, Homo sapiens
  CDR3 for alpha chain variable domain of TCR clone 236925 (TRAV30, TRAJ24)
CGTEIVDADSWGKFQF

SEQ ID NO: 473850 - protein, 15 aa, Homo sapiens
  CDR3 for beta chain variable domain of TCR clone 236925 (TRBV7-9, TRBJ1-4)
CASSSRTGGNEKLFF

SEQ ID NO: 473851 - protein, 15 aa, Homo sapiens
  CDR3 for alpha chain variable domain of TCR clone 236926 (TRAV3, TRAJ11)
CAVRDRGSGYSTLTF

SEQ ID NO: 473852 - protein, 15 aa, Homo sapiens
  CDR3 for beta chain variable domain of TCR clone 236926 (TRBV4-2, TRBJ1-3)
CASSQDGAQGNTIYF

SEQ ID NO: 473853 - protein, 14 aa, Homo sapiens
  CDR3 for alpha chain variable domain of TCR clone 236927 (TRAV35, TRAJ13)
CAGSPSGGYQKVTF

SEQ ID NO: 473854 - protein, 14 aa, Homo sapiens
  CDR3 for beta chain variable domain of TCR clone 236927 (TRBV7-6, TRBJ2-3)
CASSLGTVTDTQYF

SEQ ID NO: 473855 - protein, 13 aa, Homo sapiens
  CDR3 for alpha chain variable domain of TCR clone 236928 (TRAV17, TRAJ5)
CATDARGRRARTF

SEQ ID NO: 473856 - protein, 13 aa, Homo sapiens
  CDR3 for beta chain variable domain of TCR clone 236928 (TRBV12-4, TRBJ2-3)
CASSLGAVDTQYF

SEQ ID NO: 473857 - protein, 14 aa, Homo sapiens
  CDR3 for alpha chain variable domain of TCR clone 236929 (TRAV13-1, TRAJ44)
CAAKATGTASKLTF

SEQ ID NO: 473858 - protein, 14 aa, Homo sapiens
  CDR3 for beta chain variable domain of TCR clone 236929 (TRBV19, TRBJ2-2)
CASSTLHRSEELFF

SEQ ID NO: 473859 - protein, 12 aa, Homo sapiens
  CDR3 for alpha chain variable domain of TCR clone 236930 (TRAV21, TRAJ23)
CAVGPQGGKLIF

SEQ ID NO: 473860 - protein, 16 aa, Homo sapiens
  CDR3 for beta chain variable domain of TCR clone 236930 (TRBV28, TRBJ2-7)
CASSFPDRRLTYEQYF

SEQ ID NO: 473861 - protein, 17 aa, Homo sapiens
  CDR3 for alpha chain variable domain of TCR clone 236931 (TRAV3, TRAJ6)
CAVRDGPRAGGSYIPTF

SEQ ID NO: 473862 - protein, 16 aa, Homo sapiens
  CDR3 for beta chain variable domain of TCR clone 236931 (TRBV4-1, TRBJ2-7)
CASSLTAGQATDEQYF

SEQ ID NO: 473863 - protein, 11 aa, Homo sapiens
  CDR3 for alpha chain variable domain of TCR clone 236932 (TRAV17, TRAJ9)
CATTGGFKTIC

SEQ ID NO: 473864 - protein, 14 aa, Homo sapiens
  CDR3 for beta chain variable domain of TCR clone 236932 (TRBV7-9, TRBJ2-2)
CASSGLADTGELFF

SEQ ID NO: 473865 - protein, 15 aa, Homo sapiens
  CDR3 for alpha chain variable domain of TCR clone 236933 (TRAV8-6, TRAJ21)
CAVSDRGGNFNKFYF

SEQ ID NO: 473866 - protein, 17 aa, Homo sapiens
  CDR3 for beta chain variable domain of TCR clone 236933 (TRBV24-1, TRBJ2-1)
CATSDASTSGTYNEQFF

SEQ ID NO: 473867 - protein, 15 aa, Homo sapiens
  CDR3 for alpha chain variable domain of TCR clone 236934 (TRAV21, TRAJ57)
CAVIITQGGSEKLIF

SEQ ID NO: 473868 - protein, 14 aa, Homo sapiens
  CDR3 for beta chain variable domain of TCR clone 236934 (TRBV5-1, TRBJ2-2)
CASSLIWIPGELFS

SEQ ID NO: 473869 - protein, 12 aa, Homo sapiens
  CDR3 for alpha chain variable domain of TCR clone 236935 (TRAV3, TRAJ26)
CAVRDYGQNFVF

SEQ ID NO: 473870 - protein, 16 aa, Homo sapiens
  CDR3 for beta chain variable domain of TCR clone 236935 (TRBV11-2, TRBJ1-2)
CASSPSGREANYCYTF

SEQ ID NO: 473871 - protein, 14 aa, Homo sapiens
  CDR3 for alpha chain variable domain of TCR clone 236936 (TRAV12-3, TRAJ56)
CAMSVTGANSKLTF

SEQ ID NO: 473872 - protein, 15 aa, Homo sapiens
  CDR3 for beta chain variable domain of TCR clone 236936 (TRBV5-1, TRBJ2-3)
CASSVTSGSTDTQYF

SEQ ID NO: 473873 - protein, 15 aa, Homo sapiens
  CDR3 for alpha chain variable domain of TCR clone 236937 (TRAV23/DV6, TRAJ18)
CAARYRGPTLGRLHF

SEQ ID NO: 473874 - protein, 13 aa, Homo sapiens
  CDR3 for beta chain variable domain of TCR clone 236937 (TRBV7-2, TRBJ2-7)
CASSSPSGSEQYF

SEQ ID NO: 473875 - protein, 16 aa, Homo sapiens
  CDR3 for alpha chain variable domain of TCR clone 236938 (TRAV1-2, TRAJ10)
CAVRGVLTGGGNKLTF

SEQ ID NO: 473876 - protein, 14 aa, Homo sapiens
  CDR3 for beta chain variable domain of TCR clone 236938 (TRBV7-9, TRBJ2-2)
CASSGLADTGELFF

SEQ ID NO: 473877 - protein, 13 aa, Homo sapiens
  CDR3 for alpha chain variable domain of TCR clone 236939 (TRAV17, TRAJ9)
CATDYTGGFKTIF

SEQ ID NO: 473878 - protein, 16 aa, Homo sapiens
  CDR3 for beta chain variable domain of TCR clone 236939 (TRBV7-7, TRBJ2-1)
CASSLASGTSYNEQFI

SEQ ID NO: 473879 - protein, 15 aa, Homo sapiens
  CDR3 for alpha chain variable domain of TCR clone 236940 (TRAV25, TRAJ48)
CAGPGANFGNEKLTF

SEQ ID NO: 473880 - protein, 16 aa, Homo sapiens
  CDR3 for beta chain variable domain of TCR clone 236940 (TRBV19, TRBJ2-1)
CASSKAGPSSYNEQFF

SEQ ID NO: 473881 - protein, 13 aa, Homo sapiens
  CDR3 for alpha chain variable domain of TCR clone 236941 (TRAV12-2, TRAJ6)
CAVYVSRKLHTYI

SEQ ID NO: 473882 - protein, 12 aa, Homo sapiens
  CDR3 for beta chain variable domain of TCR clone 236941 (TRBV29-1, TRBJ2-3)
CSVTGGADTQYF

SEQ ID NO: 473883 - protein, 16 aa, Homo sapiens
  CDR3 for alpha chain variable domain of TCR clone 236942 (TRAV4, TRAJ42)
CHAGPIYGGSQGNLIF

SEQ ID NO: 473884 - protein, 13 aa, Homo sapiens
  CDR3 for beta chain variable domain of TCR clone 236942 (TRBV11-2, TRBJ2-7)
RASSPLGSYEQYF

SEQ ID NO: 473885 - protein, 14 aa, Homo sapiens
  CDR3 for alpha chain variable domain of TCR clone 236943 (TRAV23/DV6, TRAJ37)
CAASTSSNTGKLIF

SEQ ID NO: 473886 - protein, 12 aa, Homo sapiens
  CDR3 for beta chain variable domain of TCR clone 236943 (TRBV11-3, TRBJ2-4)
CASSAGRVIQYF

SEQ ID NO: 473887 - protein, 13 aa, Homo sapiens
  CDR3 for alpha chain variable domain of TCR clone 236944 (TRAV12-3, TRAJ21)
CAPGPHNFNKFYF

SEQ ID NO: 473888 - protein, 13 aa, Homo sapiens
  CDR3 for beta chain variable domain of TCR clone 236944 (TRBV4-2, TRBJ1-1)
CASSQAGNTEDFF

SEQ ID NO: 473889 - protein, 14 aa, Homo sapiens
  CDR3 for alpha chain variable domain of TCR clone 236945 (TRAV2, TRAJ22)
CAVEVKRAARQLTF

SEQ ID NO: 473890 - protein, 13 aa, Homo sapiens
  CDR3 for beta chain variable domain of TCR clone 236945 (TRBV24-1, TRBJ2-1)
CATSAGPYNEQFF

SEQ ID NO: 473891 - protein, 14 aa, Homo sapiens
  CDR3 for alpha chain variable domain of TCR clone 236946 (TRAV35, TRAJ24)
CAGPRRDSWGKLQF

SEQ ID NO: 473892 - protein, 15 aa, Homo sapiens
  CDR3 for beta chain variable domain of TCR clone 236946 (TRBV18, TRBJ2-5)
CASSPDPGLQETQYF

SEQ ID NO: 473893 - protein, 14 aa, Homo sapiens
  CDR3 for alpha chain variable domain of TCR clone 236947 (TRAV12-2, TRAJ6)
CASKWGGGSYIPTF

SEQ ID NO: 473894 - protein, 14 aa, Homo sapiens
  CDR3 for beta chain variable domain of TCR clone 236947 (TRBV27, TRBJ1-1)
CASSLLSGLSEAFF

SEQ ID NO: 473895 - protein, 12 aa, Homo sapiens
  CDR3 for alpha chain variable domain of TCR clone 236948 (TRAV8-3, TRAJ26)
CAVDNYGQNFVF

SEQ ID NO: 473896 - protein, 14 aa, Homo sapiens
  CDR3 for beta chain variable domain of TCR clone 236948 (TRBV19, TRBJ2-1)
CASGARSFQWEQFF

SEQ ID NO: 473897 - protein, 12 aa, Homo sapiens
  CDR3 for alpha chain variable domain of TCR clone 236949 (TRAV13-1, TRAJ20)
SVQHVNDYKLSF

SEQ ID NO: 473898 - protein, 14 aa, Homo sapiens
  CDR3 for beta chain variable domain of TCR clone 236949 (TRBV7-6, TRBJ2-3)
CASSLTGGTDTQYF

SEQ ID NO: 473899 - protein, 16 aa, Homo sapiens
  CDR3 for alpha chain variable domain of TCR clone 236950 (TRAV26-1, TRAJ53)
CIVRVAMGGSNYKLTF

SEQ ID NO: 473900 - protein, 12 aa, Homo sapiens
  CDR3 for beta chain variable domain of TCR clone 236950 (TRBV7-9, TRBJ1-5)
CASSRQGQPQHF

SEQ ID NO: 473901 - protein, 15 aa, Homo sapiens
  CDR3 for alpha chain variable domain of TCR clone 236951 (TRAV8-3, TRAJ45)
CASSYSGGGADGLTF

SEQ ID NO: 473902 - protein, 13 aa, Homo sapiens
  CDR3 for beta chain variable domain of TCR clone 236951 (TRBV10-3, TRBJ2-7)
CASKRAGNYEQYF

SEQ ID NO: 473903 - protein, 12 aa, Homo sapiens
  CDR3 for alpha chain variable domain of TCR clone 236952 (TRAV12-1, TRAJ40)
CVVYSGTYNYIL

SEQ ID NO: 473904 - protein, 18 aa, Homo sapiens
  CDR3 for beta chain variable domain of TCR clone 236952 (TRBV11-2, TRBJ2-3)
CASSLGGASRGAPNTQYF

SEQ ID NO: 473905 - protein, 11 aa, Homo sapiens
  CDR3 for alpha chain variable domain of TCR clone 236953 (TRAV35, TRAJ34)
CWARNTDKLIF

SEQ ID NO: 473906 - protein, 13 aa, Homo sapiens
  CDR3 for beta chain variable domain of TCR clone 236953 (TRBV19, TRBJ2-7)
CASSIDRTYEQSF

SEQ ID NO: 473907 - protein, 11 aa, Homo sapiens
  CDR3 for alpha chain variable domain of TCR clone 236954 (TRAV1-1, TRAJ23)
CAVRQGGELLF

SEQ ID NO: 473908 - protein, 20 aa, Homo sapiens
  CDR3 for beta chain variable domain of TCR clone 236954 (TRBV7-8, TRBJ2-2)
CASSHLFPGPTIHITGELFF

SEQ ID NO: 473909 - protein, 15 aa, Homo sapiens
  CDR3 for alpha chain variable domain of TCR clone 236955 (TRAV2, TRAJ15)
CAVEDREQAGTALIF

SEQ ID NO: 473910 - protein, 16 aa, Homo sapiens
  CDR3 for beta chain variable domain of TCR clone 236955 (TRBV2, TRBJ2-3)
CASSTSVEGVTDTQYF

SEQ ID NO: 473911 - protein, 14 aa, Homo sapiens
  CDR3 for alpha chain variable domain of TCR clone 236956 (TRAV8-1, TRAJ5)
CAVRTDTARRALTF

SEQ ID NO: 473912 - protein, 14 aa, Homo sapiens
  CDR3 for beta chain variable domain of TCR clone 236956 (TRBV19, TRBJ2-1)
CASPTFVLSGEQFF

SEQ ID NO: 473913 - protein, 11 aa, Homo sapiens
  CDR3 for alpha chain variable domain of TCR clone 236957 (TRAV5, TRAJ31)
CAESNNARLMF

SEQ ID NO: 473914 - protein, 15 aa, Homo sapiens
  CDR3 for beta chain variable domain of TCR clone 236957 (TRBV7-8, TRBJ2-3)
CASSPRTGSTDTQYF

SEQ ID NO: 473915 - protein, 14 aa, Homo sapiens
  CDR3 for alpha chain variable domain of TCR clone 236958 (TRAV35, TRAJ13)
CAGSPSGGYQKVTF

SEQ ID NO: 473916 - protein, 13 aa, Homo sapiens
  CDR3 for beta chain variable domain of TCR clone 236958 (TRBV29-1, TRBJ1-1)
CGVGDSRNTEVFF

SEQ ID NO: 473917 - protein, 14 aa, Homo sapiens
  CDR3 for alpha chain variable domain of TCR clone 236959 (TRAV12-2, TRAJ40)
CAVKIPSGTYKYIF

SEQ ID NO: 473918 - protein, 18 aa, Homo sapiens
  CDR3 for beta chain variable domain of TCR clone 236959 (TRBV11-2, TRBJ2-3)
CVSSLGGASRGAPNTQYF

SEQ ID NO: 473919 - protein, 13 aa, Homo sapiens
  CDR3 for alpha chain variable domain of TCR clone 236960 (TRAV8-6, TRAJ8)
CAVTNTGFQKLVF

SEQ ID NO: 473920 - protein, 15 aa, Homo sapiens
  CDR3 for beta chain variable domain of TCR clone 236960 (TRBV28, TRBJ2-5)
CASSSGRTIQETQYF

SEQ ID NO: 473921 - protein, 15 aa, Homo sapiens
  CDR3 for alpha chain variable domain of TCR clone 236961 (TRAV3, TRAJ5)
CAVRDLDTGRRALTF

SEQ ID NO: 473922 - protein, 14 aa, Homo sapiens
  CDR3 for beta chain variable domain of TCR clone 236961 (TRBV25-1, TRBJ1-1)
CASTHLGGNTEAFF

SEQ ID NO: 473923 - protein, 14 aa, Homo sapiens
  CDR3 for alpha chain variable domain of TCR clone 236962 (TRAV22, TRAJ28)
CAVYSGAGSYQLTF

SEQ ID NO: 473924 - protein, 16 aa, Homo sapiens
  CDR3 for beta chain variable domain of TCR clone 236962 (TRBV24-1, TRBJ2-3)
CATSDPGTGVTDTQYF

SEQ ID NO: 473925 - protein, 14 aa, Homo sapiens
  CDR3 for alpha chain variable domain of TCR clone 236963 (TRAV13-1, TRAJ26)
CAVSRGNYGQNFVF

SEQ ID NO: 473926 - protein, 15 aa, Homo sapiens
  CDR3 for beta chain variable domain of TCR clone 236963 (TRBV7-9, TRBJ1-5)
CASSQGHQPNQPQHF

SEQ ID NO: 473927 - protein, 12 aa, Homo sapiens
  CDR3 for alpha chain variable domain of TCR clone 236964 (TRAV3, TRAJ43)
CAVRDPNNDMLF

SEQ ID NO: 473928 - protein, 17 aa, Homo sapiens
  CDR3 for beta chain variable domain of TCR clone 236964 (TRBV7-8, TRBJ2-6)
CASSAGTGGAGANVLTF

SEQ ID NO: 473929 - protein, 13 aa, Homo sapiens
  CDR3 for alpha chain variable domain of TCR clone 236965 (TRAV27, TRAJ56)
CAGKPGANSKLTF

SEQ ID NO: 473930 - protein, 16 aa, Homo sapiens
  CDR3 for beta chain variable domain of TCR clone 236965 (TRBV19, TRBJ2-2)
CASSFPGQGLAGELFF

SEQ ID NO: 473931 - protein, 14 aa, Homo sapiens
  CDR3 for alpha chain variable domain of TCR clone 236966 (TRAV12-3, TRAJ13)
CAVKKTGSYQKVTF

SEQ ID NO: 473932 - protein, 15 aa, Homo sapiens
  CDR3 for beta chain variable domain of TCR clone 236966 (TRBV27, TRBJ2-1)
CASSNGGGSSNEQFF

SEQ ID NO: 473933 - protein, 16 aa, Homo sapiens
  CDR3 for alpha chain variable domain of TCR clone 236967 (TRAV3, TRAJ37)
FAVRGKGSGNTGKLIF

SEQ ID NO: 473934 - protein, 12 aa, Homo sapiens
  CDR3 for beta chain variable domain of TCR clone 236967 (TRBV12-4, TRBJ2-3)
CASSTLPDTQYF

SEQ ID NO: 473935 - protein, 13 aa, Homo sapiens
  CDR3 for alpha chain variable domain of TCR clone 236968 (TRAV12-2, TRAJ30)
CAVNLNRDDKVIF

SEQ ID NO: 473936 - protein, 14 aa, Homo sapiens
  CDR3 for beta chain variable domain of TCR clone 236968 (TRBV7-2, TRBJ1-2)
CASSSQGAHYGYTF

SEQ ID NO: 473937 - protein, 13 aa, Homo sapiens
  CDR3 for alpha chain variable domain of TCR clone 236969 (TRAV12-1, TRAJ31)
CVVVPNNNARLMF

SEQ ID NO: 473938 - protein, 13 aa, Homo sapiens
  CDR3 for beta chain variable domain of TCR clone 236969 (TRBV7-9, TRBJ1-1)
CASSLEAGTEAFF

SEQ ID NO: 473939 - protein, 16 aa, Homo sapiens
  CDR3 for alpha chain variable domain of TCR clone 236970 (TRAV16, TRAJ4)
CALSRMFSGGYNKLIF

SEQ ID NO: 473940 - protein, 14 aa, Homo sapiens
  CDR3 for beta chain variable domain of TCR clone 236970 (TRBV7-2, TRBJ1-2)
CASSQTGSTYGYTF

SEQ ID NO: 473941 - protein, 15 aa, Homo sapiens
  CDR3 for alpha chain variable domain of TCR clone 236971 (TRAV8-3, TRAJ7)
CAVGSISYGNNRLAF

SEQ ID NO: 473942 - protein, 12 aa, Homo sapiens
  CDR3 for beta chain variable domain of TCR clone 236971 (TRBV10-3, TRBJ1-1)
CATMDRPPEAFF

SEQ ID NO: 473943 - protein, 13 aa, Homo sapiens
  CDR3 for alpha chain variable domain of TCR clone 236972 (TRAV12-3, TRAJ40)
CAMSDSGTYKCIF

SEQ ID NO: 473944 - protein, 14 aa, Homo sapiens
  CDR3 for beta chain variable domain of TCR clone 236972 (TRBV7-2, TRBJ1-5)
CASSTQGAGQPQHF

SEQ ID NO: 473945 - protein, 16 aa, Homo sapiens
  CDR3 for alpha chain variable domain of TCR clone 236973 (TRAV25, TRAJ24)
CAQRSGTTDSWGKLQF

SEQ ID NO: 473946 - protein, 14 aa, Homo sapiens
  CDR3 for beta chain variable domain of TCR clone 236973 (TRBV6-6, TRBJ1-5)
CASSYGPANQPQHF

SEQ ID NO: 473947 - protein, 14 aa, Homo sapiens
  CDR3 for alpha chain variable domain of TCR clone 236974 (TRAV34, TRAJ22)
CGADTSGSARQLTF

SEQ ID NO: 473948 - protein, 15 aa, Homo sapiens
  CDR3 for beta chain variable domain of TCR clone 236974 (TRBV11-3, TRBJ2-3)
CAGLKDGREGDTQYF

SEQ ID NO: 473949 - protein, 14 aa, Homo sapiens
  CDR3 for alpha chain variable domain of TCR clone 236975 (TRAV1-2, TRAJ8)
CAVREDTGFQKLVF

SEQ ID NO: 473950 - protein, 13 aa, Homo sapiens
  CDR3 for beta chain variable domain of TCR clone 236975 (TRBV12-4, TRBJ1-2)
CASSSGLTVISAF

SEQ ID NO: 473951 - protein, 14 aa, Homo sapiens
  CDR3 for alpha chain variable domain of TCR clone 236976 (TRAV1-2, TRAJ8)
CAVREDTGFQKLVF

SEQ ID NO: 473952 - protein, 16 aa, Homo sapiens
  CDR3 for beta chain variable domain of TCR clone 236976 (TRBV12-5, TRBJ2-5)
CASGPRTSGNQETQCF

SEQ ID NO: 473953 - protein, 15 aa, Homo sapiens
  CDR3 for alpha chain variable domain of TCR clone 236977 (TRAV12-1, TRAJ42)
CVVTRDGGSQGNLIF

SEQ ID NO: 473954 - protein, 15 aa, Homo sapiens
  CDR3 for beta chain variable domain of TCR clone 236977 (TRBV7-9, TRBJ1-5)
CASSQGHQPNQPQHF

SEQ ID NO: 473955 - protein, 16 aa, Homo sapiens
  CDR3 for alpha chain variable domain of TCR clone 236978 (TRAV30, TRAJ24)
CGIEIVDADSWGKFQF

SEQ ID NO: 473956 - protein, 17 aa, Homo sapiens
  CDR3 for beta chain variable domain of TCR clone 236978 (TRBV11-2, TRBJ2-1)
CASSLYPPGVEYNEQFF

SEQ ID NO: 473957 - protein, 15 aa, Homo sapiens
  CDR3 for alpha chain variable domain of TCR clone 236979 (TRAV35, TRAJ40)
CAGQLGTSGTYKYIF

SEQ ID NO: 473958 - protein, 14 aa, Homo sapiens
  CDR3 for beta chain variable domain of TCR clone 236979 (TRBV5-1, TRBJ2-7)
CASSRGASLYEQYF

SEQ ID NO: 473959 - protein, 15 aa, Homo sapiens
  CDR3 for alpha chain variable domain of TCR clone 236980 (TRAV17, TRAJ13)
CATDAGSWGYQKVTF

SEQ ID NO: 473960 - protein, 17 aa, Homo sapiens
  CDR3 for beta chain variable domain of TCR clone 236980 (TRBV11-2, TRBJ2-1)
CASSLYPPGVEYNEQFF

SEQ ID NO: 473961 - protein, 17 aa, Homo sapiens
  CDR3 for alpha chain variable domain of TCR clone 236981 (TRAV3, TRAJ42)
CAVRDRDYGGSQGNLIF

SEQ ID NO: 473962 - protein, 13 aa, Homo sapiens
  CDR3 for beta chain variable domain of TCR clone 236981 (TRBV11-3, TRBJ1-1)
CASTGSLNTEAFF

SEQ ID NO: 473963 - protein, 12 aa, Homo sapiens
  CDR3 for alpha chain variable domain of TCR clone 236982 (TRAV21, TRAJ39)
CAADNAGNMLTF

SEQ ID NO: 473964 - protein, 13 aa, Homo sapiens
  CDR3 for beta chain variable domain of TCR clone 236982 (TRBV12-4, TRBJ1-1)
CASSPWTGFEAFF

SEQ ID NO: 473965 - protein, 14 aa, Homo sapiens
  CDR3 for alpha chain variable domain of TCR clone 236983 (TRAV1-2, TRAJ8)
CAVREDTGFQRLVF

SEQ ID NO: 473966 - protein, 14 aa, Homo sapiens
  CDR3 for beta chain variable domain of TCR clone 236983 (TRBV7-9, TRBJ1-1)
CASTPLQSYTEAFF

SEQ ID NO: 473967 - protein, 13 aa, Homo sapiens
  CDR3 for alpha chain variable domain of TCR clone 236984 (TRAV12-3, TRAJ7)
CAMTPYGNNRLAF

SEQ ID NO: 473968 - protein, 16 aa, Homo sapiens
  CDR3 for beta chain variable domain of TCR clone 236984 (TRBV20-1, TRBJ1-4)
CSARSYGGELNEKLFC

SEQ ID NO: 473969 - protein, 14 aa, Homo sapiens
  CDR3 for alpha chain variable domain of TCR clone 236985 (TRAV16, TRAJ37)
CALDISGNTGKLII

SEQ ID NO: 473970 - protein, 14 aa, Homo sapiens
  CDR3 for beta chain variable domain of TCR clone 236985 (TRBV7-6, TRBJ2-7)
CASSFRQGADEQYF

SEQ ID NO: 473971 - protein, 11 aa, Homo sapiens
  CDR3 for alpha chain variable domain of TCR clone 236986 (TRAV3, TRAJ21)
CAVGTFSKFYF

SEQ ID NO: 473972 - protein, 16 aa, Homo sapiens
  CDR3 for beta chain variable domain of TCR clone 236986 (TRBV19, TRBJ2-1)
CASSRAGPSSYNEQFF

SEQ ID NO: 473973 - protein, 15 aa, Homo sapiens
  CDR3 for alpha chain variable domain of TCR clone 236987 (TRAV21, TRAJ45)
CAVSYSGGGADGLTF

SEQ ID NO: 473974 - protein, 13 aa, Homo sapiens
  CDR3 for beta chain variable domain of TCR clone 236987 (TRBV20-1, TRBJ2-5)
CSAATELQETQYL

SEQ ID NO: 473975 - protein, 11 aa, Homo sapiens
  CDR3 for alpha chain variable domain of TCR clone 236988 (TRAV17, TRAJ9)
CATTGGFTTIF

SEQ ID NO: 473976 - protein, 11 aa, Homo sapiens
  CDR3 for beta chain variable domain of TCR clone 236988 (TRBV29-1, TRBJ2-5)
CSEDRTGTQYF

SEQ ID NO: 473977 - protein, 15 aa, Homo sapiens
  CDR3 for alpha chain variable domain of TCR clone 236989 (TRAV17, TRAJ57)
YATGPSQGGSEKLVF

SEQ ID NO: 473978 - protein, 15 aa, Homo sapiens
  CDR3 for beta chain variable domain of TCR clone 236989 (TRBV25-1, TRBJ1-4)
CASSPGDSTNEKLFF

SEQ ID NO: 473979 - protein, 17 aa, Homo sapiens
  CDR3 for alpha chain variable domain of TCR clone 236990 (TRAV26-1, TRAJ22)
CIVRVPSHSGSARQLTF

SEQ ID NO: 473980 - protein, 16 aa, Homo sapiens
  CDR3 for beta chain variable domain of TCR clone 236990 (TRBV28, TRBJ2-1)
CASRRSGRVVGNEQFL

SEQ ID NO: 473981 - protein, 13 aa, Homo sapiens
  CDR3 for alpha chain variable domain of TCR clone 236991 (TRAV13-1, TRAJ11)
CAASIRGYSTLTF

SEQ ID NO: 473982 - protein, 17 aa, Homo sapiens
  CDR3 for beta chain variable domain of TCR clone 236991 (TRBV7-9, TRBJ2-1)
CASSAGTLGRSYNEQFF

SEQ ID NO: 473983 - protein, 13 aa, Homo sapiens
  CDR3 for alpha chain variable domain of TCR clone 236992 (TRAV20, TRAJ21)
CAVEGYNFNKFYF

SEQ ID NO: 473984 - protein, 13 aa, Homo sapiens
  CDR3 for beta chain variable domain of TCR clone 236992 (TRBV4-1, TRBJ2-1)
CASSQEVQYEQFF

SEQ ID NO: 473985 - protein, 13 aa, Homo sapiens
  CDR3 for alpha chain variable domain of TCR clone 236993 (TRAV30, TRAJ49)
CGTESQPVTSSIL

SEQ ID NO: 473986 - protein, 13 aa, Homo sapiens
  CDR3 for beta chain variable domain of TCR clone 236993 (TRBV10-3, TRBJ2-7)
CASKLAVSYEQYF

SEQ ID NO: 473987 - protein, 16 aa, Homo sapiens
  CDR3 for alpha chain variable domain of TCR clone 236994 (TRAV2, TRAJ4)
CAVEDRFSGGYNKLIF

SEQ ID NO: 473988 - protein, 15 aa, Homo sapiens
  CDR3 for beta chain variable domain of TCR clone 236994 (TRBV5-1, TRBJ2-1)
CASSPPRAPYNEQFF

SEQ ID NO: 473989 - protein, 14 aa, Homo sapiens
  CDR3 for alpha chain variable domain of TCR clone 236995 (TRAV13-2, TRAJ29)
CAENIEPGNTPLVF

SEQ ID NO: 473990 - protein, 14 aa, Homo sapiens
  CDR3 for beta chain variable domain of TCR clone 236995 (TRBV19, TRBJ2-2)
CAATGHANTGELFF

SEQ ID NO: 473991 - protein, 17 aa, Homo sapiens
  CDR3 for alpha chain variable domain of TCR clone 236996 (TRAV3, TRAJ12)
CCERRDGTMDSSYKLIF

SEQ ID NO: 473992 - protein, 15 aa, Homo sapiens
  CDR3 for beta chain variable domain of TCR clone 236996 (TRBV5-5, TRBJ1-5)
CSSSLKGGGEQPQHF

SEQ ID NO: 473993 - protein, 15 aa, Homo sapiens
  CDR3 for alpha chain variable domain of TCR clone 236997 (TRAV8-3, TRAJ45)
CASSYSGGGADGLPF

SEQ ID NO: 473994 - protein, 13 aa, Homo sapiens
  CDR3 for beta chain variable domain of TCR clone 236997 (TRBV10-3, TRBJ2-7)
CASKLAVSYEQYF

SEQ ID NO: 473995 - protein, 15 aa, Homo sapiens
  CDR3 for alpha chain variable domain of TCR clone 236998 (TRAV29/DV5, TRAJ24)
CAASGSTDSWGKFQC

SEQ ID NO: 473996 - protein, 12 aa, Homo sapiens
  CDR3 for beta chain variable domain of TCR clone 236998 (TRBV11-2, TRBJ2-2)
CASSLPTGELFF

SEQ ID NO: 473997 - protein, 18 aa, Homo sapiens
  CDR3 for alpha chain variable domain of TCR clone 236999 (TRAV21, TRAJ52)
CAVRPSPAGGTSYGKLTF

SEQ ID NO: 473998 - protein, 13 aa, Homo sapiens
  CDR3 for beta chain variable domain of TCR clone 236999 (TRBV5-1, TRBJ2-7)
CASSREPSVEQYF

SEQ ID NO: 473999 - protein, 14 aa, Homo sapiens
  CDR3 for alpha chain variable domain of TCR clone 237000 (TRAV17, TRAJ16)
CATADFSDGQKLLF

SEQ ID NO: 474000 - protein, 12 aa, Homo sapiens
  CDR3 for beta chain variable domain of TCR clone 237000 (TRBV19, TRBJ1-1)
CASSTTGIEAFF

SEQ ID NO: 474001 - protein, 15 aa, Homo sapiens
  CDR3 for alpha chain variable domain of TCR clone 237001 (TRAV13-1, TRAJ17)
CAASIERAASNKLTF

SEQ ID NO: 474002 - protein, 12 aa, Homo sapiens
  CDR3 for beta chain variable domain of TCR clone 237001 (TRBV5-7, TRBJ1-1)
CASSLGRGKAFF

SEQ ID NO: 474003 - protein, 13 aa, Homo sapiens
  CDR3 for alpha chain variable domain of TCR clone 237002 (TRAV36/DV7, TRAJ49)
CAVEANTGNQFYF

SEQ ID NO: 474004 - protein, 14 aa, Homo sapiens
  CDR3 for beta chain variable domain of TCR clone 237002 (TRBV20-1, TRBJ2-5)
CSASYGRAAETQYF

SEQ ID NO: 474005 - protein, 13 aa, Homo sapiens
  CDR3 for alpha chain variable domain of TCR clone 237003 (TRAV2, TRAJ15)
CAVASQAGTALIF

SEQ ID NO: 474006 - protein, 14 aa, Homo sapiens
  CDR3 for beta chain variable domain of TCR clone 237003 (TRBV19, TRBJ2-1)
CASSKDRGQDEQFF

SEQ ID NO: 474007 - protein, 13 aa, Homo sapiens
  CDR3 for alpha chain variable domain of TCR clone 237004 (TRAV1-2, TRAJ9)
CAALNTGGFKIIF

SEQ ID NO: 474008 - protein, 16 aa, Homo sapiens
  CDR3 for beta chain variable domain of TCR clone 237004 (TRBV28, TRBJ2-2)
CASSLEGGSNTGELFL

SEQ ID NO: 474009 - protein, 15 aa, Homo sapiens
  CDR3 for alpha chain variable domain of TCR clone 237005 (TRAV16, TRAJ50)
RALSGWETSYDKVIF

SEQ ID NO: 474010 - protein, 14 aa, Homo sapiens
  CDR3 for beta chain variable domain of TCR clone 237005 (TRBV18, TRBJ2-3)
CASSETSASDTQYF

SEQ ID NO: 474011 - protein, 15 aa, Homo sapiens
  CDR3 for alpha chain variable domain of TCR clone 237006 (TRAV26-1, TRAJ42)
CIVRVAEGSQGNLIF

SEQ ID NO: 474012 - protein, 13 aa, Homo sapiens
  CDR3 for beta chain variable domain of TCR clone 237006 (TRBV24-1, TRBJ2-2)
CATSDWSTGELFF

SEQ ID NO: 474013 - protein, 11 aa, Homo sapiens
  CDR3 for alpha chain variable domain of TCR clone 237007 (TRAV21, TRAJ23)
CAPQRRGKLIF

SEQ ID NO: 474014 - protein, 14 aa, Homo sapiens
  CDR3 for beta chain variable domain of TCR clone 237007 (TRBV12-4, TRBJ1-1)
CASTWTGNDTEAFF

SEQ ID NO: 474015 - protein, 12 aa, Homo sapiens
  CDR3 for alpha chain variable domain of TCR clone 237008 (TRAV13-1, TRAJ21)
CPAKEGFNKFYF

SEQ ID NO: 474016 - protein, 18 aa, Homo sapiens
  CDR3 for beta chain variable domain of TCR clone 237008 (TRBV20-1, TRBJ2-6)
CSAETTPTHGSGANVLTF

SEQ ID NO: 474017 - protein, 13 aa, Homo sapiens
  CDR3 for alpha chain variable domain of TCR clone 237009 (TRAV13-1, TRAJ5)
CAAEHTGRRALTF

SEQ ID NO: 474018 - protein, 12 aa, Homo sapiens
  CDR3 for beta chain variable domain of TCR clone 237009 (TRBV7-9, TRBJ2-7)
CASSIKREEQYF

SEQ ID NO: 474019 - protein, 14 aa, Homo sapiens
  CDR3 for alpha chain variable domain of TCR clone 237010 (TRAV12-2, TRAJ44)
CAVNPAGTASKLTF

SEQ ID NO: 474020 - protein, 14 aa, Homo sapiens
  CDR3 for beta chain variable domain of TCR clone 237010 (TRBV18, TRBJ2-5)
CASSPGPAEETQYF

SEQ ID NO: 474021 - protein, 11 aa, Homo sapiens
  CDR3 for alpha chain variable domain of TCR clone 237011 (TRAV2, TRAJ33)
CAVDSNYQLIW

SEQ ID NO: 474022 - protein, 16 aa, Homo sapiens
  CDR3 for beta chain variable domain of TCR clone 237011 (TRBV15, TRBJ1-2)
CATSRGPRTGGGGYTF

SEQ ID NO: 474023 - protein, 14 aa, Homo sapiens
  CDR3 for alpha chain variable domain of TCR clone 237012 (TRAV38-1, TRAJ45)
CAYYSGGGDDGLTF

SEQ ID NO: 474024 - protein, 19 aa, Homo sapiens
  CDR3 for beta chain variable domain of TCR clone 237012 (TRBV28, TRBJ2-1)
CQHPIGRSPGLAGGNEQFF

SEQ ID NO: 474025 - protein, 14 aa, Homo sapiens
  CDR3 for alpha chain variable domain of TCR clone 237013 (TRAV2, TRAJ37)
CAVDFTSNTGKLIF

SEQ ID NO: 474026 - protein, 13 aa, Homo sapiens
  CDR3 for beta chain variable domain of TCR clone 237013 (TRBV6-1, TRBJ2-2)
CANSGHNTGELFF

SEQ ID NO: 474027 - protein, 12 aa, Homo sapiens
  CDR3 for alpha chain variable domain of TCR clone 237014 (TRAV29/DV5, TRAJ43)
CAAPYNNNDKRF

SEQ ID NO: 474028 - protein, 17 aa, Homo sapiens
  CDR3 for beta chain variable domain of TCR clone 237014 (TRBV19, TRBJ2-6)
CASSTGQVFSGANVLTL

SEQ ID NO: 474029 - protein, 15 aa, Homo sapiens
  CDR3 for alpha chain variable domain of TCR clone 237015 (TRAV8-3, TRAJ23)
CAVGDRYNQGGKLIF

SEQ ID NO: 474030 - protein, 15 aa, Homo sapiens
  CDR3 for beta chain variable domain of TCR clone 237015 (TRBV20-1, TRBJ2-7)
CSARDRVSGMDEQYF

SEQ ID NO: 474031 - protein, 14 aa, Homo sapiens
  CDR3 for alpha chain variable domain of TCR clone 237016 (TRAV1-2, TRAJ16)
CAVNRVSDGQKLLF

SEQ ID NO: 474032 - protein, 13 aa, Homo sapiens
  CDR3 for beta chain variable domain of TCR clone 237016 (TRBV19, TRBJ2-7)
CASSTSGSYEQYF

SEQ ID NO: 474033 - protein, 13 aa, Homo sapiens
  CDR3 for alpha chain variable domain of TCR clone 237017 (TRAV12-1, TRAJ8)
CVGTGPGFQKLVF

SEQ ID NO: 474034 - protein, 14 aa, Homo sapiens
  CDR3 for beta chain variable domain of TCR clone 237017 (TRBV19, TRBJ2-1)
CASPTFVLSGEQFF

SEQ ID NO: 474035 - protein, 13 aa, Homo sapiens
  CDR3 for alpha chain variable domain of TCR clone 237018 (TRAV8-6, TRAJ49)
CAVITNTGNQFYF

SEQ ID NO: 474036 - protein, 13 aa, Homo sapiens
  CDR3 for beta chain variable domain of TCR clone 237018 (TRBV4-1, TRBJ1-1)
CASSRKMNTEAFF

SEQ ID NO: 474037 - protein, 14 aa, Homo sapiens
  CDR3 for alpha chain variable domain of TCR clone 237019 (TRAV23/DV6, TRAJ22)
CAESVSGSARQLTF

SEQ ID NO: 474038 - protein, 15 aa, Homo sapiens
  CDR3 for beta chain variable domain of TCR clone 237019 (TRBV20-1, TRBJ2-7)
CSARDRVSGMDEQYF

SEQ ID NO: 474039 - protein, 11 aa, Homo sapiens
  CDR3 for alpha chain variable domain of TCR clone 237020 (TRAV9-2, TRAJ49)
CALSAGNQFYF

SEQ ID NO: 474040 - protein, 16 aa, Homo sapiens
  CDR3 for beta chain variable domain of TCR clone 237020 (TRBV28, TRBJ2-6)
CASSTRRGSGANVLTF

SEQ ID NO: 474041 - protein, 13 aa, Homo sapiens
  CDR3 for alpha chain variable domain of TCR clone 237021 (TRAV17, TRAJ9)
CATDYTGGFKTIF

SEQ ID NO: 474042 - protein, 16 aa, Homo sapiens
  CDR3 for beta chain variable domain of TCR clone 237021 (TRBV7-7, TRBJ2-1)
CASSLASGNSYNEQFF

SEQ ID NO: 474043 - protein, 18 aa, Homo sapiens
  CDR3 for alpha chain variable domain of TCR clone 237022 (TRAV1-2, TRAJ18)
FAVRDMGDRGSTLGRLYF

SEQ ID NO: 474044 - protein, 16 aa, Homo sapiens
  CDR3 for beta chain variable domain of TCR clone 237022 (TRBV29-1, TRBJ1-2)
CSVEANRDIANYGCTF

SEQ ID NO: 474045 - protein, 11 aa, Homo sapiens
  CDR3 for alpha chain variable domain of TCR clone 237023 (TRAV29/DV5, TRAJ31)
CAAMNNARLMF

SEQ ID NO: 474046 - protein, 20 aa, Homo sapiens
  CDR3 for beta chain variable domain of TCR clone 237023 (TRBV28, TRBJ2-1)
CASTPIGRSPGLAGGNEQFF

SEQ ID NO: 474047 - protein, 13 aa, Homo sapiens
  CDR3 for alpha chain variable domain of TCR clone 237024 (TRAV17, TRAJ9)
CATGSTGGFKTII

SEQ ID NO: 474048 - protein, 14 aa, Homo sapiens
  CDR3 for beta chain variable domain of TCR clone 237024 (TRBV7-8, TRBJ2-7)
CASTFRGGPNEQYF

SEQ ID NO: 474049 - protein, 12 aa, Homo sapiens
  CDR3 for alpha chain variable domain of TCR clone 237025 (TRAV13-1, TRAJ53)
AASGGSNCKLTF

SEQ ID NO: 474050 - protein, 12 aa, Homo sapiens
  CDR3 for beta chain variable domain of TCR clone 237025 (TRBV18, TRBJ1-4)
CASSPSREKLFF

SEQ ID NO: 474051 - protein, 16 aa, Homo sapiens
  CDR3 for alpha chain variable domain of TCR clone 237026 (TRAV12-3, TRAJ53)
CAMSPGSGGSNHELTF

SEQ ID NO: 474052 - protein, 11 aa, Homo sapiens
  CDR3 for beta chain variable domain of TCR clone 237026 (TRBV29-1, TRBJ2-5)
CSEDRTGTQYF

SEQ ID NO: 474053 - protein, 12 aa, Homo sapiens
  CDR3 for alpha chain variable domain of TCR clone 237027 (TRAV12-3, TRAJ17)
CAMTLTGNKLTF

SEQ ID NO: 474054 - protein, 15 aa, Homo sapiens
  CDR3 for beta chain variable domain of TCR clone 237027 (TRBV4-2, TRBJ1-1)
CASSQLQGASAEAFF

SEQ ID NO: 474055 - protein, 12 aa, Homo sapiens
  CDR3 for alpha chain variable domain of TCR clone 237028 (TRAV13-1, TRAJ21)
CAAKEGFNKVYF

SEQ ID NO: 474056 - protein, 20 aa, Homo sapiens
  CDR3 for beta chain variable domain of TCR clone 237028 (TRBV7-8, TRBJ2-2)
CASSHLFPGPTIHITGELFF

SEQ ID NO: 474057 - protein, 17 aa, Homo sapiens
  CDR3 for alpha chain variable domain of TCR clone 237029 (TRAV36/DV7, TRAJ52)
CAVAQRAGGTSYGKRTF

SEQ ID NO: 474058 - protein, 19 aa, Homo sapiens
  CDR3 for beta chain variable domain of TCR clone 237029 (TRBV7-2, TRBJ2-3)
CASSFLSRNWGGGTDTQYF

SEQ ID NO: 474059 - protein, 13 aa, Homo sapiens
  CDR3 for alpha chain variable domain of TCR clone 237030 (TRAV13-1, TRAJ6)
CAASKGGSYIPTF

SEQ ID NO: 474060 - protein, 14 aa, Homo sapiens
  CDR3 for beta chain variable domain of TCR clone 237030 (TRBV4-1, TRBJ2-2)
CASSQAVNTGELFF

SEQ ID NO: 474061 - protein, 13 aa, Homo sapiens
  CDR3 for alpha chain variable domain of TCR clone 237031 (TRAV27, TRAJ54)
CAGAGQGAQKLVF

SEQ ID NO: 474062 - protein, 15 aa, Homo sapiens
  CDR3 for beta chain variable domain of TCR clone 237031 (TRBV18, TRBJ2-6)
CASSPSYAGANILTF

SEQ ID NO: 474063 - protein, 12 aa, Homo sapiens
  CDR3 for alpha chain variable domain of TCR clone 237032 (TRAV21, TRAJ33)
CSKMDSNYQLIW

SEQ ID NO: 474064 - protein, 15 aa, Homo sapiens
  CDR3 for beta chain variable domain of TCR clone 237032 (TRBV12-4, TRBJ2-5)
CASSPPTGLQETQYF

SEQ ID NO: 474065 - protein, 15 aa, Homo sapiens
  CDR3 for alpha chain variable domain of TCR clone 237033 (TRAV2, TRAJ24)
CAVVRLKNSWGKLQF

SEQ ID NO: 474066 - protein, 17 aa, Homo sapiens
  CDR3 for beta chain variable domain of TCR clone 237033 (TRBV13, TRBJ2-3)
CAISLARVAGGRNTQYF

SEQ ID NO: 474067 - protein, 15 aa, Homo sapiens
  CDR3 for alpha chain variable domain of TCR clone 237034 (TRAV12-1, TRAJ9)
CVVSFGDTGGFKTIF

SEQ ID NO: 474068 - protein, 16 aa, Homo sapiens
  CDR3 for beta chain variable domain of TCR clone 237034 (TRBV19, TRBJ2-1)
CASSKAGPSSYNEQFF

SEQ ID NO: 474069 - protein, 15 aa, Homo sapiens
  CDR3 for alpha chain variable domain of TCR clone 237035 (TRAV30, TRAJ13)
CGTQGVTGGYQRVTF

SEQ ID NO: 474070 - protein, 17 aa, Homo sapiens
  CDR3 for beta chain variable domain of TCR clone 237035 (TRBV20-1, TRBJ2-2)
CSARVRRTHVRSGELFF

SEQ ID NO: 474071 - protein, 13 aa, Homo sapiens
  CDR3 for alpha chain variable domain of TCR clone 237036 (TRAV12-1, TRAJ21)
CVVTLYNFNKFYF

SEQ ID NO: 474072 - protein, 20 aa, Homo sapiens
  CDR3 for beta chain variable domain of TCR clone 237036 (TRBV7-8, TRBJ2-1)
CASSLAYRLAGVRAYNEQFF

SEQ ID NO: 474073 - protein, 15 aa, Homo sapiens
  CDR3 for alpha chain variable domain of TCR clone 237037 (TRAV35, TRAJ40)
CAGQLGTSGTYKYIF

SEQ ID NO: 474074 - protein, 13 aa, Homo sapiens
  CDR3 for beta chain variable domain of TCR clone 237037 (TRBV7-3, TRBJ2-1)
CSSLAGGTNEQFF

SEQ ID NO: 474075 - protein, 16 aa, Homo sapiens
  CDR3 for alpha chain variable domain of TCR clone 237038 (TRAV3, TRAJ23)
CAAKIGIYNQGGKLIF

SEQ ID NO: 474076 - protein, 17 aa, Homo sapiens
  CDR3 for beta chain variable domain of TCR clone 237038 (TRBV10-3, TRBJ2-6)
CAISESTAPSRANVLTF

SEQ ID NO: 474077 - protein, 12 aa, Homo sapiens
  CDR3 for alpha chain variable domain of TCR clone 237039 (TRAV12-3, TRAJ17)
CAMTLTGNKRTF

SEQ ID NO: 474078 - protein, 15 aa, Homo sapiens
  CDR3 for beta chain variable domain of TCR clone 237039 (TRBV29-1, TRBJ2-6)
CSFTGGRSGANVLTF

SEQ ID NO: 474079 - protein, 12 aa, Homo sapiens
  CDR3 for alpha chain variable domain of TCR clone 237040 (TRAV12-3, TRAJ17)
CAMTLTGNNLTF

SEQ ID NO: 474080 - protein, 18 aa, Homo sapiens
  CDR3 for beta chain variable domain of TCR clone 237040 (TRBV4-3, TRBJ1-6)
CASSQETPASSYNSPLHF

SEQ ID NO: 474081 - protein, 14 aa, Homo sapiens
  CDR3 for alpha chain variable domain of TCR clone 237041 (TRAV38-1, TRAJ45)
CAAHSGGGADGLTF

SEQ ID NO: 474082 - protein, 13 aa, Homo sapiens
  CDR3 for beta chain variable domain of TCR clone 237041 (TRBV10-3, TRBJ1-2)
CAISERDSYGHTF

SEQ ID NO: 474083 - protein, 12 aa, Homo sapiens
  CDR3 for alpha chain variable domain of TCR clone 237042 (TRAV12-1, TRAJ40)
CVVYSGTYKYIF

SEQ ID NO: 474084 - protein, 15 aa, Homo sapiens
  CDR3 for beta chain variable domain of TCR clone 237042 (TRBV6-3, TRBJ2-2)
CASSFLATLTGELFF

SEQ ID NO: 474085 - protein, 12 aa, Homo sapiens
  CDR3 for alpha chain variable domain of TCR clone 237043 (TRAV12-3, TRAJ17)
CAMTLTGNKLTF

SEQ ID NO: 474086 - protein, 15 aa, Homo sapiens
  CDR3 for beta chain variable domain of TCR clone 237043 (TRBV20-1, TRBJ2-7)
CSARDQVPGMDEQYF

SEQ ID NO: 474087 - protein, 15 aa, Homo sapiens
  CDR3 for alpha chain variable domain of TCR clone 237044 (TRAV21, TRAJ37)
CAVRPTLSNTGKLIF

SEQ ID NO: 474088 - protein, 15 aa, Homo sapiens
  CDR3 for beta chain variable domain of TCR clone 237044 (TRBV4-1, TRBJ1-4)
CASSDTGGTNEKLFF

SEQ ID NO: 474089 - protein, 11 aa, Homo sapiens
  CDR3 for alpha chain variable domain of TCR clone 237045 (TRAV1-2, TRAJ40)
CAVPGTYKYIF

SEQ ID NO: 474090 - protein, 14 aa, Homo sapiens
  CDR3 for beta chain variable domain of TCR clone 237045 (TRBV19, TRBJ1-4)
CASAIEAEGEKLFF

SEQ ID NO: 474091 - protein, 15 aa, Homo sapiens
  CDR3 for alpha chain variable domain of TCR clone 237046 (TRAV3, TRAJ45)
CAVRTPWGGSDGLTF

SEQ ID NO: 474092 - protein, 16 aa, Homo sapiens
  CDR3 for beta chain variable domain of TCR clone 237046 (TRBV6-1, TRBJ2-2)
CASSVGQGANTGELFF

SEQ ID NO: 474093 - protein, 15 aa, Homo sapiens
  CDR3 for alpha chain variable domain of TCR clone 237047 (TRAV13-1, TRAJ57)
CAASNTQGGSEKLVF

SEQ ID NO: 474094 - protein, 16 aa, Homo sapiens
  CDR3 for beta chain variable domain of TCR clone 237047 (TRBV19, TRBJ2-1)
CASSKAGSSSYNEQFF

SEQ ID NO: 474095 - protein, 10 aa, Homo sapiens
  CDR3 for alpha chain variable domain of TCR clone 237048 (TRAV12-2, TRAJ43)
CAVKVLSMRF

SEQ ID NO: 474096 - protein, 14 aa, Homo sapiens
  CDR3 for beta chain variable domain of TCR clone 237048 (TRBV11-2, TRBJ2-7)
CASSVGNSLYEQYF

SEQ ID NO: 474097 - protein, 14 aa, Homo sapiens
  CDR3 for alpha chain variable domain of TCR clone 237049 (TRAV1-1, TRAJ27)
CAVIYNTNEGKSTF

SEQ ID NO: 474098 - protein, 15 aa, Homo sapiens
  CDR3 for beta chain variable domain of TCR clone 237049 (TRBV27, TRBJ2-1)
CASSNGGGSSNEQFF

SEQ ID NO: 474099 - protein, 14 aa, Homo sapiens
  CDR3 for alpha chain variable domain of TCR clone 237050 (TRAV16, TRAJ57)
FALPTQGGPEKLVF

SEQ ID NO: 474100 - protein, 17 aa, Homo sapiens
  CDR3 for beta chain variable domain of TCR clone 237050 (TRBV28, TRBJ1-3)
CASWGGISLETPYILER

SEQ ID NO: 474101 - protein, 15 aa, Homo sapiens
  CDR3 for alpha chain variable domain of TCR clone 237051 (TRAV2, TRAJ11)
CAVGGRNSGYSTLTF

SEQ ID NO: 474102 - protein, 12 aa, Homo sapiens
  CDR3 for beta chain variable domain of TCR clone 237051 (TRBV5-1, TRBJ1-2)
CASSQDTYGYTF

SEQ ID NO: 474103 - protein, 16 aa, Homo sapiens
  CDR3 for alpha chain variable domain of TCR clone 237052 (TRAV1-2, TRAJ10)
CAVRGVLTGGGNKRTF

SEQ ID NO: 474104 - protein, 17 aa, Homo sapiens
  CDR3 for beta chain variable domain of TCR clone 237052 (TRBV28, TRBJ2-5)
CASSTPEGDALQETQYF

SEQ ID NO: 474105 - protein, 15 aa, Homo sapiens
  CDR3 for alpha chain variable domain of TCR clone 237053 (TRAV26-1, TRAJ29)
CIVRVEGSGNTPLVC

SEQ ID NO: 474106 - protein, 15 aa, Homo sapiens
  CDR3 for beta chain variable domain of TCR clone 237053 (TRBV7-9, TRBJ1-5)
CASSEGHQPNQPQHF

SEQ ID NO: 474107 - protein, 11 aa, Homo sapiens
  CDR3 for alpha chain variable domain of TCR clone 237054 (TRAV2, TRAJ13)
CASGGYQKVTF

SEQ ID NO: 474108 - protein, 13 aa, Homo sapiens
  CDR3 for beta chain variable domain of TCR clone 237054 (TRBV12-4, TRBJ1-2)
CASSSGPNYGYTF

SEQ ID NO: 474109 - protein, 13 aa, Homo sapiens
  CDR3 for alpha chain variable domain of TCR clone 237055 (TRAV12-1, TRAJ21)
CVVIGDNINKFYF

SEQ ID NO: 474110 - protein, 14 aa, Homo sapiens
  CDR3 for beta chain variable domain of TCR clone 237055 (TRBV7-3, TRBJ2-2)
CASSLYPLTGELFF

SEQ ID NO: 474111 - protein, 12 aa, Homo sapiens
  CDR3 for alpha chain variable domain of TCR clone 237056 (TRAV2, TRAJ5)
CALDMGRRALTF

SEQ ID NO: 474112 - protein, 15 aa, Homo sapiens
  CDR3 for beta chain variable domain of TCR clone 237056 (TRBV10-3, TRBJ2-1)
CAISDVQDRAYEQFF

SEQ ID NO: 474113 - protein, 13 aa, Homo sapiens
  CDR3 for alpha chain variable domain of TCR clone 237057 (TRAV29/DV5, TRAJ31)
FAASRNNNARLMF

SEQ ID NO: 474114 - protein, 12 aa, Homo sapiens
  CDR3 for beta chain variable domain of TCR clone 237057 (TRBV14, TRBJ1-1)
CASSQLKGLAFF

SEQ ID NO: 474115 - protein, 15 aa, Homo sapiens
  CDR3 for alpha chain variable domain of TCR clone 237058 (TRAV13-1, TRAJ18)
CAASGGGSTLGMLYF

SEQ ID NO: 474116 - protein, 13 aa, Homo sapiens
  CDR3 for beta chain variable domain of TCR clone 237058 (TRBV18, TRBJ2-1)
CASGLASNNEQFF

SEQ ID NO: 474117 - protein, 10 aa, Homo sapiens
  CDR3 for alpha chain variable domain of TCR clone 237059 (TRAV26-1, TRAJ22)
RSGSARQLTF

SEQ ID NO: 474118 - protein, 13 aa, Homo sapiens
  CDR3 for beta chain variable domain of TCR clone 237059 (TRBV7-9, TRBJ1-2)
CAISLKQNYGYTF

SEQ ID NO: 474119 - protein, 16 aa, Homo sapiens
  CDR3 for alpha chain variable domain of TCR clone 237060 (TRAV30, TRAJ24)
CGTEIVDADSWGKFQF

SEQ ID NO: 474120 - protein, 16 aa, Homo sapiens
  CDR3 for beta chain variable domain of TCR clone 237060 (TRBV7-3, TRBJ2-1)
CASSAGGTGTDNEQFF

SEQ ID NO: 474121 - protein, 14 aa, Homo sapiens
  CDR3 for alpha chain variable domain of TCR clone 237061 (TRAV2, TRAJ9)
CAVEDRSGGFKTIF

SEQ ID NO: 474122 - protein, 15 aa, Homo sapiens
  CDR3 for beta chain variable domain of TCR clone 237061 (TRBV5-1, TRBJ2-1)
CASKGLAGVYNEQFF

SEQ ID NO: 474123 - protein, 14 aa, Homo sapiens
  CDR3 for alpha chain variable domain of TCR clone 237062 (TRAV12-1, TRAJ40)
CVVNRDSGTYKYIF

SEQ ID NO: 474124 - protein, 16 aa, Homo sapiens
  CDR3 for beta chain variable domain of TCR clone 237062 (TRBV4-3, TRBJ2-1)
CASSPALDRGVNEQFF

SEQ ID NO: 474125 - protein, 15 aa, Homo sapiens
  CDR3 for alpha chain variable domain of TCR clone 237063 (TRAV38-1, TRAJ37)
CAFIFGSGNTGKLIF

SEQ ID NO: 474126 - protein, 16 aa, Homo sapiens
  CDR3 for beta chain variable domain of TCR clone 237063 (TRBV6-1, TRBJ2-3)
CASSEVTGQGTDTQYF

SEQ ID NO: 474127 - protein, 14 aa, Homo sapiens
  CDR3 for alpha chain variable domain of TCR clone 237064 (TRAV8-4, TRAJ12)
CAVSPMDSSYKLIF

SEQ ID NO: 474128 - protein, 15 aa, Homo sapiens
  CDR3 for beta chain variable domain of TCR clone 237064 (TRBV5-5, TRBJ2-1)
CASSAEAETYNEQFF

SEQ ID NO: 474129 - protein, 13 aa, Homo sapiens
  CDR3 for alpha chain variable domain of TCR clone 237065 (TRAV3, TRAJ40)
CAVRGSGAYKYIF

SEQ ID NO: 474130 - protein, 14 aa, Homo sapiens
  CDR3 for beta chain variable domain of TCR clone 237065 (TRBV12-4, TRBJ1-1)
CASSLGTGGTEAFF

SEQ ID NO: 474131 - protein, 14 aa, Homo sapiens
  CDR3 for alpha chain variable domain of TCR clone 237066 (TRAV8-4, TRAJ13)
CAVTLSGGYQKVNF

SEQ ID NO: 474132 - protein, 14 aa, Homo sapiens
  CDR3 for beta chain variable domain of TCR clone 237066 (TRBV7-2, TRBJ1-2)
CASSQTGSTYDYTF

SEQ ID NO: 474133 - protein, 14 aa, Homo sapiens
  CDR3 for alpha chain variable domain of TCR clone 237067 (TRAV1-2, TRAJ6)
CAVSLSGGSYIPAF

SEQ ID NO: 474134 - protein, 15 aa, Homo sapiens
  CDR3 for beta chain variable domain of TCR clone 237067 (TRBV28, TRBJ2-7)
CASSPGGRGFYEQYF

SEQ ID NO: 474135 - protein, 12 aa, Homo sapiens
  CDR3 for alpha chain variable domain of TCR clone 237068 (TRAV13-1, TRAJ39)
CAASNAGKMLTF

SEQ ID NO: 474136 - protein, 15 aa, Homo sapiens
  CDR3 for beta chain variable domain of TCR clone 237068 (TRBV29-1, TRBJ2-5)
CSVAGASGTQETQYF

SEQ ID NO: 474137 - protein, 14 aa, Homo sapiens
  CDR3 for alpha chain variable domain of TCR clone 237069 (TRAV38-1, TRAJ45)
CAYYSGGGADGLTF

SEQ ID NO: 474138 - protein, 17 aa, Homo sapiens
  CDR3 for beta chain variable domain of TCR clone 237069 (TRBV15, TRBJ1-2)
CATSGREIDVVNYGYTF

SEQ ID NO: 474139 - protein, 18 aa, Homo sapiens
  CDR3 for alpha chain variable domain of TCR clone 237070 (TRAV12-2, )
CAVEDIQNPYPAVYQLRD

SEQ ID NO: 474140 - protein, 18 aa, Homo sapiens
  CDR3 for beta chain variable domain of TCR clone 237070 (TRBV11-2, TRBJ2-3)
CASSLGGASRGAPNTQYF

SEQ ID NO: 474141 - protein, 13 aa, Homo sapiens
  CDR3 for alpha chain variable domain of TCR clone 237071 (TRAV8-4, TRAJ47)
CAVTALYGNKLVF

SEQ ID NO: 474142 - protein, 14 aa, Homo sapiens
  CDR3 for beta chain variable domain of TCR clone 237071 (TRBV19, TRBJ2-7)
CASSIGGEVAEQYF

SEQ ID NO: 474143 - protein, 10 aa, Homo sapiens
  CDR3 for alpha chain variable domain of TCR clone 237072 (TRAV16, TRAJ50)
CALSGWGNLL

SEQ ID NO: 474144 - protein, 14 aa, Homo sapiens
  CDR3 for beta chain variable domain of TCR clone 237072 (TRBV18, TRBJ2-3)
CASSETSASDTQYF

SEQ ID NO: 474145 - protein, 15 aa, Homo sapiens
  CDR3 for alpha chain variable domain of TCR clone 237073 (TRAV8-3, TRAJ45)
FASSYSGGGADGLTF

SEQ ID NO: 474146 - protein, 17 aa, Homo sapiens
  CDR3 for beta chain variable domain of TCR clone 237073 (TRBV7-8, TRBJ1-2)
CASSLRPLQGHLYGYTF

SEQ ID NO: 474147 - protein, 14 aa, Homo sapiens
  CDR3 for alpha chain variable domain of TCR clone 237074 (TRAV26-1, TRAJ44)
CIARTTGTASKLTF

SEQ ID NO: 474148 - protein, 14 aa, Homo sapiens
  CDR3 for beta chain variable domain of TCR clone 237074 (TRBV18, TRBJ2-3)
CASSGLADTDTQYF

SEQ ID NO: 474149 - protein, 14 aa, Homo sapiens
  CDR3 for alpha chain variable domain of TCR clone 237075 (TRAV1-2, TRAJ8)
CAFREDTGFQKLVF

SEQ ID NO: 474150 - protein, 15 aa, Homo sapiens
  CDR3 for beta chain variable domain of TCR clone 237075 (TRBV20-1, TRBJ2-7)
CSAREGRDSLYEQYF

SEQ ID NO: 474151 - protein, 17 aa, Homo sapiens
  CDR3 for alpha chain variable domain of TCR clone 237076 (TRAV3, TRAJ38)
CAVRDCLNAGNNRKLIW

SEQ ID NO: 474152 - protein, 14 aa, Homo sapiens
  CDR3 for beta chain variable domain of TCR clone 237076 (TRBV2, TRBJ2-7)
CASSRDRSSYEQYF

SEQ ID NO: 474153 - protein, 12 aa, Homo sapiens
  CDR3 for alpha chain variable domain of TCR clone 237077 (TRAV21, TRAJ49)
CAVSWTGNQFYF

SEQ ID NO: 474154 - protein, 18 aa, Homo sapiens
  CDR3 for beta chain variable domain of TCR clone 237077 (TRBV7-8, TRBJ2-1)
SASSPAEGLAGGLNEQFF

SEQ ID NO: 474155 - protein, 13 aa, Homo sapiens
  CDR3 for alpha chain variable domain of TCR clone 237078 (TRAV36/DV7, TRAJ54)
CAVCTQGAKKLVF

SEQ ID NO: 474156 - protein, 13 aa, Homo sapiens
  CDR3 for beta chain variable domain of TCR clone 237078 (TRBV7-6, TRBJ2-7)
CASSLDHTHEQYF

SEQ ID NO: 474157 - protein, 11 aa, Homo sapiens
  CDR3 for alpha chain variable domain of TCR clone 237079 (TRAV2, TRAJ13)
CASGGYQKVSF

SEQ ID NO: 474158 - protein, 16 aa, Homo sapiens
  CDR3 for beta chain variable domain of TCR clone 237079 (TRBV19, TRBJ2-1)
CASSKAGPSSYNEQFF

SEQ ID NO: 474159 - protein, 12 aa, Homo sapiens
  CDR3 for alpha chain variable domain of TCR clone 237080 (TRAV6, TRAJ20)
CALDRGDYKLSS

SEQ ID NO: 474160 - protein, 13 aa, Homo sapiens
  CDR3 for beta chain variable domain of TCR clone 237080 (TRBV5-1, TRBJ1-2)
CASSFQDGYGYTF

SEQ ID NO: 474161 - protein, 14 aa, Homo sapiens
  CDR3 for alpha chain variable domain of TCR clone 237081 (TRAV13-1, TRAJ44)
CAAKATGTASKLTF

SEQ ID NO: 474162 - protein, 22 aa, Homo sapiens
  CDR3 for beta chain variable domain of TCR clone 237081 (TRBV19, TRBJ2-1)
CASSVRDRVTGTSGRIYNEQFL

SEQ ID NO: 474163 - protein, 16 aa, Homo sapiens
  CDR3 for alpha chain variable domain of TCR clone 237082 (TRAV8-3, TRAJ13)
CAVVLMNSGGYQKVTF

SEQ ID NO: 474164 - protein, 15 aa, Homo sapiens
  CDR3 for beta chain variable domain of TCR clone 237082 (TRBV5-4, TRBJ2-5)
CASSLGGGAKETQYF

SEQ ID NO: 474165 - protein, 14 aa, Homo sapiens
  CDR3 for alpha chain variable domain of TCR clone 237083 (TRAV12-2, TRAJ13)
CALKKTGGYQKVTF

SEQ ID NO: 474166 - protein, 20 aa, Homo sapiens
  CDR3 for beta chain variable domain of TCR clone 237083 (TRBV7-8, TRBJ2-2)
CASSHLFPGPTIHITGELFF

SEQ ID NO: 474167 - protein, 13 aa, Homo sapiens
  CDR3 for alpha chain variable domain of TCR clone 237084 (TRAV12-2, TRAJ20)
CRDGQGNDYKLSF

SEQ ID NO: 474168 - protein, 14 aa, Homo sapiens
  CDR3 for beta chain variable domain of TCR clone 237084 (TRBV7-2, TRBJ2-5)
CASSFGGEQETQYF

SEQ ID NO: 474169 - protein, 14 aa, Homo sapiens
  CDR3 for alpha chain variable domain of TCR clone 237085 (TRAV12-1, TRAJ41)
CVVLNSNFGYALNF

SEQ ID NO: 474170 - protein, 14 aa, Homo sapiens
  CDR3 for beta chain variable domain of TCR clone 237085 (TRBV5-8, TRBJ1-1)
CASSPRTGFSEAFF

SEQ ID NO: 474171 - protein, 13 aa, Homo sapiens
  CDR3 for alpha chain variable domain of TCR clone 237086 (TRAV12-3, TRAJ7)
CARSASGNNRLAF

SEQ ID NO: 474172 - protein, 14 aa, Homo sapiens
  CDR3 for beta chain variable domain of TCR clone 237086 (TRBV13, TRBJ2-5)
CASSLGPRGETQYF

SEQ ID NO: 474173 - protein, 15 aa, Homo sapiens
  CDR3 for alpha chain variable domain of TCR clone 237087 (TRAV25, TRAJ53)
CAATGGGGSNYKLTF

SEQ ID NO: 474174 - protein, 17 aa, Homo sapiens
  CDR3 for beta chain variable domain of TCR clone 237087 (TRBV28, TRBJ1-1)
CASSLSGTVYENTEAFF

SEQ ID NO: 474175 - protein, 14 aa, Homo sapiens
  CDR3 for alpha chain variable domain of TCR clone 237088 (TRAV12-2, TRAJ40)
CAVKIPSGTYKYIF

SEQ ID NO: 474176 - protein, 15 aa, Homo sapiens
  CDR3 for beta chain variable domain of TCR clone 237088 (TRBV11-2, TRBJ2-7)
CASGHLGGQPYEQYF

SEQ ID NO: 474177 - protein, 13 aa, Homo sapiens
  CDR3 for alpha chain variable domain of TCR clone 237089 (TRAV29/DV5, TRAJ31)
CAASRNNNARLMF

SEQ ID NO: 474178 - protein, 20 aa, Homo sapiens
  CDR3 for beta chain variable domain of TCR clone 237089 (TRBV19, TRBJ2-1)
CASSISRTVTSTRLNNEQFF

SEQ ID NO: 474179 - protein, 14 aa, Homo sapiens
  CDR3 for alpha chain variable domain of TCR clone 237090 (TRAV1-1, TRAJ23)
CAVSIYNQGRKLIF

SEQ ID NO: 474180 - protein, 15 aa, Homo sapiens
  CDR3 for beta chain variable domain of TCR clone 237090 (TRBV5-8, TRBJ2-2)
CASSLDRGVTGELFF

SEQ ID NO: 474181 - protein, 13 aa, Homo sapiens
  CDR3 for alpha chain variable domain of TCR clone 237091 (TRAV2, TRAJ40)
CAVVASGTYKYIF

SEQ ID NO: 474182 - protein, 15 aa, Homo sapiens
  CDR3 for beta chain variable domain of TCR clone 237091 (TRBV7-9, TRBJ1-5)
CASSQGHQPNQPQHF

SEQ ID NO: 474183 - protein, 14 aa, Homo sapiens
  CDR3 for alpha chain variable domain of TCR clone 237092 (TRAV8-1, TRAJ15)
CAVNGQQAGTALIF

SEQ ID NO: 474184 - protein, 14 aa, Homo sapiens
  CDR3 for beta chain variable domain of TCR clone 237092 (TRBV12-4, TRBJ1-1)
CASSLGTGGTEAFF

SEQ ID NO: 474185 - protein, 12 aa, Homo sapiens
  CDR3 for alpha chain variable domain of TCR clone 237093 (TRAV12-1, TRAJ40)
CVVYSGTYKFIF

SEQ ID NO: 474186 - protein, 18 aa, Homo sapiens
  CDR3 for beta chain variable domain of TCR clone 237093 (TRBV11-2, TRBJ2-3)
CASSLGGASRGAPNTQYF

SEQ ID NO: 474187 - protein, 12 aa, Homo sapiens
  CDR3 for alpha chain variable domain of TCR clone 237094 (TRAV29/DV5, TRAJ49)
CAATDTGNQFYF

SEQ ID NO: 474188 - protein, 19 aa, Homo sapiens
  CDR3 for beta chain variable domain of TCR clone 237094 (TRBV25-1, TRBJ2-2)
CAILVYRVDRGRKTGELYF

SEQ ID NO: 474189 - protein, 14 aa, Homo sapiens
  CDR3 for alpha chain variable domain of TCR clone 237095 (TRAV1-2, TRAJ16)
CAVNRFSDGQMLLF

SEQ ID NO: 474190 - protein, 17 aa, Homo sapiens
  CDR3 for beta chain variable domain of TCR clone 237095 (TRBV20-1, TRBJ2-1)
CSASSSGLAGSYNEQFF

SEQ ID NO: 474191 - protein, 16 aa, Homo sapiens
  CDR3 for alpha chain variable domain of TCR clone 237096 (TRAV26-1, TRAJ45)
CIVEKYSGGGADGLTF

SEQ ID NO: 474192 - protein, 16 aa, Homo sapiens
  CDR3 for beta chain variable domain of TCR clone 237096 (TRBV10-3, TRBJ1-6)
CAISERRGQGNSPLHV

SEQ ID NO: 474193 - protein, 14 aa, Homo sapiens
  CDR3 for alpha chain variable domain of TCR clone 237097 (TRAV1-2, TRAJ8)
CAVREDTGFQKLVF

SEQ ID NO: 474194 - protein, 17 aa, Homo sapiens
  CDR3 for beta chain variable domain of TCR clone 237097 (TRBV15, TRBJ2-3)
CATSGTTSEEGTDTQYF

SEQ ID NO: 474195 - protein, 19 aa, Homo sapiens
  CDR3 for alpha chain variable domain of TCR clone 237098 (TRAV40, )
CLPIPDIHNPDPAVYQLRD

SEQ ID NO: 474196 - protein, 15 aa, Homo sapiens
  CDR3 for beta chain variable domain of TCR clone 237098 (TRBV2, TRBJ1-2)
CASSEIGGANYGYTF

SEQ ID NO: 474197 - protein, 13 aa, Homo sapiens
  CDR3 for alpha chain variable domain of TCR clone 237099 (TRAV1-2, TRAJ9)
CAALNTVGFKTIF

SEQ ID NO: 474198 - protein, 13 aa, Homo sapiens
  CDR3 for beta chain variable domain of TCR clone 237099 (TRBV19, TRBJ1-2)
CASSVTGQDGYTF

SEQ ID NO: 474199 - protein, 13 aa, Homo sapiens
  CDR3 for alpha chain variable domain of TCR clone 237100 (TRAV27, TRAJ41)
CAGEGNSGYALNF

SEQ ID NO: 474200 - protein, 15 aa, Homo sapiens
  CDR3 for beta chain variable domain of TCR clone 237100 (TRBV6-3, TRBJ2-7)
RASSSLGTVFYEQYF

SEQ ID NO: 474201 - protein, 12 aa, Homo sapiens
  CDR3 for alpha chain variable domain of TCR clone 237101 (TRAV13-2, TRAJ8)
CAPWLGFQKLVF

SEQ ID NO: 474202 - protein, 15 aa, Homo sapiens
  CDR3 for beta chain variable domain of TCR clone 237101 (TRBV4-1, TRBJ2-7)
CASSQQGQGFDEQYF

SEQ ID NO: 474203 - protein, 14 aa, Homo sapiens
  CDR3 for alpha chain variable domain of TCR clone 237102 (TRAV26-1, TRAJ21)
CIVRPPYNFNKFYF

SEQ ID NO: 474204 - protein, 15 aa, Homo sapiens
  CDR3 for beta chain variable domain of TCR clone 237102 (TRBV9, TRBJ1-6)
CASSVAGTGDSPLHF

SEQ ID NO: 474205 - protein, 15 aa, Homo sapiens
  CDR3 for alpha chain variable domain of TCR clone 237103 (TRAV8-3, TRAJ11)
CAVGLLNSGDSTLTF

SEQ ID NO: 474206 - protein, 16 aa, Homo sapiens
  CDR3 for beta chain variable domain of TCR clone 237103 (TRBV7-9, TRBJ1-2)
CASSLGFSSGEDGYTF

SEQ ID NO: 474207 - protein, 18 aa, Homo sapiens
  CDR3 for alpha chain variable domain of TCR clone 237104 (TRAV13-1, TRAJ52)
CAASKWSAGGTSYGKLTF

SEQ ID NO: 474208 - protein, 13 aa, Homo sapiens
  CDR3 for beta chain variable domain of TCR clone 237104 (TRBV12-4, TRBJ1-2)
CASSLRQGKGYTF

SEQ ID NO: 474209 - protein, 12 aa, Homo sapiens
  CDR3 for alpha chain variable domain of TCR clone 237105 (TRAV12-1, TRAJ48)
CVARRGNEKLTF

SEQ ID NO: 474210 - protein, 14 aa, Homo sapiens
  CDR3 for beta chain variable domain of TCR clone 237105 (TRBV19, TRBJ2-1)
CASSRLASINEQFF

SEQ ID NO: 474211 - protein, 12 aa, Homo sapiens
  CDR3 for alpha chain variable domain of TCR clone 237106 (TRAV12-3, TRAJ17)
CAMTLTGNKLTF

SEQ ID NO: 474212 - protein, 15 aa, Homo sapiens
  CDR3 for beta chain variable domain of TCR clone 237106 (TRBV7-9, TRBJ1-6)
RASSSPGRGNSPLLF

SEQ ID NO: 474213 - protein, 14 aa, Homo sapiens
  CDR3 for alpha chain variable domain of TCR clone 237107 (TRAV8-2, TRAJ5)
CVVDLDTGRRALTF

SEQ ID NO: 474214 - protein, 15 aa, Homo sapiens
  CDR3 for beta chain variable domain of TCR clone 237107 (TRBV5-7, TRBJ2-1)
CASSYISGRGNEQFF

SEQ ID NO: 474215 - protein, 15 aa, Homo sapiens
  CDR3 for alpha chain variable domain of TCR clone 237108 (TRAV2, TRAJ15)
CAVEDREQAGTALIF

SEQ ID NO: 474216 - protein, 15 aa, Homo sapiens
  CDR3 for beta chain variable domain of TCR clone 237108 (TRBV3-1, TRBJ1-2)
CASSHQGTPGYGYTF

SEQ ID NO: 474217 - protein, 14 aa, Homo sapiens
  CDR3 for alpha chain variable domain of TCR clone 237109 (TRAV13-1, TRAJ22)
CAATTSGSARQLTF

SEQ ID NO: 474218 - protein, 13 aa, Homo sapiens
  CDR3 for beta chain variable domain of TCR clone 237109 (TRBV28, TRBJ2-7)
CASTPGLAGEQYF

SEQ ID NO: 474219 - protein, 11 aa, Homo sapiens
  CDR3 for alpha chain variable domain of TCR clone 237110 (TRAV23/DV6, TRAJ49)
CAVAPVTSSIL

SEQ ID NO: 474220 - protein, 14 aa, Homo sapiens
  CDR3 for beta chain variable domain of TCR clone 237110 (TRBV7-3, TRBJ1-1)
CASSLGTGYTEAFF

SEQ ID NO: 474221 - protein, 13 aa, Homo sapiens
  CDR3 for alpha chain variable domain of TCR clone 237111 (TRAV12-1, TRAJ33)
CGDAPDSNYRLIW

SEQ ID NO: 474222 - protein, 15 aa, Homo sapiens
  CDR3 for beta chain variable domain of TCR clone 237111 (TRBV27, TRBJ2-1)
CASSKGGGSSNEQFF

SEQ ID NO: 474223 - protein, 14 aa, Homo sapiens
  CDR3 for alpha chain variable domain of TCR clone 237112 (TRAV2, TRAJ29)
CAVTPHSGNTPLVF

SEQ ID NO: 474224 - protein, 13 aa, Homo sapiens
  CDR3 for beta chain variable domain of TCR clone 237112 (TRBV11-2, TRBJ2-1)
CASSLGLAGGGSS

SEQ ID NO: 474225 - protein, 13 aa, Homo sapiens
  CDR3 for alpha chain variable domain of TCR clone 237113 (TRAV2, TRAJ40)
CAMVTSGTYKCIF

SEQ ID NO: 474226 - protein, 14 aa, Homo sapiens
  CDR3 for beta chain variable domain of TCR clone 237113 (TRBV19, TRBJ2-1)
CASPTFVLSGEQFF

SEQ ID NO: 474227 - protein, 13 aa, Homo sapiens
  CDR3 for alpha chain variable domain of TCR clone 237114 (TRAV8-4, TRAJ26)
CAVSSSMVRILSL

SEQ ID NO: 474228 - protein, 14 aa, Homo sapiens
  CDR3 for beta chain variable domain of TCR clone 237114 (TRBV18, TRBJ2-5)
CARSPRASSETQYF

SEQ ID NO: 474229 - protein, 11 aa, Homo sapiens
  CDR3 for alpha chain variable domain of TCR clone 237115 (TRAV2, TRAJ33)
CAVDSNYQLIW

SEQ ID NO: 474230 - protein, 16 aa, Homo sapiens
  CDR3 for beta chain variable domain of TCR clone 237115 (TRBV24-1, TRBJ2-3)
CATSGPGTGATDTQYF

SEQ ID NO: 474231 - protein, 14 aa, Homo sapiens
  CDR3 for alpha chain variable domain of TCR clone 237116 (TRAV1-2, TRAJ8)
CAVREDTGFQKLVF

SEQ ID NO: 474232 - protein, 21 aa, Homo sapiens
  CDR3 for beta chain variable domain of TCR clone 237116 (TRBV11-1, TRBJ2-1)
CASSARERLRPEGPAYNEQFF

SEQ ID NO: 474233 - protein, 14 aa, Homo sapiens
  CDR3 for alpha chain variable domain of TCR clone 237117 (TRAV1-2, TRAJ8)
CAVREYTGFQKLVF

SEQ ID NO: 474234 - protein, 16 aa, Homo sapiens
  CDR3 for beta chain variable domain of TCR clone 237117 (TRBV4-3, TRBJ2-1)
CASSPALDRGVNEQFF

SEQ ID NO: 474235 - protein, 14 aa, Homo sapiens
  CDR3 for alpha chain variable domain of TCR clone 237118 (TRAV8-3, TRAJ4)
CAVGAARGYNKLLF

SEQ ID NO: 474236 - protein, 15 aa, Homo sapiens
  CDR3 for beta chain variable domain of TCR clone 237118 (TRBV6-5, TRBJ2-1)
CASSYDAGAGNEQFF

SEQ ID NO: 474237 - protein, 15 aa, Homo sapiens
  CDR3 for alpha chain variable domain of TCR clone 237119 (TRAV38-1, TRAJ37)
CAFIFGSGNTGKLIF

SEQ ID NO: 474238 - protein, 16 aa, Homo sapiens
  CDR3 for beta chain variable domain of TCR clone 237119 (TRBV20-1, TRBJ1-1)
CSARALTQGMNTEAFF

SEQ ID NO: 474239 - protein, 14 aa, Homo sapiens
  CDR3 for alpha chain variable domain of TCR clone 237120 (TRAV1-2, TRAJ16)
CAVNRFSDGQKLLF

SEQ ID NO: 474240 - protein, 15 aa, Homo sapiens
  CDR3 for beta chain variable domain of TCR clone 237120 (TRBV7-2, TRBJ1-2)
WASSPRAGWNYGYTF

SEQ ID NO: 474241 - protein, 14 aa, Homo sapiens
  CDR3 for alpha chain variable domain of TCR clone 237121 (TRAV17, TRAJ16)
CATADFSDGKKLLF

SEQ ID NO: 474242 - protein, 15 aa, Homo sapiens
  CDR3 for beta chain variable domain of TCR clone 237121 (TRBV18, TRBJ2-1)
CASSPPSASYNGQFF

SEQ ID NO: 474243 - protein, 15 aa, Homo sapiens
  CDR3 for alpha chain variable domain of TCR clone 237122 (TRAV3, TRAJ22)
CAVRDRGGSARQLTF

SEQ ID NO: 474244 - protein, 15 aa, Homo sapiens
  CDR3 for beta chain variable domain of TCR clone 237122 (TRBV7-3, TRBJ2-2)
CASSETGQGTGELIF

SEQ ID NO: 474245 - protein, 12 aa, Homo sapiens
  CDR3 for alpha chain variable domain of TCR clone 237123 (TRAV3, TRAJ31)
CAVRDGNARLMF

SEQ ID NO: 474246 - protein, 18 aa, Homo sapiens
  CDR3 for beta chain variable domain of TCR clone 237123 (TRBV7-2, TRBJ2-3)
CASSLKREGSGITDTRYF

SEQ ID NO: 474247 - protein, 14 aa, Homo sapiens
  CDR3 for alpha chain variable domain of TCR clone 237124 (TRAV35, TRAJ50)
CAGHRKTSYDKVIF

SEQ ID NO: 474248 - protein, 17 aa, Homo sapiens
  CDR3 for beta chain variable domain of TCR clone 237124 (TRBV7-8, TRBJ2-6)
CANSAGTGGAGANVLSF

SEQ ID NO: 474249 - protein, 23 aa, Homo sapiens
  CDR3 for alpha chain variable domain of TCR clone 237125 (TRAV26-1, TRAJ38)
CIADNAGNNHIQNPDPAVYHLRD

SEQ ID NO: 474250 - protein, 13 aa, Homo sapiens
  CDR3 for beta chain variable domain of TCR clone 237125 (TRBV20-1, TRBJ1-1)
CSARGGGNTETFF

SEQ ID NO: 474251 - protein, 14 aa, Homo sapiens
  CDR3 for alpha chain variable domain of TCR clone 237126 (TRAV3, TRAJ22)
CCERPGGSARQLTF

SEQ ID NO: 474252 - protein, 14 aa, Homo sapiens
  CDR3 for beta chain variable domain of TCR clone 237126 (TRBV28, TRBJ2-2)
CASRIRSGTGELFF

SEQ ID NO: 474253 - protein, 15 aa, Homo sapiens
  CDR3 for alpha chain variable domain of TCR clone 237127 (TRAV13-1, TRAJ5)
CAVSPIDTGRRALIF

SEQ ID NO: 474254 - protein, 18 aa, Homo sapiens
  CDR3 for beta chain variable domain of TCR clone 237127 (TRBV4-1, TRBJ2-2)
CASSFRTSGGEGPGELFF

SEQ ID NO: 474255 - protein, 15 aa, Homo sapiens
  CDR3 for alpha chain variable domain of TCR clone 237128 (TRAV8-4, TRAJ3)
CAVTGENPVHQCFQD

SEQ ID NO: 474256 - protein, 16 aa, Homo sapiens
  CDR3 for beta chain variable domain of TCR clone 237128 (TRBV4-2, TRBJ1-1)
CASSQAGFGMNTEAFF

SEQ ID NO: 474257 - protein, 20 aa, Homo sapiens
  CDR3 for alpha chain variable domain of TCR clone 237129 (TRAV23/DV6, TRAJ37)
CAASLTWQHRQTNLWARDNF

SEQ ID NO: 474258 - protein, 14 aa, Homo sapiens
  CDR3 for beta chain variable domain of TCR clone 237129 (TRBV7-9, TRBJ2-7)
CASSLDRPTDEQYF

SEQ ID NO: 474259 - protein, 15 aa, Homo sapiens
  CDR3 for alpha chain variable domain of TCR clone 237130 (TRAV17, TRAJ57)
CATGPSQGGSEKLVF

SEQ ID NO: 474260 - protein, 17 aa, Homo sapiens
  CDR3 for beta chain variable domain of TCR clone 237130 (TRBV7-9, TRBJ2-3)
CASSPTVAGDLTDTQYF

SEQ ID NO: 474261 - protein, 16 aa, Homo sapiens
  CDR3 for alpha chain variable domain of TCR clone 237131 (TRAV1-2, TRAJ27)
CAVREPQTPMQANHPL

SEQ ID NO: 474262 - protein, 13 aa, Homo sapiens
  CDR3 for beta chain variable domain of TCR clone 237131 (TRBV6-1, TRBJ1-2)
CASSAREGYGYTF

SEQ ID NO: 474263 - protein, 15 aa, Homo sapiens
  CDR3 for alpha chain variable domain of TCR clone 237132 (TRAV17, TRAJ57)
CATGPSQGGSEKLVF

SEQ ID NO: 474264 - protein, 17 aa, Homo sapiens
  CDR3 for beta chain variable domain of TCR clone 237132 (TRBV20-1, TRBJ2-1)
CSASASGLAGSYNEQFF

SEQ ID NO: 474265 - protein, 14 aa, Homo sapiens
  CDR3 for alpha chain variable domain of TCR clone 237133 (TRAV17, TRAJ57)
CATDPQGGSEKLVF

SEQ ID NO: 474266 - protein, 13 aa, Homo sapiens
  CDR3 for beta chain variable domain of TCR clone 237133 (TRBV24-1, TRBJ2-2)
CATSDWSTGELFF

SEQ ID NO: 474267 - protein, 15 aa, Homo sapiens
  CDR3 for alpha chain variable domain of TCR clone 237134 (TRAV23/DV6, TRAJ16)
CAASPWFSDGQKLLF

SEQ ID NO: 474268 - protein, 14 aa, Homo sapiens
  CDR3 for beta chain variable domain of TCR clone 237134 (TRBV23-1, TRBJ2-5)
CASSFLRSQETQYF

SEQ ID NO: 474269 - protein, 15 aa, Homo sapiens
  CDR3 for alpha chain variable domain of TCR clone 237135 (TRAV13-2, TRAJ8)
CAENRGNTGFQKLVF

SEQ ID NO: 474270 - protein, 14 aa, Homo sapiens
  CDR3 for beta chain variable domain of TCR clone 237135 (TRBV5-4, TRBJ2-1)
CASSLDQGLNEQFF

SEQ ID NO: 474271 - protein, 14 aa, Homo sapiens
  CDR3 for alpha chain variable domain of TCR clone 237136 (TRAV27, TRAJ12)
CAVRNGDSSYKLIF

SEQ ID NO: 474272 - protein, 14 aa, Homo sapiens
  CDR3 for beta chain variable domain of TCR clone 237136 (TRBV7-6, TRBJ2-7)
CASSLTGTGNEQYF

SEQ ID NO: 474273 - protein, 15 aa, Homo sapiens
  CDR3 for alpha chain variable domain of TCR clone 237137 (TRAV23/DV6, TRAJ37)
CAAGEGSSNTGKLIF

SEQ ID NO: 474274 - protein, 17 aa, Homo sapiens
  CDR3 for beta chain variable domain of TCR clone 237137 (TRBV20-1, TRBJ2-7)
CSATRGGGVGGVVEQLF

SEQ ID NO: 474275 - protein, 13 aa, Homo sapiens
  CDR3 for alpha chain variable domain of TCR clone 237138 (TRAV12-3, TRAJ9)
CAMRNTGGFKTIF

SEQ ID NO: 474276 - protein, 17 aa, Homo sapiens
  CDR3 for beta chain variable domain of TCR clone 237138 (TRBV11-2, TRBJ2-1)
CASSLYPPGVEYNEQFF

SEQ ID NO: 474277 - protein, 21 aa, Homo sapiens
  CDR3 for alpha chain variable domain of TCR clone 237139 (TRAV6, TRAJ36)
CARQTTSSLGLERDSPLFPIS

SEQ ID NO: 474278 - protein, 14 aa, Homo sapiens
  CDR3 for beta chain variable domain of TCR clone 237139 (TRBV10-2, TRBJ1-5)
CASSSTGRDQPQHF

SEQ ID NO: 474279 - protein, 16 aa, Homo sapiens
  CDR3 for alpha chain variable domain of TCR clone 237140 (TRAV3, TRAJ10)
CAVRDMRAGGGNKHTF

SEQ ID NO: 474280 - protein, 13 aa, Homo sapiens
  CDR3 for beta chain variable domain of TCR clone 237140 (TRBV6-1, TRBJ1-1)
CASSRQGNAEAFF

SEQ ID NO: 474281 - protein, 12 aa, Homo sapiens
  CDR3 for alpha chain variable domain of TCR clone 237141 (TRAV3, TRAJ39)
RAVIERSNMLNF

SEQ ID NO: 474282 - protein, 14 aa, Homo sapiens
  CDR3 for beta chain variable domain of TCR clone 237141 (TRBV7-8, TRBJ2-3)
CASSFPDGQDTQYF

SEQ ID NO: 474283 - protein, 14 aa, Homo sapiens
  CDR3 for alpha chain variable domain of TCR clone 237142 (TRAV8-3, TRAJ39)
CAVGANNAGNMLTF

SEQ ID NO: 474284 - protein, 13 aa, Homo sapiens
  CDR3 for beta chain variable domain of TCR clone 237142 (TRBV11-2, TRBJ2-1)
CASSLGLAGGRFF

SEQ ID NO: 474285 - protein, 16 aa, Homo sapiens
  CDR3 for alpha chain variable domain of TCR clone 237143 (TRAV23/DV6, TRAJ9)
CAASIGGNTGGFKTVF

SEQ ID NO: 474286 - protein, 14 aa, Homo sapiens
  CDR3 for beta chain variable domain of TCR clone 237143 (TRBV9, TRBJ2-7)
CASSVGVGSYEQYF

SEQ ID NO: 474287 - protein, 17 aa, Homo sapiens
  CDR3 for alpha chain variable domain of TCR clone 237144 (TRAV3, TRAJ6)
CAVRDGPRAGGSYIPTF

SEQ ID NO: 474288 - protein, 11 aa, Homo sapiens
  CDR3 for beta chain variable domain of TCR clone 237144 (TRBV2, TRBJ1-2)
CASSPGNGYTF

SEQ ID NO: 474289 - protein, 14 aa, Homo sapiens
  CDR3 for alpha chain variable domain of TCR clone 237145 (TRAV12-2, TRAJ36)
CAVKISAGANNLFF

SEQ ID NO: 474290 - protein, 14 aa, Homo sapiens
  CDR3 for beta chain variable domain of TCR clone 237145 (TRBV25-1, TRBJ1-2)
CASSDTTGVVGYTF

SEQ ID NO: 474291 - protein, 10 aa, Homo sapiens
  CDR3 for alpha chain variable domain of TCR clone 237146 (TRAV30, TRAJ16)
CGTGGQKLLF

SEQ ID NO: 474292 - protein, 13 aa, Homo sapiens
  CDR3 for beta chain variable domain of TCR clone 237146 (TRBV20-1, TRBJ1-1)
CSARGGGNTEAFF

SEQ ID NO: 474293 - protein, 12 aa, Homo sapiens
  CDR3 for alpha chain variable domain of TCR clone 237147 (TRAV8-3, TRAJ41)
CAVGELGYALNF

SEQ ID NO: 474294 - protein, 16 aa, Homo sapiens
  CDR3 for beta chain variable domain of TCR clone 237147 (TRBV7-6, TRBJ2-3)
CASSDSRGEGTDTQYF

SEQ ID NO: 474295 - protein, 11 aa, Homo sapiens
  CDR3 for alpha chain variable domain of TCR clone 237148 (TRAV3, TRAJ21)
CAVGNFNKFYF

SEQ ID NO: 474296 - protein, 15 aa, Homo sapiens
  CDR3 for beta chain variable domain of TCR clone 237148 (TRBV12-4, TRBJ2-1)
CAGSPLSGRNSEQFF

SEQ ID NO: 474297 - protein, 10 aa, Homo sapiens
  CDR3 for alpha chain variable domain of TCR clone 237149 (TRAV13-1, TRAJ42)
CAASLETTIL

SEQ ID NO: 474298 - protein, 13 aa, Homo sapiens
  CDR3 for beta chain variable domain of TCR clone 237149 (TRBV20-1, TRBJ1-1)
CSARGGGNTEAFF

SEQ ID NO: 474299 - protein, 14 aa, Homo sapiens
  CDR3 for alpha chain variable domain of TCR clone 237150 (TRAV8-3, TRAJ17)
CAVGAQTAGNKLTF

SEQ ID NO: 474300 - protein, 14 aa, Homo sapiens
  CDR3 for beta chain variable domain of TCR clone 237150 (TRBV7-2, TRBJ2-7)
CASSPKTSFYEQYF

SEQ ID NO: 474301 - protein, 14 aa, Homo sapiens
  CDR3 for alpha chain variable domain of TCR clone 237151 (TRAV16, TRAJ32)
CALKSGGATNKLIF

SEQ ID NO: 474302 - protein, 13 aa, Homo sapiens
  CDR3 for beta chain variable domain of TCR clone 237151 (TRBV15, TRBJ1-6)
CATSWGLNSPLHF

SEQ ID NO: 474303 - protein, 14 aa, Homo sapiens
  CDR3 for alpha chain variable domain of TCR clone 237152 (TRAV12-2, TRAJ13)
CAVKKTGGYQKVTF

SEQ ID NO: 474304 - protein, 14 aa, Homo sapiens
  CDR3 for beta chain variable domain of TCR clone 237152 (TRBV7-9, TRBJ2-7)
CASSLDRPTDEQYF

SEQ ID NO: 474305 - protein, 13 aa, Homo sapiens
  CDR3 for alpha chain variable domain of TCR clone 237153 (TRAV12-3, TRAJ13)
CAMSSGGYQKVTF

SEQ ID NO: 474306 - protein, 13 aa, Homo sapiens
  CDR3 for beta chain variable domain of TCR clone 237153 (TRBV4-1, TRBJ2-2)
CASSQENTGELFF

SEQ ID NO: 474307 - protein, 16 aa, Homo sapiens
  CDR3 for alpha chain variable domain of TCR clone 237154 (TRAV20, TRAJ10)
CAVLPGLTGGGNKLTF

SEQ ID NO: 474308 - protein, 14 aa, Homo sapiens
  CDR3 for beta chain variable domain of TCR clone 237154 (TRBV19, TRBJ1-5)
CASRAPDSFLSQHF

SEQ ID NO: 474309 - protein, 11 aa, Homo sapiens
  CDR3 for alpha chain variable domain of TCR clone 237155 (TRAV2, TRAJ13)
CASGGYQKVTF

SEQ ID NO: 474310 - protein, 18 aa, Homo sapiens
  CDR3 for beta chain variable domain of TCR clone 237155 (TRBV11-2, TRBJ2-3)
CASSLGGGSRGAPNTQYF

SEQ ID NO: 474311 - protein, 16 aa, Homo sapiens
  CDR3 for alpha chain variable domain of TCR clone 237156 (TRAV3, TRAJ10)
CAVRDGITGGGNKLTF

SEQ ID NO: 474312 - protein, 14 aa, Homo sapiens
  CDR3 for beta chain variable domain of TCR clone 237156 (TRBV20-1, TRBJ2-5)
CSAKGLAGIQTQYF

SEQ ID NO: 474313 - protein, 14 aa, Homo sapiens
  CDR3 for alpha chain variable domain of TCR clone 237157 (TRAV12-2, TRAJ13)
CAVKKTGGHQKVTF

SEQ ID NO: 474314 - protein, 13 aa, Homo sapiens
  CDR3 for beta chain variable domain of TCR clone 237157 (TRBV27, TRBJ2-1)
CASRTLGVGEQFF

SEQ ID NO: 474315 - protein, 17 aa, Homo sapiens
  CDR3 for alpha chain variable domain of TCR clone 237158 (TRAV35, TRAJ28)
CAGLQVYSGARSYQLTF

SEQ ID NO: 474316 - protein, 15 aa, Homo sapiens
  CDR3 for beta chain variable domain of TCR clone 237158 (TRBV2, TRBJ1-2)
CASSEIGGANYGYTF

SEQ ID NO: 474317 - protein, 17 aa, Homo sapiens
  CDR3 for alpha chain variable domain of TCR clone 237159 (TRAV26-1, TRAJ46)
IASSESEKKSSGDKLTF

SEQ ID NO: 474318 - protein, 13 aa, Homo sapiens
  CDR3 for beta chain variable domain of TCR clone 237159 (TRBV12-4, TRBJ2-2)
CASSITGSGELFF

SEQ ID NO: 474319 - protein, 12 aa, Homo sapiens
  CDR3 for alpha chain variable domain of TCR clone 237160 (TRAV12-3, TRAJ5)
CAMDTGRRALTF

SEQ ID NO: 474320 - protein, 13 aa, Homo sapiens
  CDR3 for beta chain variable domain of TCR clone 237160 (TRBV24-1, TRBJ2-2)
CATSDWSTGELFF

SEQ ID NO: 474321 - protein, 15 aa, Homo sapiens
  CDR3 for alpha chain variable domain of TCR clone 237161 (TRAV4, TRAJ39)
CLVGPNNNAGNMLTF

SEQ ID NO: 474322 - protein, 14 aa, Homo sapiens
  CDR3 for beta chain variable domain of TCR clone 237161 (TRBV19, TRBJ2-1)
CASPTFVVSGEQFL

SEQ ID NO: 474323 - protein, 17 aa, Homo sapiens
  CDR3 for alpha chain variable domain of TCR clone 237162 (TRAV16, TRAJ42)
CALSPKLYGGSQGNPIF

SEQ ID NO: 474324 - protein, 17 aa, Homo sapiens
  CDR3 for beta chain variable domain of TCR clone 237162 (TRBV11-2, TRBJ2-1)
CASSLYPPGVEYNEQFF

SEQ ID NO: 474325 - protein, 14 aa, Homo sapiens
  CDR3 for alpha chain variable domain of TCR clone 237163 (TRAV2, TRAJ3)
CAVRPYSSASKIIF

SEQ ID NO: 474326 - protein, 17 aa, Homo sapiens
  CDR3 for beta chain variable domain of TCR clone 237163 (TRBV7-6, TRBJ2-5)
CASSYPQAGDPSETQYF

SEQ ID NO: 474327 - protein, 11 aa, Homo sapiens
  CDR3 for alpha chain variable domain of TCR clone 237164 (TRAV4, TRAJ31)
CLVGDNARLMF

SEQ ID NO: 474328 - protein, 16 aa, Homo sapiens
  CDR3 for beta chain variable domain of TCR clone 237164 (TRBV7-2, TRBJ2-5)
CACSSKWLSGQETQYF

SEQ ID NO: 474329 - protein, 15 aa, Homo sapiens
  CDR3 for alpha chain variable domain of TCR clone 237165 (TRAV36/DV7, TRAJ44)
CAVCRNTGTASKLTF

SEQ ID NO: 474330 - protein, 13 aa, Homo sapiens
  CDR3 for beta chain variable domain of TCR clone 237165 (TRBV18, TRBJ2-3)
CASSTGGTDTQYF

SEQ ID NO: 474331 - protein, 12 aa, Homo sapiens
  CDR3 for alpha chain variable domain of TCR clone 237166 (TRAV12-3, TRAJ17)
CAMTLTGNKLIF

SEQ ID NO: 474332 - protein, 13 aa, Homo sapiens
  CDR3 for beta chain variable domain of TCR clone 237166 (TRBV19, TRBJ2-7)
CASSIDRTYEQYF

SEQ ID NO: 474333 - protein, 14 aa, Homo sapiens
  CDR3 for alpha chain variable domain of TCR clone 237167 (TRAV12-3, TRAJ50)
CAMSPKTSYDKVIF

SEQ ID NO: 474334 - protein, 14 aa, Homo sapiens
  CDR3 for beta chain variable domain of TCR clone 237167 (TRBV25-1, TRBJ1-1)
CASTHLGGNTEAFF

SEQ ID NO: 474335 - protein, 15 aa, Homo sapiens
  CDR3 for alpha chain variable domain of TCR clone 237168 (TRAV27, TRAJ17)
CRSTMIKAAGNKLPF

SEQ ID NO: 474336 - protein, 13 aa, Homo sapiens
  CDR3 for beta chain variable domain of TCR clone 237168 (TRBV12-5, TRBJ2-3)
CASGDRQSDTQYF

SEQ ID NO: 474337 - protein, 12 aa, Homo sapiens
  CDR3 for alpha chain variable domain of TCR clone 237169 (TRAV21, TRAJ11)
CAATSGYSTLTF

SEQ ID NO: 474338 - protein, 15 aa, Homo sapiens
  CDR3 for beta chain variable domain of TCR clone 237169 (TRBV7-8, TRBJ1-1)
CASSLGDSRNTEAFF

SEQ ID NO: 474339 - protein, 11 aa, Homo sapiens
  CDR3 for alpha chain variable domain of TCR clone 237170 (TRAV12-3, TRAJ17)
SMTLTGNKLTF

SEQ ID NO: 474340 - protein, 17 aa, Homo sapiens
  CDR3 for beta chain variable domain of TCR clone 237170 (TRBV20-1, TRBJ2-7)
CSARDRVSGWTSSTSGR

SEQ ID NO: 474341 - protein, 12 aa, Homo sapiens
  CDR3 for alpha chain variable domain of TCR clone 237171 (TRAV8-3, TRAJ34)
CAVRGNTDKLIF

SEQ ID NO: 474342 - protein, 16 aa, Homo sapiens
  CDR3 for beta chain variable domain of TCR clone 237171 (TRBV5-1, TRBJ2-3)
CASSLGLAVYTDTQYF

SEQ ID NO: 474343 - protein, 13 aa, Homo sapiens
  CDR3 for alpha chain variable domain of TCR clone 237172 (TRAV13-1, TRAJ4)
FAASIGGYNKLIF

SEQ ID NO: 474344 - protein, 16 aa, Homo sapiens
  CDR3 for beta chain variable domain of TCR clone 237172 (TRBV20-1, TRBJ2-1)
CSAPGLAGSYSDEQFF

SEQ ID NO: 474345 - protein, 12 aa, Homo sapiens
  CDR3 for alpha chain variable domain of TCR clone 237173 (TRAV3, TRAJ20)
CAVRDGDYKLSF

SEQ ID NO: 474346 - protein, 14 aa, Homo sapiens
  CDR3 for beta chain variable domain of TCR clone 237173 (TRBV7-2, TRBJ1-1)
CASSFLTGTTEAFF

SEQ ID NO: 474347 - protein, 11 aa, Homo sapiens
  CDR3 for alpha chain variable domain of TCR clone 237174 (TRAV27, TRAJ20)
CAGLNDYKLSF

SEQ ID NO: 474348 - protein, 15 aa, Homo sapiens
  CDR3 for beta chain variable domain of TCR clone 237174 (TRBV7-2, TRBJ1-2)
CASSPRAGWNYGYTF

SEQ ID NO: 474349 - protein, 17 aa, Homo sapiens
  CDR3 for alpha chain variable domain of TCR clone 237175 (TRAV3, TRAJ6)
CAVRDGARAGGSYIPTF

SEQ ID NO: 474350 - protein, 20 aa, Homo sapiens
  CDR3 for beta chain variable domain of TCR clone 237175 (TRBV28, TRBJ2-1)
CASSPIGRSPGLAGGNEQFF

SEQ ID NO: 474351 - protein, 15 aa, Homo sapiens
  CDR3 for alpha chain variable domain of TCR clone 237176 (TRAV9-2, TRAJ57)
CALRPNQGGSEKLVV

SEQ ID NO: 474352 - protein, 17 aa, Homo sapiens
  CDR3 for beta chain variable domain of TCR clone 237176 (TRBV20-1, TRBJ2-1)
CSAPPRLAGTRYNEQFF

SEQ ID NO: 474353 - protein, 11 aa, Homo sapiens
  CDR3 for alpha chain variable domain of TCR clone 237177 (TRAV21, TRAJ34)
CAVYNNDKLIF

SEQ ID NO: 474354 - protein, 13 aa, Homo sapiens
  CDR3 for beta chain variable domain of TCR clone 237177 (TRBV4-3, TRBJ2-1)
CASGLSVYNEQFF

SEQ ID NO: 474355 - protein, 16 aa, Homo sapiens
  CDR3 for alpha chain variable domain of TCR clone 237178 (TRAV22, TRAJ45)
CAVERGKRGGADGLTF

SEQ ID NO: 474356 - protein, 14 aa, Homo sapiens
  CDR3 for beta chain variable domain of TCR clone 237178 (TRBV25-1, TRBJ1-1)
CASTHLGGNTEAFF

SEQ ID NO: 474357 - protein, 12 aa, Homo sapiens
  CDR3 for alpha chain variable domain of TCR clone 237179 (TRAV29/DV5, TRAJ15)
CASNQAGTALIL

SEQ ID NO: 474358 - protein, 15 aa, Homo sapiens
  CDR3 for beta chain variable domain of TCR clone 237179 (TRBV7-6, TRBJ2-5)
CASSSGLAGVETQYF

SEQ ID NO: 474359 - protein, 14 aa, Homo sapiens
  CDR3 for alpha chain variable domain of TCR clone 237180 (TRAV13-2, TRAJ17)
CAENSKAAGNKLTF

SEQ ID NO: 474360 - protein, 15 aa, Homo sapiens
  CDR3 for beta chain variable domain of TCR clone 237180 (TRBV7-2, TRBJ2-1)
CASSLASGRVNEQFF

SEQ ID NO: 474361 - protein, 11 aa, Homo sapiens
  CDR3 for alpha chain variable domain of TCR clone 237181 (TRAV26-1, TRAJ37)
CIVRVGRKLIF

SEQ ID NO: 474362 - protein, 22 aa, Homo sapiens
  CDR3 for beta chain variable domain of TCR clone 237181 (TRBV7-2, TRBJ2-5)
RRTRPGISVPAACQGGGETQYF

SEQ ID NO: 474363 - protein, 12 aa, Homo sapiens
  CDR3 for alpha chain variable domain of TCR clone 237182 (TRAV2, TRAJ31)
CAVEDNNARLMF

SEQ ID NO: 474364 - protein, 15 aa, Homo sapiens
  CDR3 for beta chain variable domain of TCR clone 237182 (TRBV18, TRBJ2-5)
CASSPDPGLQETQYF

SEQ ID NO: 474365 - protein, 18 aa, Homo sapiens
  CDR3 for alpha chain variable domain of TCR clone 237183 (TRAV13-1, TRAJ52)
CAAKNPNAGGTSYGKLTF

SEQ ID NO: 474366 - protein, 17 aa, Homo sapiens
  CDR3 for beta chain variable domain of TCR clone 237183 (TRBV7-3, TRBJ2-3)
RASSLMKRMRGADTQYF

SEQ ID NO: 474367 - protein, 16 aa, Homo sapiens
  CDR3 for alpha chain variable domain of TCR clone 237184 (TRAV26-1, TRAJ45)
CIVEKYSGGGADGLTF

SEQ ID NO: 474368 - protein, 14 aa, Homo sapiens
  CDR3 for beta chain variable domain of TCR clone 237184 (TRBV7-3, TRBJ1-1)
CASSLKGGNTEAFF

SEQ ID NO: 474369 - protein, 10 aa, Homo sapiens
  CDR3 for alpha chain variable domain of TCR clone 237185 (TRAV26-1, TRAJ23)
CIVRVGLEVW

SEQ ID NO: 474370 - protein, 16 aa, Homo sapiens
  CDR3 for beta chain variable domain of TCR clone 237185 (TRBV19, TRBJ2-1)
CASSKAGPSSYNEQFF

SEQ ID NO: 474371 - protein, 15 aa, Homo sapiens
  CDR3 for alpha chain variable domain of TCR clone 237186 (TRAV17, TRAJ22)
CATVAPSGSARQLTF

SEQ ID NO: 474372 - protein, 16 aa, Homo sapiens
  CDR3 for beta chain variable domain of TCR clone 237186 (TRBV10-3, TRBJ2-7)
CAIRADFADRPYEQYF

SEQ ID NO: 474373 - protein, 14 aa, Homo sapiens
  CDR3 for alpha chain variable domain of TCR clone 237187 (TRAV39, TRAJ54)
CAVVLIQGAQKLVF

SEQ ID NO: 474374 - protein, 13 aa, Homo sapiens
  CDR3 for beta chain variable domain of TCR clone 237187 (TRBV29-1, TRBJ2-5)
CSVGVTSAETQYF

SEQ ID NO: 474375 - protein, 12 aa, Homo sapiens
  CDR3 for alpha chain variable domain of TCR clone 237188 (TRAV16, TRAJ10)
CSRTGGGNKLTF

SEQ ID NO: 474376 - protein, 16 aa, Homo sapiens
  CDR3 for beta chain variable domain of TCR clone 237188 (TRBV7-9, TRBJ2-5)
CASSPSGQGVKGTQYF

SEQ ID NO: 474377 - protein, 14 aa, Homo sapiens
  CDR3 for alpha chain variable domain of TCR clone 237189 (TRAV21, TRAJ21)
WAGKGVGNFNKFYF

SEQ ID NO: 474378 - protein, 13 aa, Homo sapiens
  CDR3 for beta chain variable domain of TCR clone 237189 (TRBV18, TRBJ1-1)
CASSPETKPEAFF

SEQ ID NO: 474379 - protein, 12 aa, Homo sapiens
  CDR3 for alpha chain variable domain of TCR clone 237190 (TRAV1-1, TRAJ8)
CAGGTGFQILVF

SEQ ID NO: 474380 - protein, 16 aa, Homo sapiens
  CDR3 for beta chain variable domain of TCR clone 237190 (TRBV12-5, TRBJ2-5)
CASGPRTSGNQETQYF

SEQ ID NO: 474381 - protein, 13 aa, Homo sapiens
  CDR3 for alpha chain variable domain of TCR clone 237191 (TRAV20, TRAJ49)
CAVKARTGNQFYF

SEQ ID NO: 474382 - protein, 14 aa, Homo sapiens
  CDR3 for beta chain variable domain of TCR clone 237191 (TRBV5-1, TRBJ1-1)
CASSLQGASTEAFF

SEQ ID NO: 474383 - protein, 12 aa, Homo sapiens
  CDR3 for alpha chain variable domain of TCR clone 237192 (TRAV12-3, TRAJ17)
CAMTLTGNKLTF

SEQ ID NO: 474384 - protein, 15 aa, Homo sapiens
  CDR3 for beta chain variable domain of TCR clone 237192 (TRBV20-1, TRBJ2-7)
CSARDRVAAMDEQYF

SEQ ID NO: 474385 - protein, 14 aa, Homo sapiens
  CDR3 for alpha chain variable domain of TCR clone 237193 (TRAV1-1, TRAJ34)
CAVSPSYNTDKLIF

SEQ ID NO: 474386 - protein, 15 aa, Homo sapiens
  CDR3 for beta chain variable domain of TCR clone 237193 (TRBV6-3, TRBJ2-7)
CASSSPVTVFYEQYF

SEQ ID NO: 474387 - protein, 14 aa, Homo sapiens
  CDR3 for alpha chain variable domain of TCR clone 237194 (TRAV26-1, TRAJ45)
CIVRVVGGADGLTF

SEQ ID NO: 474388 - protein, 16 aa, Homo sapiens
  CDR3 for beta chain variable domain of TCR clone 237194 (TRBV7-9, TRBJ1-1)
CARSLTQVRSHTEAFF

SEQ ID NO: 474389 - protein, 18 aa, Homo sapiens
  CDR3 for alpha chain variable domain of TCR clone 237195 (TRAV12-3, TRAJ52)
CAMSQTNAGGTSYGKLTF

SEQ ID NO: 474390 - protein, 17 aa, Homo sapiens
  CDR3 for beta chain variable domain of TCR clone 237195 (TRBV7-3, TRBJ2-3)
CASSLMKRMRGADTQYS

SEQ ID NO: 474391 - protein, 12 aa, Homo sapiens
  CDR3 for alpha chain variable domain of TCR clone 237196 (TRAV12-3, TRAJ17)
CAMTLTGNKLTF

SEQ ID NO: 474392 - protein, 15 aa, Homo sapiens
  CDR3 for beta chain variable domain of TCR clone 237196 (TRBV12-4, TRBJ2-5)
CASTLNSGRGETQYF

SEQ ID NO: 474393 - protein, 12 aa, Homo sapiens
  CDR3 for alpha chain variable domain of TCR clone 237197 (TRAV30, TRAJ43)
CGTEERGNDMRF

SEQ ID NO: 474394 - protein, 17 aa, Homo sapiens
  CDR3 for beta chain variable domain of TCR clone 237197 (TRBV7-2, TRBJ2-3)
CASSLEARGTSTDTQYF

SEQ ID NO: 474395 - protein, 14 aa, Homo sapiens
  CDR3 for alpha chain variable domain of TCR clone 237198 (TRAV17, TRAJ15)
CATDRGQAGTALIF

SEQ ID NO: 474396 - protein, 17 aa, Homo sapiens
  CDR3 for beta chain variable domain of TCR clone 237198 (TRBV29-1, TRBJ2-1)
CSVVGLAGAYSYNDQFF

SEQ ID NO: 474397 - protein, 17 aa, Homo sapiens
  CDR3 for alpha chain variable domain of TCR clone 237199 (TRAV3, TRAJ12)
CAVRDGGRMDSSYKLIF

SEQ ID NO: 474398 - protein, 13 aa, Homo sapiens
  CDR3 for beta chain variable domain of TCR clone 237199 (TRBV20-1, TRBJ1-1)
CSAPLGGGTEAFC

SEQ ID NO: 474399 - protein, 13 aa, Homo sapiens
  CDR3 for alpha chain variable domain of TCR clone 237200 (TRAV21, TRAJ27)
CAQWGGNTGKSTF

SEQ ID NO: 474400 - protein, 14 aa, Homo sapiens
  CDR3 for beta chain variable domain of TCR clone 237200 (TRBV2, TRBJ2-3)
CAVGGTISTDTQYF

SEQ ID NO: 474401 - protein, 16 aa, Homo sapiens
  CDR3 for alpha chain variable domain of TCR clone 237201 (TRAV17, TRAJ53)
CATDALSGGSNYKLTF

SEQ ID NO: 474402 - protein, 16 aa, Homo sapiens
  CDR3 for beta chain variable domain of TCR clone 237201 (TRBV20-1, TRBJ1-4)
CSAPGQGLLTKEKLFF

SEQ ID NO: 474403 - protein, 17 aa, Homo sapiens
  CDR3 for alpha chain variable domain of TCR clone 237202 (TRAV3, TRAJ6)
CAVRDGPRAVGSYIPTF

SEQ ID NO: 474404 - protein, 15 aa, Homo sapiens
  CDR3 for beta chain variable domain of TCR clone 237202 (TRBV29-1, TRBJ2-5)
CSVEGLAVNQETQYF

SEQ ID NO: 474405 - protein, 16 aa, Homo sapiens
  CDR3 for alpha chain variable domain of TCR clone 237203 (TRAV30, TRAJ24)
CGTEIVDADCWGKFQF

SEQ ID NO: 474406 - protein, 17 aa, Homo sapiens
  CDR3 for beta chain variable domain of TCR clone 237203 (TRBV20-1, TRBJ2-1)
CSARDPLAGVWDNEQFF

SEQ ID NO: 474407 - protein, 15 aa, Homo sapiens
  CDR3 for alpha chain variable domain of TCR clone 237204 (TRAV12-2, TRAJ53)
CAVNGGGGSNYKLTF

SEQ ID NO: 474408 - protein, 14 aa, Homo sapiens
  CDR3 for beta chain variable domain of TCR clone 237204 (TRBV7-9, TRBJ2-1)
CASSPRDSLYEQFF

SEQ ID NO: 474409 - protein, 10 aa, Homo sapiens
  CDR3 for alpha chain variable domain of TCR clone 237205 (TRAV17, TRAJ26)
CSLYGQNFVF

SEQ ID NO: 474410 - protein, 13 aa, Homo sapiens
  CDR3 for beta chain variable domain of TCR clone 237205 (TRBV7-9, TRBJ1-2)
CASSLKQNYGYTF

SEQ ID NO: 474411 - protein, 15 aa, Homo sapiens
  CDR3 for alpha chain variable domain of TCR clone 237206 (TRAV8-3, TRAJ40)
CAAPSLGSGTYKYTF

SEQ ID NO: 474412 - protein, 12 aa, Homo sapiens
  CDR3 for beta chain variable domain of TCR clone 237206 (TRBV11-2, TRBJ2-2)
CASSLGGGELFF

SEQ ID NO: 474413 - protein, 13 aa, Homo sapiens
  CDR3 for alpha chain variable domain of TCR clone 237207 (TRAV26-1, TRAJ33)
CIVRVEGNYQLIW

SEQ ID NO: 474414 - protein, 13 aa, Homo sapiens
  CDR3 for beta chain variable domain of TCR clone 237207 (TRBV6-6, TRBJ1-2)
CASSEQGASGYTF

SEQ ID NO: 474415 - protein, 16 aa, Homo sapiens
  CDR3 for alpha chain variable domain of TCR clone 237208 (TRAV17, TRAJ28)
CATASDSGAGSYQLTF

SEQ ID NO: 474416 - protein, 11 aa, Homo sapiens
  CDR3 for beta chain variable domain of TCR clone 237208 (TRBV7-9, TRBJ2-5)
CASSLGETQYF

SEQ ID NO: 474417 - protein, 13 aa, Homo sapiens
  CDR3 for alpha chain variable domain of TCR clone 237209 (TRAV8-3, TRAJ28)
CAVGAVGSYQLTF

SEQ ID NO: 474418 - protein, 14 aa, Homo sapiens
  CDR3 for beta chain variable domain of TCR clone 237209 (TRBV5-5, TRBJ2-5)
CASTPTGVMETQYF

SEQ ID NO: 474419 - protein, 12 aa, Homo sapiens
  CDR3 for alpha chain variable domain of TCR clone 237210 (TRAV13-1, TRAJ27)
CAAHTNAGNQPL

SEQ ID NO: 474420 - protein, 14 aa, Homo sapiens
  CDR3 for beta chain variable domain of TCR clone 237210 (TRBV19, TRBJ2-2)
CAISGQGIAGELFF

SEQ ID NO: 474421 - protein, 13 aa, Homo sapiens
  CDR3 for alpha chain variable domain of TCR clone 237211 (TRAV12-1, TRAJ31)
CVVNMNNTARLMF

SEQ ID NO: 474422 - protein, 15 aa, Homo sapiens
  CDR3 for beta chain variable domain of TCR clone 237211 (TRBV4-1, TRBJ1-2)
CASSQGQGAAYGYTF

SEQ ID NO: 474423 - protein, 12 aa, Homo sapiens
  CDR3 for alpha chain variable domain of TCR clone 237212 (TRAV13-1, TRAJ9)
CASHTGGFKTIF

SEQ ID NO: 474424 - protein, 18 aa, Homo sapiens
  CDR3 for beta chain variable domain of TCR clone 237212 (TRBV11-2, TRBJ2-3)
CASSLGGASWGAPNTQYF

SEQ ID NO: 474425 - protein, 15 aa, Homo sapiens
  CDR3 for alpha chain variable domain of TCR clone 237213 (TRAV8-2, TRAJ42)
CVVSCYGGSQGNLIF

SEQ ID NO: 474426 - protein, 17 aa, Homo sapiens
  CDR3 for beta chain variable domain of TCR clone 237213 (TRBV2, TRBJ2-6)
CASSLQGRSSGANVLTF

SEQ ID NO: 474427 - protein, 18 aa, Homo sapiens
  CDR3 for alpha chain variable domain of TCR clone 237214 (TRAV13-1, TRAJ52)
CAADFPNAGGTSYGTLTF

SEQ ID NO: 474428 - protein, 14 aa, Homo sapiens
  CDR3 for beta chain variable domain of TCR clone 237214 (TRBV11-2, TRBJ2-3)
CASSLYAGRDTQYF

SEQ ID NO: 474429 - protein, 13 aa, Homo sapiens
  CDR3 for alpha chain variable domain of TCR clone 237215 (TRAV21, TRAJ57)
CAVTQGGPEKLVF

SEQ ID NO: 474430 - protein, 16 aa, Homo sapiens
  CDR3 for beta chain variable domain of TCR clone 237215 (TRBV29-1, TRBJ2-7)
FSVEDAEDGTAYEQYF

SEQ ID NO: 474431 - protein, 16 aa, Homo sapiens
  CDR3 for alpha chain variable domain of TCR clone 237216 (TRAV8-3, TRAJ22)
CAVDLLGPGSARQLTF

SEQ ID NO: 474432 - protein, 14 aa, Homo sapiens
  CDR3 for beta chain variable domain of TCR clone 237216 (TRBV11-2, TRBJ2-7)
CASGLELEGYEQYF

SEQ ID NO: 474433 - protein, 15 aa, Homo sapiens
  CDR3 for alpha chain variable domain of TCR clone 237217 (TRAV26-1, TRAJ29)
CIVRVDGSGNTPLVF

SEQ ID NO: 474434 - protein, 15 aa, Homo sapiens
  CDR3 for beta chain variable domain of TCR clone 237217 (TRBV7-9, TRBJ1-5)
CASSQGHQPDQPQHF

SEQ ID NO: 474435 - protein, 14 aa, Homo sapiens
  CDR3 for alpha chain variable domain of TCR clone 237218 (TRAV1-2, TRAJ16)
CAVNRFSYGQKLLF

SEQ ID NO: 474436 - protein, 15 aa, Homo sapiens
  CDR3 for beta chain variable domain of TCR clone 237218 (TRBV27, TRBJ2-3)
CASRSLAGVIDTQYF

SEQ ID NO: 474437 - protein, 14 aa, Homo sapiens
  CDR3 for alpha chain variable domain of TCR clone 237219 (TRAV12-2, TRAJ13)
CAVKKTGGYQKVTF

SEQ ID NO: 474438 - protein, 15 aa, Homo sapiens
  CDR3 for beta chain variable domain of TCR clone 237219 (TRBV11-2, TRBJ1-1)
CASSLGKRGNTEAFF

SEQ ID NO: 474439 - protein, 16 aa, Homo sapiens
  CDR3 for alpha chain variable domain of TCR clone 237220 (TRAV30, TRAJ24)
CGTGIVDADSWGKFQF

SEQ ID NO: 474440 - protein, 16 aa, Homo sapiens
  CDR3 for beta chain variable domain of TCR clone 237220 (TRBV7-3, TRBJ2-3)
ELSLMKRMRGADTQYF

SEQ ID NO: 474441 - protein, 14 aa, Homo sapiens
  CDR3 for alpha chain variable domain of TCR clone 237221 (TRAV16, TRAJ33)
CALSAMDSNYQLIW

SEQ ID NO: 474442 - protein, 13 aa, Homo sapiens
  CDR3 for beta chain variable domain of TCR clone 237221 (TRBV7-7, TRBJ1-1)
CASSLGANTEAFF

SEQ ID NO: 474443 - protein, 10 aa, Homo sapiens
  CDR3 for alpha chain variable domain of TCR clone 237222 (TRAV38-1, TRAJ34)
CALYTDKLIF

SEQ ID NO: 474444 - protein, 15 aa, Homo sapiens
  CDR3 for beta chain variable domain of TCR clone 237222 (TRBV28, TRBJ2-5)
CASSPPGSYQETQYF

SEQ ID NO: 474445 - protein, 14 aa, Homo sapiens
  CDR3 for alpha chain variable domain of TCR clone 237223 (TRAV8-3, TRAJ30)
CSVGDMNRDDKIIF

SEQ ID NO: 474446 - protein, 17 aa, Homo sapiens
  CDR3 for beta chain variable domain of TCR clone 237223 (TRBV19, TRBJ2-2)
CASSRNPGGFGTGELFF

SEQ ID NO: 474447 - protein, 19 aa, Homo sapiens
  CDR3 for alpha chain variable domain of TCR clone 237224 (TRAV2, TRAJ20)
ILQVREADAAVYRDCKLSF

SEQ ID NO: 474448 - protein, 13 aa, Homo sapiens
  CDR3 for beta chain variable domain of TCR clone 237224 (TRBV2, TRBJ2-5)
CASGTPYQETQYF

SEQ ID NO: 474449 - protein, 12 aa, Homo sapiens
  CDR3 for alpha chain variable domain of TCR clone 237225 (TRAV8-3, TRAJ20)
CAVDFNDYKLSF

SEQ ID NO: 474450 - protein, 18 aa, Homo sapiens
  CDR3 for beta chain variable domain of TCR clone 237225 (TRBV2, TRBJ2-1)
CASRGLAGGPRTYNEQFF

SEQ ID NO: 474451 - protein, 16 aa, Homo sapiens
  CDR3 for alpha chain variable domain of TCR clone 237226 (TRAV12-2, TRAJ32)
CAVNMNYGGATTKLIF

SEQ ID NO: 474452 - protein, 16 aa, Homo sapiens
  CDR3 for beta chain variable domain of TCR clone 237226 (TRBV7-8, TRBJ2-3)
CASSTEGQRETDTQYF

SEQ ID NO: 474453 - protein, 14 aa, Homo sapiens
  CDR3 for alpha chain variable domain of TCR clone 237227 (TRAV38-1, TRAJ40)
CALRPTSGTYKYIF

SEQ ID NO: 474454 - protein, 11 aa, Homo sapiens
  CDR3 for beta chain variable domain of TCR clone 237227 (TRBV19, TRBJ1-1)
CASSIGSEAFF

SEQ ID NO: 474455 - protein, 12 aa, Homo sapiens
  CDR3 for alpha chain variable domain of TCR clone 237228 (TRAV2, TRAJ8)
CAVGQGFQKLVF

SEQ ID NO: 474456 - protein, 13 aa, Homo sapiens
  CDR3 for beta chain variable domain of TCR clone 237228 (TRBV12-4, TRBJ1-1)
CASSPGTGFEAFF

SEQ ID NO: 474457 - protein, 15 aa, Homo sapiens
  CDR3 for alpha chain variable domain of TCR clone 237229 (TRAV6, TRAJ13)
CALGGDSGGYQKVTF

SEQ ID NO: 474458 - protein, 12 aa, Homo sapiens
  CDR3 for beta chain variable domain of TCR clone 237229 (TRBV5-7, TRBJ1-2)
CASSDRIHGDTF

SEQ ID NO: 474459 - protein, 21 aa, Homo sapiens
  CDR3 for alpha chain variable domain of TCR clone 237230 (TRAV13-1, TRAJ26)
SLHITETQPEDSAGYFCAIVF

SEQ ID NO: 474460 - protein, 15 aa, Homo sapiens
  CDR3 for beta chain variable domain of TCR clone 237230 (TRBV12-4, TRBJ2-1)
CASSLLGRTYNEQFF

SEQ ID NO: 474461 - protein, 12 aa, Homo sapiens
  CDR3 for alpha chain variable domain of TCR clone 237231 (TRAV13-1, TRAJ21)
CAPTINFNKFYF

SEQ ID NO: 474462 - protein, 14 aa, Homo sapiens
  CDR3 for beta chain variable domain of TCR clone 237231 (TRBV7-2, TRBJ2-7)
CASSPKTSFYEQYF

SEQ ID NO: 474463 - protein, 14 aa, Homo sapiens
  CDR3 for alpha chain variable domain of TCR clone 237232 (TRAV29/DV5, TRAJ20)
CAASAPIEDYKLSL

SEQ ID NO: 474464 - protein, 16 aa, Homo sapiens
  CDR3 for beta chain variable domain of TCR clone 237232 (TRBV11-3, TRBJ2-5)
CASSSVVAGSTETQYF

SEQ ID NO: 474465 - protein, 14 aa, Homo sapiens
  CDR3 for alpha chain variable domain of TCR clone 237233 (TRAV27, TRAJ36)
CAGPSKRGANNLFF

SEQ ID NO: 474466 - protein, 15 aa, Homo sapiens
  CDR3 for beta chain variable domain of TCR clone 237233 (TRBV18, TRBJ2-7)
CASSPASTPNYEQYF

SEQ ID NO: 474467 - protein, 11 aa, Homo sapiens
  CDR3 for alpha chain variable domain of TCR clone 237234 (TRAV12-2, TRAJ33)
CAVGSNYQLIW

SEQ ID NO: 474468 - protein, 17 aa, Homo sapiens
  CDR3 for beta chain variable domain of TCR clone 237234 (TRBV11-2, TRBJ2-1)
CASSLYPPGVEYNEQFF

SEQ ID NO: 474469 - protein, 16 aa, Homo sapiens
  CDR3 for alpha chain variable domain of TCR clone 237235 (TRAV1-2, TRAJ6)
CAVRDQGTGGSYIPTF

SEQ ID NO: 474470 - protein, 13 aa, Homo sapiens
  CDR3 for beta chain variable domain of TCR clone 237235 (TRBV28, TRBJ2-7)
CASTAGLAGEQYF

SEQ ID NO: 474471 - protein, 15 aa, Homo sapiens
  CDR3 for alpha chain variable domain of TCR clone 237236 (TRAV2, TRAJ9)
CAVEDRGTGGFKTIF

SEQ ID NO: 474472 - protein, 11 aa, Homo sapiens
  CDR3 for beta chain variable domain of TCR clone 237236 (TRBV7-8, TRBJ2-7)
CASSLSLEQYF

SEQ ID NO: 474473 - protein, 13 aa, Homo sapiens
  CDR3 for alpha chain variable domain of TCR clone 237237 (TRAV20, TRAJ48)
CAVHIFGNEKLTF

SEQ ID NO: 474474 - protein, 15 aa, Homo sapiens
  CDR3 for beta chain variable domain of TCR clone 237237 (TRBV6-5, TRBJ2-6)
CASSQWEAGANVLTF

SEQ ID NO: 474475 - protein, 14 aa, Homo sapiens
  CDR3 for alpha chain variable domain of TCR clone 237238 (TRAV17, TRAJ16)
CATADFSDGQKLPF

SEQ ID NO: 474476 - protein, 18 aa, Homo sapiens
  CDR3 for beta chain variable domain of TCR clone 237238 (TRBV19, TRBJ1-5)
CASSKGQVSIHSNQPQHF

SEQ ID NO: 474477 - protein, 16 aa, Homo sapiens
  CDR3 for alpha chain variable domain of TCR clone 237239 (TRAV12-3, TRAJ53)
CAMSPGGGGSNCKLTF

SEQ ID NO: 474478 - protein, 11 aa, Homo sapiens
  CDR3 for beta chain variable domain of TCR clone 237239 (TRBV29-1, TRBJ2-5)
CSEDRTGTQYF

SEQ ID NO: 474479 - protein, 17 aa, Homo sapiens
  CDR3 for alpha chain variable domain of TCR clone 237240 (TRAV12-2, TRAJ42)
CAVNILNYGGSQGNLIF

SEQ ID NO: 474480 - protein, 11 aa, Homo sapiens
  CDR3 for beta chain variable domain of TCR clone 237240 (TRBV13, TRBJ2-3)
CASGNADTQYF

SEQ ID NO: 474481 - protein, 12 aa, Homo sapiens
  CDR3 for alpha chain variable domain of TCR clone 237241 (TRAV21, TRAJ27)
CAANTNAVKSTF

SEQ ID NO: 474482 - protein, 15 aa, Homo sapiens
  CDR3 for beta chain variable domain of TCR clone 237241 (TRBV29-1, TRBJ1-4)
CSVVGIGDFNEKLFF

SEQ ID NO: 474483 - protein, 14 aa, Homo sapiens
  CDR3 for alpha chain variable domain of TCR clone 237242 (TRAV13-2, TRAJ22)
CADGTLGSARQPTF

SEQ ID NO: 474484 - protein, 16 aa, Homo sapiens
  CDR3 for beta chain variable domain of TCR clone 237242 (TRBV19, TRBJ2-1)
CAGSSKGTRSYNEQFF

SEQ ID NO: 474485 - protein, 15 aa, Homo sapiens
  CDR3 for alpha chain variable domain of TCR clone 237243 (TRAV12-3, TRAJ17)
CAMSPSLAAGNKLTF

SEQ ID NO: 474486 - protein, 13 aa, Homo sapiens
  CDR3 for beta chain variable domain of TCR clone 237243 (TRBV12-4, TRBJ2-7)
CASSPTETYEQYF

SEQ ID NO: 474487 - protein, 14 aa, Homo sapiens
  CDR3 for alpha chain variable domain of TCR clone 237244 (TRAV1-2, TRAJ16)
CAVNRFSDVQKLLF

SEQ ID NO: 474488 - protein, 12 aa, Homo sapiens
  CDR3 for beta chain variable domain of TCR clone 237244 (TRBV5-1, TRBJ2-7)
CASSSTTYEQYF

SEQ ID NO: 474489 - protein, 14 aa, Homo sapiens
  CDR3 for alpha chain variable domain of TCR clone 237245 (TRAV9-2, TRAJ39)
WALYIYNAGNMLTF

SEQ ID NO: 474490 - protein, 15 aa, Homo sapiens
  CDR3 for beta chain variable domain of TCR clone 237245 (TRBV15, TRBJ2-7)
CATSRDRSPRNEQYF

SEQ ID NO: 474491 - protein, 14 aa, Homo sapiens
  CDR3 for alpha chain variable domain of TCR clone 237246 (TRAV17, TRAJ54)
CATDANQGAQKLVF

SEQ ID NO: 474492 - protein, 16 aa, Homo sapiens
  CDR3 for beta chain variable domain of TCR clone 237246 (TRBV15, TRBJ2-1)
CATSRNLAGGYNEQFF

SEQ ID NO: 474493 - protein, 12 aa, Homo sapiens
  CDR3 for alpha chain variable domain of TCR clone 237247 (TRAV12-2, TRAJ31)
CAVNTPDARHMF

SEQ ID NO: 474494 - protein, 17 aa, Homo sapiens
  CDR3 for beta chain variable domain of TCR clone 237247 (TRBV20-1, TRBJ1-6)
CSARGGYTFAYNSPLHF

SEQ ID NO: 474495 - protein, 11 aa, Homo sapiens
  CDR3 for alpha chain variable domain of TCR clone 237248 (TRAV12-1, TRAJ33)
CVVNSNYQLIW

SEQ ID NO: 474496 - protein, 20 aa, Homo sapiens
  CDR3 for beta chain variable domain of TCR clone 237248 (TRBV7-8, TRBJ2-2)
CASSHLFPGPTIHITGELFF

SEQ ID NO: 474497 - protein, 10 aa, Homo sapiens
  CDR3 for alpha chain variable domain of TCR clone 237249 (TRAV1-2, TRAJ20)
CALNDYKLSF

SEQ ID NO: 474498 - protein, 15 aa, Homo sapiens
  CDR3 for beta chain variable domain of TCR clone 237249 (TRBV4-1, TRBJ1-4)
CASSDTGGTNEKLFF

SEQ ID NO: 474499 - protein, 12 aa, Homo sapiens
  CDR3 for alpha chain variable domain of TCR clone 237250 (TRAV13-1, TRAJ21)
CAAKEGFNKIYF

SEQ ID NO: 474500 - protein, 19 aa, Homo sapiens
  CDR3 for beta chain variable domain of TCR clone 237250 (TRBV2, TRBJ2-7)
CASSDDETSGRANDYEQYF

SEQ ID NO: 474501 - protein, 15 aa, Homo sapiens
  CDR3 for alpha chain variable domain of TCR clone 237251 (TRAV8-3, TRAJ40)
CAAPSLGPGTCRYIF

SEQ ID NO: 474502 - protein, 16 aa, Homo sapiens
  CDR3 for beta chain variable domain of TCR clone 237251 (TRBV7-3, TRBJ2-3)
CASSLSGYRPEDTQYF

SEQ ID NO: 474503 - protein, 16 aa, Homo sapiens
  CDR3 for alpha chain variable domain of TCR clone 237252 (TRAV3, TRAJ37)
CAVRGKGSGNTGKLIF

SEQ ID NO: 474504 - protein, 13 aa, Homo sapiens
  CDR3 for beta chain variable domain of TCR clone 237252 (TRBV7-3, TRBJ1-1)
CASSQDWGAKAFF

SEQ ID NO: 474505 - protein, 19 aa, Homo sapiens
  CDR3 for alpha chain variable domain of TCR clone 237253 (TRAV3, TRAJ37)
CAVRDIVGGYPSNTGKLIF

SEQ ID NO: 474506 - protein, 13 aa, Homo sapiens
  CDR3 for beta chain variable domain of TCR clone 237253 (TRBV4-2, TRBJ1-1)
CASSQAGNTEAFF

SEQ ID NO: 474507 - protein, 14 aa, Homo sapiens
  CDR3 for alpha chain variable domain of TCR clone 237254 (TRAV8-3, TRAJ39)
CAVGATNAGSMLTF

SEQ ID NO: 474508 - protein, 15 aa, Homo sapiens
  CDR3 for beta chain variable domain of TCR clone 237254 (TRBV4-3, TRBJ1-1)
CASSQELGRGTEAFF

SEQ ID NO: 474509 - protein, 14 aa, Homo sapiens
  CDR3 for alpha chain variable domain of TCR clone 237255 (TRAV27, TRAJ44)
CAASFTGTASKLTF

SEQ ID NO: 474510 - protein, 13 aa, Homo sapiens
  CDR3 for beta chain variable domain of TCR clone 237255 (TRBV27, TRBJ2-3)
CATSIGGLYTQYF

SEQ ID NO: 474511 - protein, 18 aa, Homo sapiens
  CDR3 for alpha chain variable domain of TCR clone 237256 (TRAV12-3, TRAJ52)
CAMSVGGTGGTSYGKLTF

SEQ ID NO: 474512 - protein, 12 aa, Homo sapiens
  CDR3 for beta chain variable domain of TCR clone 237256 (TRBV11-2, TRBJ2-2)
CASSLGGGELFF

SEQ ID NO: 474513 - protein, 15 aa, Homo sapiens
  CDR3 for alpha chain variable domain of TCR clone 237257 (TRAV8-3, TRAJ40)
CAAPSLVSGTYKYIF

SEQ ID NO: 474514 - protein, 13 aa, Homo sapiens
  CDR3 for beta chain variable domain of TCR clone 237257 (TRBV7-3, TRBJ1-1)
CASSQDWGAEDFF

SEQ ID NO: 474515 - protein, 15 aa, Homo sapiens
  CDR3 for alpha chain variable domain of TCR clone 237258 (TRAV17, TRAJ57)
CATGPSQGGSEKLVF

SEQ ID NO: 474516 - protein, 13 aa, Homo sapiens
  CDR3 for beta chain variable domain of TCR clone 237258 (TRBV10-3, TRBJ2-5)
CAMTSGAGETQYS

SEQ ID NO: 474517 - protein, 14 aa, Homo sapiens
  CDR3 for alpha chain variable domain of TCR clone 237259 (TRAV12-3, TRAJ11)
CAMTTNSGYSTLTF

SEQ ID NO: 474518 - protein, 14 aa, Homo sapiens
  CDR3 for beta chain variable domain of TCR clone 237259 (TRBV20-1, TRBJ1-1)
CSAQTRIGGTEAFF

SEQ ID NO: 474519 - protein, 11 aa, Homo sapiens
  CDR3 for alpha chain variable domain of TCR clone 237260 (TRAV1-2, TRAJ40)
CAVPGTYKYIF

SEQ ID NO: 474520 - protein, 17 aa, Homo sapiens
  CDR3 for beta chain variable domain of TCR clone 237260 (TRBV20-1, TRBJ2-1)
CSAPPRLAGKRYNEQFF

SEQ ID NO: 474521 - protein, 15 aa, Homo sapiens
  CDR3 for alpha chain variable domain of TCR clone 237261 (TRAV4, TRAJ10)
CLVGDEEGGGNKLTF

SEQ ID NO: 474522 - protein, 15 aa, Homo sapiens
  CDR3 for beta chain variable domain of TCR clone 237261 (TRBV7-2, TRBJ2-7)
SASSLTGQGTYEQYF

SEQ ID NO: 474523 - protein, 12 aa, Homo sapiens
  CDR3 for alpha chain variable domain of TCR clone 237262 (TRAV13-1, TRAJ49)
CAAPNTGNQFYF

SEQ ID NO: 474524 - protein, 17 aa, Homo sapiens
  CDR3 for beta chain variable domain of TCR clone 237262 (TRBV25-1, TRBJ2-7)
CASSDARVDFSSYEQYF

SEQ ID NO: 474525 - protein, 13 aa, Homo sapiens
  CDR3 for alpha chain variable domain of TCR clone 237263 (TRAV26-1, TRAJ29)
CIVRRSGNTPLVF

SEQ ID NO: 474526 - protein, 13 aa, Homo sapiens
  CDR3 for beta chain variable domain of TCR clone 237263 (TRBV7-9, TRBJ1-2)
CASSLKQNYGYTF

SEQ ID NO: 474527 - protein, 15 aa, Homo sapiens
  CDR3 for alpha chain variable domain of TCR clone 237264 (TRAV8-6, TRAJ6)
CAVSGESGGSYIPTF

SEQ ID NO: 474528 - protein, 20 aa, Homo sapiens
  CDR3 for beta chain variable domain of TCR clone 237264 (TRBV28, TRBJ2-1)
CASTPIGRSPGLAGGNEQFF

SEQ ID NO: 474529 - protein, 14 aa, Homo sapiens
  CDR3 for alpha chain variable domain of TCR clone 237265 (TRAV4, TRAJ9)
CLVGSGTGVFKTIF

SEQ ID NO: 474530 - protein, 15 aa, Homo sapiens
  CDR3 for beta chain variable domain of TCR clone 237265 (TRBV7-2, TRBJ2-1)
CASSLASGRVNEQFF

SEQ ID NO: 474531 - protein, 17 aa, Homo sapiens
  CDR3 for alpha chain variable domain of TCR clone 237266 (TRAV3, TRAJ6)
CAVRDGPRAGGSDKPTF

SEQ ID NO: 474532 - protein, 13 aa, Homo sapiens
  CDR3 for beta chain variable domain of TCR clone 237266 (TRBV19, TRBJ2-7)
CASSIDRTYEQYF

SEQ ID NO: 474533 - protein, 12 aa, Homo sapiens
  CDR3 for alpha chain variable domain of TCR clone 237267 (TRAV13-2, TRAJ23)
CAERHRGGKLIF

SEQ ID NO: 474534 - protein, 15 aa, Homo sapiens
  CDR3 for beta chain variable domain of TCR clone 237267 (TRBV7-2, TRBJ2-3)
CASSLEQGGTDTQYF

SEQ ID NO: 474535 - protein, 15 aa, Homo sapiens
  CDR3 for alpha chain variable domain of TCR clone 237268 (TRAV2, TRAJ15)
CAVEDRGRAGTALIF

SEQ ID NO: 474536 - protein, 15 aa, Homo sapiens
  CDR3 for beta chain variable domain of TCR clone 237268 (TRBV5-1, TRBJ1-3)
CASSPDSSSGNTIYF

SEQ ID NO: 474537 - protein, 18 aa, Homo sapiens
  CDR3 for alpha chain variable domain of TCR clone 237269 (TRAV9-2, TRAJ52)
CALSDLNLGGTSYVKLTF

SEQ ID NO: 474538 - protein, 15 aa, Homo sapiens
  CDR3 for beta chain variable domain of TCR clone 237269 (TRBV6-5, TRBJ1-2)
CASSYLLQGGYGYTF

SEQ ID NO: 474539 - protein, 12 aa, Homo sapiens
  CDR3 for alpha chain variable domain of TCR clone 237270 (TRAV12-2, TRAJ10)
WGVTGGGNKLTF

SEQ ID NO: 474540 - protein, 14 aa, Homo sapiens
  CDR3 for beta chain variable domain of TCR clone 237270 (TRBV18, TRBJ2-7)
CASSPRGGDYEQYF

SEQ ID NO: 474541 - protein, 15 aa, Homo sapiens
  CDR3 for alpha chain variable domain of TCR clone 237271 (TRAV12-3, TRAJ6)
CAMSATTGGSYIPTF

SEQ ID NO: 474542 - protein, 14 aa, Homo sapiens
  CDR3 for beta chain variable domain of TCR clone 237271 (TRBV28, TRBJ1-5)
CASSLFPGVQPQHF

SEQ ID NO: 474543 - protein, 15 aa, Homo sapiens
  CDR3 for alpha chain variable domain of TCR clone 237272 (TRAV3, TRAJ3)
CAVRDMSSSASKIIF

SEQ ID NO: 474544 - protein, 13 aa, Homo sapiens
  CDR3 for beta chain variable domain of TCR clone 237272 (TRBV7-9, TRBJ2-3)
CASSPGSTDTQYF

SEQ ID NO: 474545 - protein, 13 aa, Homo sapiens
  CDR3 for alpha chain variable domain of TCR clone 237273 (TRAV36/DV7, TRAJ54)
CAVDIQGAQKLVF

SEQ ID NO: 474546 - protein, 14 aa, Homo sapiens
  CDR3 for beta chain variable domain of TCR clone 237273 (TRBV19, TRBJ2-7)
CASNFRDTFTGMNF

SEQ ID NO: 474547 - protein, 13 aa, Homo sapiens
  CDR3 for alpha chain variable domain of TCR clone 237274 (TRAV20, TRAJ20)
CAVQNPHDYRLSF

SEQ ID NO: 474548 - protein, 12 aa, Homo sapiens
  CDR3 for beta chain variable domain of TCR clone 237274 (TRBV18, TRBJ2-7)
CASSPNNNEQYF

SEQ ID NO: 474549 - protein, 11 aa, Homo sapiens
  CDR3 for alpha chain variable domain of TCR clone 237275 (TRAV12-1, TRAJ15)
CVVNAATALIF

SEQ ID NO: 474550 - protein, 16 aa, Homo sapiens
  CDR3 for beta chain variable domain of TCR clone 237275 (TRBV28, TRBJ2-1)
CASSSRVRDSYNEQFF

SEQ ID NO: 474551 - protein, 16 aa, Homo sapiens
  CDR3 for alpha chain variable domain of TCR clone 237276 (TRAV21, TRAJ37)
CAVRPRGSSNTGKLII

SEQ ID NO: 474552 - protein, 13 aa, Homo sapiens
  CDR3 for beta chain variable domain of TCR clone 237276 (TRBV7-9, TRBJ2-5)
CASLSPGQETQYF

SEQ ID NO: 474553 - protein, 13 aa, Homo sapiens
  CDR3 for alpha chain variable domain of TCR clone 237277 (TRAV2, TRAJ40)
CAAVTSGTYTYIF

SEQ ID NO: 474554 - protein, 12 aa, Homo sapiens
  CDR3 for beta chain variable domain of TCR clone 237277 (TRBV7-3, TRBJ2-1)
CASSFQSGPQFF

SEQ ID NO: 474555 - protein, 12 aa, Homo sapiens
  CDR3 for alpha chain variable domain of TCR clone 237278 (TRAV2, TRAJ31)
CAVEDNNARLMF

SEQ ID NO: 474556 - protein, 16 aa, Homo sapiens
  CDR3 for beta chain variable domain of TCR clone 237278 (TRBV10-3, TRBJ2-1)
CAISGVGDGGGGDQFF

SEQ ID NO: 474557 - protein, 12 aa, Homo sapiens
  CDR3 for alpha chain variable domain of TCR clone 237279 (TRAV8-6, TRAJ4)
CAVSDHPNKLIF

SEQ ID NO: 474558 - protein, 16 aa, Homo sapiens
  CDR3 for beta chain variable domain of TCR clone 237279 (TRBV6-1, TRBJ2-5)
CASSETLDRGAETQYF

SEQ ID NO: 474559 - protein, 16 aa, Homo sapiens
  CDR3 for alpha chain variable domain of TCR clone 237280 (TRAV30, TRAJ24)
CGTEIVDADSWGKLQF

SEQ ID NO: 474560 - protein, 17 aa, Homo sapiens
  CDR3 for beta chain variable domain of TCR clone 237280 (TRBV20-1, TRBJ2-1)
CSAPPRLAGTRYNEQFF

SEQ ID NO: 474561 - protein, 14 aa, Homo sapiens
  CDR3 for alpha chain variable domain of TCR clone 237281 (TRAV1-2, TRAJ8)
CAVREDTGFEKLVF

SEQ ID NO: 474562 - protein, 15 aa, Homo sapiens
  CDR3 for beta chain variable domain of TCR clone 237281 (TRBV7-3, TRBJ2-2)
CASSETGQGTGELFF

SEQ ID NO: 474563 - protein, 15 aa, Homo sapiens
  CDR3 for alpha chain variable domain of TCR clone 237282 (TRAV21, TRAJ45)
CAVSYSGGGADGLTC

SEQ ID NO: 474564 - protein, 13 aa, Homo sapiens
  CDR3 for beta chain variable domain of TCR clone 237282 (TRBV20-1, TRBJ2-5)
CSAATELQETQYF

SEQ ID NO: 474565 - protein, 14 aa, Homo sapiens
  CDR3 for alpha chain variable domain of TCR clone 237283 (TRAV1-1, TRAJ28)
CAAPSGAGSYQLTF

SEQ ID NO: 474566 - protein, 16 aa, Homo sapiens
  CDR3 for beta chain variable domain of TCR clone 237283 (TRBV12-5, TRBJ2-5)
CASGPRTSGNQETQYF

SEQ ID NO: 474567 - protein, 13 aa, Homo sapiens
  CDR3 for alpha chain variable domain of TCR clone 237284 (TRAV12-3, TRAJ13)
CAMSSGGYQEVTF

SEQ ID NO: 474568 - protein, 15 aa, Homo sapiens
  CDR3 for beta chain variable domain of TCR clone 237284 (TRBV5-7, TRBJ1-5)
CASSYGKLWDQPQHF

SEQ ID NO: 474569 - protein, 12 aa, Homo sapiens
  CDR3 for alpha chain variable domain of TCR clone 237285 (TRAV38-1, TRAJ47)
CAFETYGNKRVF

SEQ ID NO: 474570 - protein, 15 aa, Homo sapiens
  CDR3 for beta chain variable domain of TCR clone 237285 (TRBV20-1, TRBJ2-7)
CSARKGLAESYEQYF

SEQ ID NO: 474571 - protein, 13 aa, Homo sapiens
  CDR3 for alpha chain variable domain of TCR clone 237286 (TRAV36/DV7, TRAJ49)
CAVEANTGNQLYF

SEQ ID NO: 474572 - protein, 14 aa, Homo sapiens
  CDR3 for beta chain variable domain of TCR clone 237286 (TRBV12-5, TRBJ2-5)
CASGSRTHQETQYF

SEQ ID NO: 474573 - protein, 16 aa, Homo sapiens
  CDR3 for alpha chain variable domain of TCR clone 237287 (TRAV13-1, TRAJ40)
CAASIATTSGTYKYIF

SEQ ID NO: 474574 - protein, 13 aa, Homo sapiens
  CDR3 for beta chain variable domain of TCR clone 237287 (TRBV19, TRBJ2-2)
CASSIWSTGELFF

SEQ ID NO: 474575 - protein, 14 aa, Homo sapiens
  CDR3 for alpha chain variable domain of TCR clone 237288 (TRAV13-2, TRAJ11)
CAETGNSGYSTLTF

SEQ ID NO: 474576 - protein, 11 aa, Homo sapiens
  CDR3 for beta chain variable domain of TCR clone 237288 (TRBV10-3, TRBJ2-7)
CAISEGPEQYF

SEQ ID NO: 474577 - protein, 15 aa, Homo sapiens
  CDR3 for alpha chain variable domain of TCR clone 237289 (TRAV3, TRAJ5)
CAVRDLDTGRRALTF

SEQ ID NO: 474578 - protein, 14 aa, Homo sapiens
  CDR3 for beta chain variable domain of TCR clone 237289 (TRBV25-1, TRBJ1-1)
CASTHLVGNTEAFF

SEQ ID NO: 474579 - protein, 13 aa, Homo sapiens
  CDR3 for alpha chain variable domain of TCR clone 237290 (TRAV1-2, TRAJ9)
CAALNTGGFKTIF

SEQ ID NO: 474580 - protein, 15 aa, Homo sapiens
  CDR3 for beta chain variable domain of TCR clone 237290 (TRBV9, TRBJ1-6)
CASSVAGTGDSTLHF

SEQ ID NO: 474581 - protein, 10 aa, Homo sapiens
  CDR3 for alpha chain variable domain of TCR clone 237291 (TRAV1-2, TRAJ18)
CAVRGEAPPW

SEQ ID NO: 474582 - protein, 16 aa, Homo sapiens
  CDR3 for beta chain variable domain of TCR clone 237291 (TRBV12-4, TRBJ1-5)
CASSRPVGGSNQPQHF

SEQ ID NO: 474583 - protein, 15 aa, Homo sapiens
  CDR3 for alpha chain variable domain of TCR clone 237292 (TRAV35, TRAJ40)
CAGQLGTSGTYKYIF

SEQ ID NO: 474584 - protein, 14 aa, Homo sapiens
  CDR3 for beta chain variable domain of TCR clone 237292 (TRBV7-2, TRBJ2-7)
CASRSQGAAYEQYF

SEQ ID NO: 474585 - protein, 15 aa, Homo sapiens
  CDR3 for alpha chain variable domain of TCR clone 237293 (TRAV3, TRAJ23)
CAVRDRGNQGGKLIF

SEQ ID NO: 474586 - protein, 15 aa, Homo sapiens
  CDR3 for beta chain variable domain of TCR clone 237293 (TRBV7-3, TRBJ2-1)
CQQLAPSGSYDEQFF

SEQ ID NO: 474587 - protein, 17 aa, Homo sapiens
  CDR3 for alpha chain variable domain of TCR clone 237294 (TRAV3, TRAJ42)
CAVRDRDYGGSQGNLIF

SEQ ID NO: 474588 - protein, 15 aa, Homo sapiens
  CDR3 for beta chain variable domain of TCR clone 237294 (TRBV5-1, TRBJ2-5)
CASSFKGGDQENQYF

SEQ ID NO: 474589 - protein, 19 aa, Homo sapiens
  CDR3 for alpha chain variable domain of TCR clone 237295 (TRAV2, TRAJ20)
ILQVREAGAAVYRDCKLSF

SEQ ID NO: 474590 - protein, 16 aa, Homo sapiens
  CDR3 for beta chain variable domain of TCR clone 237295 (TRBV9, TRBJ2-2)
CASSAMGKGNTGELFF

SEQ ID NO: 474591 - protein, 23 aa, Homo sapiens
  CDR3 for alpha chain variable domain of TCR clone 237296 (TRAV12-2, TRAJ36)
SLLIRDSQPSDSATLERANNLFF

SEQ ID NO: 474592 - protein, 14 aa, Homo sapiens
  CDR3 for beta chain variable domain of TCR clone 237296 (TRBV7-2, TRBJ1-1)
CASSFLTGTTEAFF

SEQ ID NO: 474593 - protein, 15 aa, Homo sapiens
  CDR3 for alpha chain variable domain of TCR clone 237297 (TRAV12-3, TRAJ6)
CAMSATTGGSYIPTF

SEQ ID NO: 474594 - protein, 15 aa, Homo sapiens
  CDR3 for beta chain variable domain of TCR clone 237297 (TRBV7-6, TRBJ1-5)
CASSQSSEINQPQHF

SEQ ID NO: 474595 - protein, 11 aa, Homo sapiens
  CDR3 for alpha chain variable domain of TCR clone 237298 (TRAV8-3, TRAJ15)
CALGPGTALIF

SEQ ID NO: 474596 - protein, 18 aa, Homo sapiens
  CDR3 for beta chain variable domain of TCR clone 237298 (TRBV18, TRBJ2-3)
CASSYTSGAAGGTDTQYF

SEQ ID NO: 474597 - protein, 12 aa, Homo sapiens
  CDR3 for alpha chain variable domain of TCR clone 237299 (TRAV27, TRAJ9)
CAGESGGFKTIF

SEQ ID NO: 474598 - protein, 14 aa, Homo sapiens
  CDR3 for beta chain variable domain of TCR clone 237299 (TRBV20-1, TRBJ1-3)
CSASPTGAGNTIYF

SEQ ID NO: 474599 - protein, 15 aa, Homo sapiens
  CDR3 for alpha chain variable domain of TCR clone 237300 (TRAV19, TRAJ9)
CALSLPDTGGFKTIF

SEQ ID NO: 474600 - protein, 15 aa, Homo sapiens
  CDR3 for beta chain variable domain of TCR clone 237300 (TRBV28, TRBJ2-5)
CASSSGRTIQETQYF

SEQ ID NO: 474601 - protein, 14 aa, Homo sapiens
  CDR3 for alpha chain variable domain of TCR clone 237301 (TRAV20, TRAJ56)
CAVQFGGANSKLTF

SEQ ID NO: 474602 - protein, 14 aa, Homo sapiens
  CDR3 for beta chain variable domain of TCR clone 237301 (TRBV28, TRBJ1-1)
CASSPRTRWAEAFF

SEQ ID NO: 474603 - protein, 23 aa, Homo sapiens
  CDR3 for alpha chain variable domain of TCR clone 237302 (TRAV26-1, TRAJ38)
CIADNAGNNHIQNPDPAVYPLRD

SEQ ID NO: 474604 - protein, 15 aa, Homo sapiens
  CDR3 for beta chain variable domain of TCR clone 237302 (TRBV9, TRBJ2-1)
CASSLAGSSYNEQFF

SEQ ID NO: 474605 - protein, 18 aa, Homo sapiens
  CDR3 for alpha chain variable domain of TCR clone 237303 (TRAV29/DV5, TRAJ52)
CAAGFRGAGGTSYGKLTF

SEQ ID NO: 474606 - protein, 16 aa, Homo sapiens
  CDR3 for beta chain variable domain of TCR clone 237303 (TRBV7-3, TRBJ2-2)
CASSLKRGTLSGDLFF

SEQ ID NO: 474607 - protein, 13 aa, Homo sapiens
  CDR3 for alpha chain variable domain of TCR clone 237304 (TRAV21, TRAJ20)
CAVGLRVDYKLSF

SEQ ID NO: 474608 - protein, 15 aa, Homo sapiens
  CDR3 for beta chain variable domain of TCR clone 237304 (TRBV7-6, TRBJ1-5)
CASSQSSGINQPQHF

SEQ ID NO: 474609 - protein, 15 aa, Homo sapiens
  CDR3 for alpha chain variable domain of TCR clone 237305 (TRAV26-1, TRAJ23)
CIVRVAINQGGKLIF

SEQ ID NO: 474610 - protein, 14 aa, Homo sapiens
  CDR3 for beta chain variable domain of TCR clone 237305 (TRBV7-8, TRBJ2-1)
CASSTETGVNEQFF

SEQ ID NO: 474611 - protein, 14 aa, Homo sapiens
  CDR3 for alpha chain variable domain of TCR clone 237306 (TRAV1-2, TRAJ16)
CAVNRFSDGQNLLF

SEQ ID NO: 474612 - protein, 14 aa, Homo sapiens
  CDR3 for beta chain variable domain of TCR clone 237306 (TRBV10-2, TRBJ1-5)
CASSSTGRNQPQHF

SEQ ID NO: 474613 - protein, 11 aa, Homo sapiens
  CDR3 for alpha chain variable domain of TCR clone 237307 (TRAV12-3, TRAJ43)
CAMSVSNDMRF

SEQ ID NO: 474614 - protein, 14 aa, Homo sapiens
  CDR3 for beta chain variable domain of TCR clone 237307 (TRBV7-2, TRBJ1-1)
CASSHRQGRTEAFF

SEQ ID NO: 474615 - protein, 18 aa, Homo sapiens
  CDR3 for alpha chain variable domain of TCR clone 237308 (TRAV13-1, TRAJ52)
CAAKNPNAGGTSYGKMTF

SEQ ID NO: 474616 - protein, 15 aa, Homo sapiens
  CDR3 for beta chain variable domain of TCR clone 237308 (TRBV28, TRBJ2-3)
CASSPDRQGANTQYF

SEQ ID NO: 474617 - protein, 12 aa, Homo sapiens
  CDR3 for alpha chain variable domain of TCR clone 237309 (TRAV12-1, TRAJ31)
CVFWNNNARLMF

SEQ ID NO: 474618 - protein, 15 aa, Homo sapiens
  CDR3 for beta chain variable domain of TCR clone 237309 (TRBV7-2, TRBJ1-5)
CASSLDRGQDQPQHF

SEQ ID NO: 474619 - protein, 18 aa, Homo sapiens
  CDR3 for alpha chain variable domain of TCR clone 237310 (TRAV13-1, TRAJ52)
CAAKNPNAGGTSYGKLTF

SEQ ID NO: 474620 - protein, 13 aa, Homo sapiens
  CDR3 for beta chain variable domain of TCR clone 237310 (TRBV19, TRBJ1-2)
CASSQGQVYGYTF

SEQ ID NO: 474621 - protein, 18 aa, Homo sapiens
  CDR3 for alpha chain variable domain of TCR clone 237311 (TRAV13-1, TRAJ52)
CAASKRSAGGTSYGKLTF

SEQ ID NO: 474622 - protein, 15 aa, Homo sapiens
  CDR3 for beta chain variable domain of TCR clone 237311 (TRBV6-1, TRBJ1-1)
CASRRGEGQLSEAFF

SEQ ID NO: 474623 - protein, 15 aa, Homo sapiens
  CDR3 for alpha chain variable domain of TCR clone 237312 (TRAV2, TRAJ9)
CAVAALNTGGFKAIF

SEQ ID NO: 474624 - protein, 13 aa, Homo sapiens
  CDR3 for beta chain variable domain of TCR clone 237312 (TRBV5-5, TRBJ1-2)
CASSFWRGEDYTF

SEQ ID NO: 474625 - protein, 11 aa, Homo sapiens
  CDR3 for alpha chain variable domain of TCR clone 237313 (TRAV3, TRAJ21)
CAVGNFNKFYF

SEQ ID NO: 474626 - protein, 16 aa, Homo sapiens
  CDR3 for beta chain variable domain of TCR clone 237313 (TRBV20-1, TRBJ2-6)
CSASSQGYDGANVLTF

SEQ ID NO: 474627 - protein, 15 aa, Homo sapiens
  CDR3 for alpha chain variable domain of TCR clone 237314 (TRAV1-2, TRAJ15)
CAVDVMGSTGTALIF

SEQ ID NO: 474628 - protein, 13 aa, Homo sapiens
  CDR3 for beta chain variable domain of TCR clone 237314 (TRBV7-2, TRBJ2-5)
CASSQTSVETQYV

SEQ ID NO: 474629 - protein, 16 aa, Homo sapiens
  CDR3 for alpha chain variable domain of TCR clone 237315 (TRAV12-1, TRAJ48)
CVVNMVSNFGNEKLTF

SEQ ID NO: 474630 - protein, 18 aa, Homo sapiens
  CDR3 for beta chain variable domain of TCR clone 237315 (TRBV11-2, TRBJ2-6)
CACSLNPFLGTGANVLTF

SEQ ID NO: 474631 - protein, 14 aa, Homo sapiens
  CDR3 for alpha chain variable domain of TCR clone 237316 (TRAV1-1, TRAJ27)
CAVIYNTNAGKSTF

SEQ ID NO: 474632 - protein, 12 aa, Homo sapiens
  CDR3 for beta chain variable domain of TCR clone 237316 (TRBV11-2, TRBJ2-1)
CASSPGHNEQFF

SEQ ID NO: 474633 - protein, 14 aa, Homo sapiens
  CDR3 for alpha chain variable domain of TCR clone 237317 (TRAV26-1, TRAJ39)
CIVRGSRAGNMLTF

SEQ ID NO: 474634 - protein, 14 aa, Homo sapiens
  CDR3 for beta chain variable domain of TCR clone 237317 (TRBV7-9, TRBJ1-5)
CASQGHQPNQPQHF

SEQ ID NO: 474635 - protein, 14 aa, Homo sapiens
  CDR3 for alpha chain variable domain of TCR clone 237318 (TRAV17, TRAJ6)
CATDASGGSYIPTF

SEQ ID NO: 474636 - protein, 16 aa, Homo sapiens
  CDR3 for beta chain variable domain of TCR clone 237318 (TRBV19, TRBJ2-2)
CASRSPGTGATGELFF

SEQ ID NO: 474637 - protein, 14 aa, Homo sapiens
  CDR3 for alpha chain variable domain of TCR clone 237319 (TRAV2, TRAJ9)
CAVEDRSGGFKTIF

SEQ ID NO: 474638 - protein, 15 aa, Homo sapiens
  CDR3 for beta chain variable domain of TCR clone 237319 (TRBV18, TRBJ1-6)
CASSPASAAGSPLHF

SEQ ID NO: 474639 - protein, 19 aa, Homo sapiens
  CDR3 for alpha chain variable domain of TCR clone 237320 (TRAV8-3, TRAJ34)
LSTSVLWVWGLRNTDKLIF

SEQ ID NO: 474640 - protein, 15 aa, Homo sapiens
  CDR3 for beta chain variable domain of TCR clone 237320 (TRBV7-2, TRBJ1-2)
CASSPRAGWNYGYTF

SEQ ID NO: 474641 - protein, 11 aa, Homo sapiens
  CDR3 for alpha chain variable domain of TCR clone 237321 (TRAV12-3, TRAJ11)
CAMKGYSTLTF

SEQ ID NO: 474642 - protein, 14 aa, Homo sapiens
  CDR3 for beta chain variable domain of TCR clone 237321 (TRBV11-2, TRBJ1-1)
CASSFLTGTTEAFF

SEQ ID NO: 474643 - protein, 16 aa, Homo sapiens
  CDR3 for alpha chain variable domain of TCR clone 237322 (TRAV3, TRAJ37)
GAVRGKGSGNTGKLIF

SEQ ID NO: 474644 - protein, 13 aa, Homo sapiens
  CDR3 for beta chain variable domain of TCR clone 237322 (TRBV14, TRBJ2-7)
SASSQDRRYEQYF

SEQ ID NO: 474645 - protein, 14 aa, Homo sapiens
  CDR3 for alpha chain variable domain of TCR clone 237323 (TRAV17, TRAJ57)
CATDPQGGSEKLAF

SEQ ID NO: 474646 - protein, 13 aa, Homo sapiens
  CDR3 for beta chain variable domain of TCR clone 237323 (TRBV10-3, TRBJ2-7)
CASKLAVNYEQYF

SEQ ID NO: 474647 - protein, 13 aa, Homo sapiens
  CDR3 for alpha chain variable domain of TCR clone 237324 (TRAV12-3, TRAJ54)
CALVPQGVQKLVF

SEQ ID NO: 474648 - protein, 15 aa, Homo sapiens
  CDR3 for beta chain variable domain of TCR clone 237324 (TRBV4-1, TRBJ2-2)
CASSQDSRGTGELFF

SEQ ID NO: 474649 - protein, 20 aa, Homo sapiens
  CDR3 for alpha chain variable domain of TCR clone 237325 (TRAV26-1, TRAJ42)
CCVLLHRQTYYGGSQGNLIF

SEQ ID NO: 474650 - protein, 14 aa, Homo sapiens
  CDR3 for beta chain variable domain of TCR clone 237325 (TRBV7-2, TRBJ1-1)
YASSFLTGTTEAFF

SEQ ID NO: 474651 - protein, 14 aa, Homo sapiens
  CDR3 for alpha chain variable domain of TCR clone 237326 (TRAV26-1, TRAJ21)
CIAHTTSTNFTLHL

SEQ ID NO: 474652 - protein, 15 aa, Homo sapiens
  CDR3 for beta chain variable domain of TCR clone 237326 (TRBV20-1, TRBJ2-7)
CSARDRVSGMDEQYF

SEQ ID NO: 474653 - protein, 13 aa, Homo sapiens
  CDR3 for alpha chain variable domain of TCR clone 237327 (TRAV5, TRAJ30)
CAEIANRDDKIIF

SEQ ID NO: 474654 - protein, 13 aa, Homo sapiens
  CDR3 for beta chain variable domain of TCR clone 237327 (TRBV19, TRBJ2-5)
CASSIPYGETQYF

SEQ ID NO: 474655 - protein, 16 aa, Homo sapiens
  CDR3 for alpha chain variable domain of TCR clone 237328 (TRAV30, TRAJ24)
CGTEIVDADSGGKFQF

SEQ ID NO: 474656 - protein, 13 aa, Homo sapiens
  CDR3 for beta chain variable domain of TCR clone 237328 (TRBV7-3, TRBJ1-1)
CASSQDWGAEAFF

SEQ ID NO: 474657 - protein, 14 aa, Homo sapiens
  CDR3 for alpha chain variable domain of TCR clone 237329 (TRAV1-2, TRAJ16)
CAVNRFSDGQKLLF

SEQ ID NO: 474658 - protein, 13 aa, Homo sapiens
  CDR3 for beta chain variable domain of TCR clone 237329 (TRBV19, TRBJ2-5)
CASSIPYGETQYF

SEQ ID NO: 474659 - protein, 10 aa, Homo sapiens
  CDR3 for alpha chain variable domain of TCR clone 237330 (TRAV12-2, TRAJ43)
CAVKVLSMRF

SEQ ID NO: 474660 - protein, 11 aa, Homo sapiens
  CDR3 for beta chain variable domain of TCR clone 237330 (TRBV11-2, TRBJ2-2)
CASSLPGELFF

SEQ ID NO: 474661 - protein, 15 aa, Homo sapiens
  CDR3 for alpha chain variable domain of TCR clone 237331 (TRAV8-4, TRAJ3)
CAVSEPYSSASKITF

SEQ ID NO: 474662 - protein, 11 aa, Homo sapiens
  CDR3 for beta chain variable domain of TCR clone 237331 (TRBV29-1, TRBJ2-5)
CSEDRTGTQYF

SEQ ID NO: 474663 - protein, 12 aa, Homo sapiens
  CDR3 for alpha chain variable domain of TCR clone 237332 (TRAV21, TRAJ58)
CALSASGSRLTF

SEQ ID NO: 474664 - protein, 17 aa, Homo sapiens
  CDR3 for beta chain variable domain of TCR clone 237332 (TRBV13, TRBJ2-3)
CASSLSRVAGGRNTQYF

SEQ ID NO: 474665 - protein, 15 aa, Homo sapiens
  CDR3 for alpha chain variable domain of TCR clone 237333 (TRAV8-3, TRAJ11)
CAVGLLNSGYSTLTF

SEQ ID NO: 474666 - protein, 12 aa, Homo sapiens
  CDR3 for beta chain variable domain of TCR clone 237333 (TRBV7-8, TRBJ2-7)
CASSLGDREQYF

SEQ ID NO: 474667 - protein, 15 aa, Homo sapiens
  CDR3 for alpha chain variable domain of TCR clone 237334 (TRAV34, TRAJ38)
CGADFTPGNNRKLIW

SEQ ID NO: 474668 - protein, 15 aa, Homo sapiens
  CDR3 for beta chain variable domain of TCR clone 237334 (TRBV18, TRBJ2-1)
CASSPPSASYNEQFF

SEQ ID NO: 474669 - protein, 14 aa, Homo sapiens
  CDR3 for alpha chain variable domain of TCR clone 237335 (TRAV26-2, TRAJ32)
CCVGCGGATNKLIF

SEQ ID NO: 474670 - protein, 15 aa, Homo sapiens
  CDR3 for beta chain variable domain of TCR clone 237335 (TRBV27, TRBJ2-5)
CASSLYPRGGETQYF

SEQ ID NO: 474671 - protein, 14 aa, Homo sapiens
  CDR3 for alpha chain variable domain of TCR clone 237336 (TRAV17, TRAJ16)
CATADFSDGQKLLF

SEQ ID NO: 474672 - protein, 15 aa, Homo sapiens
  CDR3 for beta chain variable domain of TCR clone 237336 (TRBV18, TRBJ2-1)
CASLPPSASYNEQFF

SEQ ID NO: 474673 - protein, 12 aa, Homo sapiens
  CDR3 for alpha chain variable domain of TCR clone 237337 (TRAV30, TRAJ43)
CGTEERGNDMRF

SEQ ID NO: 474674 - protein, 12 aa, Homo sapiens
  CDR3 for beta chain variable domain of TCR clone 237337 (TRBV7-2, TRBJ1-6)
CASSLSSSPLHF

SEQ ID NO: 474675 - protein, 14 aa, Homo sapiens
  CDR3 for alpha chain variable domain of TCR clone 237338 (TRAV12-2, TRAJ53)
YAVKGGGSNYKLTF

SEQ ID NO: 474676 - protein, 14 aa, Homo sapiens
  CDR3 for beta chain variable domain of TCR clone 237338 (TRBV7-7, TRBJ2-2)
CATRQDSDTGELFF

SEQ ID NO: 474677 - protein, 13 aa, Homo sapiens
  CDR3 for alpha chain variable domain of TCR clone 237339 (TRAV3, TRAJ21)
CAVREPDFNKFYF

SEQ ID NO: 474678 - protein, 14 aa, Homo sapiens
  CDR3 for beta chain variable domain of TCR clone 237339 (TRBV15, TRBJ2-3)
CATRSGTSTDTQYF

SEQ ID NO: 474679 - protein, 12 aa, Homo sapiens
  CDR3 for alpha chain variable domain of TCR clone 237340 (TRAV17, TRAJ34)
CATDAKGDKLIF

SEQ ID NO: 474680 - protein, 15 aa, Homo sapiens
  CDR3 for beta chain variable domain of TCR clone 237340 (TRBV5-1, TRBJ2-1)
CASSPPRAPYNEQFF

SEQ ID NO: 474681 - protein, 14 aa, Homo sapiens
  CDR3 for alpha chain variable domain of TCR clone 237341 (TRAV17, TRAJ6)
CATDASGGSYIPTF

SEQ ID NO: 474682 - protein, 16 aa, Homo sapiens
  CDR3 for beta chain variable domain of TCR clone 237341 (TRBV12-5, TRBJ2-5)
CASGPRTSGNQETQYF

SEQ ID NO: 474683 - protein, 12 aa, Homo sapiens
  CDR3 for alpha chain variable domain of TCR clone 237342 (TRAV14/DV4, TRAJ9)
CAMNPVGLKTIF

SEQ ID NO: 474684 - protein, 16 aa, Homo sapiens
  CDR3 for beta chain variable domain of TCR clone 237342 (TRBV28, TRBJ2-5)
CASSFSPAGGWETQYF

SEQ ID NO: 474685 - protein, 14 aa, Homo sapiens
  CDR3 for alpha chain variable domain of TCR clone 237343 (TRAV17, TRAJ31)
CATVLRNNNARLMF

SEQ ID NO: 474686 - protein, 19 aa, Homo sapiens
  CDR3 for beta chain variable domain of TCR clone 237343 (TRBV4-3, TRBJ2-7)
CASSQEFIGWQVTPYEQYF

SEQ ID NO: 474687 - protein, 12 aa, Homo sapiens
  CDR3 for alpha chain variable domain of TCR clone 237344 (TRAV2, TRAJ9)
CAVGAGGFKTIF

SEQ ID NO: 474688 - protein, 14 aa, Homo sapiens
  CDR3 for beta chain variable domain of TCR clone 237344 (TRBV6-1, TRBJ1-3)
CASVQGGGGNTLYF

SEQ ID NO: 474689 - protein, 16 aa, Homo sapiens
  CDR3 for alpha chain variable domain of TCR clone 237345 (TRAV30, TRAJ24)
CGTEIVDADSWGKFQF

SEQ ID NO: 474690 - protein, 19 aa, Homo sapiens
  CDR3 for beta chain variable domain of TCR clone 237345 (TRBV7-2, TRBJ2-3)
CASSFLSRNWGGGTDTRYF

SEQ ID NO: 474691 - protein, 12 aa, Homo sapiens
  CDR3 for alpha chain variable domain of TCR clone 237346 (TRAV2, TRAJ31)
CAVEDNNARLMF

SEQ ID NO: 474692 - protein, 16 aa, Homo sapiens
  CDR3 for beta chain variable domain of TCR clone 237346 (TRBV7-2, TRBJ2-6)
CASSLAGRSGANVLTF

SEQ ID NO: 474693 - protein, 14 aa, Homo sapiens
  CDR3 for alpha chain variable domain of TCR clone 237347 (TRAV25, TRAJ22)
CAVRSSGFARQLTF

SEQ ID NO: 474694 - protein, 16 aa, Homo sapiens
  CDR3 for beta chain variable domain of TCR clone 237347 (TRBV4-2, TRBJ1-1)
CASSPSPGRAAPEAFF

SEQ ID NO: 474695 - protein, 12 aa, Homo sapiens
  CDR3 for alpha chain variable domain of TCR clone 237348 (TRAV21, TRAJ23)
CAVMLQGGKLIF

SEQ ID NO: 474696 - protein, 16 aa, Homo sapiens
  CDR3 for beta chain variable domain of TCR clone 237348 (TRBV24-1, TRBJ2-3)
CATSDPGTGATDTQYF

SEQ ID NO: 474697 - protein, 14 aa, Homo sapiens
  CDR3 for alpha chain variable domain of TCR clone 237349 (TRAV12-2, TRAJ40)
CALKIPSGTYKYIF

SEQ ID NO: 474698 - protein, 17 aa, Homo sapiens
  CDR3 for beta chain variable domain of TCR clone 237349 (TRBV20-1, TRBJ2-1)
CSAFSGTSGSLYNEQFF

SEQ ID NO: 474699 - protein, 15 aa, Homo sapiens
  CDR3 for alpha chain variable domain of TCR clone 237350 (TRAV8-3, TRAJ27)
CAVGPSKTNAGTSTF

SEQ ID NO: 474700 - protein, 16 aa, Homo sapiens
  CDR3 for beta chain variable domain of TCR clone 237350 (TRBV6-6, TRBJ2-1)
CASSLLSDSSYNEQFF

SEQ ID NO: 474701 - protein, 13 aa, Homo sapiens
  CDR3 for alpha chain variable domain of TCR clone 237351 (TRAV3, TRAJ15)
CAVRDQAGTALIF

SEQ ID NO: 474702 - protein, 14 aa, Homo sapiens
  CDR3 for beta chain variable domain of TCR clone 237351 (TRBV12-4, TRBJ2-7)
CASSLTGRAYEQYF

SEQ ID NO: 474703 - protein, 12 aa, Homo sapiens
  CDR3 for alpha chain variable domain of TCR clone 237352 (TRAV12-3, TRAJ40)
CAVSSGTYKYIF

SEQ ID NO: 474704 - protein, 16 aa, Homo sapiens
  CDR3 for beta chain variable domain of TCR clone 237352 (TRBV19, TRBJ2-1)
CASSKAGPSSYNEQFF

SEQ ID NO: 474705 - protein, 13 aa, Homo sapiens
  CDR3 for alpha chain variable domain of TCR clone 237353 (TRAV2, TRAJ29)
CAAGGPGNTPLVF

SEQ ID NO: 474706 - protein, 14 aa, Homo sapiens
  CDR3 for beta chain variable domain of TCR clone 237353 (TRBV25-1, TRBJ1-1)
CASTHLGGNTEAFF

SEQ ID NO: 474707 - protein, 17 aa, Homo sapiens
  CDR3 for alpha chain variable domain of TCR clone 237354 (TRAV3, TRAJ6)
CAVRDGPRAGGSYMPTF

SEQ ID NO: 474708 - protein, 14 aa, Homo sapiens
  CDR3 for beta chain variable domain of TCR clone 237354 (TRBV7-2, TRBJ2-7)
CASGPKTSFYEQYF

SEQ ID NO: 474709 - protein, 16 aa, Homo sapiens
  CDR3 for alpha chain variable domain of TCR clone 237355 (TRAV12-2, TRAJ45)
CAVNRGSGGGADGLTF

SEQ ID NO: 474710 - protein, 14 aa, Homo sapiens
  CDR3 for beta chain variable domain of TCR clone 237355 (TRBV23-1, TRBJ2-2)
EDRGVEKDTGGLFF

SEQ ID NO: 474711 - protein, 14 aa, Homo sapiens
  CDR3 for alpha chain variable domain of TCR clone 237356 (TRAV1-2, TRAJ16)
CAVNRFSDGQKLLF

SEQ ID NO: 474712 - protein, 14 aa, Homo sapiens
  CDR3 for beta chain variable domain of TCR clone 237356 (TRBV7-2, TRBJ1-2)
CASSQTGSTYGDTF

SEQ ID NO: 474713 - protein, 14 aa, Homo sapiens
  CDR3 for alpha chain variable domain of TCR clone 237357 (TRAV1-2, TRAJ16)
FAVNRFSDGQKLLF

SEQ ID NO: 474714 - protein, 12 aa, Homo sapiens
  CDR3 for beta chain variable domain of TCR clone 237357 (TRBV24-1, TRBJ1-1)
CATLYPDTEAFF

SEQ ID NO: 474715 - protein, 16 aa, Homo sapiens
  CDR3 for alpha chain variable domain of TCR clone 237358 (TRAV12-3, TRAJ53)
CAMSPGSGGSNYKLPF

SEQ ID NO: 474716 - protein, 15 aa, Homo sapiens
  CDR3 for beta chain variable domain of TCR clone 237358 (TRBV25-1, TRBJ1-4)
CASSKRIATNEKLFF

SEQ ID NO: 474717 - protein, 15 aa, Homo sapiens
  CDR3 for alpha chain variable domain of TCR clone 237359 (TRAV3, TRAJ5)
CAVRDLDTGRRALTF

SEQ ID NO: 474718 - protein, 11 aa, Homo sapiens
  CDR3 for beta chain variable domain of TCR clone 237359 (TRBV12-4, TRBJ2-3)
CASTATDTQCF

SEQ ID NO: 474719 - protein, 14 aa, Homo sapiens
  CDR3 for alpha chain variable domain of TCR clone 237360 (TRAV1-2, TRAJ16)
CAVNRFSDGQKLLF

SEQ ID NO: 474720 - protein, 14 aa, Homo sapiens
  CDR3 for beta chain variable domain of TCR clone 237360 (TRBV4-1, TRBJ2-5)
CASSRSGSGETQYF

SEQ ID NO: 474721 - protein, 13 aa, Homo sapiens
  CDR3 for alpha chain variable domain of TCR clone 237361 (TRAV3, TRAJ27)
CAVRPLGAGKSTF

SEQ ID NO: 474722 - protein, 17 aa, Homo sapiens
  CDR3 for beta chain variable domain of TCR clone 237361 (TRBV24-1, TRBJ2-1)
CATSDVSTSGTYNEQFF

SEQ ID NO: 474723 - protein, 15 aa, Homo sapiens
  CDR3 for alpha chain variable domain of TCR clone 237362 (TRAV12-3, TRAJ13)
CAMSARSGGYQKVTF

SEQ ID NO: 474724 - protein, 18 aa, Homo sapiens
  CDR3 for beta chain variable domain of TCR clone 237362 (TRBV3-1, TRBJ2-7)
CASSQEGGGRSWHYEQCF

SEQ ID NO: 474725 - protein, 15 aa, Homo sapiens
  CDR3 for alpha chain variable domain of TCR clone 237363 (TRAV12-2, TRAJ9)
CAVNGGYTGGFKTIF

SEQ ID NO: 474726 - protein, 13 aa, Homo sapiens
  CDR3 for beta chain variable domain of TCR clone 237363 (TRBV7-2, TRBJ2-2)
CASSLAVTGELFF

SEQ ID NO: 474727 - protein, 14 aa, Homo sapiens
  CDR3 for alpha chain variable domain of TCR clone 237364 (TRAV1-2, TRAJ8)
CAVREDTGFQKPVF

SEQ ID NO: 474728 - protein, 12 aa, Homo sapiens
  CDR3 for beta chain variable domain of TCR clone 237364 (TRBV14, TRBJ2-5)
CASSQLKETQYF

SEQ ID NO: 474729 - protein, 17 aa, Homo sapiens
  CDR3 for alpha chain variable domain of TCR clone 237365 (TRAV3, TRAJ6)
CAVRDGPRAGGSYIPTC

SEQ ID NO: 474730 - protein, 13 aa, Homo sapiens
  CDR3 for beta chain variable domain of TCR clone 237365 (TRBV7-9, TRBJ2-3)
CASSPGSTDTQYF

SEQ ID NO: 474731 - protein, 13 aa, Homo sapiens
  CDR3 for alpha chain variable domain of TCR clone 237366 (TRAV12-1, TRAJ31)
CVVIPNNNARLMF

SEQ ID NO: 474732 - protein, 17 aa, Homo sapiens
  CDR3 for beta chain variable domain of TCR clone 237366 (TRBV4-1, TRBJ2-7)
CASSRDPLGVRGGEQYF

SEQ ID NO: 474733 - protein, 12 aa, Homo sapiens
  CDR3 for alpha chain variable domain of TCR clone 237367 (TRAV27, TRAJ35)
CAEQTLGMCCIA

SEQ ID NO: 474734 - protein, 16 aa, Homo sapiens
  CDR3 for beta chain variable domain of TCR clone 237367 (TRBV6-1, TRBJ2-1)
CASILRQGSSYNEQFF

SEQ ID NO: 474735 - protein, 15 aa, Homo sapiens
  CDR3 for alpha chain variable domain of TCR clone 237368 (TRAV27, TRAJ38)
CAARRNAGNNRKLIW

SEQ ID NO: 474736 - protein, 13 aa, Homo sapiens
  CDR3 for beta chain variable domain of TCR clone 237368 (TRBV10-3, TRBJ2-3)
CAIRDTGADTQYF

SEQ ID NO: 474737 - protein, 15 aa, Homo sapiens
  CDR3 for alpha chain variable domain of TCR clone 237369 (TRAV17, TRAJ4)
CATGTWSGGYNKLIF

SEQ ID NO: 474738 - protein, 13 aa, Homo sapiens
  CDR3 for beta chain variable domain of TCR clone 237369 (TRBV6-6, TRBJ2-7)
CASSPKDLAEQYF

SEQ ID NO: 474739 - protein, 14 aa, Homo sapiens
  CDR3 for alpha chain variable domain of TCR clone 237370 (TRAV20, TRAJ4)
CAVRLGGGYNKLIF

SEQ ID NO: 474740 - protein, 13 aa, Homo sapiens
  CDR3 for beta chain variable domain of TCR clone 237370 (TRBV15, TRBJ2-1)
CVPPAEVDTARFF

SEQ ID NO: 474741 - protein, 16 aa, Homo sapiens
  CDR3 for alpha chain variable domain of TCR clone 237371 (TRAV30, TRAJ24)
CGTEIVDADSWGKFPF

SEQ ID NO: 474742 - protein, 14 aa, Homo sapiens
  CDR3 for beta chain variable domain of TCR clone 237371 (TRBV12-5, TRBJ2-5)
CASGSRTHQETQHF

SEQ ID NO: 474743 - protein, 12 aa, Homo sapiens
  CDR3 for alpha chain variable domain of TCR clone 237372 (TRAV12-3, TRAJ17)
CAMTLTGNKLTF

SEQ ID NO: 474744 - protein, 12 aa, Homo sapiens
  CDR3 for beta chain variable domain of TCR clone 237372 (TRBV7-9, TRBJ1-1)
CASSLVRGEAFF

SEQ ID NO: 474745 - protein, 14 aa, Homo sapiens
  CDR3 for alpha chain variable domain of TCR clone 237373 (TRAV12-2, TRAJ13)
CAVKKTGGYQEITF

SEQ ID NO: 474746 - protein, 15 aa, Homo sapiens
  CDR3 for beta chain variable domain of TCR clone 237373 (TRBV27, TRBJ2-1)
CASSNGGGSSNEQFF

SEQ ID NO: 474747 - protein, 10 aa, Homo sapiens
  CDR3 for alpha chain variable domain of TCR clone 237374 (TRAV12-1, TRAJ37)
ARGNTGKLIF

SEQ ID NO: 474748 - protein, 15 aa, Homo sapiens
  CDR3 for beta chain variable domain of TCR clone 237374 (TRBV7-2, TRBJ2-3)
FASSLEQGGTDTQYF

SEQ ID NO: 474749 - protein, 14 aa, Homo sapiens
  CDR3 for alpha chain variable domain of TCR clone 237375 (TRAV12-2, TRAJ44)
CAVNPAGTASKLTF

SEQ ID NO: 474750 - protein, 15 aa, Homo sapiens
  CDR3 for beta chain variable domain of TCR clone 237375 (TRBV4-1, TRBJ2-7)
CASSQNTGRLYEQYF

SEQ ID NO: 474751 - protein, 15 aa, Homo sapiens
  CDR3 for alpha chain variable domain of TCR clone 237376 (TRAV4, TRAJ39)
CLVGPNNNAGNMLTF

SEQ ID NO: 474752 - protein, 15 aa, Homo sapiens
  CDR3 for beta chain variable domain of TCR clone 237376 (TRBV7-9, TRBJ1-6)
CASSSPGRGNSPLLF

SEQ ID NO: 474753 - protein, 15 aa, Homo sapiens
  CDR3 for alpha chain variable domain of TCR clone 237377 (TRAV8-4, TRAJ3)
CAVSEPYSSASKIIF

SEQ ID NO: 474754 - protein, 14 aa, Homo sapiens
  CDR3 for beta chain variable domain of TCR clone 237377 (TRBV7-2, TRBJ2-5)
CQQIKEQGRETQYF

SEQ ID NO: 474755 - protein, 14 aa, Homo sapiens
  CDR3 for alpha chain variable domain of TCR clone 237378 (TRAV35, TRAJ39)
CAGQLGNAGNMLTL

SEQ ID NO: 474756 - protein, 13 aa, Homo sapiens
  CDR3 for beta chain variable domain of TCR clone 237378 (TRBV4-2, TRBJ1-1)
CASSQAGNTEAFF

SEQ ID NO: 474757 - protein, 13 aa, Homo sapiens
  CDR3 for alpha chain variable domain of TCR clone 237379 (TRAV36/DV7, TRAJ54)
CAVDIQGAPKLVF

SEQ ID NO: 474758 - protein, 14 aa, Homo sapiens
  CDR3 for beta chain variable domain of TCR clone 237379 (TRBV19, TRBJ2-7)
CASNFRDTFTGMYF

SEQ ID NO: 474759 - protein, 16 aa, Homo sapiens
  CDR3 for alpha chain variable domain of TCR clone 237380 (TRAV30, TRAJ24)
CGTEIVDADSWGKLQF

SEQ ID NO: 474760 - protein, 14 aa, Homo sapiens
  CDR3 for beta chain variable domain of TCR clone 237380 (TRBV12-5, TRBJ2-5)
CASGSRTRQETQYF

SEQ ID NO: 474761 - protein, 14 aa, Homo sapiens
  CDR3 for alpha chain variable domain of TCR clone 237381 (TRAV9-2, TRAJ39)
CALYIYNAGNMLTF

SEQ ID NO: 474762 - protein, 15 aa, Homo sapiens
  CDR3 for beta chain variable domain of TCR clone 237381 (TRBV2, TRBJ2-7)
CASSGGLARSYEQYF

SEQ ID NO: 474763 - protein, 15 aa, Homo sapiens
  CDR3 for alpha chain variable domain of TCR clone 237382 (TRAV17, TRAJ57)
CATGPSQGGSEKLVF

SEQ ID NO: 474764 - protein, 13 aa, Homo sapiens
  CDR3 for beta chain variable domain of TCR clone 237382 (TRBV10-2, TRBJ2-5)
CASGRLARETQYF

SEQ ID NO: 474765 - protein, 12 aa, Homo sapiens
  CDR3 for alpha chain variable domain of TCR clone 237383 (TRAV21, TRAJ23)
CAVGPQGGKLIF

SEQ ID NO: 474766 - protein, 14 aa, Homo sapiens
  CDR3 for beta chain variable domain of TCR clone 237383 (TRBV7-9, TRBJ2-1)
CASSPRDSLYEQFF

SEQ ID NO: 474767 - protein, 15 aa, Homo sapiens
  CDR3 for alpha chain variable domain of TCR clone 237384 (TRAV3, TRAJ4)
CAVGDGTGGYNKLLF

SEQ ID NO: 474768 - protein, 16 aa, Homo sapiens
  CDR3 for beta chain variable domain of TCR clone 237384 (TRBV27, TRBJ2-2)
CASSSSGVSNTGELFF

SEQ ID NO: 474769 - protein, 14 aa, Homo sapiens
  CDR3 for alpha chain variable domain of TCR clone 237385 (TRAV29/DV5, TRAJ44)
CAAFLVGTAIKLTF

SEQ ID NO: 474770 - protein, 15 aa, Homo sapiens
  CDR3 for beta chain variable domain of TCR clone 237385 (TRBV7-3, TRBJ2-2)
CASSETGHGTGELFF

SEQ ID NO: 474771 - protein, 13 aa, Homo sapiens
  CDR3 for alpha chain variable domain of TCR clone 237386 (TRAV21, TRAJ22)
CAVKSGSARQLTF

SEQ ID NO: 474772 - protein, 19 aa, Homo sapiens
  CDR3 for beta chain variable domain of TCR clone 237386 (TRBV6-5, TRBJ2-7)
CASSHSNRGSNPFTYEQYF

SEQ ID NO: 474773 - protein, 13 aa, Homo sapiens
  CDR3 for alpha chain variable domain of TCR clone 237387 (TRAV8-3, TRAJ21)
CAVGAYNFNKFYF

SEQ ID NO: 474774 - protein, 12 aa, Homo sapiens
  CDR3 for beta chain variable domain of TCR clone 237387 (TRBV7-9, TRBJ2-7)
CASSIKREEQYF

SEQ ID NO: 474775 - protein, 14 aa, Homo sapiens
  CDR3 for alpha chain variable domain of TCR clone 237388 (TRAV1-2, TRAJ8)
CAVREDTGFQKLVF

SEQ ID NO: 474776 - protein, 10 aa, Homo sapiens
  CDR3 for beta chain variable domain of TCR clone 237388 (TRBV7-9, TRBJ2-2)
CASTLGHLPR

SEQ ID NO: 474777 - protein, 16 aa, Homo sapiens
  CDR3 for alpha chain variable domain of TCR clone 237389 (TRAV30, TRAJ24)
CGPEIVDADSWGKFQF

SEQ ID NO: 474778 - protein, 18 aa, Homo sapiens
  CDR3 for beta chain variable domain of TCR clone 237389 (TRBV12-5, TRBJ2-5)
CASGSRTHQETVLRARHA

SEQ ID NO: 474779 - protein, 13 aa, Homo sapiens
  CDR3 for alpha chain variable domain of TCR clone 237390 (TRAV1-2, TRAJ9)
CAALNTGGFKTIF

SEQ ID NO: 474780 - protein, 15 aa, Homo sapiens
  CDR3 for beta chain variable domain of TCR clone 237390 (TRBV11-2, TRBJ1-3)
CASSLDGTVGNTIYF

SEQ ID NO: 474781 - protein, 15 aa, Homo sapiens
  CDR3 for alpha chain variable domain of TCR clone 237391 (TRAV17, TRAJ42)
CATDHYGGSQGNTIF

SEQ ID NO: 474782 - protein, 14 aa, Homo sapiens
  CDR3 for beta chain variable domain of TCR clone 237391 (TRBV19, TRBJ2-5)
CASSIEHSQDTQYF

SEQ ID NO: 474783 - protein, 18 aa, Homo sapiens
  CDR3 for alpha chain variable domain of TCR clone 237392 (TRAV26-1, TRAJ23)
CIVRVGLEVWNQGGKLIF

SEQ ID NO: 474784 - protein, 13 aa, Homo sapiens
  CDR3 for beta chain variable domain of TCR clone 237392 (TRBV7-2, TRBJ2-2)
CASSSVRAGELFF

SEQ ID NO: 474785 - protein, 16 aa, Homo sapiens
  CDR3 for alpha chain variable domain of TCR clone 237393 (TRAV26-1, TRAJ37)
CIVRGDGSGNTGKLIF

SEQ ID NO: 474786 - protein, 17 aa, Homo sapiens
  CDR3 for beta chain variable domain of TCR clone 237393 (TRBV4-1, TRBJ2-7)
CASSQPTSGSRGYEQYF

SEQ ID NO: 474787 - protein, 15 aa, Homo sapiens
  CDR3 for alpha chain variable domain of TCR clone 237394 (TRAV8-3, TRAJ15)
CAVGAPNQAGTALIF

SEQ ID NO: 474788 - protein, 13 aa, Homo sapiens
  CDR3 for beta chain variable domain of TCR clone 237394 (TRBV4-2, TRBJ1-1)
CASSQAGNTEAFF

SEQ ID NO: 474789 - protein, 15 aa, Homo sapiens
  CDR3 for alpha chain variable domain of TCR clone 237395 (TRAV21, TRAJ13)
CAVPRSFWGLPESYL

SEQ ID NO: 474790 - protein, 15 aa, Homo sapiens
  CDR3 for beta chain variable domain of TCR clone 237395 (TRBV7-9, TRBJ1-6)
CASSYPGRGNSPLHF

SEQ ID NO: 474791 - protein, 13 aa, Homo sapiens
  CDR3 for alpha chain variable domain of TCR clone 237396 (TRAV12-2, TRAJ52)
CNAGGTSYGKLTF

SEQ ID NO: 474792 - protein, 17 aa, Homo sapiens
  CDR3 for beta chain variable domain of TCR clone 237396 (TRBV15, TRBJ1-4)
CATSRYGTGDPNEKLFF

SEQ ID NO: 474793 - protein, 23 aa, Homo sapiens
  CDR3 for alpha chain variable domain of TCR clone 237397 (TRAV1-1, TRAJ11)
LLHELQMKDFASYFCAGYSTLTF

SEQ ID NO: 474794 - protein, 15 aa, Homo sapiens
  CDR3 for beta chain variable domain of TCR clone 237397 (TRBV6-5, TRBJ2-1)
CASRGDFDSYNEQFF

SEQ ID NO: 474795 - protein, 17 aa, Homo sapiens
  CDR3 for alpha chain variable domain of TCR clone 237398 (TRAV8-6, TRAJ58)
CAVSSWVVETSGSRLTC

SEQ ID NO: 474796 - protein, 14 aa, Homo sapiens
  CDR3 for beta chain variable domain of TCR clone 237398 (TRBV4-2, TRBJ2-1)
CASGLDRAYNEQFF

SEQ ID NO: 474797 - protein, 12 aa, Homo sapiens
  CDR3 for alpha chain variable domain of TCR clone 237399 (TRAV12-3, TRAJ17)
CAMTLTGKKLTF

SEQ ID NO: 474798 - protein, 13 aa, Homo sapiens
  CDR3 for beta chain variable domain of TCR clone 237399 (TRBV10-3, TRBJ2-7)
CASKLAVNYEQYF

SEQ ID NO: 474799 - protein, 10 aa, Homo sapiens
  CDR3 for alpha chain variable domain of TCR clone 237400 (TRAV26-1, TRAJ40)
CIAGTYKYIS

SEQ ID NO: 474800 - protein, 14 aa, Homo sapiens
  CDR3 for beta chain variable domain of TCR clone 237400 (TRBV12-4, TRBJ1-1)
CASSSARGYTEAFF

SEQ ID NO: 474801 - protein, 16 aa, Homo sapiens
  CDR3 for alpha chain variable domain of TCR clone 237401 (TRAV3, TRAJ37)
CAVRPHGSGNTGKLIL

SEQ ID NO: 474802 - protein, 17 aa, Homo sapiens
  CDR3 for beta chain variable domain of TCR clone 237401 (TRBV5-1, TRBJ2-5)
CASSPVALGQNQETQYF

SEQ ID NO: 474803 - protein, 14 aa, Homo sapiens
  CDR3 for alpha chain variable domain of TCR clone 237402 (TRAV1-2, TRAJ16)
CAVNRFSDGQKLLF

SEQ ID NO: 474804 - protein, 16 aa, Homo sapiens
  CDR3 for beta chain variable domain of TCR clone 237402 (TRBV7-2, TRBJ2-7)
CASSLDLSGGAYEQYL

SEQ ID NO: 474805 - protein, 15 aa, Homo sapiens
  CDR3 for alpha chain variable domain of TCR clone 237403 (TRAV14/DV4, TRAJ4)
CAMRDSSGGYNKLIF

SEQ ID NO: 474806 - protein, 14 aa, Homo sapiens
  CDR3 for beta chain variable domain of TCR clone 237403 (TRBV7-8, TRBJ2-7)
CASSPRDRVYEQYF

SEQ ID NO: 474807 - protein, 13 aa, Homo sapiens
  CDR3 for alpha chain variable domain of TCR clone 237404 (TRAV26-1, TRAJ47)
CIFFHGIWKQTSL

SEQ ID NO: 474808 - protein, 13 aa, Homo sapiens
  CDR3 for beta chain variable domain of TCR clone 237404 (TRBV24-1, TRBJ2-7)
CATSDLGPYEQYF

SEQ ID NO: 474809 - protein, 14 aa, Homo sapiens
  CDR3 for alpha chain variable domain of TCR clone 237405 (TRAV13-1, TRAJ35)
CAARKGGFGNVLHC

SEQ ID NO: 474810 - protein, 13 aa, Homo sapiens
  CDR3 for beta chain variable domain of TCR clone 237405 (TRBV7-3, TRBJ1-1)
CANSQDWGAEAFF

SEQ ID NO: 474811 - protein, 14 aa, Homo sapiens
  CDR3 for alpha chain variable domain of TCR clone 237406 (TRAV1-2, TRAJ16)
CAVNRFSDGQKLLF

SEQ ID NO: 474812 - protein, 12 aa, Homo sapiens
  CDR3 for beta chain variable domain of TCR clone 237406 (TRBV7-8, TRBJ2-7)
CGSSLGDREQYF

SEQ ID NO: 474813 - protein, 16 aa, Homo sapiens
  CDR3 for alpha chain variable domain of TCR clone 237407 (TRAV12-3, TRAJ53)
CAMSPGSGGSNYKQTF

SEQ ID NO: 474814 - protein, 17 aa, Homo sapiens
  CDR3 for beta chain variable domain of TCR clone 237407 (TRBV20-1, TRBJ2-2)
CSASGSGQGGLTGELFF

SEQ ID NO: 474815 - protein, 16 aa, Homo sapiens
  CDR3 for alpha chain variable domain of TCR clone 237408 (TRAV30, TRAJ24)
CGTEIVDADSWGKFQF

SEQ ID NO: 474816 - protein, 15 aa, Homo sapiens
  CDR3 for beta chain variable domain of TCR clone 237408 (TRBV19, TRBJ2-1)
CASSIGLAGWDEQFF

SEQ ID NO: 474817 - protein, 14 aa, Homo sapiens
  CDR3 for alpha chain variable domain of TCR clone 237409 (TRAV12-3, TRAJ18)
CNERRGLTLGRLYF

SEQ ID NO: 474818 - protein, 13 aa, Homo sapiens
  CDR3 for beta chain variable domain of TCR clone 237409 (TRBV15, TRBJ1-6)
CATSGGLNSPLHF

SEQ ID NO: 474819 - protein, 15 aa, Homo sapiens
  CDR3 for alpha chain variable domain of TCR clone 237410 (TRAV34, TRAJ38)
CGADFTPGNNRKLIW

SEQ ID NO: 474820 - protein, 15 aa, Homo sapiens
  CDR3 for beta chain variable domain of TCR clone 237410 (TRBV12-4, TRBJ1-1)
CASSLAVSRGAEAFF

SEQ ID NO: 474821 - protein, 15 aa, Homo sapiens
  CDR3 for alpha chain variable domain of TCR clone 237411 (TRAV13-1, TRAJ32)
CAASNGWWCYKQAHL

SEQ ID NO: 474822 - protein, 15 aa, Homo sapiens
  CDR3 for beta chain variable domain of TCR clone 237411 (TRBV9, TRBJ1-6)
CASSVAGTGDSPLHF

SEQ ID NO: 474823 - protein, 14 aa, Homo sapiens
  CDR3 for alpha chain variable domain of TCR clone 237412 (TRAV23/DV6, TRAJ4)
CAAPSSAGYNKLIF

SEQ ID NO: 474824 - protein, 16 aa, Homo sapiens
  CDR3 for beta chain variable domain of TCR clone 237412 (TRBV19, TRBJ1-1)
CASRFGGPVTGTEAFF

SEQ ID NO: 474825 - protein, 13 aa, Homo sapiens
  CDR3 for alpha chain variable domain of TCR clone 237413 (TRAV8-3, TRAJ36)
CAVGATGANNLFF

SEQ ID NO: 474826 - protein, 15 aa, Homo sapiens
  CDR3 for beta chain variable domain of TCR clone 237413 (TRBV5-5, TRBJ1-5)
CASSSTPGSNQPQHF

SEQ ID NO: 474827 - protein, 15 aa, Homo sapiens
  CDR3 for alpha chain variable domain of TCR clone 237414 (TRAV17, TRAJ57)
CATGPSQGGSEKLVF

SEQ ID NO: 474828 - protein, 14 aa, Homo sapiens
  CDR3 for beta chain variable domain of TCR clone 237414 (TRBV12-5, TRBJ2-5)
RASGSRTHQETQFF

SEQ ID NO: 474829 - protein, 13 aa, Homo sapiens
  CDR3 for alpha chain variable domain of TCR clone 237415 (TRAV12-2, TRAJ18)
CAVRGSTLGRLYF

SEQ ID NO: 474830 - protein, 20 aa, Homo sapiens
  CDR3 for beta chain variable domain of TCR clone 237415 (TRBV7-8, TRBJ2-2)
YASSHLFPGPTIHITGELFF

SEQ ID NO: 474831 - protein, 15 aa, Homo sapiens
  CDR3 for alpha chain variable domain of TCR clone 237416 (TRAV16, TRAJ48)
CALFISNFGNEKLTF

SEQ ID NO: 474832 - protein, 14 aa, Homo sapiens
  CDR3 for beta chain variable domain of TCR clone 237416 (TRBV7-2, TRBJ1-6)
CASSLQGANSPLHF

SEQ ID NO: 474833 - protein, 15 aa, Homo sapiens
  CDR3 for alpha chain variable domain of TCR clone 237417 (TRAV2, TRAJ24)
CAVVRLKNSWGNLQF

SEQ ID NO: 474834 - protein, 17 aa, Homo sapiens
  CDR3 for beta chain variable domain of TCR clone 237417 (TRBV24-1, TRBJ2-1)
CATSDVSTSGTYNEQFF

SEQ ID NO: 474835 - protein, 17 aa, Homo sapiens
  CDR3 for alpha chain variable domain of TCR clone 237418 (TRAV12-3, TRAJ6)
CAMSARGGAGGSYIPQF

SEQ ID NO: 474836 - protein, 12 aa, Homo sapiens
  CDR3 for beta chain variable domain of TCR clone 237418 (TRBV12-4, TRBJ2-3)
CASSTLPDTQYF

SEQ ID NO: 474837 - protein, 15 aa, Homo sapiens
  CDR3 for alpha chain variable domain of TCR clone 237419 (TRAV8-2, TRAJ16)
CVVSDGFSDGQKLLF

SEQ ID NO: 474838 - protein, 12 aa, Homo sapiens
  CDR3 for beta chain variable domain of TCR clone 237419 (TRBV12-4, TRBJ2-7)
CASSVGGYEQYF

SEQ ID NO: 474839 - protein, 15 aa, Homo sapiens
  CDR3 for alpha chain variable domain of TCR clone 237420 (TRAV12-3, TRAJ42)
CAMSGHGGSQGNLIF

SEQ ID NO: 474840 - protein, 15 aa, Homo sapiens
  CDR3 for beta chain variable domain of TCR clone 237420 (TRBV7-3, TRBJ2-2)
CASSETGQGTGELFF

SEQ ID NO: 474841 - protein, 14 aa, Homo sapiens
  CDR3 for alpha chain variable domain of TCR clone 237421 (TRAV26-1, TRAJ40)
CIVRLLSGTHQYIF

SEQ ID NO: 474842 - protein, 13 aa, Homo sapiens
  CDR3 for beta chain variable domain of TCR clone 237421 (TRBV3-1, TRBJ1-1)
CASSQLQGAEAFF

SEQ ID NO: 474843 - protein, 11 aa, Homo sapiens
  CDR3 for alpha chain variable domain of TCR clone 237422 (TRAV12-3, TRAJ22)
CAMTLARQLTF

SEQ ID NO: 474844 - protein, 17 aa, Homo sapiens
  CDR3 for beta chain variable domain of TCR clone 237422 (TRBV11-2, TRBJ2-1)
CASSLSPPGVEYNEQFF

SEQ ID NO: 474845 - protein, 14 aa, Homo sapiens
  CDR3 for alpha chain variable domain of TCR clone 237423 (TRAV12-1, TRAJ41)
CVVLNSNSGYALNF

SEQ ID NO: 474846 - protein, 13 aa, Homo sapiens
  CDR3 for beta chain variable domain of TCR clone 237423 (TRBV4-2, TRBJ1-1)
CASSQAGNTEAFF

SEQ ID NO: 474847 - protein, 16 aa, Homo sapiens
  CDR3 for alpha chain variable domain of TCR clone 237424 (TRAV16, TRAJ4)
CIPVLPFSGGYKKLIF

SEQ ID NO: 474848 - protein, 14 aa, Homo sapiens
  CDR3 for beta chain variable domain of TCR clone 237424 (TRBV19, TRBJ2-7)
CASSMGQGAIEQYF

SEQ ID NO: 474849 - protein, 15 aa, Homo sapiens
  CDR3 for alpha chain variable domain of TCR clone 237425 (TRAV14/DV4, TRAJ21)
CAMREGLYNFNKFYF

SEQ ID NO: 474850 - protein, 13 aa, Homo sapiens
  CDR3 for beta chain variable domain of TCR clone 237425 (TRBV6-1, TRBJ2-1)
CASREDGGHEQFF

SEQ ID NO: 474851 - protein, 12 aa, Homo sapiens
  CDR3 for alpha chain variable domain of TCR clone 237426 (TRAV35, TRAJ43)
CAGADNNNDMRF

SEQ ID NO: 474852 - protein, 14 aa, Homo sapiens
  CDR3 for beta chain variable domain of TCR clone 237426 (TRBV2, TRBJ2-2)
CASSWQGATGELFF

SEQ ID NO: 474853 - protein, 13 aa, Homo sapiens
  CDR3 for alpha chain variable domain of TCR clone 237427 (TRAV16, TRAJ11)
CALTQSGYSTLTF

SEQ ID NO: 474854 - protein, 17 aa, Homo sapiens
  CDR3 for beta chain variable domain of TCR clone 237427 (TRBV5-1, TRBJ1-5)
CASSLAFLTRGKQPQHL

SEQ ID NO: 474855 - protein, 13 aa, Homo sapiens
  CDR3 for alpha chain variable domain of TCR clone 237428 (TRAV26-1, TRAJ40)
CIVATSGTYKYIF

SEQ ID NO: 474856 - protein, 16 aa, Homo sapiens
  CDR3 for beta chain variable domain of TCR clone 237428 (TRBV7-2, TRBJ2-2)
CASSLYRGPNTGELLF

SEQ ID NO: 474857 - protein, 14 aa, Homo sapiens
  CDR3 for alpha chain variable domain of TCR clone 237429 (TRAV17, TRAJ54)
CATDANQGAQKLVF

SEQ ID NO: 474858 - protein, 16 aa, Homo sapiens
  CDR3 for beta chain variable domain of TCR clone 237429 (TRBV4-2, TRBJ2-7)
CASSQDGVERGYEQYF

SEQ ID NO: 474859 - protein, 15 aa, Homo sapiens
  CDR3 for alpha chain variable domain of TCR clone 237430 (TRAV26-2, TRAJ39)
CSLRGNNNAGNMLTF

SEQ ID NO: 474860 - protein, 18 aa, Homo sapiens
  CDR3 for beta chain variable domain of TCR clone 237430 (TRBV6-7, TRBJ1-1)
CASSYSRLAGARNTEAFF

SEQ ID NO: 474861 - protein, 13 aa, Homo sapiens
  CDR3 for alpha chain variable domain of TCR clone 237431 (TRAV39, TRAJ49)
CAVDRNTGNQFYF

SEQ ID NO: 474862 - protein, 15 aa, Homo sapiens
  CDR3 for beta chain variable domain of TCR clone 237431 (TRBV28, TRBJ2-5)
CASSPPWSYQETQYF

SEQ ID NO: 474863 - protein, 16 aa, Homo sapiens
  CDR3 for alpha chain variable domain of TCR clone 237432 (TRAV12-1, TRAJ42)
CVVTPYYGGSQGNLIF

SEQ ID NO: 474864 - protein, 15 aa, Homo sapiens
  CDR3 for beta chain variable domain of TCR clone 237432 (TRBV4-3, TRBJ2-7)
CARSQGGRGIYEQYF

SEQ ID NO: 474865 - protein, 14 aa, Homo sapiens
  CDR3 for alpha chain variable domain of TCR clone 237433 (TRAV9-2, TRAJ39)
CALYIYNAGNMLNF

SEQ ID NO: 474866 - protein, 14 aa, Homo sapiens
  CDR3 for beta chain variable domain of TCR clone 237433 (TRBV6-1, TRBJ1-3)
CASVQGGGGNTIYF

SEQ ID NO: 474867 - protein, 13 aa, Homo sapiens
  CDR3 for alpha chain variable domain of TCR clone 237434 (TRAV27, TRAJ40)
CAGPPSGTYKYIF

SEQ ID NO: 474868 - protein, 13 aa, Homo sapiens
  CDR3 for beta chain variable domain of TCR clone 237434 (TRBV20-1, TRBJ2-7)
CSARPSTNYEQYF

SEQ ID NO: 474869 - protein, 11 aa, Homo sapiens
  CDR3 for alpha chain variable domain of TCR clone 237435 (TRAV3, TRAJ21)
CAVGNFNKFYF

SEQ ID NO: 474870 - protein, 15 aa, Homo sapiens
  CDR3 for beta chain variable domain of TCR clone 237435 (TRBV5-1, TRBJ1-1)
CASSSTTGTNTEAFF

SEQ ID NO: 474871 - protein, 14 aa, Homo sapiens
  CDR3 for alpha chain variable domain of TCR clone 237436 (TRAV23/DV6, TRAJ22)
CAADPSGSERQLTF

SEQ ID NO: 474872 - protein, 14 aa, Homo sapiens
  CDR3 for beta chain variable domain of TCR clone 237436 (TRBV5-1, TRBJ2-7)
CASSLWGAQDEQYF

SEQ ID NO: 474873 - protein, 17 aa, Homo sapiens
  CDR3 for alpha chain variable domain of TCR clone 237437 (TRAV3, TRAJ6)
CAVRDGPRAGGSDIPTC

SEQ ID NO: 474874 - protein, 14 aa, Homo sapiens
  CDR3 for beta chain variable domain of TCR clone 237437 (TRBV7-2, TRBJ2-7)
CASSPKTSFYEQYF

SEQ ID NO: 474875 - protein, 13 aa, Homo sapiens
  CDR3 for alpha chain variable domain of TCR clone 237438 (TRAV8-3, TRAJ4)
WVFYSGGYNKLIF

SEQ ID NO: 474876 - protein, 16 aa, Homo sapiens
  CDR3 for beta chain variable domain of TCR clone 237438 (TRBV7-8, TRBJ2-3)
CASSREGQRETDTQYF

SEQ ID NO: 474877 - protein, 23 aa, Homo sapiens
  CDR3 for alpha chain variable domain of TCR clone 237439 (TRAV26-1, TRAJ38)
CIADNAGNNPIQNPDPAVYQLRD

SEQ ID NO: 474878 - protein, 13 aa, Homo sapiens
  CDR3 for beta chain variable domain of TCR clone 237439 (TRBV20-1, TRBJ1-1)
CSARGRGNTEAFF

SEQ ID NO: 474879 - protein, 11 aa, Homo sapiens
  CDR3 for alpha chain variable domain of TCR clone 237440 (TRAV1-2, TRAJ31)
CAVNNNARLTF

SEQ ID NO: 474880 - protein, 18 aa, Homo sapiens
  CDR3 for beta chain variable domain of TCR clone 237440 (TRBV7-9, TRBJ2-7)
CASSLTTSGSRTWYEQYF

SEQ ID NO: 474881 - protein, 11 aa, Homo sapiens
  CDR3 for alpha chain variable domain of TCR clone 237441 (TRAV23/DV6, TRAJ44)
CAAPTPGKLTF

SEQ ID NO: 474882 - protein, 16 aa, Homo sapiens
  CDR3 for beta chain variable domain of TCR clone 237441 (TRBV12-4, TRBJ2-7)
CASSLIGGTGTYEQYF

SEQ ID NO: 474883 - protein, 13 aa, Homo sapiens
  CDR3 for alpha chain variable domain of TCR clone 237442 (TRAV16, TRAJ31)
CALSAHNNARLMF

SEQ ID NO: 474884 - protein, 17 aa, Homo sapiens
  CDR3 for beta chain variable domain of TCR clone 237442 (TRBV12-4, TRBJ2-1)
RASSPGLAGGRINEQFV

SEQ ID NO: 474885 - protein, 15 aa, Homo sapiens
  CDR3 for alpha chain variable domain of TCR clone 237443 (TRAV38-1, TRAJ37)
CAFIFGSGNTGKLIF

SEQ ID NO: 474886 - protein, 12 aa, Homo sapiens
  CDR3 for beta chain variable domain of TCR clone 237443 (TRBV7-9, TRBJ2-7)
CASSLEGYEKYF

SEQ ID NO: 474887 - protein, 14 aa, Homo sapiens
  CDR3 for alpha chain variable domain of TCR clone 237444 (TRAV12-2, TRAJ9)
CAVNMEGGGFKTIF

SEQ ID NO: 474888 - protein, 19 aa, Homo sapiens
  CDR3 for beta chain variable domain of TCR clone 237444 (TRBV2, TRBJ2-7)
CASSDDETSGRANDYEQYF

SEQ ID NO: 474889 - protein, 11 aa, Homo sapiens
  CDR3 for alpha chain variable domain of TCR clone 237445 (TRAV17, TRAJ43)
CATPRSNDMRF

SEQ ID NO: 474890 - protein, 16 aa, Homo sapiens
  CDR3 for beta chain variable domain of TCR clone 237445 (TRBV19, TRBJ1-1)
CASRFGGPVTGTEAFF

SEQ ID NO: 474891 - protein, 16 aa, Homo sapiens
  CDR3 for alpha chain variable domain of TCR clone 237446 (TRAV1-1, TRAJ29)
CAVRSTRNSGNTPLVF

SEQ ID NO: 474892 - protein, 16 aa, Homo sapiens
  CDR3 for beta chain variable domain of TCR clone 237446 (TRBV29-1, TRBJ2-7)
CSVEDAEDGTAYEQYF

SEQ ID NO: 474893 - protein, 16 aa, Homo sapiens
  CDR3 for alpha chain variable domain of TCR clone 237447 (TRAV1-2, TRAJ10)
CAVRGVLTGGGNKLTF

SEQ ID NO: 474894 - protein, 15 aa, Homo sapiens
  CDR3 for beta chain variable domain of TCR clone 237447 (TRBV20-1, TRBJ2-1)
CSARGIGGTYNEQFV

SEQ ID NO: 474895 - protein, 13 aa, Homo sapiens
  CDR3 for alpha chain variable domain of TCR clone 237448 (TRAV20, TRAJ20)
CAVRWVRDYKLSF

SEQ ID NO: 474896 - protein, 10 aa, Homo sapiens
  CDR3 for beta chain variable domain of TCR clone 237448 (TRBV19, TRBJ2-2)
CASTVTAKHR

SEQ ID NO: 474897 - protein, 16 aa, Homo sapiens
  CDR3 for alpha chain variable domain of TCR clone 237449 (TRAV30, TRAJ24)
CGTELVDADSWGKLQF

SEQ ID NO: 474898 - protein, 14 aa, Homo sapiens
  CDR3 for beta chain variable domain of TCR clone 237449 (TRBV12-5, TRBJ2-5)
CASGSRTHQETQYV

SEQ ID NO: 474899 - protein, 15 aa, Homo sapiens
  CDR3 for alpha chain variable domain of TCR clone 237450 (TRAV12-3, TRAJ49)
CAMAVTPNTGNQFYF

SEQ ID NO: 474900 - protein, 14 aa, Homo sapiens
  CDR3 for beta chain variable domain of TCR clone 237450 (TRBV5-1, TRBJ2-7)
CASSRGESLYEQYF

SEQ ID NO: 474901 - protein, 13 aa, Homo sapiens
  CDR3 for alpha chain variable domain of TCR clone 237451 (TRAV12-1, TRAJ29)
CVVRNSGNTPLVF

SEQ ID NO: 474902 - protein, 14 aa, Homo sapiens
  CDR3 for beta chain variable domain of TCR clone 237451 (TRBV7-2, TRBJ2-7)
CASRSRGAAYEQYF

SEQ ID NO: 474903 - protein, 14 aa, Homo sapiens
  CDR3 for alpha chain variable domain of TCR clone 237452 (TRAV1-2, TRAJ8)
CAVREDTGFQALVF

SEQ ID NO: 474904 - protein, 17 aa, Homo sapiens
  CDR3 for beta chain variable domain of TCR clone 237452 (TRBV11-2, TRBJ2-1)
CASSLYPPGVEYNEQFF

SEQ ID NO: 474905 - protein, 13 aa, Homo sapiens
  CDR3 for alpha chain variable domain of TCR clone 237453 (TRAV30, TRAJ6)
CGFIEGGSYIPTF

SEQ ID NO: 474906 - protein, 17 aa, Homo sapiens
  CDR3 for beta chain variable domain of TCR clone 237453 (TRBV11-2, TRBJ2-1)
CASSLYPPGVEYNEQVF

SEQ ID NO: 474907 - protein, 11 aa, Homo sapiens
  CDR3 for alpha chain variable domain of TCR clone 237454 (TRAV3, TRAJ21)
CAVGNFNKFYF

SEQ ID NO: 474908 - protein, 15 aa, Homo sapiens
  CDR3 for beta chain variable domain of TCR clone 237454 (TRBV11-2, TRBJ2-1)
CASSLTSGGYNEQFF

SEQ ID NO: 474909 - protein, 11 aa, Homo sapiens
  CDR3 for alpha chain variable domain of TCR clone 237455 (TRAV2, TRAJ33)
CAVDSNYQLIW

SEQ ID NO: 474910 - protein, 15 aa, Homo sapiens
  CDR3 for beta chain variable domain of TCR clone 237455 (TRBV7-9, TRBJ1-5)
CASSLGQGESQPQHF

SEQ ID NO: 474911 - protein, 14 aa, Homo sapiens
  CDR3 for alpha chain variable domain of TCR clone 237456 (TRAV23/DV6, TRAJ37)
CAASTSSNTGKLIF

SEQ ID NO: 474912 - protein, 16 aa, Homo sapiens
  CDR3 for beta chain variable domain of TCR clone 237456 (TRBV28, TRBJ1-4)
CASSPPYRGRSEKLFF

SEQ ID NO: 474913 - protein, 15 aa, Homo sapiens
  CDR3 for alpha chain variable domain of TCR clone 237457 (TRAV13-1, TRAJ5)
CAASPRGHGQESTSF

SEQ ID NO: 474914 - protein, 17 aa, Homo sapiens
  CDR3 for beta chain variable domain of TCR clone 237457 (TRBV3-1, TRBJ2-2)
CASSQFRDKVDTGELFF

SEQ ID NO: 474915 - protein, 13 aa, Homo sapiens
  CDR3 for alpha chain variable domain of TCR clone 237458 (TRAV12-1, TRAJ35)
CVVRGGFGNVLHC

SEQ ID NO: 474916 - protein, 13 aa, Homo sapiens
  CDR3 for beta chain variable domain of TCR clone 237458 (TRBV19, TRBJ2-1)
RASTNSDVGEQFF

SEQ ID NO: 474917 - protein, 15 aa, Homo sapiens
  CDR3 for alpha chain variable domain of TCR clone 237459 (TRAV23/DV6, TRAJ13)
CAASIGSGGYQKVTF

SEQ ID NO: 474918 - protein, 15 aa, Homo sapiens
  CDR3 for beta chain variable domain of TCR clone 237459 (TRBV12-4, TRBJ1-6)
CASSLGGQGTSPLHF

SEQ ID NO: 474919 - protein, 14 aa, Homo sapiens
  CDR3 for alpha chain variable domain of TCR clone 237460 (TRAV17, TRAJ32)
CATDTGGATNKLIF

SEQ ID NO: 474920 - protein, 14 aa, Homo sapiens
  CDR3 for beta chain variable domain of TCR clone 237460 (TRBV2, TRBJ1-5)
CASSENRGGQPQHF

SEQ ID NO: 474921 - protein, 12 aa, Homo sapiens
  CDR3 for alpha chain variable domain of TCR clone 237461 (TRAV12-1, TRAJ40)
CVVYSGTYKYIF

SEQ ID NO: 474922 - protein, 15 aa, Homo sapiens
  CDR3 for beta chain variable domain of TCR clone 237461 (TRBV28, TRBJ2-1)
CASRKTGTAYNEQFF

SEQ ID NO: 474923 - protein, 15 aa, Homo sapiens
  CDR3 for alpha chain variable domain of TCR clone 237462 (TRAV21, TRAJ53)
CATLNSGGSNYKQTF

SEQ ID NO: 474924 - protein, 15 aa, Homo sapiens
  CDR3 for beta chain variable domain of TCR clone 237462 (TRBV7-2, TRBJ2-1)
CASTHGTGIYNEQFF

SEQ ID NO: 474925 - protein, 11 aa, Homo sapiens
  CDR3 for alpha chain variable domain of TCR clone 237463 (TRAV12-3, TRAJ43)
CAMSVSNDMRF

SEQ ID NO: 474926 - protein, 14 aa, Homo sapiens
  CDR3 for beta chain variable domain of TCR clone 237463 (TRBV7-8, TRBJ2-3)
CASSFKSSTDTQYF

SEQ ID NO: 474927 - protein, 14 aa, Homo sapiens
  CDR3 for alpha chain variable domain of TCR clone 237464 (TRAV27, TRAJ17)
CRSTIRAAGTKLTF

SEQ ID NO: 474928 - protein, 15 aa, Homo sapiens
  CDR3 for beta chain variable domain of TCR clone 237464 (TRBV19, TRBJ1-6)
CASSTQGAVGSPLHF

SEQ ID NO: 474929 - protein, 17 aa, Homo sapiens
  CDR3 for alpha chain variable domain of TCR clone 237465 (TRAV27, TRAJ18)
CAGLHRGRGSTLWRLYF

SEQ ID NO: 474930 - protein, 14 aa, Homo sapiens
  CDR3 for beta chain variable domain of TCR clone 237465 (TRBV5-7, TRBJ1-1)
CASSLAGDWTEAFF

SEQ ID NO: 474931 - protein, 12 aa, Homo sapiens
  CDR3 for alpha chain variable domain of TCR clone 237466 (TRAV12-3, TRAJ20)
CATVRGDYKLSF

SEQ ID NO: 474932 - protein, 14 aa, Homo sapiens
  CDR3 for beta chain variable domain of TCR clone 237466 (TRBV5-5, TRBJ1-5)
CASSGQGVDQPQHF

SEQ ID NO: 474933 - protein, 12 aa, Homo sapiens
  CDR3 for alpha chain variable domain of TCR clone 237467 (TRAV3, TRAJ20)
CAVRDGDYKLSF

SEQ ID NO: 474934 - protein, 20 aa, Homo sapiens
  CDR3 for beta chain variable domain of TCR clone 237467 (TRBV28, TRBJ2-1)
CASTPIGRSPGLAGGNEQFF

SEQ ID NO: 474935 - protein, 14 aa, Homo sapiens
  CDR3 for alpha chain variable domain of TCR clone 237468 (TRAV30, TRAJ33)
CGTVAPRSNYQLIW

SEQ ID NO: 474936 - protein, 13 aa, Homo sapiens
  CDR3 for beta chain variable domain of TCR clone 237468 (TRBV7-9, TRBJ2-1)
CASSLDVGNEQFF

SEQ ID NO: 474937 - protein, 14 aa, Homo sapiens
  CDR3 for alpha chain variable domain of TCR clone 237469 (TRAV1-1, TRAJ27)
CAVIYNTNAGKSTF

SEQ ID NO: 474938 - protein, 12 aa, Homo sapiens
  CDR3 for beta chain variable domain of TCR clone 237469 (TRBV7-9, TRBJ2-7)
CASSIKREEQYF

SEQ ID NO: 474939 - protein, 13 aa, Homo sapiens
  CDR3 for alpha chain variable domain of TCR clone 237470 (TRAV27, TRAJ8)
CAGGPTGFQKLVF

SEQ ID NO: 474940 - protein, 13 aa, Homo sapiens
  CDR3 for beta chain variable domain of TCR clone 237470 (TRBV7-9, TRBJ2-4)
CATEGLAGNIQYF

SEQ ID NO: 474941 - protein, 14 aa, Homo sapiens
  CDR3 for alpha chain variable domain of TCR clone 237471 (TRAV3, TRAJ22)
CAVSASGSARQLTF

SEQ ID NO: 474942 - protein, 14 aa, Homo sapiens
  CDR3 for beta chain variable domain of TCR clone 237471 (TRBV4-1, TRBJ2-1)
CASRTSGVFHEQFF

SEQ ID NO: 474943 - protein, 12 aa, Homo sapiens
  CDR3 for alpha chain variable domain of TCR clone 237472 (TRAV13-1, TRAJ42)
VNYGGSQGNLIF

SEQ ID NO: 474944 - protein, 12 aa, Homo sapiens
  CDR3 for beta chain variable domain of TCR clone 237472 (TRBV7-9, TRBJ1-5)
CASSSGQAPQHF

SEQ ID NO: 474945 - protein, 17 aa, Homo sapiens
  CDR3 for alpha chain variable domain of TCR clone 237473 (TRAV3, TRAJ42)
CAVRDKDYGGSQGNLIF

SEQ ID NO: 474946 - protein, 16 aa, Homo sapiens
  CDR3 for beta chain variable domain of TCR clone 237473 (TRBV9, TRBJ2-1)
CASSVGGGGNYNEQFF

SEQ ID NO: 474947 - protein, 13 aa, Homo sapiens
  CDR3 for alpha chain variable domain of TCR clone 237474 (TRAV2, TRAJ40)
CAVVTSGTYKYIF

SEQ ID NO: 474948 - protein, 15 aa, Homo sapiens
  CDR3 for beta chain variable domain of TCR clone 237474 (TRBV7-9, TRBJ1-1)
CASSRPGTANTEAVF

SEQ ID NO: 474949 - protein, 15 aa, Homo sapiens
  CDR3 for alpha chain variable domain of TCR clone 237475 (TRAV34, TRAJ38)
CGADFTPGNNRKLIW

SEQ ID NO: 474950 - protein, 15 aa, Homo sapiens
  CDR3 for beta chain variable domain of TCR clone 237475 (TRBV2, TRBJ2-5)
CASSEAGTRQETQYF

SEQ ID NO: 474951 - protein, 17 aa, Homo sapiens
  CDR3 for alpha chain variable domain of TCR clone 237476 (TRAV8-4, TRAJ11)
CAVSDRGENSGYSTHTF

SEQ ID NO: 474952 - protein, 14 aa, Homo sapiens
  CDR3 for beta chain variable domain of TCR clone 237476 (TRBV20-1, TRBJ2-1)
CSPNDEASYNEQFF

SEQ ID NO: 474953 - protein, 15 aa, Homo sapiens
  CDR3 for alpha chain variable domain of TCR clone 237477 (TRAV35, TRAJ23)
CAGPLGNNQGGKLIF

SEQ ID NO: 474954 - protein, 14 aa, Homo sapiens
  CDR3 for beta chain variable domain of TCR clone 237477 (TRBV7-9, TRBJ1-1)
CASTPLESYTEAFF

SEQ ID NO: 474955 - protein, 13 aa, Homo sapiens
  CDR3 for alpha chain variable domain of TCR clone 237478 (TRAV27, TRAJ29)
CAGAHSGNTPLVF

SEQ ID NO: 474956 - protein, 15 aa, Homo sapiens
  CDR3 for beta chain variable domain of TCR clone 237478 (TRBV27, TRBJ2-1)
CASSLSKGFYNEQFF

SEQ ID NO: 474957 - protein, 16 aa, Homo sapiens
  CDR3 for alpha chain variable domain of TCR clone 237479 (TRAV8-2, TRAJ7)
CVVSEAPYYGNNRLAF

SEQ ID NO: 474958 - protein, 13 aa, Homo sapiens
  CDR3 for beta chain variable domain of TCR clone 237479 (TRBV19, TRBJ2-1)
CASSMYGVNEQFF

SEQ ID NO: 474959 - protein, 13 aa, Homo sapiens
  CDR3 for alpha chain variable domain of TCR clone 237480 (TRAV2, TRAJ5)
CAVPDTGRRALAF

SEQ ID NO: 474960 - protein, 15 aa, Homo sapiens
  CDR3 for beta chain variable domain of TCR clone 237480 (TRBV7-2, TRBJ2-2)
CASSTRTGYTGELFF

SEQ ID NO: 474961 - protein, 11 aa, Homo sapiens
  CDR3 for alpha chain variable domain of TCR clone 237481 (TRAV23/DV6, TRAJ58)
CAARLLRGETS

SEQ ID NO: 474962 - protein, 12 aa, Homo sapiens
  CDR3 for beta chain variable domain of TCR clone 237481 (TRBV27, TRBJ2-2)
CASKLFTGELFF

SEQ ID NO: 474963 - protein, 14 aa, Homo sapiens
  CDR3 for alpha chain variable domain of TCR clone 237482 (TRAV29/DV5, TRAJ20)
CAASAPIEDYKLSF

SEQ ID NO: 474964 - protein, 13 aa, Homo sapiens
  CDR3 for beta chain variable domain of TCR clone 237482 (TRBV24-1, TRBJ1-2)
CATSGTALDGYTF

SEQ ID NO: 474965 - protein, 14 aa, Homo sapiens
  CDR3 for alpha chain variable domain of TCR clone 237483 (TRAV1-1, TRAJ34)
CAVSPSYNTDKLIF

SEQ ID NO: 474966 - protein, 15 aa, Homo sapiens
  CDR3 for beta chain variable domain of TCR clone 237483 (TRBV6-3, TRBJ2-7)
CASSSPWTVFYEQYF

SEQ ID NO: 474967 - protein, 13 aa, Homo sapiens
  CDR3 for alpha chain variable domain of TCR clone 237484 (TRAV30, TRAJ39)
CGTEKNAGNMHTF

SEQ ID NO: 474968 - protein, 12 aa, Homo sapiens
  CDR3 for beta chain variable domain of TCR clone 237484 (TRBV12-4, TRBJ2-5)
CASSSAQETQYF

SEQ ID NO: 474969 - protein, 12 aa, Homo sapiens
  CDR3 for alpha chain variable domain of TCR clone 237485 (TRAV25, TRAJ11)
CAGASGYSTLTF

SEQ ID NO: 474970 - protein, 10 aa, Homo sapiens
  CDR3 for beta chain variable domain of TCR clone 237485 (TRBV15, TRBJ1-2)
CATSRGPRTG

SEQ ID NO: 474971 - protein, 12 aa, Homo sapiens
  CDR3 for alpha chain variable domain of TCR clone 237486 (TRAV12-3, TRAJ17)
CAITLTGNKLTY

SEQ ID NO: 474972 - protein, 15 aa, Homo sapiens
  CDR3 for beta chain variable domain of TCR clone 237486 (TRBV20-1, TRBJ2-7)
CSARDRVSGMDEQYF

SEQ ID NO: 474973 - protein, 15 aa, Homo sapiens
  CDR3 for alpha chain variable domain of TCR clone 237487 (TRAV4, TRAJ39)
CLVGPNNNAGNMLTF

SEQ ID NO: 474974 - protein, 16 aa, Homo sapiens
  CDR3 for beta chain variable domain of TCR clone 237487 (TRBV13, TRBJ2-2)
CASSPRTVEHTGELFF

SEQ ID NO: 474975 - protein, 14 aa, Homo sapiens
  CDR3 for alpha chain variable domain of TCR clone 237488 (TRAV12-1, TRAJ12)
CVVTRMDSSYKLIF

SEQ ID NO: 474976 - protein, 15 aa, Homo sapiens
  CDR3 for beta chain variable domain of TCR clone 237488 (TRBV5-8, TRBJ2-2)
CASSLDRGATGELFF

SEQ ID NO: 474977 - protein, 17 aa, Homo sapiens
  CDR3 for alpha chain variable domain of TCR clone 237489 (TRAV8-6, TRAJ58)
CAVSSWVGETSGSRLTF

SEQ ID NO: 474978 - protein, 14 aa, Homo sapiens
  CDR3 for beta chain variable domain of TCR clone 237489 (TRBV4-3, TRBJ2-1)
WASGLDRAYNEQFF

SEQ ID NO: 474979 - protein, 14 aa, Homo sapiens
  CDR3 for alpha chain variable domain of TCR clone 237490 (TRAV13-1, TRAJ6)
CAASITGGSYIPTF

SEQ ID NO: 474980 - protein, 14 aa, Homo sapiens
  CDR3 for beta chain variable domain of TCR clone 237490 (TRBV6-3, TRBJ2-1)
CASLHSAYFNEQFF

SEQ ID NO: 474981 - protein, 10 aa, Homo sapiens
  CDR3 for alpha chain variable domain of TCR clone 237491 (TRAV23/DV6, TRAJ57)
CAASSTLSQG

SEQ ID NO: 474982 - protein, 16 aa, Homo sapiens
  CDR3 for beta chain variable domain of TCR clone 237491 (TRBV5-1, TRBJ2-3)
CASSLGLAVYTDTQYF

SEQ ID NO: 474983 - protein, 12 aa, Homo sapiens
  CDR3 for alpha chain variable domain of TCR clone 237492 (TRAV8-4, TRAJ43)
CAVSVNDNDMRF

SEQ ID NO: 474984 - protein, 16 aa, Homo sapiens
  CDR3 for beta chain variable domain of TCR clone 237492 (TRBV7-2, TRBJ2-6)
CASSLAGRSGANVLTF

SEQ ID NO: 474985 - protein, 14 aa, Homo sapiens
  CDR3 for alpha chain variable domain of TCR clone 237493 (TRAV1-2, TRAJ8)
CAVREDTGFQKLVF

SEQ ID NO: 474986 - protein, 16 aa, Homo sapiens
  CDR3 for beta chain variable domain of TCR clone 237493 (TRBV20-1, TRBJ2-1)
CSARDRKQGMNNEQFF

SEQ ID NO: 474987 - protein, 19 aa, Homo sapiens
  CDR3 for alpha chain variable domain of TCR clone 237494 (TRAV3, TRAJ6)
CAVRDRNPSRSGGSYIHTF

SEQ ID NO: 474988 - protein, 15 aa, Homo sapiens
  CDR3 for beta chain variable domain of TCR clone 237494 (TRBV28, TRBJ2-5)
CASSPGQGSIETQYF

SEQ ID NO: 474989 - protein, 14 aa, Homo sapiens
  CDR3 for alpha chain variable domain of TCR clone 237495 (TRAV13-1, TRAJ8)
CAASISTGFQKLVF

SEQ ID NO: 474990 - protein, 13 aa, Homo sapiens
  CDR3 for beta chain variable domain of TCR clone 237495 (TRBV13, TRBJ2-1)
CASTPGSYNEQFF

SEQ ID NO: 474991 - protein, 17 aa, Homo sapiens
  CDR3 for alpha chain variable domain of TCR clone 237496 (TRAV8-6, TRAJ4)
CAVSDLGVAGGYNKLIF

SEQ ID NO: 474992 - protein, 13 aa, Homo sapiens
  CDR3 for beta chain variable domain of TCR clone 237496 (TRBV3-1, TRBJ1-1)
CASSPGVITEAFF

SEQ ID NO: 474993 - protein, 15 aa, Homo sapiens
  CDR3 for alpha chain variable domain of TCR clone 237497 (TRAV27, TRAJ38)
CAARRNAGNNRKRVW

SEQ ID NO: 474994 - protein, 13 aa, Homo sapiens
  CDR3 for beta chain variable domain of TCR clone 237497 (TRBV12-5, TRBJ2-3)
CASGDRQSDTQYF

SEQ ID NO: 474995 - protein, 12 aa, Homo sapiens
  CDR3 for alpha chain variable domain of TCR clone 237498 (TRAV16, TRAJ9)
CALRGGGFKTIF

SEQ ID NO: 474996 - protein, 16 aa, Homo sapiens
  CDR3 for beta chain variable domain of TCR clone 237498 (TRBV11-2, TRBJ2-7)
CASSLAPTGVNYEQYF

SEQ ID NO: 474997 - protein, 12 aa, Homo sapiens
  CDR3 for alpha chain variable domain of TCR clone 237499 (TRAV12-3, TRAJ43)
CAISSNNNEMRF

SEQ ID NO: 474998 - protein, 15 aa, Homo sapiens
  CDR3 for beta chain variable domain of TCR clone 237499 (TRBV27, TRBJ1-4)
CASSPRHATNEKLFF

SEQ ID NO: 474999 - protein, 14 aa, Homo sapiens
  CDR3 for alpha chain variable domain of TCR clone 237500 (TRAV12-3, TRAJ10)
SHLPLTGGGNKLTF

SEQ ID NO: 475000 - protein, 16 aa, Homo sapiens
  CDR3 for beta chain variable domain of TCR clone 237500 (TRBV18, TRBJ2-4)
CASSPPYSGAKNIQYF

SEQ ID NO: 475001 - protein, 11 aa, Homo sapiens
  CDR3 for alpha chain variable domain of TCR clone 237501 (TRAV2, TRAJ33)
CAVDSNYQLIW

SEQ ID NO: 475002 - protein, 17 aa, Homo sapiens
  CDR3 for beta chain variable domain of TCR clone 237501 (TRBV20-1, TRBJ2-3)
CIARDGWNAKERDTQYF

SEQ ID NO: 475003 - protein, 14 aa, Homo sapiens
  CDR3 for alpha chain variable domain of TCR clone 237502 (TRAV30, TRAJ26)
CGTEIVGYGQNFVF

SEQ ID NO: 475004 - protein, 13 aa, Homo sapiens
  CDR3 for beta chain variable domain of TCR clone 237502 (TRBV19, TRBJ1-3)
CASRLCLGNTIYF

SEQ ID NO: 475005 - protein, 14 aa, Homo sapiens
  CDR3 for alpha chain variable domain of TCR clone 237503 (TRAV2, TRAJ20)
CAVELTSNDYELSF

SEQ ID NO: 475006 - protein, 14 aa, Homo sapiens
  CDR3 for beta chain variable domain of TCR clone 237503 (TRBV4-2, TRBJ1-2)
CASSQVGQNYGYTF

SEQ ID NO: 475007 - protein, 14 aa, Homo sapiens
  CDR3 for alpha chain variable domain of TCR clone 237504 (TRAV8-1, TRAJ5)
CAVRTDRAGEHLLL

SEQ ID NO: 475008 - protein, 15 aa, Homo sapiens
  CDR3 for beta chain variable domain of TCR clone 237504 (TRBV7-3, TRBJ2-1)
CASSPTGGGEVEQFF

SEQ ID NO: 475009 - protein, 15 aa, Homo sapiens
  CDR3 for alpha chain variable domain of TCR clone 237505 (TRAV3, TRAJ42)
CAVRGGTGSQGNLIF

SEQ ID NO: 475010 - protein, 16 aa, Homo sapiens
  CDR3 for beta chain variable domain of TCR clone 237505 (TRBV27, TRBJ2-2)
CASSFRGLVRTGELFF

SEQ ID NO: 475011 - protein, 14 aa, Homo sapiens
  CDR3 for alpha chain variable domain of TCR clone 237506 (TRAV1-2, TRAJ16)
CAVNRFSDGQKLLF

SEQ ID NO: 475012 - protein, 14 aa, Homo sapiens
  CDR3 for beta chain variable domain of TCR clone 237506 (TRBV6-1, TRBJ1-3)
CASVQGGAGNTIYF

SEQ ID NO: 475013 - protein, 12 aa, Homo sapiens
  CDR3 for alpha chain variable domain of TCR clone 237507 (TRAV13-1, TRAJ21)
CAAKEGFNKFYF

SEQ ID NO: 475014 - protein, 13 aa, Homo sapiens
  CDR3 for beta chain variable domain of TCR clone 237507 (TRBV28, TRBJ1-2)
CASRPGTLYGYTF

SEQ ID NO: 475015 - protein, 12 aa, Homo sapiens
  CDR3 for alpha chain variable domain of TCR clone 237508 (TRAV12-3, TRAJ5)
YAMDTGRRALTF

SEQ ID NO: 475016 - protein, 13 aa, Homo sapiens
  CDR3 for beta chain variable domain of TCR clone 237508 (TRBV7-7, TRBJ2-2)
CASSLTSAGELFF

SEQ ID NO: 475017 - protein, 14 aa, Homo sapiens
  CDR3 for alpha chain variable domain of TCR clone 237509 (TRAV3, TRAJ7)
CAVREEEREQQTGF

SEQ ID NO: 475018 - protein, 12 aa, Homo sapiens
  CDR3 for beta chain variable domain of TCR clone 237509 (TRBV24-1, TRBJ1-4)
CATSDPNEKLFF

SEQ ID NO: 475019 - protein, 13 aa, Homo sapiens
  CDR3 for alpha chain variable domain of TCR clone 237510 (TRAV26-1, TRAJ34)
CIVRPWITDKLIF

SEQ ID NO: 475020 - protein, 13 aa, Homo sapiens
  CDR3 for beta chain variable domain of TCR clone 237510 (TRBV5-1, TRBJ2-1)
CASSLGSCNEQFF

SEQ ID NO: 475021 - protein, 15 aa, Homo sapiens
  CDR3 for alpha chain variable domain of TCR clone 237511 (TRAV26-1, TRAJ29)
CIVIVEVSGNTPLVF

SEQ ID NO: 475022 - protein, 14 aa, Homo sapiens
  CDR3 for beta chain variable domain of TCR clone 237511 (TRBV18, TRBJ2-5)
CASSPGVSQETQYF

SEQ ID NO: 475023 - protein, 14 aa, Homo sapiens
  CDR3 for alpha chain variable domain of TCR clone 237512 (TRAV17, TRAJ4)
CATVPSGGYSKLIF

SEQ ID NO: 475024 - protein, 17 aa, Homo sapiens
  CDR3 for beta chain variable domain of TCR clone 237512 (TRBV11-2, TRBJ2-1)
CASSLYPPGVEYNEQFF

SEQ ID NO: 475025 - protein, 19 aa, Homo sapiens
  CDR3 for alpha chain variable domain of TCR clone 237513 (TRAV2, TRAJ20)
ILQVREADAAVHRDCKLSF

SEQ ID NO: 475026 - protein, 17 aa, Homo sapiens
  CDR3 for beta chain variable domain of TCR clone 237513 (TRBV11-2, TRBJ2-1)
CASSLYPPGVEYNEQFF

SEQ ID NO: 475027 - protein, 15 aa, Homo sapiens
  CDR3 for alpha chain variable domain of TCR clone 237514 (TRAV8-3, TRAJ45)
CASSYSGGGVDGLTF

SEQ ID NO: 475028 - protein, 16 aa, Homo sapiens
  CDR3 for beta chain variable domain of TCR clone 237514 (TRBV7-9, TRBJ2-2)
CASSGFGGANTGELFF

SEQ ID NO: 475029 - protein, 12 aa, Homo sapiens
  CDR3 for alpha chain variable domain of TCR clone 237515 (TRAV17, TRAJ20)
CATDGDDYKLSF

SEQ ID NO: 475030 - protein, 13 aa, Homo sapiens
  CDR3 for beta chain variable domain of TCR clone 237515 (TRBV7-2, TRBJ2-2)
CASSLAVTGELFF

SEQ ID NO: 475031 - protein, 17 aa, Homo sapiens
  CDR3 for alpha chain variable domain of TCR clone 237516 (TRAV27, TRAJ52)
CAGVGWAGGTSYGKLTF

SEQ ID NO: 475032 - protein, 16 aa, Homo sapiens
  CDR3 for beta chain variable domain of TCR clone 237516 (TRBV19, TRBJ2-1)
CASSKAGPSSYNEQLF

SEQ ID NO: 475033 - protein, 12 aa, Homo sapiens
  CDR3 for alpha chain variable domain of TCR clone 237517 (TRAV14/DV4, TRAJ32)
CTSLTPTNKLIF

SEQ ID NO: 475034 - protein, 13 aa, Homo sapiens
  CDR3 for beta chain variable domain of TCR clone 237517 (TRBV7-9, TRBJ1-2)
CASSLKQNYGYTF

SEQ ID NO: 475035 - protein, 13 aa, Homo sapiens
  CDR3 for alpha chain variable domain of TCR clone 237518 (TRAV29/DV5, TRAJ31)
CAASRNNNARLRF

SEQ ID NO: 475036 - protein, 16 aa, Homo sapiens
  CDR3 for beta chain variable domain of TCR clone 237518 (TRBV19, TRBJ2-2)
CASRSPGTGATGELFF

SEQ ID NO: 475037 - protein, 12 aa, Homo sapiens
  CDR3 for alpha chain variable domain of TCR clone 237519 (TRAV1-2, TRAJ26)
CAVRYYGQNFVF

SEQ ID NO: 475038 - protein, 15 aa, Homo sapiens
  CDR3 for beta chain variable domain of TCR clone 237519 (TRBV7-2, TRBJ2-2)
CASSTRTGYTGELFF

SEQ ID NO: 475039 - protein, 13 aa, Homo sapiens
  CDR3 for alpha chain variable domain of TCR clone 237520 (TRAV3, TRAJ21)
CAVREPDFNKFYF

SEQ ID NO: 475040 - protein, 16 aa, Homo sapiens
  CDR3 for beta chain variable domain of TCR clone 237520 (TRBV4-2, TRBJ2-3)
CASSQELAGDTDTQYF

SEQ ID NO: 475041 - protein, 12 aa, Homo sapiens
  CDR3 for alpha chain variable domain of TCR clone 237521 (TRAV3, TRAJ43)
CAVRDPNNDMRF

SEQ ID NO: 475042 - protein, 16 aa, Homo sapiens
  CDR3 for beta chain variable domain of TCR clone 237521 (TRBV7-9, TRBJ2-5)
CASSPSGQGVKGTQYF

SEQ ID NO: 475043 - protein, 13 aa, Homo sapiens
  CDR3 for alpha chain variable domain of TCR clone 237522 (TRAV30, TRAJ53)
CGTVTGSNYKLTF

SEQ ID NO: 475044 - protein, 14 aa, Homo sapiens
  CDR3 for beta chain variable domain of TCR clone 237522 (TRBV7-9, TRBJ1-1)
CASSLGGANTEAFF

SEQ ID NO: 475045 - protein, 13 aa, Homo sapiens
  CDR3 for alpha chain variable domain of TCR clone 237523 (TRAV23/DV6, TRAJ47)
CAASSQYGNKLVF

SEQ ID NO: 475046 - protein, 15 aa, Homo sapiens
  CDR3 for beta chain variable domain of TCR clone 237523 (TRBV7-3, TRBJ2-1)
CASSLDGNSYNEQFY

SEQ ID NO: 475047 - protein, 17 aa, Homo sapiens
  CDR3 for alpha chain variable domain of TCR clone 237524 (TRAV3, TRAJ42)
CAVRDRDSGGSQGNLIF

SEQ ID NO: 475048 - protein, 12 aa, Homo sapiens
  CDR3 for beta chain variable domain of TCR clone 237524 (TRBV11-2, TRBJ2-2)
CASSLGGGELFF

SEQ ID NO: 475049 - protein, 14 aa, Homo sapiens
  CDR3 for alpha chain variable domain of TCR clone 237525 (TRAV26-1, TRAJ34)
CIVRGAYNTDKLIF

SEQ ID NO: 475050 - protein, 16 aa, Homo sapiens
  CDR3 for beta chain variable domain of TCR clone 237525 (TRBV7-3, TRBJ2-2)
CASSLKRGTLSGELFF

SEQ ID NO: 475051 - protein, 12 aa, Homo sapiens
  CDR3 for alpha chain variable domain of TCR clone 237526 (TRAV12-1, TRAJ40)
CVAFSGTYKYIF

SEQ ID NO: 475052 - protein, 14 aa, Homo sapiens
  CDR3 for beta chain variable domain of TCR clone 237526 (TRBV19, TRBJ2-1)
CASPTFVLSGEQFF

SEQ ID NO: 475053 - protein, 19 aa, Homo sapiens
  CDR3 for alpha chain variable domain of TCR clone 237527 (TRAV26-1, TRAJ52)
CIVRAHRNAGGTSYGKLTF

SEQ ID NO: 475054 - protein, 14 aa, Homo sapiens
  CDR3 for beta chain variable domain of TCR clone 237527 (TRBV9, TRBJ1-2)
CASSVSGTLYGYTF

SEQ ID NO: 475055 - protein, 13 aa, Homo sapiens
  CDR3 for alpha chain variable domain of TCR clone 237528 (TRAV12-1, TRAJ38)
CVVPAGNNRKLIW

SEQ ID NO: 475056 - protein, 17 aa, Homo sapiens
  CDR3 for beta chain variable domain of TCR clone 237528 (TRBV7-8, TRBJ2-6)
CASSAGTGGAGANVLTF

SEQ ID NO: 475057 - protein, 16 aa, Homo sapiens
  CDR3 for alpha chain variable domain of TCR clone 237529 (TRAV8-2, TRAJ48)
CVVSDVSNFGNGKLTF

SEQ ID NO: 475058 - protein, 16 aa, Homo sapiens
  CDR3 for beta chain variable domain of TCR clone 237529 (TRBV24-1, TRBJ2-1)
CATSGVTGADYNEQFF

SEQ ID NO: 475059 - protein, 14 aa, Homo sapiens
  CDR3 for alpha chain variable domain of TCR clone 237530 (TRAV8-2, TRAJ37)
CVVSISGNTGNLIF

SEQ ID NO: 475060 - protein, 13 aa, Homo sapiens
  CDR3 for beta chain variable domain of TCR clone 237530 (TRBV7-8, TRBJ2-7)
RRVRLTEMGEQYF

SEQ ID NO: 475061 - protein, 12 aa, Homo sapiens
  CDR3 for alpha chain variable domain of TCR clone 237531 (TRAV12-1, TRAJ20)
CVVIPDDYKLSF

SEQ ID NO: 475062 - protein, 12 aa, Homo sapiens
  CDR3 for beta chain variable domain of TCR clone 237531 (TRBV11-2, TRBJ2-2)
CASSLGGGELFF

SEQ ID NO: 475063 - protein, 14 aa, Homo sapiens
  CDR3 for alpha chain variable domain of TCR clone 237532 (TRAV1-2, TRAJ29)
CAVREPTSATPLVF

SEQ ID NO: 475064 - protein, 14 aa, Homo sapiens
  CDR3 for beta chain variable domain of TCR clone 237532 (TRBV3-1, TRBJ2-5)
CASSQGPDQETQYF

SEQ ID NO: 475065 - protein, 13 aa, Homo sapiens
  CDR3 for alpha chain variable domain of TCR clone 237533 (TRAV12-1, TRAJ39)
CVALNNAGNMLTF

SEQ ID NO: 475066 - protein, 15 aa, Homo sapiens
  CDR3 for beta chain variable domain of TCR clone 237533 (TRBV20-1, TRBJ1-1)
CSASRGVTGNTEAFF

SEQ ID NO: 475067 - protein, 13 aa, Homo sapiens
  CDR3 for alpha chain variable domain of TCR clone 237534 (TRAV6, TRAJ16)
CALDDSDGQKLLF

SEQ ID NO: 475068 - protein, 14 aa, Homo sapiens
  CDR3 for beta chain variable domain of TCR clone 237534 (TRBV12-4, TRBJ1-6)
CASNLQGKGSPLHC

SEQ ID NO: 475069 - protein, 13 aa, Homo sapiens
  CDR3 for alpha chain variable domain of TCR clone 237535 (TRAV38-2/DV8, TRAJ34)
CAYRNYNTDKLIF

SEQ ID NO: 475070 - protein, 15 aa, Homo sapiens
  CDR3 for beta chain variable domain of TCR clone 237535 (TRBV20-1, TRBJ2-7)
CSARDRVSGMDEQYF

SEQ ID NO: 475071 - protein, 11 aa, Homo sapiens
  CDR3 for alpha chain variable domain of TCR clone 237536 (TRAV8-4, TRAJ26)
CAGGEGQNFVF

SEQ ID NO: 475072 - protein, 17 aa, Homo sapiens
  CDR3 for beta chain variable domain of TCR clone 237536 (TRBV7-9, TRBJ2-3)
CANSPTVAGDLTDTQYF

SEQ ID NO: 475073 - protein, 13 aa, Homo sapiens
  CDR3 for alpha chain variable domain of TCR clone 237537 (TRAV3, TRAJ8)
CAVRFTGFQKLVF

SEQ ID NO: 475074 - protein, 12 aa, Homo sapiens
  CDR3 for beta chain variable domain of TCR clone 237537 (TRBV2, TRBJ2-1)
CAKREGYNEQFF

SEQ ID NO: 475075 - protein, 12 aa, Homo sapiens
  CDR3 for alpha chain variable domain of TCR clone 237538 (TRAV23/DV6, TRAJ30)
RAASKGDDKLIF

SEQ ID NO: 475076 - protein, 17 aa, Homo sapiens
  CDR3 for beta chain variable domain of TCR clone 237538 (TRBV13, TRBJ2-3)
CASSLSRVAGGRNTQYF

SEQ ID NO: 475077 - protein, 21 aa, Homo sapiens
  CDR3 for alpha chain variable domain of TCR clone 237539 (TRAV1-1, TRAJ6)
CAVRREEATYLHLEEEPALLF

SEQ ID NO: 475078 - protein, 14 aa, Homo sapiens
  CDR3 for beta chain variable domain of TCR clone 237539 (TRBV19, TRBJ2-7)
CASSMGQGAIEQYF

SEQ ID NO: 475079 - protein, 14 aa, Homo sapiens
  CDR3 for alpha chain variable domain of TCR clone 237540 (TRAV3, TRAJ6)
CAVGDWGGSYIPTF

SEQ ID NO: 475080 - protein, 15 aa, Homo sapiens
  CDR3 for beta chain variable domain of TCR clone 237540 (TRBV5-1, TRBJ2-1)
CASSPPRAPYNEQFF

SEQ ID NO: 475081 - protein, 15 aa, Homo sapiens
  CDR3 for alpha chain variable domain of TCR clone 237541 (TRAV8-2, TRAJ16)
CVVSDGFSDGQKLLL

SEQ ID NO: 475082 - protein, 14 aa, Homo sapiens
  CDR3 for beta chain variable domain of TCR clone 237541 (TRBV7-3, TRBJ1-1)
CASSLGTGYTEAFF

SEQ ID NO: 475083 - protein, 18 aa, Homo sapiens
  CDR3 for alpha chain variable domain of TCR clone 237542 (TRAV21, TRAJ52)
CAVRPSPAVGTSYGKLTF

SEQ ID NO: 475084 - protein, 13 aa, Homo sapiens
  CDR3 for beta chain variable domain of TCR clone 237542 (TRBV10-3, TRBJ2-1)
CAISEFSGREQFF

SEQ ID NO: 475085 - protein, 15 aa, Homo sapiens
  CDR3 for alpha chain variable domain of TCR clone 237543 (TRAV8-3, TRAJ27)
CAVGPSKTNAGKSTF

SEQ ID NO: 475086 - protein, 14 aa, Homo sapiens
  CDR3 for beta chain variable domain of TCR clone 237543 (TRBV7-2, TRBJ2-1)
CQQLRTSGGNEQFF

SEQ ID NO: 475087 - protein, 15 aa, Homo sapiens
  CDR3 for alpha chain variable domain of TCR clone 237544 (TRAV26-1, TRAJ44)
CIVRANTGTASKLTF

SEQ ID NO: 475088 - protein, 13 aa, Homo sapiens
  CDR3 for beta chain variable domain of TCR clone 237544 (TRBV28, TRBJ2-5)
CASSSRNQETQYF

SEQ ID NO: 475089 - protein, 16 aa, Homo sapiens
  CDR3 for alpha chain variable domain of TCR clone 237545 (TRAV26-1, TRAJ53)
CIVRVAMGGSNYKLTF

SEQ ID NO: 475090 - protein, 12 aa, Homo sapiens
  CDR3 for beta chain variable domain of TCR clone 237545 (TRBV7-9, TRBJ1-5)
CASSPQGQPQHC

SEQ ID NO: 475091 - protein, 14 aa, Homo sapiens
  CDR3 for alpha chain variable domain of TCR clone 237546 (TRAV1-2, TRAJ16)
CAVNRLSDGQKLLF

SEQ ID NO: 475092 - protein, 16 aa, Homo sapiens
  CDR3 for beta chain variable domain of TCR clone 237546 (TRBV27, TRBJ2-2)
CASSFRGLFRTGELFF

SEQ ID NO: 475093 - protein, 13 aa, Homo sapiens
  CDR3 for alpha chain variable domain of TCR clone 237547 (TRAV35, TRAJ44)
CAGLSGTASKLTF

SEQ ID NO: 475094 - protein, 12 aa, Homo sapiens
  CDR3 for beta chain variable domain of TCR clone 237547 (TRBV7-8, TRBJ2-7)
CASSLGDREQYF

SEQ ID NO: 475095 - protein, 13 aa, Homo sapiens
  CDR3 for alpha chain variable domain of TCR clone 237548 (TRAV27, TRAJ3)
ASLRGSSASKIIF

SEQ ID NO: 475096 - protein, 15 aa, Homo sapiens
  CDR3 for beta chain variable domain of TCR clone 237548 (TRBV28, TRBJ1-3)
CGSSMGWASGNTIYF

SEQ ID NO: 475097 - protein, 14 aa, Homo sapiens
  CDR3 for alpha chain variable domain of TCR clone 237549 (TRAV12-2, TRAJ13)
CAVKKTGGYQKVTF

SEQ ID NO: 475098 - protein, 19 aa, Homo sapiens
  CDR3 for beta chain variable domain of TCR clone 237549 (TRBV25-1, TRBJ2-2)
CAILVYRVDRGRKTGELFS

SEQ ID NO: 475099 - protein, 12 aa, Homo sapiens
  CDR3 for alpha chain variable domain of TCR clone 237550 (TRAV12-3, TRAJ17)
CAMTLTVNKLTF

SEQ ID NO: 475100 - protein, 15 aa, Homo sapiens
  CDR3 for beta chain variable domain of TCR clone 237550 (TRBV20-1, TRBJ2-7)
CSARERVSGMDEQDF

SEQ ID NO: 475101 - protein, 10 aa, Homo sapiens
  CDR3 for alpha chain variable domain of TCR clone 237551 (TRAV30, TRAJ48)
CGIGNEKLTF

SEQ ID NO: 475102 - protein, 15 aa, Homo sapiens
  CDR3 for beta chain variable domain of TCR clone 237551 (TRBV28, TRBJ2-5)
CASSPPRSYQETQYF

SEQ ID NO: 475103 - protein, 19 aa, Homo sapiens
  CDR3 for alpha chain variable domain of TCR clone 237552 (TRAV25, TRAJ20)
TATQTTDVGILPHDYKLSF

SEQ ID NO: 475104 - protein, 15 aa, Homo sapiens
  CDR3 for beta chain variable domain of TCR clone 237552 (TRBV6-6, TRBJ1-5)
CASSSIQGTNQPQHC

SEQ ID NO: 475105 - protein, 13 aa, Homo sapiens
  CDR3 for alpha chain variable domain of TCR clone 237553 (TRAV21, TRAJ37)
CAVSSGNTGKLIF

SEQ ID NO: 475106 - protein, 17 aa, Homo sapiens
  CDR3 for beta chain variable domain of TCR clone 237553 (TRBV4-1, TRBJ1-4)
CASSQEGPRGVEEKLFF

SEQ ID NO: 475107 - protein, 11 aa, Homo sapiens
  CDR3 for alpha chain variable domain of TCR clone 237554 (TRAV12-1, TRAJ34)
CVVNKGRELIF

SEQ ID NO: 475108 - protein, 12 aa, Homo sapiens
  CDR3 for beta chain variable domain of TCR clone 237554 (TRBV2, TRBJ2-1)
RAYGPPGNEQVF

SEQ ID NO: 475109 - protein, 14 aa, Homo sapiens
  CDR3 for alpha chain variable domain of TCR clone 237555 (TRAV2, TRAJ9)
CAVEDRSGGFKTIF

SEQ ID NO: 475110 - protein, 14 aa, Homo sapiens
  CDR3 for beta chain variable domain of TCR clone 237555 (TRBV4-1, TRBJ2-2)
CASSQAVSTGELFF

SEQ ID NO: 475111 - protein, 13 aa, Homo sapiens
  CDR3 for alpha chain variable domain of TCR clone 237556 (TRAV17, TRAJ13)
CATDSGGYQKVTF

SEQ ID NO: 475112 - protein, 13 aa, Homo sapiens
  CDR3 for beta chain variable domain of TCR clone 237556 (TRBV28, TRBJ2-7)
CASKAGGVYEQYF

SEQ ID NO: 475113 - protein, 14 aa, Homo sapiens
  CDR3 for alpha chain variable domain of TCR clone 237557 (TRAV12-1, TRAJ23)
CVVIVYNQGGKLIF

SEQ ID NO: 475114 - protein, 13 aa, Homo sapiens
  CDR3 for beta chain variable domain of TCR clone 237557 (TRBV11-2, TRBJ2-5)
CASSFSSEETQYF

SEQ ID NO: 475115 - protein, 14 aa, Homo sapiens
  CDR3 for alpha chain variable domain of TCR clone 237558 (TRAV12-3, TRAJ37)
CAGFGSGNTGKLIF

SEQ ID NO: 475116 - protein, 15 aa, Homo sapiens
  CDR3 for beta chain variable domain of TCR clone 237558 (TRBV10-3, TRBJ2-3)
CAISLTSGGTDTQYF

SEQ ID NO: 475117 - protein, 14 aa, Homo sapiens
  CDR3 for alpha chain variable domain of TCR clone 237559 (TRAV1-2, TRAJ8)
CAGSEDTGFQKLVF

SEQ ID NO: 475118 - protein, 15 aa, Homo sapiens
  CDR3 for beta chain variable domain of TCR clone 237559 (TRBV9, TRBJ1-6)
CASSVAGTGDSPLHF

SEQ ID NO: 475119 - protein, 17 aa, Homo sapiens
  CDR3 for alpha chain variable domain of TCR clone 237560 (TRAV3, TRAJ6)
CDVRDGPRAGGSYIPTF

SEQ ID NO: 475120 - protein, 15 aa, Homo sapiens
  CDR3 for beta chain variable domain of TCR clone 237560 (TRBV20-1, TRBJ1-1)
CSASWDRFLNTEAFF

SEQ ID NO: 475121 - protein, 13 aa, Homo sapiens
  CDR3 for alpha chain variable domain of TCR clone 237561 (TRAV23/DV6, TRAJ41)
CSDRINSGYALNF

SEQ ID NO: 475122 - protein, 15 aa, Homo sapiens
  CDR3 for beta chain variable domain of TCR clone 237561 (TRBV10-2, TRBJ2-6)
CASSEQGTGANVLTF

SEQ ID NO: 475123 - protein, 13 aa, Homo sapiens
  CDR3 for alpha chain variable domain of TCR clone 237562 (TRAV26-1, TRAJ34)
CIVRPWITDKLIF

SEQ ID NO: 475124 - protein, 14 aa, Homo sapiens
  CDR3 for beta chain variable domain of TCR clone 237562 (TRBV7-9, TRBJ1-1)
CASTPLQSYTEAFF

SEQ ID NO: 475125 - protein, 14 aa, Homo sapiens
  CDR3 for alpha chain variable domain of TCR clone 237563 (TRAV8-4, TRAJ9)
CAVRINTGGFKNIF

SEQ ID NO: 475126 - protein, 15 aa, Homo sapiens
  CDR3 for beta chain variable domain of TCR clone 237563 (TRBV10-2, TRBJ2-6)
CASSEQGTGANNLIF

SEQ ID NO: 475127 - protein, 12 aa, Homo sapiens
  CDR3 for alpha chain variable domain of TCR clone 237564 (TRAV2, TRAJ10)
CASTGGGNKLTF

SEQ ID NO: 475128 - protein, 14 aa, Homo sapiens
  CDR3 for beta chain variable domain of TCR clone 237564 (TRBV7-2, TRBJ2-2)
CASRGQGTAGELFF

SEQ ID NO: 475129 - protein, 12 aa, Homo sapiens
  CDR3 for alpha chain variable domain of TCR clone 237565 (TRAV12-2, TRAJ31)
CAVNTPDARLMF

SEQ ID NO: 475130 - protein, 15 aa, Homo sapiens
  CDR3 for beta chain variable domain of TCR clone 237565 (TRBV4-2, TRBJ1-1)
CACSQDQGLNTEAFF

SEQ ID NO: 475131 - protein, 16 aa, Homo sapiens
  CDR3 for alpha chain variable domain of TCR clone 237566 (TRAV16, TRAJ52)
CALSAAGGTSYGKLTF

SEQ ID NO: 475132 - protein, 16 aa, Homo sapiens
  CDR3 for beta chain variable domain of TCR clone 237566 (TRBV12-4, TRBJ1-5)
CASSRPVRGSNQPQHF

SEQ ID NO: 475133 - protein, 12 aa, Homo sapiens
  CDR3 for alpha chain variable domain of TCR clone 237567 (TRAV17, TRAJ4)
CATDGGYNKLIF

SEQ ID NO: 475134 - protein, 15 aa, Homo sapiens
  CDR3 for beta chain variable domain of TCR clone 237567 (TRBV7-3, TRBJ2-1)
CASSPTGGGEVEQFF

SEQ ID NO: 475135 - protein, 13 aa, Homo sapiens
  CDR3 for alpha chain variable domain of TCR clone 237568 (TRAV8-3, TRAJ28)
CAVGAFGSYQLTF

SEQ ID NO: 475136 - protein, 15 aa, Homo sapiens
  CDR3 for beta chain variable domain of TCR clone 237568 (TRBV7-9, TRBJ1-5)
CANSQGHQPNQPQHF

SEQ ID NO: 475137 - protein, 14 aa, Homo sapiens
  CDR3 for alpha chain variable domain of TCR clone 237569 (TRAV12-3, TRAJ10)
SHLPLTGGGNKLTF

SEQ ID NO: 475138 - protein, 13 aa, Homo sapiens
  CDR3 for beta chain variable domain of TCR clone 237569 (TRBV2, TRBJ1-6)
CADSGSYNSTLHF

SEQ ID NO: 475139 - protein, 14 aa, Homo sapiens
  CDR3 for alpha chain variable domain of TCR clone 237570 (TRAV25, TRAJ42)
CAGNYGGSQGNLIF

SEQ ID NO: 475140 - protein, 15 aa, Homo sapiens
  CDR3 for beta chain variable domain of TCR clone 237570 (TRBV6-1, TRBJ2-6)
CASTGSRSGANGLTF

SEQ ID NO: 475141 - protein, 14 aa, Homo sapiens
  CDR3 for alpha chain variable domain of TCR clone 237571 (TRAV1-2, TRAJ16)
CAVNRSSDGQKLLF

SEQ ID NO: 475142 - protein, 11 aa, Homo sapiens
  CDR3 for beta chain variable domain of TCR clone 237571 (TRBV7-9, TRBJ2-3)
CASSPTDTQYF

SEQ ID NO: 475143 - protein, 18 aa, Homo sapiens
  CDR3 for alpha chain variable domain of TCR clone 237572 (TRAV21, TRAJ52)
CAVRPSPAGGTSYGKLTF

SEQ ID NO: 475144 - protein, 14 aa, Homo sapiens
  CDR3 for beta chain variable domain of TCR clone 237572 (TRBV28, TRBJ2-5)
CASSLRGLEETQYF

SEQ ID NO: 475145 - protein, 15 aa, Homo sapiens
  CDR3 for alpha chain variable domain of TCR clone 237573 (TRAV20, TRAJ50)
CAVRQMKTSDDKVIF

SEQ ID NO: 475146 - protein, 17 aa, Homo sapiens
  CDR3 for beta chain variable domain of TCR clone 237573 (TRBV28, TRBJ2-7)
CASSPLHRASGVYEQYF

SEQ ID NO: 475147 - protein, 14 aa, Homo sapiens
  CDR3 for alpha chain variable domain of TCR clone 237574 (TRAV12-3, TRAJ10)
SHLPLTGGGNKLTF

SEQ ID NO: 475148 - protein, 14 aa, Homo sapiens
  CDR3 for beta chain variable domain of TCR clone 237574 (TRBV6-3, TRBJ2-7)
CASSYSVRVYEQYF

SEQ ID NO: 475149 - protein, 15 aa, Homo sapiens
  CDR3 for alpha chain variable domain of TCR clone 237575 (TRAV8-3, TRAJ11)
CAVGVLNSGYSTLTF

SEQ ID NO: 475150 - protein, 16 aa, Homo sapiens
  CDR3 for beta chain variable domain of TCR clone 237575 (TRBV7-9, TRBJ1-2)
CASSLGFSSGEDGYTF

SEQ ID NO: 475151 - protein, 13 aa, Homo sapiens
  CDR3 for alpha chain variable domain of TCR clone 237576 (TRAV35, TRAJ42)
CAGFPGSQGNLIV

SEQ ID NO: 475152 - protein, 13 aa, Homo sapiens
  CDR3 for beta chain variable domain of TCR clone 237576 (TRBV29-1, TRBJ2-1)
CSVEGGGVNEQFF

SEQ ID NO: 475153 - protein, 12 aa, Homo sapiens
  CDR3 for alpha chain variable domain of TCR clone 237577 (TRAV3, TRAJ43)
CAVGDPNNDMRF

SEQ ID NO: 475154 - protein, 14 aa, Homo sapiens
  CDR3 for beta chain variable domain of TCR clone 237577 (TRBV5-1, TRBJ2-3)
CASSLFGPTDTQYF

SEQ ID NO: 475155 - protein, 13 aa, Homo sapiens
  CDR3 for alpha chain variable domain of TCR clone 237578 (TRAV3, TRAJ20)
CAVRDTPRYKLSF

SEQ ID NO: 475156 - protein, 20 aa, Homo sapiens
  CDR3 for beta chain variable domain of TCR clone 237578 (TRBV3-1, TRBJ2-6)
CASSPRPGLEGGAGANVLTF

SEQ ID NO: 475157 - protein, 13 aa, Homo sapiens
  CDR3 for alpha chain variable domain of TCR clone 237579 (TRAV3, TRAJ20)
CAVRSLNDYKLSF

SEQ ID NO: 475158 - protein, 14 aa, Homo sapiens
  CDR3 for beta chain variable domain of TCR clone 237579 (TRBV7-2, TRBJ1-1)
CASSFLTGTTEAFF

SEQ ID NO: 475159 - protein, 16 aa, Homo sapiens
  CDR3 for alpha chain variable domain of TCR clone 237580 (TRAV12-3, TRAJ53)
CAMSVVSGGSNYKLTF

SEQ ID NO: 475160 - protein, 11 aa, Homo sapiens
  CDR3 for beta chain variable domain of TCR clone 237580 (TRBV29-1, TRBJ2-5)
CSVASGETQYF

SEQ ID NO: 475161 - protein, 13 aa, Homo sapiens
  CDR3 for alpha chain variable domain of TCR clone 237581 (TRAV12-2, TRAJ52)
CAVSGTSYGKLTF

SEQ ID NO: 475162 - protein, 15 aa, Homo sapiens
  CDR3 for beta chain variable domain of TCR clone 237581 (TRBV19, TRBJ2-1)
CASSRGGSSYNEQFF

SEQ ID NO: 475163 - protein, 14 aa, Homo sapiens
  CDR3 for alpha chain variable domain of TCR clone 237582 (TRAV13-2, TRAJ17)
CAENSKAAGNKLTF

SEQ ID NO: 475164 - protein, 15 aa, Homo sapiens
  CDR3 for beta chain variable domain of TCR clone 237582 (TRBV5-1, TRBJ2-3)
CASSVTSGSTDTQYC

SEQ ID NO: 475165 - protein, 15 aa, Homo sapiens
  CDR3 for alpha chain variable domain of TCR clone 237583 (TRAV12-2, TRAJ53)
CAVNGGGGSNYKLTF

SEQ ID NO: 475166 - protein, 13 aa, Homo sapiens
  CDR3 for beta chain variable domain of TCR clone 237583 (TRBV18, TRBJ1-1)
CASSGGRNTEAFF

SEQ ID NO: 475167 - protein, 15 aa, Homo sapiens
  CDR3 for alpha chain variable domain of TCR clone 237584 (TRAV21, TRAJ53)
CATLNSGGSNYKLTF

SEQ ID NO: 475168 - protein, 16 aa, Homo sapiens
  CDR3 for beta chain variable domain of TCR clone 237584 (TRBV11-3, TRBJ2-4)
CASSAERTLAKNIQYF

SEQ ID NO: 475169 - protein, 13 aa, Homo sapiens
  CDR3 for alpha chain variable domain of TCR clone 237585 (TRAV3, TRAJ20)
CAVRDTPRYKLGF

SEQ ID NO: 475170 - protein, 14 aa, Homo sapiens
  CDR3 for beta chain variable domain of TCR clone 237585 (TRBV11-1, TRBJ2-7)
CASTFAVPSYEQYF

SEQ ID NO: 475171 - protein, 12 aa, Homo sapiens
  CDR3 for alpha chain variable domain of TCR clone 237586 (TRAV13-1, TRAJ48)
CAANFGNEKLTF

SEQ ID NO: 475172 - protein, 11 aa, Homo sapiens
  CDR3 for beta chain variable domain of TCR clone 237586 (TRBV28, TRBJ2-7)
CASGPLPEQYF

SEQ ID NO: 475173 - protein, 18 aa, Homo sapiens
  CDR3 for alpha chain variable domain of TCR clone 237587 (TRAV26-2, TRAJ54)
CILRDVEVGIQGAQKLVF

SEQ ID NO: 475174 - protein, 14 aa, Homo sapiens
  CDR3 for beta chain variable domain of TCR clone 237587 (TRBV7-8, TRBJ2-1)
CATERERSYNEQFF

SEQ ID NO: 475175 - protein, 11 aa, Homo sapiens
  CDR3 for alpha chain variable domain of TCR clone 237588 (TRAV27, TRAJ47)
SIVEYGNKLVF

SEQ ID NO: 475176 - protein, 14 aa, Homo sapiens
  CDR3 for beta chain variable domain of TCR clone 237588 (TRBV12-5, TRBJ2-5)
CASGSRTHQETQYF

SEQ ID NO: 475177 - protein, 13 aa, Homo sapiens
  CDR3 for alpha chain variable domain of TCR clone 237589 (TRAV12-2, TRAJ6)
CAVNVSRKLHTCI

SEQ ID NO: 475178 - protein, 14 aa, Homo sapiens
  CDR3 for beta chain variable domain of TCR clone 237589 (TRBV19, TRBJ2-1)
CASPTFVLSGEQFF

SEQ ID NO: 475179 - protein, 17 aa, Homo sapiens
  CDR3 for alpha chain variable domain of TCR clone 237590 (TRAV26-1, TRAJ37)
CIVRVITVSSNTGNLIF

SEQ ID NO: 475180 - protein, 11 aa, Homo sapiens
  CDR3 for beta chain variable domain of TCR clone 237590 (TRBV29-1, TRBJ2-5)
CSEDRTGTQYF

SEQ ID NO: 475181 - protein, 16 aa, Homo sapiens
  CDR3 for alpha chain variable domain of TCR clone 237591 (TRAV1-2, TRAJ10)
CAVRGVLTGGGNKLTF

SEQ ID NO: 475182 - protein, 15 aa, Homo sapiens
  CDR3 for beta chain variable domain of TCR clone 237591 (TRBV29-1, TRBJ2-1)
CSVGRHAVFYNEQFF

SEQ ID NO: 475183 - protein, 16 aa, Homo sapiens
  CDR3 for alpha chain variable domain of TCR clone 237592 (TRAV20, TRAJ53)
CAVQGNSGGSNYKLTF

SEQ ID NO: 475184 - protein, 16 aa, Homo sapiens
  CDR3 for beta chain variable domain of TCR clone 237592 (TRBV12-4, TRBJ1-2)
CASSPTATGKTRGYTF

SEQ ID NO: 475185 - protein, 14 aa, Homo sapiens
  CDR3 for alpha chain variable domain of TCR clone 237593 (TRAV1-2, TRAJ16)
CSVNRFSDGQKLLF

SEQ ID NO: 475186 - protein, 17 aa, Homo sapiens
  CDR3 for beta chain variable domain of TCR clone 237593 (TRBV6-5, TRBJ2-1)
CASRLSGRFESYNEQFF

SEQ ID NO: 475187 - protein, 13 aa, Homo sapiens
  CDR3 for alpha chain variable domain of TCR clone 237594 (TRAV30, TRAJ6)
CGFIGGGSYIPTF

SEQ ID NO: 475188 - protein, 13 aa, Homo sapiens
  CDR3 for beta chain variable domain of TCR clone 237594 (TRBV5-4, TRBJ2-5)
CASGPVSQETQYF

SEQ ID NO: 475189 - protein, 11 aa, Homo sapiens
  CDR3 for alpha chain variable domain of TCR clone 237595 (TRAV21, TRAJ11)
CAVNEYSTLTF

SEQ ID NO: 475190 - protein, 11 aa, Homo sapiens
  CDR3 for beta chain variable domain of TCR clone 237595 (TRBV19, TRBJ1-1)
CASSIGSEAFF

SEQ ID NO: 475191 - protein, 16 aa, Homo sapiens
  CDR3 for alpha chain variable domain of TCR clone 237596 (TRAV3, TRAJ37)
CAVRDSGSGNTGKLIF

SEQ ID NO: 475192 - protein, 12 aa, Homo sapiens
  CDR3 for beta chain variable domain of TCR clone 237596 (TRBV7-2, TRBJ2-5)
CASSLYQETQDF

SEQ ID NO: 475193 - protein, 12 aa, Homo sapiens
  CDR3 for alpha chain variable domain of TCR clone 237597 (TRAV12-1, TRAJ20)
CMVNPDDYKLSF

SEQ ID NO: 475194 - protein, 12 aa, Homo sapiens
  CDR3 for beta chain variable domain of TCR clone 237597 (TRBV11-2, TRBJ2-2)
CASSLGGGELFF

SEQ ID NO: 475195 - protein, 15 aa, Homo sapiens
  CDR3 for alpha chain variable domain of TCR clone 237598 (TRAV3, TRAJ15)
CAVRPANQAGTALIF

SEQ ID NO: 475196 - protein, 11 aa, Homo sapiens
  CDR3 for beta chain variable domain of TCR clone 237598 (TRBV29-1, TRBJ2-5)
CSEDRTGTQYF

SEQ ID NO: 475197 - protein, 14 aa, Homo sapiens
  CDR3 for alpha chain variable domain of TCR clone 237599 (TRAV17, TRAJ37)
CATDGSSNTGKLIF

SEQ ID NO: 475198 - protein, 12 aa, Homo sapiens
  CDR3 for beta chain variable domain of TCR clone 237599 (TRBV11-2, TRBJ2-1)
CASSPGNNEQFF

SEQ ID NO: 475199 - protein, 14 aa, Homo sapiens
  CDR3 for alpha chain variable domain of TCR clone 237600 (TRAV12-2, TRAJ13)
CSVKKTGGYPKVTF

SEQ ID NO: 475200 - protein, 15 aa, Homo sapiens
  CDR3 for beta chain variable domain of TCR clone 237600 (TRBV27, TRBJ2-1)
CASSNGGGSSNEQFF

SEQ ID NO: 475201 - protein, 15 aa, Homo sapiens
  CDR3 for alpha chain variable domain of TCR clone 237601 (TRAV21, TRAJ53)
CATLNSGGSNYKLTF

SEQ ID NO: 475202 - protein, 16 aa, Homo sapiens
  CDR3 for beta chain variable domain of TCR clone 237601 (TRBV12-4, TRBJ2-3)
CASSLWLAETTDTQYF

SEQ ID NO: 475203 - protein, 15 aa, Homo sapiens
  CDR3 for alpha chain variable domain of TCR clone 237602 (TRAV8-3, TRAJ41)
CAVGSTSNSGYALNF

SEQ ID NO: 475204 - protein, 17 aa, Homo sapiens
  CDR3 for beta chain variable domain of TCR clone 237602 (TRBV25-1, TRBJ2-1)
CASSAYGQGRGVYEQFF

SEQ ID NO: 475205 - protein, 14 aa, Homo sapiens
  CDR3 for alpha chain variable domain of TCR clone 237603 (TRAV26-1, TRAJ6)
CIVSPVGGSYIPTF

SEQ ID NO: 475206 - protein, 16 aa, Homo sapiens
  CDR3 for beta chain variable domain of TCR clone 237603 (TRBV4-1, TRBJ2-5)
CASSAGLAGVLGTQYF

SEQ ID NO: 475207 - protein, 14 aa, Homo sapiens
  CDR3 for alpha chain variable domain of TCR clone 237604 (TRAV17, TRAJ54)
CATDANQGAQKLVF

SEQ ID NO: 475208 - protein, 13 aa, Homo sapiens
  CDR3 for beta chain variable domain of TCR clone 237604 (TRBV15, TRBJ1-2)
CATSRGQLYGYTF

SEQ ID NO: 475209 - protein, 14 aa, Homo sapiens
  CDR3 for alpha chain variable domain of TCR clone 237605 (TRAV21, TRAJ58)
CAVGEETSGSRLTF

SEQ ID NO: 475210 - protein, 14 aa, Homo sapiens
  CDR3 for beta chain variable domain of TCR clone 237605 (TRBV7-2, TRBJ1-1)
CSSSFLTGTTEAFF

SEQ ID NO: 475211 - protein, 16 aa, Homo sapiens
  CDR3 for alpha chain variable domain of TCR clone 237606 (TRAV30, TRAJ24)
CGTEIVDADSWGKFQF

SEQ ID NO: 475212 - protein, 14 aa, Homo sapiens
  CDR3 for beta chain variable domain of TCR clone 237606 (TRBV12-5, TRBJ2-5)
CASGSRTRQETQYY

SEQ ID NO: 475213 - protein, 12 aa, Homo sapiens
  CDR3 for alpha chain variable domain of TCR clone 237607 (TRAV12-3, TRAJ17)
CAMTLTGNKLTF

SEQ ID NO: 475214 - protein, 14 aa, Homo sapiens
  CDR3 for beta chain variable domain of TCR clone 237607 (TRBV5-1, TRBJ1-4)
CASSRGGTDEKLFF

SEQ ID NO: 475215 - protein, 15 aa, Homo sapiens
  CDR3 for alpha chain variable domain of TCR clone 237608 (TRAV3, TRAJ13)
CAVRNIAGGYQKVTF

SEQ ID NO: 475216 - protein, 13 aa, Homo sapiens
  CDR3 for beta chain variable domain of TCR clone 237608 (TRBV2, TRBJ2-2)
CASSKKNTGELFF

SEQ ID NO: 475217 - protein, 13 aa, Homo sapiens
  CDR3 for alpha chain variable domain of TCR clone 237609 (TRAV20, TRAJ37)
CAGCSSSTGKLIF

SEQ ID NO: 475218 - protein, 10 aa, Homo sapiens
  CDR3 for beta chain variable domain of TCR clone 237609 (TRBV12-4, TRBJ2-3)
CSTDTDTQYF

SEQ ID NO: 475219 - protein, 15 aa, Homo sapiens
  CDR3 for alpha chain variable domain of TCR clone 237610 (TRAV3, TRAJ20)
CAVSYLRSNDYKLSF

SEQ ID NO: 475220 - protein, 16 aa, Homo sapiens
  CDR3 for beta chain variable domain of TCR clone 237610 (TRBV28, TRBJ2-7)
CASSLRGLAGGYEQYV

SEQ ID NO: 475221 - protein, 15 aa, Homo sapiens
  CDR3 for alpha chain variable domain of TCR clone 237611 (TRAV16, TRAJ20)
CALTGGLRADYKLSF

SEQ ID NO: 475222 - protein, 16 aa, Homo sapiens
  CDR3 for beta chain variable domain of TCR clone 237611 (TRBV11-3, TRBJ2-2)
CASSSRTSPGTGELFF

SEQ ID NO: 475223 - protein, 14 aa, Homo sapiens
  CDR3 for alpha chain variable domain of TCR clone 237612 (TRAV12-2, TRAJ24)
CAVTPAASWGKLQF

SEQ ID NO: 475224 - protein, 16 aa, Homo sapiens
  CDR3 for beta chain variable domain of TCR clone 237612 (TRBV6-4, TRBJ2-3)
APSEGGRAWGTDTQYF

SEQ ID NO: 475225 - protein, 14 aa, Homo sapiens
  CDR3 for alpha chain variable domain of TCR clone 237613 (TRAV8-3, TRAJ27)
CAGGRNTNAGKSTF

SEQ ID NO: 475226 - protein, 15 aa, Homo sapiens
  CDR3 for beta chain variable domain of TCR clone 237613 (TRBV28, TRBJ1-3)
CASSMGWASGNTIYF

SEQ ID NO: 475227 - protein, 14 aa, Homo sapiens
  CDR3 for alpha chain variable domain of TCR clone 237614 (TRAV17, TRAJ5)
CATVALTGRRALNF

SEQ ID NO: 475228 - protein, 14 aa, Homo sapiens
  CDR3 for beta chain variable domain of TCR clone 237614 (TRBV28, TRBJ2-7)
CASSPYGMAYEQYL

SEQ ID NO: 475229 - protein, 23 aa, Homo sapiens
  CDR3 for alpha chain variable domain of TCR clone 237615 (TRAV8-6, TRAJ38)
CAVRNAGNNHIQNPYPAVYQLRD

SEQ ID NO: 475230 - protein, 15 aa, Homo sapiens
  CDR3 for beta chain variable domain of TCR clone 237615 (TRBV4-1, TRBJ2-2)
CASSEGQGITGELFF

SEQ ID NO: 475231 - protein, 15 aa, Homo sapiens
  CDR3 for alpha chain variable domain of TCR clone 237616 (TRAV29/DV5, TRAJ29)
CAASERSSGNTPLVF

SEQ ID NO: 475232 - protein, 16 aa, Homo sapiens
  CDR3 for beta chain variable domain of TCR clone 237616 (TRBV11-2, TRBJ2-7)
CASSPTTGGVSYEQYF

SEQ ID NO: 475233 - protein, 16 aa, Homo sapiens
  CDR3 for alpha chain variable domain of TCR clone 237617 (TRAV1-2, TRAJ10)
CAVRGVLTGGGNKHTF

SEQ ID NO: 475234 - protein, 12 aa, Homo sapiens
  CDR3 for beta chain variable domain of TCR clone 237617 (TRBV7-8, TRBJ2-7)
CASSPGDREQYF

SEQ ID NO: 475235 - protein, 16 aa, Homo sapiens
  CDR3 for alpha chain variable domain of TCR clone 237618 (TRAV16, TRAJ52)
CALSAAGGTSYGKLTF

SEQ ID NO: 475236 - protein, 14 aa, Homo sapiens
  CDR3 for beta chain variable domain of TCR clone 237618 (TRBV20-1, TRBJ2-5)
CSASGTPDQETQYF

SEQ ID NO: 475237 - protein, 13 aa, Homo sapiens
  CDR3 for alpha chain variable domain of TCR clone 237619 (TRAV35, TRAJ37)
CAESSGNTGKLIF

SEQ ID NO: 475238 - protein, 16 aa, Homo sapiens
  CDR3 for beta chain variable domain of TCR clone 237619 (TRBV10-3, TRBJ2-1)
CAISLTSGNSYNEQFF

SEQ ID NO: 475239 - protein, 12 aa, Homo sapiens
  CDR3 for alpha chain variable domain of TCR clone 237620 (TRAV8-4, TRAJ43)
CAVSVNNNGMRF

SEQ ID NO: 475240 - protein, 13 aa, Homo sapiens
  CDR3 for beta chain variable domain of TCR clone 237620 (TRBV7-7, TRBJ1-1)
CASSLGANTEAFF

SEQ ID NO: 475241 - protein, 16 aa, Homo sapiens
  CDR3 for alpha chain variable domain of TCR clone 237621 (TRAV1-2, TRAJ10)
CAVRGVLTGGGNKLTF

SEQ ID NO: 475242 - protein, 17 aa, Homo sapiens
  CDR3 for beta chain variable domain of TCR clone 237621 (TRBV15, TRBJ1-5)
CATSRAPPGTRSQPQHF

SEQ ID NO: 475243 - protein, 12 aa, Homo sapiens
  CDR3 for alpha chain variable domain of TCR clone 237622 (TRAV12-2, TRAJ31)
CAVNTPDARLMF

SEQ ID NO: 475244 - protein, 13 aa, Homo sapiens
  CDR3 for beta chain variable domain of TCR clone 237622 (TRBV2, TRBJ1-5)
CATAGPGNQPQHF

SEQ ID NO: 475245 - protein, 13 aa, Homo sapiens
  CDR3 for alpha chain variable domain of TCR clone 237623 (TRAV17, TRAJ4)
CATKAGGYNKLIF

SEQ ID NO: 475246 - protein, 14 aa, Homo sapiens
  CDR3 for beta chain variable domain of TCR clone 237623 (TRBV20-1, TRBJ1-5)
CSARDDRGNQPQHF

SEQ ID NO: 475247 - protein, 16 aa, Homo sapiens
  CDR3 for alpha chain variable domain of TCR clone 237624 (TRAV1-2, TRAJ6)
CAVRDQGTGGSYIPTF

SEQ ID NO: 475248 - protein, 16 aa, Homo sapiens
  CDR3 for beta chain variable domain of TCR clone 237624 (TRBV7-2, TRBJ2-5)
CASSPFPTGGEETQYF

SEQ ID NO: 475249 - protein, 11 aa, Homo sapiens
  CDR3 for alpha chain variable domain of TCR clone 237625 (TRAV13-1, TRAJ6)
CATLGSYIPTF

SEQ ID NO: 475250 - protein, 13 aa, Homo sapiens
  CDR3 for beta chain variable domain of TCR clone 237625 (TRBV6-6, TRBJ2-1)
CTSSLHQGDEQFF

SEQ ID NO: 475251 - protein, 12 aa, Homo sapiens
  CDR3 for alpha chain variable domain of TCR clone 237626 (TRAV36/DV7, TRAJ37)
CACYGNTGKLTF

SEQ ID NO: 475252 - protein, 14 aa, Homo sapiens
  CDR3 for beta chain variable domain of TCR clone 237626 (TRBV6-3, TRBJ1-4)
CASSGQNLNEKLFF

SEQ ID NO: 475253 - protein, 11 aa, Homo sapiens
  CDR3 for alpha chain variable domain of TCR clone 237627 (TRAV2, TRAJ33)
CAVDSNYQLIW

SEQ ID NO: 475254 - protein, 14 aa, Homo sapiens
  CDR3 for beta chain variable domain of TCR clone 237627 (TRBV7-9, TRBJ2-3)
CASSLEQGTNTQYF

SEQ ID NO: 475255 - protein, 12 aa, Homo sapiens
  CDR3 for alpha chain variable domain of TCR clone 237628 (TRAV24, TRAJ47)
CAFGEYGNKLVF

SEQ ID NO: 475256 - protein, 16 aa, Homo sapiens
  CDR3 for beta chain variable domain of TCR clone 237628 (TRBV7-9, TRBJ2-1)
CASSDVAGGSYNEQFF

SEQ ID NO: 475257 - protein, 15 aa, Homo sapiens
  CDR3 for alpha chain variable domain of TCR clone 237629 (TRAV8-6, TRAJ38)
CAVSSNAGNNRKLIW

SEQ ID NO: 475258 - protein, 14 aa, Homo sapiens
  CDR3 for beta chain variable domain of TCR clone 237629 (TRBV12-4, TRBJ2-7)
CASSPSGSPYEQYF

SEQ ID NO: 475259 - protein, 14 aa, Homo sapiens
  CDR3 for alpha chain variable domain of TCR clone 237630 (TRAV1-2, TRAJ16)
CAVNRFSDGQKLLF

SEQ ID NO: 475260 - protein, 13 aa, Homo sapiens
  CDR3 for beta chain variable domain of TCR clone 237630 (TRBV7-9, TRBJ2-5)
CASSKTSVETQYF

SEQ ID NO: 475261 - protein, 18 aa, Homo sapiens
  CDR3 for alpha chain variable domain of TCR clone 237631 (TRAV26-2, TRAJ54)
CILRDVEVGIQGAQKLVF

SEQ ID NO: 475262 - protein, 14 aa, Homo sapiens
  CDR3 for beta chain variable domain of TCR clone 237631 (TRBV27, TRBJ2-2)
CASRPGVNTGELFF

SEQ ID NO: 475263 - protein, 14 aa, Homo sapiens
  CDR3 for alpha chain variable domain of TCR clone 237632 (TRAV13-1, TRAJ35)
CAASKGGFGNLLHG

SEQ ID NO: 475264 - protein, 13 aa, Homo sapiens
  CDR3 for beta chain variable domain of TCR clone 237632 (TRBV7-3, TRBJ1-1)
CASSQDWGAEAFF

SEQ ID NO: 475265 - protein, 18 aa, Homo sapiens
  CDR3 for alpha chain variable domain of TCR clone 237633 (TRAV13-1, TRAJ4)
CSKYKEVPWRGGYNKLIF

SEQ ID NO: 475266 - protein, 13 aa, Homo sapiens
  CDR3 for beta chain variable domain of TCR clone 237633 (TRBV4-2, TRBJ1-1)
CASSQAGNTEAFF

SEQ ID NO: 475267 - protein, 14 aa, Homo sapiens
  CDR3 for alpha chain variable domain of TCR clone 237634 (TRAV12-2, TRAJ53)
CAVKGGGSNYKLTF

SEQ ID NO: 475268 - protein, 13 aa, Homo sapiens
  CDR3 for beta chain variable domain of TCR clone 237634 (TRBV20-1, TRBJ2-5)
CSAREAFQETQYF

SEQ ID NO: 475269 - protein, 11 aa, Homo sapiens
  CDR3 for alpha chain variable domain of TCR clone 237635 (TRAV2, TRAJ13)
CASGGYQKVNF

SEQ ID NO: 475270 - protein, 16 aa, Homo sapiens
  CDR3 for beta chain variable domain of TCR clone 237635 (TRBV2, TRBJ2-1)
CASSVGGSLSYNEQFF

SEQ ID NO: 475271 - protein, 12 aa, Homo sapiens
  CDR3 for alpha chain variable domain of TCR clone 237636 (TRAV13-1, TRAJ16)
CAAVADGQKLLF

SEQ ID NO: 475272 - protein, 16 aa, Homo sapiens
  CDR3 for beta chain variable domain of TCR clone 237636 (TRBV7-2, TRBJ2-1)
CASSLVAGAGYNEQFF

SEQ ID NO: 475273 - protein, 12 aa, Homo sapiens
  CDR3 for alpha chain variable domain of TCR clone 237637 (TRAV13-2, TRAJ23)
CAGRHRGGKLIF

SEQ ID NO: 475274 - protein, 16 aa, Homo sapiens
  CDR3 for beta chain variable domain of TCR clone 237637 (TRBV4-1, TRBJ2-5)
CASSHADRAGGETQYF

SEQ ID NO: 475275 - protein, 12 aa, Homo sapiens
  CDR3 for alpha chain variable domain of TCR clone 237638 (TRAV35, TRAJ12)
CAGMDSSYKLIF

SEQ ID NO: 475276 - protein, 18 aa, Homo sapiens
  CDR3 for beta chain variable domain of TCR clone 237638 (TRBV28, TRBJ2-5)
CASSLYRGTDPVLRARHA

SEQ ID NO: 475277 - protein, 16 aa, Homo sapiens
  CDR3 for alpha chain variable domain of TCR clone 237639 (TRAV38-1, TRAJ56)
CAFMKRQTGANSKLTF

SEQ ID NO: 475278 - protein, 18 aa, Homo sapiens
  CDR3 for beta chain variable domain of TCR clone 237639 (TRBV7-9, TRBJ2-7)
CASSLTTSGSRTWYEQYF

SEQ ID NO: 475279 - protein, 17 aa, Homo sapiens
  CDR3 for alpha chain variable domain of TCR clone 237640 (TRAV14/DV4, TRAJ33)
CAMREGLWIYSNYQLIW

SEQ ID NO: 475280 - protein, 18 aa, Homo sapiens
  CDR3 for beta chain variable domain of TCR clone 237640 (TRBV20-1, TRBJ2-6)
CSARGSGTTRSGANVLTF

SEQ ID NO: 475281 - protein, 12 aa, Homo sapiens
  CDR3 for alpha chain variable domain of TCR clone 237641 (TRAV26-1, TRAJ36)
CVVRVRADNPFF

SEQ ID NO: 475282 - protein, 14 aa, Homo sapiens
  CDR3 for beta chain variable domain of TCR clone 237641 (TRBV14, TRBJ2-3)
CASSRKLAADTQYF

SEQ ID NO: 475283 - protein, 13 aa, Homo sapiens
  CDR3 for alpha chain variable domain of TCR clone 237642 (TRAV30, TRAJ16)
CGTFGGDGQKLLF

SEQ ID NO: 475284 - protein, 15 aa, Homo sapiens
  CDR3 for beta chain variable domain of TCR clone 237642 (TRBV7-8, TRBJ2-3)
CASSPRTGSTDTQYF

SEQ ID NO: 475285 - protein, 14 aa, Homo sapiens
  CDR3 for alpha chain variable domain of TCR clone 237643 (TRAV2, TRAJ9)
CAVEDRSGGFKTIF

SEQ ID NO: 475286 - protein, 16 aa, Homo sapiens
  CDR3 for beta chain variable domain of TCR clone 237643 (TRBV2, TRBJ2-5)
CASSTLRDRDRENQYF

SEQ ID NO: 475287 - protein, 14 aa, Homo sapiens
  CDR3 for alpha chain variable domain of TCR clone 237644 (TRAV26-1, TRAJ38)
CIAANAGNNRKLIW

SEQ ID NO: 475288 - protein, 13 aa, Homo sapiens
  CDR3 for beta chain variable domain of TCR clone 237644 (TRBV20-1, TRBJ1-1)
CSARSGGNTEAFF

SEQ ID NO: 475289 - protein, 15 aa, Homo sapiens
  CDR3 for alpha chain variable domain of TCR clone 237645 (TRAV21, TRAJ24)
CAARSSTDSWGKLQF

SEQ ID NO: 475290 - protein, 15 aa, Homo sapiens
  CDR3 for beta chain variable domain of TCR clone 237645 (TRBV7-2, TRBJ2-1)
CAWSSGLAGGNEQFF

SEQ ID NO: 475291 - protein, 15 aa, Homo sapiens
  CDR3 for alpha chain variable domain of TCR clone 237646 (TRAV20, TRAJ24)
CAVQTAPDSWGKFQF

SEQ ID NO: 475292 - protein, 14 aa, Homo sapiens
  CDR3 for beta chain variable domain of TCR clone 237646 (TRBV20-1, TRBJ1-1)
CSARDRGQGSEAFF

SEQ ID NO: 475293 - protein, 13 aa, Homo sapiens
  CDR3 for alpha chain variable domain of TCR clone 237647 (TRAV27, TRAJ17)
CAGAATAGYKLTF

SEQ ID NO: 475294 - protein, 15 aa, Homo sapiens
  CDR3 for beta chain variable domain of TCR clone 237647 (TRBV5-1, TRBJ2-3)
CASRNQAGSTDTQYF

SEQ ID NO: 475295 - protein, 11 aa, Homo sapiens
  CDR3 for alpha chain variable domain of TCR clone 237648 (TRAV8-3, TRAJ18)
SAVGGRQRLNP

SEQ ID NO: 475296 - protein, 12 aa, Homo sapiens
  CDR3 for beta chain variable domain of TCR clone 237648 (TRBV28, TRBJ2-6)
CAIQAGANVLTF

SEQ ID NO: 475297 - protein, 14 aa, Homo sapiens
  CDR3 for alpha chain variable domain of TCR clone 237649 (TRAV29/DV5, TRAJ32)
CAAAYGGATIKLIF

SEQ ID NO: 475298 - protein, 15 aa, Homo sapiens
  CDR3 for beta chain variable domain of TCR clone 237649 (TRBV27, TRBJ2-7)
CASSTAGTGSYEQYF

SEQ ID NO: 475299 - protein, 14 aa, Homo sapiens
  CDR3 for alpha chain variable domain of TCR clone 237650 (TRAV8-1, TRAJ32)
CAVNARGATNKLIF

SEQ ID NO: 475300 - protein, 18 aa, Homo sapiens
  CDR3 for beta chain variable domain of TCR clone 237650 (TRBV9, TRBJ2-7)
CASSLTTSGSRTWYEQYF

SEQ ID NO: 475301 - protein, 12 aa, Homo sapiens
  CDR3 for alpha chain variable domain of TCR clone 237651 (TRAV8-3, TRAJ20)
CAVDFNDYKLSF

SEQ ID NO: 475302 - protein, 15 aa, Homo sapiens
  CDR3 for beta chain variable domain of TCR clone 237651 (TRBV6-3, TRBJ2-7)
CASSSPGTVFYEQYF

SEQ ID NO: 475303 - protein, 12 aa, Homo sapiens
  CDR3 for alpha chain variable domain of TCR clone 237652 (TRAV29/DV5, TRAJ15)
CASNQAGTALIF

SEQ ID NO: 475304 - protein, 14 aa, Homo sapiens
  CDR3 for beta chain variable domain of TCR clone 237652 (TRBV20-1, TRBJ2-3)
CSARGGTSTDTQYF

SEQ ID NO: 475305 - protein, 14 aa, Homo sapiens
  CDR3 for alpha chain variable domain of TCR clone 237653 (TRAV29/DV5, TRAJ47)
CAASSIEYGNKLVF

SEQ ID NO: 475306 - protein, 14 aa, Homo sapiens
  CDR3 for beta chain variable domain of TCR clone 237653 (TRBV12-5, TRBJ2-5)
CASGSRTHQETQYF

SEQ ID NO: 475307 - protein, 11 aa, Homo sapiens
  CDR3 for alpha chain variable domain of TCR clone 237654 (TRAV35, TRAJ30)
CAGPEDDKIIF

SEQ ID NO: 475308 - protein, 14 aa, Homo sapiens
  CDR3 for beta chain variable domain of TCR clone 237654 (TRBV7-6, TRBJ1-6)
CASSQAGGGSPLHV

SEQ ID NO: 475309 - protein, 13 aa, Homo sapiens
  CDR3 for alpha chain variable domain of TCR clone 237655 (TRAV38-1, TRAJ42)
CARWGGIQGNLIF

SEQ ID NO: 475310 - protein, 17 aa, Homo sapiens
  CDR3 for beta chain variable domain of TCR clone 237655 (TRBV20-1, TRBJ2-1)
CSARDPLAGVWDNEQFF

SEQ ID NO: 475311 - protein, 15 aa, Homo sapiens
  CDR3 for alpha chain variable domain of TCR clone 237656 (TRAV2, TRAJ22)
CAVPSRGGSARQLTF

SEQ ID NO: 475312 - protein, 15 aa, Homo sapiens
  CDR3 for beta chain variable domain of TCR clone 237656 (TRBV29-1, TRBJ2-1)
CSVEGGPASYNEQIF

SEQ ID NO: 475313 - protein, 12 aa, Homo sapiens
  CDR3 for alpha chain variable domain of TCR clone 237657 (TRAV21, TRAJ26)
CAAYNYGQNFVF

SEQ ID NO: 475314 - protein, 14 aa, Homo sapiens
  CDR3 for beta chain variable domain of TCR clone 237657 (TRBV7-2, TRBJ2-7)
CASRSQGAAYEQYF

SEQ ID NO: 475315 - protein, 13 aa, Homo sapiens
  CDR3 for alpha chain variable domain of TCR clone 237658 (TRAV12-2, TRAJ4)
CAGFSGGYNKLIF

SEQ ID NO: 475316 - protein, 14 aa, Homo sapiens
  CDR3 for beta chain variable domain of TCR clone 237658 (TRBV5-1, TRBJ2-2)
CASSLAGGSGELFF

SEQ ID NO: 475317 - protein, 15 aa, Homo sapiens
  CDR3 for alpha chain variable domain of TCR clone 237659 (TRAV17, TRAJ23)
CATDAEDNQGGKLIF

SEQ ID NO: 475318 - protein, 17 aa, Homo sapiens
  CDR3 for beta chain variable domain of TCR clone 237659 (TRBV7-3, TRBJ2-5)
CASSLGSGRSGSETQYF

SEQ ID NO: 475319 - protein, 14 aa, Homo sapiens
  CDR3 for alpha chain variable domain of TCR clone 237660 (TRAV2, TRAJ9)
CAVEDRSGGVKTIF

SEQ ID NO: 475320 - protein, 18 aa, Homo sapiens
  CDR3 for beta chain variable domain of TCR clone 237660 (TRBV11-2, TRBJ2-3)
CASSLGGASRGAPNTQYF

SEQ ID NO: 475321 - protein, 11 aa, Homo sapiens
  CDR3 for alpha chain variable domain of TCR clone 237661 (TRAV12-3, TRAJ43)
CAMSVSNDMRF

SEQ ID NO: 475322 - protein, 15 aa, Homo sapiens
  CDR3 for beta chain variable domain of TCR clone 237661 (TRBV9, TRBJ2-1)
CASSLAGSSYNEQFF

SEQ ID NO: 475323 - protein, 14 aa, Homo sapiens
  CDR3 for alpha chain variable domain of TCR clone 237662 (TRAV20, TRAJ42)
CAVQAGGSQGNTIF

SEQ ID NO: 475324 - protein, 14 aa, Homo sapiens
  CDR3 for beta chain variable domain of TCR clone 237662 (TRBV28, TRBJ1-2)
CASRIQGANYGYTF

SEQ ID NO: 475325 - protein, 14 aa, Homo sapiens
  CDR3 for alpha chain variable domain of TCR clone 237663 (TRAV16, TRAJ26)
CALSSANYGQNCVF

SEQ ID NO: 475326 - protein, 12 aa, Homo sapiens
  CDR3 for beta chain variable domain of TCR clone 237663 (TRBV6-5, TRBJ2-2)
CASRTGTGELFF

SEQ ID NO: 475327 - protein, 13 aa, Homo sapiens
  CDR3 for alpha chain variable domain of TCR clone 237664 (TRAV8-4, TRAJ49)
CAVRTLTGNQFYF

SEQ ID NO: 475328 - protein, 16 aa, Homo sapiens
  CDR3 for beta chain variable domain of TCR clone 237664 (TRBV28, TRBJ2-1)
CASSSPEYPRDNEQFF

SEQ ID NO: 475329 - protein, 13 aa, Homo sapiens
  CDR3 for alpha chain variable domain of TCR clone 237665 (TRAV21, TRAJ27)
CAARPGNAGKSTF

SEQ ID NO: 475330 - protein, 15 aa, Homo sapiens
  CDR3 for beta chain variable domain of TCR clone 237665 (TRBV6-3, TRBJ2-7)
CASSSPGTVFYEQFS

SEQ ID NO: 475331 - protein, 12 aa, Homo sapiens
  CDR3 for alpha chain variable domain of TCR clone 237666 (TRAV12-3, TRAJ39)
CAMTQAGNMLTF

SEQ ID NO: 475332 - protein, 16 aa, Homo sapiens
  CDR3 for beta chain variable domain of TCR clone 237666 (TRBV7-3, TRBJ2-1)
CASSKPLAGGYNEQFF

SEQ ID NO: 475333 - protein, 18 aa, Homo sapiens
  CDR3 for alpha chain variable domain of TCR clone 237667 (TRAV13-1, TRAJ52)
CAAKNPNAGGNSYGKLTF

SEQ ID NO: 475334 - protein, 16 aa, Homo sapiens
  CDR3 for beta chain variable domain of TCR clone 237667 (TRBV11-2, TRBJ2-7)
CASSPTTGGVSYEQYF

SEQ ID NO: 475335 - protein, 13 aa, Homo sapiens
  CDR3 for alpha chain variable domain of TCR clone 237668 (TRAV5, TRAJ11)
CAETTSGYSTLTF

SEQ ID NO: 475336 - protein, 15 aa, Homo sapiens
  CDR3 for beta chain variable domain of TCR clone 237668 (TRBV4-1, TRBJ2-5)
CASCQLAGGQETQYF

SEQ ID NO: 475337 - protein, 13 aa, Homo sapiens
  CDR3 for alpha chain variable domain of TCR clone 237669 (TRAV20, TRAJ29)
CAVQAVGKNTLVF

SEQ ID NO: 475338 - protein, 15 aa, Homo sapiens
  CDR3 for beta chain variable domain of TCR clone 237669 (TRBV10-2, TRBJ2-5)
CASRGSGGPQETQYL

SEQ ID NO: 475339 - protein, 16 aa, Homo sapiens
  CDR3 for alpha chain variable domain of TCR clone 237670 (TRAV12-1, TRAJ22)
CVVNTISSGTARQLTF

SEQ ID NO: 475340 - protein, 13 aa, Homo sapiens
  CDR3 for beta chain variable domain of TCR clone 237670 (TRBV19, TRBJ2-1)
CASNGGVFSEQFF

SEQ ID NO: 475341 - protein, 12 aa, Homo sapiens
  CDR3 for alpha chain variable domain of TCR clone 237671 (TRAV13-1, TRAJ9)
CAASISHWRLQN

SEQ ID NO: 475342 - protein, 16 aa, Homo sapiens
  CDR3 for beta chain variable domain of TCR clone 237671 (TRBV28, TRBJ2-2)
CASSLEGGSNTGELFF

SEQ ID NO: 475343 - protein, 10 aa, Homo sapiens
  CDR3 for alpha chain variable domain of TCR clone 237672 (TRAV4, TRAJ20)
CLVGYYKLSF

SEQ ID NO: 475344 - protein, 14 aa, Homo sapiens
  CDR3 for beta chain variable domain of TCR clone 237672 (TRBV20-1, TRBJ1-1)
CSAQTRIGGTEAFF

SEQ ID NO: 475345 - protein, 13 aa, Homo sapiens
  CDR3 for alpha chain variable domain of TCR clone 237673 (TRAV13-2, TRAJ48)
FAEMDFGNEKLTF

SEQ ID NO: 475346 - protein, 15 aa, Homo sapiens
  CDR3 for beta chain variable domain of TCR clone 237673 (TRBV7-9, TRBJ1-6)
CASSSPGCGNSPLHF

SEQ ID NO: 475347 - protein, 18 aa, Homo sapiens
  CDR3 for alpha chain variable domain of TCR clone 237674 (TRAV29/DV5, TRAJ52)
CAAGFRGAGGTSYGKLTF

SEQ ID NO: 475348 - protein, 16 aa, Homo sapiens
  CDR3 for beta chain variable domain of TCR clone 237674 (TRBV7-3, TRBJ2-2)
CARSLKRGTLSGELFF

SEQ ID NO: 475349 - protein, 16 aa, Homo sapiens
  CDR3 for alpha chain variable domain of TCR clone 237675 (TRAV25, TRAJ52)
CAGPRAGGTSYGKLAF

SEQ ID NO: 475350 - protein, 15 aa, Homo sapiens
  CDR3 for beta chain variable domain of TCR clone 237675 (TRBV10-3, TRBJ2-2)
CAIYTGGTGTGELFF

SEQ ID NO: 475351 - protein, 19 aa, Homo sapiens
  CDR3 for alpha chain variable domain of TCR clone 237676 (TRAV13-1, TRAJ52)
CAASPYQNAGGTSYGKLTF

SEQ ID NO: 475352 - protein, 13 aa, Homo sapiens
  CDR3 for beta chain variable domain of TCR clone 237676 (TRBV27, TRBJ1-1)
CASSLSIGAEAFF

SEQ ID NO: 475353 - protein, 15 aa, Homo sapiens
  CDR3 for alpha chain variable domain of TCR clone 237677 (TRAV3, TRAJ3)
CAVRDRDSSASKILF

SEQ ID NO: 475354 - protein, 15 aa, Homo sapiens
  CDR3 for beta chain variable domain of TCR clone 237677 (TRBV19, TRBJ2-1)
CASSSPGVPLDEQFF

SEQ ID NO: 475355 - protein, 12 aa, Homo sapiens
  CDR3 for alpha chain variable domain of TCR clone 237678 (TRAV2, TRAJ34)
CAVERNTDKLIF

SEQ ID NO: 475356 - protein, 14 aa, Homo sapiens
  CDR3 for beta chain variable domain of TCR clone 237678 (TRBV7-9, TRBJ2-1)
CASSDNSGYNERFF

SEQ ID NO: 475357 - protein, 17 aa, Homo sapiens
  CDR3 for alpha chain variable domain of TCR clone 237679 (TRAV38-2/DV8, TRAJ28)
CAFLTLYSGAGSYQLTF

SEQ ID NO: 475358 - protein, 16 aa, Homo sapiens
  CDR3 for beta chain variable domain of TCR clone 237679 (TRBV7-2, TRBJ2-5)
CASSPFPTGGEETQYF

SEQ ID NO: 475359 - protein, 15 aa, Homo sapiens
  CDR3 for alpha chain variable domain of TCR clone 237680 (TRAV4, TRAJ26)
CLVGDMNNYGQNFAF

SEQ ID NO: 475360 - protein, 16 aa, Homo sapiens
  CDR3 for beta chain variable domain of TCR clone 237680 (TRBV28, TRBJ1-4)
CASSSRTGAANEKLFF

SEQ ID NO: 475361 - protein, 14 aa, Homo sapiens
  CDR3 for alpha chain variable domain of TCR clone 237681 (TRAV12-2, TRAJ13)
CAVKKTGGYQKVTF

SEQ ID NO: 475362 - protein, 17 aa, Homo sapiens
  CDR3 for beta chain variable domain of TCR clone 237681 (TRBV15, TRBJ2-4)
CATSSDNPQTGLDIQYF

SEQ ID NO: 475363 - protein, 14 aa, Homo sapiens
  CDR3 for alpha chain variable domain of TCR clone 237682 (TRAV17, TRAJ45)
CATASGVGADGLTF

SEQ ID NO: 475364 - protein, 15 aa, Homo sapiens
  CDR3 for beta chain variable domain of TCR clone 237682 (TRBV11-2, TRBJ2-1)
CASSRNRGLMYEQFF

SEQ ID NO: 475365 - protein, 11 aa, Homo sapiens
  CDR3 for alpha chain variable domain of TCR clone 237683 (TRAV29/DV5, TRAJ31)
CAAMNNARLMF

SEQ ID NO: 475366 - protein, 13 aa, Homo sapiens
  CDR3 for beta chain variable domain of TCR clone 237683 (TRBV10-2, TRBJ1-1)
CASNDQMNTEAFF

SEQ ID NO: 475367 - protein, 10 aa, Homo sapiens
  CDR3 for alpha chain variable domain of TCR clone 237684 (TRAV14/DV4, TRAJ48)
CAPRSEKLNF

SEQ ID NO: 475368 - protein, 17 aa, Homo sapiens
  CDR3 for beta chain variable domain of TCR clone 237684 (TRBV28, TRBJ2-5)
CASSTPEGGALQETQYF

SEQ ID NO: 475369 - protein, 10 aa, Homo sapiens
  CDR3 for alpha chain variable domain of TCR clone 237685 (TRAV13-1, TRAJ42)
CAASLETTIL

SEQ ID NO: 475370 - protein, 16 aa, Homo sapiens
  CDR3 for beta chain variable domain of TCR clone 237685 (TRBV12-4, TRBJ1-5)
CASSRPVGGSNQPQHF

SEQ ID NO: 475371 - protein, 12 aa, Homo sapiens
  CDR3 for alpha chain variable domain of TCR clone 237686 (TRAV26-1, TRAJ53)
CIEGGSNYKLTF

SEQ ID NO: 475372 - protein, 13 aa, Homo sapiens
  CDR3 for beta chain variable domain of TCR clone 237686 (TRBV11-2, TRBJ2-7)
CASSGTRPYEQYF

SEQ ID NO: 475373 - protein, 11 aa, Homo sapiens
  CDR3 for alpha chain variable domain of TCR clone 237687 (TRAV1-2, TRAJ20)
CAVANDYKLSF

SEQ ID NO: 475374 - protein, 15 aa, Homo sapiens
  CDR3 for beta chain variable domain of TCR clone 237687 (TRBV7-2, TRBJ2-1)
CASTHGTGIYNEQFF

SEQ ID NO: 475375 - protein, 16 aa, Homo sapiens
  CDR3 for alpha chain variable domain of TCR clone 237688 (TRAV16, TRAJ4)
CALSRMFSGGYNKLIF

SEQ ID NO: 475376 - protein, 15 aa, Homo sapiens
  CDR3 for beta chain variable domain of TCR clone 237688 (TRBV4-1, TRBJ2-7)
CASSQQGQGFDEQYF

SEQ ID NO: 475377 - protein, 12 aa, Homo sapiens
  CDR3 for alpha chain variable domain of TCR clone 237689 (TRAV8-3, TRAJ20)
CAVGADDYKLSF

SEQ ID NO: 475378 - protein, 16 aa, Homo sapiens
  CDR3 for beta chain variable domain of TCR clone 237689 (TRBV19, TRBJ2-2)
CASRSPGTGATGEMFF

SEQ ID NO: 475379 - protein, 15 aa, Homo sapiens
  CDR3 for alpha chain variable domain of TCR clone 237690 (TRAV3, TRAJ20)
CAVRDIKLSDYKLSF

SEQ ID NO: 475380 - protein, 18 aa, Homo sapiens
  CDR3 for beta chain variable domain of TCR clone 237690 (TRBV27, TRBJ2-1)
CASGNRAVGVGSKNEQFF

SEQ ID NO: 475381 - protein, 11 aa, Homo sapiens
  CDR3 for alpha chain variable domain of TCR clone 237691 (TRAV2, TRAJ16)
CAVGDGQKLLF

SEQ ID NO: 475382 - protein, 13 aa, Homo sapiens
  CDR3 for beta chain variable domain of TCR clone 237691 (TRBV13, TRBJ1-1)
CASSGPDSGEAFF

SEQ ID NO: 475383 - protein, 13 aa, Homo sapiens
  CDR3 for alpha chain variable domain of TCR clone 237692 (TRAV13-2, TRAJ40)
CAEFTSGNYKYIF

SEQ ID NO: 475384 - protein, 13 aa, Homo sapiens
  CDR3 for beta chain variable domain of TCR clone 237692 (TRBV12-4, TRBJ1-2)
CASSLRQGKGYTF

SEQ ID NO: 475385 - protein, 11 aa, Homo sapiens
  CDR3 for alpha chain variable domain of TCR clone 237693 (TRAV2, TRAJ33)
CAVESNYQLIW

SEQ ID NO: 475386 - protein, 16 aa, Homo sapiens
  CDR3 for beta chain variable domain of TCR clone 237693 (TRBV11-1, TRBJ2-2)
CASSAEGLKNTGELFF

SEQ ID NO: 475387 - protein, 22 aa, Homo sapiens
  CDR3 for alpha chain variable domain of TCR clone 237694 (TRAV2, TRAJ9)
CAVEDRSGGFKLSLEQEQDYLL

SEQ ID NO: 475388 - protein, 15 aa, Homo sapiens
  CDR3 for beta chain variable domain of TCR clone 237694 (TRBV10-2, TRBJ2-6)
CASSEQGTGANVLTF

SEQ ID NO: 475389 - protein, 16 aa, Homo sapiens
  CDR3 for alpha chain variable domain of TCR clone 237695 (TRAV3, TRAJ10)
CAVRDMRAGGGNKLTF

SEQ ID NO: 475390 - protein, 15 aa, Homo sapiens
  CDR3 for beta chain variable domain of TCR clone 237695 (TRBV20-1, TRBJ2-3)
CSARPSGFYTDTQYF

SEQ ID NO: 475391 - protein, 13 aa, Homo sapiens
  CDR3 for alpha chain variable domain of TCR clone 237696 (TRAV8-6, TRAJ13)
CAVSSGGYQKVTF

SEQ ID NO: 475392 - protein, 22 aa, Homo sapiens
  CDR3 for beta chain variable domain of TCR clone 237696 (TRBV7-9, TRBJ2-7)
RGTRPCISVPAAYRWEANEQYF

SEQ ID NO: 475393 - protein, 16 aa, Homo sapiens
  CDR3 for alpha chain variable domain of TCR clone 237697 (TRAV12-2, TRAJ10)
CAVNRILTGGGNKLTF

SEQ ID NO: 475394 - protein, 12 aa, Homo sapiens
  CDR3 for beta chain variable domain of TCR clone 237697 (TRBV28, TRBJ2-7)
CASSFSSYEQYL

SEQ ID NO: 475395 - protein, 15 aa, Homo sapiens
  CDR3 for alpha chain variable domain of TCR clone 237698 (TRAV12-1, TRAJ52)
CVGNAGGTSYGKLTF

SEQ ID NO: 475396 - protein, 14 aa, Homo sapiens
  CDR3 for beta chain variable domain of TCR clone 237698 (TRBV7-3, TRBJ2-2)
CASSPDPSGRELIF

SEQ ID NO: 475397 - protein, 15 aa, Homo sapiens
  CDR3 for alpha chain variable domain of TCR clone 237699 (TRAV3, TRAJ3)
CAVRDGHSIASKIIF

SEQ ID NO: 475398 - protein, 15 aa, Homo sapiens
  CDR3 for beta chain variable domain of TCR clone 237699 (TRBV6-1, TRBJ2-3)
CASSERGGITDTQYI

SEQ ID NO: 475399 - protein, 18 aa, Homo sapiens
  CDR3 for alpha chain variable domain of TCR clone 237700 (TRAV21, TRAJ52)
CAVRPSPAGGTSYGKLTF

SEQ ID NO: 475400 - protein, 17 aa, Homo sapiens
  CDR3 for beta chain variable domain of TCR clone 237700 (TRBV7-3, TRBJ2-3)
CASSLMKRVRGADTQYF

SEQ ID NO: 475401 - protein, 18 aa, Homo sapiens
  CDR3 for alpha chain variable domain of TCR clone 237701 (TRAV12-2, )
CAVEDIQNPDPAVYQLRD

SEQ ID NO: 475402 - protein, 16 aa, Homo sapiens
  CDR3 for beta chain variable domain of TCR clone 237701 (TRBV6-1, TRBJ1-2)
CASSGAWLGRSHGYTF

SEQ ID NO: 475403 - protein, 14 aa, Homo sapiens
  CDR3 for alpha chain variable domain of TCR clone 237702 (TRAV16, TRAJ32)
CALKSGGATNKLIF

SEQ ID NO: 475404 - protein, 15 aa, Homo sapiens
  CDR3 for beta chain variable domain of TCR clone 237702 (TRBV7-3, TRBJ2-1)
CASSLDGNSYNEQFF

SEQ ID NO: 475405 - protein, 15 aa, Homo sapiens
  CDR3 for alpha chain variable domain of TCR clone 237703 (TRAV8-3, TRAJ11)
CAVGLLNSGYSTLTF

SEQ ID NO: 475406 - protein, 16 aa, Homo sapiens
  CDR3 for beta chain variable domain of TCR clone 237703 (TRBV28, TRBJ2-1)
CASSLWGRTSGTDQFF

SEQ ID NO: 475407 - protein, 14 aa, Homo sapiens
  CDR3 for alpha chain variable domain of TCR clone 237704 (TRAV17, TRAJ35)
CATDRPGFGNVLHC

SEQ ID NO: 475408 - protein, 15 aa, Homo sapiens
  CDR3 for beta chain variable domain of TCR clone 237704 (TRBV28, TRBJ2-5)
CASSSGRVIQDTQYF

SEQ ID NO: 475409 - protein, 13 aa, Homo sapiens
  CDR3 for alpha chain variable domain of TCR clone 237705 (TRAV38-2/DV8, TRAJ34)
CAYRTWNTDKLIF

SEQ ID NO: 475410 - protein, 15 aa, Homo sapiens
  CDR3 for beta chain variable domain of TCR clone 237705 (TRBV10-2, TRBJ2-6)
CASSEQGTGANGLTF

SEQ ID NO: 475411 - protein, 13 aa, Homo sapiens
  CDR3 for alpha chain variable domain of TCR clone 237706 (TRAV12-3, TRAJ29)
CAMTLSGNTPLVF

SEQ ID NO: 475412 - protein, 16 aa, Homo sapiens
  CDR3 for beta chain variable domain of TCR clone 237706 (TRBV20-1, TRBJ1-4)
CSAPGQGLLTNEKLFF

SEQ ID NO: 475413 - protein, 15 aa, Homo sapiens
  CDR3 for alpha chain variable domain of TCR clone 237707 (TRAV8-4, TRAJ47)
CAVSDTEEYGNKLVF

SEQ ID NO: 475414 - protein, 15 aa, Homo sapiens
  CDR3 for beta chain variable domain of TCR clone 237707 (TRBV11-2, TRBJ2-1)
CASSLGPDSYNEQFF

SEQ ID NO: 475415 - protein, 14 aa, Homo sapiens
  CDR3 for alpha chain variable domain of TCR clone 237708 (TRAV13-1, TRAJ44)
CAAKATGTASKLTF

SEQ ID NO: 475416 - protein, 13 aa, Homo sapiens
  CDR3 for beta chain variable domain of TCR clone 237708 (TRBV7-3, TRBJ2-1)
CASSQEVQYEQFF

SEQ ID NO: 475417 - protein, 16 aa, Homo sapiens
  CDR3 for alpha chain variable domain of TCR clone 237709 (TRAV26-1, TRAJ36)
CIVRAIGRSGANHLFF

SEQ ID NO: 475418 - protein, 14 aa, Homo sapiens
  CDR3 for beta chain variable domain of TCR clone 237709 (TRBV25-1, TRBJ2-1)
CASSKTGGYNEQFF

SEQ ID NO: 475419 - protein, 16 aa, Homo sapiens
  CDR3 for alpha chain variable domain of TCR clone 237710 (TRAV30, TRAJ24)
CGTEIVDADSWGKFQF

SEQ ID NO: 475420 - protein, 16 aa, Homo sapiens
  CDR3 for beta chain variable domain of TCR clone 237710 (TRBV7-2, TRBJ1-2)
CASSSNQDRRGHGYTF

SEQ ID NO: 475421 - protein, 16 aa, Homo sapiens
  CDR3 for alpha chain variable domain of TCR clone 237711 (TRAV3, TRAJ10)
CAVRDMRAGGGNKLTF

SEQ ID NO: 475422 - protein, 15 aa, Homo sapiens
  CDR3 for beta chain variable domain of TCR clone 237711 (TRBV6-5, TRBJ1-2)
CASSYSQAFNYGYTF

SEQ ID NO: 475423 - protein, 13 aa, Homo sapiens
  CDR3 for alpha chain variable domain of TCR clone 237712 (TRAV27, TRAJ29)
CAGAHSGNTPLVF

SEQ ID NO: 475424 - protein, 16 aa, Homo sapiens
  CDR3 for beta chain variable domain of TCR clone 237712 (TRBV7-4, TRBJ2-1)
CASSPSPGLAFNEQFF

SEQ ID NO: 475425 - protein, 16 aa, Homo sapiens
  CDR3 for alpha chain variable domain of TCR clone 237713 (TRAV16, TRAJ37)
CALTFSGPGNTGKLIF

SEQ ID NO: 475426 - protein, 14 aa, Homo sapiens
  CDR3 for beta chain variable domain of TCR clone 237713 (TRBV4-2, TRBJ2-1)
CASGLDRAYNEQFF

SEQ ID NO: 475427 - protein, 16 aa, Homo sapiens
  CDR3 for alpha chain variable domain of TCR clone 237714 (TRAV30, TRAJ49)
SAAQRVGPNTGNQFYF

SEQ ID NO: 475428 - protein, 13 aa, Homo sapiens
  CDR3 for beta chain variable domain of TCR clone 237714 (TRBV2, TRBJ1-5)
CATAGPGNQPQHF

SEQ ID NO: 475429 - protein, 11 aa, Homo sapiens
  CDR3 for alpha chain variable domain of TCR clone 237715 (TRAV17, TRAJ36)
CAPTGANNLFF

SEQ ID NO: 475430 - protein, 18 aa, Homo sapiens
  CDR3 for beta chain variable domain of TCR clone 237715 (TRBV4-1, TRBJ1-5)
CASSQDPRGQGLNQPQHF

SEQ ID NO: 475431 - protein, 15 aa, Homo sapiens
  CDR3 for alpha chain variable domain of TCR clone 237716 (TRAV13-1, TRAJ17)
CAASIERAAGNNLTF

SEQ ID NO: 475432 - protein, 12 aa, Homo sapiens
  CDR3 for beta chain variable domain of TCR clone 237716 (TRBV5-7, TRBJ1-1)
CASSLGRGKAFF

SEQ ID NO: 475433 - protein, 15 aa, Homo sapiens
  CDR3 for alpha chain variable domain of TCR clone 237717 (TRAV13-1, TRAJ44)
CAASRNTGTASNLTF

SEQ ID NO: 475434 - protein, 14 aa, Homo sapiens
  CDR3 for beta chain variable domain of TCR clone 237717 (TRBV2, TRBJ2-7)
CASSLPSGGYEQYF

SEQ ID NO: 475435 - protein, 13 aa, Homo sapiens
  CDR3 for alpha chain variable domain of TCR clone 237718 (TRAV2, TRAJ24)
CDLQLTAGGDSSL

SEQ ID NO: 475436 - protein, 13 aa, Homo sapiens
  CDR3 for beta chain variable domain of TCR clone 237718 (TRBV7-9, TRBJ1-2)
CASSLKQNYGYTF

SEQ ID NO: 475437 - protein, 13 aa, Homo sapiens
  CDR3 for alpha chain variable domain of TCR clone 237719 (TRAV21, TRAJ57)
CAVTQGGSEKLAF

SEQ ID NO: 475438 - protein, 15 aa, Homo sapiens
  CDR3 for beta chain variable domain of TCR clone 237719 (TRBV5-1, TRBJ1-1)
CASSSTTGTNTEAFF

SEQ ID NO: 475439 - protein, 19 aa, Homo sapiens
  CDR3 for alpha chain variable domain of TCR clone 237720 (TRAV2, TRAJ20)
ILQVREADAAVYRDCKLSF

SEQ ID NO: 475440 - protein, 16 aa, Homo sapiens
  CDR3 for beta chain variable domain of TCR clone 237720 (TRBV19, TRBJ2-2)
CASSAAGTGGTGELFF

SEQ ID NO: 475441 - protein, 17 aa, Homo sapiens
  CDR3 for alpha chain variable domain of TCR clone 237721 (TRAV3, TRAJ42)
CAVRDRDYGGSQGNLIF

SEQ ID NO: 475442 - protein, 14 aa, Homo sapiens
  CDR3 for beta chain variable domain of TCR clone 237721 (TRBV5-8, TRBJ2-3)
CASSLGQGTDTQYF

SEQ ID NO: 475443 - protein, 15 aa, Homo sapiens
  CDR3 for alpha chain variable domain of TCR clone 237722 (TRAV8-3, TRAJ23)
CAVGDRYNQGGKLIF

SEQ ID NO: 475444 - protein, 22 aa, Homo sapiens
  CDR3 for beta chain variable domain of TCR clone 237722 (TRBV29-1, TRBJ2-5)
TVSNMSPEDSSIYLCSAGTQYC

SEQ ID NO: 475445 - protein, 16 aa, Homo sapiens
  CDR3 for alpha chain variable domain of TCR clone 237723 (TRAV30, TRAJ24)
CGTEIVDADRWGKFQF

SEQ ID NO: 475446 - protein, 17 aa, Homo sapiens
  CDR3 for beta chain variable domain of TCR clone 237723 (TRBV20-1, TRBJ2-1)
CSARDRRRASSYNEQFF

SEQ ID NO: 475447 - protein, 13 aa, Homo sapiens
  CDR3 for alpha chain variable domain of TCR clone 237724 (TRAV13-1, TRAJ21)
CAASIYKFNKFYF

SEQ ID NO: 475448 - protein, 13 aa, Homo sapiens
  CDR3 for beta chain variable domain of TCR clone 237724 (TRBV27, TRBJ1-4)
CASSLMGNEKLFF

SEQ ID NO: 475449 - protein, 15 aa, Homo sapiens
  CDR3 for alpha chain variable domain of TCR clone 237725 (TRAV2, TRAJ9)
CAVEDRGTGGFKTIF

SEQ ID NO: 475450 - protein, 15 aa, Homo sapiens
  CDR3 for beta chain variable domain of TCR clone 237725 (TRBV15, TRBJ2-1)
CATSRDLGSYNEQFF

SEQ ID NO: 475451 - protein, 15 aa, Homo sapiens
  CDR3 for alpha chain variable domain of TCR clone 237726 (TRAV21, TRAJ53)
CATLNSGGSNYQPTF

SEQ ID NO: 475452 - protein, 16 aa, Homo sapiens
  CDR3 for beta chain variable domain of TCR clone 237726 (TRBV9, TRBJ2-1)
CASSVGGGGNYNEQFF

SEQ ID NO: 475453 - protein, 15 aa, Homo sapiens
  CDR3 for alpha chain variable domain of TCR clone 237727 (TRAV8-3, TRAJ37)
CAVGARVSNTGKLIF

SEQ ID NO: 475454 - protein, 15 aa, Homo sapiens
  CDR3 for beta chain variable domain of TCR clone 237727 (TRBV5-4, TRBJ2-3)
CASSLAGRVTDTQYF

SEQ ID NO: 475455 - protein, 18 aa, Homo sapiens
  CDR3 for alpha chain variable domain of TCR clone 237728 (TRAV26-1, TRAJ22)
CIVRVAVISSGSARQLTF

SEQ ID NO: 475456 - protein, 13 aa, Homo sapiens
  CDR3 for beta chain variable domain of TCR clone 237728 (TRBV13, TRBJ2-5)
CASSAEVGETQYF

SEQ ID NO: 475457 - protein, 15 aa, Homo sapiens
  CDR3 for alpha chain variable domain of TCR clone 237729 (TRAV20, TRAJ37)
CCAGGGSSNTGKLIF

SEQ ID NO: 475458 - protein, 17 aa, Homo sapiens
  CDR3 for beta chain variable domain of TCR clone 237729 (TRBV7-9, TRBJ2-5)
CATSGGARDPVLRARHA

SEQ ID NO: 475459 - protein, 14 aa, Homo sapiens
  CDR3 for alpha chain variable domain of TCR clone 237730 (TRAV16, TRAJ31)
CSKWRRGDNARLMF

SEQ ID NO: 475460 - protein, 16 aa, Homo sapiens
  CDR3 for beta chain variable domain of TCR clone 237730 (TRBV28, TRBJ2-7)
CASSLFFETVGPEQYF

SEQ ID NO: 475461 - protein, 15 aa, Homo sapiens
  CDR3 for alpha chain variable domain of TCR clone 237731 (TRAV26-1, TRAJ44)
CIARVPFGTASKRTF

SEQ ID NO: 475462 - protein, 12 aa, Homo sapiens
  CDR3 for beta chain variable domain of TCR clone 237731 (TRBV11-2, TRBJ2-2)
CASSLGGGELFF

SEQ ID NO: 475463 - protein, 13 aa, Homo sapiens
  CDR3 for alpha chain variable domain of TCR clone 237732 (TRAV17, TRAJ9)
CATDYTGGFKTIF

SEQ ID NO: 475464 - protein, 15 aa, Homo sapiens
  CDR3 for beta chain variable domain of TCR clone 237732 (TRBV20-1, TRBJ2-7)
CSARDRVSGMDERYF

SEQ ID NO: 475465 - protein, 14 aa, Homo sapiens
  CDR3 for alpha chain variable domain of TCR clone 237733 (TRAV29/DV5, TRAJ44)
CAASATGTASKLTF

SEQ ID NO: 475466 - protein, 16 aa, Homo sapiens
  CDR3 for beta chain variable domain of TCR clone 237733 (TRBV7-2, TRBJ2-7)
CASSPTTGGVSYEQYF

SEQ ID NO: 475467 - protein, 12 aa, Homo sapiens
  CDR3 for alpha chain variable domain of TCR clone 237734 (TRAV26-2, TRAJ21)
CILKGNFNKFYF

SEQ ID NO: 475468 - protein, 14 aa, Homo sapiens
  CDR3 for beta chain variable domain of TCR clone 237734 (TRBV7-9, TRBJ1-1)
CASTPLQSYTEVFF

SEQ ID NO: 475469 - protein, 15 aa, Homo sapiens
  CDR3 for alpha chain variable domain of TCR clone 237735 (TRAV12-3, TRAJ6)
CAMSATTGGSYIPTF

SEQ ID NO: 475470 - protein, 15 aa, Homo sapiens
  CDR3 for beta chain variable domain of TCR clone 237735 (TRBV5-4, TRBJ2-3)
CASSLYRGRTDTQYF

SEQ ID NO: 475471 - protein, 13 aa, Homo sapiens
  CDR3 for alpha chain variable domain of TCR clone 237736 (TRAV3, TRAJ21)
CAVREPDFNKFYF

SEQ ID NO: 475472 - protein, 15 aa, Homo sapiens
  CDR3 for beta chain variable domain of TCR clone 237736 (TRBV3-1, TRBJ2-7)
CASRQAPSGSYEQYF

SEQ ID NO: 475473 - protein, 18 aa, Homo sapiens
  CDR3 for alpha chain variable domain of TCR clone 237737 (TRAV26-1, TRAJ22)
CIVRVALISSGSARQLTF

SEQ ID NO: 475474 - protein, 13 aa, Homo sapiens
  CDR3 for beta chain variable domain of TCR clone 237737 (TRBV13, TRBJ2-5)
CASSPEVGEAQYF

SEQ ID NO: 475475 - protein, 12 aa, Homo sapiens
  CDR3 for alpha chain variable domain of TCR clone 237738 (TRAV8-4, TRAJ37)
CAVSGNTGKLIF

SEQ ID NO: 475476 - protein, 17 aa, Homo sapiens
  CDR3 for beta chain variable domain of TCR clone 237738 (TRBV7-2, TRBJ2-3)
CASSPHGRARVQDTQYF

SEQ ID NO: 475477 - protein, 13 aa, Homo sapiens
  CDR3 for alpha chain variable domain of TCR clone 237739 (TRAV27, TRAJ45)
CRSSGGGADGLTF

SEQ ID NO: 475478 - protein, 14 aa, Homo sapiens
  CDR3 for beta chain variable domain of TCR clone 237739 (TRBV11-2, TRBJ2-3)
CASSLGTVTDTQYF

SEQ ID NO: 475479 - protein, 15 aa, Homo sapiens
  CDR3 for alpha chain variable domain of TCR clone 237740 (TRAV13-1, TRAJ21)
CAAVYTTSTNFTLDL

SEQ ID NO: 475480 - protein, 15 aa, Homo sapiens
  CDR3 for beta chain variable domain of TCR clone 237740 (TRBV5-5, TRBJ1-5)
CASSLKGGGEQPQHF

SEQ ID NO: 475481 - protein, 14 aa, Homo sapiens
  CDR3 for alpha chain variable domain of TCR clone 237741 (TRAV12-2, TRAJ13)
CAVKRTGGYQKVTF

SEQ ID NO: 475482 - protein, 15 aa, Homo sapiens
  CDR3 for beta chain variable domain of TCR clone 237741 (TRBV27, TRBJ2-1)
CANSNGGGSSKEQFF

SEQ ID NO: 475483 - protein, 15 aa, Homo sapiens
  CDR3 for alpha chain variable domain of TCR clone 237742 (TRAV8-3, TRAJ45)
CAVEGSGGGADGLTF

SEQ ID NO: 475484 - protein, 12 aa, Homo sapiens
  CDR3 for beta chain variable domain of TCR clone 237742 (TRBV11-2, TRBJ2-2)
CASSLGGGELFF

SEQ ID NO: 475485 - protein, 10 aa, Homo sapiens
  CDR3 for alpha chain variable domain of TCR clone 237743 (TRAV2, TRAJ34)
CAVVNDKLIF

SEQ ID NO: 475486 - protein, 14 aa, Homo sapiens
  CDR3 for beta chain variable domain of TCR clone 237743 (TRBV11-3, TRBJ2-1)
CASSATTSGSIQFF

SEQ ID NO: 475487 - protein, 13 aa, Homo sapiens
  CDR3 for alpha chain variable domain of TCR clone 237744 (TRAV20, TRAJ21)
CAVEGYNFNKFYF

SEQ ID NO: 475488 - protein, 16 aa, Homo sapiens
  CDR3 for beta chain variable domain of TCR clone 237744 (TRBV29-1, TRBJ2-6)
CSVEDITYSGANVLTF

SEQ ID NO: 475489 - protein, 14 aa, Homo sapiens
  CDR3 for alpha chain variable domain of TCR clone 237745 (TRAV1-2, TRAJ8)
CAVREDTGFQKLVF

SEQ ID NO: 475490 - protein, 15 aa, Homo sapiens
  CDR3 for beta chain variable domain of TCR clone 237745 (TRBV10-2, TRBJ2-6)
CASSELGTGANVLTF

SEQ ID NO: 475491 - protein, 11 aa, Homo sapiens
  CDR3 for alpha chain variable domain of TCR clone 237746 (TRAV2, TRAJ33)
CAVDSNYQLIW

SEQ ID NO: 475492 - protein, 18 aa, Homo sapiens
  CDR3 for beta chain variable domain of TCR clone 237746 (TRBV12-4, TRBJ2-2)
CASSLVAGTRGRTGELFF

SEQ ID NO: 475493 - protein, 14 aa, Homo sapiens
  CDR3 for alpha chain variable domain of TCR clone 237747 (TRAV13-1, TRAJ48)
CAASTDFGNEELTF

SEQ ID NO: 475494 - protein, 15 aa, Homo sapiens
  CDR3 for beta chain variable domain of TCR clone 237747 (TRBV10-2, TRBJ2-5)
CASKPEDRRQETQYF

SEQ ID NO: 475495 - protein, 15 aa, Homo sapiens
  CDR3 for alpha chain variable domain of TCR clone 237748 (TRAV41, TRAJ45)
CAPSYSGGGADGLTF

SEQ ID NO: 475496 - protein, 14 aa, Homo sapiens
  CDR3 for beta chain variable domain of TCR clone 237748 (TRBV12-5, TRBJ2-5)
CASGSRTHQETQYF

SEQ ID NO: 475497 - protein, 14 aa, Homo sapiens
  CDR3 for alpha chain variable domain of TCR clone 237749 (TRAV26-1, TRAJ34)
CIVIVAYNTDKLIF

SEQ ID NO: 475498 - protein, 15 aa, Homo sapiens
  CDR3 for beta chain variable domain of TCR clone 237749 (TRBV20-1, TRBJ2-7)
CSARVPAAYFHKQYF

SEQ ID NO: 475499 - protein, 18 aa, Homo sapiens
  CDR3 for alpha chain variable domain of TCR clone 237750 (TRAV13-1, TRAJ52)
CAASKRSAGGTSYGKRTF

SEQ ID NO: 475500 - protein, 15 aa, Homo sapiens
  CDR3 for beta chain variable domain of TCR clone 237750 (TRBV5-1, TRBJ2-1)
CASSPPRAPYNEQFF

SEQ ID NO: 475501 - protein, 16 aa, Homo sapiens
  CDR3 for alpha chain variable domain of TCR clone 237751 (TRAV30, TRAJ24)
CGTEIVDADSWGKFQF

SEQ ID NO: 475502 - protein, 13 aa, Homo sapiens
  CDR3 for beta chain variable domain of TCR clone 237751 (TRBV3-1, TRBJ1-5)
CASSQFGDQPQHF

SEQ ID NO: 475503 - protein, 15 aa, Homo sapiens
  CDR3 for alpha chain variable domain of TCR clone 237752 (TRAV8-4, TRAJ48)
CAGSYESRGNEKLTF

SEQ ID NO: 475504 - protein, 16 aa, Homo sapiens
  CDR3 for beta chain variable domain of TCR clone 237752 (TRBV12-4, TRBJ2-5)
CASSFFVRGRQETQYF

SEQ ID NO: 475505 - protein, 14 aa, Homo sapiens
  CDR3 for alpha chain variable domain of TCR clone 237753 (TRAV12-2, TRAJ17)
CAGLFKAAGKKLTF

SEQ ID NO: 475506 - protein, 15 aa, Homo sapiens
  CDR3 for beta chain variable domain of TCR clone 237753 (TRBV20-1, TRBJ2-7)
CSARDRVSGMDEQYF

SEQ ID NO: 475507 - protein, 11 aa, Homo sapiens
  CDR3 for alpha chain variable domain of TCR clone 237754 (TRAV27, TRAJ47)
CRSNQGNKLVF

SEQ ID NO: 475508 - protein, 16 aa, Homo sapiens
  CDR3 for beta chain variable domain of TCR clone 237754 (TRBV7-9, TRBJ2-1)
CASSDVAGGSYKEQFF

SEQ ID NO: 475509 - protein, 17 aa, Homo sapiens
  CDR3 for alpha chain variable domain of TCR clone 237755 (TRAV26-1, TRAJ27)
CIVRVLTPMQANQPLGM

SEQ ID NO: 475510 - protein, 13 aa, Homo sapiens
  CDR3 for beta chain variable domain of TCR clone 237755 (TRBV20-1, TRBJ2-7)
CSATHTSGYEQYF

SEQ ID NO: 475511 - protein, 15 aa, Homo sapiens
  CDR3 for alpha chain variable domain of TCR clone 237756 (TRAV16, TRAJ48)
CALFISNFGNEKLTF

SEQ ID NO: 475512 - protein, 16 aa, Homo sapiens
  CDR3 for beta chain variable domain of TCR clone 237756 (TRBV12-4, TRBJ1-5)
CASSRPVGGSNQPQHF

SEQ ID NO: 475513 - protein, 15 aa, Homo sapiens
  CDR3 for alpha chain variable domain of TCR clone 237757 (TRAV26-1, TRAJ29)
CIVRVEGSGKTPLVF

SEQ ID NO: 475514 - protein, 15 aa, Homo sapiens
  CDR3 for beta chain variable domain of TCR clone 237757 (TRBV7-9, TRBJ1-5)
CASSQGHQQNQTQHF

SEQ ID NO: 475515 - protein, 15 aa, Homo sapiens
  CDR3 for alpha chain variable domain of TCR clone 237758 (TRAV21, TRAJ24)
CAARSSTDSWGTLQF

SEQ ID NO: 475516 - protein, 13 aa, Homo sapiens
  CDR3 for beta chain variable domain of TCR clone 237758 (TRBV11-2, TRBJ2-5)
CASSSTGGETQYF

SEQ ID NO: 475517 - protein, 13 aa, Homo sapiens
  CDR3 for alpha chain variable domain of TCR clone 237759 (TRAV2, TRAJ29)
CAVYSLGNTPIVF

SEQ ID NO: 475518 - protein, 14 aa, Homo sapiens
  CDR3 for beta chain variable domain of TCR clone 237759 (TRBV7-9, TRBJ1-1)
CASSLGGLKTEAFF

SEQ ID NO: 475519 - protein, 16 aa, Homo sapiens
  CDR3 for alpha chain variable domain of TCR clone 237760 (TRAV21, TRAJ33)
CAVSPASMDSNYQLIW

SEQ ID NO: 475520 - protein, 14 aa, Homo sapiens
  CDR3 for beta chain variable domain of TCR clone 237760 (TRBV20-1, TRBJ1-1)
CSAMGGTANTEAFF

SEQ ID NO: 475521 - protein, 14 aa, Homo sapiens
  CDR3 for alpha chain variable domain of TCR clone 237761 (TRAV12-2, TRAJ41)
CAGNRANSGYALNF

SEQ ID NO: 475522 - protein, 13 aa, Homo sapiens
  CDR3 for beta chain variable domain of TCR clone 237761 (TRBV7-9, TRBJ1-2)
CASSLKQNYGYTF

SEQ ID NO: 475523 - protein, 15 aa, Homo sapiens
  CDR3 for alpha chain variable domain of TCR clone 237762 (TRAV26-1, TRAJ29)
CIVRVEGSGNTPLVF

SEQ ID NO: 475524 - protein, 15 aa, Homo sapiens
  CDR3 for beta chain variable domain of TCR clone 237762 (TRBV28, TRBJ2-7)
CASSPGGRGFYEQYF

SEQ ID NO: 475525 - protein, 12 aa, Homo sapiens
  CDR3 for alpha chain variable domain of TCR clone 237763 (TRAV13-1, TRAJ48)
CAANFGNEKLTF

SEQ ID NO: 475526 - protein, 15 aa, Homo sapiens
  CDR3 for beta chain variable domain of TCR clone 237763 (TRBV10-3, TRBJ2-1)
CAIRNGTSGHNEQFF

SEQ ID NO: 475527 - protein, 12 aa, Homo sapiens
  CDR3 for alpha chain variable domain of TCR clone 237764 (TRAV12-3, TRAJ17)
CAMTLTANKLTF

SEQ ID NO: 475528 - protein, 13 aa, Homo sapiens
  CDR3 for beta chain variable domain of TCR clone 237764 (TRBV19, TRBJ1-5)
CASSIGGNQPQHF

SEQ ID NO: 475529 - protein, 13 aa, Homo sapiens
  CDR3 for alpha chain variable domain of TCR clone 237765 (TRAV12-3, TRAJ5)
CAMIYTGRRALTF

SEQ ID NO: 475530 - protein, 13 aa, Homo sapiens
  CDR3 for beta chain variable domain of TCR clone 237765 (TRBV20-1, TRBJ1-1)
CSARGGGNTEAFF

SEQ ID NO: 475531 - protein, 12 aa, Homo sapiens
  CDR3 for alpha chain variable domain of TCR clone 237766 (TRAV27, TRAJ35)
CAGADFGNVLHC

SEQ ID NO: 475532 - protein, 15 aa, Homo sapiens
  CDR3 for beta chain variable domain of TCR clone 237766 (TRBV19, TRBJ1-6)
CASSTQGAVGSPLHF

SEQ ID NO: 475533 - protein, 15 aa, Homo sapiens
  CDR3 for alpha chain variable domain of TCR clone 237767 (TRAV17, TRAJ28)
CATVDSGAGSYQLTF

SEQ ID NO: 475534 - protein, 13 aa, Homo sapiens
  CDR3 for beta chain variable domain of TCR clone 237767 (TRBV5-4, TRBJ2-5)
CASSRQEGKTQYF

SEQ ID NO: 475535 - protein, 14 aa, Homo sapiens
  CDR3 for alpha chain variable domain of TCR clone 237768 (TRAV12-3, TRAJ54)
CAMSAHQGAQKLVF

SEQ ID NO: 475536 - protein, 15 aa, Homo sapiens
  CDR3 for beta chain variable domain of TCR clone 237768 (TRBV19, TRBJ2-4)
CASSTPGIAKNIQYF

SEQ ID NO: 475537 - protein, 16 aa, Homo sapiens
  CDR3 for alpha chain variable domain of TCR clone 237769 (TRAV12-3, TRAJ45)
CAMGWGSGGGADGLTF

SEQ ID NO: 475538 - protein, 13 aa, Homo sapiens
  CDR3 for beta chain variable domain of TCR clone 237769 (TRBV7-2, TRBJ2-2)
CASSLAVTGELFF

SEQ ID NO: 475539 - protein, 12 aa, Homo sapiens
  CDR3 for alpha chain variable domain of TCR clone 237770 (TRAV12-1, TRAJ40)
CVVYSGTYKYIF

SEQ ID NO: 475540 - protein, 14 aa, Homo sapiens
  CDR3 for beta chain variable domain of TCR clone 237770 (TRBV11-1, TRBJ2-5)
CASSLDTAQETQYF

SEQ ID NO: 475541 - protein, 14 aa, Homo sapiens
  CDR3 for alpha chain variable domain of TCR clone 237771 (TRAV8-3, TRAJ39)
CAVGANNAGNMLTF

SEQ ID NO: 475542 - protein, 15 aa, Homo sapiens
  CDR3 for beta chain variable domain of TCR clone 237771 (TRBV4-3, TRBJ1-1)
CASSQELGRGTEDFF

SEQ ID NO: 475543 - protein, 12 aa, Homo sapiens
  CDR3 for alpha chain variable domain of TCR clone 237772 (TRAV12-3, TRAJ41)
CAMSYSGYAPNF

SEQ ID NO: 475544 - protein, 12 aa, Homo sapiens
  CDR3 for beta chain variable domain of TCR clone 237772 (TRBV7-8, TRBJ2-7)
CASSLGDREQYF

SEQ ID NO: 475545 - protein, 16 aa, Homo sapiens
  CDR3 for alpha chain variable domain of TCR clone 237773 (TRAV4, TRAJ9)
CLVGDPNRPGGFKTIF

SEQ ID NO: 475546 - protein, 16 aa, Homo sapiens
  CDR3 for beta chain variable domain of TCR clone 237773 (TRBV28, TRBJ1-4)
CASSPPYRGRSEKLFC

SEQ ID NO: 475547 - protein, 13 aa, Homo sapiens
  CDR3 for alpha chain variable domain of TCR clone 237774 (TRAV35, TRAJ42)
CAGFPGSQGNPIF

SEQ ID NO: 475548 - protein, 14 aa, Homo sapiens
  CDR3 for beta chain variable domain of TCR clone 237774 (TRBV19, TRBJ2-1)
CASPTVVLSGEQFF

SEQ ID NO: 475549 - protein, 11 aa, Homo sapiens
  CDR3 for alpha chain variable domain of TCR clone 237775 (TRAV2, TRAJ13)
CASVGYQKVTF

SEQ ID NO: 475550 - protein, 12 aa, Homo sapiens
  CDR3 for beta chain variable domain of TCR clone 237775 (TRBV24-1, TRBJ2-3)
CATSDSTDTQYF

SEQ ID NO: 475551 - protein, 14 aa, Homo sapiens
  CDR3 for alpha chain variable domain of TCR clone 237776 (TRAV12-3, TRAJ10)
SHLPLTGGGNELTF

SEQ ID NO: 475552 - protein, 15 aa, Homo sapiens
  CDR3 for beta chain variable domain of TCR clone 237776 (TRBV3-1, TRBJ2-5)
CASSANLGGPETQYF

SEQ ID NO: 475553 - protein, 11 aa, Homo sapiens
  CDR3 for alpha chain variable domain of TCR clone 237777 (TRAV13-1, TRAJ6)
CATLGSYIPTF

SEQ ID NO: 475554 - protein, 13 aa, Homo sapiens
  CDR3 for beta chain variable domain of TCR clone 237777 (TRBV6-6, TRBJ2-1)
CASSFHQGDEQFF

SEQ ID NO: 475555 - protein, 17 aa, Homo sapiens
  CDR3 for alpha chain variable domain of TCR clone 237778 (TRAV3, TRAJ6)
CAVRDGPRAGGSYIPTF

SEQ ID NO: 475556 - protein, 14 aa, Homo sapiens
  CDR3 for beta chain variable domain of TCR clone 237778 (TRBV7-2, TRBJ2-7)
CASSPKTSFYDKYF

SEQ ID NO: 475557 - protein, 16 aa, Homo sapiens
  CDR3 for alpha chain variable domain of TCR clone 237779 (TRAV3, TRAJ10)
CAVRDMRAGGGNKLTF

SEQ ID NO: 475558 - protein, 15 aa, Homo sapiens
  CDR3 for beta chain variable domain of TCR clone 237779 (TRBV11-2, TRBJ2-1)
CASSRNRGLMYEQFF

SEQ ID NO: 475559 - protein, 12 aa, Homo sapiens
  CDR3 for alpha chain variable domain of TCR clone 237780 (TRAV13-1, TRAJ21)
CAAKEGFNKFYF

SEQ ID NO: 475560 - protein, 14 aa, Homo sapiens
  CDR3 for beta chain variable domain of TCR clone 237780 (TRBV7-3, TRBJ2-1)
CASSLAGGANEQFF

SEQ ID NO: 475561 - protein, 17 aa, Homo sapiens
  CDR3 for alpha chain variable domain of TCR clone 237781 (TRAV3, TRAJ42)
CAVRDRDYGGSQGNPIF

SEQ ID NO: 475562 - protein, 15 aa, Homo sapiens
  CDR3 for beta chain variable domain of TCR clone 237781 (TRBV20-1, TRBJ2-7)
CSARDRVSGMDEQYF

SEQ ID NO: 475563 - protein, 14 aa, Homo sapiens
  CDR3 for alpha chain variable domain of TCR clone 237782 (TRAV21, TRAJ45)
CAVSSGGGADGLTF

SEQ ID NO: 475564 - protein, 14 aa, Homo sapiens
  CDR3 for beta chain variable domain of TCR clone 237782 (TRBV19, TRBJ2-1)
CASPTFVLSGEQFF

SEQ ID NO: 475565 - protein, 15 aa, Homo sapiens
  CDR3 for alpha chain variable domain of TCR clone 237783 (TRAV25, TRAJ52)
CAGTSGGTSYGKLTF

SEQ ID NO: 475566 - protein, 15 aa, Homo sapiens
  CDR3 for beta chain variable domain of TCR clone 237783 (TRBV20-1, TRBJ1-1)
CSASRGVTGNTEAFF

SEQ ID NO: 475567 - protein, 17 aa, Homo sapiens
  CDR3 for alpha chain variable domain of TCR clone 237784 (TRAV3, TRAJ12)
CAVRDGGRMDSSYKLIF

SEQ ID NO: 475568 - protein, 14 aa, Homo sapiens
  CDR3 for beta chain variable domain of TCR clone 237784 (TRBV5-4, TRBJ1-1)
CASSLDSRRDEAFF

SEQ ID NO: 475569 - protein, 16 aa, Homo sapiens
  CDR3 for alpha chain variable domain of TCR clone 237785 (TRAV12-3, TRAJ53)
CAMSPGSGGSNYKLTF

SEQ ID NO: 475570 - protein, 15 aa, Homo sapiens
  CDR3 for beta chain variable domain of TCR clone 237785 (TRBV19, TRBJ2-1)
CASSSPGVPLDEQFS

SEQ ID NO: 475571 - protein, 10 aa, Homo sapiens
  CDR3 for alpha chain variable domain of TCR clone 237786 (TRAV12-3, TRAJ49)
CAVNDDQFYF

SEQ ID NO: 475572 - protein, 16 aa, Homo sapiens
  CDR3 for beta chain variable domain of TCR clone 237786 (TRBV20-1, TRBJ1-4)
CSAPGQGLLTNEKLFF

SEQ ID NO: 475573 - protein, 18 aa, Homo sapiens
  CDR3 for alpha chain variable domain of TCR clone 237787 (TRAV3, TRAJ17)
CAVRARRGGRRCRQKANF

SEQ ID NO: 475574 - protein, 14 aa, Homo sapiens
  CDR3 for beta chain variable domain of TCR clone 237787 (TRBV4-1, TRBJ2-2)
CASSQAVNTGELFF

SEQ ID NO: 475575 - protein, 16 aa, Homo sapiens
  CDR3 for alpha chain variable domain of TCR clone 237788 (TRAV26-1, TRAJ50)
CIVRALMKTSYDKVIF

SEQ ID NO: 475576 - protein, 16 aa, Homo sapiens
  CDR3 for beta chain variable domain of TCR clone 237788 (TRBV6-4, TRBJ1-2)
CASSEAVGDPNYGYTF

SEQ ID NO: 475577 - protein, 18 aa, Homo sapiens
  CDR3 for alpha chain variable domain of TCR clone 237789 (TRAV29/DV5, TRAJ52)
CAAGFRGAGGTSYGKLTF

SEQ ID NO: 475578 - protein, 16 aa, Homo sapiens
  CDR3 for beta chain variable domain of TCR clone 237789 (TRBV7-2, TRBJ2-7)
CASSLEAGGPWYEQYF

SEQ ID NO: 475579 - protein, 14 aa, Homo sapiens
  CDR3 for alpha chain variable domain of TCR clone 237790 (TRAV17, TRAJ31)
CATVPLSGNARLMF

SEQ ID NO: 475580 - protein, 15 aa, Homo sapiens
  CDR3 for beta chain variable domain of TCR clone 237790 (TRBV15, TRBJ2-2)
CASSGTGGRVGELFF

SEQ ID NO: 475581 - protein, 14 aa, Homo sapiens
  CDR3 for alpha chain variable domain of TCR clone 237791 (TRAV12-1, TRAJ40)
CVVNRDSGTYKYIF

SEQ ID NO: 475582 - protein, 14 aa, Homo sapiens
  CDR3 for beta chain variable domain of TCR clone 237791 (TRBV19, TRBJ2-1)
CASPTFVLSGEQFF

SEQ ID NO: 475583 - protein, 12 aa, Homo sapiens
  CDR3 for alpha chain variable domain of TCR clone 237792 (TRAV39, TRAJ21)
CAVLSNFNKFYF

SEQ ID NO: 475584 - protein, 18 aa, Homo sapiens
  CDR3 for beta chain variable domain of TCR clone 237792 (TRBV27, TRBJ2-5)
CASSPWKGQVRTLETQYF

SEQ ID NO: 475585 - protein, 14 aa, Homo sapiens
  CDR3 for alpha chain variable domain of TCR clone 237793 (TRAV3, TRAJ6)
CAVRDPRGSYIPTF

SEQ ID NO: 475586 - protein, 17 aa, Homo sapiens
  CDR3 for beta chain variable domain of TCR clone 237793 (TRBV25-1, TRBJ2-1)
CASSAYGQGRGVYEQFF

SEQ ID NO: 475587 - protein, 14 aa, Homo sapiens
  CDR3 for alpha chain variable domain of TCR clone 237794 (TRAV1-1, TRAJ23)
CAVSIYNQGGKIIF

SEQ ID NO: 475588 - protein, 20 aa, Homo sapiens
  CDR3 for beta chain variable domain of TCR clone 237794 (TRBV6-4, TRBJ2-7)
CASSDSSVSGQVPTSYEQYF

SEQ ID NO: 475589 - protein, 14 aa, Homo sapiens
  CDR3 for alpha chain variable domain of TCR clone 237795 (TRAV13-1, TRAJ11)
CAASPDSGYSTLTF

SEQ ID NO: 475590 - protein, 16 aa, Homo sapiens
  CDR3 for beta chain variable domain of TCR clone 237795 (TRBV4-1, TRBJ2-3)
CASSQSTSGAEDTQYF

SEQ ID NO: 475591 - protein, 11 aa, Homo sapiens
  CDR3 for alpha chain variable domain of TCR clone 237796 (TRAV13-2, TRAJ54)
RAVQGAQKLVF

SEQ ID NO: 475592 - protein, 11 aa, Homo sapiens
  CDR3 for beta chain variable domain of TCR clone 237796 (TRBV29-1, TRBJ2-5)
CSEDRTGTQYF

SEQ ID NO: 475593 - protein, 11 aa, Homo sapiens
  CDR3 for alpha chain variable domain of TCR clone 237797 (TRAV12-2, TRAJ33)
CAVTSNYQLIR

SEQ ID NO: 475594 - protein, 14 aa, Homo sapiens
  CDR3 for beta chain variable domain of TCR clone 237797 (TRBV28, TRBJ2-2)
CASRIRSGTGELFF

SEQ ID NO: 475595 - protein, 16 aa, Homo sapiens
  CDR3 for alpha chain variable domain of TCR clone 237798 (TRAV30, TRAJ24)
CGTEIVDAHSWGKFQF

SEQ ID NO: 475596 - protein, 16 aa, Homo sapiens
  CDR3 for beta chain variable domain of TCR clone 237798 (TRBV2, TRBJ1-3)
CASSGGAGRSGNTIYF

SEQ ID NO: 475597 - protein, 13 aa, Homo sapiens
  CDR3 for alpha chain variable domain of TCR clone 237799 (TRAV38-1, TRAJ42)
CARWGGSQGNLIF

SEQ ID NO: 475598 - protein, 13 aa, Homo sapiens
  CDR3 for beta chain variable domain of TCR clone 237799 (TRBV19, TRBJ2-1)
CATSRGVYNEQFF

SEQ ID NO: 475599 - protein, 17 aa, Homo sapiens
  CDR3 for alpha chain variable domain of TCR clone 237800 (TRAV3, TRAJ6)
CAGRDGPRAGGSYIPTF

SEQ ID NO: 475600 - protein, 15 aa, Homo sapiens
  CDR3 for beta chain variable domain of TCR clone 237800 (TRBV28, TRBJ2-1)
CASSIIAGGRSEQFF

SEQ ID NO: 475601 - protein, 15 aa, Homo sapiens
  CDR3 for alpha chain variable domain of TCR clone 237801 (TRAV2, TRAJ24)
CAVEVLTDSWGKFQF

SEQ ID NO: 475602 - protein, 14 aa, Homo sapiens
  CDR3 for beta chain variable domain of TCR clone 237801 (TRBV19, TRBJ2-1)
CASSMGRGRRSSSS

SEQ ID NO: 475603 - protein, 12 aa, Homo sapiens
  CDR3 for alpha chain variable domain of TCR clone 237802 (TRAV12-1, TRAJ49)
CVGLQHRSPVLF

SEQ ID NO: 475604 - protein, 14 aa, Homo sapiens
  CDR3 for beta chain variable domain of TCR clone 237802 (TRBV12-4, TRBJ1-2)
CASSNLRGNYGYTF

SEQ ID NO: 475605 - protein, 14 aa, Homo sapiens
  CDR3 for alpha chain variable domain of TCR clone 237803 (TRAV1-2, TRAJ8)
CAVREDTGFQKLVF

SEQ ID NO: 475606 - protein, 15 aa, Homo sapiens
  CDR3 for beta chain variable domain of TCR clone 237803 (TRBV11-2, TRBJ2-1)
CASSLGPDAYNEQFF

SEQ ID NO: 475607 - protein, 19 aa, Homo sapiens
  CDR3 for alpha chain variable domain of TCR clone 237804 (TRAV2, TRAJ20)
ILQVREADAAVYRDCKLSF

SEQ ID NO: 475608 - protein, 14 aa, Homo sapiens
  CDR3 for beta chain variable domain of TCR clone 237804 (TRBV29-1, TRBJ2-2)
CSALGGVGAGELFF

SEQ ID NO: 475609 - protein, 14 aa, Homo sapiens
  CDR3 for alpha chain variable domain of TCR clone 237805 (TRAV13-1, TRAJ44)
CAAKPTGPASKLTF

SEQ ID NO: 475610 - protein, 17 aa, Homo sapiens
  CDR3 for beta chain variable domain of TCR clone 237805 (TRBV7-3, TRBJ2-3)
CASSLMKRMRGADTQYF

SEQ ID NO: 475611 - protein, 17 aa, Homo sapiens
  CDR3 for alpha chain variable domain of TCR clone 237806 (TRAV29/DV5, TRAJ52)
CAATSTADGTRYGKLTF

SEQ ID NO: 475612 - protein, 15 aa, Homo sapiens
  CDR3 for beta chain variable domain of TCR clone 237806 (TRBV3-1, TRBJ2-7)
CASSQEWTGSYEQYF

SEQ ID NO: 475613 - protein, 14 aa, Homo sapiens
  CDR3 for alpha chain variable domain of TCR clone 237807 (TRAV12-2, TRAJ40)
CAVKIPSGTYKYIF

SEQ ID NO: 475614 - protein, 15 aa, Homo sapiens
  CDR3 for beta chain variable domain of TCR clone 237807 (TRBV18, TRBJ1-1)
CASSPRQGENTEAFF

SEQ ID NO: 475615 - protein, 14 aa, Homo sapiens
  CDR3 for alpha chain variable domain of TCR clone 237808 (TRAV9-2, TRAJ39)
CALYIYNAGNMLTF

SEQ ID NO: 475616 - protein, 12 aa, Homo sapiens
  CDR3 for beta chain variable domain of TCR clone 237808 (TRBV14, TRBJ2-5)
CASSQLKETQYF

SEQ ID NO: 475617 - protein, 12 aa, Homo sapiens
  CDR3 for alpha chain variable domain of TCR clone 237809 (TRAV13-1, TRAJ49)
CAASPMGNQFYF

SEQ ID NO: 475618 - protein, 13 aa, Homo sapiens
  CDR3 for beta chain variable domain of TCR clone 237809 (TRBV20-1, TRBJ2-2)
CSASAAGTGQLFF

SEQ ID NO: 475619 - protein, 15 aa, Homo sapiens
  CDR3 for alpha chain variable domain of TCR clone 237810 (TRAV21, TRAJ45)
CAVSYSGGGADGLTF

SEQ ID NO: 475620 - protein, 12 aa, Homo sapiens
  CDR3 for beta chain variable domain of TCR clone 237810 (TRBV11-2, TRBJ2-1)
CASSHGNNEQFF

SEQ ID NO: 475621 - protein, 13 aa, Homo sapiens
  CDR3 for alpha chain variable domain of TCR clone 237811 (TRAV21, TRAJ20)
CAVGLRVDYKLSF

SEQ ID NO: 475622 - protein, 12 aa, Homo sapiens
  CDR3 for beta chain variable domain of TCR clone 237811 (TRBV19, TRBJ2-7)
CASTSGTYEQYF

SEQ ID NO: 475623 - protein, 14 aa, Homo sapiens
  CDR3 for alpha chain variable domain of TCR clone 237812 (TRAV9-2, TRAJ39)
CALYIYNAGNMLTS

SEQ ID NO: 475624 - protein, 15 aa, Homo sapiens
  CDR3 for beta chain variable domain of TCR clone 237812 (TRBV10-1, TRBJ2-3)
CASSATSGGFDTQYF

SEQ ID NO: 475625 - protein, 14 aa, Homo sapiens
  CDR3 for alpha chain variable domain of TCR clone 237813 (TRAV12-2, TRAJ13)
CAVRKTGGYQKVTF

SEQ ID NO: 475626 - protein, 19 aa, Homo sapiens
  CDR3 for beta chain variable domain of TCR clone 237813 (TRBV19, TRBJ2-5)
CASSIGQVTDFFLGETQYF

SEQ ID NO: 475627 - protein, 13 aa, Homo sapiens
  CDR3 for alpha chain variable domain of TCR clone 237814 (TRAV2, TRAJ15)
CAVASQAGTALIF

SEQ ID NO: 475628 - protein, 14 aa, Homo sapiens
  CDR3 for beta chain variable domain of TCR clone 237814 (TRBV6-5, TRBJ2-7)
CASVASGGAHEQYF

SEQ ID NO: 475629 - protein, 14 aa, Homo sapiens
  CDR3 for alpha chain variable domain of TCR clone 237815 (TRAV26-1, TRAJ39)
CIVFTNNAGNMLTF

SEQ ID NO: 475630 - protein, 17 aa, Homo sapiens
  CDR3 for beta chain variable domain of TCR clone 237815 (TRBV19, TRBJ2-4)
CASSLTGQPKTFSTSAP

SEQ ID NO: 475631 - protein, 14 aa, Homo sapiens
  CDR3 for alpha chain variable domain of TCR clone 237816 (TRAV13-1, TRAJ35)
CAASKGGFGNVLHC

SEQ ID NO: 475632 - protein, 15 aa, Homo sapiens
  CDR3 for beta chain variable domain of TCR clone 237816 (TRBV28, TRBJ2-4)
CAAGSGTLLMGIQYF

SEQ ID NO: 475633 - protein, 13 aa, Homo sapiens
  CDR3 for alpha chain variable domain of TCR clone 237817 (TRAV1-2, TRAJ12)
CAVSMDSSYKLIF

SEQ ID NO: 475634 - protein, 15 aa, Homo sapiens
  CDR3 for beta chain variable domain of TCR clone 237817 (TRBV27, TRBJ2-5)
CASSSIPSGGETQYF

SEQ ID NO: 475635 - protein, 13 aa, Homo sapiens
  CDR3 for alpha chain variable domain of TCR clone 237818 (TRAV30, TRAJ24)
CGTVADSWGNLQF

SEQ ID NO: 475636 - protein, 14 aa, Homo sapiens
  CDR3 for beta chain variable domain of TCR clone 237818 (TRBV6-3, TRBJ2-2)
CASTYTPDTGELFF

SEQ ID NO: 475637 - protein, 15 aa, Homo sapiens
  CDR3 for alpha chain variable domain of TCR clone 237819 (TRAV35, TRAJ33)
CAGQPPRYSNYQLLW

SEQ ID NO: 475638 - protein, 14 aa, Homo sapiens
  CDR3 for beta chain variable domain of TCR clone 237819 (TRBV25-1, TRBJ2-7)
CASSEYGRGYERYF

SEQ ID NO: 475639 - protein, 11 aa, Homo sapiens
  CDR3 for alpha chain variable domain of TCR clone 237820 (TRAV4, TRAJ31)
CLVGDNARPMF

SEQ ID NO: 475640 - protein, 14 aa, Homo sapiens
  CDR3 for beta chain variable domain of TCR clone 237820 (TRBV4-1, TRBJ2-2)
CASSQAVNTGELFF

SEQ ID NO: 475641 - protein, 16 aa, Homo sapiens
  CDR3 for alpha chain variable domain of TCR clone 237821 (TRAV27, TRAJ53)
CAAPEGSGCSNYKLTF

SEQ ID NO: 475642 - protein, 15 aa, Homo sapiens
  CDR3 for beta chain variable domain of TCR clone 237821 (TRBV25-1, TRBJ1-4)
CASSPGDSTNEKLFF

SEQ ID NO: 475643 - protein, 12 aa, Homo sapiens
  CDR3 for alpha chain variable domain of TCR clone 237822 (TRAV16, TRAJ22)
CALEVSARQMTF

SEQ ID NO: 475644 - protein, 14 aa, Homo sapiens
  CDR3 for beta chain variable domain of TCR clone 237822 (TRBV11-2, TRBJ2-3)
CASSSIASTDTQYF

SEQ ID NO: 475645 - protein, 13 aa, Homo sapiens
  CDR3 for alpha chain variable domain of TCR clone 237823 (TRAV21, TRAJ57)
CTVTQGGSEKLVF

SEQ ID NO: 475646 - protein, 17 aa, Homo sapiens
  CDR3 for beta chain variable domain of TCR clone 237823 (TRBV13, TRBJ2-3)
CASSLSRVAGGRNTQYF

SEQ ID NO: 475647 - protein, 12 aa, Homo sapiens
  CDR3 for alpha chain variable domain of TCR clone 237824 (TRAV12-2, TRAJ4)
GWPEGGYNKLIF

SEQ ID NO: 475648 - protein, 20 aa, Homo sapiens
  CDR3 for beta chain variable domain of TCR clone 237824 (TRBV6-1, TRBJ2-5)
CASSETLDRERRPSTSGQAR

SEQ ID NO: 475649 - protein, 23 aa, Homo sapiens
  CDR3 for alpha chain variable domain of TCR clone 237825 (TRAV8-1, TRAJ36)
CAVNSPTGANNLFLGLERDSPLF

SEQ ID NO: 475650 - protein, 15 aa, Homo sapiens
  CDR3 for beta chain variable domain of TCR clone 237825 (TRBV7-2, TRBJ2-3)
CASSLEQGGTDTQYF

SEQ ID NO: 475651 - protein, 17 aa, Homo sapiens
  CDR3 for alpha chain variable domain of TCR clone 237826 (TRAV3, TRAJ6)
CAVRDGPRAGGSYIPTF

SEQ ID NO: 475652 - protein, 13 aa, Homo sapiens
  CDR3 for beta chain variable domain of TCR clone 237826 (TRBV13, TRBJ2-2)
CASSPGLTGELFF

SEQ ID NO: 475653 - protein, 13 aa, Homo sapiens
  CDR3 for alpha chain variable domain of TCR clone 237827 (TRAV12-3, TRAJ13)
CAMSSGGHQKVTF

SEQ ID NO: 475654 - protein, 12 aa, Homo sapiens
  CDR3 for beta chain variable domain of TCR clone 237827 (TRBV19, TRBJ1-5)
CASSRDRILSRF

SEQ ID NO: 475655 - protein, 14 aa, Homo sapiens
  CDR3 for alpha chain variable domain of TCR clone 237828 (TRAV12-3, TRAJ57)
CAMSAWGGSEKLVF

SEQ ID NO: 475656 - protein, 14 aa, Homo sapiens
  CDR3 for beta chain variable domain of TCR clone 237828 (TRBV18, TRBJ2-5)
RASSPGVSQETQYF

SEQ ID NO: 475657 - protein, 12 aa, Homo sapiens
  CDR3 for alpha chain variable domain of TCR clone 237829 (TRAV1-1, TRAJ30)
CAVRGRDDKFIF

SEQ ID NO: 475658 - protein, 13 aa, Homo sapiens
  CDR3 for beta chain variable domain of TCR clone 237829 (TRBV11-3, TRBJ2-7)
CASSLDKLYEQYF

SEQ ID NO: 475659 - protein, 11 aa, Homo sapiens
  CDR3 for alpha chain variable domain of TCR clone 237830 (TRAV1-2, TRAJ20)
CAVANDYKLCF

SEQ ID NO: 475660 - protein, 16 aa, Homo sapiens
  CDR3 for beta chain variable domain of TCR clone 237830 (TRBV4-3, TRBJ1-6)
CASSQDPGVYNSPLHF

SEQ ID NO: 475661 - protein, 13 aa, Homo sapiens
  CDR3 for alpha chain variable domain of TCR clone 237831 (TRAV38-2/DV8, TRAJ34)
CAYRNYNTDKLIF

SEQ ID NO: 475662 - protein, 16 aa, Homo sapiens
  CDR3 for beta chain variable domain of TCR clone 237831 (TRBV28, TRBJ1-2)
CASSHGQGVYKDGYTF

SEQ ID NO: 475663 - protein, 13 aa, Homo sapiens
  CDR3 for alpha chain variable domain of TCR clone 237832 (TRAV8-3, TRAJ28)
CAVGAVGSYQLTF

SEQ ID NO: 475664 - protein, 17 aa, Homo sapiens
  CDR3 for beta chain variable domain of TCR clone 237832 (TRBV11-2, TRBJ2-1)
CASSLNPPGVEYNEQFF

SEQ ID NO: 475665 - protein, 13 aa, Homo sapiens
  CDR3 for alpha chain variable domain of TCR clone 237833 (TRAV3, TRAJ29)
CAVRDIIDTPLVF

SEQ ID NO: 475666 - protein, 14 aa, Homo sapiens
  CDR3 for beta chain variable domain of TCR clone 237833 (TRBV27, TRBJ2-1)
CASSATGGYNEQSF

SEQ ID NO: 475667 - protein, 12 aa, Homo sapiens
  CDR3 for alpha chain variable domain of TCR clone 237834 (TRAV12-2, TRAJ16)
CAVNLDGQKLLF

SEQ ID NO: 475668 - protein, 17 aa, Homo sapiens
  CDR3 for beta chain variable domain of TCR clone 237834 (TRBV28, TRBJ2-5)
CASSRQGGLAGAETQYF

SEQ ID NO: 475669 - protein, 15 aa, Homo sapiens
  CDR3 for alpha chain variable domain of TCR clone 237835 (TRAV8-3, TRAJ23)
CAVGDRYNQGGKLTF

SEQ ID NO: 475670 - protein, 19 aa, Homo sapiens
  CDR3 for beta chain variable domain of TCR clone 237835 (TRBV4-1, TRBJ1-4)
CASSQEGPRGVEEKLFLAV

SEQ ID NO: 475671 - protein, 18 aa, Homo sapiens
  CDR3 for alpha chain variable domain of TCR clone 237836 (TRAV13-1, TRAJ17)
CAASIHGGCRQQANFWRR

SEQ ID NO: 475672 - protein, 14 aa, Homo sapiens
  CDR3 for beta chain variable domain of TCR clone 237836 (TRBV20-1, TRBJ2-4)
CCARDRGQGGIQYF

SEQ ID NO: 475673 - protein, 14 aa, Homo sapiens
  CDR3 for alpha chain variable domain of TCR clone 237837 (TRAV1-2, TRAJ16)
CAVNRFSDVQKLRF

SEQ ID NO: 475674 - protein, 15 aa, Homo sapiens
  CDR3 for beta chain variable domain of TCR clone 237837 (TRBV9, TRBJ1-6)
CASSVAGTGDSPLHF

SEQ ID NO: 475675 - protein, 13 aa, Homo sapiens
  CDR3 for alpha chain variable domain of TCR clone 237838 (TRAV12-2, TRAJ24)
CAVSTDSWGKLQF

SEQ ID NO: 475676 - protein, 11 aa, Homo sapiens
  CDR3 for beta chain variable domain of TCR clone 237838 (TRBV11-2, TRBJ1-1)
CASSINTEAFF

SEQ ID NO: 475677 - protein, 15 aa, Homo sapiens
  CDR3 for alpha chain variable domain of TCR clone 237839 (TRAV25, TRAJ53)
CPTSNSGGSNYKLTF

SEQ ID NO: 475678 - protein, 18 aa, Homo sapiens
  CDR3 for beta chain variable domain of TCR clone 237839 (TRBV11-2, TRBJ1-3)
CASTPRVPTLGSGNTIYF

SEQ ID NO: 475679 - protein, 12 aa, Homo sapiens
  CDR3 for alpha chain variable domain of TCR clone 237840 (TRAV13-2, TRAJ23)
YAERHRGGKLIF

SEQ ID NO: 475680 - protein, 19 aa, Homo sapiens
  CDR3 for beta chain variable domain of TCR clone 237840 (TRBV19, TRBJ2-5)
CASSIGQVTDFFLGEAQYF

SEQ ID NO: 475681 - protein, 16 aa, Homo sapiens
  CDR3 for alpha chain variable domain of TCR clone 237841 (TRAV30, TRAJ24)
CGTEIVDADSWGKFQF

SEQ ID NO: 475682 - protein, 17 aa, Homo sapiens
  CDR3 for beta chain variable domain of TCR clone 237841 (TRBV20-1, TRBJ2-1)
CSAPLRLAGTRYNEQFF

SEQ ID NO: 475683 - protein, 13 aa, Homo sapiens
  CDR3 for alpha chain variable domain of TCR clone 237842 (TRAV20, TRAJ54)
CAVQAGGAQKLVF

SEQ ID NO: 475684 - protein, 14 aa, Homo sapiens
  CDR3 for beta chain variable domain of TCR clone 237842 (TRBV20-1, TRBJ2-7)
CSAKTGTGGYVQYF

SEQ ID NO: 475685 - protein, 14 aa, Homo sapiens
  CDR3 for alpha chain variable domain of TCR clone 237843 (TRAV13-1, TRAJ12)
CAASYMDSSYKLIF

SEQ ID NO: 475686 - protein, 13 aa, Homo sapiens
  CDR3 for beta chain variable domain of TCR clone 237843 (TRBV2, TRBJ2-5)
CANSDGIQETQYF

SEQ ID NO: 475687 - protein, 14 aa, Homo sapiens
  CDR3 for alpha chain variable domain of TCR clone 237844 (TRAV12-2, TRAJ13)
CAVKKTGGYQKVTL

SEQ ID NO: 475688 - protein, 12 aa, Homo sapiens
  CDR3 for beta chain variable domain of TCR clone 237844 (TRBV7-8, TRBJ2-7)
CASSLGDREQYF

SEQ ID NO: 475689 - protein, 13 aa, Homo sapiens
  CDR3 for alpha chain variable domain of TCR clone 237845 (TRAV12-3, TRAJ47)
CAMKKAYGNKLVF

SEQ ID NO: 475690 - protein, 16 aa, Homo sapiens
  CDR3 for beta chain variable domain of TCR clone 237845 (TRBV3-1, TRBJ2-6)
CASSLTWVSGANVLTF

SEQ ID NO: 475691 - protein, 14 aa, Homo sapiens
  CDR3 for alpha chain variable domain of TCR clone 237846 (TRAV16, TRAJ32)
CALKSGGATNKLIF

SEQ ID NO: 475692 - protein, 13 aa, Homo sapiens
  CDR3 for beta chain variable domain of TCR clone 237846 (TRBV15, TRBJ1-6)
CATAGGLNSPLHF

SEQ ID NO: 475693 - protein, 13 aa, Homo sapiens
  CDR3 for alpha chain variable domain of TCR clone 237847 (TRAV4, TRAJ33)
CLVGDMNNYQLIG

SEQ ID NO: 475694 - protein, 14 aa, Homo sapiens
  CDR3 for beta chain variable domain of TCR clone 237847 (TRBV7-9, TRBJ1-1)
CASSLGGANTEAFF

SEQ ID NO: 475695 - protein, 14 aa, Homo sapiens
  CDR3 for alpha chain variable domain of TCR clone 237848 (TRAV2, TRAJ15)
RLPLFNQAGTALIF

SEQ ID NO: 475696 - protein, 16 aa, Homo sapiens
  CDR3 for beta chain variable domain of TCR clone 237848 (TRBV4-1, TRBJ2-7)
CASSQEWTSGPLEQYF

SEQ ID NO: 475697 - protein, 17 aa, Homo sapiens
  CDR3 for alpha chain variable domain of TCR clone 237849 (TRAV8-6, TRAJ58)
CAVSSWVGETSGSRLTF

SEQ ID NO: 475698 - protein, 16 aa, Homo sapiens
  CDR3 for beta chain variable domain of TCR clone 237849 (TRBV20-1, TRBJ2-3)
CSAVRDRGPIADTQYF

SEQ ID NO: 475699 - protein, 11 aa, Homo sapiens
  CDR3 for alpha chain variable domain of TCR clone 237850 (TRAV3, TRAJ21)
CAVGNFNKFYF

SEQ ID NO: 475700 - protein, 14 aa, Homo sapiens
  CDR3 for beta chain variable domain of TCR clone 237850 (TRBV20-1, TRBJ2-3)
CSARGGTSTDTQYF

SEQ ID NO: 475701 - protein, 16 aa, Homo sapiens
  CDR3 for alpha chain variable domain of TCR clone 237851 (TRAV3, TRAJ10)
CAVRDMRAGGGNKLTF

SEQ ID NO: 475702 - protein, 15 aa, Homo sapiens
  CDR3 for beta chain variable domain of TCR clone 237851 (TRBV6-3, TRBJ2-3)
RLIHYSVGQADTQYF

SEQ ID NO: 475703 - protein, 15 aa, Homo sapiens
  CDR3 for alpha chain variable domain of TCR clone 237852 (TRAV12-3, TRAJ6)
CAMSATTGGSYIPTF

SEQ ID NO: 475704 - protein, 13 aa, Homo sapiens
  CDR3 for beta chain variable domain of TCR clone 237852 (TRBV7-9, TRBJ1-2)
CARSLKQNYGYTF

SEQ ID NO: 475705 - protein, 12 aa, Homo sapiens
  CDR3 for alpha chain variable domain of TCR clone 237853 (TRAV8-3, TRAJ20)
SAVDFNDYKLSF

SEQ ID NO: 475706 - protein, 13 aa, Homo sapiens
  CDR3 for beta chain variable domain of TCR clone 237853 (TRBV5-7, TRBJ2-3)
CASSLGRTDTQYF

SEQ ID NO: 475707 - protein, 14 aa, Homo sapiens
  CDR3 for alpha chain variable domain of TCR clone 237854 (TRAV13-1, TRAJ48)
CAASTDFGNDKLTF

SEQ ID NO: 475708 - protein, 14 aa, Homo sapiens
  CDR3 for beta chain variable domain of TCR clone 237854 (TRBV7-2, TRBJ2-2)
CASSSDGHTGELFF

SEQ ID NO: 475709 - protein, 14 aa, Homo sapiens
  CDR3 for alpha chain variable domain of TCR clone 237855 (TRAV12-3, TRAJ10)
SHLPLPGGGNKLTF

SEQ ID NO: 475710 - protein, 15 aa, Homo sapiens
  CDR3 for beta chain variable domain of TCR clone 237855 (TRBV7-3, TRBJ2-2)
CANSETGQGTGELFF

SEQ ID NO: 475711 - protein, 14 aa, Homo sapiens
  CDR3 for alpha chain variable domain of TCR clone 237856 (TRAV12-1, TRAJ3)
WVVSGYSSASKIIF

SEQ ID NO: 475712 - protein, 14 aa, Homo sapiens
  CDR3 for beta chain variable domain of TCR clone 237856 (TRBV6-6, TRBJ1-3)
CASSRQGSGNTIYF

SEQ ID NO: 475713 - protein, 14 aa, Homo sapiens
  CDR3 for alpha chain variable domain of TCR clone 237857 (TRAV38-1, TRAJ43)
CAFMKHNNNNDMRF

SEQ ID NO: 475714 - protein, 17 aa, Homo sapiens
  CDR3 for beta chain variable domain of TCR clone 237857 (TRBV7-7, TRBJ1-4)
CAISLVGQGASNEKLFF

SEQ ID NO: 475715 - protein, 16 aa, Homo sapiens
  CDR3 for alpha chain variable domain of TCR clone 237858 (TRAV8-2, TRAJ7)
CVVSEGPYYGNNRLAF

SEQ ID NO: 475716 - protein, 12 aa, Homo sapiens
  CDR3 for beta chain variable domain of TCR clone 237858 (TRBV11-2, TRBJ2-2)
CASSLGGGELFF

SEQ ID NO: 475717 - protein, 13 aa, Homo sapiens
  CDR3 for alpha chain variable domain of TCR clone 237859 (TRAV12-3, TRAJ33)
CAMGVNSNYKLIW

SEQ ID NO: 475718 - protein, 13 aa, Homo sapiens
  CDR3 for beta chain variable domain of TCR clone 237859 (TRBV7-2, TRBJ2-2)
CASSLAVTGELFF

SEQ ID NO: 475719 - protein, 18 aa, Homo sapiens
  CDR3 for alpha chain variable domain of TCR clone 237860 (TRAV21, TRAJ52)
CAVRPSPAGGTSYGKLTF

SEQ ID NO: 475720 - protein, 17 aa, Homo sapiens
  CDR3 for beta chain variable domain of TCR clone 237860 (TRBV4-1, TRBJ2-5)
CASSQDLTGGPIETQYF

SEQ ID NO: 475721 - protein, 15 aa, Homo sapiens
  CDR3 for alpha chain variable domain of TCR clone 237861 (TRAV23/DV6, TRAJ18)
CAARYGGSTLGRLYS

SEQ ID NO: 475722 - protein, 13 aa, Homo sapiens
  CDR3 for beta chain variable domain of TCR clone 237861 (TRBV7-2, TRBJ2-7)
CASSSPSGSEQYF

SEQ ID NO: 475723 - protein, 19 aa, Homo sapiens
  CDR3 for alpha chain variable domain of TCR clone 237862 (TRAV26-2, TRAJ52)
CILRTGFNAGGTSYGKLTF

SEQ ID NO: 475724 - protein, 15 aa, Homo sapiens
  CDR3 for beta chain variable domain of TCR clone 237862 (TRBV6-6, TRBJ2-1)
CATRQGVSSYNEQFF

SEQ ID NO: 475725 - protein, 10 aa, Homo sapiens
  CDR3 for alpha chain variable domain of TCR clone 237863 (TRAV13-1, TRAJ30)
CAARDDKIIF

SEQ ID NO: 475726 - protein, 15 aa, Homo sapiens
  CDR3 for beta chain variable domain of TCR clone 237863 (TRBV7-9, TRBJ1-2)
CTSSLDREPNYGYTF

SEQ ID NO: 475727 - protein, 15 aa, Homo sapiens
  CDR3 for alpha chain variable domain of TCR clone 237864 (TRAV21, TRAJ53)
CATLNSGGSNYKLTF

SEQ ID NO: 475728 - protein, 15 aa, Homo sapiens
  CDR3 for beta chain variable domain of TCR clone 237864 (TRBV20-1, TRBJ2-7)
CIARDRVSGMDEQYF

SEQ ID NO: 475729 - protein, 13 aa, Homo sapiens
  CDR3 for alpha chain variable domain of TCR clone 237865 (TRAV2, TRAJ40)
CAVVTPGTYKYIF

SEQ ID NO: 475730 - protein, 14 aa, Homo sapiens
  CDR3 for beta chain variable domain of TCR clone 237865 (TRBV19, TRBJ2-3)
CASSAPRGTDTQYF

SEQ ID NO: 475731 - protein, 11 aa, Homo sapiens
  CDR3 for alpha chain variable domain of TCR clone 237866 (TRAV12-2, TRAJ31)
CAVTRWARLMF

SEQ ID NO: 475732 - protein, 15 aa, Homo sapiens
  CDR3 for beta chain variable domain of TCR clone 237866 (TRBV19, TRBJ2-7)
CASSTGGGLANEQYF

SEQ ID NO: 475733 - protein, 13 aa, Homo sapiens
  CDR3 for alpha chain variable domain of TCR clone 237867 (TRAV16, TRAJ27)
CALRRTNAVKSTF

SEQ ID NO: 475734 - protein, 15 aa, Homo sapiens
  CDR3 for beta chain variable domain of TCR clone 237867 (TRBV18, TRBJ2-1)
CASSPPSASYNEQFF

SEQ ID NO: 475735 - protein, 23 aa, Homo sapiens
  CDR3 for alpha chain variable domain of TCR clone 237868 (TRAV26-1, TRAJ38)
CIADNAGNNHIQNTDPAVYQLRD

SEQ ID NO: 475736 - protein, 13 aa, Homo sapiens
  CDR3 for beta chain variable domain of TCR clone 237868 (TRBV20-1, TRBJ1-1)
CSARGGGNTEAFV

SEQ ID NO: 475737 - protein, 15 aa, Homo sapiens
  CDR3 for alpha chain variable domain of TCR clone 237869 (TRAV14/DV4, TRAJ49)
CAMREGRDTVNQFYF

SEQ ID NO: 475738 - protein, 14 aa, Homo sapiens
  CDR3 for beta chain variable domain of TCR clone 237869 (TRBV25-1, TRBJ1-1)
CASTHLGGNTEAFF

SEQ ID NO: 475739 - protein, 13 aa, Homo sapiens
  CDR3 for alpha chain variable domain of TCR clone 237870 (TRAV29/DV5, TRAJ47)
CAASAEYGNKLVF

SEQ ID NO: 475740 - protein, 14 aa, Homo sapiens
  CDR3 for beta chain variable domain of TCR clone 237870 (TRBV7-6, TRBJ2-1)
CASSLGGGADEQFF

SEQ ID NO: 475741 - protein, 16 aa, Homo sapiens
  CDR3 for alpha chain variable domain of TCR clone 237871 (TRAV12-2, TRAJ28)
CAVNEYSGAGRYQLTF

SEQ ID NO: 475742 - protein, 14 aa, Homo sapiens
  CDR3 for beta chain variable domain of TCR clone 237871 (TRBV18, TRBJ2-3)
CASSLGGGSDTQYF

SEQ ID NO: 475743 - protein, 11 aa, Homo sapiens
  CDR3 for alpha chain variable domain of TCR clone 237872 (TRAV3, TRAJ21)
CAVDNFNKFYF

SEQ ID NO: 475744 - protein, 16 aa, Homo sapiens
  CDR3 for beta chain variable domain of TCR clone 237872 (TRBV19, TRBJ2-1)
CASSRAGPSSYNEQFF

SEQ ID NO: 475745 - protein, 11 aa, Homo sapiens
  CDR3 for alpha chain variable domain of TCR clone 237873 (TRAV27, TRAJ45)
CAGAQEEELTD

SEQ ID NO: 475746 - protein, 17 aa, Homo sapiens
  CDR3 for beta chain variable domain of TCR clone 237873 (TRBV11-2, TRBJ2-1)
CASSLYPPGVEYNEQFF

SEQ ID NO: 475747 - protein, 14 aa, Homo sapiens
  CDR3 for alpha chain variable domain of TCR clone 237874 (TRAV1-2, TRAJ16)
CAVNRSSDGQKLLF

SEQ ID NO: 475748 - protein, 15 aa, Homo sapiens
  CDR3 for beta chain variable domain of TCR clone 237874 (TRBV5-8, TRBJ1-1)
CASSFSGTSLKGAFF

SEQ ID NO: 475749 - protein, 14 aa, Homo sapiens
  CDR3 for alpha chain variable domain of TCR clone 237875 (TRAV13-1, TRAJ22)
CAASYSGSARQLTF

SEQ ID NO: 475750 - protein, 13 aa, Homo sapiens
  CDR3 for beta chain variable domain of TCR clone 237875 (TRBV6-3, TRBJ1-2)
CASSLTGNYGYTF

SEQ ID NO: 475751 - protein, 12 aa, Homo sapiens
  CDR3 for alpha chain variable domain of TCR clone 237876 (TRAV12-3, TRAJ17)
CAMTLTGNKLTF

SEQ ID NO: 475752 - protein, 13 aa, Homo sapiens
  CDR3 for beta chain variable domain of TCR clone 237876 (TRBV7-3, TRBJ1-1)
CASSQDWGADAVF

SEQ ID NO: 475753 - protein, 15 aa, Homo sapiens
  CDR3 for alpha chain variable domain of TCR clone 237877 (TRAV3, TRAJ5)
CAVRDPDTGRRALTF

SEQ ID NO: 475754 - protein, 15 aa, Homo sapiens
  CDR3 for beta chain variable domain of TCR clone 237877 (TRBV20-1, TRBJ2-1)
CSARSPGGPGNEQFF

SEQ ID NO: 475755 - protein, 14 aa, Homo sapiens
  CDR3 for alpha chain variable domain of TCR clone 237878 (TRAV26-1, TRAJ57)
CIRAGQGGSEKRVF

SEQ ID NO: 475756 - protein, 13 aa, Homo sapiens
  CDR3 for beta chain variable domain of TCR clone 237878 (TRBV19, TRBJ2-7)
CASSLTTSYEQYF

SEQ ID NO: 475757 - protein, 14 aa, Homo sapiens
  CDR3 for alpha chain variable domain of TCR clone 237879 (TRAV39, TRAJ33)
CAVHIKNSNYQLIC

SEQ ID NO: 475758 - protein, 13 aa, Homo sapiens
  CDR3 for beta chain variable domain of TCR clone 237879 (TRBV4-2, TRBJ2-1)
CASSPGTYNEQFF

SEQ ID NO: 475759 - protein, 16 aa, Homo sapiens
  CDR3 for alpha chain variable domain of TCR clone 237880 (TRAV16, TRAJ4)
CALSRMFSGGYNKLIF

SEQ ID NO: 475760 - protein, 14 aa, Homo sapiens
  CDR3 for beta chain variable domain of TCR clone 237880 (TRBV11-1, TRBJ1-1)
CASSLEHPNTEAFF

SEQ ID NO: 475761 - protein, 15 aa, Homo sapiens
  CDR3 for alpha chain variable domain of TCR clone 237881 (TRAV8-2, TRAJ16)
CVVSDGFSDGQKLLF

SEQ ID NO: 475762 - protein, 13 aa, Homo sapiens
  CDR3 for beta chain variable domain of TCR clone 237881 (TRBV12-5, TRBJ2-3)
CASGDRQSDTQYF

SEQ ID NO: 475763 - protein, 16 aa, Homo sapiens
  CDR3 for alpha chain variable domain of TCR clone 237882 (TRAV1-2, TRAJ16)
CAVNRFQMARSCSLQG

SEQ ID NO: 475764 - protein, 14 aa, Homo sapiens
  CDR3 for beta chain variable domain of TCR clone 237882 (TRBV12-4, TRBJ1-1)
CASSLGTGGTEAFF

SEQ ID NO: 475765 - protein, 18 aa, Homo sapiens
  CDR3 for alpha chain variable domain of TCR clone 237883 (TRAV26-1, TRAJ52)
CIVRVEGAGGTSYGKLTF

SEQ ID NO: 475766 - protein, 13 aa, Homo sapiens
  CDR3 for beta chain variable domain of TCR clone 237883 (TRBV7-3, TRBJ1-2)
CASSLKRGFGYTF

SEQ ID NO: 475767 - protein, 13 aa, Homo sapiens
  CDR3 for alpha chain variable domain of TCR clone 237884 (TRAV27, TRAJ41)
CAGEGNSGYALNF

SEQ ID NO: 475768 - protein, 14 aa, Homo sapiens
  CDR3 for beta chain variable domain of TCR clone 237884 (TRBV18, TRBJ2-5)
CASSPGVSQETQYF

SEQ ID NO: 475769 - protein, 13 aa, Homo sapiens
  CDR3 for alpha chain variable domain of TCR clone 237885 (TRAV3, TRAJ27)
CAVTNTNSGKSTL

SEQ ID NO: 475770 - protein, 13 aa, Homo sapiens
  CDR3 for beta chain variable domain of TCR clone 237885 (TRBV19, TRBJ2-7)
CASQSYGAGEQYF

SEQ ID NO: 475771 - protein, 13 aa, Homo sapiens
  CDR3 for alpha chain variable domain of TCR clone 237886 (TRAV36/DV7, TRAJ37)
FAVFSSNTGKLIF

SEQ ID NO: 475772 - protein, 16 aa, Homo sapiens
  CDR3 for beta chain variable domain of TCR clone 237886 (TRBV3-1, TRBJ2-5)
CASSPGQFNGFGTQYF

SEQ ID NO: 475773 - protein, 14 aa, Homo sapiens
  CDR3 for alpha chain variable domain of TCR clone 237887 (TRAV1-2, TRAJ16)
CAVNRVSDGQKLLF

SEQ ID NO: 475774 - protein, 16 aa, Homo sapiens
  CDR3 for beta chain variable domain of TCR clone 237887 (TRBV5-1, TRBJ1-1)
CASSSGGNSLNTEAFF

SEQ ID NO: 475775 - protein, 23 aa, Homo sapiens
  CDR3 for alpha chain variable domain of TCR clone 237888 (TRAV21, )
CAVRQDAGNNHIKNPDPAVYQLR

SEQ ID NO: 475776 - protein, 16 aa, Homo sapiens
  CDR3 for beta chain variable domain of TCR clone 237888 (TRBV4-2, TRBJ1-1)
CASRPLDGGGDTEAFF

SEQ ID NO: 475777 - protein, 14 aa, Homo sapiens
  CDR3 for alpha chain variable domain of TCR clone 237889 (TRAV6, TRAJ6)
CAVPTSGGSYVPTF

SEQ ID NO: 475778 - protein, 15 aa, Homo sapiens
  CDR3 for beta chain variable domain of TCR clone 237889 (TRBV20-1, TRBJ2-7)
CSAESGTSGAYEQYF

SEQ ID NO: 475779 - protein, 17 aa, Homo sapiens
  CDR3 for alpha chain variable domain of TCR clone 237890 (TRAV3, TRAJ28)
CAVREAYSGSGSYQLTF

SEQ ID NO: 475780 - protein, 11 aa, Homo sapiens
  CDR3 for beta chain variable domain of TCR clone 237890 (TRBV19, TRBJ2-2)
CASRYSGELFF

SEQ ID NO: 475781 - protein, 16 aa, Homo sapiens
  CDR3 for alpha chain variable domain of TCR clone 237891 (TRAV3, TRAJ37)
CDVRGKGSGNTGKLIF

SEQ ID NO: 475782 - protein, 13 aa, Homo sapiens
  CDR3 for beta chain variable domain of TCR clone 237891 (TRBV7-2, TRBJ2-2)
CASSSVRAGELFF

SEQ ID NO: 475783 - protein, 11 aa, Homo sapiens
  CDR3 for alpha chain variable domain of TCR clone 237892 (TRAV27, TRAJ20)
CAGLNDYKLIF

SEQ ID NO: 475784 - protein, 14 aa, Homo sapiens
  CDR3 for beta chain variable domain of TCR clone 237892 (TRBV6-1, TRBJ1-1)
CASTPLQMNTEAFF

SEQ ID NO: 475785 - protein, 11 aa, Homo sapiens
  CDR3 for alpha chain variable domain of TCR clone 237893 (TRAV21, TRAJ34)
CAVTNTDKLIF

SEQ ID NO: 475786 - protein, 16 aa, Homo sapiens
  CDR3 for beta chain variable domain of TCR clone 237893 (TRBV7-3, TRBJ2-2)
CASSLKRGTVSGELFF

SEQ ID NO: 475787 - protein, 13 aa, Homo sapiens
  CDR3 for alpha chain variable domain of TCR clone 237894 (TRAV8-6, TRAJ49)
CAVITNTGNKFYF

SEQ ID NO: 475788 - protein, 14 aa, Homo sapiens
  CDR3 for beta chain variable domain of TCR clone 237894 (TRBV5-1, TRBJ2-7)
CASSRGESLYEQSF

SEQ ID NO: 475789 - protein, 16 aa, Homo sapiens
  CDR3 for alpha chain variable domain of TCR clone 237895 (TRAV3, TRAJ37)
CAVRFRGSGNTGKLIF

SEQ ID NO: 475790 - protein, 13 aa, Homo sapiens
  CDR3 for beta chain variable domain of TCR clone 237895 (TRBV7-9, TRBJ1-2)
CASSLKQNYGYTF

SEQ ID NO: 475791 - protein, 14 aa, Homo sapiens
  CDR3 for alpha chain variable domain of TCR clone 237896 (TRAV27, TRAJ44)
CAGEGAGTASKLTF

SEQ ID NO: 475792 - protein, 14 aa, Homo sapiens
  CDR3 for beta chain variable domain of TCR clone 237896 (TRBV4-2, TRBJ2-1)
CASGLDRAYNEQFF

SEQ ID NO: 475793 - protein, 13 aa, Homo sapiens
  CDR3 for alpha chain variable domain of TCR clone 237897 (TRAV30, TRAJ29)
CGTEDSGNTPLFF

SEQ ID NO: 475794 - protein, 15 aa, Homo sapiens
  CDR3 for beta chain variable domain of TCR clone 237897 (TRBV6-1, TRBJ2-3)
CASSERGGITDTQYF

SEQ ID NO: 475795 - protein, 12 aa, Homo sapiens
  CDR3 for alpha chain variable domain of TCR clone 237898 (TRAV12-1, TRAJ40)
CVFYSGTYKYIF

SEQ ID NO: 475796 - protein, 15 aa, Homo sapiens
  CDR3 for beta chain variable domain of TCR clone 237898 (TRBV6-3, TRBJ2-7)
CASSSPGTVFYEQYF

SEQ ID NO: 475797 - protein, 14 aa, Homo sapiens
  CDR3 for alpha chain variable domain of TCR clone 237899 (TRAV16, TRAJ17)
CALSGRTAGNKLTF

SEQ ID NO: 475798 - protein, 15 aa, Homo sapiens
  CDR3 for beta chain variable domain of TCR clone 237899 (TRBV3-1, TRBJ1-2)
CASSPTRLPEGGYAF

SEQ ID NO: 475799 - protein, 21 aa, Homo sapiens
  CDR3 for alpha chain variable domain of TCR clone 237900 (TRAV25, TRAJ7)
TATQTTDVGTYFCPGNNRLAF

SEQ ID NO: 475800 - protein, 16 aa, Homo sapiens
  CDR3 for beta chain variable domain of TCR clone 237900 (TRBV7-3, TRBJ2-2)
CASSLKRGTLSGELFF

SEQ ID NO: 475801 - protein, 14 aa, Homo sapiens
  CDR3 for alpha chain variable domain of TCR clone 237901 (TRAV1-2, TRAJ8)
CAVREDTGFQKLVF

SEQ ID NO: 475802 - protein, 14 aa, Homo sapiens
  CDR3 for beta chain variable domain of TCR clone 237901 (TRBV7-2, TRBJ1-2)
CASSQTGSTYGDTF

SEQ ID NO: 475803 - protein, 16 aa, Homo sapiens
  CDR3 for alpha chain variable domain of TCR clone 237902 (TRAV8-2, TRAJ50)
CVVSDHMKSSYDKVIF

SEQ ID NO: 475804 - protein, 15 aa, Homo sapiens
  CDR3 for beta chain variable domain of TCR clone 237902 (TRBV7-2, TRBJ2-1)
CASSFQADEYSEQFF

SEQ ID NO: 475805 - protein, 12 aa, Homo sapiens
  CDR3 for alpha chain variable domain of TCR clone 237903 (TRAV23/DV6, TRAJ53)
CAASKMGSGGSN

SEQ ID NO: 475806 - protein, 14 aa, Homo sapiens
  CDR3 for beta chain variable domain of TCR clone 237903 (TRBV7-9, TRBJ2-3)
CASSLEQGTNTQYF

SEQ ID NO: 475807 - protein, 12 aa, Homo sapiens
  CDR3 for alpha chain variable domain of TCR clone 237904 (TRAV12-3, TRAJ31)
CAMSVPNARLMF

SEQ ID NO: 475808 - protein, 12 aa, Homo sapiens
  CDR3 for beta chain variable domain of TCR clone 237904 (TRBV11-2, TRBJ2-1)
CASSVQRDGQFF

SEQ ID NO: 475809 - protein, 13 aa, Homo sapiens
  CDR3 for alpha chain variable domain of TCR clone 237905 (TRAV1-2, TRAJ24)
CAVRADSWGNFQF

SEQ ID NO: 475810 - protein, 13 aa, Homo sapiens
  CDR3 for beta chain variable domain of TCR clone 237905 (TRBV20-1, TRBJ2-1)
CSATGLAGDEQFF

SEQ ID NO: 475811 - protein, 11 aa, Homo sapiens
  CDR3 for alpha chain variable domain of TCR clone 237906 (TRAV3, TRAJ21)
CAAGNFNKFYF

SEQ ID NO: 475812 - protein, 16 aa, Homo sapiens
  CDR3 for beta chain variable domain of TCR clone 237906 (TRBV19, TRBJ2-1)
FASSKAGPSSYNEQFF

SEQ ID NO: 475813 - protein, 12 aa, Homo sapiens
  CDR3 for alpha chain variable domain of TCR clone 237907 (TRAV1-2, TRAJ24)
CAVGAAGGNSSL

SEQ ID NO: 475814 - protein, 15 aa, Homo sapiens
  CDR3 for beta chain variable domain of TCR clone 237907 (TRBV6-1, TRBJ2-7)
CASSEGVGNPYEQYF

SEQ ID NO: 475815 - protein, 14 aa, Homo sapiens
  CDR3 for alpha chain variable domain of TCR clone 237908 (TRAV12-2, TRAJ53)
CAVKGGGSNYNLTF

SEQ ID NO: 475816 - protein, 15 aa, Homo sapiens
  CDR3 for beta chain variable domain of TCR clone 237908 (TRBV11-2, TRBJ2-2)
CASGSDRVNAGELFF

SEQ ID NO: 475817 - protein, 13 aa, Homo sapiens
  CDR3 for alpha chain variable domain of TCR clone 237909 (TRAV35, TRAJ42)
CAGFPGSQGKLIF

SEQ ID NO: 475818 - protein, 14 aa, Homo sapiens
  CDR3 for beta chain variable domain of TCR clone 237909 (TRBV19, TRBJ2-1)
CASPTFVLSGEQFF

SEQ ID NO: 475819 - protein, 14 aa, Homo sapiens
  CDR3 for alpha chain variable domain of TCR clone 237910 (TRAV8-4, TRAJ9)
CAVSDRTGGFKTIF

SEQ ID NO: 475820 - protein, 15 aa, Homo sapiens
  CDR3 for beta chain variable domain of TCR clone 237910 (TRBV19, TRBJ2-7)
CASSPAGSGEALRYF

SEQ ID NO: 475821 - protein, 10 aa, Homo sapiens
  CDR3 for alpha chain variable domain of TCR clone 237911 (TRAV30, TRAJ48)
CGIGNEKLTF

SEQ ID NO: 475822 - protein, 13 aa, Homo sapiens
  CDR3 for beta chain variable domain of TCR clone 237911 (TRBV29-1, TRBJ2-1)
CSVEGGRVNEQFF

SEQ ID NO: 475823 - protein, 14 aa, Homo sapiens
  CDR3 for alpha chain variable domain of TCR clone 237912 (TRAV16, TRAJ54)
CALSGLQGAQKLVF

SEQ ID NO: 475824 - protein, 15 aa, Homo sapiens
  CDR3 for beta chain variable domain of TCR clone 237912 (TRBV28, TRBJ2-1)
CASSIIAGGRSEQFF

SEQ ID NO: 475825 - protein, 15 aa, Homo sapiens
  CDR3 for alpha chain variable domain of TCR clone 237913 (TRAV8-3, TRAJ45)
CTSSYSGGGADGLTS

SEQ ID NO: 475826 - protein, 18 aa, Homo sapiens
  CDR3 for beta chain variable domain of TCR clone 237913 (TRBV18, TRBJ1-3)
CASSPRGGAGPSGNTIYF

SEQ ID NO: 475827 - protein, 14 aa, Homo sapiens
  CDR3 for alpha chain variable domain of TCR clone 237914 (TRAV26-1, TRAJ47)
CIVIPTLHGIWKQT

SEQ ID NO: 475828 - protein, 14 aa, Homo sapiens
  CDR3 for beta chain variable domain of TCR clone 237914 (TRBV7-3, TRBJ1-5)
RASSFSGCNQPQHF

SEQ ID NO: 475829 - protein, 12 aa, Homo sapiens
  CDR3 for alpha chain variable domain of TCR clone 237915 (TRAV17, TRAJ20)
CSTDSNDYKLSF

SEQ ID NO: 475830 - protein, 17 aa, Homo sapiens
  CDR3 for beta chain variable domain of TCR clone 237915 (TRBV5-1, TRBJ2-2)
CASSLAGLSGGTGELFF

SEQ ID NO: 475831 - protein, 11 aa, Homo sapiens
  CDR3 for alpha chain variable domain of TCR clone 237916 (TRAV21, TRAJ20)
CATSNDYKLSF

SEQ ID NO: 475832 - protein, 16 aa, Homo sapiens
  CDR3 for beta chain variable domain of TCR clone 237916 (TRBV19, TRBJ2-3)
CASRGSGRAFTDTQYF

SEQ ID NO: 475833 - protein, 14 aa, Homo sapiens
  CDR3 for alpha chain variable domain of TCR clone 237917 (TRAV3, TRAJ21)
CAVESPANFNQFYF

SEQ ID NO: 475834 - protein, 18 aa, Homo sapiens
  CDR3 for beta chain variable domain of TCR clone 237917 (TRBV7-9, TRBJ2-1)
CASSLAVSGTSGRNEQFF

SEQ ID NO: 475835 - protein, 15 aa, Homo sapiens
  CDR3 for alpha chain variable domain of TCR clone 237918 (TRAV8-3, TRAJ45)
CASSYSGGGADGLTF

SEQ ID NO: 475836 - protein, 12 aa, Homo sapiens
  CDR3 for beta chain variable domain of TCR clone 237918 (TRBV12-4, TRBJ2-7)
CASSLGGYEQYV

SEQ ID NO: 475837 - protein, 11 aa, Homo sapiens
  CDR3 for alpha chain variable domain of TCR clone 237919 (TRAV8-3, TRAJ15)
CAVGPGTALIF

SEQ ID NO: 475838 - protein, 18 aa, Homo sapiens
  CDR3 for beta chain variable domain of TCR clone 237919 (TRBV18, TRBJ2-3)
CASSYTSGAAGGKDTQYF

SEQ ID NO: 475839 - protein, 10 aa, Homo sapiens
  CDR3 for alpha chain variable domain of TCR clone 237920 (TRAV1-2, TRAJ20)
CVPNDYKLSF

SEQ ID NO: 475840 - protein, 11 aa, Homo sapiens
  CDR3 for beta chain variable domain of TCR clone 237920 (TRBV12-4, TRBJ2-3)
CASTATDTQYF

SEQ ID NO: 475841 - protein, 14 aa, Homo sapiens
  CDR3 for alpha chain variable domain of TCR clone 237921 (TRAV30, TRAJ26)
CGTEIVSYGQNFVF

SEQ ID NO: 475842 - protein, 13 aa, Homo sapiens
  CDR3 for beta chain variable domain of TCR clone 237921 (TRBV27, TRBJ1-4)
CASSLMGDEKLFF

SEQ ID NO: 475843 - protein, 11 aa, Homo sapiens
  CDR3 for alpha chain variable domain of TCR clone 237922 (TRAV27, TRAJ43)
CRSNQGNKLVF

SEQ ID NO: 475844 - protein, 14 aa, Homo sapiens
  CDR3 for beta chain variable domain of TCR clone 237922 (TRBV11-2, TRBJ1-2)
CASSLGTANYGYTF

SEQ ID NO: 475845 - protein, 13 aa, Homo sapiens
  CDR3 for alpha chain variable domain of TCR clone 237923 (TRAV27, TRAJ53)
CAGQGGSKYKLTF

SEQ ID NO: 475846 - protein, 13 aa, Homo sapiens
  CDR3 for beta chain variable domain of TCR clone 237923 (TRBV29-1, TRBJ1-1)
CSVELGFGTEAFF

SEQ ID NO: 475847 - protein, 15 aa, Homo sapiens
  CDR3 for alpha chain variable domain of TCR clone 237924 (TRAV13-1, TRAJ17)
CAASIERAAGNKLTF

SEQ ID NO: 475848 - protein, 15 aa, Homo sapiens
  CDR3 for beta chain variable domain of TCR clone 237924 (TRBV6-1, TRBJ2-3)
CASSERGGIADTQYF

SEQ ID NO: 475849 - protein, 15 aa, Homo sapiens
  CDR3 for alpha chain variable domain of TCR clone 237925 (TRAV25, TRAJ43)
CAVFMRVGAGTRLTV

SEQ ID NO: 475850 - protein, 13 aa, Homo sapiens
  CDR3 for beta chain variable domain of TCR clone 237925 (TRBV7-9, TRBJ1-2)
CASSLKQNYGYTF

SEQ ID NO: 475851 - protein, 12 aa, Homo sapiens
  CDR3 for alpha chain variable domain of TCR clone 237926 (TRAV21, TRAJ3)
CCFYSSASKIIF

SEQ ID NO: 475852 - protein, 13 aa, Homo sapiens
  CDR3 for beta chain variable domain of TCR clone 237926 (TRBV28, TRBJ2-7)
CASKAGGVYEQYF

SEQ ID NO: 475853 - protein, 20 aa, Homo sapiens
  CDR3 for alpha chain variable domain of TCR clone 237927 (TRAV12-3, TRAJ41)
SSFIRDSQPSDSATPEALNF

SEQ ID NO: 475854 - protein, 13 aa, Homo sapiens
  CDR3 for beta chain variable domain of TCR clone 237927 (TRBV10-3, TRBJ2-3)
CAIRDTGADTQYF

SEQ ID NO: 475855 - protein, 12 aa, Homo sapiens
  CDR3 for alpha chain variable domain of TCR clone 237928 (TRAV2, TRAJ9)
CAVGAGGFKTIF

SEQ ID NO: 475856 - protein, 13 aa, Homo sapiens
  CDR3 for beta chain variable domain of TCR clone 237928 (TRBV7-2, TRBJ1-1)
CASNLKGAKVAFF

SEQ ID NO: 475857 - protein, 16 aa, Homo sapiens
  CDR3 for alpha chain variable domain of TCR clone 237929 (TRAV4, TRAJ9)
CLVGDPNRPGGFKAIF

SEQ ID NO: 475858 - protein, 15 aa, Homo sapiens
  CDR3 for beta chain variable domain of TCR clone 237929 (TRBV11-3, TRBJ2-7)
CASSPGPASSYEQYF

SEQ ID NO: 475859 - protein, 16 aa, Homo sapiens
  CDR3 for alpha chain variable domain of TCR clone 237930 (TRAV26-1, TRAJ37)
CIVRGDGYGNTGKLIS

SEQ ID NO: 475860 - protein, 13 aa, Homo sapiens
  CDR3 for beta chain variable domain of TCR clone 237930 (TRBV4-1, TRBJ2-2)
CASSQENTGELFF

SEQ ID NO: 475861 - protein, 16 aa, Homo sapiens
  CDR3 for alpha chain variable domain of TCR clone 237931 (TRAV4, TRAJ5)
CLVGPDHGHGQESTYF

SEQ ID NO: 475862 - protein, 15 aa, Homo sapiens
  CDR3 for beta chain variable domain of TCR clone 237931 (TRBV27, TRBJ2-5)
CASSLLPAGGETQYF

SEQ ID NO: 475863 - protein, 10 aa, Homo sapiens
  CDR3 for alpha chain variable domain of TCR clone 237932 (TRAV30, TRAJ48)
CGIGNEKLTF

SEQ ID NO: 475864 - protein, 14 aa, Homo sapiens
  CDR3 for beta chain variable domain of TCR clone 237932 (TRBV18, TRBJ2-7)
CASSPRGGAYEQYF

SEQ ID NO: 475865 - protein, 15 aa, Homo sapiens
  CDR3 for alpha chain variable domain of TCR clone 237933 (TRAV17, TRAJ52)
CATEAGGTSYGKLTF

SEQ ID NO: 475866 - protein, 14 aa, Homo sapiens
  CDR3 for beta chain variable domain of TCR clone 237933 (TRBV28, TRBJ1-5)
CASSLGVLVEPQHF

SEQ ID NO: 475867 - protein, 16 aa, Homo sapiens
  CDR3 for alpha chain variable domain of TCR clone 237934 (TRAV3, TRAJ37)
CAVRGKGSGNTGKLIF

SEQ ID NO: 475868 - protein, 14 aa, Homo sapiens
  CDR3 for beta chain variable domain of TCR clone 237934 (TRBV20-1, TRBJ2-3)
CSAGGGTSTDTQYF

SEQ ID NO: 475869 - protein, 16 aa, Homo sapiens
  CDR3 for alpha chain variable domain of TCR clone 237935 (TRAV26-1, TRAJ45)
CIVEKYSGGGADGLTF

SEQ ID NO: 475870 - protein, 14 aa, Homo sapiens
  CDR3 for beta chain variable domain of TCR clone 237935 (TRBV18, TRBJ1-2)
RVAIFLCANYGYTF

SEQ ID NO: 475871 - protein, 11 aa, Homo sapiens
  CDR3 for alpha chain variable domain of TCR clone 237936 (TRAV3, TRAJ21)
CAVGNFNKFHF

SEQ ID NO: 475872 - protein, 12 aa, Homo sapiens
  CDR3 for beta chain variable domain of TCR clone 237936 (TRBV19, TRBJ2-1)
CASSRQGAEQFF

SEQ ID NO: 475873 - protein, 12 aa, Homo sapiens
  CDR3 for alpha chain variable domain of TCR clone 237937 (TRAV36/DV7, TRAJ37)
CACCGNTGKLIF

SEQ ID NO: 475874 - protein, 13 aa, Homo sapiens
  CDR3 for beta chain variable domain of TCR clone 237937 (TRBV10-3, TRBJ2-7)
CASKLAVNYEQYF

SEQ ID NO: 475875 - protein, 15 aa, Homo sapiens
  CDR3 for alpha chain variable domain of TCR clone 237938 (TRAV12-2, TRAJ53)
CAVNGGGGSNYKLTF

SEQ ID NO: 475876 - protein, 16 aa, Homo sapiens
  CDR3 for beta chain variable domain of TCR clone 237938 (TRBV18, TRBJ1-5)
CASSPSTGNSNQPQHF

SEQ ID NO: 475877 - protein, 13 aa, Homo sapiens
  CDR3 for alpha chain variable domain of TCR clone 237939 (TRAV26-2, TRAJ45)
CIPYRRRCRRTHL

SEQ ID NO: 475878 - protein, 20 aa, Homo sapiens
  CDR3 for beta chain variable domain of TCR clone 237939 (TRBV28, TRBJ2-1)
CASTPIGRSPGLAGGNEQFF

SEQ ID NO: 475879 - protein, 11 aa, Homo sapiens
  CDR3 for alpha chain variable domain of TCR clone 237940 (TRAV12-3, TRAJ43)
CAMSVSNDMRF

SEQ ID NO: 475880 - protein, 10 aa, Homo sapiens
  CDR3 for beta chain variable domain of TCR clone 237940 (TRBV20-1, TRBJ1-1)
CTWGGTEAFF

SEQ ID NO: 475881 - protein, 14 aa, Homo sapiens
  CDR3 for alpha chain variable domain of TCR clone 237941 (TRAV8-6, TRAJ5)
CAVSVDTGRRALTF

SEQ ID NO: 475882 - protein, 14 aa, Homo sapiens
  CDR3 for beta chain variable domain of TCR clone 237941 (TRBV4-2, TRBJ1-2)
CASSPGGSNYGYTF

SEQ ID NO: 475883 - protein, 13 aa, Homo sapiens
  CDR3 for alpha chain variable domain of TCR clone 237942 (TRAV17, TRAJ40)
CAGALGGTYKYIF

SEQ ID NO: 475884 - protein, 15 aa, Homo sapiens
  CDR3 for beta chain variable domain of TCR clone 237942 (TRBV5-7, TRBJ1-5)
CASSYGKLWDQPQHF

SEQ ID NO: 475885 - protein, 14 aa, Homo sapiens
  CDR3 for alpha chain variable domain of TCR clone 237943 (TRAV26-1, TRAJ6)
CIVSPVGGSYIPTF

SEQ ID NO: 475886 - protein, 16 aa, Homo sapiens
  CDR3 for beta chain variable domain of TCR clone 237943 (TRBV12-5, TRBJ2-5)
CASGPRTSGNQETQYF

SEQ ID NO: 475887 - protein, 13 aa, Homo sapiens
  CDR3 for alpha chain variable domain of TCR clone 237944 (TRAV17, TRAJ22)
CAHHSGSARQLTF

SEQ ID NO: 475888 - protein, 13 aa, Homo sapiens
  CDR3 for beta chain variable domain of TCR clone 237944 (TRBV27, TRBJ1-4)
CASGLMGDEKLFF

SEQ ID NO: 475889 - protein, 16 aa, Homo sapiens
  CDR3 for alpha chain variable domain of TCR clone 237945 (TRAV30, TRAJ24)
CGTEIVAADTCGKFQF

SEQ ID NO: 475890 - protein, 14 aa, Homo sapiens
  CDR3 for beta chain variable domain of TCR clone 237945 (TRBV12-5, TRBJ2-5)
CASGSRTHQETQYF

SEQ ID NO: 475891 - protein, 14 aa, Homo sapiens
  CDR3 for alpha chain variable domain of TCR clone 237946 (TRAV26-1, TRAJ38)
CIADNAGNNRKLIW

SEQ ID NO: 475892 - protein, 17 aa, Homo sapiens
  CDR3 for beta chain variable domain of TCR clone 237946 (TRBV7-9, TRBJ2-3)
CASGPTVAGDLTDTQYF

SEQ ID NO: 475893 - protein, 15 aa, Homo sapiens
  CDR3 for alpha chain variable domain of TCR clone 237947 (TRAV8-4, TRAJ37)
CAVSRGSGNTGKLIF

SEQ ID NO: 475894 - protein, 15 aa, Homo sapiens
  CDR3 for beta chain variable domain of TCR clone 237947 (TRBV5-1, TRBJ2-7)
CASSLDVTSSYEQYF

SEQ ID NO: 475895 - protein, 14 aa, Homo sapiens
  CDR3 for alpha chain variable domain of TCR clone 237948 (TRAV9-2, TRAJ39)
CALYIYNAGNMLTF

SEQ ID NO: 475896 - protein, 15 aa, Homo sapiens
  CDR3 for beta chain variable domain of TCR clone 237948 (TRBV7-3, TRBJ2-2)
CASSLEVLRTGELFF

SEQ ID NO: 475897 - protein, 14 aa, Homo sapiens
  CDR3 for alpha chain variable domain of TCR clone 237949 (TRAV20, TRAJ22)
CAVALGGSARQLTF

SEQ ID NO: 475898 - protein, 14 aa, Homo sapiens
  CDR3 for beta chain variable domain of TCR clone 237949 (TRBV4-1, TRBJ2-2)
CASSLTENTGELFF

SEQ ID NO: 475899 - protein, 13 aa, Homo sapiens
  CDR3 for alpha chain variable domain of TCR clone 237950 (TRAV12-2, TRAJ40)
CAVKRTGTYKNIF

SEQ ID NO: 475900 - protein, 15 aa, Homo sapiens
  CDR3 for beta chain variable domain of TCR clone 237950 (TRBV12-4, TRBJ1-2)
CASSPITGGGYGYTF

SEQ ID NO: 475901 - protein, 13 aa, Homo sapiens
  CDR3 for alpha chain variable domain of TCR clone 237951 (TRAV2, TRAJ40)
CAVVTSGTYKYIF

SEQ ID NO: 475902 - protein, 16 aa, Homo sapiens
  CDR3 for beta chain variable domain of TCR clone 237951 (TRBV4-1, TRBJ2-5)
CASSSGLAGVLGTQYF

SEQ ID NO: 475903 - protein, 14 aa, Homo sapiens
  CDR3 for alpha chain variable domain of TCR clone 237952 (TRAV13-1, TRAJ10)
CAAKGPGGGNKLTF

SEQ ID NO: 475904 - protein, 14 aa, Homo sapiens
  CDR3 for beta chain variable domain of TCR clone 237952 (TRBV6-6, TRBJ2-7)
CASSDSGAGYEQYF

SEQ ID NO: 475905 - protein, 15 aa, Homo sapiens
  CDR3 for alpha chain variable domain of TCR clone 237953 (TRAV36/DV7, TRAJ53)
CAVEGSGGSNYKLTF

SEQ ID NO: 475906 - protein, 16 aa, Homo sapiens
  CDR3 for beta chain variable domain of TCR clone 237953 (TRBV27, TRBJ2-2)
CASSLSGFWVTGELLF

SEQ ID NO: 475907 - protein, 12 aa, Homo sapiens
  CDR3 for alpha chain variable domain of TCR clone 237954 (TRAV4, TRAJ26)
CLVGDYGQNFVF

SEQ ID NO: 475908 - protein, 16 aa, Homo sapiens
  CDR3 for beta chain variable domain of TCR clone 237954 (TRBV7-2, TRBJ1-2)
CASSSNHDRRGHGYAF

SEQ ID NO: 475909 - protein, 16 aa, Homo sapiens
  CDR3 for alpha chain variable domain of TCR clone 237955 (TRAV3, TRAJ3)
CAVRDGGKSSASKIIF

SEQ ID NO: 475910 - protein, 13 aa, Homo sapiens
  CDR3 for beta chain variable domain of TCR clone 237955 (TRBV10-3, TRBJ2-7)
CASKLAVNYEQYF

SEQ ID NO: 475911 - protein, 13 aa, Homo sapiens
  CDR3 for alpha chain variable domain of TCR clone 237956 (TRAV2, TRAJ40)
RAVVNSGTYKYIF

SEQ ID NO: 475912 - protein, 14 aa, Homo sapiens
  CDR3 for beta chain variable domain of TCR clone 237956 (TRBV19, TRBJ2-1)
CASPTFVLSGEQFF

SEQ ID NO: 475913 - protein, 14 aa, Homo sapiens
  CDR3 for alpha chain variable domain of TCR clone 237957 (TRAV12-3, TRAJ10)
SHLPLTGGGNKLTF

SEQ ID NO: 475914 - protein, 17 aa, Homo sapiens
  CDR3 for beta chain variable domain of TCR clone 237957 (TRBV20-1, TRBJ2-1)
CSASSSGLAVSYNEQFF

SEQ ID NO: 475915 - protein, 13 aa, Homo sapiens
  CDR3 for alpha chain variable domain of TCR clone 237958 (TRAV2, TRAJ40)
CAVVTSGTYKYIF

SEQ ID NO: 475916 - protein, 14 aa, Homo sapiens
  CDR3 for beta chain variable domain of TCR clone 237958 (TRBV19, TRBJ2-3)
CASSAPWGTDTQYF

SEQ ID NO: 475917 - protein, 15 aa, Homo sapiens
  CDR3 for alpha chain variable domain of TCR clone 237959 (TRAV2, TRAJ11)
CAVGGRNSGYSTLTF

SEQ ID NO: 475918 - protein, 14 aa, Homo sapiens
  CDR3 for beta chain variable domain of TCR clone 237959 (TRBV29-1, TRBJ1-4)
CSVEDMDRGEKLFF

SEQ ID NO: 475919 - protein, 14 aa, Homo sapiens
  CDR3 for alpha chain variable domain of TCR clone 237960 (TRAV1-1, TRAJ27)
CAVIYNTNAGKSTF

SEQ ID NO: 475920 - protein, 12 aa, Homo sapiens
  CDR3 for beta chain variable domain of TCR clone 237960 (TRBV29-1, TRBJ2-3)
CSVTGGADTQYF

SEQ ID NO: 475921 - protein, 16 aa, Homo sapiens
  CDR3 for alpha chain variable domain of TCR clone 237961 (TRAV16, TRAJ4)
CALSRMFSGGYNKLIF

SEQ ID NO: 475922 - protein, 17 aa, Homo sapiens
  CDR3 for beta chain variable domain of TCR clone 237961 (TRBV24-1, TRBJ2-1)
CATSDVSTSGTYNEQFF

SEQ ID NO: 475923 - protein, 12 aa, Homo sapiens
  CDR3 for alpha chain variable domain of TCR clone 237962 (TRAV12-3, TRAJ17)
CAMTLTGNKITF

SEQ ID NO: 475924 - protein, 14 aa, Homo sapiens
  CDR3 for beta chain variable domain of TCR clone 237962 (TRBV6-6, TRBJ2-5)
CASSYGGRGETQYF

SEQ ID NO: 475925 - protein, 16 aa, Homo sapiens
  CDR3 for alpha chain variable domain of TCR clone 237963 (TRAV12-3, TRAJ45)
CAMGWGSGGGADGLTF

SEQ ID NO: 475926 - protein, 15 aa, Homo sapiens
  CDR3 for beta chain variable domain of TCR clone 237963 (TRBV3-1, TRBJ1-2)
CASSHPGTPGYGYIF

SEQ ID NO: 475927 - protein, 12 aa, Homo sapiens
  CDR3 for alpha chain variable domain of TCR clone 237964 (TRAV13-1, TRAJ34)
CAASKGTDKLIF

SEQ ID NO: 475928 - protein, 17 aa, Homo sapiens
  CDR3 for beta chain variable domain of TCR clone 237964 (TRBV11-2, TRBJ2-1)
RASSLYPPGVEYNEQFF

SEQ ID NO: 475929 - protein, 17 aa, Homo sapiens
  CDR3 for alpha chain variable domain of TCR clone 237965 (TRAV3, TRAJ6)
CAVRDGPRAGGSYIPTF

SEQ ID NO: 475930 - protein, 14 aa, Homo sapiens
  CDR3 for beta chain variable domain of TCR clone 237965 (TRBV12-5, TRBJ2-5)
CASGSRTHQETQYV

SEQ ID NO: 475931 - protein, 15 aa, Homo sapiens
  CDR3 for alpha chain variable domain of TCR clone 237966 (TRAV3, TRAJ5)
CAVRDLDTGRRALTF

SEQ ID NO: 475932 - protein, 13 aa, Homo sapiens
  CDR3 for beta chain variable domain of TCR clone 237966 (TRBV12-4, TRBJ2-7)
CASTPTETYEQYF

SEQ ID NO: 475933 - protein, 17 aa, Homo sapiens
  CDR3 for alpha chain variable domain of TCR clone 237967 (TRAV26-1, TRAJ22)
CIVRVPSHSGSARKLTF

SEQ ID NO: 475934 - protein, 16 aa, Homo sapiens
  CDR3 for beta chain variable domain of TCR clone 237967 (TRBV28, TRBJ2-1)
CASRRSGRVVGNEQFF

SEQ ID NO: 475935 - protein, 15 aa, Homo sapiens
  CDR3 for alpha chain variable domain of TCR clone 237968 (TRAV8-3, TRAJ11)
CAVGLLNSGYSTLTF

SEQ ID NO: 475936 - protein, 12 aa, Homo sapiens
  CDR3 for beta chain variable domain of TCR clone 237968 (TRBV24-1, TRBJ2-7)
CATSDPGYEQYF

SEQ ID NO: 475937 - protein, 13 aa, Homo sapiens
  CDR3 for alpha chain variable domain of TCR clone 237969 (TRAV21, TRAJ27)
FAARPGNAGKSTF

SEQ ID NO: 475938 - protein, 16 aa, Homo sapiens
  CDR3 for beta chain variable domain of TCR clone 237969 (TRBV20-1, TRBJ1-2)
CSASMGQGVANYGYTF

SEQ ID NO: 475939 - protein, 15 aa, Homo sapiens
  CDR3 for alpha chain variable domain of TCR clone 237970 (TRAV22, TRAJ45)
CAAKYSGGGADGLPF

SEQ ID NO: 475940 - protein, 18 aa, Homo sapiens
  CDR3 for beta chain variable domain of TCR clone 237970 (TRBV11-2, TRBJ2-3)
CASSLGGASRGAPNTQYF

SEQ ID NO: 475941 - protein, 16 aa, Homo sapiens
  CDR3 for alpha chain variable domain of TCR clone 237971 (TRAV30, TRAJ37)
CGTEIKGSSNTGKLIF

SEQ ID NO: 475942 - protein, 15 aa, Homo sapiens
  CDR3 for beta chain variable domain of TCR clone 237971 (TRBV6-3, TRBJ2-7)
CASSSPGTVFYEQYF

SEQ ID NO: 475943 - protein, 15 aa, Homo sapiens
  CDR3 for alpha chain variable domain of TCR clone 237972 (TRAV8-4, TRAJ37)
CAVSRGSGNTGKLIF

SEQ ID NO: 475944 - protein, 11 aa, Homo sapiens
  CDR3 for beta chain variable domain of TCR clone 237972 (TRBV28, TRBJ2-7)
CASSLTYEQYF

SEQ ID NO: 475945 - protein, 16 aa, Homo sapiens
  CDR3 for alpha chain variable domain of TCR clone 237973 (TRAV8-1, TRAJ32)
LSTSVPHKGAPNKPIF

SEQ ID NO: 475946 - protein, 12 aa, Homo sapiens
  CDR3 for beta chain variable domain of TCR clone 237973 (TRBV29-1, TRBJ2-2)
CSVDKYTGELFF

SEQ ID NO: 475947 - protein, 13 aa, Homo sapiens
  CDR3 for alpha chain variable domain of TCR clone 237974 (TRAV13-1, TRAJ37)
CAAVSGNTGKLIF

SEQ ID NO: 475948 - protein, 12 aa, Homo sapiens
  CDR3 for beta chain variable domain of TCR clone 237974 (TRBV11-2, TRBJ2-2)
CASSLPTGELFF

SEQ ID NO: 475949 - protein, 14 aa, Homo sapiens
  CDR3 for alpha chain variable domain of TCR clone 237975 (TRAV2, TRAJ37)
CAVASTSNTGKLIF

SEQ ID NO: 475950 - protein, 15 aa, Homo sapiens
  CDR3 for beta chain variable domain of TCR clone 237975 (TRBV20-1, TRBJ1-1)
CSASRGVTGNTEAFF

SEQ ID NO: 475951 - protein, 17 aa, Homo sapiens
  CDR3 for alpha chain variable domain of TCR clone 237976 (TRAV13-2, TRAJ42)
CAEKGKNYGGSQGNIIF

SEQ ID NO: 475952 - protein, 16 aa, Homo sapiens
  CDR3 for beta chain variable domain of TCR clone 237976 (TRBV7-9, TRBJ2-1)
CASSLGTGWDYNEQFF

SEQ ID NO: 475953 - protein, 14 aa, Homo sapiens
  CDR3 for alpha chain variable domain of TCR clone 237977 (TRAV26-1, TRAJ38)
CIADTAGNKRKLIW

SEQ ID NO: 475954 - protein, 13 aa, Homo sapiens
  CDR3 for beta chain variable domain of TCR clone 237977 (TRBV20-1, TRBJ1-1)
CSARGGGNTEAFF

SEQ ID NO: 475955 - protein, 13 aa, Homo sapiens
  CDR3 for alpha chain variable domain of TCR clone 237978 (TRAV13-1, TRAJ39)
CAASIWAGNMLTF

SEQ ID NO: 475956 - protein, 15 aa, Homo sapiens
  CDR3 for beta chain variable domain of TCR clone 237978 (TRBV20-1, TRBJ1-1)
FSASRGVTGNTEAFF

SEQ ID NO: 475957 - protein, 17 aa, Homo sapiens
  CDR3 for alpha chain variable domain of TCR clone 237979 (TRAV20, TRAJ52)
CAVQANAGGTSYGKLTF

SEQ ID NO: 475958 - protein, 14 aa, Homo sapiens
  CDR3 for beta chain variable domain of TCR clone 237979 (TRBV18, TRBJ1-2)
CASSPEGDLYGYTF

SEQ ID NO: 475959 - protein, 14 aa, Homo sapiens
  CDR3 for alpha chain variable domain of TCR clone 237980 (TRAV21, TRAJ9)
CCGGGGTGGFKTIF

SEQ ID NO: 475960 - protein, 13 aa, Homo sapiens
  CDR3 for beta chain variable domain of TCR clone 237980 (TRBV12-4, TRBJ1-2)
CASSAGLTVISTF

SEQ ID NO: 475961 - protein, 13 aa, Homo sapiens
  CDR3 for alpha chain variable domain of TCR clone 237981 (TRAV30, TRAJ34)
CGTVGYNTDKLIF

SEQ ID NO: 475962 - protein, 16 aa, Homo sapiens
  CDR3 for beta chain variable domain of TCR clone 237981 (TRBV7-9, TRBJ1-2)
CASSFGFSSGEDGYTF

SEQ ID NO: 475963 - protein, 11 aa, Homo sapiens
  CDR3 for alpha chain variable domain of TCR clone 237982 (TRAV3, TRAJ21)
CAVGNFNKFYF

SEQ ID NO: 475964 - protein, 15 aa, Homo sapiens
  CDR3 for beta chain variable domain of TCR clone 237982 (TRBV7-2, TRBJ2-1)
CASTSASGDYNEQFF

SEQ ID NO: 475965 - protein, 13 aa, Homo sapiens
  CDR3 for alpha chain variable domain of TCR clone 237983 (TRAV12-3, TRAJ13)
CAMSSGGYQKVTF

SEQ ID NO: 475966 - protein, 14 aa, Homo sapiens
  CDR3 for beta chain variable domain of TCR clone 237983 (TRBV2, TRBJ2-1)
CVSRTGSSYNEQFF

SEQ ID NO: 475967 - protein, 14 aa, Homo sapiens
  CDR3 for alpha chain variable domain of TCR clone 237984 (TRAV12-3, TRAJ42)
CAMNYGGSQGNLIF

SEQ ID NO: 475968 - protein, 14 aa, Homo sapiens
  CDR3 for beta chain variable domain of TCR clone 237984 (TRBV4-1, TRBJ2-5)
CASSQERGRETQYF

SEQ ID NO: 475969 - protein, 15 aa, Homo sapiens
  CDR3 for alpha chain variable domain of TCR clone 237985 (TRAV3, TRAJ5)
CSVRDLDTGRRALTF

SEQ ID NO: 475970 - protein, 15 aa, Homo sapiens
  CDR3 for beta chain variable domain of TCR clone 237985 (TRBV20-1, TRBJ2-1)
CSARSPGGPGNEQFF

SEQ ID NO: 475971 - protein, 14 aa, Homo sapiens
  CDR3 for alpha chain variable domain of TCR clone 237986 (TRAV16, TRAJ39)
CALSKNDAGSMLTF

SEQ ID NO: 475972 - protein, 19 aa, Homo sapiens
  CDR3 for beta chain variable domain of TCR clone 237986 (TRBV6-6, TRBJ2-1)
AAPSQTSVYFCASSYEQFF

SEQ ID NO: 475973 - protein, 14 aa, Homo sapiens
  CDR3 for alpha chain variable domain of TCR clone 237987 (TRAV8-3, TRAJ23)
CAVIIYNQGGRLIF

SEQ ID NO: 475974 - protein, 15 aa, Homo sapiens
  CDR3 for beta chain variable domain of TCR clone 237987 (TRBV18, TRBJ2-1)
CASSPPSASYNEQFF

SEQ ID NO: 475975 - protein, 14 aa, Homo sapiens
  CDR3 for alpha chain variable domain of TCR clone 237988 (TRAV2, TRAJ9)
CAVEDRRGGFKTIF

SEQ ID NO: 475976 - protein, 13 aa, Homo sapiens
  CDR3 for beta chain variable domain of TCR clone 237988 (TRBV3-1, TRBJ1-1)
CASSPGVITEAFF

SEQ ID NO: 475977 - protein, 15 aa, Homo sapiens
  CDR3 for alpha chain variable domain of TCR clone 237989 (TRAV36/DV7, TRAJ54)
CAVEKPVQGAQKLVF

SEQ ID NO: 475978 - protein, 17 aa, Homo sapiens
  CDR3 for beta chain variable domain of TCR clone 237989 (TRBV6-5, TRBJ1-2)
CASSSPWEGAFDYGYSF

SEQ ID NO: 475979 - protein, 15 aa, Homo sapiens
  CDR3 for alpha chain variable domain of TCR clone 237990 (TRAV3, TRAJ5)
CAVRDSKTGRRELTF

SEQ ID NO: 475980 - protein, 15 aa, Homo sapiens
  CDR3 for beta chain variable domain of TCR clone 237990 (TRBV7-8, TRBJ2-1)
CASSLADSLYNEQFF

SEQ ID NO: 475981 - protein, 15 aa, Homo sapiens
  CDR3 for alpha chain variable domain of TCR clone 237991 (TRAV26-1, TRAJ44)
CIVRANTGTASKLIF

SEQ ID NO: 475982 - protein, 16 aa, Homo sapiens
  CDR3 for beta chain variable domain of TCR clone 237991 (TRBV7-7, TRBJ2-1)
CASSLASGTSYNEQFF

SEQ ID NO: 475983 - protein, 14 aa, Homo sapiens
  CDR3 for alpha chain variable domain of TCR clone 237992 (TRAV1-2, TRAJ16)
CAVNRFSDGQKLPF

SEQ ID NO: 475984 - protein, 15 aa, Homo sapiens
  CDR3 for beta chain variable domain of TCR clone 237992 (TRBV4-2, TRBJ1-1)
CASSQQGAGDTEAFL

SEQ ID NO: 475985 - protein, 14 aa, Homo sapiens
  CDR3 for alpha chain variable domain of TCR clone 237993 (TRAV8-3, TRAJ36)
CAVGPITGANNFFF

SEQ ID NO: 475986 - protein, 15 aa, Homo sapiens
  CDR3 for beta chain variable domain of TCR clone 237993 (TRBV4-1, TRBJ2-1)
CASSQDPGNYNEQFF

SEQ ID NO: 475987 - protein, 15 aa, Homo sapiens
  CDR3 for alpha chain variable domain of TCR clone 237994 (TRAV12-1, TRAJ42)
CVVTRDGVSQGNLIF

SEQ ID NO: 475988 - protein, 19 aa, Homo sapiens
  CDR3 for beta chain variable domain of TCR clone 237994 (TRBV7-2, TRBJ2-3)
CASSFLSRNWGGGTDTQYF

SEQ ID NO: 475989 - protein, 16 aa, Homo sapiens
  CDR3 for alpha chain variable domain of TCR clone 237995 (TRAV20, TRAJ22)
CDVQASSSGSARQLTF

SEQ ID NO: 475990 - protein, 13 aa, Homo sapiens
  CDR3 for beta chain variable domain of TCR clone 237995 (TRBV7-8, TRBJ2-5)
CASSQTSVETQYF

SEQ ID NO: 475991 - protein, 15 aa, Homo sapiens
  CDR3 for alpha chain variable domain of TCR clone 237996 (TRAV8-3, TRAJ45)
CASSYSGGGADGLTF

SEQ ID NO: 475992 - protein, 17 aa, Homo sapiens
  CDR3 for beta chain variable domain of TCR clone 237996 (TRBV28, TRBJ2-7)
CASSPLPAGGKSYEQYF

SEQ ID NO: 475993 - protein, 16 aa, Homo sapiens
  CDR3 for alpha chain variable domain of TCR clone 237997 (TRAV12-1, TRAJ43)
CVENPHRFGAGTRLTV

SEQ ID NO: 475994 - protein, 13 aa, Homo sapiens
  CDR3 for beta chain variable domain of TCR clone 237997 (TRBV12-4, TRBJ1-2)
CASSSGPNYGYTF

SEQ ID NO: 475995 - protein, 15 aa, Homo sapiens
  CDR3 for alpha chain variable domain of TCR clone 237998 (TRAV3, TRAJ17)
CAVRDARAAGNKLTF

SEQ ID NO: 475996 - protein, 15 aa, Homo sapiens
  CDR3 for beta chain variable domain of TCR clone 237998 (TRBV20-1, TRBJ2-7)
CSARDRVSGMDEQYF

SEQ ID NO: 475997 - protein, 15 aa, Homo sapiens
  CDR3 for alpha chain variable domain of TCR clone 237999 (TRAV13-1, TRAJ45)
CAASGPGGGADGLTF

SEQ ID NO: 475998 - protein, 17 aa, Homo sapiens
  CDR3 for beta chain variable domain of TCR clone 237999 (TRBV20-1, TRBJ2-2)
CSASGSGQGGLTGELFF

SEQ ID NO: 475999 - protein, 14 aa, Homo sapiens
  CDR3 for alpha chain variable domain of TCR clone 238000 (TRAV38-1, TRAJ45)
CASHSGGGADGLNF

SEQ ID NO: 476000 - protein, 14 aa, Homo sapiens
  CDR3 for beta chain variable domain of TCR clone 238000 (TRBV20-1, TRBJ1-1)
CSAQTRIGGTEAFF

SEQ ID NO: 476001 - protein, 13 aa, Homo sapiens
  CDR3 for alpha chain variable domain of TCR clone 238001 (TRAV20, TRAJ54)
CAVQAGGAQKMVF

SEQ ID NO: 476002 - protein, 14 aa, Homo sapiens
  CDR3 for beta chain variable domain of TCR clone 238001 (TRBV4-1, TRBJ2-2)
CASSQAVNTGELFF

SEQ ID NO: 476003 - protein, 13 aa, Homo sapiens
  CDR3 for alpha chain variable domain of TCR clone 238002 (TRAV23/DV6, TRAJ22)
CAPYSGSARQLTF

SEQ ID NO: 476004 - protein, 12 aa, Homo sapiens
  CDR3 for beta chain variable domain of TCR clone 238002 (TRBV7-9, TRBJ2-7)
CASSIKREEQYF

SEQ ID NO: 476005 - protein, 11 aa, Homo sapiens
  CDR3 for alpha chain variable domain of TCR clone 238003 (TRAV30, TRAJ23)
CGTEIAGKLSF

SEQ ID NO: 476006 - protein, 16 aa, Homo sapiens
  CDR3 for beta chain variable domain of TCR clone 238003 (TRBV7-2, TRBJ2-7)
CASTSQAASGGYEQYF

SEQ ID NO: 476007 - protein, 11 aa, Homo sapiens
  CDR3 for alpha chain variable domain of TCR clone 238004 (TRAV12-3, TRAJ43)
FAMIVSDDMRF

SEQ ID NO: 476008 - protein, 13 aa, Homo sapiens
  CDR3 for beta chain variable domain of TCR clone 238004 (TRBV20-1, TRBJ1-1)
CSAPLGGGTEAFF

SEQ ID NO: 476009 - protein, 14 aa, Homo sapiens
  CDR3 for alpha chain variable domain of TCR clone 238005 (TRAV1-1, TRAJ27)
CAVIYNTNAGKSTF

SEQ ID NO: 476010 - protein, 15 aa, Homo sapiens
  CDR3 for beta chain variable domain of TCR clone 238005 (TRBV6-3, TRBJ2-7)
CASSSPGTVFYEQCF

SEQ ID NO: 476011 - protein, 13 aa, Homo sapiens
  CDR3 for alpha chain variable domain of TCR clone 238006 (TRAV6, TRAJ32)
CSRAGGATNKLIF

SEQ ID NO: 476012 - protein, 16 aa, Homo sapiens
  CDR3 for beta chain variable domain of TCR clone 238006 (TRBV7-2, TRBJ1-3)
CASSRLEASSGNTIYF

SEQ ID NO: 476013 - protein, 13 aa, Homo sapiens
  CDR3 for alpha chain variable domain of TCR clone 238007 (TRAV17, TRAJ26)
CATVDNYGQNFVF

SEQ ID NO: 476014 - protein, 16 aa, Homo sapiens
  CDR3 for beta chain variable domain of TCR clone 238007 (TRBV11-2, TRBJ2-7)
CASSPTTGGVSYEQYF

SEQ ID NO: 476015 - protein, 15 aa, Homo sapiens
  CDR3 for alpha chain variable domain of TCR clone 238008 (TRAV12-1, TRAJ45)
CVVLSGGVGADGLTF

SEQ ID NO: 476016 - protein, 15 aa, Homo sapiens
  CDR3 for beta chain variable domain of TCR clone 238008 (TRBV20-1, TRBJ2-7)
CSARDRVSGMDEQYF

SEQ ID NO: 476017 - protein, 15 aa, Homo sapiens
  CDR3 for alpha chain variable domain of TCR clone 238009 (TRAV26-1, TRAJ29)
CIVRVEGSGKTPLVF

SEQ ID NO: 476018 - protein, 15 aa, Homo sapiens
  CDR3 for beta chain variable domain of TCR clone 238009 (TRBV7-9, TRBJ1-5)
CASSQGHQPNQPRHF

SEQ ID NO: 476019 - protein, 16 aa, Homo sapiens
  CDR3 for alpha chain variable domain of TCR clone 238010 (TRAV13-1, TRAJ10)
CEASSHFTGGGNKLTF

SEQ ID NO: 476020 - protein, 15 aa, Homo sapiens
  CDR3 for beta chain variable domain of TCR clone 238010 (TRBV7-9, TRBJ1-6)
CASSSPGRGNSPLHF

SEQ ID NO: 476021 - protein, 11 aa, Homo sapiens
  CDR3 for alpha chain variable domain of TCR clone 238011 (TRAV12-3, TRAJ43)
CAMSVSNDMRF

SEQ ID NO: 476022 - protein, 14 aa, Homo sapiens
  CDR3 for beta chain variable domain of TCR clone 238011 (TRBV12-4, TRBJ2-1)
CASSWGHSVDEQFF

SEQ ID NO: 476023 - protein, 17 aa, Homo sapiens
  CDR3 for alpha chain variable domain of TCR clone 238012 (TRAV13-1, TRAJ28)
CAASPPYSGAGSYQLTF

SEQ ID NO: 476024 - protein, 15 aa, Homo sapiens
  CDR3 for beta chain variable domain of TCR clone 238012 (TRBV2, TRBJ2-7)
CASSEGLARSYERYF

SEQ ID NO: 476025 - protein, 12 aa, Homo sapiens
  CDR3 for alpha chain variable domain of TCR clone 238013 (TRAV25, TRAJ33)
CAGPDSNYQLIW

SEQ ID NO: 476026 - protein, 15 aa, Homo sapiens
  CDR3 for beta chain variable domain of TCR clone 238013 (TRBV6-1, TRBJ2-5)
CASSEGWGIQETQYF

SEQ ID NO: 476027 - protein, 11 aa, Homo sapiens
  CDR3 for alpha chain variable domain of TCR clone 238014 (TRAV17, TRAJ39)
CATNPYNMLTF

SEQ ID NO: 476028 - protein, 13 aa, Homo sapiens
  CDR3 for beta chain variable domain of TCR clone 238014 (TRBV12-5, TRBJ2-3)
CASQNRGTDTQYF

SEQ ID NO: 476029 - protein, 13 aa, Homo sapiens
  CDR3 for alpha chain variable domain of TCR clone 238015 (TRAV13-1, TRAJ39)
CSKYSNAGNMLTF

SEQ ID NO: 476030 - protein, 14 aa, Homo sapiens
  CDR3 for beta chain variable domain of TCR clone 238015 (TRBV7-2, TRBJ1-1)
CASSFLTGTTEAFF

SEQ ID NO: 476031 - protein, 16 aa, Homo sapiens
  CDR3 for alpha chain variable domain of TCR clone 238016 (TRAV23/DV6, TRAJ9)
CAASIGGNTGGFKTIF

SEQ ID NO: 476032 - protein, 14 aa, Homo sapiens
  CDR3 for beta chain variable domain of TCR clone 238016 (TRBV11-2, TRBJ2-5)
CASSRTGGIETQYF

SEQ ID NO: 476033 - protein, 15 aa, Homo sapiens
  CDR3 for alpha chain variable domain of TCR clone 238017 (TRAV12-1, TRAJ9)
CVVSFGDTGGFKTIF

SEQ ID NO: 476034 - protein, 20 aa, Homo sapiens
  CDR3 for beta chain variable domain of TCR clone 238017 (TRBV7-8, TRBJ2-2)
CASSHLFPGPTIHITGELFF

SEQ ID NO: 476035 - protein, 13 aa, Homo sapiens
  CDR3 for alpha chain variable domain of TCR clone 238018 (TRAV12-2, TRAJ13)
CRKKTGGYQKVTF

SEQ ID NO: 476036 - protein, 13 aa, Homo sapiens
  CDR3 for beta chain variable domain of TCR clone 238018 (TRBV4-2, TRBJ1-1)
CASSQAGNTEAFF

SEQ ID NO: 476037 - protein, 23 aa, Homo sapiens
  CDR3 for alpha chain variable domain of TCR clone 238019 (TRAV30, TRAJ43)
CTLRPPSSVTQEPTSAALSDMRF

SEQ ID NO: 476038 - protein, 15 aa, Homo sapiens
  CDR3 for beta chain variable domain of TCR clone 238019 (TRBV11-3, TRBJ2-3)
CASLKDGREGDTQYF

SEQ ID NO: 476039 - protein, 16 aa, Homo sapiens
  CDR3 for alpha chain variable domain of TCR clone 238020 (TRAV12-3, TRAJ53)
CAMSPGSGGSNYKLTV

SEQ ID NO: 476040 - protein, 17 aa, Homo sapiens
  CDR3 for beta chain variable domain of TCR clone 238020 (TRBV11-1, TRBJ2-7)
CASSLTGSFGLDYEQYF

SEQ ID NO: 476041 - protein, 16 aa, Homo sapiens
  CDR3 for alpha chain variable domain of TCR clone 238021 (TRAV26-1, TRAJ40)
CIVRVGTTSGTYKYIF

SEQ ID NO: 476042 - protein, 13 aa, Homo sapiens
  CDR3 for beta chain variable domain of TCR clone 238021 (TRBV19, TRBJ1-2)
CASSQGQVYGYTF

SEQ ID NO: 476043 - protein, 15 aa, Homo sapiens
  CDR3 for alpha chain variable domain of TCR clone 238022 (TRAV2, TRAJ44)
CAVEAYTGTASKLTF

SEQ ID NO: 476044 - protein, 17 aa, Homo sapiens
  CDR3 for beta chain variable domain of TCR clone 238022 (TRBV12-4, TRBJ2-1)
CASSPGLAGGRINEQFL

SEQ ID NO: 476045 - protein, 10 aa, Homo sapiens
  CDR3 for alpha chain variable domain of TCR clone 238023 (TRAV23/DV6, TRAJ57)
CAASSTLSQG

SEQ ID NO: 476046 - protein, 17 aa, Homo sapiens
  CDR3 for beta chain variable domain of TCR clone 238023 (TRBV11-2, TRBJ2-1)
CASSLYPPGVEYDEQFF

SEQ ID NO: 476047 - protein, 13 aa, Homo sapiens
  CDR3 for alpha chain variable domain of TCR clone 238024 (TRAV36/DV7, TRAJ37)
CAVLSSNTGKLIF

SEQ ID NO: 476048 - protein, 15 aa, Homo sapiens
  CDR3 for beta chain variable domain of TCR clone 238024 (TRBV9, TRBJ1-6)
CASSVAGTGDSPLHF

SEQ ID NO: 476049 - protein, 12 aa, Homo sapiens
  CDR3 for alpha chain variable domain of TCR clone 238025 (TRAV8-4, TRAJ31)
CAVSDSNARLMF

SEQ ID NO: 476050 - protein, 15 aa, Homo sapiens
  CDR3 for beta chain variable domain of TCR clone 238025 (TRBV27, TRBJ2-7)
CDSRFWGQGADEQYF

SEQ ID NO: 476051 - protein, 14 aa, Homo sapiens
  CDR3 for alpha chain variable domain of TCR clone 238026 (TRAV1-2, TRAJ8)
CAVREDTGFQKLVF

SEQ ID NO: 476052 - protein, 16 aa, Homo sapiens
  CDR3 for beta chain variable domain of TCR clone 238026 (TRBV12-4, TRBJ1-5)
CARSRPVGGSNQPQHF

SEQ ID NO: 476053 - protein, 10 aa, Homo sapiens
  CDR3 for alpha chain variable domain of TCR clone 238027 (TRAV23/DV6, TRAJ31)
CARGGARLMF

SEQ ID NO: 476054 - protein, 15 aa, Homo sapiens
  CDR3 for beta chain variable domain of TCR clone 238027 (TRBV7-2, TRBJ2-1)
CASTHGTGIYNEQFF

SEQ ID NO: 476055 - protein, 17 aa, Homo sapiens
  CDR3 for alpha chain variable domain of TCR clone 238028 (TRAV3, TRAJ12)
CAVRDGGRMDSSYKLIF

SEQ ID NO: 476056 - protein, 14 aa, Homo sapiens
  CDR3 for beta chain variable domain of TCR clone 238028 (TRBV6-1, TRBJ1-3)
CASVQGGGGNTIYF

SEQ ID NO: 476057 - protein, 15 aa, Homo sapiens
  CDR3 for alpha chain variable domain of TCR clone 238029 (TRAV26-1, TRAJ37)
CIVRVADGHTGKLIF

SEQ ID NO: 476058 - protein, 14 aa, Homo sapiens
  CDR3 for beta chain variable domain of TCR clone 238029 (TRBV10-3, TRBJ2-2)
CATFGQLNTGELFF

SEQ ID NO: 476059 - protein, 14 aa, Homo sapiens
  CDR3 for alpha chain variable domain of TCR clone 238030 (TRAV17, TRAJ57)
CATDPQGGSEKLGF

SEQ ID NO: 476060 - protein, 18 aa, Homo sapiens
  CDR3 for beta chain variable domain of TCR clone 238030 (TRBV25-1, TRBJ2-1)
CASSESRAGGPGYNEQFF

SEQ ID NO: 476061 - protein, 15 aa, Homo sapiens
  CDR3 for alpha chain variable domain of TCR clone 238031 (TRAV17, TRAJ6)
CATDLPSGGSYIPTF

SEQ ID NO: 476062 - protein, 16 aa, Homo sapiens
  CDR3 for beta chain variable domain of TCR clone 238031 (TRBV4-1, TRBJ2-7)
CDSSQDPTGYSYEQYF

SEQ ID NO: 476063 - protein, 18 aa, Homo sapiens
  CDR3 for alpha chain variable domain of TCR clone 238032 (TRAV21, TRAJ52)
CAVRPSPAGGTSYGKLTF

SEQ ID NO: 476064 - protein, 13 aa, Homo sapiens
  CDR3 for beta chain variable domain of TCR clone 238032 (TRBV2, TRBJ1-5)
CATAGPGNRPQHF

SEQ ID NO: 476065 - protein, 13 aa, Homo sapiens
  CDR3 for alpha chain variable domain of TCR clone 238033 (TRAV13-2, TRAJ48)
CAEMDFGNEKLTF

SEQ ID NO: 476066 - protein, 14 aa, Homo sapiens
  CDR3 for beta chain variable domain of TCR clone 238033 (TRBV7-9, TRBJ2-3)
CASSLEDGTDTQYF

SEQ ID NO: 476067 - protein, 15 aa, Homo sapiens
  CDR3 for alpha chain variable domain of TCR clone 238034 (TRAV1-2, TRAJ9)
CAVRDDGTGGFKTIF

SEQ ID NO: 476068 - protein, 16 aa, Homo sapiens
  CDR3 for beta chain variable domain of TCR clone 238034 (TRBV19, TRBJ2-7)
CASSPALGQGVYEQYF

SEQ ID NO: 476069 - protein, 15 aa, Homo sapiens
  CDR3 for alpha chain variable domain of TCR clone 238035 (TRAV8-3, TRAJ45)
CASSYSGGGADGFTF

SEQ ID NO: 476070 - protein, 15 aa, Homo sapiens
  CDR3 for beta chain variable domain of TCR clone 238035 (TRBV20-1, TRBJ2-7)
CSARDRVSGMDEQYF

SEQ ID NO: 476071 - protein, 12 aa, Homo sapiens
  CDR3 for alpha chain variable domain of TCR clone 238036 (TRAV23/DV6, TRAJ26)
CAASKFGQNFVF

SEQ ID NO: 476072 - protein, 16 aa, Homo sapiens
  CDR3 for beta chain variable domain of TCR clone 238036 (TRBV7-3, TRBJ2-2)
CASSLKRGTLSGELFF

SEQ ID NO: 476073 - protein, 16 aa, Homo sapiens
  CDR3 for alpha chain variable domain of TCR clone 238037 (TRAV3, TRAJ21)
CAVRDIERGNFNTFCF

SEQ ID NO: 476074 - protein, 13 aa, Homo sapiens
  CDR3 for beta chain variable domain of TCR clone 238037 (TRBV27, TRBJ2-7)
CASSLTTGYEQYF

SEQ ID NO: 476075 - protein, 12 aa, Homo sapiens
  CDR3 for alpha chain variable domain of TCR clone 238038 (TRAV3, TRAJ43)
CAVRDPNNDMRF

SEQ ID NO: 476076 - protein, 16 aa, Homo sapiens
  CDR3 for beta chain variable domain of TCR clone 238038 (TRBV24-1, TRBJ2-1)
CATSGVTGANYNEQFF

SEQ ID NO: 476077 - protein, 15 aa, Homo sapiens
  CDR3 for alpha chain variable domain of TCR clone 238039 (TRAV3, TRAJ4)
CAVRDGTGGYNKLIF

SEQ ID NO: 476078 - protein, 16 aa, Homo sapiens
  CDR3 for beta chain variable domain of TCR clone 238039 (TRBV7-3, TRBJ2-2)
FASSLKRGTLSGELFF

SEQ ID NO: 476079 - protein, 14 aa, Homo sapiens
  CDR3 for alpha chain variable domain of TCR clone 238040 (TRAV12-2, TRAJ13)
CAVKKTGGDQKVTF

SEQ ID NO: 476080 - protein, 16 aa, Homo sapiens
  CDR3 for beta chain variable domain of TCR clone 238040 (TRBV12-5, TRBJ2-5)
CASGPRTSGNQETQYF

SEQ ID NO: 476081 - protein, 15 aa, Homo sapiens
  CDR3 for alpha chain variable domain of TCR clone 238041 (TRAV3, TRAJ22)
CAVRDRGGSARQMPF

SEQ ID NO: 476082 - protein, 15 aa, Homo sapiens
  CDR3 for beta chain variable domain of TCR clone 238041 (TRBV11-2, TRBJ1-1)
CASSSRSSLLLSLDK

SEQ ID NO: 476083 - protein, 14 aa, Homo sapiens
  CDR3 for alpha chain variable domain of TCR clone 238042 (TRAV12-2, TRAJ17)
CAVLFRAAGNKLTF

SEQ ID NO: 476084 - protein, 15 aa, Homo sapiens
  CDR3 for beta chain variable domain of TCR clone 238042 (TRBV20-1, TRBJ2-7)
CSARDRVSGMDEQYF

SEQ ID NO: 476085 - protein, 18 aa, Homo sapiens
  CDR3 for alpha chain variable domain of TCR clone 238043 (TRAV26-1, TRAJ23)
CIVRVGLEVWNQGGKLIF

SEQ ID NO: 476086 - protein, 12 aa, Homo sapiens
  CDR3 for beta chain variable domain of TCR clone 238043 (TRBV12-5, TRBJ2-5)
CASGQGVETQYF

SEQ ID NO: 476087 - protein, 13 aa, Homo sapiens
  CDR3 for alpha chain variable domain of TCR clone 238044 (TRAV36/DV7, TRAJ37)
CAVFSSNTGKLIF

SEQ ID NO: 476088 - protein, 15 aa, Homo sapiens
  CDR3 for beta chain variable domain of TCR clone 238044 (TRBV2, TRBJ2-5)
CASTRDGGPQETQYF

SEQ ID NO: 476089 - protein, 13 aa, Homo sapiens
  CDR3 for alpha chain variable domain of TCR clone 238045 (TRAV8-1, TRAJ34)
CAVRPYNTDKLIF

SEQ ID NO: 476090 - protein, 15 aa, Homo sapiens
  CDR3 for beta chain variable domain of TCR clone 238045 (TRBV7-9, TRBJ1-3)
CASRLRSGSGNTIYF

SEQ ID NO: 476091 - protein, 20 aa, Homo sapiens
  CDR3 for alpha chain variable domain of TCR clone 238046 (TRAV12-3, TRAJ17)
SPVIQPPTSAMTLTGNKLTF

SEQ ID NO: 476092 - protein, 20 aa, Homo sapiens
  CDR3 for beta chain variable domain of TCR clone 238046 (TRBV7-8, TRBJ2-2)
CASSHLFPGPTIHITGELFF

SEQ ID NO: 476093 - protein, 12 aa, Homo sapiens
  CDR3 for alpha chain variable domain of TCR clone 238047 (TRAV13-1, TRAJ5)
CAAKAGRRAFTF

SEQ ID NO: 476094 - protein, 13 aa, Homo sapiens
  CDR3 for beta chain variable domain of TCR clone 238047 (TRBV7-9, TRBJ1-2)
CASSLKQNYGYTF

SEQ ID NO: 476095 - protein, 14 aa, Homo sapiens
  CDR3 for alpha chain variable domain of TCR clone 238048 (TRAV12-1, TRAJ3)
CGDARYSSAFKIIF

SEQ ID NO: 476096 - protein, 15 aa, Homo sapiens
  CDR3 for beta chain variable domain of TCR clone 238048 (TRBV7-2, TRBJ2-6)
CASSREGSGANVLTF

SEQ ID NO: 476097 - protein, 14 aa, Homo sapiens
  CDR3 for alpha chain variable domain of TCR clone 238049 (TRAV12-1, TRAJ3)
CVVNPGSSASKIIF

SEQ ID NO: 476098 - protein, 18 aa, Homo sapiens
  CDR3 for beta chain variable domain of TCR clone 238049 (TRBV4-2, TRBJ1-2)
CASSQDKFGHTANYGYTF

SEQ ID NO: 476099 - protein, 15 aa, Homo sapiens
  CDR3 for alpha chain variable domain of TCR clone 238050 (TRAV17, TRAJ17)
CATDASIIRRQQANF

SEQ ID NO: 476100 - protein, 16 aa, Homo sapiens
  CDR3 for beta chain variable domain of TCR clone 238050 (TRBV12-5, TRBJ2-5)
CASGPRTSGNQETQYF

SEQ ID NO: 476101 - protein, 12 aa, Homo sapiens
  CDR3 for alpha chain variable domain of TCR clone 238051 (TRAV3, TRAJ20)
CAVTDGDYKLSF

SEQ ID NO: 476102 - protein, 13 aa, Homo sapiens
  CDR3 for beta chain variable domain of TCR clone 238051 (TRBV9, TRBJ2-1)
CASSVGQGGEQFF

SEQ ID NO: 476103 - protein, 12 aa, Homo sapiens
  CDR3 for alpha chain variable domain of TCR clone 238052 (TRAV12-3, TRAJ17)
CAMTLTGNKLTF

SEQ ID NO: 476104 - protein, 13 aa, Homo sapiens
  CDR3 for beta chain variable domain of TCR clone 238052 (TRBV19, TRBJ1-2)
CASSISEDYGYTF

SEQ ID NO: 476105 - protein, 14 aa, Homo sapiens
  CDR3 for alpha chain variable domain of TCR clone 238053 (TRAV1-2, TRAJ16)
CAVNRFSDGQKLLF

SEQ ID NO: 476106 - protein, 13 aa, Homo sapiens
  CDR3 for beta chain variable domain of TCR clone 238053 (TRBV7-3, TRBJ2-5)
CASSSDREETQYF

SEQ ID NO: 476107 - protein, 13 aa, Homo sapiens
  CDR3 for alpha chain variable domain of TCR clone 238054 (TRAV30, TRAJ24)
CGTVTDSWGKLQF

SEQ ID NO: 476108 - protein, 16 aa, Homo sapiens
  CDR3 for beta chain variable domain of TCR clone 238054 (TRBV2, TRBJ2-1)
CASSVGGSLSYNEQFF

SEQ ID NO: 476109 - protein, 14 aa, Homo sapiens
  CDR3 for alpha chain variable domain of TCR clone 238055 (TRAV2, TRAJ9)
CAVEDRSGGFKTIF

SEQ ID NO: 476110 - protein, 17 aa, Homo sapiens
  CDR3 for beta chain variable domain of TCR clone 238055 (TRBV28, TRBJ2-3)
CASSPTPAGGRVDTQYF

SEQ ID NO: 476111 - protein, 15 aa, Homo sapiens
  CDR3 for alpha chain variable domain of TCR clone 238056 (TRAV12-1, TRAJ9)
CVVSFGDTGGFKTIF

SEQ ID NO: 476112 - protein, 12 aa, Homo sapiens
  CDR3 for beta chain variable domain of TCR clone 238056 (TRBV7-8, TRBJ2-3)
CASSLWDEAQYF

SEQ ID NO: 476113 - protein, 16 aa, Homo sapiens
  CDR3 for alpha chain variable domain of TCR clone 238057 (TRAV3, TRAJ10)
CAVRDMRAGGGNKLAF

SEQ ID NO: 476114 - protein, 17 aa, Homo sapiens
  CDR3 for beta chain variable domain of TCR clone 238057 (TRBV5-1, TRBJ2-7)
FAPAADNPGQIPYEQYF

SEQ ID NO: 476115 - protein, 14 aa, Homo sapiens
  CDR3 for alpha chain variable domain of TCR clone 238058 (TRAV12-1, TRAJ37)
CVVTGSSNTGKLIF

SEQ ID NO: 476116 - protein, 14 aa, Homo sapiens
  CDR3 for beta chain variable domain of TCR clone 238058 (TRBV20-1, TRBJ2-1)
CSAQIGGSANEQFF

SEQ ID NO: 476117 - protein, 10 aa, Homo sapiens
  CDR3 for alpha chain variable domain of TCR clone 238059 (TRAV27, TRAJ43)
CAGANNDMRF

SEQ ID NO: 476118 - protein, 13 aa, Homo sapiens
  CDR3 for beta chain variable domain of TCR clone 238059 (TRBV5-5, TRBJ1-2)
CASSFWRGEDYTF

SEQ ID NO: 476119 - protein, 17 aa, Homo sapiens
  CDR3 for alpha chain variable domain of TCR clone 238060 (TRAV26-1, TRAJ53)
CIVRVDDSGGSNYKLTF

SEQ ID NO: 476120 - protein, 14 aa, Homo sapiens
  CDR3 for beta chain variable domain of TCR clone 238060 (TRBV19, TRBJ2-2)
CASSIAGAFGELFF

SEQ ID NO: 476121 - protein, 12 aa, Homo sapiens
  CDR3 for alpha chain variable domain of TCR clone 238061 (TRAV8-3, TRAJ43)
CAVGAGNNDMRF

SEQ ID NO: 476122 - protein, 14 aa, Homo sapiens
  CDR3 for beta chain variable domain of TCR clone 238061 (TRBV4-2, TRBJ1-5)
CASSRDRGKQPQHF

SEQ ID NO: 476123 - protein, 14 aa, Homo sapiens
  CDR3 for alpha chain variable domain of TCR clone 238062 (TRAV12-2, TRAJ9)
CAVNLNTGGFKTIF

SEQ ID NO: 476124 - protein, 17 aa, Homo sapiens
  CDR3 for beta chain variable domain of TCR clone 238062 (TRBV20-1, TRBJ2-2)
FSASRQVGQGYTGELFF

SEQ ID NO: 476125 - protein, 13 aa, Homo sapiens
  CDR3 for alpha chain variable domain of TCR clone 238063 (TRAV3, TRAJ16)
CAVRDRNGQKLLF

SEQ ID NO: 476126 - protein, 15 aa, Homo sapiens
  CDR3 for beta chain variable domain of TCR clone 238063 (TRBV5-1, TRBJ2-1)
CASSLPRAPYNKQFF

SEQ ID NO: 476127 - protein, 15 aa, Homo sapiens
  CDR3 for alpha chain variable domain of TCR clone 238064 (TRAV13-1, TRAJ32)
CAASIYGGATNKLMF

SEQ ID NO: 476128 - protein, 12 aa, Homo sapiens
  CDR3 for beta chain variable domain of TCR clone 238064 (TRBV7-6, TRBJ2-3)
CASSTGTDTQYF

SEQ ID NO: 476129 - protein, 14 aa, Homo sapiens
  CDR3 for alpha chain variable domain of TCR clone 238065 (TRAV8-1, TRAJ5)
CAVRTDTGRSALTF

SEQ ID NO: 476130 - protein, 15 aa, Homo sapiens
  CDR3 for beta chain variable domain of TCR clone 238065 (TRBV9, TRBJ1-6)
CASSVAGTGDSPLHF

SEQ ID NO: 476131 - protein, 14 aa, Homo sapiens
  CDR3 for alpha chain variable domain of TCR clone 238066 (TRAV17, TRAJ54)
CATDANQGAQKLVF

SEQ ID NO: 476132 - protein, 10 aa, Homo sapiens
  CDR3 for beta chain variable domain of TCR clone 238066 (TRBV28, TRBJ1-2)
CASSSDRAVF

SEQ ID NO: 476133 - protein, 12 aa, Homo sapiens
  CDR3 for alpha chain variable domain of TCR clone 238067 (TRAV8-3, TRAJ43)
CAVGAGTNDMRF

SEQ ID NO: 476134 - protein, 14 aa, Homo sapiens
  CDR3 for beta chain variable domain of TCR clone 238067 (TRBV4-2, TRBJ1-5)
CASSRDRGNQTQHF

SEQ ID NO: 476135 - protein, 14 aa, Homo sapiens
  CDR3 for alpha chain variable domain of TCR clone 238068 (TRAV12-1, TRAJ17)
CVVNYKAACNKLTF

SEQ ID NO: 476136 - protein, 15 aa, Homo sapiens
  CDR3 for beta chain variable domain of TCR clone 238068 (TRBV7-2, TRBJ2-1)
CASTHGTGIYNEQFF

SEQ ID NO: 476137 - protein, 14 aa, Homo sapiens
  CDR3 for alpha chain variable domain of TCR clone 238069 (TRAV30, TRAJ12)
CGTAWMDSSYKLIF

SEQ ID NO: 476138 - protein, 17 aa, Homo sapiens
  CDR3 for beta chain variable domain of TCR clone 238069 (TRBV20-1, TRBJ2-2)
CSASGSGQGGLTRELFF

SEQ ID NO: 476139 - protein, 13 aa, Homo sapiens
  CDR3 for alpha chain variable domain of TCR clone 238070 (TRAV13-2, TRAJ53)
CAENMGSNYKLTF

SEQ ID NO: 476140 - protein, 16 aa, Homo sapiens
  CDR3 for beta chain variable domain of TCR clone 238070 (TRBV7-9, TRBJ1-2)
CASSPGGGAINYGYTF

SEQ ID NO: 476141 - protein, 16 aa, Homo sapiens
  CDR3 for alpha chain variable domain of TCR clone 238071 (TRAV12-3, TRAJ53)
CAMSPGSGVSNYKLTF

SEQ ID NO: 476142 - protein, 14 aa, Homo sapiens
  CDR3 for beta chain variable domain of TCR clone 238071 (TRBV18, TRBJ2-7)
CASSPRGGAYEQYF

SEQ ID NO: 476143 - protein, 14 aa, Homo sapiens
  CDR3 for alpha chain variable domain of TCR clone 238072 (TRAV12-2, TRAJ13)
CAVKKTGGYQKVTF

SEQ ID NO: 476144 - protein, 15 aa, Homo sapiens
  CDR3 for beta chain variable domain of TCR clone 238072 (TRBV6-3, TRBJ2-7)
CARSSPGTVFYEQYF

SEQ ID NO: 476145 - protein, 15 aa, Homo sapiens
  CDR3 for alpha chain variable domain of TCR clone 238073 (TRAV23/DV6, TRAJ13)
CAAWPGGGGYQKVTF

SEQ ID NO: 476146 - protein, 12 aa, Homo sapiens
  CDR3 for beta chain variable domain of TCR clone 238073 (TRBV2, TRBJ2-1)
CASSESSGPCIF

SEQ ID NO: 476147 - protein, 14 aa, Homo sapiens
  CDR3 for alpha chain variable domain of TCR clone 238074 (TRAV12-3, TRAJ10)
SHLPLTGGGNKLNF

SEQ ID NO: 476148 - protein, 14 aa, Homo sapiens
  CDR3 for beta chain variable domain of TCR clone 238074 (TRBV19, TRBJ2-7)
CASTVQGRPYEQYF

SEQ ID NO: 476149 - protein, 12 aa, Homo sapiens
  CDR3 for alpha chain variable domain of TCR clone 238075 (TRAV12-3, TRAJ17)
CAMTLTGNKLTF

SEQ ID NO: 476150 - protein, 15 aa, Homo sapiens
  CDR3 for beta chain variable domain of TCR clone 238075 (TRBV12-4, TRBJ2-1)
CASSLLATGNNEQFL

SEQ ID NO: 476151 - protein, 15 aa, Homo sapiens
  CDR3 for alpha chain variable domain of TCR clone 238076 (TRAV12-3, TRAJ6)
CAMIATTGGSYIPTF

SEQ ID NO: 476152 - protein, 19 aa, Homo sapiens
  CDR3 for beta chain variable domain of TCR clone 238076 (TRBV25-1, TRBJ2-2)
CAILVYRVDRGCKTGELFF

SEQ ID NO: 476153 - protein, 13 aa, Homo sapiens
  CDR3 for alpha chain variable domain of TCR clone 238077 (TRAV35, TRAJ13)
CAGRAGGYQKVNF

SEQ ID NO: 476154 - protein, 13 aa, Homo sapiens
  CDR3 for beta chain variable domain of TCR clone 238077 (TRBV12-4, TRBJ1-1)
CASTPRMNTEAFF

SEQ ID NO: 476155 - protein, 12 aa, Homo sapiens
  CDR3 for alpha chain variable domain of TCR clone 238078 (TRAV13-1, TRAJ42)
VNYGGSQGNLIF

SEQ ID NO: 476156 - protein, 15 aa, Homo sapiens
  CDR3 for beta chain variable domain of TCR clone 238078 (TRBV20-1, TRBJ2-1)
FSASSAGSSYNEQFF

SEQ ID NO: 476157 - protein, 14 aa, Homo sapiens
  CDR3 for alpha chain variable domain of TCR clone 238079 (TRAV12-1, TRAJ12)
CVVTMMDSSYKLIF

SEQ ID NO: 476158 - protein, 14 aa, Homo sapiens
  CDR3 for beta chain variable domain of TCR clone 238079 (TRBV4-1, TRBJ2-7)
CASSPVAGGDEQYF

SEQ ID NO: 476159 - protein, 14 aa, Homo sapiens
  CDR3 for alpha chain variable domain of TCR clone 238080 (TRAV20, TRAJ29)
CAVQAWVGNTPLVF

SEQ ID NO: 476160 - protein, 15 aa, Homo sapiens
  CDR3 for beta chain variable domain of TCR clone 238080 (TRBV29-1, TRBJ2-7)
YSVEFFDRGSYEQYF

SEQ ID NO: 476161 - protein, 17 aa, Homo sapiens
  CDR3 for alpha chain variable domain of TCR clone 238081 (TRAV8-6, TRAJ58)
CAVSSWVGETSGSRSTF

SEQ ID NO: 476162 - protein, 14 aa, Homo sapiens
  CDR3 for beta chain variable domain of TCR clone 238081 (TRBV12-5, TRBJ2-5)
CASGSRTHQETQYF

SEQ ID NO: 476163 - protein, 14 aa, Homo sapiens
  CDR3 for alpha chain variable domain of TCR clone 238082 (TRAV26-1, TRAJ38)
CIADNSGNNRKLIW

SEQ ID NO: 476164 - protein, 13 aa, Homo sapiens
  CDR3 for beta chain variable domain of TCR clone 238082 (TRBV20-1, TRBJ1-1)
CSARGGGNIEAFF

SEQ ID NO: 476165 - protein, 14 aa, Homo sapiens
  CDR3 for alpha chain variable domain of TCR clone 238083 (TRAV1-2, TRAJ16)
CAVNRFSDGQKLLF

SEQ ID NO: 476166 - protein, 15 aa, Homo sapiens
  CDR3 for beta chain variable domain of TCR clone 238083 (TRBV7-2, TRBJ2-2)
CASSFQRGETGELFF

SEQ ID NO: 476167 - protein, 12 aa, Homo sapiens
  CDR3 for alpha chain variable domain of TCR clone 238084 (TRAV26-1, TRAJ53)
CIEGGSNYKLTF

SEQ ID NO: 476168 - protein, 16 aa, Homo sapiens
  CDR3 for beta chain variable domain of TCR clone 238084 (TRBV5-1, TRBJ1-1)
CASSSGGNSLNTEAFF

SEQ ID NO: 476169 - protein, 12 aa, Homo sapiens
  CDR3 for alpha chain variable domain of TCR clone 238085 (TRAV12-3, TRAJ17)
CAMTLTGNKLTF

SEQ ID NO: 476170 - protein, 19 aa, Homo sapiens
  CDR3 for beta chain variable domain of TCR clone 238085 (TRBV25-1, TRBJ2-2)
CAILVYWVDRGRKTGELFF

SEQ ID NO: 476171 - protein, 18 aa, Homo sapiens
  CDR3 for alpha chain variable domain of TCR clone 238086 (TRAV17, TRAJ28)
CATDRPRGSGAGSYQLTF

SEQ ID NO: 476172 - protein, 14 aa, Homo sapiens
  CDR3 for beta chain variable domain of TCR clone 238086 (TRBV13, TRBJ2-5)
CASSLDYPQETQYF

SEQ ID NO: 476173 - protein, 13 aa, Homo sapiens
  CDR3 for alpha chain variable domain of TCR clone 238087 (TRAV16, TRAJ10)
CAPAREEETNTPL

SEQ ID NO: 476174 - protein, 14 aa, Homo sapiens
  CDR3 for beta chain variable domain of TCR clone 238087 (TRBV7-2, TRBJ2-1)
CASSLGVGYNEQFF

SEQ ID NO: 476175 - protein, 12 aa, Homo sapiens
  CDR3 for alpha chain variable domain of TCR clone 238088 (TRAV17, TRAJ20)
CATDGYDYKLSF

SEQ ID NO: 476176 - protein, 18 aa, Homo sapiens
  CDR3 for beta chain variable domain of TCR clone 238088 (TRBV6-5, TRBJ2-5)
CASSYSQAGGSYQETQYF

SEQ ID NO: 476177 - protein, 14 aa, Homo sapiens
  CDR3 for alpha chain variable domain of TCR clone 238089 (TRAV2, TRAJ9)
CAVEDRSGGFKTIF

SEQ ID NO: 476178 - protein, 15 aa, Homo sapiens
  CDR3 for beta chain variable domain of TCR clone 238089 (TRBV7-2, TRBJ2-6)
CASSSGHSGANVLTF

SEQ ID NO: 476179 - protein, 11 aa, Homo sapiens
  CDR3 for alpha chain variable domain of TCR clone 238090 (TRAV2, TRAJ33)
CAVESNYQLIW

SEQ ID NO: 476180 - protein, 13 aa, Homo sapiens
  CDR3 for beta chain variable domain of TCR clone 238090 (TRBV10-3, TRBJ2-7)
FASKLAVNYEQYF

SEQ ID NO: 476181 - protein, 19 aa, Homo sapiens
  CDR3 for alpha chain variable domain of TCR clone 238091 (TRAV17, TRAJ40)
TASRAADTASYFCASEYIF

SEQ ID NO: 476182 - protein, 17 aa, Homo sapiens
  CDR3 for beta chain variable domain of TCR clone 238091 (TRBV11-2, TRBJ2-4)
CASSFLALGGAGDRQYF

SEQ ID NO: 476183 - protein, 15 aa, Homo sapiens
  CDR3 for alpha chain variable domain of TCR clone 238092 (TRAV17, TRAJ48)
CATDETNFGNEKLTF

SEQ ID NO: 476184 - protein, 14 aa, Homo sapiens
  CDR3 for beta chain variable domain of TCR clone 238092 (TRBV12-4, TRBJ1-1)
CASSLGAGGTEAFF

SEQ ID NO: 476185 - protein, 16 aa, Homo sapiens
  CDR3 for alpha chain variable domain of TCR clone 238093 (TRAV30, TRAJ24)
CGTEIVDDDSWGKFQF

SEQ ID NO: 476186 - protein, 19 aa, Homo sapiens
  CDR3 for beta chain variable domain of TCR clone 238093 (TRBV25-1, TRBJ2-2)
CAILVYRVDRGRKTGELFF

SEQ ID NO: 476187 - protein, 10 aa, Homo sapiens
  CDR3 for alpha chain variable domain of TCR clone 238094 (TRAV13-1, TRAJ27)
CAPLARQINL

SEQ ID NO: 476188 - protein, 13 aa, Homo sapiens
  CDR3 for beta chain variable domain of TCR clone 238094 (TRBV28, TRBJ1-1)
CASSKQEWTEAFF

SEQ ID NO: 476189 - protein, 13 aa, Homo sapiens
  CDR3 for alpha chain variable domain of TCR clone 238095 (TRAV21, TRAJ15)
CAVANQAGTALIL

SEQ ID NO: 476190 - protein, 12 aa, Homo sapiens
  CDR3 for beta chain variable domain of TCR clone 238095 (TRBV28, TRBJ2-3)
CASSLYRDTQYF

SEQ ID NO: 476191 - protein, 16 aa, Homo sapiens
  CDR3 for alpha chain variable domain of TCR clone 238096 (TRAV30, TRAJ24)
CGTEIVDSDSWGKFQL

SEQ ID NO: 476192 - protein, 14 aa, Homo sapiens
  CDR3 for beta chain variable domain of TCR clone 238096 (TRBV12-5, TRBJ2-5)
CASGSRTHQETQYF

SEQ ID NO: 476193 - protein, 14 aa, Homo sapiens
  CDR3 for alpha chain variable domain of TCR clone 238097 (TRAV2, TRAJ9)
CAVEDRSGGFKTIF

SEQ ID NO: 476194 - protein, 16 aa, Homo sapiens
  CDR3 for beta chain variable domain of TCR clone 238097 (TRBV28, TRBJ1-5)
CASSLTGQGGNQPQHF

SEQ ID NO: 476195 - protein, 15 aa, Homo sapiens
  CDR3 for alpha chain variable domain of TCR clone 238098 (TRAV8-3, TRAJ11)
CAVGLLNSGYSTLTF

SEQ ID NO: 476196 - protein, 16 aa, Homo sapiens
  CDR3 for beta chain variable domain of TCR clone 238098 (TRBV7-9, TRBJ1-2)
CASSLGFSSGEDGYTS

SEQ ID NO: 476197 - protein, 12 aa, Homo sapiens
  CDR3 for alpha chain variable domain of TCR clone 238099 (TRAV8-1, TRAJ23)
CAVGNQGGKRIF

SEQ ID NO: 476198 - protein, 13 aa, Homo sapiens
  CDR3 for beta chain variable domain of TCR clone 238099 (TRBV7-9, TRBJ2-7)
CASSFAGAYEQYF

SEQ ID NO: 476199 - protein, 15 aa, Homo sapiens
  CDR3 for alpha chain variable domain of TCR clone 238100 (TRAV3, TRAJ5)
CAVRDRKTGRRALTF

SEQ ID NO: 476200 - protein, 19 aa, Homo sapiens
  CDR3 for beta chain variable domain of TCR clone 238100 (TRBV7-2, TRBJ2-3)
CASSFLSRNWGGGTDAQYF

SEQ ID NO: 476201 - protein, 14 aa, Homo sapiens
  CDR3 for alpha chain variable domain of TCR clone 238101 (TRAV12-2, TRAJ40)
CAVKIPSGTYKYIF

SEQ ID NO: 476202 - protein, 15 aa, Homo sapiens
  CDR3 for beta chain variable domain of TCR clone 238101 (TRBV20-1, TRBJ1-1)
SAVHKHGFGGTEAFF

SEQ ID NO: 476203 - protein, 14 aa, Homo sapiens
  CDR3 for alpha chain variable domain of TCR clone 238102 (TRAV12-2, TRAJ40)
CAVKIPSGTYKYIF

SEQ ID NO: 476204 - protein, 16 aa, Homo sapiens
  CDR3 for beta chain variable domain of TCR clone 238102 (TRBV7-2, TRBJ2-7)
CASSLEAGGPWYEQYF

SEQ ID NO: 476205 - protein, 16 aa, Homo sapiens
  CDR3 for alpha chain variable domain of TCR clone 238103 (TRAV16, TRAJ4)
CALSRMFSGGYNKLIF

SEQ ID NO: 476206 - protein, 15 aa, Homo sapiens
  CDR3 for beta chain variable domain of TCR clone 238103 (TRBV7-9, TRBJ2-7)
CASSPGGGLTYEQYF

SEQ ID NO: 476207 - protein, 17 aa, Homo sapiens
  CDR3 for alpha chain variable domain of TCR clone 238104 (TRAV16, TRAJ42)
CALSPKLDGGSQGNLIF

SEQ ID NO: 476208 - protein, 13 aa, Homo sapiens
  CDR3 for beta chain variable domain of TCR clone 238104 (TRBV19, TRBJ1-5)
CASSTRRDQPQHF

SEQ ID NO: 476209 - protein, 15 aa, Homo sapiens
  CDR3 for alpha chain variable domain of TCR clone 238105 (TRAV21, TRAJ6)
CAMSATTGGSYIPTF

SEQ ID NO: 476210 - protein, 17 aa, Homo sapiens
  CDR3 for beta chain variable domain of TCR clone 238105 (TRBV13, TRBJ2-3)
CASSLSRVAGGRNTQYF

SEQ ID NO: 476211 - protein, 10 aa, Homo sapiens
  CDR3 for alpha chain variable domain of TCR clone 238106 (TRAV21, TRAJ43)
CAVRIGDMRF

SEQ ID NO: 476212 - protein, 13 aa, Homo sapiens
  CDR3 for beta chain variable domain of TCR clone 238106 (TRBV20-1, TRBJ2-7)
CSAPGLAYYEQYF

SEQ ID NO: 476213 - protein, 13 aa, Homo sapiens
  CDR3 for alpha chain variable domain of TCR clone 238107 (TRAV38-1, TRAJ42)
CAFRSGSQGNLIF

SEQ ID NO: 476214 - protein, 13 aa, Homo sapiens
  CDR3 for beta chain variable domain of TCR clone 238107 (TRBV4-2, TRBJ1-1)
CASSQAGNTEAFF

SEQ ID NO: 476215 - protein, 14 aa, Homo sapiens
  CDR3 for alpha chain variable domain of TCR clone 238108 (TRAV27, TRAJ38)
CAGDRAGNNRKLIW

SEQ ID NO: 476216 - protein, 17 aa, Homo sapiens
  CDR3 for beta chain variable domain of TCR clone 238108 (TRBV9, TRBJ1-6)
CASSVAGTGDSPSTLGT

SEQ ID NO: 476217 - protein, 13 aa, Homo sapiens
  CDR3 for alpha chain variable domain of TCR clone 238109 (TRAV26-1, TRAJ33)
CIVRVEGNYQLMW

SEQ ID NO: 476218 - protein, 16 aa, Homo sapiens
  CDR3 for beta chain variable domain of TCR clone 238109 (TRBV15, TRBJ2-7)
CATSRDRGRRRGEQYF

SEQ ID NO: 476219 - protein, 13 aa, Homo sapiens
  CDR3 for alpha chain variable domain of TCR clone 238110 (TRAV21, TRAJ34)
CAVSEGDTDKLIF

SEQ ID NO: 476220 - protein, 17 aa, Homo sapiens
  CDR3 for beta chain variable domain of TCR clone 238110 (TRBV20-1, TRBJ1-5)
CSARDPSAQGFKQPQHF

SEQ ID NO: 476221 - protein, 14 aa, Homo sapiens
  CDR3 for alpha chain variable domain of TCR clone 238111 (TRAV1-2, TRAJ16)
CAVNRFSDGQKLLF

SEQ ID NO: 476222 - protein, 15 aa, Homo sapiens
  CDR3 for beta chain variable domain of TCR clone 238111 (TRBV7-9, TRBJ1-6)
CASSSPGRGNSTLIF

SEQ ID NO: 476223 - protein, 16 aa, Homo sapiens
  CDR3 for alpha chain variable domain of TCR clone 238112 (TRAV14/DV4, TRAJ54)
CAMREGLAWGAQKLVF

SEQ ID NO: 476224 - protein, 15 aa, Homo sapiens
  CDR3 for beta chain variable domain of TCR clone 238112 (TRBV7-2, TRBJ2-3)
CASSSTGLETDTQYF

SEQ ID NO: 476225 - protein, 14 aa, Homo sapiens
  CDR3 for alpha chain variable domain of TCR clone 238113 (TRAV12-2, TRAJ24)
CAVTPSDSWGKLQF

SEQ ID NO: 476226 - protein, 13 aa, Homo sapiens
  CDR3 for beta chain variable domain of TCR clone 238113 (TRBV6-4, TRBJ1-5)
CASSADLNQPQHF

SEQ ID NO: 476227 - protein, 14 aa, Homo sapiens
  CDR3 for alpha chain variable domain of TCR clone 238114 (TRAV3, TRAJ9)
CTVRLNTGGFKTIF

SEQ ID NO: 476228 - protein, 15 aa, Homo sapiens
  CDR3 for beta chain variable domain of TCR clone 238114 (TRBV7-2, TRBJ2-1)
CASSLASGRVNEQFV

SEQ ID NO: 476229 - protein, 13 aa, Homo sapiens
  CDR3 for alpha chain variable domain of TCR clone 238115 (TRAV12-3, TRAJ54)
CALVPQGAQKLVF

SEQ ID NO: 476230 - protein, 15 aa, Homo sapiens
  CDR3 for beta chain variable domain of TCR clone 238115 (TRBV4-1, TRBJ2-2)
YASSQDARGTGELFF

SEQ ID NO: 476231 - protein, 14 aa, Homo sapiens
  CDR3 for alpha chain variable domain of TCR clone 238116 (TRAV26-1, TRAJ26)
CIVRATFLGQNFVF

SEQ ID NO: 476232 - protein, 16 aa, Homo sapiens
  CDR3 for beta chain variable domain of TCR clone 238116 (TRBV12-4, TRBJ2-7)
CASSSTGTGLSYEQYF

SEQ ID NO: 476233 - protein, 22 aa, Homo sapiens
  CDR3 for alpha chain variable domain of TCR clone 238117 (TRAV21, )
CAVRQDAGNNHIRNPDPAVYQL

SEQ ID NO: 476234 - protein, 16 aa, Homo sapiens
  CDR3 for beta chain variable domain of TCR clone 238117 (TRBV4-2, TRBJ1-1)
CASRPRDGGGDTEAFF

SEQ ID NO: 476235 - protein, 13 aa, Homo sapiens
  CDR3 for alpha chain variable domain of TCR clone 238118 (TRAV12-3, TRAJ31)
CAMSANNNARLMF

SEQ ID NO: 476236 - protein, 16 aa, Homo sapiens
  CDR3 for beta chain variable domain of TCR clone 238118 (TRBV7-9, TRBJ1-2)
CDSSLGFSSGEDGYTF

SEQ ID NO: 476237 - protein, 14 aa, Homo sapiens
  CDR3 for alpha chain variable domain of TCR clone 238119 (TRAV4, TRAJ17)
CLVGDMAAGNKLTF

SEQ ID NO: 476238 - protein, 14 aa, Homo sapiens
  CDR3 for beta chain variable domain of TCR clone 238119 (TRBV7-6, TRBJ2-3)
RASSLGTVTDTQYF

SEQ ID NO: 476239 - protein, 14 aa, Homo sapiens
  CDR3 for alpha chain variable domain of TCR clone 238120 (TRAV13-1, TRAJ3)
GAASKSSSASKIIF

SEQ ID NO: 476240 - protein, 16 aa, Homo sapiens
  CDR3 for beta chain variable domain of TCR clone 238120 (TRBV15, TRBJ2-3)
CATSRDLGIVTDTQYF

SEQ ID NO: 476241 - protein, 12 aa, Homo sapiens
  CDR3 for alpha chain variable domain of TCR clone 238121 (TRAV21, TRAJ31)
CAVWGNNARLMF

SEQ ID NO: 476242 - protein, 13 aa, Homo sapiens
  CDR3 for beta chain variable domain of TCR clone 238121 (TRBV7-9, TRBJ2-3)
CASSPGSTDTQYF

SEQ ID NO: 476243 - protein, 16 aa, Homo sapiens
  CDR3 for alpha chain variable domain of TCR clone 238122 (TRAV30, TRAJ24)
CGTEIVDADRWGKFPF

SEQ ID NO: 476244 - protein, 13 aa, Homo sapiens
  CDR3 for beta chain variable domain of TCR clone 238122 (TRBV7-3, TRBJ1-1)
CASSQDWGAEAFF

SEQ ID NO: 476245 - protein, 13 aa, Homo sapiens
  CDR3 for alpha chain variable domain of TCR clone 238123 (TRAV27, TRAJ10)
CAGLTGGGNKLTF

SEQ ID NO: 476246 - protein, 18 aa, Homo sapiens
  CDR3 for beta chain variable domain of TCR clone 238123 (TRBV11-2, TRBJ2-3)
CASSLGGASRGAPNTQYF

SEQ ID NO: 476247 - protein, 17 aa, Homo sapiens
  CDR3 for alpha chain variable domain of TCR clone 238124 (TRAV4, TRAJ18)
CLVGKRSVGSTLGRLYF

SEQ ID NO: 476248 - protein, 15 aa, Homo sapiens
  CDR3 for beta chain variable domain of TCR clone 238124 (TRBV20-1, TRBJ2-7)
CSARVPAAYFYEQYF

SEQ ID NO: 476249 - protein, 15 aa, Homo sapiens
  CDR3 for alpha chain variable domain of TCR clone 238125 (TRAV29/DV5, TRAJ42)
CAAKTDGGSPGNLIF

SEQ ID NO: 476250 - protein, 15 aa, Homo sapiens
  CDR3 for beta chain variable domain of TCR clone 238125 (TRBV5-1, TRBJ2-2)
CASSSQGGNTGELFF

SEQ ID NO: 476251 - protein, 13 aa, Homo sapiens
  CDR3 for alpha chain variable domain of TCR clone 238126 (TRAV12-2, TRAJ7)
CAGLIYGNHRLAF

SEQ ID NO: 476252 - protein, 14 aa, Homo sapiens
  CDR3 for beta chain variable domain of TCR clone 238126 (TRBV6-1, TRBJ2-1)
CATFTSGQNNEQFF

SEQ ID NO: 476253 - protein, 10 aa, Homo sapiens
  CDR3 for alpha chain variable domain of TCR clone 238127 (TRAV12-1, TRAJ43)
CVVHNNDIRV

SEQ ID NO: 476254 - protein, 13 aa, Homo sapiens
  CDR3 for beta chain variable domain of TCR clone 238127 (TRBV12-4, TRBJ1-2)
CASSSGLTVISTF

SEQ ID NO: 476255 - protein, 14 aa, Homo sapiens
  CDR3 for alpha chain variable domain of TCR clone 238128 (TRAV23/DV6, TRAJ5)
CAAKRPAGRRALTF

SEQ ID NO: 476256 - protein, 14 aa, Homo sapiens
  CDR3 for beta chain variable domain of TCR clone 238128 (TRBV25-1, TRBJ1-1)
RASTHLGGNTEAFF

SEQ ID NO: 476257 - protein, 14 aa, Homo sapiens
  CDR3 for alpha chain variable domain of TCR clone 238129 (TRAV12-1, TRAJ54)
CVVNIYQGAQKLVF

SEQ ID NO: 476258 - protein, 15 aa, Homo sapiens
  CDR3 for beta chain variable domain of TCR clone 238129 (TRBV6-3, TRBJ2-7)
CASSSPGTVFYEQYF

SEQ ID NO: 476259 - protein, 19 aa, Homo sapiens
  CDR3 for alpha chain variable domain of TCR clone 238130 (TRAV1-2, TRAJ26)
CLLPLCCERPDNYGQNFVF

SEQ ID NO: 476260 - protein, 13 aa, Homo sapiens
  CDR3 for beta chain variable domain of TCR clone 238130 (TRBV4-1, TRBJ2-2)
CASSQENTGELFF

SEQ ID NO: 476261 - protein, 12 aa, Homo sapiens
  CDR3 for alpha chain variable domain of TCR clone 238131 (TRAV13-2, TRAJ23)
CAERHRGGKLIF

SEQ ID NO: 476262 - protein, 13 aa, Homo sapiens
  CDR3 for beta chain variable domain of TCR clone 238131 (TRBV11-2, TRBJ1-1)
CASSLETSTEAFF

SEQ ID NO: 476263 - protein, 12 aa, Homo sapiens
  CDR3 for alpha chain variable domain of TCR clone 238132 (TRAV29/DV5, TRAJ49)
CAATDTGNQFYF

SEQ ID NO: 476264 - protein, 17 aa, Homo sapiens
  CDR3 for beta chain variable domain of TCR clone 238132 (TRBV7-9, TRBJ2-3)
CASSPTVAGDLTDTQYF

SEQ ID NO: 476265 - protein, 13 aa, Homo sapiens
  CDR3 for alpha chain variable domain of TCR clone 238133 (TRAV12-1, TRAJ16)
CVVNGPDGQKLLF

SEQ ID NO: 476266 - protein, 13 aa, Homo sapiens
  CDR3 for beta chain variable domain of TCR clone 238133 (TRBV2, TRBJ1-1)
CARTPTGGFHALF

SEQ ID NO: 476267 - protein, 14 aa, Homo sapiens
  CDR3 for alpha chain variable domain of TCR clone 238134 (TRAV3, TRAJ34)
CAVRAPGNTDKLIF

SEQ ID NO: 476268 - protein, 17 aa, Homo sapiens
  CDR3 for beta chain variable domain of TCR clone 238134 (TRBV20-1, TRBJ2-7)
CSAAPGRARGISYEQYF

SEQ ID NO: 476269 - protein, 12 aa, Homo sapiens
  CDR3 for alpha chain variable domain of TCR clone 238135 (TRAV29/DV5, TRAJ43)
CAAPYTNNDMRF

SEQ ID NO: 476270 - protein, 17 aa, Homo sapiens
  CDR3 for beta chain variable domain of TCR clone 238135 (TRBV19, TRBJ2-6)
CASSTGQVFSGANVLTF

SEQ ID NO: 476271 - protein, 18 aa, Homo sapiens
  CDR3 for alpha chain variable domain of TCR clone 238136 (TRAV21, TRAJ52)
CAVRPSPAGGTSYGKLTF

SEQ ID NO: 476272 - protein, 17 aa, Homo sapiens
  CDR3 for beta chain variable domain of TCR clone 238136 (TRBV4-1, TRBJ1-4)
CASSQEGPRGVEDKLFF

SEQ ID NO: 476273 - protein, 13 aa, Homo sapiens
  CDR3 for alpha chain variable domain of TCR clone 238137 (TRAV8-6, TRAJ8)
CAVSNTGFQKLVY

SEQ ID NO: 476274 - protein, 15 aa, Homo sapiens
  CDR3 for beta chain variable domain of TCR clone 238137 (TRBV28, TRBJ2-5)
CASSSGRTIQETQYF

SEQ ID NO: 476275 - protein, 14 aa, Homo sapiens
  CDR3 for alpha chain variable domain of TCR clone 238138 (TRAV29/DV5, TRAJ36)
CAARRKTGANNLFF

SEQ ID NO: 476276 - protein, 15 aa, Homo sapiens
  CDR3 for beta chain variable domain of TCR clone 238138 (TRBV7-8, TRBJ2-1)
CASSLADSLYNEQFF

SEQ ID NO: 476277 - protein, 13 aa, Homo sapiens
  CDR3 for alpha chain variable domain of TCR clone 238139 (TRAV3, TRAJ20)
CAGRSLNDYKLSF

SEQ ID NO: 476278 - protein, 13 aa, Homo sapiens
  CDR3 for beta chain variable domain of TCR clone 238139 (TRBV11-3, TRBJ2-7)
CASSLDKLYEQYF

SEQ ID NO: 476279 - protein, 13 aa, Homo sapiens
  CDR3 for alpha chain variable domain of TCR clone 238140 (TRAV13-1, TRAJ21)
CAASIYNLNKFYF

SEQ ID NO: 476280 - protein, 15 aa, Homo sapiens
  CDR3 for beta chain variable domain of TCR clone 238140 (TRBV5-5, TRBJ1-5)
CASSLKGGGEQPQHF

SEQ ID NO: 476281 - protein, 13 aa, Homo sapiens
  CDR3 for alpha chain variable domain of TCR clone 238141 (TRAV21, TRAJ45)
CAVMGGGADGLTF

SEQ ID NO: 476282 - protein, 13 aa, Homo sapiens
  CDR3 for beta chain variable domain of TCR clone 238141 (TRBV2, TRBJ1-5)
CASSVGWDQPQHF

SEQ ID NO: 476283 - protein, 14 aa, Homo sapiens
  CDR3 for alpha chain variable domain of TCR clone 238142 (TRAV2, TRAJ22)
CAVEVKRAARQLTF

SEQ ID NO: 476284 - protein, 15 aa, Homo sapiens
  CDR3 for beta chain variable domain of TCR clone 238142 (TRBV7-2, TRBJ2-1)
CASSLVAGRYNEQFF

SEQ ID NO: 476285 - protein, 12 aa, Homo sapiens
  CDR3 for alpha chain variable domain of TCR clone 238143 (TRAV12-3, TRAJ17)
CARTLTGNKLTF

SEQ ID NO: 476286 - protein, 16 aa, Homo sapiens
  CDR3 for beta chain variable domain of TCR clone 238143 (TRBV12-4, TRBJ2-5)
CASSFFVRGRQETQYF

SEQ ID NO: 476287 - protein, 14 aa, Homo sapiens
  CDR3 for alpha chain variable domain of TCR clone 238144 (TRAV2, TRAJ9)
CAVADRRGGFKTIF

SEQ ID NO: 476288 - protein, 18 aa, Homo sapiens
  CDR3 for beta chain variable domain of TCR clone 238144 (TRBV11-2, TRBJ2-3)
CASSLGGASRGAPNTQYF

SEQ ID NO: 476289 - protein, 14 aa, Homo sapiens
  CDR3 for alpha chain variable domain of TCR clone 238145 (TRAV12-2, TRAJ17)
CAALFKAAGNKLTF

SEQ ID NO: 476290 - protein, 16 aa, Homo sapiens
  CDR3 for beta chain variable domain of TCR clone 238145 (TRBV20-1, TRBJ2-2)
RSASASGIPGAGELFF

SEQ ID NO: 476291 - protein, 14 aa, Homo sapiens
  CDR3 for alpha chain variable domain of TCR clone 238146 (TRAV20, TRAJ56)
CAVQFGGANSKLTF

SEQ ID NO: 476292 - protein, 14 aa, Homo sapiens
  CDR3 for beta chain variable domain of TCR clone 238146 (TRBV20-1, TRBJ2-7)
RSAKRGKSSYEQYF

SEQ ID NO: 476293 - protein, 16 aa, Homo sapiens
  CDR3 for alpha chain variable domain of TCR clone 238147 (TRAV16, TRAJ42)
CALSGLLGGSQGNLIF

SEQ ID NO: 476294 - protein, 15 aa, Homo sapiens
  CDR3 for beta chain variable domain of TCR clone 238147 (TRBV5-1, TRBJ2-1)
CASSPGGLAGNEQCF

SEQ ID NO: 476295 - protein, 11 aa, Homo sapiens
  CDR3 for alpha chain variable domain of TCR clone 238148 (TRAV27, TRAJ20)
CAGGGDYKLSF

SEQ ID NO: 476296 - protein, 16 aa, Homo sapiens
  CDR3 for beta chain variable domain of TCR clone 238148 (TRBV7-3, TRBJ2-1)
CASSLEGYRSYNEQFF

SEQ ID NO: 476297 - protein, 10 aa, Homo sapiens
  CDR3 for alpha chain variable domain of TCR clone 238149 (TRAV20, TRAJ37)
GASNPGKLIF

SEQ ID NO: 476298 - protein, 11 aa, Homo sapiens
  CDR3 for beta chain variable domain of TCR clone 238149 (TRBV12-4, TRBJ2-3)
CASTATDTQYF

SEQ ID NO: 476299 - protein, 14 aa, Homo sapiens
  CDR3 for alpha chain variable domain of TCR clone 238150 (TRAV9-2, TRAJ39)
CALYIYNAGNMLTF

SEQ ID NO: 476300 - protein, 15 aa, Homo sapiens
  CDR3 for beta chain variable domain of TCR clone 238150 (TRBV19, TRBJ2-7)
CASRPTPGLSIEQYF

SEQ ID NO: 476301 - protein, 14 aa, Homo sapiens
  CDR3 for alpha chain variable domain of TCR clone 238151 (TRAV26-1, TRAJ38)
CIADNAGNNRKLIW

SEQ ID NO: 476302 - protein, 14 aa, Homo sapiens
  CDR3 for beta chain variable domain of TCR clone 238151 (TRBV7-9, TRBJ2-2)
CASSFDRGTGELFF

SEQ ID NO: 476303 - protein, 18 aa, Homo sapiens
  CDR3 for alpha chain variable domain of TCR clone 238152 (TRAV13-1, TRAJ52)
CAASKRSAGGTSYGKLTF

SEQ ID NO: 476304 - protein, 12 aa, Homo sapiens
  CDR3 for beta chain variable domain of TCR clone 238152 (TRBV11-2, TRBJ2-5)
CASSLVGETQYF

SEQ ID NO: 476305 - protein, 12 aa, Homo sapiens
  CDR3 for alpha chain variable domain of TCR clone 238153 (TRAV21, TRAJ29)
CAVTSGNTPLVF

SEQ ID NO: 476306 - protein, 15 aa, Homo sapiens
  CDR3 for beta chain variable domain of TCR clone 238153 (TRBV12-4, TRBJ1-2)
CASRLAVAGNYGYTF

SEQ ID NO: 476307 - protein, 12 aa, Homo sapiens
  CDR3 for alpha chain variable domain of TCR clone 238154 (TRAV21, TRAJ15)
CAVNQAGPALIF

SEQ ID NO: 476308 - protein, 13 aa, Homo sapiens
  CDR3 for beta chain variable domain of TCR clone 238154 (TRBV11-2, TRBJ2-5)
CASSSTGEETQYF

SEQ ID NO: 476309 - protein, 14 aa, Homo sapiens
  CDR3 for alpha chain variable domain of TCR clone 238155 (TRAV1-2, TRAJ8)
CVVREDTGFQKLVF

SEQ ID NO: 476310 - protein, 13 aa, Homo sapiens
  CDR3 for beta chain variable domain of TCR clone 238155 (TRBV5-5, TRBJ1-2)
CASSFWRGEDYTF

SEQ ID NO: 476311 - protein, 16 aa, Homo sapiens
  CDR3 for alpha chain variable domain of TCR clone 238156 (TRAV30, TRAJ24)
CGTEIVDADSWGKFQF

SEQ ID NO: 476312 - protein, 14 aa, Homo sapiens
  CDR3 for beta chain variable domain of TCR clone 238156 (TRBV27, TRBJ2-2)
CASSLGDTTGELFF

SEQ ID NO: 476313 - protein, 11 aa, Homo sapiens
  CDR3 for alpha chain variable domain of TCR clone 238157 (TRAV21, TRAJ39)
LLVNACNMLTF

SEQ ID NO: 476314 - protein, 13 aa, Homo sapiens
  CDR3 for beta chain variable domain of TCR clone 238157 (TRBV24-1, TRBJ2-2)
CATSDWSTGELFF

SEQ ID NO: 476315 - protein, 14 aa, Homo sapiens
  CDR3 for alpha chain variable domain of TCR clone 238158 (TRAV17, TRAJ40)
CATALTSGTYKYLF

SEQ ID NO: 476316 - protein, 13 aa, Homo sapiens
  CDR3 for beta chain variable domain of TCR clone 238158 (TRBV27, TRBJ2-1)
CASSSGSYNEQFF

SEQ ID NO: 476317 - protein, 13 aa, Homo sapiens
  CDR3 for alpha chain variable domain of TCR clone 238159 (TRAV8-3, TRAJ28)
CAVGAVGSYQLTF

SEQ ID NO: 476318 - protein, 12 aa, Homo sapiens
  CDR3 for beta chain variable domain of TCR clone 238159 (TRBV7-3, TRBJ2-1)
CASSFINNEQFF

SEQ ID NO: 476319 - protein, 14 aa, Homo sapiens
  CDR3 for alpha chain variable domain of TCR clone 238160 (TRAV9-2, TRAJ39)
CALYTYNAGNMLTF

SEQ ID NO: 476320 - protein, 15 aa, Homo sapiens
  CDR3 for beta chain variable domain of TCR clone 238160 (TRBV7-9, TRBJ1-5)
CASSQGHQPNQPQHF

SEQ ID NO: 476321 - protein, 15 aa, Homo sapiens
  CDR3 for alpha chain variable domain of TCR clone 238161 (TRAV1-1, TRAJ20)
CAVRDNVANDYKLSF

SEQ ID NO: 476322 - protein, 14 aa, Homo sapiens
  CDR3 for beta chain variable domain of TCR clone 238161 (TRBV7-2, TRBJ1-1)
CASSFLTGTTEAFF

SEQ ID NO: 476323 - protein, 11 aa, Homo sapiens
  CDR3 for alpha chain variable domain of TCR clone 238162 (TRAV12-2, TRAJ49)
CAVDTGNQFYF

SEQ ID NO: 476324 - protein, 17 aa, Homo sapiens
  CDR3 for beta chain variable domain of TCR clone 238162 (TRBV11-2, TRBJ2-1)
CASSLYPPGVEYNEQFF

SEQ ID NO: 476325 - protein, 14 aa, Homo sapiens
  CDR3 for alpha chain variable domain of TCR clone 238163 (TRAV1-2, TRAJ8)
CAVRADTGFQKLLF

SEQ ID NO: 476326 - protein, 15 aa, Homo sapiens
  CDR3 for beta chain variable domain of TCR clone 238163 (TRBV11-3, TRBJ2-3)
CASLKDGREGDTQYF

SEQ ID NO: 476327 - protein, 12 aa, Homo sapiens
  CDR3 for alpha chain variable domain of TCR clone 238164 (TRAV16, TRAJ10)
CSRTGGGNKLTV

SEQ ID NO: 476328 - protein, 13 aa, Homo sapiens
  CDR3 for beta chain variable domain of TCR clone 238164 (TRBV7-3, TRBJ1-1)
CASSQDWGAEAFF

SEQ ID NO: 476329 - protein, 11 aa, Homo sapiens
  CDR3 for alpha chain variable domain of TCR clone 238165 (TRAV12-1, TRAJ21)
CVVNNFNKFYF

SEQ ID NO: 476330 - protein, 13 aa, Homo sapiens
  CDR3 for beta chain variable domain of TCR clone 238165 (TRBV7-3, TRBJ1-1)
CASSQDWGAEAFF

SEQ ID NO: 476331 - protein, 13 aa, Homo sapiens
  CDR3 for alpha chain variable domain of TCR clone 238166 (TRAV12-3, TRAJ9)
CAMRNTGGFKTIF

SEQ ID NO: 476332 - protein, 16 aa, Homo sapiens
  CDR3 for beta chain variable domain of TCR clone 238166 (TRBV12-4, TRBJ2-1)
CASSAVGQGNGDEQFF

SEQ ID NO: 476333 - protein, 17 aa, Homo sapiens
  CDR3 for alpha chain variable domain of TCR clone 238167 (TRAV27, TRAJ36)
SLVIQASNPAGANNLFF

SEQ ID NO: 476334 - protein, 13 aa, Homo sapiens
  CDR3 for beta chain variable domain of TCR clone 238167 (TRBV7-9, TRBJ2-3)
CASSPGSTDTQYF

SEQ ID NO: 476335 - protein, 12 aa, Homo sapiens
  CDR3 for alpha chain variable domain of TCR clone 238168 (TRAV23/DV6, TRAJ30)
CAAKDDRDKIIF

SEQ ID NO: 476336 - protein, 13 aa, Homo sapiens
  CDR3 for beta chain variable domain of TCR clone 238168 (TRBV7-3, TRBJ1-1)
CASSQDWGAEAFF

SEQ ID NO: 476337 - protein, 14 aa, Homo sapiens
  CDR3 for alpha chain variable domain of TCR clone 238169 (TRAV12-3, TRAJ57)
CARALEGGSEKLVF

SEQ ID NO: 476338 - protein, 17 aa, Homo sapiens
  CDR3 for beta chain variable domain of TCR clone 238169 (TRBV11-3, TRBJ2-3)
CASSLGLTGGGTDAQYF

SEQ ID NO: 476339 - protein, 14 aa, Homo sapiens
  CDR3 for alpha chain variable domain of TCR clone 238170 (TRAV21, TRAJ45)
CAVHSGGGADGLTF

SEQ ID NO: 476340 - protein, 13 aa, Homo sapiens
  CDR3 for beta chain variable domain of TCR clone 238170 (TRBV10-3, TRBJ2-7)
CASKLAVNYEQYF

SEQ ID NO: 476341 - protein, 14 aa, Homo sapiens
  CDR3 for alpha chain variable domain of TCR clone 238171 (TRAV4, TRAJ17)
CLVGDMAAGNKLTF

SEQ ID NO: 476342 - protein, 14 aa, Homo sapiens
  CDR3 for beta chain variable domain of TCR clone 238171 (TRBV7-6, TRBJ2-3)
CASSLGTVTDTRYF

SEQ ID NO: 476343 - protein, 16 aa, Homo sapiens
  CDR3 for alpha chain variable domain of TCR clone 238172 (TRAV3, TRAJ10)
CAVRDMRAGGGNKLTF

SEQ ID NO: 476344 - protein, 18 aa, Homo sapiens
  CDR3 for beta chain variable domain of TCR clone 238172 (TRBV6-5, TRBJ2-5)
CASSYSQAGGSYQETKYF

SEQ ID NO: 476345 - protein, 12 aa, Homo sapiens
  CDR3 for alpha chain variable domain of TCR clone 238173 (TRAV13-1, TRAJ29)
CAARSRKHTSCL

SEQ ID NO: 476346 - protein, 17 aa, Homo sapiens
  CDR3 for beta chain variable domain of TCR clone 238173 (TRBV4-1, TRBJ2-1)
CASSHRDSGSSYNEQFC

SEQ ID NO: 476347 - protein, 13 aa, Homo sapiens
  CDR3 for alpha chain variable domain of TCR clone 238174 (TRAV35, TRAJ36)
CAGPQIGANNLFF

SEQ ID NO: 476348 - protein, 15 aa, Homo sapiens
  CDR3 for beta chain variable domain of TCR clone 238174 (TRBV28, TRBJ2-5)
CASSPSWSYQETQYF

SEQ ID NO: 476349 - protein, 11 aa, Homo sapiens
  CDR3 for alpha chain variable domain of TCR clone 238175 (TRAV12-1, TRAJ26)
CVVAYGQNFVF

SEQ ID NO: 476350 - protein, 12 aa, Homo sapiens
  CDR3 for beta chain variable domain of TCR clone 238175 (TRBV18, TRBJ2-7)
CASAYVGGEQYF

SEQ ID NO: 476351 - protein, 12 aa, Homo sapiens
  CDR3 for alpha chain variable domain of TCR clone 238176 (TRAV12-3, TRAJ31)
CAMSVPNARLMF

SEQ ID NO: 476352 - protein, 12 aa, Homo sapiens
  CDR3 for beta chain variable domain of TCR clone 238176 (TRBV11-2, TRBJ2-1)
CASSVQREGQFL

SEQ ID NO: 476353 - protein, 14 aa, Homo sapiens
  CDR3 for alpha chain variable domain of TCR clone 238177 (TRAV29/DV5, TRAJ48)
CAAMALFGNEKLTF

SEQ ID NO: 476354 - protein, 19 aa, Homo sapiens
  CDR3 for beta chain variable domain of TCR clone 238177 (TRBV25-1, TRBJ2-2)
CAIIVYRVDRGRKTGELFF

SEQ ID NO: 476355 - protein, 14 aa, Homo sapiens
  CDR3 for alpha chain variable domain of TCR clone 238178 (TRAV16, TRAJ17)
CALSGRAAGNKLTF

SEQ ID NO: 476356 - protein, 12 aa, Homo sapiens
  CDR3 for beta chain variable domain of TCR clone 238178 (TRBV5-7, TRBJ1-1)
CASSLGRGKAFF

SEQ ID NO: 476357 - protein, 15 aa, Homo sapiens
  CDR3 for alpha chain variable domain of TCR clone 238179 (TRAV29/DV5, TRAJ24)
CAASGATDSWGKFQF

SEQ ID NO: 476358 - protein, 15 aa, Homo sapiens
  CDR3 for beta chain variable domain of TCR clone 238179 (TRBV7-9, TRBJ1-6)
CASSSPGRGNSPLHF

SEQ ID NO: 476359 - protein, 14 aa, Homo sapiens
  CDR3 for alpha chain variable domain of TCR clone 238180 (TRAV8-1, TRAJ5)
CAVRTDTGRRALTF

SEQ ID NO: 476360 - protein, 14 aa, Homo sapiens
  CDR3 for beta chain variable domain of TCR clone 238180 (TRBV5-5, TRBJ1-2)
CASSLDPYDYGYTF

SEQ ID NO: 476361 - protein, 16 aa, Homo sapiens
  CDR3 for alpha chain variable domain of TCR clone 238181 (TRAV12-3, TRAJ53)
CAMSPGSGGSNYKLTF

SEQ ID NO: 476362 - protein, 17 aa, Homo sapiens
  CDR3 for beta chain variable domain of TCR clone 238181 (TRBV24-1, TRBJ2-1)
CATSDAFGGGNYNEQFF

SEQ ID NO: 476363 - protein, 11 aa, Homo sapiens
  CDR3 for alpha chain variable domain of TCR clone 238182 (TRAV35, TRAJ34)
CWARNTDKLIF

SEQ ID NO: 476364 - protein, 18 aa, Homo sapiens
  CDR3 for beta chain variable domain of TCR clone 238182 (TRBV12-4, TRBJ2-2)
CASSLVAGTRGRTGELFF

SEQ ID NO: 476365 - protein, 15 aa, Homo sapiens
  CDR3 for alpha chain variable domain of TCR clone 238183 (TRAV26-1, TRAJ48)
CIGRVGDFGNEKLTF

SEQ ID NO: 476366 - protein, 16 aa, Homo sapiens
  CDR3 for beta chain variable domain of TCR clone 238183 (TRBV4-1, TRBJ2-3)
CASSQRAGGLTDTQYF

SEQ ID NO: 476367 - protein, 14 aa, Homo sapiens
  CDR3 for alpha chain variable domain of TCR clone 238184 (TRAV38-1, TRAJ40)
CALRPTSGTYKYIF

SEQ ID NO: 476368 - protein, 16 aa, Homo sapiens
  CDR3 for beta chain variable domain of TCR clone 238184 (TRBV5-1, TRBJ2-3)
CASSLGLAVYTDTQYF

SEQ ID NO: 476369 - protein, 14 aa, Homo sapiens
  CDR3 for alpha chain variable domain of TCR clone 238185 (TRAV17, TRAJ54)
CATDANQGAQKLVF

SEQ ID NO: 476370 - protein, 14 aa, Homo sapiens
  CDR3 for beta chain variable domain of TCR clone 238185 (TRBV7-2, TRBJ2-5)
CASSFTQGQETQYF

SEQ ID NO: 476371 - protein, 14 aa, Homo sapiens
  CDR3 for alpha chain variable domain of TCR clone 238186 (TRAV3, TRAJ9)
CAVRLNTGGFKTIF

SEQ ID NO: 476372 - protein, 16 aa, Homo sapiens
  CDR3 for beta chain variable domain of TCR clone 238186 (TRBV12-5, TRBJ2-5)
WASGPRTSGNQETQYF

SEQ ID NO: 476373 - protein, 13 aa, Homo sapiens
  CDR3 for alpha chain variable domain of TCR clone 238187 (TRAV35, TRAJ27)
CAGQEGDAGKSTF

SEQ ID NO: 476374 - protein, 14 aa, Homo sapiens
  CDR3 for beta chain variable domain of TCR clone 238187 (TRBV7-2, TRBJ2-7)
CASRSQGAAYEQYF

SEQ ID NO: 476375 - protein, 17 aa, Homo sapiens
  CDR3 for alpha chain variable domain of TCR clone 238188 (TRAV12-3, TRAJ58)
CAMSALGGETSGSRLTF

SEQ ID NO: 476376 - protein, 13 aa, Homo sapiens
  CDR3 for beta chain variable domain of TCR clone 238188 (TRBV20-1, TRBJ1-1)
CSAPPGGHTEAFF

SEQ ID NO: 476377 - protein, 16 aa, Homo sapiens
  CDR3 for alpha chain variable domain of TCR clone 238189 (TRAV21, TRAJ52)
CAVTNAGGTSYGKLTF

SEQ ID NO: 476378 - protein, 14 aa, Homo sapiens
  CDR3 for beta chain variable domain of TCR clone 238189 (TRBV13, TRBJ2-1)
CASSAGQGAYEQFF

SEQ ID NO: 476379 - protein, 12 aa, Homo sapiens
  CDR3 for alpha chain variable domain of TCR clone 238190 (TRAV8-4, TRAJ37)
CAVSGNTGNLIF

SEQ ID NO: 476380 - protein, 17 aa, Homo sapiens
  CDR3 for beta chain variable domain of TCR clone 238190 (TRBV7-2, TRBJ2-3)
CASSPQGRARVQDTQYF

SEQ ID NO: 476381 - protein, 13 aa, Homo sapiens
  CDR3 for alpha chain variable domain of TCR clone 238191 (TRAV8-3, TRAJ28)
CAVGAVGSYQLTF

SEQ ID NO: 476382 - protein, 17 aa, Homo sapiens
  CDR3 for beta chain variable domain of TCR clone 238191 (TRBV7-9, TRBJ2-4)
CASSFLALGGAGDIQYF

SEQ ID NO: 476383 - protein, 14 aa, Homo sapiens
  CDR3 for alpha chain variable domain of TCR clone 238192 (TRAV9-2, TRAJ39)
CALYIYNAGNMLTF

SEQ ID NO: 476384 - protein, 15 aa, Homo sapiens
  CDR3 for beta chain variable domain of TCR clone 238192 (TRBV29-1, TRBJ2-6)
CSVGDRGSGANGLTF

SEQ ID NO: 476385 - protein, 12 aa, Homo sapiens
  CDR3 for alpha chain variable domain of TCR clone 238193 (TRAV4, TRAJ21)
CLVGDNFNKFYF

SEQ ID NO: 476386 - protein, 17 aa, Homo sapiens
  CDR3 for beta chain variable domain of TCR clone 238193 (TRBV3-1, TRBJ2-7)
CASSQDLTGLRSYEQYF

SEQ ID NO: 476387 - protein, 14 aa, Homo sapiens
  CDR3 for alpha chain variable domain of TCR clone 238194 (TRAV26-1, TRAJ15)
CIEAGNQAGTALIF

SEQ ID NO: 476388 - protein, 16 aa, Homo sapiens
  CDR3 for beta chain variable domain of TCR clone 238194 (TRBV7-7, TRBJ2-1)
CASSLASGTSYNEQFF

SEQ ID NO: 476389 - protein, 11 aa, Homo sapiens
  CDR3 for alpha chain variable domain of TCR clone 238195 (TRAV1-1, TRAJ23)
CAVRQGGKLIF

SEQ ID NO: 476390 - protein, 14 aa, Homo sapiens
  CDR3 for beta chain variable domain of TCR clone 238195 (TRBV19, TRBJ2-1)
SASPTFVLSGEQFF

SEQ ID NO: 476391 - protein, 15 aa, Homo sapiens
  CDR3 for alpha chain variable domain of TCR clone 238196 (TRAV2, TRAJ37)
CAVGDGSSNTGKLIF

SEQ ID NO: 476392 - protein, 14 aa, Homo sapiens
  CDR3 for beta chain variable domain of TCR clone 238196 (TRBV7-9, TRBJ2-1)
CASSPRDSLYEQFF

SEQ ID NO: 476393 - protein, 16 aa, Homo sapiens
  CDR3 for alpha chain variable domain of TCR clone 238197 (TRAV13-1, TRAJ48)
CAASIPGNFGNEKLTI

SEQ ID NO: 476394 - protein, 16 aa, Homo sapiens
  CDR3 for beta chain variable domain of TCR clone 238197 (TRBV18, TRBJ1-5)
CASSPYRVEGNQPQHF

SEQ ID NO: 476395 - protein, 16 aa, Homo sapiens
  CDR3 for alpha chain variable domain of TCR clone 238198 (TRAV3, TRAJ37)
CAVRPHGSGNTGKLIF

SEQ ID NO: 476396 - protein, 15 aa, Homo sapiens
  CDR3 for beta chain variable domain of TCR clone 238198 (TRBV12-4, TRBJ2-5)
CASSPPTGLQETQYF

SEQ ID NO: 476397 - protein, 11 aa, Homo sapiens
  CDR3 for alpha chain variable domain of TCR clone 238199 (TRAV35, TRAJ34)
CWARNTDKLIF

SEQ ID NO: 476398 - protein, 13 aa, Homo sapiens
  CDR3 for beta chain variable domain of TCR clone 238199 (TRBV7-2, TRBJ2-4)
CASSREHANMQYF

SEQ ID NO: 476399 - protein, 14 aa, Homo sapiens
  CDR3 for alpha chain variable domain of TCR clone 238200 (TRAV12-1, TRAJ3)
CVVNPGSSASKIIL

SEQ ID NO: 476400 - protein, 15 aa, Homo sapiens
  CDR3 for beta chain variable domain of TCR clone 238200 (TRBV5-7, TRBJ1-2)
CASSSPGQGNYGYTF

SEQ ID NO: 476401 - protein, 13 aa, Homo sapiens
  CDR3 for alpha chain variable domain of TCR clone 238201 (TRAV2, TRAJ16)
CAVEFGDSQKLLF

SEQ ID NO: 476402 - protein, 14 aa, Homo sapiens
  CDR3 for beta chain variable domain of TCR clone 238201 (TRBV6-3, TRBJ2-5)
CASSYSLREKTQYF

SEQ ID NO: 476403 - protein, 16 aa, Homo sapiens
  CDR3 for alpha chain variable domain of TCR clone 238202 (TRAV3, TRAJ18)
CAVRRPRGSTLGRLYF

SEQ ID NO: 476404 - protein, 13 aa, Homo sapiens
  CDR3 for beta chain variable domain of TCR clone 238202 (TRBV19, TRBJ2-7)
CASSTRSSYEQYF

SEQ ID NO: 476405 - protein, 14 aa, Homo sapiens
  CDR3 for alpha chain variable domain of TCR clone 238203 (TRAV13-1, TRAJ20)
CAARPGSNDYKLSF

SEQ ID NO: 476406 - protein, 13 aa, Homo sapiens
  CDR3 for beta chain variable domain of TCR clone 238203 (TRBV20-1, TRBJ1-1)
CRAPPGGHTEAFF

SEQ ID NO: 476407 - protein, 13 aa, Homo sapiens
  CDR3 for alpha chain variable domain of TCR clone 238204 (TRAV8-3, TRAJ28)
CAVGAVGSYPLPF

SEQ ID NO: 476408 - protein, 15 aa, Homo sapiens
  CDR3 for beta chain variable domain of TCR clone 238204 (TRBV7-9, TRBJ1-5)
CASSQGHQPNQPQHF

SEQ ID NO: 476409 - protein, 14 aa, Homo sapiens
  CDR3 for alpha chain variable domain of TCR clone 238205 (TRAV23/DV6, TRAJ58)
CAAAKETSGSRLTF

SEQ ID NO: 476410 - protein, 14 aa, Homo sapiens
  CDR3 for beta chain variable domain of TCR clone 238205 (TRBV5-1, TRBJ2-7)
CASSLFTGTHEQYV

SEQ ID NO: 476411 - protein, 13 aa, Homo sapiens
  CDR3 for alpha chain variable domain of TCR clone 238206 (TRAV13-2, TRAJ13)
CAERPGGYQKVTF

SEQ ID NO: 476412 - protein, 12 aa, Homo sapiens
  CDR3 for beta chain variable domain of TCR clone 238206 (TRBV11-2, TRBJ2-3)
CASRPGTDTQYF

SEQ ID NO: 476413 - protein, 10 aa, Homo sapiens
  CDR3 for alpha chain variable domain of TCR clone 238207 (TRAV3, TRAJ18)
CAVRLTEAQP

SEQ ID NO: 476414 - protein, 14 aa, Homo sapiens
  CDR3 for beta chain variable domain of TCR clone 238207 (TRBV7-2, TRBJ2-7)
CASSPKTSFYEQYF

SEQ ID NO: 476415 - protein, 18 aa, Homo sapiens
  CDR3 for alpha chain variable domain of TCR clone 238208 (TRAV26-1, TRAJ22)
RIVRVALISSGSARQLTF

SEQ ID NO: 476416 - protein, 13 aa, Homo sapiens
  CDR3 for beta chain variable domain of TCR clone 238208 (TRBV13, TRBJ2-5)
CASSPEVGETQYF

SEQ ID NO: 476417 - protein, 17 aa, Homo sapiens
  CDR3 for alpha chain variable domain of TCR clone 238209 (TRAV4, TRAJ18)
CLVGERSVGSTLGRLYF

SEQ ID NO: 476418 - protein, 14 aa, Homo sapiens
  CDR3 for beta chain variable domain of TCR clone 238209 (TRBV6-5, TRBJ1-2)
RASSYDGTGGGYIF

SEQ ID NO: 476419 - protein, 13 aa, Homo sapiens
  CDR3 for alpha chain variable domain of TCR clone 238210 (TRAV12-2, TRAJ52)
CAVGGTSYGKLTF

SEQ ID NO: 476420 - protein, 14 aa, Homo sapiens
  CDR3 for beta chain variable domain of TCR clone 238210 (TRBV19, TRBJ2-1)
CASPTFVLCGEQFF

SEQ ID NO: 476421 - protein, 18 aa, Homo sapiens
  CDR3 for alpha chain variable domain of TCR clone 238211 (TRAV17, TRAJ45)
CATSLDLYSGGGTDGLTF

SEQ ID NO: 476422 - protein, 15 aa, Homo sapiens
  CDR3 for beta chain variable domain of TCR clone 238211 (TRBV11-2, TRBJ2-1)
CASSKNRGLIYEQFF

SEQ ID NO: 476423 - protein, 15 aa, Homo sapiens
  CDR3 for alpha chain variable domain of TCR clone 238212 (TRAV12-2, TRAJ53)
CAVNGGGGSNYKLTF

SEQ ID NO: 476424 - protein, 15 aa, Homo sapiens
  CDR3 for beta chain variable domain of TCR clone 238212 (TRBV28, TRBJ2-5)
CASSPGQGSIETQYF

SEQ ID NO: 476425 - protein, 15 aa, Homo sapiens
  CDR3 for alpha chain variable domain of TCR clone 238213 (TRAV3, TRAJ5)
CAVRPLGHGQESTYF

SEQ ID NO: 476426 - protein, 16 aa, Homo sapiens
  CDR3 for beta chain variable domain of TCR clone 238213 (TRBV3-1, TRBJ2-7)
CASSQGVGKGSSEQDF

SEQ ID NO: 476427 - protein, 14 aa, Homo sapiens
  CDR3 for alpha chain variable domain of TCR clone 238214 (TRAV26-1, TRAJ38)
CIADNAGNNRSLIW

SEQ ID NO: 476428 - protein, 15 aa, Homo sapiens
  CDR3 for beta chain variable domain of TCR clone 238214 (TRBV9, TRBJ2-1)
CASSLAGSSYNEQFF

SEQ ID NO: 476429 - protein, 13 aa, Homo sapiens
  CDR3 for alpha chain variable domain of TCR clone 238215 (TRAV12-3, TRAJ9)
CAMRNTGGFKTIF

SEQ ID NO: 476430 - protein, 14 aa, Homo sapiens
  CDR3 for beta chain variable domain of TCR clone 238215 (TRBV11-2, TRBJ2-7)
CASSSTGEGYVQYF

SEQ ID NO: 476431 - protein, 10 aa, Homo sapiens
  CDR3 for alpha chain variable domain of TCR clone 238216 (TRAV9-2, TRAJ49)
CALTGNQFYF

SEQ ID NO: 476432 - protein, 15 aa, Homo sapiens
  CDR3 for beta chain variable domain of TCR clone 238216 (TRBV4-1, TRBJ1-4)
CASSDTGGTNEKLFF

SEQ ID NO: 476433 - protein, 14 aa, Homo sapiens
  CDR3 for alpha chain variable domain of TCR clone 238217 (TRAV1-2, TRAJ27)
CAHAGYTNAGKSTF

SEQ ID NO: 476434 - protein, 18 aa, Homo sapiens
  CDR3 for beta chain variable domain of TCR clone 238217 (TRBV28, TRBJ1-2)
CASRQQQGKRGSNYGYTF

SEQ ID NO: 476435 - protein, 14 aa, Homo sapiens
  CDR3 for alpha chain variable domain of TCR clone 238218 (TRAV20, TRAJ10)
CAVRVEGGGRKLTF

SEQ ID NO: 476436 - protein, 18 aa, Homo sapiens
  CDR3 for beta chain variable domain of TCR clone 238218 (TRBV24-1, TRBJ2-1)
CATSDLMFLGRGVHEQFF

SEQ ID NO: 476437 - protein, 22 aa, Homo sapiens
  CDR3 for alpha chain variable domain of TCR clone 238219 (TRAV26-1, TRAJ30)
CIVRVRTEMTRSSLEKGHDVIF

SEQ ID NO: 476438 - protein, 18 aa, Homo sapiens
  CDR3 for beta chain variable domain of TCR clone 238219 (TRBV4-1, TRBJ1-5)
CASSQDPRGQGLNQPQHF

SEQ ID NO: 476439 - protein, 16 aa, Homo sapiens
  CDR3 for alpha chain variable domain of TCR clone 238220 (TRAV14/DV4, TRAJ54)
CAMREGRIQGAQKLVF

SEQ ID NO: 476440 - protein, 13 aa, Homo sapiens
  CDR3 for beta chain variable domain of TCR clone 238220 (TRBV27, TRBJ2-7)
CASSFVSSYEQYF

SEQ ID NO: 476441 - protein, 17 aa, Homo sapiens
  CDR3 for alpha chain variable domain of TCR clone 238221 (TRAV3, TRAJ6)
CAVRDGPRAGGSYIPTF

SEQ ID NO: 476442 - protein, 20 aa, Homo sapiens
  CDR3 for beta chain variable domain of TCR clone 238221 (TRBV28, TRBJ2-1)
CASSPSGRSPGLAGGNEQFF

SEQ ID NO: 476443 - protein, 15 aa, Homo sapiens
  CDR3 for alpha chain variable domain of TCR clone 238222 (TRAV1-2, TRAJ12)
CAVIPEVDSSYKLIF

SEQ ID NO: 476444 - protein, 16 aa, Homo sapiens
  CDR3 for beta chain variable domain of TCR clone 238222 (TRBV11-1, TRBJ1-1)
CASSPRGAHMNSEAFF

SEQ ID NO: 476445 - protein, 13 aa, Homo sapiens
  CDR3 for alpha chain variable domain of TCR clone 238223 (TRAV20, TRAJ35)
CAVQEGFGNVLYC

SEQ ID NO: 476446 - protein, 14 aa, Homo sapiens
  CDR3 for beta chain variable domain of TCR clone 238223 (TRBV7-2, TRBJ2-7)
CASRSQGAAYEQYF

SEQ ID NO: 476447 - protein, 14 aa, Homo sapiens
  CDR3 for alpha chain variable domain of TCR clone 238224 (TRAV17, TRAJ34)
CATDSLEVTEKLIF

SEQ ID NO: 476448 - protein, 13 aa, Homo sapiens
  CDR3 for beta chain variable domain of TCR clone 238224 (TRBV11-2, TRBJ2-7)
CASSGTRPYEQYF

SEQ ID NO: 476449 - protein, 13 aa, Homo sapiens
  CDR3 for alpha chain variable domain of TCR clone 238225 (TRAV8-2, TRAJ26)
CPEMDNYGKNFVF

SEQ ID NO: 476450 - protein, 16 aa, Homo sapiens
  CDR3 for beta chain variable domain of TCR clone 238225 (TRBV13, TRBJ2-2)
CASSPRTGEHTGELFF

SEQ ID NO: 476451 - protein, 11 aa, Homo sapiens
  CDR3 for alpha chain variable domain of TCR clone 238226 (TRAV3, TRAJ21)
CAVGNFNKVYF

SEQ ID NO: 476452 - protein, 16 aa, Homo sapiens
  CDR3 for beta chain variable domain of TCR clone 238226 (TRBV19, TRBJ2-1)
CACSKAGPSSYNEQFF

SEQ ID NO: 476453 - protein, 14 aa, Homo sapiens
  CDR3 for alpha chain variable domain of TCR clone 238227 (TRAV17, TRAJ16)
CATADFSDSQKLLF

SEQ ID NO: 476454 - protein, 12 aa, Homo sapiens
  CDR3 for beta chain variable domain of TCR clone 238227 (TRBV24-1, TRBJ1-1)
CATLYPDTEAFF

SEQ ID NO: 476455 - protein, 13 aa, Homo sapiens
  CDR3 for alpha chain variable domain of TCR clone 238228 (TRAV2, TRAJ47)
CAVDREYGNKLVF

SEQ ID NO: 476456 - protein, 17 aa, Homo sapiens
  CDR3 for beta chain variable domain of TCR clone 238228 (TRBV15, TRBJ1-5)
CATSRVKGIYSNQPQNF

SEQ ID NO: 476457 - protein, 14 aa, Homo sapiens
  CDR3 for alpha chain variable domain of TCR clone 238229 (TRAV1-2, TRAJ6)
CAVRSSGGGYIPTF

SEQ ID NO: 476458 - protein, 16 aa, Homo sapiens
  CDR3 for beta chain variable domain of TCR clone 238229 (TRBV7-3, TRBJ2-2)
CASSLKRGTLSGELFF

SEQ ID NO: 476459 - protein, 15 aa, Homo sapiens
  CDR3 for alpha chain variable domain of TCR clone 238230 (TRAV3, TRAJ22)
CAVRDRGGSARQLTF

SEQ ID NO: 476460 - protein, 16 aa, Homo sapiens
  CDR3 for beta chain variable domain of TCR clone 238230 (TRBV15, TRBJ2-7)
CATSRDFGAAVYEQYF

SEQ ID NO: 476461 - protein, 15 aa, Homo sapiens
  CDR3 for alpha chain variable domain of TCR clone 238231 (TRAV8-3, TRAJ23)
CAVGDRYNQGGKLNF

SEQ ID NO: 476462 - protein, 22 aa, Homo sapiens
  CDR3 for beta chain variable domain of TCR clone 238231 (TRBV29-1, TRBJ2-5)
TVSNMSPEDSSIYLCSAGTQYF

SEQ ID NO: 476463 - protein, 10 aa, Homo sapiens
  CDR3 for alpha chain variable domain of TCR clone 238232 (TRAV13-1, TRAJ15)
INQAGTALIF

SEQ ID NO: 476464 - protein, 14 aa, Homo sapiens
  CDR3 for beta chain variable domain of TCR clone 238232 (TRBV7-9, TRBJ2-1)
CAGSDNSGYNEQFF

SEQ ID NO: 476465 - protein, 13 aa, Homo sapiens
  CDR3 for alpha chain variable domain of TCR clone 238233 (TRAV16, TRAJ28)
CAPTGVGSYQLTF

SEQ ID NO: 476466 - protein, 16 aa, Homo sapiens
  CDR3 for beta chain variable domain of TCR clone 238233 (TRBV28, TRBJ1-5)
CASSLTGQGWDQPQHF

SEQ ID NO: 476467 - protein, 14 aa, Homo sapiens
  CDR3 for alpha chain variable domain of TCR clone 238234 (TRAV1-2, TRAJ29)
CAVRELTSATPLVF

SEQ ID NO: 476468 - protein, 15 aa, Homo sapiens
  CDR3 for beta chain variable domain of TCR clone 238234 (TRBV5-1, TRBJ2-7)
CASSFRLAGVHEQYF

SEQ ID NO: 476469 - protein, 14 aa, Homo sapiens
  CDR3 for alpha chain variable domain of TCR clone 238235 (TRAV16, TRAJ33)
CALSAVDSNYKLIW

SEQ ID NO: 476470 - protein, 12 aa, Homo sapiens
  CDR3 for beta chain variable domain of TCR clone 238235 (TRBV5-1, TRBJ1-2)
CASSQDTYGYTF

SEQ ID NO: 476471 - protein, 15 aa, Homo sapiens
  CDR3 for alpha chain variable domain of TCR clone 238236 (TRAV27, TRAJ38)
CAARRNAGNNRKLIW

SEQ ID NO: 476472 - protein, 12 aa, Homo sapiens
  CDR3 for beta chain variable domain of TCR clone 238236 (TRBV27, TRBJ2-7)
CASSGGFYEQYF

SEQ ID NO: 476473 - protein, 14 aa, Homo sapiens
  CDR3 for alpha chain variable domain of TCR clone 238237 (TRAV1-2, TRAJ17)
CALRRGAAVNKLTF

SEQ ID NO: 476474 - protein, 14 aa, Homo sapiens
  CDR3 for beta chain variable domain of TCR clone 238237 (TRBV7-2, TRBJ2-7)
CASSLYPGRYEQYF

SEQ ID NO: 476475 - protein, 14 aa, Homo sapiens
  CDR3 for alpha chain variable domain of TCR clone 238238 (TRAV17, TRAJ37)
CATVPSSTTGKLIF

SEQ ID NO: 476476 - protein, 15 aa, Homo sapiens
  CDR3 for beta chain variable domain of TCR clone 238238 (TRBV12-4, TRBJ2-2)
CASLRRGDLTGELFF

SEQ ID NO: 476477 - protein, 16 aa, Homo sapiens
  CDR3 for alpha chain variable domain of TCR clone 238239 (TRAV12-3, TRAJ53)
CSMSPGSGGSNYKMTF

SEQ ID NO: 476478 - protein, 11 aa, Homo sapiens
  CDR3 for beta chain variable domain of TCR clone 238239 (TRBV29-1, TRBJ2-5)
CSEDRTGTQYF

SEQ ID NO: 476479 - protein, 14 aa, Homo sapiens
  CDR3 for alpha chain variable domain of TCR clone 238240 (TRAV1-2, TRAJ16)
CAVNRFSDVQKLLF

SEQ ID NO: 476480 - protein, 16 aa, Homo sapiens
  CDR3 for beta chain variable domain of TCR clone 238240 (TRBV4-1, TRBJ1-1)
CASSQDAGMGNTEAFF

SEQ ID NO: 476481 - protein, 11 aa, Homo sapiens
  CDR3 for alpha chain variable domain of TCR clone 238241 (TRAV17, TRAJ39)
CATNPYNMLTL

SEQ ID NO: 476482 - protein, 13 aa, Homo sapiens
  CDR3 for beta chain variable domain of TCR clone 238241 (TRBV7-8, TRBJ2-1)
CASTRDAVDEQFF

SEQ ID NO: 476483 - protein, 13 aa, Homo sapiens
  CDR3 for alpha chain variable domain of TCR clone 238242 (TRAV20, TRAJ31)
CAVQAWNNARLMF

SEQ ID NO: 476484 - protein, 16 aa, Homo sapiens
  CDR3 for beta chain variable domain of TCR clone 238242 (TRBV12-4, TRBJ1-5)
CASRQPVEGSNQPQHF

SEQ ID NO: 476485 - protein, 14 aa, Homo sapiens
  CDR3 for alpha chain variable domain of TCR clone 238243 (TRAV12-2, TRAJ13)
CAAKKTGGYQKVTF

SEQ ID NO: 476486 - protein, 15 aa, Homo sapiens
  CDR3 for beta chain variable domain of TCR clone 238243 (TRBV20-1, TRBJ2-1)
CSARGIGGTYNEQFF

SEQ ID NO: 476487 - protein, 16 aa, Homo sapiens
  CDR3 for alpha chain variable domain of TCR clone 238244 (TRAV3, TRAJ37)
CAVRPHGSGNTGKLII

SEQ ID NO: 476488 - protein, 14 aa, Homo sapiens
  CDR3 for beta chain variable domain of TCR clone 238244 (TRBV25-1, TRBJ1-1)
CASTHLGGNTEAFF

SEQ ID NO: 476489 - protein, 12 aa, Homo sapiens
  CDR3 for alpha chain variable domain of TCR clone 238245 (TRAV16, TRAJ10)
CSRTGGGNKLTC

SEQ ID NO: 476490 - protein, 13 aa, Homo sapiens
  CDR3 for beta chain variable domain of TCR clone 238245 (TRBV15, TRBJ2-7)
CATSTTGHYEQYF

SEQ ID NO: 476491 - protein, 14 aa, Homo sapiens
  CDR3 for alpha chain variable domain of TCR clone 238246 (TRAV1-2, TRAJ8)
CAVREDTGFQKLVF

SEQ ID NO: 476492 - protein, 16 aa, Homo sapiens
  CDR3 for beta chain variable domain of TCR clone 238246 (TRBV4-1, TRBJ1-4)
CASSQDLRRGGEKLCF

SEQ ID NO: 476493 - protein, 12 aa, Homo sapiens
  CDR3 for alpha chain variable domain of TCR clone 238247 (TRAV17, TRAJ20)
CATDSNDYKLSF

SEQ ID NO: 476494 - protein, 15 aa, Homo sapiens
  CDR3 for beta chain variable domain of TCR clone 238247 (TRBV2, TRBJ2-3)
CASSDFEKATDTQYF

SEQ ID NO: 476495 - protein, 21 aa, Homo sapiens
  CDR3 for alpha chain variable domain of TCR clone 238248 (TRAV8-4, TRAJ47)
HLTKPSAHMSDAAERGNKLVF

SEQ ID NO: 476496 - protein, 14 aa, Homo sapiens
  CDR3 for beta chain variable domain of TCR clone 238248 (TRBV7-6, TRBJ2-3)
CASSLGTVTDTQYF

SEQ ID NO: 476497 - protein, 14 aa, Homo sapiens
  CDR3 for alpha chain variable domain of TCR clone 238249 (TRAV12-2, TRAJ11)
CAVNRESGYSTLTF

SEQ ID NO: 476498 - protein, 17 aa, Homo sapiens
  CDR3 for beta chain variable domain of TCR clone 238249 (TRBV20-1, TRBJ2-1)
CSASSSGLAGSYNEQFF

SEQ ID NO: 476499 - protein, 20 aa, Homo sapiens
  CDR3 for alpha chain variable domain of TCR clone 238250 (TRAV27, TRAJ21)
CAGVRQLQQILLWICDQTQC

SEQ ID NO: 476500 - protein, 13 aa, Homo sapiens
  CDR3 for beta chain variable domain of TCR clone 238250 (TRBV10-3, TRBJ2-7)
CASKLAVNYEQYF

SEQ ID NO: 476501 - protein, 17 aa, Homo sapiens
  CDR3 for alpha chain variable domain of TCR clone 238251 (TRAV17, TRAJ28)
CATDPRRGGAGSYQLTF

SEQ ID NO: 476502 - protein, 16 aa, Homo sapiens
  CDR3 for beta chain variable domain of TCR clone 238251 (TRBV25-1, TRBJ1-1)
CASSGDRDRGRIEAFC

SEQ ID NO: 476503 - protein, 13 aa, Homo sapiens
  CDR3 for alpha chain variable domain of TCR clone 238252 (TRAV13-2, TRAJ48)
CAEMDFGNEKLTF

SEQ ID NO: 476504 - protein, 13 aa, Homo sapiens
  CDR3 for beta chain variable domain of TCR clone 238252 (TRBV19, TRBJ1-3)
CASRLSLGNTIYF

SEQ ID NO: 476505 - protein, 11 aa, Homo sapiens
  CDR3 for alpha chain variable domain of TCR clone 238253 (TRAV3, TRAJ21)
CAVGNFNKFYF

SEQ ID NO: 476506 - protein, 15 aa, Homo sapiens
  CDR3 for beta chain variable domain of TCR clone 238253 (TRBV11-3, TRBJ2-7)
CASSLLSGSSYEQYF

SEQ ID NO: 476507 - protein, 14 aa, Homo sapiens
  CDR3 for alpha chain variable domain of TCR clone 238254 (TRAV27, TRAJ12)
CAGARMDSSYKLIF

SEQ ID NO: 476508 - protein, 18 aa, Homo sapiens
  CDR3 for beta chain variable domain of TCR clone 238254 (TRBV10-3, TRBJ2-7)
RAISESGRPSGGRVEQYF

SEQ ID NO: 476509 - protein, 17 aa, Homo sapiens
  CDR3 for alpha chain variable domain of TCR clone 238255 (TRAV29/DV5, TRAJ45)
CAADGPFSGGGADGLTF

SEQ ID NO: 476510 - protein, 13 aa, Homo sapiens
  CDR3 for beta chain variable domain of TCR clone 238255 (TRBV4-2, TRBJ1-1)
CASSQAGNTEAFF

SEQ ID NO: 476511 - protein, 12 aa, Homo sapiens
  CDR3 for alpha chain variable domain of TCR clone 238256 (TRAV8-3, TRAJ41)
CAVALSGYALNF

SEQ ID NO: 476512 - protein, 18 aa, Homo sapiens
  CDR3 for beta chain variable domain of TCR clone 238256 (TRBV20-1, TRBJ2-6)
CSAETKPTHGSGANVLTF

SEQ ID NO: 476513 - protein, 15 aa, Homo sapiens
  CDR3 for alpha chain variable domain of TCR clone 238257 (TRAV17, TRAJ57)
CATGPSQGGSEKLVF

SEQ ID NO: 476514 - protein, 12 aa, Homo sapiens
  CDR3 for beta chain variable domain of TCR clone 238257 (TRBV6-1, TRBJ2-1)
CATQKGGGHLFF

SEQ ID NO: 476515 - protein, 15 aa, Homo sapiens
  CDR3 for alpha chain variable domain of TCR clone 238258 (TRAV12-2, TRAJ53)
CAVHGGGGSNYKLTF

SEQ ID NO: 476516 - protein, 13 aa, Homo sapiens
  CDR3 for beta chain variable domain of TCR clone 238258 (TRBV3-1, TRBJ1-1)
CASSLGVITEAFF

SEQ ID NO: 476517 - protein, 13 aa, Homo sapiens
  CDR3 for alpha chain variable domain of TCR clone 238259 (TRAV12-2, TRAJ10)
CAVPTGGGNKLTF

SEQ ID NO: 476518 - protein, 14 aa, Homo sapiens
  CDR3 for beta chain variable domain of TCR clone 238259 (TRBV25-1, TRBJ1-1)
SASTHLGGNTEAFF

SEQ ID NO: 476519 - protein, 13 aa, Homo sapiens
  CDR3 for alpha chain variable domain of TCR clone 238260 (TRAV2, TRAJ9)
CAVESTGGFKTIF

SEQ ID NO: 476520 - protein, 15 aa, Homo sapiens
  CDR3 for beta chain variable domain of TCR clone 238260 (TRBV10-3, TRBJ2-1)
CAITFGGGTDHEQFF

SEQ ID NO: 476521 - protein, 13 aa, Homo sapiens
  CDR3 for alpha chain variable domain of TCR clone 238261 (TRAV5, TRAJ30)
CAEIANRDDKIIF

SEQ ID NO: 476522 - protein, 16 aa, Homo sapiens
  CDR3 for beta chain variable domain of TCR clone 238261 (TRBV11-2, TRBJ1-2)
CASSLDTGGADYGYTF

SEQ ID NO: 476523 - protein, 15 aa, Homo sapiens
  CDR3 for alpha chain variable domain of TCR clone 238262 (TRAV12-2, TRAJ8)
CAGREEKTGFQKIVF

SEQ ID NO: 476524 - protein, 15 aa, Homo sapiens
  CDR3 for beta chain variable domain of TCR clone 238262 (TRBV28, TRBJ2-4)
CAAGSGTLLMGMQYF

SEQ ID NO: 476525 - protein, 13 aa, Homo sapiens
  CDR3 for alpha chain variable domain of TCR clone 238263 (TRAV12-3, TRAJ40)
CAMSDLGTYKYIF

SEQ ID NO: 476526 - protein, 14 aa, Homo sapiens
  CDR3 for beta chain variable domain of TCR clone 238263 (TRBV7-2, TRBJ1-5)
CASSTQGAGQPQHF

SEQ ID NO: 476527 - protein, 16 aa, Homo sapiens
  CDR3 for alpha chain variable domain of TCR clone 238264 (TRAV26-1, TRAJ37)
CIVRGDGSGNTGKLIF

SEQ ID NO: 476528 - protein, 15 aa, Homo sapiens
  CDR3 for beta chain variable domain of TCR clone 238264 (TRBV27, TRBJ1-4)
CASSAQQDLNEKLFF

SEQ ID NO: 476529 - protein, 11 aa, Homo sapiens
  CDR3 for alpha chain variable domain of TCR clone 238265 (TRAV4, TRAJ31)
CLVGDNASLMF

SEQ ID NO: 476530 - protein, 16 aa, Homo sapiens
  CDR3 for beta chain variable domain of TCR clone 238265 (TRBV7-2, TRBJ2-5)
CASSSKWLSGQEAQYF

SEQ ID NO: 476531 - protein, 14 aa, Homo sapiens
  CDR3 for alpha chain variable domain of TCR clone 238266 (TRAV23/DV6, TRAJ5)
CAAKRPAGRRALTF

SEQ ID NO: 476532 - protein, 16 aa, Homo sapiens
  CDR3 for beta chain variable domain of TCR clone 238266 (TRBV12-4, TRBJ1-5)
CASSRPVGGSNQPQHF

SEQ ID NO: 476533 - protein, 13 aa, Homo sapiens
  CDR3 for alpha chain variable domain of TCR clone 238267 (TRAV1-2, TRAJ9)
CAALHTGGFKPIF

SEQ ID NO: 476534 - protein, 13 aa, Homo sapiens
  CDR3 for beta chain variable domain of TCR clone 238267 (TRBV19, TRBJ1-2)
CASSVPGQDGYTF

SEQ ID NO: 476535 - protein, 14 aa, Homo sapiens
  CDR3 for alpha chain variable domain of TCR clone 238268 (TRAV14/DV4, TRAJ41)
CAIGGHDSGYALNF

SEQ ID NO: 476536 - protein, 15 aa, Homo sapiens
  CDR3 for beta chain variable domain of TCR clone 238268 (TRBV19, TRBJ2-1)
CASSIQATSYNEQFF

SEQ ID NO: 476537 - protein, 13 aa, Homo sapiens
  CDR3 for alpha chain variable domain of TCR clone 238269 (TRAV13-2, TRAJ13)
CSDLSGGYQKVTF

SEQ ID NO: 476538 - protein, 15 aa, Homo sapiens
  CDR3 for beta chain variable domain of TCR clone 238269 (TRBV19, TRBJ1-1)
CASSIGGGRNTEAFF

SEQ ID NO: 476539 - protein, 16 aa, Homo sapiens
  CDR3 for alpha chain variable domain of TCR clone 238270 (TRAV30, TRAJ24)
CGTEIVDSDSWRKFQF

SEQ ID NO: 476540 - protein, 14 aa, Homo sapiens
  CDR3 for beta chain variable domain of TCR clone 238270 (TRBV12-5, TRBJ2-5)
CASGSRTHQETQYF

SEQ ID NO: 476541 - protein, 13 aa, Homo sapiens
  CDR3 for alpha chain variable domain of TCR clone 238271 (TRAV27, TRAJ49)
CAHVHTPVTSSIF

SEQ ID NO: 476542 - protein, 16 aa, Homo sapiens
  CDR3 for beta chain variable domain of TCR clone 238271 (TRBV4-1, TRBJ1-2)
CASSQDAGQVLYGYTF

SEQ ID NO: 476543 - protein, 15 aa, Homo sapiens
  CDR3 for alpha chain variable domain of TCR clone 238272 (TRAV17, TRAJ22)
CAKVAPSGSARQLTF

SEQ ID NO: 476544 - protein, 16 aa, Homo sapiens
  CDR3 for beta chain variable domain of TCR clone 238272 (TRBV10-3, TRBJ2-7)
CAISADFADRPYEQYF

SEQ ID NO: 476545 - protein, 20 aa, Homo sapiens
  CDR3 for alpha chain variable domain of TCR clone 238273 (TRAV12-2, TRAJ52)
SPVIQPPARAGGTSYGRLTF

SEQ ID NO: 476546 - protein, 16 aa, Homo sapiens
  CDR3 for beta chain variable domain of TCR clone 238273 (TRBV15, TRBJ1-2)
CATSRGPRTGGGGYTF

SEQ ID NO: 476547 - protein, 14 aa, Homo sapiens
  CDR3 for alpha chain variable domain of TCR clone 238274 (TRAV2, TRAJ33)
CDVEDQGSNYQLIW

SEQ ID NO: 476548 - protein, 13 aa, Homo sapiens
  CDR3 for beta chain variable domain of TCR clone 238274 (TRBV7-9, TRBJ1-2)
CASSLKQNYGYTL

SEQ ID NO: 476549 - protein, 13 aa, Homo sapiens
  CDR3 for alpha chain variable domain of TCR clone 238275 (TRAV1-2, TRAJ31)
CAVRPNNNARLML

SEQ ID NO: 476550 - protein, 14 aa, Homo sapiens
  CDR3 for beta chain variable domain of TCR clone 238275 (TRBV11-2, TRBJ2-1)
CASSLSGPYNEQFF

SEQ ID NO: 476551 - protein, 14 aa, Homo sapiens
  CDR3 for alpha chain variable domain of TCR clone 238276 (TRAV1-2, TRAJ8)
CAVREDTGFQKIVF

SEQ ID NO: 476552 - protein, 13 aa, Homo sapiens
  CDR3 for beta chain variable domain of TCR clone 238276 (TRBV11-2, TRBJ2-5)
CASSSTGEETQYF

SEQ ID NO: 476553 - protein, 12 aa, Homo sapiens
  CDR3 for alpha chain variable domain of TCR clone 238277 (TRAV9-2, TRAJ53)
CALRGSNYKLTF

SEQ ID NO: 476554 - protein, 14 aa, Homo sapiens
  CDR3 for beta chain variable domain of TCR clone 238277 (TRBV10-3, TRBJ2-3)
CATMGTGGLDTQYF

SEQ ID NO: 476555 - protein, 14 aa, Homo sapiens
  CDR3 for alpha chain variable domain of TCR clone 238278 (TRAV16, TRAJ37)
CALDISGNAGKLIF

SEQ ID NO: 476556 - protein, 12 aa, Homo sapiens
  CDR3 for beta chain variable domain of TCR clone 238278 (TRBV7-9, TRBJ2-7)
CASSFGSYEQYF

SEQ ID NO: 476557 - protein, 12 aa, Homo sapiens
  CDR3 for alpha chain variable domain of TCR clone 238279 (TRAV25, TRAJ48)
CAGDFGNEKLTF

SEQ ID NO: 476558 - protein, 12 aa, Homo sapiens
  CDR3 for beta chain variable domain of TCR clone 238279 (TRBV2, TRBJ2-5)
CAGKEYGETQYF

SEQ ID NO: 476559 - protein, 12 aa, Homo sapiens
  CDR3 for alpha chain variable domain of TCR clone 238280 (TRAV3, TRAJ43)
CAVRDTNNDIRF

SEQ ID NO: 476560 - protein, 15 aa, Homo sapiens
  CDR3 for beta chain variable domain of TCR clone 238280 (TRBV27, TRBJ1-5)
CASSLGTGFDQPQHF

SEQ ID NO: 476561 - protein, 14 aa, Homo sapiens
  CDR3 for alpha chain variable domain of TCR clone 238281 (TRAV29/DV5, TRAJ36)
CAARRKTGANNLFF

SEQ ID NO: 476562 - protein, 15 aa, Homo sapiens
  CDR3 for beta chain variable domain of TCR clone 238281 (TRBV19, TRBJ2-1)
CASSIQATSYNEQFF

SEQ ID NO: 476563 - protein, 14 aa, Homo sapiens
  CDR3 for alpha chain variable domain of TCR clone 238282 (TRAV13-1, TRAJ35)
CAASKGGFGNVLHC

SEQ ID NO: 476564 - protein, 15 aa, Homo sapiens
  CDR3 for beta chain variable domain of TCR clone 238282 (TRBV10-3, TRBJ2-3)
CAISLTSGGTDKQYF

SEQ ID NO: 476565 - protein, 13 aa, Homo sapiens
  CDR3 for alpha chain variable domain of TCR clone 238283 (TRAV21, TRAJ27)
CAARPGNAGKSTF

SEQ ID NO: 476566 - protein, 15 aa, Homo sapiens
  CDR3 for beta chain variable domain of TCR clone 238283 (TRBV13, TRBJ1-3)
CASSSQGTSGNTIYF

SEQ ID NO: 476567 - protein, 16 aa, Homo sapiens
  CDR3 for alpha chain variable domain of TCR clone 238284 (TRAV12-1, TRAJ53)
CVATSVAGGSNYKLTF

SEQ ID NO: 476568 - protein, 16 aa, Homo sapiens
  CDR3 for beta chain variable domain of TCR clone 238284 (TRBV6-6, TRBJ2-3)
CASSCSHAGSTDTQYF

SEQ ID NO: 476569 - protein, 18 aa, Homo sapiens
  CDR3 for alpha chain variable domain of TCR clone 238285 (TRAV12-3, TRAJ52)
CAMSVGGAGGTSYGKLTF

SEQ ID NO: 476570 - protein, 14 aa, Homo sapiens
  CDR3 for beta chain variable domain of TCR clone 238285 (TRBV7-2, TRBJ2-7)
CASRSQGAAYEQYL

SEQ ID NO: 476571 - protein, 15 aa, Homo sapiens
  CDR3 for alpha chain variable domain of TCR clone 238286 (TRAV12-2, TRAJ22)
CAVNGASGSARQLTF

SEQ ID NO: 476572 - protein, 13 aa, Homo sapiens
  CDR3 for beta chain variable domain of TCR clone 238286 (TRBV12-5, TRBJ2-3)
CASGDRQSDTQYF

SEQ ID NO: 476573 - protein, 14 aa, Homo sapiens
  CDR3 for alpha chain variable domain of TCR clone 238287 (TRAV38-1, TRAJ35)
CAFLTIGFGHVLHC

SEQ ID NO: 476574 - protein, 17 aa, Homo sapiens
  CDR3 for beta chain variable domain of TCR clone 238287 (TRBV28, TRBJ1-1)
CASSGDLRTESNTEAFF

SEQ ID NO: 476575 - protein, 15 aa, Homo sapiens
  CDR3 for alpha chain variable domain of TCR clone 238288 (TRAV4, TRAJ17)
CLVGDIGAAGNKLTF

SEQ ID NO: 476576 - protein, 12 aa, Homo sapiens
  CDR3 for beta chain variable domain of TCR clone 238288 (TRBV12-4, TRBJ1-5)
CASSLSGQPQHF

SEQ ID NO: 476577 - protein, 13 aa, Homo sapiens
  CDR3 for alpha chain variable domain of TCR clone 238289 (TRAV2, TRAJ40)
CAVVTSGTYKYIF

SEQ ID NO: 476578 - protein, 13 aa, Homo sapiens
  CDR3 for beta chain variable domain of TCR clone 238289 (TRBV9, TRBJ2-7)
CASSASDSYEQYL

SEQ ID NO: 476579 - protein, 16 aa, Homo sapiens
  CDR3 for alpha chain variable domain of TCR clone 238290 (TRAV21, TRAJ52)
CAVTNAGGTSYGKLTF

SEQ ID NO: 476580 - protein, 16 aa, Homo sapiens
  CDR3 for beta chain variable domain of TCR clone 238290 (TRBV2, TRBJ2-4)
CASSEAPGGEQNIQYF

SEQ ID NO: 476581 - protein, 14 aa, Homo sapiens
  CDR3 for alpha chain variable domain of TCR clone 238291 (TRAV1-1, TRAJ28)
CAAPSGAGSYQLTC

SEQ ID NO: 476582 - protein, 12 aa, Homo sapiens
  CDR3 for beta chain variable domain of TCR clone 238291 (TRBV7-3, TRBJ2-1)
CASSFINNEQFF

SEQ ID NO: 476583 - protein, 14 aa, Homo sapiens
  CDR3 for alpha chain variable domain of TCR clone 238292 (TRAV1-2, TRAJ8)
CAVREDTGFQKLVF

SEQ ID NO: 476584 - protein, 13 aa, Homo sapiens
  CDR3 for beta chain variable domain of TCR clone 238292 (TRBV11-2, TRBJ2-5)
CASGHGAKETQYF

SEQ ID NO: 476585 - protein, 14 aa, Homo sapiens
  CDR3 for alpha chain variable domain of TCR clone 238293 (TRAV38-1, TRAJ45)
CAYYSGGGADGLTF

SEQ ID NO: 476586 - protein, 16 aa, Homo sapiens
  CDR3 for beta chain variable domain of TCR clone 238293 (TRBV29-1, TRBJ2-7)
CSVEDAEDGTAYEQYF

SEQ ID NO: 476587 - protein, 10 aa, Homo sapiens
  CDR3 for alpha chain variable domain of TCR clone 238294 (TRAV39, TRAJ49)
CAVAGNQFYF

SEQ ID NO: 476588 - protein, 20 aa, Homo sapiens
  CDR3 for beta chain variable domain of TCR clone 238294 (TRBV28, TRBJ2-1)
CASTPIGRSPGLAGGNEQFF

SEQ ID NO: 476589 - protein, 12 aa, Homo sapiens
  CDR3 for alpha chain variable domain of TCR clone 238295 (TRAV3, TRAJ43)
CAVRDPNNDMRF

SEQ ID NO: 476590 - protein, 15 aa, Homo sapiens
  CDR3 for beta chain variable domain of TCR clone 238295 (TRBV27, TRBJ1-5)
CASSLGTGFDQPQHV

SEQ ID NO: 476591 - protein, 13 aa, Homo sapiens
  CDR3 for alpha chain variable domain of TCR clone 238296 (TRAV3, TRAJ26)
CAVSRGYGQNFVF

SEQ ID NO: 476592 - protein, 15 aa, Homo sapiens
  CDR3 for beta chain variable domain of TCR clone 238296 (TRBV27, TRBJ2-1)
CASSLAWGAYNEQFF

SEQ ID NO: 476593 - protein, 11 aa, Homo sapiens
  CDR3 for alpha chain variable domain of TCR clone 238297 (TRAV2, TRAJ33)
CAVDSNYQLIW

SEQ ID NO: 476594 - protein, 14 aa, Homo sapiens
  CDR3 for beta chain variable domain of TCR clone 238297 (TRBV7-2, TRBJ2-2)
CASRGQGAAGELFF

SEQ ID NO: 476595 - protein, 14 aa, Homo sapiens
  CDR3 for alpha chain variable domain of TCR clone 238298 (TRAV12-2, TRAJ15)
CAPHTGQAGTAPIF

SEQ ID NO: 476596 - protein, 14 aa, Homo sapiens
  CDR3 for beta chain variable domain of TCR clone 238298 (TRBV7-2, TRBJ2-7)
CASSPKTSFYEQYF

SEQ ID NO: 476597 - protein, 17 aa, Homo sapiens
  CDR3 for alpha chain variable domain of TCR clone 238299 (TRAV3, TRAJ42)
CAVRDRDYGGSQGNLIF

SEQ ID NO: 476598 - protein, 15 aa, Homo sapiens
  CDR3 for beta chain variable domain of TCR clone 238299 (TRBV25-1, TRBJ1-2)
CASSETGGPSYGYTF

SEQ ID NO: 476599 - protein, 12 aa, Homo sapiens
  CDR3 for alpha chain variable domain of TCR clone 238300 (TRAV12-2, TRAJ10)
WGVTGGGNKLTC

SEQ ID NO: 476600 - protein, 14 aa, Homo sapiens
  CDR3 for beta chain variable domain of TCR clone 238300 (TRBV12-4, TRBJ1-4)
CASSRQGANEELFF

SEQ ID NO: 476601 - protein, 15 aa, Homo sapiens
  CDR3 for alpha chain variable domain of TCR clone 238301 (TRAV8-2, TRAJ40)
CVVLGTTSGTFKYIF

SEQ ID NO: 476602 - protein, 16 aa, Homo sapiens
  CDR3 for beta chain variable domain of TCR clone 238301 (TRBV7-3, TRBJ2-1)
CASSLEGYRSYNEQFF

SEQ ID NO: 476603 - protein, 12 aa, Homo sapiens
  CDR3 for alpha chain variable domain of TCR clone 238302 (TRAV13-1, TRAJ21)
CAAKEGFNKFYF

SEQ ID NO: 476604 - protein, 11 aa, Homo sapiens
  CDR3 for beta chain variable domain of TCR clone 238302 (TRBV19, TRBJ2-5)
CASSIKETQYF

SEQ ID NO: 476605 - protein, 15 aa, Homo sapiens
  CDR3 for alpha chain variable domain of TCR clone 238303 (TRAV8-3, TRAJ45)
CASSYSGGGADGLTF

SEQ ID NO: 476606 - protein, 15 aa, Homo sapiens
  CDR3 for beta chain variable domain of TCR clone 238303 (TRBV6-3, TRBJ2-2)
CASSFGRLNTGELFF

SEQ ID NO: 476607 - protein, 14 aa, Homo sapiens
  CDR3 for alpha chain variable domain of TCR clone 238304 (TRAV17, TRAJ57)
CATDPQGGAEKLVF

SEQ ID NO: 476608 - protein, 14 aa, Homo sapiens
  CDR3 for beta chain variable domain of TCR clone 238304 (TRBV25-1, TRBJ1-1)
CASTHLGGNTEALF

SEQ ID NO: 476609 - protein, 16 aa, Homo sapiens
  CDR3 for alpha chain variable domain of TCR clone 238305 (TRAV30, TRAJ24)
CGTEIVDADSWGKFQL

SEQ ID NO: 476610 - protein, 17 aa, Homo sapiens
  CDR3 for beta chain variable domain of TCR clone 238305 (TRBV13, TRBJ2-3)
CASSLSRVAGGRNTQYF

SEQ ID NO: 476611 - protein, 20 aa, Homo sapiens
  CDR3 for alpha chain variable domain of TCR clone 238306 (TRAV21, TRAJ35)
AASQPGDSATYRTRGNVLNC

SEQ ID NO: 476612 - protein, 12 aa, Homo sapiens
  CDR3 for beta chain variable domain of TCR clone 238306 (TRBV11-2, TRBJ2-2)
CASSLPTGELFF

SEQ ID NO: 476613 - protein, 14 aa, Homo sapiens
  CDR3 for alpha chain variable domain of TCR clone 238307 (TRAV12-1, TRAJ12)
CVVTRMDSSYKLIF

SEQ ID NO: 476614 - protein, 15 aa, Homo sapiens
  CDR3 for beta chain variable domain of TCR clone 238307 (TRBV7-8, TRBJ2-1)
CASSVADSLYNEQFF

SEQ ID NO: 476615 - protein, 16 aa, Homo sapiens
  CDR3 for alpha chain variable domain of TCR clone 238308 (TRAV27, TRAJ13)
CAGAKSDSGGYQKATF

SEQ ID NO: 476616 - protein, 15 aa, Homo sapiens
  CDR3 for beta chain variable domain of TCR clone 238308 (TRBV29-1, TRBJ2-1)
CSVGRPALFYNEQLF

SEQ ID NO: 476617 - protein, 10 aa, Homo sapiens
  CDR3 for alpha chain variable domain of TCR clone 238309 (TRAV1-2, TRAJ20)
CALNDYKLSF

SEQ ID NO: 476618 - protein, 13 aa, Homo sapiens
  CDR3 for beta chain variable domain of TCR clone 238309 (TRBV2, TRBJ1-1)
CASSVLMNTEAFF

SEQ ID NO: 476619 - protein, 15 aa, Homo sapiens
  CDR3 for alpha chain variable domain of TCR clone 238310 (TRAV12-3, TRAJ6)
CAMSATTGGSYIPTF

SEQ ID NO: 476620 - protein, 17 aa, Homo sapiens
  CDR3 for beta chain variable domain of TCR clone 238310 (TRBV20-1, TRBJ2-1)
CSAPPRLAGTRYNEQFF

SEQ ID NO: 476621 - protein, 12 aa, Homo sapiens
  CDR3 for alpha chain variable domain of TCR clone 238311 (TRAV8-3, TRAJ26)
CAGDNYGQNFVF

SEQ ID NO: 476622 - protein, 16 aa, Homo sapiens
  CDR3 for beta chain variable domain of TCR clone 238311 (TRBV2, TRBJ2-1)
CASSVGGSLSYNVQFF

SEQ ID NO: 476623 - protein, 15 aa, Homo sapiens
  CDR3 for alpha chain variable domain of TCR clone 238312 (TRAV2, TRAJ13)
CCLLLCFRGYQKVTF

SEQ ID NO: 476624 - protein, 11 aa, Homo sapiens
  CDR3 for beta chain variable domain of TCR clone 238312 (TRBV5-6, TRBJ2-1)
CASSLERTQYF

SEQ ID NO: 476625 - protein, 13 aa, Homo sapiens
  CDR3 for alpha chain variable domain of TCR clone 238313 (TRAV27, TRAJ45)
CRSSGGGADGLTF

SEQ ID NO: 476626 - protein, 11 aa, Homo sapiens
  CDR3 for beta chain variable domain of TCR clone 238313 (TRBV19, TRBJ1-1)
CTSSIGSEAFF

SEQ ID NO: 476627 - protein, 13 aa, Homo sapiens
  CDR3 for alpha chain variable domain of TCR clone 238314 (TRAV16, TRAJ48)
CSPLNFGNEKFTF

SEQ ID NO: 476628 - protein, 11 aa, Homo sapiens
  CDR3 for beta chain variable domain of TCR clone 238314 (TRBV7-9, TRBJ2-3)
CASSPTDTQYF

SEQ ID NO: 476629 - protein, 13 aa, Homo sapiens
  CDR3 for alpha chain variable domain of TCR clone 238315 (TRAV3, TRAJ20)
CAVRDTPRYKLRF

SEQ ID NO: 476630 - protein, 16 aa, Homo sapiens
  CDR3 for beta chain variable domain of TCR clone 238315 (TRBV20-1, TRBJ2-7)
CSARAPGLALSYEQYF

SEQ ID NO: 476631 - protein, 12 aa, Homo sapiens
  CDR3 for alpha chain variable domain of TCR clone 238316 (TRAV17, TRAJ4)
CATDGGYNKLIF

SEQ ID NO: 476632 - protein, 13 aa, Homo sapiens
  CDR3 for beta chain variable domain of TCR clone 238316 (TRBV4-2, TRBJ1-2)
CASSLSASGGYTF

SEQ ID NO: 476633 - protein, 15 aa, Homo sapiens
  CDR3 for alpha chain variable domain of TCR clone 238317 (TRAV3, TRAJ9)
CAVRARNTGGFKTIF

SEQ ID NO: 476634 - protein, 15 aa, Homo sapiens
  CDR3 for beta chain variable domain of TCR clone 238317 (TRBV27, TRBJ1-1)
CASSPYADPYTEAFS

SEQ ID NO: 476635 - protein, 13 aa, Homo sapiens
  CDR3 for alpha chain variable domain of TCR clone 238318 (TRAV20, TRAJ37)
CAGCSSNTGKLIF

SEQ ID NO: 476636 - protein, 15 aa, Homo sapiens
  CDR3 for beta chain variable domain of TCR clone 238318 (TRBV28, TRBJ1-2)
CASIPQGSDDYGYTF

SEQ ID NO: 476637 - protein, 13 aa, Homo sapiens
  CDR3 for alpha chain variable domain of TCR clone 238319 (TRAV17, TRAJ40)
CAGALGGTYKYTF

SEQ ID NO: 476638 - protein, 16 aa, Homo sapiens
  CDR3 for beta chain variable domain of TCR clone 238319 (TRBV7-2, TRBJ1-4)
CASSLAPGRRDEKLFF

SEQ ID NO: 476639 - protein, 16 aa, Homo sapiens
  CDR3 for alpha chain variable domain of TCR clone 238320 (TRAV20, TRAJ22)
CAVQASSSGSARQLTF

SEQ ID NO: 476640 - protein, 16 aa, Homo sapiens
  CDR3 for beta chain variable domain of TCR clone 238320 (TRBV12-4, TRBJ2-5)
CASSFFVRGRQETQYF

SEQ ID NO: 476641 - protein, 20 aa, Homo sapiens
  CDR3 for alpha chain variable domain of TCR clone 238321 (TRAV3, TRAJ20)
CAVRPSVTTKAQLWSRNHSN

SEQ ID NO: 476642 - protein, 15 aa, Homo sapiens
  CDR3 for beta chain variable domain of TCR clone 238321 (TRBV19, TRBJ2-6)
CASVRRDSGANVLTF

SEQ ID NO: 476643 - protein, 13 aa, Homo sapiens
  CDR3 for alpha chain variable domain of TCR clone 238322 (TRAV1-2, TRAJ12)
CAVSMDSNYKLIF

SEQ ID NO: 476644 - protein, 17 aa, Homo sapiens
  CDR3 for beta chain variable domain of TCR clone 238322 (TRBV11-2, TRBJ2-1)
CASSLYPPGVEYNEQFF

SEQ ID NO: 476645 - protein, 13 aa, Homo sapiens
  CDR3 for alpha chain variable domain of TCR clone 238323 (TRAV2, TRAJ15)
CAVASQAGTALIF

SEQ ID NO: 476646 - protein, 14 aa, Homo sapiens
  CDR3 for beta chain variable domain of TCR clone 238323 (TRBV5-1, TRBJ2-7)
CASSRGGSLYEQYF

SEQ ID NO: 476647 - protein, 15 aa, Homo sapiens
  CDR3 for alpha chain variable domain of TCR clone 238324 (TRAV26-1, TRAJ44)
CIVRIGTGTASKLTF

SEQ ID NO: 476648 - protein, 15 aa, Homo sapiens
  CDR3 for beta chain variable domain of TCR clone 238324 (TRBV7-8, TRBJ2-7)
CASSLGTGNPYEQYF

SEQ ID NO: 476649 - protein, 15 aa, Homo sapiens
  CDR3 for alpha chain variable domain of TCR clone 238325 (TRAV20, TRAJ50)
CAVRQMKTSYDKVIF

SEQ ID NO: 476650 - protein, 15 aa, Homo sapiens
  CDR3 for beta chain variable domain of TCR clone 238325 (TRBV20-1, TRBJ2-7)
CSVRDRVSGMDEQYF

SEQ ID NO: 476651 - protein, 14 aa, Homo sapiens
  CDR3 for alpha chain variable domain of TCR clone 238326 (TRAV12-2, TRAJ13)
CAVKKTGGYQNVTF

SEQ ID NO: 476652 - protein, 13 aa, Homo sapiens
  CDR3 for beta chain variable domain of TCR clone 238326 (TRBV2, TRBJ2-7)
CASSVGGSGEQYF

SEQ ID NO: 476653 - protein, 17 aa, Homo sapiens
  CDR3 for alpha chain variable domain of TCR clone 238327 (TRAV3, TRAJ6)
CAVRDGPRAGGSYIPTF

SEQ ID NO: 476654 - protein, 17 aa, Homo sapiens
  CDR3 for beta chain variable domain of TCR clone 238327 (TRBV28, TRBJ2-3)
CASSPTPAGGRVDTQYF

SEQ ID NO: 476655 - protein, 14 aa, Homo sapiens
  CDR3 for alpha chain variable domain of TCR clone 238328 (TRAV23/DV6, TRAJ9)
CASKYWRLPNYLLS

SEQ ID NO: 476656 - protein, 14 aa, Homo sapiens
  CDR3 for beta chain variable domain of TCR clone 238328 (TRBV6-1, TRBJ2-7)
CASTRTGDYYEQYF

SEQ ID NO: 476657 - protein, 15 aa, Homo sapiens
  CDR3 for alpha chain variable domain of TCR clone 238329 (TRAV19, TRAJ35)
CALSEGAGFGNVLHC

SEQ ID NO: 476658 - protein, 14 aa, Homo sapiens
  CDR3 for beta chain variable domain of TCR clone 238329 (TRBV2, TRBJ2-5)
CASTWGRAQETQYF

SEQ ID NO: 476659 - protein, 10 aa, Homo sapiens
  CDR3 for alpha chain variable domain of TCR clone 238330 (TRAV8-2, TRAJ29)
CTGGKTPLVF

SEQ ID NO: 476660 - protein, 13 aa, Homo sapiens
  CDR3 for beta chain variable domain of TCR clone 238330 (TRBV20-1, TRBJ1-1)
CSARGGGNTEAFF

SEQ ID NO: 476661 - protein, 16 aa, Homo sapiens
  CDR3 for alpha chain variable domain of TCR clone 238331 (TRAV12-3, TRAJ53)
CSMSPGSGGSNYKLTF

SEQ ID NO: 476662 - protein, 17 aa, Homo sapiens
  CDR3 for beta chain variable domain of TCR clone 238331 (TRBV28, TRBJ2-5)
CASSTPEGDALQETQYF

SEQ ID NO: 476663 - protein, 15 aa, Homo sapiens
  CDR3 for alpha chain variable domain of TCR clone 238332 (TRAV25, TRAJ52)
CAGRPGGTSYGKLTF

SEQ ID NO: 476664 - protein, 15 aa, Homo sapiens
  CDR3 for beta chain variable domain of TCR clone 238332 (TRBV4-1, TRBJ1-2)
CASSQGQGAAYGYTF

SEQ ID NO: 476665 - protein, 13 aa, Homo sapiens
  CDR3 for alpha chain variable domain of TCR clone 238333 (TRAV2, TRAJ15)
CAVASQAGTALIF

SEQ ID NO: 476666 - protein, 13 aa, Homo sapiens
  CDR3 for beta chain variable domain of TCR clone 238333 (TRBV11-2, TRBJ1-5)
CASSLDRNQPQHF

SEQ ID NO: 476667 - protein, 11 aa, Homo sapiens
  CDR3 for alpha chain variable domain of TCR clone 238334 (TRAV1-2, TRAJ31)
CAVNNNARLMF

SEQ ID NO: 476668 - protein, 15 aa, Homo sapiens
  CDR3 for beta chain variable domain of TCR clone 238334 (TRBV28, TRBJ2-1)
CASSGLAEVDNEQFF

SEQ ID NO: 476669 - protein, 18 aa, Homo sapiens
  CDR3 for alpha chain variable domain of TCR clone 238335 (TRAV9-2, TRAJ52)
CALSRHNAGGTSYGKMTF

SEQ ID NO: 476670 - protein, 16 aa, Homo sapiens
  CDR3 for beta chain variable domain of TCR clone 238335 (TRBV19, TRBJ2-1)
CASSKAGPSSYNEQFF

SEQ ID NO: 476671 - protein, 17 aa, Homo sapiens
  CDR3 for alpha chain variable domain of TCR clone 238336 (TRAV36/DV7, TRAJ52)
CAVAQRAGGTSYGKLTF

SEQ ID NO: 476672 - protein, 15 aa, Homo sapiens
  CDR3 for beta chain variable domain of TCR clone 238336 (TRBV9, TRBJ1-6)
CASSVAGTGDSPLDF

SEQ ID NO: 476673 - protein, 11 aa, Homo sapiens
  CDR3 for alpha chain variable domain of TCR clone 238337 (TRAV4, TRAJ31)
CLVGDNARLMF

SEQ ID NO: 476674 - protein, 13 aa, Homo sapiens
  CDR3 for beta chain variable domain of TCR clone 238337 (TRBV19, TRBJ1-2)
CASSVPGQDGYTS

SEQ ID NO: 476675 - protein, 17 aa, Homo sapiens
  CDR3 for alpha chain variable domain of TCR clone 238338 (TRAV3, TRAJ38)
CAVRDCLNAGNNRKLIW

SEQ ID NO: 476676 - protein, 15 aa, Homo sapiens
  CDR3 for beta chain variable domain of TCR clone 238338 (TRBV2, TRBJ2-1)
CASSEEREGDNEQFF

SEQ ID NO: 476677 - protein, 14 aa, Homo sapiens
  CDR3 for alpha chain variable domain of TCR clone 238339 (TRAV12-1, TRAJ17)
CVVNYKAAGNKLPF

SEQ ID NO: 476678 - protein, 17 aa, Homo sapiens
  CDR3 for beta chain variable domain of TCR clone 238339 (TRBV20-1, TRBJ2-1)
CSASSSGLAGPYNEQFF

SEQ ID NO: 476679 - protein, 14 aa, Homo sapiens
  CDR3 for alpha chain variable domain of TCR clone 238340 (TRAV1-2, TRAJ33)
CAVRAPDSNYQLIR

SEQ ID NO: 476680 - protein, 15 aa, Homo sapiens
  CDR3 for beta chain variable domain of TCR clone 238340 (TRBV10-3, TRBJ2-3)
CAISLTSGGTDTQYF

SEQ ID NO: 476681 - protein, 12 aa, Homo sapiens
  CDR3 for alpha chain variable domain of TCR clone 238341 (TRAV12-2, TRAJ10)
WGVTGGGNKLTF

SEQ ID NO: 476682 - protein, 16 aa, Homo sapiens
  CDR3 for beta chain variable domain of TCR clone 238341 (TRBV7-2, TRBJ1-2)
CASSPTSGTSLGGYTF

SEQ ID NO: 476683 - protein, 15 aa, Homo sapiens
  CDR3 for alpha chain variable domain of TCR clone 238342 (TRAV12-2, TRAJ50)
CAVNGLETSYDKVIF

SEQ ID NO: 476684 - protein, 14 aa, Homo sapiens
  CDR3 for beta chain variable domain of TCR clone 238342 (TRBV7-2, TRBJ2-7)
CASRSQGAAYEQYF

SEQ ID NO: 476685 - protein, 10 aa, Homo sapiens
  CDR3 for alpha chain variable domain of TCR clone 238343 (TRAV30, TRAJ48)
CGIGNEKLTF

SEQ ID NO: 476686 - protein, 14 aa, Homo sapiens
  CDR3 for beta chain variable domain of TCR clone 238343 (TRBV28, TRBJ2-7)
CASSALAEPAEQYF

SEQ ID NO: 476687 - protein, 14 aa, Homo sapiens
  CDR3 for alpha chain variable domain of TCR clone 238344 (TRAV2, TRAJ42)
CAVVGGGSQGNLIF

SEQ ID NO: 476688 - protein, 15 aa, Homo sapiens
  CDR3 for beta chain variable domain of TCR clone 238344 (TRBV11-3, TRBJ2-3)
CASSFRAASPDTQYF

SEQ ID NO: 476689 - protein, 13 aa, Homo sapiens
  CDR3 for alpha chain variable domain of TCR clone 238345 (TRAV13-1, TRAJ39)
CAAPFECRQHAHL

SEQ ID NO: 476690 - protein, 13 aa, Homo sapiens
  CDR3 for beta chain variable domain of TCR clone 238345 (TRBV7-9, TRBJ1-2)
CASSLKQNYGYTF

SEQ ID NO: 476691 - protein, 14 aa, Homo sapiens
  CDR3 for alpha chain variable domain of TCR clone 238346 (TRAV12-2, TRAJ40)
CAVKIPSGTYKYIF

SEQ ID NO: 476692 - protein, 16 aa, Homo sapiens
  CDR3 for beta chain variable domain of TCR clone 238346 (TRBV29-1, TRBJ2-7)
SAALRGEGTTSSTSGR

SEQ ID NO: 476693 - protein, 16 aa, Homo sapiens
  CDR3 for alpha chain variable domain of TCR clone 238347 (TRAV3, TRAJ10)
CAVRDMRAGGGKKLTF

SEQ ID NO: 476694 - protein, 15 aa, Homo sapiens
  CDR3 for beta chain variable domain of TCR clone 238347 (TRBV20-1, TRBJ2-1)
CSASSAGSSYNEQFF

SEQ ID NO: 476695 - protein, 11 aa, Homo sapiens
  CDR3 for alpha chain variable domain of TCR clone 238348 (TRAV12-2, TRAJ49)
CAVSGGNQFYF

SEQ ID NO: 476696 - protein, 15 aa, Homo sapiens
  CDR3 for beta chain variable domain of TCR clone 238348 (TRBV7-8, TRBJ1-5)
CASSLERRGLEPQHF

SEQ ID NO: 476697 - protein, 13 aa, Homo sapiens
  CDR3 for alpha chain variable domain of TCR clone 238349 (TRAV17, TRAJ9)
CATDYTGGFTTIF

SEQ ID NO: 476698 - protein, 14 aa, Homo sapiens
  CDR3 for beta chain variable domain of TCR clone 238349 (TRBV19, TRBJ2-5)
CAGSMTGQQETQYF

SEQ ID NO: 476699 - protein, 16 aa, Homo sapiens
  CDR3 for alpha chain variable domain of TCR clone 238350 (TRAV3, TRAJ10)
CAVRDMRAGGGNKLTF

SEQ ID NO: 476700 - protein, 15 aa, Homo sapiens
  CDR3 for beta chain variable domain of TCR clone 238350 (TRBV3-1, TRBJ2-2)
CASSQDWTRAGELFF

SEQ ID NO: 476701 - protein, 12 aa, Homo sapiens
  CDR3 for alpha chain variable domain of TCR clone 238351 (TRAV8-3, TRAJ26)
CAGDNYGQNFVF

SEQ ID NO: 476702 - protein, 15 aa, Homo sapiens
  CDR3 for beta chain variable domain of TCR clone 238351 (TRBV11-2, TRBJ2-5)
CASSLGTSGLNEQFF

SEQ ID NO: 476703 - protein, 17 aa, Homo sapiens
  CDR3 for alpha chain variable domain of TCR clone 238352 (TRAV12-2, TRAJ52)
CAVNPYAGGTSYGKLTF

SEQ ID NO: 476704 - protein, 13 aa, Homo sapiens
  CDR3 for beta chain variable domain of TCR clone 238352 (TRBV7-9, TRBJ1-2)
CASSLKQNYGYTF

SEQ ID NO: 476705 - protein, 14 aa, Homo sapiens
  CDR3 for alpha chain variable domain of TCR clone 238353 (TRAV12-3, TRAJ6)
CAMSGAGGSYIPTF

SEQ ID NO: 476706 - protein, 16 aa, Homo sapiens
  CDR3 for beta chain variable domain of TCR clone 238353 (TRBV7-3, TRBJ2-2)
CASSLKRGTLSGELFF

SEQ ID NO: 476707 - protein, 15 aa, Homo sapiens
  CDR3 for alpha chain variable domain of TCR clone 238354 (TRAV23/DV6, TRAJ28)
CAALLAYSGAGSYQL

SEQ ID NO: 476708 - protein, 13 aa, Homo sapiens
  CDR3 for beta chain variable domain of TCR clone 238354 (TRBV4-2, TRBJ2-3)
CASSQGNTDTHYF

SEQ ID NO: 476709 - protein, 14 aa, Homo sapiens
  CDR3 for alpha chain variable domain of TCR clone 238355 (TRAV1-2, TRAJ16)
CAVNRFLDVQKLLF

SEQ ID NO: 476710 - protein, 15 aa, Homo sapiens
  CDR3 for beta chain variable domain of TCR clone 238355 (TRBV6-1, TRBJ2-3)
CASSERGGITDTQYF

SEQ ID NO: 476711 - protein, 11 aa, Homo sapiens
  CDR3 for alpha chain variable domain of TCR clone 238356 (TRAV2, TRAJ33)
CAVESNFQLIW

SEQ ID NO: 476712 - protein, 15 aa, Homo sapiens
  CDR3 for beta chain variable domain of TCR clone 238356 (TRBV18, TRBJ2-1)
CASSPPSASYNEQFF

SEQ ID NO: 476713 - protein, 13 aa, Homo sapiens
  CDR3 for alpha chain variable domain of TCR clone 238357 (TRAV12-2, TRAJ10)
CAVPTVGGNKLTF

SEQ ID NO: 476714 - protein, 11 aa, Homo sapiens
  CDR3 for beta chain variable domain of TCR clone 238357 (TRBV6-1, TRBJ2-1)
CASISSNEQFF

SEQ ID NO: 476715 - protein, 12 aa, Homo sapiens
  CDR3 for alpha chain variable domain of TCR clone 238358 (TRAV13-1, TRAJ21)
CAAKEGFNKFYF

SEQ ID NO: 476716 - protein, 20 aa, Homo sapiens
  CDR3 for beta chain variable domain of TCR clone 238358 (TRBV4-1, TRBJ2-2)
CASSQASPPGLASNTGELFF

SEQ ID NO: 476717 - protein, 13 aa, Homo sapiens
  CDR3 for alpha chain variable domain of TCR clone 238359 (TRAV35, TRAJ27)
CAGQEGDAGKSTF

SEQ ID NO: 476718 - protein, 12 aa, Homo sapiens
  CDR3 for beta chain variable domain of TCR clone 238359 (TRBV11-2, TRBJ2-2)
CASSLGGGELFF

SEQ ID NO: 476719 - protein, 15 aa, Homo sapiens
  CDR3 for alpha chain variable domain of TCR clone 238360 (TRAV27, TRAJ38)
CAARRNAGNNRKLMW

SEQ ID NO: 476720 - protein, 13 aa, Homo sapiens
  CDR3 for beta chain variable domain of TCR clone 238360 (TRBV12-5, TRBJ2-3)
CASGDRQADTQYF

SEQ ID NO: 476721 - protein, 12 aa, Homo sapiens
  CDR3 for alpha chain variable domain of TCR clone 238361 (TRAV3, TRAJ20)
CAVRDHDYKLSF

SEQ ID NO: 476722 - protein, 15 aa, Homo sapiens
  CDR3 for beta chain variable domain of TCR clone 238361 (TRBV9, TRBJ1-6)
CASSVDGTGDSPLHF

SEQ ID NO: 476723 - protein, 13 aa, Homo sapiens
  CDR3 for alpha chain variable domain of TCR clone 238362 (TRAV21, TRAJ47)
CAVSGLYGNKLVF

SEQ ID NO: 476724 - protein, 15 aa, Homo sapiens
  CDR3 for beta chain variable domain of TCR clone 238362 (TRBV9, TRBJ1-6)
CASSVAGTGDSPLHF

SEQ ID NO: 476725 - protein, 12 aa, Homo sapiens
  CDR3 for alpha chain variable domain of TCR clone 238363 (TRAV12-2, TRAJ10)
WGVTGGGNKLTF

SEQ ID NO: 476726 - protein, 14 aa, Homo sapiens
  CDR3 for beta chain variable domain of TCR clone 238363 (TRBV11-2, TRBJ2-7)
CASSLGAGAYEQYF

SEQ ID NO: 476727 - protein, 16 aa, Homo sapiens
  CDR3 for alpha chain variable domain of TCR clone 238364 (TRAV30, TRAJ26)
CGTESVGDNYGQNFVF

SEQ ID NO: 476728 - protein, 13 aa, Homo sapiens
  CDR3 for beta chain variable domain of TCR clone 238364 (TRBV19, TRBJ1-2)
GASSISEDYGYTF

SEQ ID NO: 476729 - protein, 15 aa, Homo sapiens
  CDR3 for alpha chain variable domain of TCR clone 238365 (TRAV3, TRAJ30)
CAVRDEYGRDDKIIF

SEQ ID NO: 476730 - protein, 11 aa, Homo sapiens
  CDR3 for beta chain variable domain of TCR clone 238365 (TRBV11-2, TRBJ2-2)
CASSLPGELFF

SEQ ID NO: 476731 - protein, 14 aa, Homo sapiens
  CDR3 for alpha chain variable domain of TCR clone 238366 (TRAV1-2, TRAJ16)
CAVNRFSDGQKLLF

SEQ ID NO: 476732 - protein, 17 aa, Homo sapiens
  CDR3 for beta chain variable domain of TCR clone 238366 (TRBV7-3, TRBJ2-1)
CASSLYPPGVEYNEQFF

SEQ ID NO: 476733 - protein, 17 aa, Homo sapiens
  CDR3 for alpha chain variable domain of TCR clone 238367 (TRAV3, TRAJ6)
CAVRDGPRAGGSYIPTF

SEQ ID NO: 476734 - protein, 14 aa, Homo sapiens
  CDR3 for beta chain variable domain of TCR clone 238367 (TRBV7-2, TRBJ2-7)
CASSPKTSLYEQYF

SEQ ID NO: 476735 - protein, 18 aa, Homo sapiens
  CDR3 for alpha chain variable domain of TCR clone 238368 (TRAV13-1, TRAJ52)
CAASKRSAGGTSYGKLTF

SEQ ID NO: 476736 - protein, 13 aa, Homo sapiens
  CDR3 for beta chain variable domain of TCR clone 238368 (TRBV11-3, TRBJ1-1)
CATEEGLNTEDFF

SEQ ID NO: 476737 - protein, 14 aa, Homo sapiens
  CDR3 for alpha chain variable domain of TCR clone 238369 (TRAV8-4, TRAJ8)
CAVSLNTGFQKLVF

SEQ ID NO: 476738 - protein, 13 aa, Homo sapiens
  CDR3 for beta chain variable domain of TCR clone 238369 (TRBV7-9, TRBJ2-3)
FASSPGSTDTQYF

SEQ ID NO: 476739 - protein, 16 aa, Homo sapiens
  CDR3 for alpha chain variable domain of TCR clone 238370 (TRAV3, TRAJ28)
CAVLPRSVAGSYQLTF

SEQ ID NO: 476740 - protein, 13 aa, Homo sapiens
  CDR3 for beta chain variable domain of TCR clone 238370 (TRBV12-4, TRBJ2-5)
CASRLAVQETQYF

SEQ ID NO: 476741 - protein, 10 aa, Homo sapiens
  CDR3 for alpha chain variable domain of TCR clone 238371 (TRAV12-3, TRAJ49)
CAMNDDQFYF

SEQ ID NO: 476742 - protein, 12 aa, Homo sapiens
  CDR3 for beta chain variable domain of TCR clone 238371 (TRBV12-4, TRBJ2-5)
CASSEGSETQYF

SEQ ID NO: 476743 - protein, 12 aa, Homo sapiens
  CDR3 for alpha chain variable domain of TCR clone 238372 (TRAV16, TRAJ10)
CSRTGGGNKLTF

SEQ ID NO: 476744 - protein, 11 aa, Homo sapiens
  CDR3 for beta chain variable domain of TCR clone 238372 (TRBV5-1, TRBJ1-5)
CASSLGDRDQS

SEQ ID NO: 476745 - protein, 16 aa, Homo sapiens
  CDR3 for alpha chain variable domain of TCR clone 238373 (TRAV3, TRAJ10)
CAVRDMRAGGGNKLTS

SEQ ID NO: 476746 - protein, 13 aa, Homo sapiens
  CDR3 for beta chain variable domain of TCR clone 238373 (TRBV12-4, TRBJ2-7)
CASSPTETYEQYF

SEQ ID NO: 476747 - protein, 14 aa, Homo sapiens
  CDR3 for alpha chain variable domain of TCR clone 238374 (TRAV30, TRAJ26)
CGTEIVSYGQNFVF

SEQ ID NO: 476748 - protein, 14 aa, Homo sapiens
  CDR3 for beta chain variable domain of TCR clone 238374 (TRBV5-5, TRBJ1-4)
CASSPRGYNEKLFF

SEQ ID NO: 476749 - protein, 13 aa, Homo sapiens
  CDR3 for alpha chain variable domain of TCR clone 238375 (TRAV30, TRAJ24)
RGTVTDSWGKLQF

SEQ ID NO: 476750 - protein, 15 aa, Homo sapiens
  CDR3 for beta chain variable domain of TCR clone 238375 (TRBV4-1, TRBJ2-1)
CASSQDPENYNEQFF

SEQ ID NO: 476751 - protein, 14 aa, Homo sapiens
  CDR3 for alpha chain variable domain of TCR clone 238376 (TRAV8-2, TRAJ13)
CVVSDSGGYQKVTL

SEQ ID NO: 476752 - protein, 15 aa, Homo sapiens
  CDR3 for beta chain variable domain of TCR clone 238376 (TRBV7-3, TRBJ2-1)
CASSLDGNSYNEQFF

SEQ ID NO: 476753 - protein, 17 aa, Homo sapiens
  CDR3 for alpha chain variable domain of TCR clone 238377 (TRAV21, TRAJ52)
CAVGANAGGTSYGNLTF

SEQ ID NO: 476754 - protein, 13 aa, Homo sapiens
  CDR3 for beta chain variable domain of TCR clone 238377 (TRBV5-1, TRBJ1-2)
CASSLQGNYGYTF

SEQ ID NO: 476755 - protein, 16 aa, Homo sapiens
  CDR3 for alpha chain variable domain of TCR clone 238378 (TRAV30, TRAJ24)
CGTEIVDADSRGKFQF

SEQ ID NO: 476756 - protein, 14 aa, Homo sapiens
  CDR3 for beta chain variable domain of TCR clone 238378 (TRBV12-5, TRBJ2-5)
CASGSRTHQEAQYF

SEQ ID NO: 476757 - protein, 23 aa, Homo sapiens
  CDR3 for alpha chain variable domain of TCR clone 238379 (TRAV3, TRAJ38)
CAVRACLNAGNNHIQNPDPAVYQ

SEQ ID NO: 476758 - protein, 19 aa, Homo sapiens
  CDR3 for beta chain variable domain of TCR clone 238379 (TRBV7-2, TRBJ2-3)
CSSSFLSRNWGGGTDTQYF

SEQ ID NO: 476759 - protein, 17 aa, Homo sapiens
  CDR3 for alpha chain variable domain of TCR clone 238380 (TRAV12-2, TRAJ48)
CASNAKLTFGTGTRLTI

SEQ ID NO: 476760 - protein, 15 aa, Homo sapiens
  CDR3 for beta chain variable domain of TCR clone 238380 (TRBV5-1, TRBJ2-1)
CASSQAGYWWNEQFF

SEQ ID NO: 476761 - protein, 12 aa, Homo sapiens
  CDR3 for alpha chain variable domain of TCR clone 238381 (TRAV21, TRAJ23)
CAVMLQGGKLIF

SEQ ID NO: 476762 - protein, 14 aa, Homo sapiens
  CDR3 for beta chain variable domain of TCR clone 238381 (TRBV7-9, TRBJ1-4)
CAITEGEANEKLFL

SEQ ID NO: 476763 - protein, 12 aa, Homo sapiens
  CDR3 for alpha chain variable domain of TCR clone 238382 (TRAV8-3, TRAJ41)
CAVGALWYALNF

SEQ ID NO: 476764 - protein, 16 aa, Homo sapiens
  CDR3 for beta chain variable domain of TCR clone 238382 (TRBV7-6, TRBJ2-3)
CASSDSRGEGTDTQYF

SEQ ID NO: 476765 - protein, 11 aa, Homo sapiens
  CDR3 for alpha chain variable domain of TCR clone 238383 (TRAV17, TRAJ9)
CGFTGGFKTIF

SEQ ID NO: 476766 - protein, 12 aa, Homo sapiens
  CDR3 for beta chain variable domain of TCR clone 238383 (TRBV5-5, TRBJ2-5)
CASSYFGETQYF

SEQ ID NO: 476767 - protein, 16 aa, Homo sapiens
  CDR3 for alpha chain variable domain of TCR clone 238384 (TRAV12-2, TRAJ18)
CAVTTDRGSTLGRLYF

SEQ ID NO: 476768 - protein, 16 aa, Homo sapiens
  CDR3 for beta chain variable domain of TCR clone 238384 (TRBV7-3, TRBJ2-2)
CASSLKRGTLSGELFF

SEQ ID NO: 476769 - protein, 16 aa, Homo sapiens
  CDR3 for alpha chain variable domain of TCR clone 238385 (TRAV3, TRAJ37)
CAVRSHGSGNTGKLIF

SEQ ID NO: 476770 - protein, 14 aa, Homo sapiens
  CDR3 for beta chain variable domain of TCR clone 238385 (TRBV25-1, TRBJ1-1)
CASTHLGGNTEAFF

SEQ ID NO: 476771 - protein, 13 aa, Homo sapiens
  CDR3 for alpha chain variable domain of TCR clone 238386 (TRAV36/DV7, TRAJ53)
CALSGGSHYKLTF

SEQ ID NO: 476772 - protein, 13 aa, Homo sapiens
  CDR3 for beta chain variable domain of TCR clone 238386 (TRBV28, TRBJ2-7)
CASSLPSRYEQYF

SEQ ID NO: 476773 - protein, 13 aa, Homo sapiens
  CDR3 for alpha chain variable domain of TCR clone 238387 (TRAV3, TRAJ27)
CAVRPLGAGTSTF

SEQ ID NO: 476774 - protein, 15 aa, Homo sapiens
  CDR3 for beta chain variable domain of TCR clone 238387 (TRBV9, TRBJ1-6)
CASSVAGTGDSPLHF

SEQ ID NO: 476775 - protein, 14 aa, Homo sapiens
  CDR3 for alpha chain variable domain of TCR clone 238388 (TRAV1-2, TRAJ16)
CAVNRFSDGPKLLF

SEQ ID NO: 476776 - protein, 13 aa, Homo sapiens
  CDR3 for beta chain variable domain of TCR clone 238388 (TRBV20-1, TRBJ1-6)
CSAPLRVGSPLHF

SEQ ID NO: 476777 - protein, 14 aa, Homo sapiens
  CDR3 for alpha chain variable domain of TCR clone 238389 (TRAV35, TRAJ50)
CAGHRKTPYAKVIF

SEQ ID NO: 476778 - protein, 15 aa, Homo sapiens
  CDR3 for beta chain variable domain of TCR clone 238389 (TRBV6-3, TRBJ2-7)
CASSSPGTVFYEQYF

SEQ ID NO: 476779 - protein, 11 aa, Homo sapiens
  CDR3 for alpha chain variable domain of TCR clone 238390 (TRAV12-3, TRAJ27)
CAMASAGKATF

SEQ ID NO: 476780 - protein, 13 aa, Homo sapiens
  CDR3 for beta chain variable domain of TCR clone 238390 (TRBV20-1, TRBJ1-1)
CSARVGGNTEAFF

SEQ ID NO: 476781 - protein, 16 aa, Homo sapiens
  CDR3 for alpha chain variable domain of TCR clone 238391 (TRAV3, TRAJ37)
CAVRPHGSGNTGRLIF

SEQ ID NO: 476782 - protein, 16 aa, Homo sapiens
  CDR3 for beta chain variable domain of TCR clone 238391 (TRBV7-9, TRBJ2-3)
CASSPWREVGTDTQYF

SEQ ID NO: 476783 - protein, 14 aa, Homo sapiens
  CDR3 for alpha chain variable domain of TCR clone 238392 (TRAV3, TRAJ9)
CAVRGNTGGFQTIF

SEQ ID NO: 476784 - protein, 14 aa, Homo sapiens
  CDR3 for beta chain variable domain of TCR clone 238392 (TRBV15, TRBJ2-1)
CATSGVEDYNEQFF

SEQ ID NO: 476785 - protein, 13 aa, Homo sapiens
  CDR3 for alpha chain variable domain of TCR clone 238393 (TRAV17, TRAJ26)
CATVDNYGQNFVF

SEQ ID NO: 476786 - protein, 16 aa, Homo sapiens
  CDR3 for beta chain variable domain of TCR clone 238393 (TRBV2, TRBJ2-1)
CASSVGGSQSYNEQFF

SEQ ID NO: 476787 - protein, 11 aa, Homo sapiens
  CDR3 for alpha chain variable domain of TCR clone 238394 (TRAV1-1, TRAJ23)
CAVRKGGKLIF

SEQ ID NO: 476788 - protein, 20 aa, Homo sapiens
  CDR3 for beta chain variable domain of TCR clone 238394 (TRBV11-2, TRBJ1-6)
CASSLVFATGGSVHPSTLGT

SEQ ID NO: 476789 - protein, 16 aa, Homo sapiens
  CDR3 for alpha chain variable domain of TCR clone 238395 (TRAV3, TRAJ37)
CAVRGKGSGNTGKLIF

SEQ ID NO: 476790 - protein, 13 aa, Homo sapiens
  CDR3 for beta chain variable domain of TCR clone 238395 (TRBV7-3, TRBJ1-1)
CASSQEWGAEAFF

SEQ ID NO: 476791 - protein, 13 aa, Homo sapiens
  CDR3 for alpha chain variable domain of TCR clone 238396 (TRAV12-3, TRAJ13)
CAMSSGGYQKVTF

SEQ ID NO: 476792 - protein, 14 aa, Homo sapiens
  CDR3 for beta chain variable domain of TCR clone 238396 (TRBV7-3, TRBJ2-1)
CASSLSGSYNEQFF

SEQ ID NO: 476793 - protein, 13 aa, Homo sapiens
  CDR3 for alpha chain variable domain of TCR clone 238397 (TRAV25, TRAJ40)
CAGSASGTYKYIF

SEQ ID NO: 476794 - protein, 14 aa, Homo sapiens
  CDR3 for beta chain variable domain of TCR clone 238397 (TRBV7-2, TRBJ2-7)
CASRSQGAAYEQYF

SEQ ID NO: 476795 - protein, 15 aa, Homo sapiens
  CDR3 for alpha chain variable domain of TCR clone 238398 (TRAV8-1, TRAJ6)
CAVNTPPGGGHIPTF

SEQ ID NO: 476796 - protein, 14 aa, Homo sapiens
  CDR3 for beta chain variable domain of TCR clone 238398 (TRBV11-2, TRBJ2-7)
CASSLGAGAYEQYF

SEQ ID NO: 476797 - protein, 10 aa, Homo sapiens
  CDR3 for alpha chain variable domain of TCR clone 238399 (TRAV2, TRAJ10)
CAVEDQRSRE

SEQ ID NO: 476798 - protein, 16 aa, Homo sapiens
  CDR3 for beta chain variable domain of TCR clone 238399 (TRBV18, TRBJ1-5)
CASSPSTGNSNQPQHF

SEQ ID NO: 476799 - protein, 14 aa, Homo sapiens
  CDR3 for alpha chain variable domain of TCR clone 238400 (TRAV1-2, TRAJ8)
CAVREDTGFHKLVF

SEQ ID NO: 476800 - protein, 14 aa, Homo sapiens
  CDR3 for beta chain variable domain of TCR clone 238400 (TRBV11-2, TRBJ2-3)
CASSRLARTDTQYF

SEQ ID NO: 476801 - protein, 12 aa, Homo sapiens
  CDR3 for alpha chain variable domain of TCR clone 238401 (TRAV17, TRAJ5)
CAILTGRRALTF

SEQ ID NO: 476802 - protein, 15 aa, Homo sapiens
  CDR3 for beta chain variable domain of TCR clone 238401 (TRBV7-9, TRBJ1-6)
CASSSPGRGNSPLHF

SEQ ID NO: 476803 - protein, 13 aa, Homo sapiens
  CDR3 for alpha chain variable domain of TCR clone 238402 (TRAV2, TRAJ15)
CAVASQAGTALIF

SEQ ID NO: 476804 - protein, 15 aa, Homo sapiens
  CDR3 for beta chain variable domain of TCR clone 238402 (TRBV7-2, TRBJ2-2)
CASRRPGQNTGELFF

SEQ ID NO: 476805 - protein, 14 aa, Homo sapiens
  CDR3 for alpha chain variable domain of TCR clone 238403 (TRAV13-1, TRAJ9)
CAASALTGGFKTIF

SEQ ID NO: 476806 - protein, 14 aa, Homo sapiens
  CDR3 for beta chain variable domain of TCR clone 238403 (TRBV28, TRBJ2-7)
CASRAAGLGYEQYF

SEQ ID NO: 476807 - protein, 14 aa, Homo sapiens
  CDR3 for alpha chain variable domain of TCR clone 238404 (TRAV16, TRAJ15)
CALSCNQAGTALIF

SEQ ID NO: 476808 - protein, 16 aa, Homo sapiens
  CDR3 for beta chain variable domain of TCR clone 238404 (TRBV9, TRBJ2-7)
CASSAGPDRSPYEQYF

SEQ ID NO: 476809 - protein, 17 aa, Homo sapiens
  CDR3 for alpha chain variable domain of TCR clone 238405 (TRAV26-1, TRAJ38)
CIADNAGNNHIQKPDTA

SEQ ID NO: 476810 - protein, 13 aa, Homo sapiens
  CDR3 for beta chain variable domain of TCR clone 238405 (TRBV20-1, TRBJ1-1)
CSARGGGNTEAFF

SEQ ID NO: 476811 - protein, 18 aa, Homo sapiens
  CDR3 for alpha chain variable domain of TCR clone 238406 (TRAV1-2, TRAJ18)
CAVRDMGDRGSTLGRLYF

SEQ ID NO: 476812 - protein, 16 aa, Homo sapiens
  CDR3 for beta chain variable domain of TCR clone 238406 (TRBV29-1, TRBJ1-2)
CSGEANRDIANYGYTF

SEQ ID NO: 476813 - protein, 15 aa, Homo sapiens
  CDR3 for alpha chain variable domain of TCR clone 238407 (TRAV21, TRAJ45)
CAVSYSGGGADGLTF

SEQ ID NO: 476814 - protein, 13 aa, Homo sapiens
  CDR3 for beta chain variable domain of TCR clone 238407 (TRBV20-1, TRBJ2-5)
CSAATELQETKYF

SEQ ID NO: 476815 - protein, 13 aa, Homo sapiens
  CDR3 for alpha chain variable domain of TCR clone 238408 (TRAV12-2, TRAJ9)
CAVLETGGFKTIF

SEQ ID NO: 476816 - protein, 14 aa, Homo sapiens
  CDR3 for beta chain variable domain of TCR clone 238408 (TRBV6-1, TRBJ1-3)
CASVQGGGGNTMYF

SEQ ID NO: 476817 - protein, 14 aa, Homo sapiens
  CDR3 for alpha chain variable domain of TCR clone 238409 (TRAV13-1, TRAJ9)
CAASALTGGFKPIF

SEQ ID NO: 476818 - protein, 16 aa, Homo sapiens
  CDR3 for beta chain variable domain of TCR clone 238409 (TRBV7-8, TRBJ2-4)
CASSAERTLAKNIQYF

SEQ ID NO: 476819 - protein, 15 aa, Homo sapiens
  CDR3 for alpha chain variable domain of TCR clone 238410 (TRAV13-1, TRAJ10)
CAATILTGGGNKLTF

SEQ ID NO: 476820 - protein, 16 aa, Homo sapiens
  CDR3 for beta chain variable domain of TCR clone 238410 (TRBV7-3, TRBJ2-1)
CASSLEGYRSYNEQFF

SEQ ID NO: 476821 - protein, 14 aa, Homo sapiens
  CDR3 for alpha chain variable domain of TCR clone 238411 (TRAV17, TRAJ6)
CAANPAGGSYIPTF

SEQ ID NO: 476822 - protein, 15 aa, Homo sapiens
  CDR3 for beta chain variable domain of TCR clone 238411 (TRBV20-1, TRBJ2-7)
CSARDRASGMDEQYF

SEQ ID NO: 476823 - protein, 13 aa, Homo sapiens
  CDR3 for alpha chain variable domain of TCR clone 238412 (TRAV13-2, TRAJ13)
CAERPGGYQKVTF

SEQ ID NO: 476824 - protein, 15 aa, Homo sapiens
  CDR3 for beta chain variable domain of TCR clone 238412 (TRBV11-3, TRBJ1-3)
CASSLRGTSGNTIYF

SEQ ID NO: 476825 - protein, 16 aa, Homo sapiens
  CDR3 for alpha chain variable domain of TCR clone 238413 (TRAV26-1, TRAJ53)
CIVRVAMGGSNYKLTF

SEQ ID NO: 476826 - protein, 16 aa, Homo sapiens
  CDR3 for beta chain variable domain of TCR clone 238413 (TRBV28, TRBJ2-7)
CASSLFCETGGPEQYF

SEQ ID NO: 476827 - protein, 13 aa, Homo sapiens
  CDR3 for alpha chain variable domain of TCR clone 238414 (TRAV12-2, TRAJ9)
CAVKWAGGFKTIF

SEQ ID NO: 476828 - protein, 12 aa, Homo sapiens
  CDR3 for beta chain variable domain of TCR clone 238414 (TRBV7-8, TRBJ2-7)
CASSLGHREQYF

SEQ ID NO: 476829 - protein, 11 aa, Homo sapiens
  CDR3 for alpha chain variable domain of TCR clone 238415 (TRAV3, TRAJ21)
CSVGYFNKFYF

SEQ ID NO: 476830 - protein, 16 aa, Homo sapiens
  CDR3 for beta chain variable domain of TCR clone 238415 (TRBV19, TRBJ2-1)
CASSKAGPSSYNEQFF

SEQ ID NO: 476831 - protein, 12 aa, Homo sapiens
  CDR3 for alpha chain variable domain of TCR clone 238416 (TRAV12-2, TRAJ43)
CAVNVNNNDMRF

SEQ ID NO: 476832 - protein, 13 aa, Homo sapiens
  CDR3 for beta chain variable domain of TCR clone 238416 (TRBV10-3, TRBJ2-7)
CASKLAVNYEQYF

SEQ ID NO: 476833 - protein, 13 aa, Homo sapiens
  CDR3 for alpha chain variable domain of TCR clone 238417 (TRAV12-3, TRAJ43)
CAMIRTNNNDMRF

SEQ ID NO: 476834 - protein, 12 aa, Homo sapiens
  CDR3 for beta chain variable domain of TCR clone 238417 (TRBV11-2, TRBJ2-5)
CASSLGQETQYF

SEQ ID NO: 476835 - protein, 15 aa, Homo sapiens
  CDR3 for alpha chain variable domain of TCR clone 238418 (TRAV8-2, TRAJ16)
CVVSDGVSAGQKLLF

SEQ ID NO: 476836 - protein, 14 aa, Homo sapiens
  CDR3 for beta chain variable domain of TCR clone 238418 (TRBV7-3, TRBJ1-1)
CASSLGTGYTEAFF

SEQ ID NO: 476837 - protein, 12 aa, Homo sapiens
  CDR3 for alpha chain variable domain of TCR clone 238419 (TRAV9-2, TRAJ26)
CALRGYGQNFVF

SEQ ID NO: 476838 - protein, 14 aa, Homo sapiens
  CDR3 for beta chain variable domain of TCR clone 238419 (TRBV7-2, TRBJ2-7)
CASSPKTSFYEQYF

SEQ ID NO: 476839 - protein, 14 aa, Homo sapiens
  CDR3 for alpha chain variable domain of TCR clone 238420 (TRAV12-1, TRAJ27)
CGEHIRTNAGKSTF

SEQ ID NO: 476840 - protein, 15 aa, Homo sapiens
  CDR3 for beta chain variable domain of TCR clone 238420 (TRBV19, TRBJ1-1)
CASTSGQIQNTEAFF

SEQ ID NO: 476841 - protein, 10 aa, Homo sapiens
  CDR3 for alpha chain variable domain of TCR clone 238421 (TRAV1-2, TRAJ20)
CALNDYKLSF

SEQ ID NO: 476842 - protein, 14 aa, Homo sapiens
  CDR3 for beta chain variable domain of TCR clone 238421 (TRBV15, TRBJ1-5)
CATSREQSDQPQHF

SEQ ID NO: 476843 - protein, 13 aa, Homo sapiens
  CDR3 for alpha chain variable domain of TCR clone 238422 (TRAV12-2, TRAJ52)
CAVSGTTYGKLTF

SEQ ID NO: 476844 - protein, 17 aa, Homo sapiens
  CDR3 for beta chain variable domain of TCR clone 238422 (TRBV11-2, TRBJ2-1)
CASSLYPPGVEYNEQFF

SEQ ID NO: 476845 - protein, 11 aa, Homo sapiens
  CDR3 for alpha chain variable domain of TCR clone 238423 (TRAV1-2, TRAJ31)
CAVNNNARLMF

SEQ ID NO: 476846 - protein, 15 aa, Homo sapiens
  CDR3 for beta chain variable domain of TCR clone 238423 (TRBV7-8, TRBJ2-7)
CASSLERAGSYEQYF

SEQ ID NO: 476847 - protein, 14 aa, Homo sapiens
  CDR3 for alpha chain variable domain of TCR clone 238424 (TRAV2, TRAJ37)
CAVDFTSNTGKLIF

SEQ ID NO: 476848 - protein, 14 aa, Homo sapiens
  CDR3 for beta chain variable domain of TCR clone 238424 (TRBV7-9, TRBJ2-5)
CASSLVGGEETQYF

SEQ ID NO: 476849 - protein, 14 aa, Homo sapiens
  CDR3 for alpha chain variable domain of TCR clone 238425 (TRAV1-2, TRAJ16)
CAVNRFSDGQKLLF

SEQ ID NO: 476850 - protein, 15 aa, Homo sapiens
  CDR3 for beta chain variable domain of TCR clone 238425 (TRBV20-1, TRBJ2-7)
CSSRDRVSGMDEQYF

SEQ ID NO: 476851 - protein, 14 aa, Homo sapiens
  CDR3 for alpha chain variable domain of TCR clone 238426 (TRAV17, TRAJ35)
CATWTIGFGNVLPC

SEQ ID NO: 476852 - protein, 15 aa, Homo sapiens
  CDR3 for beta chain variable domain of TCR clone 238426 (TRBV7-2, TRBJ2-5)
CASSPLGLDKETQYF

SEQ ID NO: 476853 - protein, 14 aa, Homo sapiens
  CDR3 for alpha chain variable domain of TCR clone 238427 (TRAV1-2, TRAJ16)
CAVNRFSDGRKLLF

SEQ ID NO: 476854 - protein, 17 aa, Homo sapiens
  CDR3 for beta chain variable domain of TCR clone 238427 (TRBV28, TRBJ2-5)
CASSTPEGDALQETQYF

SEQ ID NO: 476855 - protein, 11 aa, Homo sapiens
  CDR3 for alpha chain variable domain of TCR clone 238428 (TRAV3, TRAJ21)
CAVGNFNKFYF

SEQ ID NO: 476856 - protein, 14 aa, Homo sapiens
  CDR3 for beta chain variable domain of TCR clone 238428 (TRBV18, TRBJ2-5)
CASSPGVSQENQYF

SEQ ID NO: 476857 - protein, 10 aa, Homo sapiens
  CDR3 for alpha chain variable domain of TCR clone 238429 (TRAV1-2, TRAJ31)
GAFFDARLMF

SEQ ID NO: 476858 - protein, 15 aa, Homo sapiens
  CDR3 for beta chain variable domain of TCR clone 238429 (TRBV4-1, TRBJ1-4)
CASSDTGGTNEKLFF

SEQ ID NO: 476859 - protein, 14 aa, Homo sapiens
  CDR3 for alpha chain variable domain of TCR clone 238430 (TRAV8-4, TRAJ45)
CASGGGGGADGLTF

SEQ ID NO: 476860 - protein, 13 aa, Homo sapiens
  CDR3 for beta chain variable domain of TCR clone 238430 (TRBV7-2, TRBJ2-3)
CASSPDPQMTQYF

SEQ ID NO: 476861 - protein, 10 aa, Homo sapiens
  CDR3 for alpha chain variable domain of TCR clone 238431 (TRAV12-1, TRAJ37)
ARGNTGKLIF

SEQ ID NO: 476862 - protein, 15 aa, Homo sapiens
  CDR3 for beta chain variable domain of TCR clone 238431 (TRBV6-6, TRBJ2-1)
CATRQGVSSYNEQFF

SEQ ID NO: 476863 - protein, 10 aa, Homo sapiens
  CDR3 for alpha chain variable domain of TCR clone 238432 (TRAV1-2, TRAJ20)
CACNDYKLSF

SEQ ID NO: 476864 - protein, 14 aa, Homo sapiens
  CDR3 for beta chain variable domain of TCR clone 238432 (TRBV15, TRBJ2-1)
CATNHGGRHNEQFF

SEQ ID NO: 476865 - protein, 13 aa, Homo sapiens
  CDR3 for alpha chain variable domain of TCR clone 238433 (TRAV8-2, TRAJ15)
CVVSGPGRNCSDL

SEQ ID NO: 476866 - protein, 15 aa, Homo sapiens
  CDR3 for beta chain variable domain of TCR clone 238433 (TRBV9, TRBJ1-6)
CASSVSGTGDSPLHF

SEQ ID NO: 476867 - protein, 14 aa, Homo sapiens
  CDR3 for alpha chain variable domain of TCR clone 238434 (TRAV1-2, TRAJ16)
CAVNWFSDGQKLLF

SEQ ID NO: 476868 - protein, 13 aa, Homo sapiens
  CDR3 for beta chain variable domain of TCR clone 238434 (TRBV20-1, TRBJ1-1)
CSARGGGNTEAFF

SEQ ID NO: 476869 - protein, 15 aa, Homo sapiens
  CDR3 for alpha chain variable domain of TCR clone 238435 (TRAV12-1, TRAJ9)
CVVSFGDTGGFKTIF

SEQ ID NO: 476870 - protein, 14 aa, Homo sapiens
  CDR3 for beta chain variable domain of TCR clone 238435 (TRBV7-3, TRBJ2-2)
CASSSGGYTGELFF

SEQ ID NO: 476871 - protein, 14 aa, Homo sapiens
  CDR3 for alpha chain variable domain of TCR clone 238436 (TRAV16, TRAJ33)
CALSAMDSNYQLIW

SEQ ID NO: 476872 - protein, 13 aa, Homo sapiens
  CDR3 for beta chain variable domain of TCR clone 238436 (TRBV7-3, TRBJ2-1)
CASSPVAYNEQFF

SEQ ID NO: 476873 - protein, 14 aa, Homo sapiens
  CDR3 for alpha chain variable domain of TCR clone 238437 (TRAV1-2, TRAJ8)
CAVREGTGFQKLVF

SEQ ID NO: 476874 - protein, 15 aa, Homo sapiens
  CDR3 for beta chain variable domain of TCR clone 238437 (TRBV7-2, TRBJ2-1)
CASSPLAGEYNEQFF

SEQ ID NO: 476875 - protein, 15 aa, Homo sapiens
  CDR3 for alpha chain variable domain of TCR clone 238438 (TRAV8-3, TRAJ6)
CAVGEDRGGSYIPTF

SEQ ID NO: 476876 - protein, 14 aa, Homo sapiens
  CDR3 for beta chain variable domain of TCR clone 238438 (TRBV28, TRBJ1-2)
CASRIQGANYGYTF

SEQ ID NO: 476877 - protein, 22 aa, Homo sapiens
  CDR3 for alpha chain variable domain of TCR clone 238439 (TRAV8-2, TRAJ45)
HLTKPSAHMSDAAEYSADGLTF

SEQ ID NO: 476878 - protein, 13 aa, Homo sapiens
  CDR3 for beta chain variable domain of TCR clone 238439 (TRBV7-3, TRBJ2-1)
CASSHVAYNEQFF

SEQ ID NO: 476879 - protein, 16 aa, Homo sapiens
  CDR3 for alpha chain variable domain of TCR clone 238440 (TRAV3, TRAJ37)
CAVRGKGSGNTGKLIC

SEQ ID NO: 476880 - protein, 12 aa, Homo sapiens
  CDR3 for beta chain variable domain of TCR clone 238440 (TRBV11-2, TRBJ2-2)
CASSLGGGELFF

SEQ ID NO: 476881 - protein, 14 aa, Homo sapiens
  CDR3 for alpha chain variable domain of TCR clone 238441 (TRAV4, TRAJ10)
CLVGGTGGGNKLIF

SEQ ID NO: 476882 - protein, 13 aa, Homo sapiens
  CDR3 for beta chain variable domain of TCR clone 238441 (TRBV10-2, TRBJ2-5)
CASSVGPQETQYF

SEQ ID NO: 476883 - protein, 14 aa, Homo sapiens
  CDR3 for alpha chain variable domain of TCR clone 238442 (TRAV2, TRAJ9)
CAVEDRSGGFKTIF

SEQ ID NO: 476884 - protein, 15 aa, Homo sapiens
  CDR3 for beta chain variable domain of TCR clone 238442 (TRBV6-3, TRBJ2-1)
CASIPGYFSYNEQFF

SEQ ID NO: 476885 - protein, 12 aa, Homo sapiens
  CDR3 for alpha chain variable domain of TCR clone 238443 (TRAV3, TRAJ43)
CTVRDPNNDMRF

SEQ ID NO: 476886 - protein, 15 aa, Homo sapiens
  CDR3 for beta chain variable domain of TCR clone 238443 (TRBV6-5, TRBJ2-1)
CASSYDAGAGNEQFF

SEQ ID NO: 476887 - protein, 16 aa, Homo sapiens
  CDR3 for alpha chain variable domain of TCR clone 238444 (TRAV19, TRAJ20)
CALSGWRVPNAYKLSF

SEQ ID NO: 476888 - protein, 14 aa, Homo sapiens
  CDR3 for beta chain variable domain of TCR clone 238444 (TRBV6-3, TRBJ1-1)
CASSYGGQHTEAFF

SEQ ID NO: 476889 - protein, 15 aa, Homo sapiens
  CDR3 for alpha chain variable domain of TCR clone 238445 (TRAV25, TRAJ53)
CAATGGGGSNYKPTF

SEQ ID NO: 476890 - protein, 19 aa, Homo sapiens
  CDR3 for beta chain variable domain of TCR clone 238445 (TRBV7-2, TRBJ2-3)
CTSSFLSRNWGGGTDTQYF

SEQ ID NO: 476891 - protein, 14 aa, Homo sapiens
  CDR3 for alpha chain variable domain of TCR clone 238446 (TRAV9-2, TRAJ39)
CALYIYNACNMLTF

SEQ ID NO: 476892 - protein, 13 aa, Homo sapiens
  CDR3 for beta chain variable domain of TCR clone 238446 (TRBV7-2, TRBJ2-2)
CASSLAVTGELFF

SEQ ID NO: 476893 - protein, 14 aa, Homo sapiens
  CDR3 for alpha chain variable domain of TCR clone 238447 (TRAV13-2, TRAJ17)
CAENSKAAGNKLTF

SEQ ID NO: 476894 - protein, 14 aa, Homo sapiens
  CDR3 for beta chain variable domain of TCR clone 238447 (TRBV19, TRBJ2-1)
CASPTFVLSCEQFF

SEQ ID NO: 476895 - protein, 16 aa, Homo sapiens
  CDR3 for alpha chain variable domain of TCR clone 238448 (TRAV38-2/DV8, TRAJ47)
CAYRSAIMEYGNKLVF

SEQ ID NO: 476896 - protein, 16 aa, Homo sapiens
  CDR3 for beta chain variable domain of TCR clone 238448 (TRBV18, TRBJ1-5)
CASSPSTGNSNQPQHF

SEQ ID NO: 476897 - protein, 13 aa, Homo sapiens
  CDR3 for alpha chain variable domain of TCR clone 238449 (TRAV25, TRAJ40)
RAGSASGTYKYIF

SEQ ID NO: 476898 - protein, 14 aa, Homo sapiens
  CDR3 for beta chain variable domain of TCR clone 238449 (TRBV7-2, TRBJ2-7)
CASRSQGAAYEQYF

SEQ ID NO: 476899 - protein, 11 aa, Homo sapiens
  CDR3 for alpha chain variable domain of TCR clone 238450 (TRAV1-2, TRAJ31)
CAVNNNARLMF

SEQ ID NO: 476900 - protein, 14 aa, Homo sapiens
  CDR3 for beta chain variable domain of TCR clone 238450 (TRBV5-5, TRBJ1-2)
CASSLDPYNYGYTF

SEQ ID NO: 476901 - protein, 12 aa, Homo sapiens
  CDR3 for alpha chain variable domain of TCR clone 238451 (TRAV23/DV6, TRAJ30)
FAASKGDDKIIF

SEQ ID NO: 476902 - protein, 13 aa, Homo sapiens
  CDR3 for beta chain variable domain of TCR clone 238451 (TRBV19, TRBJ1-2)
CASSVPGQDGYTF

SEQ ID NO: 476903 - protein, 14 aa, Homo sapiens
  CDR3 for alpha chain variable domain of TCR clone 238452 (TRAV1-2, TRAJ8)
CAVREDTGFQKLVF

SEQ ID NO: 476904 - protein, 16 aa, Homo sapiens
  CDR3 for beta chain variable domain of TCR clone 238452 (TRBV28, TRBJ2-7)
CASSPWVATGDLSQYF

SEQ ID NO: 476905 - protein, 18 aa, Homo sapiens
  CDR3 for alpha chain variable domain of TCR clone 238453 (TRAV12-3, TRAJ52)
CAMSVGGARGTSYGKLTF

SEQ ID NO: 476906 - protein, 15 aa, Homo sapiens
  CDR3 for beta chain variable domain of TCR clone 238453 (TRBV27, TRBJ1-6)
CASSFDRGLGSPLHF

SEQ ID NO: 476907 - protein, 13 aa, Homo sapiens
  CDR3 for alpha chain variable domain of TCR clone 238454 (TRAV8-3, TRAJ36)
CAVGATGANNLFF

SEQ ID NO: 476908 - protein, 15 aa, Homo sapiens
  CDR3 for beta chain variable domain of TCR clone 238454 (TRBV7-2, TRBJ2-1)
CASSSGLAGGNEQFF

SEQ ID NO: 476909 - protein, 10 aa, Homo sapiens
  CDR3 for alpha chain variable domain of TCR clone 238455 (TRAV13-1, TRAJ7)
LIGGKNRLAF

SEQ ID NO: 476910 - protein, 15 aa, Homo sapiens
  CDR3 for beta chain variable domain of TCR clone 238455 (TRBV7-9, TRBJ1-1)
CASSLLEQGGTEAFF

SEQ ID NO: 476911 - protein, 11 aa, Homo sapiens
  CDR3 for alpha chain variable domain of TCR clone 238456 (TRAV13-1, TRAJ15)
CAANPGTALIF

SEQ ID NO: 476912 - protein, 15 aa, Homo sapiens
  CDR3 for beta chain variable domain of TCR clone 238456 (TRBV28, TRBJ2-5)
CASSPPWSYQETQYF

SEQ ID NO: 476913 - protein, 11 aa, Homo sapiens
  CDR3 for alpha chain variable domain of TCR clone 238457 (TRAV13-1, TRAJ30)
RAASRDDKIIF

SEQ ID NO: 476914 - protein, 15 aa, Homo sapiens
  CDR3 for beta chain variable domain of TCR clone 238457 (TRBV18, TRBJ1-1)
CASSPSSWVNTEAFF

SEQ ID NO: 476915 - protein, 17 aa, Homo sapiens
  CDR3 for alpha chain variable domain of TCR clone 238458 (TRAV8-6, TRAJ52)
CAVTRNAGGTSYGKLTF

SEQ ID NO: 476916 - protein, 17 aa, Homo sapiens
  CDR3 for beta chain variable domain of TCR clone 238458 (TRBV4-2, TRBJ1-1)
CASTQFGGGSGNTEAFF

SEQ ID NO: 476917 - protein, 12 aa, Homo sapiens
  CDR3 for alpha chain variable domain of TCR clone 238459 (TRAV12-3, TRAJ17)
CAMTLTGNKPTF

SEQ ID NO: 476918 - protein, 16 aa, Homo sapiens
  CDR3 for beta chain variable domain of TCR clone 238459 (TRBV11-2, TRBJ1-2)
CASSLDTGGADYGYTF

SEQ ID NO: 476919 - protein, 12 aa, Homo sapiens
  CDR3 for alpha chain variable domain of TCR clone 238460 (TRAV16, TRAJ10)
CSRTGGGNKLTF

SEQ ID NO: 476920 - protein, 13 aa, Homo sapiens
  CDR3 for beta chain variable domain of TCR clone 238460 (TRBV7-3, TRBJ1-1)
FASSQDWGAEAFF

SEQ ID NO: 476921 - protein, 12 aa, Homo sapiens
  CDR3 for alpha chain variable domain of TCR clone 238461 (TRAV12-3, TRAJ41)
CAMSYSGYALNF

SEQ ID NO: 476922 - protein, 13 aa, Homo sapiens
  CDR3 for beta chain variable domain of TCR clone 238461 (TRBV18, TRBJ1-1)
CASSGGRNTEAFF

SEQ ID NO: 476923 - protein, 16 aa, Homo sapiens
  CDR3 for alpha chain variable domain of TCR clone 238462 (TRAV12-2, TRAJ32)
CAVNLGQGGATNKLIF

SEQ ID NO: 476924 - protein, 12 aa, Homo sapiens
  CDR3 for beta chain variable domain of TCR clone 238462 (TRBV29-1, TRBJ2-3)
CSVTGGADKQYF

SEQ ID NO: 476925 - protein, 15 aa, Homo sapiens
  CDR3 for alpha chain variable domain of TCR clone 238463 (TRAV3, TRAJ9)
CAVRYSNTGGFKTIF

SEQ ID NO: 476926 - protein, 16 aa, Homo sapiens
  CDR3 for beta chain variable domain of TCR clone 238463 (TRBV15, TRBJ2-5)
CATSPTTGQGMETQYF

SEQ ID NO: 476927 - protein, 16 aa, Homo sapiens
  CDR3 for alpha chain variable domain of TCR clone 238464 (TRAV27, TRAJ13)
CAGAKSDSGGYQKVTF

SEQ ID NO: 476928 - protein, 16 aa, Homo sapiens
  CDR3 for beta chain variable domain of TCR clone 238464 (TRBV2, TRBJ2-1)
CASIVGGSLSYNEQFF

SEQ ID NO: 476929 - protein, 14 aa, Homo sapiens
  CDR3 for alpha chain variable domain of TCR clone 238465 (TRAV1-1, TRAJ9)
CAVRGGNGGFKTIF

SEQ ID NO: 476930 - protein, 16 aa, Homo sapiens
  CDR3 for beta chain variable domain of TCR clone 238465 (TRBV4-3, TRBJ2-1)
CASSPALDRGVNEQFF

SEQ ID NO: 476931 - protein, 12 aa, Homo sapiens
  CDR3 for alpha chain variable domain of TCR clone 238466 (TRAV12-3, TRAJ17)
CAMTLTGNKLTF

SEQ ID NO: 476932 - protein, 17 aa, Homo sapiens
  CDR3 for beta chain variable domain of TCR clone 238466 (TRBV7-3, TRBJ2-3)
CASSLMKRMWGADTQYF

SEQ ID NO: 476933 - protein, 14 aa, Homo sapiens
  CDR3 for alpha chain variable domain of TCR clone 238467 (TRAV13-2, TRAJ11)
CAETGNSGYSTITF

SEQ ID NO: 476934 - protein, 11 aa, Homo sapiens
  CDR3 for beta chain variable domain of TCR clone 238467 (TRBV10-3, TRBJ2-7)
CAISEGLERYF

SEQ ID NO: 476935 - protein, 12 aa, Homo sapiens
  CDR3 for alpha chain variable domain of TCR clone 238468 (TRAV13-1, TRAJ21)
CAAKEGFNKFYF

SEQ ID NO: 476936 - protein, 13 aa, Homo sapiens
  CDR3 for beta chain variable domain of TCR clone 238468 (TRBV7-2, TRBJ2-5)
CASSQTSVETQYF

SEQ ID NO: 476937 - protein, 16 aa, Homo sapiens
  CDR3 for alpha chain variable domain of TCR clone 238469 (TRAV1-2, TRAJ10)
CAGRGGLTGGGNKLTF

SEQ ID NO: 476938 - protein, 12 aa, Homo sapiens
  CDR3 for beta chain variable domain of TCR clone 238469 (TRBV7-8, TRBJ2-7)
CASSLGDREQYF

SEQ ID NO: 476939 - protein, 13 aa, Homo sapiens
  CDR3 for alpha chain variable domain of TCR clone 238470 (TRAV8-3, TRAJ36)
CAVGATGANNVFF

SEQ ID NO: 476940 - protein, 15 aa, Homo sapiens
  CDR3 for beta chain variable domain of TCR clone 238470 (TRBV5-1, TRBJ2-3)
CASSVTSGSTDTQYF

SEQ ID NO: 476941 - protein, 14 aa, Homo sapiens
  CDR3 for alpha chain variable domain of TCR clone 238471 (TRAV29/DV5, TRAJ45)
CASSFRGGADGLTF

SEQ ID NO: 476942 - protein, 11 aa, Homo sapiens
  CDR3 for beta chain variable domain of TCR clone 238471 (TRBV11-2, TRBJ2-2)
CASSLPGELFF

SEQ ID NO: 476943 - protein, 15 aa, Homo sapiens
  CDR3 for alpha chain variable domain of TCR clone 238472 (TRAV16, TRAJ17)
CALSGNKAAGNKLTF

SEQ ID NO: 476944 - protein, 16 aa, Homo sapiens
  CDR3 for beta chain variable domain of TCR clone 238472 (TRBV7-6, TRBJ1-6)
CASNSLPAGEYSPLHF

SEQ ID NO: 476945 - protein, 16 aa, Homo sapiens
  CDR3 for alpha chain variable domain of TCR clone 238473 (TRAV3, TRAJ37)
CAVRGKGSGNTGKLIF

SEQ ID NO: 476946 - protein, 13 aa, Homo sapiens
  CDR3 for beta chain variable domain of TCR clone 238473 (TRBV3-1, TRBJ1-5)
CAITRRDGQPQHF

SEQ ID NO: 476947 - protein, 14 aa, Homo sapiens
  CDR3 for alpha chain variable domain of TCR clone 238474 (TRAV17, TRAJ39)
CAPDPVRAGNMLTF

SEQ ID NO: 476948 - protein, 15 aa, Homo sapiens
  CDR3 for beta chain variable domain of TCR clone 238474 (TRBV13, TRBJ1-5)
CASSFGQGGVQPQHF

SEQ ID NO: 476949 - protein, 14 aa, Homo sapiens
  CDR3 for alpha chain variable domain of TCR clone 238475 (TRAV25, TRAJ27)
CAGEHLTNAGKSTF

SEQ ID NO: 476950 - protein, 15 aa, Homo sapiens
  CDR3 for beta chain variable domain of TCR clone 238475 (TRBV5-1, TRBJ2-1)
CASSPPRAPYNEQFF

SEQ ID NO: 476951 - protein, 15 aa, Homo sapiens
  CDR3 for alpha chain variable domain of TCR clone 238476 (TRAV3, TRAJ5)
CAVRDLDTGRRALTF

SEQ ID NO: 476952 - protein, 15 aa, Homo sapiens
  CDR3 for beta chain variable domain of TCR clone 238476 (TRBV7-2, TRBJ1-2)
CASSLVSGGDYGYTF

SEQ ID NO: 476953 - protein, 11 aa, Homo sapiens
  CDR3 for alpha chain variable domain of TCR clone 238477 (TRAV2, TRAJ13)
CVSGGYQKVTF

SEQ ID NO: 476954 - protein, 16 aa, Homo sapiens
  CDR3 for beta chain variable domain of TCR clone 238477 (TRBV2, TRBJ2-1)
CASSVGGSLSYNEQFF

SEQ ID NO: 476955 - protein, 12 aa, Homo sapiens
  CDR3 for alpha chain variable domain of TCR clone 238478 (TRAV12-3, TRAJ17)
CSMTLTGNKLTF

SEQ ID NO: 476956 - protein, 14 aa, Homo sapiens
  CDR3 for beta chain variable domain of TCR clone 238478 (TRBV25-1, TRBJ1-1)
CASTHLGGNTEAFF

SEQ ID NO: 476957 - protein, 15 aa, Homo sapiens
  CDR3 for alpha chain variable domain of TCR clone 238479 (TRAV26-1, TRAJ24)
CINVGATDSWGKLQF

SEQ ID NO: 476958 - protein, 13 aa, Homo sapiens
  CDR3 for beta chain variable domain of TCR clone 238479 (TRBV20-1, TRBJ2-2)
CSASAAGTGELFF

SEQ ID NO: 476959 - protein, 15 aa, Homo sapiens
  CDR3 for alpha chain variable domain of TCR clone 238480 (TRAV19, TRAJ45)
CALSASGGGADGLTF

SEQ ID NO: 476960 - protein, 15 aa, Homo sapiens
  CDR3 for beta chain variable domain of TCR clone 238480 (TRBV13, TRBJ1-5)
CASSRTGRGHQPQHL

SEQ ID NO: 476961 - protein, 14 aa, Homo sapiens
  CDR3 for alpha chain variable domain of TCR clone 238481 (TRAV12-2, TRAJ5)
CAMSTYTGRRALTF

SEQ ID NO: 476962 - protein, 13 aa, Homo sapiens
  CDR3 for beta chain variable domain of TCR clone 238481 (TRBV28, TRBJ2-3)
CASSTGGEDTQYF

SEQ ID NO: 476963 - protein, 15 aa, Homo sapiens
  CDR3 for alpha chain variable domain of TCR clone 238482 (TRAV16, TRAJ57)
CALSGGQGGSEKRVF

SEQ ID NO: 476964 - protein, 18 aa, Homo sapiens
  CDR3 for beta chain variable domain of TCR clone 238482 (TRBV28, TRBJ2-1)
CASSSTSGRANSYNEQFF

SEQ ID NO: 476965 - protein, 21 aa, Homo sapiens
  CDR3 for alpha chain variable domain of TCR clone 238483 (TRAV25, TRAJ7)
TATQTTDVGTYFCPGNNRLAF

SEQ ID NO: 476966 - protein, 14 aa, Homo sapiens
  CDR3 for beta chain variable domain of TCR clone 238483 (TRBV7-2, TRBJ2-7)
CASSPKTSFYEQYF

SEQ ID NO: 476967 - protein, 14 aa, Homo sapiens
  CDR3 for alpha chain variable domain of TCR clone 238484 (TRAV1-2, TRAJ8)
CAVREDTGFQKLVF

SEQ ID NO: 476968 - protein, 16 aa, Homo sapiens
  CDR3 for beta chain variable domain of TCR clone 238484 (TRBV20-1, TRBJ1-4)
CGAPGQGLLTNEKLFF

SEQ ID NO: 476969 - protein, 14 aa, Homo sapiens
  CDR3 for alpha chain variable domain of TCR clone 238485 (TRAV38-1, TRAJ45)
CASRSGGGADGLTF

SEQ ID NO: 476970 - protein, 13 aa, Homo sapiens
  CDR3 for beta chain variable domain of TCR clone 238485 (TRBV10-3, TRBJ1-2)
CAISERDSYGYTF

SEQ ID NO: 476971 - protein, 14 aa, Homo sapiens
  CDR3 for alpha chain variable domain of TCR clone 238486 (TRAV12-2, TRAJ3)
CAGKGYSSASKIIF

SEQ ID NO: 476972 - protein, 14 aa, Homo sapiens
  CDR3 for beta chain variable domain of TCR clone 238486 (TRBV4-2, TRBJ2-1)
CASGLDRAYNEQFF

SEQ ID NO: 476973 - protein, 14 aa, Homo sapiens
  CDR3 for alpha chain variable domain of TCR clone 238487 (TRAV38-1, TRAJ40)
CALRPTSGTYKYIF

SEQ ID NO: 476974 - protein, 15 aa, Homo sapiens
  CDR3 for beta chain variable domain of TCR clone 238487 (TRBV28, TRBJ2-5)
CASSSPLGGGETQYF

SEQ ID NO: 476975 - protein, 16 aa, Homo sapiens
  CDR3 for alpha chain variable domain of TCR clone 238488 (TRAV26-1, TRAJ23)
CIVRVHPYNQGGKLIF

SEQ ID NO: 476976 - protein, 15 aa, Homo sapiens
  CDR3 for beta chain variable domain of TCR clone 238488 (TRBV5-7, TRBJ2-7)
CASSPYFEGSYEQYL

SEQ ID NO: 476977 - protein, 14 aa, Homo sapiens
  CDR3 for alpha chain variable domain of TCR clone 238489 (TRAV9-2, TRAJ39)
CALYIYNAGNILTF

SEQ ID NO: 476978 - protein, 14 aa, Homo sapiens
  CDR3 for beta chain variable domain of TCR clone 238489 (TRBV7-6, TRBJ2-3)
CASSLGTVTDTQYF

SEQ ID NO: 476979 - protein, 12 aa, Homo sapiens
  CDR3 for alpha chain variable domain of TCR clone 238490 (TRAV2, TRAJ26)
GAPGDYGQNFVF

SEQ ID NO: 476980 - protein, 17 aa, Homo sapiens
  CDR3 for beta chain variable domain of TCR clone 238490 (TRBV11-2, TRBJ2-1)
CASSLYPPGVEYNEQFF

SEQ ID NO: 476981 - protein, 14 aa, Homo sapiens
  CDR3 for alpha chain variable domain of TCR clone 238491 (TRAV12-2, TRAJ17)
CAVPFKAAGNKLTS

SEQ ID NO: 476982 - protein, 15 aa, Homo sapiens
  CDR3 for beta chain variable domain of TCR clone 238491 (TRBV20-1, TRBJ2-7)
CSARDRVSGMDEQYF

SEQ ID NO: 476983 - protein, 14 aa, Homo sapiens
  CDR3 for alpha chain variable domain of TCR clone 238492 (TRAV1-2, TRAJ16)
CAVNRFSDGQELPF

SEQ ID NO: 476984 - protein, 14 aa, Homo sapiens
  CDR3 for beta chain variable domain of TCR clone 238492 (TRBV7-3, TRBJ1-1)
CASSLKGGNTEAFF

SEQ ID NO: 476985 - protein, 13 aa, Homo sapiens
  CDR3 for alpha chain variable domain of TCR clone 238493 (TRAV1-2, TRAJ9)
CAILNTGGFKTIF

SEQ ID NO: 476986 - protein, 14 aa, Homo sapiens
  CDR3 for beta chain variable domain of TCR clone 238493 (TRBV20-1, TRBJ2-3)
CSARGGTSTDTQYF

SEQ ID NO: 476987 - protein, 14 aa, Homo sapiens
  CDR3 for alpha chain variable domain of TCR clone 238494 (TRAV1-2, TRAJ16)
CAVNRFSDAQKLLF

SEQ ID NO: 476988 - protein, 15 aa, Homo sapiens
  CDR3 for beta chain variable domain of TCR clone 238494 (TRBV20-1, TRBJ2-7)
CSARDRVSGMDEQYC

SEQ ID NO: 476989 - protein, 16 aa, Homo sapiens
  CDR3 for alpha chain variable domain of TCR clone 238495 (TRAV3, TRAJ37)
CAVRPHGSGNTGKLIF

SEQ ID NO: 476990 - protein, 14 aa, Homo sapiens
  CDR3 for beta chain variable domain of TCR clone 238495 (TRBV25-1, TRBJ1-1)
CASTHLGGNTEAFI

SEQ ID NO: 476991 - protein, 11 aa, Homo sapiens
  CDR3 for alpha chain variable domain of TCR clone 238496 (TRAV3, TRAJ49)
CAPITGNQFYF

SEQ ID NO: 476992 - protein, 16 aa, Homo sapiens
  CDR3 for beta chain variable domain of TCR clone 238496 (TRBV7-3, TRBJ2-1)
RASSLLVGELVDEQFF

SEQ ID NO: 476993 - protein, 13 aa, Homo sapiens
  CDR3 for alpha chain variable domain of TCR clone 238497 (TRAV8-3, TRAJ44)
CAVVPGPASKLTF

SEQ ID NO: 476994 - protein, 13 aa, Homo sapiens
  CDR3 for beta chain variable domain of TCR clone 238497 (TRBV27, TRBJ2-7)
CASSLRHRYEQYF

SEQ ID NO: 476995 - protein, 16 aa, Homo sapiens
  CDR3 for alpha chain variable domain of TCR clone 238498 (TRAV19, TRAJ20)
CALSGWRVPNDYKLSF

SEQ ID NO: 476996 - protein, 15 aa, Homo sapiens
  CDR3 for beta chain variable domain of TCR clone 238498 (TRBV23-1, TRBJ1-5)
CISAPAVPRMRCQHF

SEQ ID NO: 476997 - protein, 13 aa, Homo sapiens
  CDR3 for alpha chain variable domain of TCR clone 238499 (TRAV13-1, TRAJ39)
CAASIWAGNMLNF

SEQ ID NO: 476998 - protein, 13 aa, Homo sapiens
  CDR3 for beta chain variable domain of TCR clone 238499 (TRBV11-2, TRBJ1-3)
CASSLEPVNTIYF

SEQ ID NO: 476999 - protein, 14 aa, Homo sapiens
  CDR3 for alpha chain variable domain of TCR clone 238500 (TRAV12-2, TRAJ17)
CAVLFKAAGNKLTF

SEQ ID NO: 477000 - protein, 10 aa, Homo sapiens
  CDR3 for beta chain variable domain of TCR clone 238500 (TRBV19, TRBJ1-2)
CASSKDRSMA

SEQ ID NO: 477001 - protein, 13 aa, Homo sapiens
  CDR3 for alpha chain variable domain of TCR clone 238501 (TRAV1-2, TRAJ9)
WAVLNTGGFNTIF

SEQ ID NO: 477002 - protein, 14 aa, Homo sapiens
  CDR3 for beta chain variable domain of TCR clone 238501 (TRBV20-1, TRBJ2-3)
CSARGGTSTDTQYF

SEQ ID NO: 477003 - protein, 12 aa, Homo sapiens
  CDR3 for alpha chain variable domain of TCR clone 238502 (TRAV8-3, TRAJ6)
CAVAGGSYIPTF

SEQ ID NO: 477004 - protein, 14 aa, Homo sapiens
  CDR3 for beta chain variable domain of TCR clone 238502 (TRBV13, TRBJ2-7)
CASSLKGASYEQYF

SEQ ID NO: 477005 - protein, 14 aa, Homo sapiens
  CDR3 for alpha chain variable domain of TCR clone 238503 (TRAV26-1, TRAJ21)
CIVRHPYNFNKFYF

SEQ ID NO: 477006 - protein, 12 aa, Homo sapiens
  CDR3 for beta chain variable domain of TCR clone 238503 (TRBV11-2, TRBJ2-2)
CASSLGGGELFF

SEQ ID NO: 477007 - protein, 14 aa, Homo sapiens
  CDR3 for alpha chain variable domain of TCR clone 238504 (TRAV1-2, TRAJ13)
CAVLNSVGYQKVTF

SEQ ID NO: 477008 - protein, 14 aa, Homo sapiens
  CDR3 for beta chain variable domain of TCR clone 238504 (TRBV12-4, TRBJ1-1)
CASSLNDMNTEAFF

SEQ ID NO: 477009 - protein, 12 aa, Homo sapiens
  CDR3 for alpha chain variable domain of TCR clone 238505 (TRAV26-1, TRAJ31)
CIVRNNNARLMF

SEQ ID NO: 477010 - protein, 15 aa, Homo sapiens
  CDR3 for beta chain variable domain of TCR clone 238505 (TRBV20-1, TRBJ2-4)
CSARDLTVGPNIQYF

SEQ ID NO: 477011 - protein, 12 aa, Homo sapiens
  CDR3 for alpha chain variable domain of TCR clone 238506 (TRAV12-3, TRAJ40)
CAMSSGTYKYIF

SEQ ID NO: 477012 - protein, 15 aa, Homo sapiens
  CDR3 for beta chain variable domain of TCR clone 238506 (TRBV7-3, TRBJ2-2)
CDSSETGQGTGELFF

SEQ ID NO: 477013 - protein, 11 aa, Homo sapiens
  CDR3 for alpha chain variable domain of TCR clone 238507 (TRAV12-2, TRAJ23)
CAVDQGGKLIF

SEQ ID NO: 477014 - protein, 14 aa, Homo sapiens
  CDR3 for beta chain variable domain of TCR clone 238507 (TRBV7-2, TRBJ2-7)
CASSPKTSFYEQYF

SEQ ID NO: 477015 - protein, 14 aa, Homo sapiens
  CDR3 for alpha chain variable domain of TCR clone 238508 (TRAV9-2, TRAJ39)
CAVYIYNAGNMLTF

SEQ ID NO: 477016 - protein, 14 aa, Homo sapiens
  CDR3 for beta chain variable domain of TCR clone 238508 (TRBV6-1, TRBJ1-3)
CASVQGGGGNTIYF

SEQ ID NO: 477017 - protein, 15 aa, Homo sapiens
  CDR3 for alpha chain variable domain of TCR clone 238509 (TRAV17, TRAJ10)
CAADASGGGGNKLTF

SEQ ID NO: 477018 - protein, 14 aa, Homo sapiens
  CDR3 for beta chain variable domain of TCR clone 238509 (TRBV20-1, TRBJ2-5)
CSVPYRGRAETQYF

SEQ ID NO: 477019 - protein, 17 aa, Homo sapiens
  CDR3 for alpha chain variable domain of TCR clone 238510 (TRAV8-6, TRAJ58)
CGVSSWVGETSGSRLTF

SEQ ID NO: 477020 - protein, 15 aa, Homo sapiens
  CDR3 for beta chain variable domain of TCR clone 238510 (TRBV20-1, TRBJ2-7)
CSARDRVSGMDEQYF

SEQ ID NO: 477021 - protein, 12 aa, Homo sapiens
  CDR3 for alpha chain variable domain of TCR clone 238511 (TRAV12-1, TRAJ40)
CVFYSGTYKYIF

SEQ ID NO: 477022 - protein, 18 aa, Homo sapiens
  CDR3 for beta chain variable domain of TCR clone 238511 (TRBV12-4, TRBJ2-2)
CASSLEAGTRGRTGELFF

SEQ ID NO: 477023 - protein, 17 aa, Homo sapiens
  CDR3 for alpha chain variable domain of TCR clone 238512 (TRAV3, TRAJ42)
CAVRDRDYGGSQGNIIF

SEQ ID NO: 477024 - protein, 11 aa, Homo sapiens
  CDR3 for beta chain variable domain of TCR clone 238512 (TRBV12-4, TRBJ2-3)
CASTATDTQYF

SEQ ID NO: 477025 - protein, 16 aa, Homo sapiens
  CDR3 for alpha chain variable domain of TCR clone 238513 (TRAV30, TRAJ24)
CGTEIVDADSWGKFQF

SEQ ID NO: 477026 - protein, 16 aa, Homo sapiens
  CDR3 for beta chain variable domain of TCR clone 238513 (TRBV3-1, TRBJ2-5)
CASNHDWASGQETQYF

SEQ ID NO: 477027 - protein, 11 aa, Homo sapiens
  CDR3 for alpha chain variable domain of TCR clone 238514 (TRAV3, TRAJ21)
CAVGNFNKFYF

SEQ ID NO: 477028 - protein, 15 aa, Homo sapiens
  CDR3 for beta chain variable domain of TCR clone 238514 (TRBV15, TRBJ1-5)
CATSRDPVSNQPQHF

SEQ ID NO: 477029 - protein, 13 aa, Homo sapiens
  CDR3 for alpha chain variable domain of TCR clone 238515 (TRAV36/DV7, TRAJ7)
CAVERYGNNRLAF

SEQ ID NO: 477030 - protein, 19 aa, Homo sapiens
  CDR3 for beta chain variable domain of TCR clone 238515 (TRBV25-1, TRBJ2-2)
CAILVYRVDRGRKTGELFF

SEQ ID NO: 477031 - protein, 14 aa, Homo sapiens
  CDR3 for alpha chain variable domain of TCR clone 238516 (TRAV12-2, TRAJ17)
CAVLFKAAGNKLTF

SEQ ID NO: 477032 - protein, 19 aa, Homo sapiens
  CDR3 for beta chain variable domain of TCR clone 238516 (TRBV28, TRBJ2-7)
CASSYSGTSRLGWVYGQYF

SEQ ID NO: 477033 - protein, 14 aa, Homo sapiens
  CDR3 for alpha chain variable domain of TCR clone 238517 (TRAV1-2, TRAJ16)
CAFNRFSDGQKLLF

SEQ ID NO: 477034 - protein, 13 aa, Homo sapiens
  CDR3 for beta chain variable domain of TCR clone 238517 (TRBV7-9, TRBJ1-2)
CASSLKQNYGYTF

SEQ ID NO: 477035 - protein, 12 aa, Homo sapiens
  CDR3 for alpha chain variable domain of TCR clone 238518 (TRAV13-2, TRAJ23)
CAECHRGGKLIF

SEQ ID NO: 477036 - protein, 16 aa, Homo sapiens
  CDR3 for beta chain variable domain of TCR clone 238518 (TRBV20-1, TRBJ1-4)
CSAPGQGLLNNEKLFF

SEQ ID NO: 477037 - protein, 15 aa, Homo sapiens
  CDR3 for alpha chain variable domain of TCR clone 238519 (TRAV25, TRAJ53)
CPTSNSGGSNYKLTF

SEQ ID NO: 477038 - protein, 12 aa, Homo sapiens
  CDR3 for beta chain variable domain of TCR clone 238519 (TRBV7-9, TRBJ1-4)
CASSTDREKLFF

SEQ ID NO: 477039 - protein, 15 aa, Homo sapiens
  CDR3 for alpha chain variable domain of TCR clone 238520 (TRAV8-3, TRAJ41)
CAVGPNSHSGYALNF

SEQ ID NO: 477040 - protein, 17 aa, Homo sapiens
  CDR3 for beta chain variable domain of TCR clone 238520 (TRBV25-1, TRBJ2-1)
CASSAYGQGRGVYEQFF

SEQ ID NO: 477041 - protein, 13 aa, Homo sapiens
  CDR3 for alpha chain variable domain of TCR clone 238521 (TRAV8-3, TRAJ36)
CAVGATGANNLFF

SEQ ID NO: 477042 - protein, 18 aa, Homo sapiens
  CDR3 for beta chain variable domain of TCR clone 238521 (TRBV6-6, TRBJ1-3)
CASSYSKWDSISGNTIYF

SEQ ID NO: 477043 - protein, 18 aa, Homo sapiens
  CDR3 for alpha chain variable domain of TCR clone 238522 (TRAV21, TRAJ52)
CAGRPSPAGGTSYGKLTF

SEQ ID NO: 477044 - protein, 15 aa, Homo sapiens
  CDR3 for beta chain variable domain of TCR clone 238522 (TRBV7-9, TRBJ2-7)
CASSSSGLAVYEQYF

SEQ ID NO: 477045 - protein, 14 aa, Homo sapiens
  CDR3 for alpha chain variable domain of TCR clone 238523 (TRAV21, TRAJ52)
CGRAGGTSDGKLTF

SEQ ID NO: 477046 - protein, 14 aa, Homo sapiens
  CDR3 for beta chain variable domain of TCR clone 238523 (TRBV19, TRBJ1-2)
CASSVLGYNYGYTF

SEQ ID NO: 477047 - protein, 20 aa, Homo sapiens
  CDR3 for alpha chain variable domain of TCR clone 238524 (TRAV13-1, )
CAASSMDIQNPDPAVYQLRD

SEQ ID NO: 477048 - protein, 13 aa, Homo sapiens
  CDR3 for beta chain variable domain of TCR clone 238524 (TRBV20-1, TRBJ2-2)
CSASAAGTGELFF

SEQ ID NO: 477049 - protein, 14 aa, Homo sapiens
  CDR3 for alpha chain variable domain of TCR clone 238525 (TRAV1-2, TRAJ8)
CAVREDTGFQKLVF

SEQ ID NO: 477050 - protein, 13 aa, Homo sapiens
  CDR3 for beta chain variable domain of TCR clone 238525 (TRBV7-3, TRBJ2-1)
CASSLYSYNEQFF

SEQ ID NO: 477051 - protein, 12 aa, Homo sapiens
  CDR3 for alpha chain variable domain of TCR clone 238526 (TRAV13-2, TRAJ23)
CAERHRGGKLIF

SEQ ID NO: 477052 - protein, 12 aa, Homo sapiens
  CDR3 for beta chain variable domain of TCR clone 238526 (TRBV11-2, TRBJ2-3)
GASRGAPNTQYF

SEQ ID NO: 477053 - protein, 13 aa, Homo sapiens
  CDR3 for alpha chain variable domain of TCR clone 238527 (TRAV26-2, TRAJ57)
CILSRGGSEKLVF

SEQ ID NO: 477054 - protein, 15 aa, Homo sapiens
  CDR3 for beta chain variable domain of TCR clone 238527 (TRBV4-3, TRBJ1-1)
CASSQDSLGNTEAFF

SEQ ID NO: 477055 - protein, 16 aa, Homo sapiens
  CDR3 for alpha chain variable domain of TCR clone 238528 (TRAV30, TRAJ24)
CGTETVDADSWGKFQF

SEQ ID NO: 477056 - protein, 13 aa, Homo sapiens
  CDR3 for beta chain variable domain of TCR clone 238528 (TRBV7-2, TRBJ1-4)
CASSLAGLEKLFF

SEQ ID NO: 477057 - protein, 14 aa, Homo sapiens
  CDR3 for alpha chain variable domain of TCR clone 238529 (TRAV12-2, TRAJ24)
CAVTPADSWGKLQF

SEQ ID NO: 477058 - protein, 22 aa, Homo sapiens
  CDR3 for beta chain variable domain of TCR clone 238529 (TRBV6-4, TRBJ2-3)
CTSVPAAPAEGGRAWGTDTQYF

SEQ ID NO: 477059 - protein, 13 aa, Homo sapiens
  CDR3 for alpha chain variable domain of TCR clone 238530 (TRAV8-3, TRAJ28)
CAVGAVGSYQLTY

SEQ ID NO: 477060 - protein, 14 aa, Homo sapiens
  CDR3 for beta chain variable domain of TCR clone 238530 (TRBV7-2, TRBJ2-7)
CASRSQGAAYEQYF

SEQ ID NO: 477061 - protein, 11 aa, Homo sapiens
  CDR3 for alpha chain variable domain of TCR clone 238531 (TRAV12-3, TRAJ43)
CAMSVSNDMHF

SEQ ID NO: 477062 - protein, 13 aa, Homo sapiens
  CDR3 for beta chain variable domain of TCR clone 238531 (TRBV20-1, TRBJ1-1)
CSAPPGGGTEAFF

SEQ ID NO: 477063 - protein, 13 aa, Homo sapiens
  CDR3 for alpha chain variable domain of TCR clone 238532 (TRAV21, TRAJ40)
CAVRPSRAYQYIF

SEQ ID NO: 477064 - protein, 12 aa, Homo sapiens
  CDR3 for beta chain variable domain of TCR clone 238532 (TRBV14, TRBJ2-5)
CASSQLKETQYF

SEQ ID NO: 477065 - protein, 15 aa, Homo sapiens
  CDR3 for alpha chain variable domain of TCR clone 238533 (TRAV8-6, TRAJ57)
CAVSLTQGGSEKLVF

SEQ ID NO: 477066 - protein, 15 aa, Homo sapiens
  CDR3 for beta chain variable domain of TCR clone 238533 (TRBV19, TRBJ2-1)
CASSSPGVPLDEQFF

SEQ ID NO: 477067 - protein, 17 aa, Homo sapiens
  CDR3 for alpha chain variable domain of TCR clone 238534 (TRAV3, TRAJ6)
CAVRDGPRAGGSDIPTF

SEQ ID NO: 477068 - protein, 16 aa, Homo sapiens
  CDR3 for beta chain variable domain of TCR clone 238534 (TRBV27, TRBJ2-5)
CASSLSRTAGGETQYF

SEQ ID NO: 477069 - protein, 15 aa, Homo sapiens
  CDR3 for alpha chain variable domain of TCR clone 238535 (TRAV30, TRAJ32)
CGTEILGGATNKLIF

SEQ ID NO: 477070 - protein, 17 aa, Homo sapiens
  CDR3 for beta chain variable domain of TCR clone 238535 (TRBV5-4, TRBJ2-1)
CASSSAGGRGTYNEQFF

SEQ ID NO: 477071 - protein, 13 aa, Homo sapiens
  CDR3 for alpha chain variable domain of TCR clone 238536 (TRAV1-2, TRAJ16)
CAPPGFHWPEAAL

SEQ ID NO: 477072 - protein, 15 aa, Homo sapiens
  CDR3 for beta chain variable domain of TCR clone 238536 (TRBV4-1, TRBJ2-3)
CASSRGQGIPDTQYF

SEQ ID NO: 477073 - protein, 12 aa, Homo sapiens
  CDR3 for alpha chain variable domain of TCR clone 238537 (TRAV1-2, TRAJ29)
CAVPSGNTPLVF

SEQ ID NO: 477074 - protein, 15 aa, Homo sapiens
  CDR3 for beta chain variable domain of TCR clone 238537 (TRBV28, TRBJ2-3)
CASSPPTGSTDTQYF

SEQ ID NO: 477075 - protein, 14 aa, Homo sapiens
  CDR3 for alpha chain variable domain of TCR clone 238538 (TRAV12-3, TRAJ10)
SHLPLTGGGNKLTF

SEQ ID NO: 477076 - protein, 15 aa, Homo sapiens
  CDR3 for beta chain variable domain of TCR clone 238538 (TRBV11-2, TRBJ1-3)
CASSLDGTGGNTMYF

SEQ ID NO: 477077 - protein, 17 aa, Homo sapiens
  CDR3 for alpha chain variable domain of TCR clone 238539 (TRAV3, TRAJ12)
CAVRDGGRMDSSNKLIF

SEQ ID NO: 477078 - protein, 14 aa, Homo sapiens
  CDR3 for beta chain variable domain of TCR clone 238539 (TRBV7-9, TRBJ1-2)
CASSRQGANYGYTF

SEQ ID NO: 477079 - protein, 12 aa, Homo sapiens
  CDR3 for alpha chain variable domain of TCR clone 238540 (TRAV12-3, TRAJ17)
CAMTLTGNKRTF

SEQ ID NO: 477080 - protein, 15 aa, Homo sapiens
  CDR3 for beta chain variable domain of TCR clone 238540 (TRBV20-1, TRBJ2-7)
CSARGRVSGMDEQYF

SEQ ID NO: 477081 - protein, 14 aa, Homo sapiens
  CDR3 for alpha chain variable domain of TCR clone 238541 (TRAV1-2, TRAJ8)
CAVREDTGFQKLVF

SEQ ID NO: 477082 - protein, 18 aa, Homo sapiens
  CDR3 for beta chain variable domain of TCR clone 238541 (TRBV6-6, TRBJ1-3)
CASSYSRWDSMSGNTIYF

SEQ ID NO: 477083 - protein, 13 aa, Homo sapiens
  CDR3 for alpha chain variable domain of TCR clone 238542 (TRAV13-1, TRAJ39)
CSKYSNAGNMLTF

SEQ ID NO: 477084 - protein, 15 aa, Homo sapiens
  CDR3 for beta chain variable domain of TCR clone 238542 (TRBV20-1, TRBJ2-1)
CSASSAGSSYNEQFF

SEQ ID NO: 477085 - protein, 15 aa, Homo sapiens
  CDR3 for alpha chain variable domain of TCR clone 238543 (TRAV3, TRAJ4)
CSVRDGTGGYNQLIF

SEQ ID NO: 477086 - protein, 16 aa, Homo sapiens
  CDR3 for beta chain variable domain of TCR clone 238543 (TRBV27, TRBJ2-2)
CASSSSGVSNTGELFF

SEQ ID NO: 477087 - protein, 16 aa, Homo sapiens
  CDR3 for alpha chain variable domain of TCR clone 238544 (TRAV26-1, )
CIDIQNPDPAVYQLSD

SEQ ID NO: 477088 - protein, 19 aa, Homo sapiens
  CDR3 for beta chain variable domain of TCR clone 238544 (TRBV19, TRBJ2-5)
CASSIGQVTDFFLGETQYF

SEQ ID NO: 477089 - protein, 13 aa, Homo sapiens
  CDR3 for alpha chain variable domain of TCR clone 238545 (TRAV12-2, TRAJ9)
CAVKWAGGFKTIF

SEQ ID NO: 477090 - protein, 16 aa, Homo sapiens
  CDR3 for beta chain variable domain of TCR clone 238545 (TRBV18, TRBJ1-1)
CASSPGVGGRGGEAFF

SEQ ID NO: 477091 - protein, 17 aa, Homo sapiens
  CDR3 for alpha chain variable domain of TCR clone 238546 (TRAV3, TRAJ6)
CAVRDGPRAGGSYIPTF

SEQ ID NO: 477092 - protein, 12 aa, Homo sapiens
  CDR3 for beta chain variable domain of TCR clone 238546 (TRBV2, TRBJ2-1)
CASSERFREQFF

SEQ ID NO: 477093 - protein, 16 aa, Homo sapiens
  CDR3 for alpha chain variable domain of TCR clone 238547 (TRAV3, TRAJ37)
CAVRPHGSGNTGKLNF

SEQ ID NO: 477094 - protein, 13 aa, Homo sapiens
  CDR3 for beta chain variable domain of TCR clone 238547 (TRBV2, TRBJ1-5)
CASGTGGYQPQHF

SEQ ID NO: 477095 - protein, 17 aa, Homo sapiens
  CDR3 for alpha chain variable domain of TCR clone 238548 (TRAV38-1, TRAJ28)
CAFMKPTSGAGSYQLTF

SEQ ID NO: 477096 - protein, 15 aa, Homo sapiens
  CDR3 for beta chain variable domain of TCR clone 238548 (TRBV9, TRBJ1-6)
CASSVAGTGDSPLHF

SEQ ID NO: 477097 - protein, 14 aa, Homo sapiens
  CDR3 for alpha chain variable domain of TCR clone 238549 (TRAV12-3, TRAJ10)
SHLPLTGGGNKLTF

SEQ ID NO: 477098 - protein, 17 aa, Homo sapiens
  CDR3 for beta chain variable domain of TCR clone 238549 (TRBV4-2, TRBJ1-1)
CASTQFGGGSGNTEAFF

SEQ ID NO: 477099 - protein, 13 aa, Homo sapiens
  CDR3 for alpha chain variable domain of TCR clone 238550 (TRAV27, TRAJ29)
WSGAHSGNTPLVF

SEQ ID NO: 477100 - protein, 14 aa, Homo sapiens
  CDR3 for beta chain variable domain of TCR clone 238550 (TRBV7-9, TRBJ2-7)
CASSIGQGAGEQYF

SEQ ID NO: 477101 - protein, 18 aa, Homo sapiens
  CDR3 for alpha chain variable domain of TCR clone 238551 (TRAV13-1, TRAJ52)
CAAKNPNAGGTSYGKLTF

SEQ ID NO: 477102 - protein, 15 aa, Homo sapiens
  CDR3 for beta chain variable domain of TCR clone 238551 (TRBV6-3, TRBJ2-7)
CASSSPGAVFYEQYF

SEQ ID NO: 477103 - protein, 14 aa, Homo sapiens
  CDR3 for alpha chain variable domain of TCR clone 238552 (TRAV13-1, TRAJ44)
CAAKATGTASKLTF

SEQ ID NO: 477104 - protein, 17 aa, Homo sapiens
  CDR3 for beta chain variable domain of TCR clone 238552 (TRBV7-3, TRBJ2-3)
GASSLMKRMRGADTQYF

SEQ ID NO: 477105 - protein, 12 aa, Homo sapiens
  CDR3 for alpha chain variable domain of TCR clone 238553 (TRAV35, TRAJ39)
LAPNNAGNMLTF

SEQ ID NO: 477106 - protein, 16 aa, Homo sapiens
  CDR3 for beta chain variable domain of TCR clone 238553 (TRBV2, TRBJ2-3)
CASSTSVEGVTDTQYF

SEQ ID NO: 477107 - protein, 18 aa, Homo sapiens
  CDR3 for alpha chain variable domain of TCR clone 238554 (TRAV8-4, TRAJ52)
CAVTRANAGGTSYGKLTF

SEQ ID NO: 477108 - protein, 20 aa, Homo sapiens
  CDR3 for beta chain variable domain of TCR clone 238554 (TRBV19, TRBJ2-1)
CASSIARTVTSTRLNNEQFF

SEQ ID NO: 477109 - protein, 14 aa, Homo sapiens
  CDR3 for alpha chain variable domain of TCR clone 238555 (TRAV12-3, TRAJ58)
CAMSTETSGSRLTF

SEQ ID NO: 477110 - protein, 15 aa, Homo sapiens
  CDR3 for beta chain variable domain of TCR clone 238555 (TRBV11-3, TRBJ2-3)
CASLNYGREGDTQYF

SEQ ID NO: 477111 - protein, 10 aa, Homo sapiens
  CDR3 for alpha chain variable domain of TCR clone 238556 (TRAV1-2, TRAJ31)
CAFFDARLMF

SEQ ID NO: 477112 - protein, 14 aa, Homo sapiens
  CDR3 for beta chain variable domain of TCR clone 238556 (TRBV11-3, TRBJ1-6)
CASSFSGGDSPLHF

SEQ ID NO: 477113 - protein, 14 aa, Homo sapiens
  CDR3 for alpha chain variable domain of TCR clone 238557 (TRAV1-2, TRAJ16)
CAVNRFTDGQKLLF

SEQ ID NO: 477114 - protein, 16 aa, Homo sapiens
  CDR3 for beta chain variable domain of TCR clone 238557 (TRBV19, TRBJ1-1)
CASRVDVTGAAWGAFF

SEQ ID NO: 477115 - protein, 11 aa, Homo sapiens
  CDR3 for alpha chain variable domain of TCR clone 238558 (TRAV12-2, TRAJ49)
CAMTGGNQFYF

SEQ ID NO: 477116 - protein, 15 aa, Homo sapiens
  CDR3 for beta chain variable domain of TCR clone 238558 (TRBV7-8, TRBJ1-5)
CASSLERRGLEPQHF

SEQ ID NO: 477117 - protein, 11 aa, Homo sapiens
  CDR3 for alpha chain variable domain of TCR clone 238559 (TRAV2, TRAJ13)
CASGGYQKVTF

SEQ ID NO: 477118 - protein, 15 aa, Homo sapiens
  CDR3 for beta chain variable domain of TCR clone 238559 (TRBV9, TRBJ1-6)
CASSVAGTGDSPLRF

SEQ ID NO: 477119 - protein, 12 aa, Homo sapiens
  CDR3 for alpha chain variable domain of TCR clone 238560 (TRAV12-3, TRAJ17)
CAMTLTGNKLTF

SEQ ID NO: 477120 - protein, 17 aa, Homo sapiens
  CDR3 for beta chain variable domain of TCR clone 238560 (TRBV7-3, TRBJ2-3)
CASSFMKRMRGADTQYF

SEQ ID NO: 477121 - protein, 15 aa, Homo sapiens
  CDR3 for alpha chain variable domain of TCR clone 238561 (TRAV4, TRAJ27)
CLVGDEGTNAGKSTF

SEQ ID NO: 477122 - protein, 14 aa, Homo sapiens
  CDR3 for beta chain variable domain of TCR clone 238561 (TRBV19, TRBJ2-1)
CASSRLASINEQFF

SEQ ID NO: 477123 - protein, 15 aa, Homo sapiens
  CDR3 for alpha chain variable domain of TCR clone 238562 (TRAV3, TRAJ17)
RAVRDTGAAGNKLTF

SEQ ID NO: 477124 - protein, 14 aa, Homo sapiens
  CDR3 for beta chain variable domain of TCR clone 238562 (TRBV5-4, TRBJ1-1)
CASSLDSRRDEAFF

SEQ ID NO: 477125 - protein, 14 aa, Homo sapiens
  CDR3 for alpha chain variable domain of TCR clone 238563 (TRAV12-2, TRAJ45)
CAVNKGGGADGLTF

SEQ ID NO: 477126 - protein, 16 aa, Homo sapiens
  CDR3 for beta chain variable domain of TCR clone 238563 (TRBV19, TRBJ2-2)
CASRSPGTGATGELFF

SEQ ID NO: 477127 - protein, 14 aa, Homo sapiens
  CDR3 for alpha chain variable domain of TCR clone 238564 (TRAV12-1, TRAJ12)
CVVNGRDSSYKLIF

SEQ ID NO: 477128 - protein, 17 aa, Homo sapiens
  CDR3 for beta chain variable domain of TCR clone 238564 (TRBV13, TRBJ2-3)
CASSLSRVAGGRNTQYF

SEQ ID NO: 477129 - protein, 19 aa, Homo sapiens
  CDR3 for alpha chain variable domain of TCR clone 238565 (TRAV8-3, TRAJ30)
CAVGEMTRSSLEKGHDFIF

SEQ ID NO: 477130 - protein, 14 aa, Homo sapiens
  CDR3 for beta chain variable domain of TCR clone 238565 (TRBV7-8, TRBJ2-3)
CASSLEAGTDTQYF

SEQ ID NO: 477131 - protein, 13 aa, Homo sapiens
  CDR3 for alpha chain variable domain of TCR clone 238566 (TRAV13-1, TRAJ5)
CAASDTGRRALTF

SEQ ID NO: 477132 - protein, 16 aa, Homo sapiens
  CDR3 for beta chain variable domain of TCR clone 238566 (TRBV15, TRBJ2-5)
CATSRYLEAAQETQYF

SEQ ID NO: 477133 - protein, 18 aa, Homo sapiens
  CDR3 for alpha chain variable domain of TCR clone 238567 (TRAV21, TRAJ52)
CAVRPSPAGGTSYGKLTF

SEQ ID NO: 477134 - protein, 17 aa, Homo sapiens
  CDR3 for beta chain variable domain of TCR clone 238567 (TRBV13, TRBJ2-3)
CASSISRVAGGRNTQYC

SEQ ID NO: 477135 - protein, 12 aa, Homo sapiens
  CDR3 for alpha chain variable domain of TCR clone 238568 (TRAV17, TRAJ30)
CVPEGRDDKIIF

SEQ ID NO: 477136 - protein, 14 aa, Homo sapiens
  CDR3 for beta chain variable domain of TCR clone 238568 (TRBV7-7, TRBJ2-2)
CASSRDGSTGELFF

SEQ ID NO: 477137 - protein, 12 aa, Homo sapiens
  CDR3 for alpha chain variable domain of TCR clone 238569 (TRAV29/DV5, TRAJ49)
CAATDPGNLFSF

SEQ ID NO: 477138 - protein, 12 aa, Homo sapiens
  CDR3 for beta chain variable domain of TCR clone 238569 (TRBV12-4, TRBJ2-7)
CASSLGGYEQYF

SEQ ID NO: 477139 - protein, 11 aa, Homo sapiens
  CDR3 for alpha chain variable domain of TCR clone 238570 (TRAV4, TRAJ20)
CLVGDKVTTTS

SEQ ID NO: 477140 - protein, 15 aa, Homo sapiens
  CDR3 for beta chain variable domain of TCR clone 238570 (TRBV18, TRBJ2-7)
CASSPSSAGNYEQYF

SEQ ID NO: 477141 - protein, 12 aa, Homo sapiens
  CDR3 for alpha chain variable domain of TCR clone 238571 (TRAV29/DV5, TRAJ43)
CAAPYNNNDMRF

SEQ ID NO: 477142 - protein, 12 aa, Homo sapiens
  CDR3 for beta chain variable domain of TCR clone 238571 (TRBV11-2, TRBJ2-2)
CASSLGGGELFF

SEQ ID NO: 477143 - protein, 15 aa, Homo sapiens
  CDR3 for alpha chain variable domain of TCR clone 238572 (TRAV21, TRAJ13)
CAVPRSFWGLPESYF

SEQ ID NO: 477144 - protein, 15 aa, Homo sapiens
  CDR3 for beta chain variable domain of TCR clone 238572 (TRBV27, TRBJ2-5)
CASSLYPRGGETQYF

SEQ ID NO: 477145 - protein, 13 aa, Homo sapiens
  CDR3 for alpha chain variable domain of TCR clone 238573 (TRAV8-1, TRAJ32)
CAAAGGATNKLIF

SEQ ID NO: 477146 - protein, 16 aa, Homo sapiens
  CDR3 for beta chain variable domain of TCR clone 238573 (TRBV7-3, TRBJ2-2)
CASSLKRGTLSGELFF

SEQ ID NO: 477147 - protein, 17 aa, Homo sapiens
  CDR3 for alpha chain variable domain of TCR clone 238574 (TRAV12-3, TRAJ6)
CAMSARGGAGGSDIPTF

SEQ ID NO: 477148 - protein, 15 aa, Homo sapiens
  CDR3 for beta chain variable domain of TCR clone 238574 (TRBV24-1, TRBJ2-1)
CATSDSGVSYNEQFF

SEQ ID NO: 477149 - protein, 13 aa, Homo sapiens
  CDR3 for alpha chain variable domain of TCR clone 238575 (TRAV21, TRAJ36)
CAVIKTGAYNLFF

SEQ ID NO: 477150 - protein, 13 aa, Homo sapiens
  CDR3 for beta chain variable domain of TCR clone 238575 (TRBV29-1, TRBJ2-3)
CSATRGGRDTQYF

SEQ ID NO: 477151 - protein, 12 aa, Homo sapiens
  CDR3 for alpha chain variable domain of TCR clone 238576 (TRAV2, TRAJ5)
CALDTGRRALTF

SEQ ID NO: 477152 - protein, 15 aa, Homo sapiens
  CDR3 for beta chain variable domain of TCR clone 238576 (TRBV6-5, TRBJ2-1)
CASSYDAGAGNEQFF

SEQ ID NO: 477153 - protein, 18 aa, Homo sapiens
  CDR3 for alpha chain variable domain of TCR clone 238577 (TRAV12-3, TRAJ52)
CAMSVGGAGGTSYGKLTF

SEQ ID NO: 477154 - protein, 14 aa, Homo sapiens
  CDR3 for beta chain variable domain of TCR clone 238577 (TRBV2, TRBJ2-1)
CASSEALDGNEQFF

SEQ ID NO: 477155 - protein, 15 aa, Homo sapiens
  CDR3 for alpha chain variable domain of TCR clone 238578 (TRAV2, TRAJ39)
CAVEARRNAGNMPTF

SEQ ID NO: 477156 - protein, 16 aa, Homo sapiens
  CDR3 for beta chain variable domain of TCR clone 238578 (TRBV7-8, TRBJ2-7)
CASSLASGTSVYEQYF

SEQ ID NO: 477157 - protein, 15 aa, Homo sapiens
  CDR3 for alpha chain variable domain of TCR clone 238579 (TRAV26-1, TRAJ22)
CIVRVSFWFCKATDL

SEQ ID NO: 477158 - protein, 15 aa, Homo sapiens
  CDR3 for beta chain variable domain of TCR clone 238579 (TRBV11-2, TRBJ2-1)
CASSPAGQSLNEQFF

SEQ ID NO: 477159 - protein, 18 aa, Homo sapiens
  CDR3 for alpha chain variable domain of TCR clone 238580 (TRAV21, TRAJ52)
CAVRPSPAGGTSYGKLTF

SEQ ID NO: 477160 - protein, 15 aa, Homo sapiens
  CDR3 for beta chain variable domain of TCR clone 238580 (TRBV6-1, TRBJ1-2)
CASSDGGAANYGYTF

SEQ ID NO: 477161 - protein, 15 aa, Homo sapiens
  CDR3 for alpha chain variable domain of TCR clone 238581 (TRAV21, TRAJ13)
CAVPRSFWGLPERYL

SEQ ID NO: 477162 - protein, 15 aa, Homo sapiens
  CDR3 for beta chain variable domain of TCR clone 238581 (TRBV7-9, TRBJ1-6)
CASSSPRRGNSPLHF

SEQ ID NO: 477163 - protein, 16 aa, Homo sapiens
  CDR3 for alpha chain variable domain of TCR clone 238582 (TRAV3, TRAJ37)
CAVRPHGSGNTGKLIF

SEQ ID NO: 477164 - protein, 16 aa, Homo sapiens
  CDR3 for beta chain variable domain of TCR clone 238582 (TRBV9, TRBJ1-2)
CASSVEEKVSPYGYTF

SEQ ID NO: 477165 - protein, 16 aa, Homo sapiens
  CDR3 for alpha chain variable domain of TCR clone 238583 (TRAV21, TRAJ52)
CAVTNAGGTSYGKLTF

SEQ ID NO: 477166 - protein, 13 aa, Homo sapiens
  CDR3 for beta chain variable domain of TCR clone 238583 (TRBV20-1, TRBJ2-3)
CSARLACTDTQYF

SEQ ID NO: 477167 - protein, 15 aa, Homo sapiens
  CDR3 for alpha chain variable domain of TCR clone 238584 (TRAV29/DV5, TRAJ24)
CAASGATDSWGKFQF

SEQ ID NO: 477168 - protein, 13 aa, Homo sapiens
  CDR3 for beta chain variable domain of TCR clone 238584 (TRBV28, TRBJ2-7)
CASTPGLAGEQYF

SEQ ID NO: 477169 - protein, 16 aa, Homo sapiens
  CDR3 for alpha chain variable domain of TCR clone 238585 (TRAV1-2, TRAJ6)
CAVRDQGTGVSYIPTF

SEQ ID NO: 477170 - protein, 13 aa, Homo sapiens
  CDR3 for beta chain variable domain of TCR clone 238585 (TRBV28, TRBJ2-7)
CASTPGLAGEQYF

SEQ ID NO: 477171 - protein, 14 aa, Homo sapiens
  CDR3 for alpha chain variable domain of TCR clone 238586 (TRAV12-3, TRAJ13)
CAMKNSGGYQKVTF

SEQ ID NO: 477172 - protein, 13 aa, Homo sapiens
  CDR3 for beta chain variable domain of TCR clone 238586 (TRBV20-1, TRBJ2-5)
CSAATELQETQYF

SEQ ID NO: 477173 - protein, 15 aa, Homo sapiens
  CDR3 for alpha chain variable domain of TCR clone 238587 (TRAV21, TRAJ13)
CAVRPTSGGYQKDTF

SEQ ID NO: 477174 - protein, 18 aa, Homo sapiens
  CDR3 for beta chain variable domain of TCR clone 238587 (TRBV11-3, TRBJ2-1)
CASSSYPGGRDSYNEQFF

SEQ ID NO: 477175 - protein, 15 aa, Homo sapiens
  CDR3 for alpha chain variable domain of TCR clone 238588 (TRAV26-1, TRAJ29)
CIVRVEGSGNTPLVF

SEQ ID NO: 477176 - protein, 15 aa, Homo sapiens
  CDR3 for beta chain variable domain of TCR clone 238588 (TRBV7-9, TRBJ1-5)
CASRQGNQPNQPQHF

SEQ ID NO: 477177 - protein, 14 aa, Homo sapiens
  CDR3 for alpha chain variable domain of TCR clone 238589 (TRAV2, TRAJ37)
CAVDFTSNTGKLIF

SEQ ID NO: 477178 - protein, 16 aa, Homo sapiens
  CDR3 for beta chain variable domain of TCR clone 238589 (TRBV24-1, TRBJ2-3)
CATSDPGTGATDTQYF

SEQ ID NO: 477179 - protein, 12 aa, Homo sapiens
  CDR3 for alpha chain variable domain of TCR clone 238590 (TRAV21, TRAJ3)
CCFYSSASKIIF

SEQ ID NO: 477180 - protein, 16 aa, Homo sapiens
  CDR3 for beta chain variable domain of TCR clone 238590 (TRBV19, TRBJ2-1)
CASSKAGPCSYNEQFF

SEQ ID NO: 477181 - protein, 15 aa, Homo sapiens
  CDR3 for alpha chain variable domain of TCR clone 238591 (TRAV24, TRAJ42)
CAPLNYGGSQGNLIF

SEQ ID NO: 477182 - protein, 15 aa, Homo sapiens
  CDR3 for beta chain variable domain of TCR clone 238591 (TRBV6-3, TRBJ2-7)
CASSSPGTVFYEQYF

SEQ ID NO: 477183 - protein, 14 aa, Homo sapiens
  CDR3 for alpha chain variable domain of TCR clone 238592 (TRAV1-2, TRAJ8)
CAVREDTGLQKLVF

SEQ ID NO: 477184 - protein, 15 aa, Homo sapiens
  CDR3 for beta chain variable domain of TCR clone 238592 (TRBV6-3, TRBJ2-7)
CASSSPGTVFYKQYF

SEQ ID NO: 477185 - protein, 12 aa, Homo sapiens
  CDR3 for alpha chain variable domain of TCR clone 238593 (TRAV10, TRAJ6)
CVVSEGSYIPTF

SEQ ID NO: 477186 - protein, 12 aa, Homo sapiens
  CDR3 for beta chain variable domain of TCR clone 238593 (TRBV7-8, TRBJ2-7)
CASSLGDREQYF

SEQ ID NO: 477187 - protein, 13 aa, Homo sapiens
  CDR3 for alpha chain variable domain of TCR clone 238594 (TRAV12-1, TRAJ21)
CVVIGDNFNKFYF

SEQ ID NO: 477188 - protein, 16 aa, Homo sapiens
  CDR3 for beta chain variable domain of TCR clone 238594 (TRBV19, TRBJ2-1)
CASSKAGPSSYNEQFF

SEQ ID NO: 477189 - protein, 12 aa, Homo sapiens
  CDR3 for alpha chain variable domain of TCR clone 238595 (TRAV21, TRAJ33)
CAKMDSNYQLIW

SEQ ID NO: 477190 - protein, 14 aa, Homo sapiens
  CDR3 for beta chain variable domain of TCR clone 238595 (TRBV2, TRBJ2-7)
CASSLTSGAYEQYF

SEQ ID NO: 477191 - protein, 10 aa, Homo sapiens
  CDR3 for alpha chain variable domain of TCR clone 238596 (TRAV23/DV6, TRAJ57)
CAASSTLSQC

SEQ ID NO: 477192 - protein, 16 aa, Homo sapiens
  CDR3 for beta chain variable domain of TCR clone 238596 (TRBV3-1, TRBJ2-5)
CASSQDWASGQETQYF

SEQ ID NO: 477193 - protein, 12 aa, Homo sapiens
  CDR3 for alpha chain variable domain of TCR clone 238597 (TRAV12-1, TRAJ23)
CVVNGGGGKLIF

SEQ ID NO: 477194 - protein, 14 aa, Homo sapiens
  CDR3 for beta chain variable domain of TCR clone 238597 (TRBV27, TRBJ2-7)
CASSPQRGTYEQYF

SEQ ID NO: 477195 - protein, 13 aa, Homo sapiens
  CDR3 for alpha chain variable domain of TCR clone 238598 (TRAV12-1, TRAJ39)
CGDDNNAGNMLTF

SEQ ID NO: 477196 - protein, 14 aa, Homo sapiens
  CDR3 for beta chain variable domain of TCR clone 238598 (TRBV19, TRBJ2-7)
CAGTVQGRPYEQYF

SEQ ID NO: 477197 - protein, 12 aa, Homo sapiens
  CDR3 for alpha chain variable domain of TCR clone 238599 (TRAV22, TRAJ49)
CAVEHTGNQFYF

SEQ ID NO: 477198 - protein, 19 aa, Homo sapiens
  CDR3 for beta chain variable domain of TCR clone 238599 (TRBV5-1, TRBJ2-3)
CASSLWLAGGITTTDTQYF

SEQ ID NO: 477199 - protein, 11 aa, Homo sapiens
  CDR3 for alpha chain variable domain of TCR clone 238600 (TRAV12-3, TRAJ43)
CAMSISNDMRF

SEQ ID NO: 477200 - protein, 12 aa, Homo sapiens
  CDR3 for beta chain variable domain of TCR clone 238600 (TRBV20-1, TRBJ1-1)
QCSTWGGTEAFF

SEQ ID NO: 477201 - protein, 16 aa, Homo sapiens
  CDR3 for alpha chain variable domain of TCR clone 238601 (TRAV3, TRAJ37)
CAVRGKGSGNPGKLIF

SEQ ID NO: 477202 - protein, 12 aa, Homo sapiens
  CDR3 for beta chain variable domain of TCR clone 238601 (TRBV11-2, TRBJ2-2)
CASSLGGGELFF

SEQ ID NO: 477203 - protein, 11 aa, Homo sapiens
  CDR3 for alpha chain variable domain of TCR clone 238602 (TRAV21, TRAJ20)
CAVRDDYKLSF

SEQ ID NO: 477204 - protein, 14 aa, Homo sapiens
  CDR3 for beta chain variable domain of TCR clone 238602 (TRBV12-4, TRBJ1-1)
CASSFSQMNTEAVF

SEQ ID NO: 477205 - protein, 17 aa, Homo sapiens
  CDR3 for alpha chain variable domain of TCR clone 238603 (TRAV8-6, TRAJ10)
CAVSDGGLTGGGNKLTF

SEQ ID NO: 477206 - protein, 16 aa, Homo sapiens
  CDR3 for beta chain variable domain of TCR clone 238603 (TRBV20-1, TRBJ1-2)
CSASMGQGVANYGYTF

SEQ ID NO: 477207 - protein, 18 aa, Homo sapiens
  CDR3 for alpha chain variable domain of TCR clone 238604 (TRAV12-3, TRAJ52)
CAMSRNNAGGTSYGKLTF

SEQ ID NO: 477208 - protein, 13 aa, Homo sapiens
  CDR3 for beta chain variable domain of TCR clone 238604 (TRBV12-4, TRBJ1-2)
CASSLRQGKGYTF

SEQ ID NO: 477209 - protein, 18 aa, Homo sapiens
  CDR3 for alpha chain variable domain of TCR clone 238605 (TRAV12-3, TRAJ52)
CAMSVGGAGGTSYGKLTF

SEQ ID NO: 477210 - protein, 14 aa, Homo sapiens
  CDR3 for beta chain variable domain of TCR clone 238605 (TRBV19, TRBJ1-5)
CASRAPDSFLSQHF

SEQ ID NO: 477211 - protein, 13 aa, Homo sapiens
  CDR3 for alpha chain variable domain of TCR clone 238606 (TRAV30, TRAJ31)
CGTEITNNARLMF

SEQ ID NO: 477212 - protein, 13 aa, Homo sapiens
  CDR3 for beta chain variable domain of TCR clone 238606 (TRBV12-5, TRBJ2-3)
CASGDPQSDTQYF

SEQ ID NO: 477213 - protein, 15 aa, Homo sapiens
  CDR3 for alpha chain variable domain of TCR clone 238607 (TRAV27, TRAJ38)
CAARRNAGNNRTLIW

SEQ ID NO: 477214 - protein, 17 aa, Homo sapiens
  CDR3 for beta chain variable domain of TCR clone 238607 (TRBV13, TRBJ2-3)
CASSLSRVAGGRNTQYF

SEQ ID NO: 477215 - protein, 14 aa, Homo sapiens
  CDR3 for alpha chain variable domain of TCR clone 238608 (TRAV19, TRAJ49)
CALSEGNTGTQFYF

SEQ ID NO: 477216 - protein, 13 aa, Homo sapiens
  CDR3 for beta chain variable domain of TCR clone 238608 (TRBV7-2, TRBJ2-2)
CASSSVRAGELFF

SEQ ID NO: 477217 - protein, 12 aa, Homo sapiens
  CDR3 for alpha chain variable domain of TCR clone 238609 (TRAV8-3, TRAJ40)
CAVTSGTHKYIF

SEQ ID NO: 477218 - protein, 14 aa, Homo sapiens
  CDR3 for beta chain variable domain of TCR clone 238609 (TRBV12-4, TRBJ2-3)
CASSGQGSTDTQYF

SEQ ID NO: 477219 - protein, 14 aa, Homo sapiens
  CDR3 for alpha chain variable domain of TCR clone 238610 (TRAV9-2, TRAJ6)
CALSDPGGSDIPTF

SEQ ID NO: 477220 - protein, 14 aa, Homo sapiens
  CDR3 for beta chain variable domain of TCR clone 238610 (TRBV12-4, TRBJ1-1)
CASSLGTGGTEAFF

SEQ ID NO: 477221 - protein, 14 aa, Homo sapiens
  CDR3 for alpha chain variable domain of TCR clone 238611 (TRAV1-2, TRAJ16)
CAVNRFSDGQKLLF

SEQ ID NO: 477222 - protein, 10 aa, Homo sapiens
  CDR3 for beta chain variable domain of TCR clone 238611 (TRBV29-1, TRBJ2-7)
FDRGSYEQYF

SEQ ID NO: 477223 - protein, 15 aa, Homo sapiens
  CDR3 for alpha chain variable domain of TCR clone 238612 (TRAV14/DV4, TRAJ26)
CAMREGQYYGQNFVF

SEQ ID NO: 477224 - protein, 15 aa, Homo sapiens
  CDR3 for beta chain variable domain of TCR clone 238612 (TRBV28, TRBJ2-1)
CASSIIAGGRSEQFF

SEQ ID NO: 477225 - protein, 13 aa, Homo sapiens
  CDR3 for alpha chain variable domain of TCR clone 238613 (TRAV13-2, TRAJ30)
CAEKMNRDDKIIF

SEQ ID NO: 477226 - protein, 16 aa, Homo sapiens
  CDR3 for beta chain variable domain of TCR clone 238613 (TRBV12-5, TRBJ2-5)
CASGPRTSGNQETQYF

SEQ ID NO: 477227 - protein, 14 aa, Homo sapiens
  CDR3 for alpha chain variable domain of TCR clone 238614 (TRAV26-2, TRAJ38)
CILYNAGNNRKLIW

SEQ ID NO: 477228 - protein, 14 aa, Homo sapiens
  CDR3 for beta chain variable domain of TCR clone 238614 (TRBV19, TRBJ2-5)
CASSMTGQQETQYF

SEQ ID NO: 477229 - protein, 12 aa, Homo sapiens
  CDR3 for alpha chain variable domain of TCR clone 238615 (TRAV3, TRAJ43)
CAVRDPNNDMRF

SEQ ID NO: 477230 - protein, 13 aa, Homo sapiens
  CDR3 for beta chain variable domain of TCR clone 238615 (TRBV19, TRBJ1-2)
CASSVPGQGGYTF

SEQ ID NO: 477231 - protein, 15 aa, Homo sapiens
  CDR3 for alpha chain variable domain of TCR clone 238616 (TRAV8-3, TRAJ20)
CAVEAKGSNDYKLSF

SEQ ID NO: 477232 - protein, 11 aa, Homo sapiens
  CDR3 for beta chain variable domain of TCR clone 238616 (TRBV12-4, TRBJ2-3)
CASTATDTQYF

SEQ ID NO: 477233 - protein, 14 aa, Homo sapiens
  CDR3 for alpha chain variable domain of TCR clone 238617 (TRAV17, TRAJ34)
CATVPTYNTDKLIF

SEQ ID NO: 477234 - protein, 18 aa, Homo sapiens
  CDR3 for beta chain variable domain of TCR clone 238617 (TRBV23-1, TRBJ2-1)
TVSLRQRSEKWLKNQQFF

SEQ ID NO: 477235 - protein, 15 aa, Homo sapiens
  CDR3 for alpha chain variable domain of TCR clone 238618 (TRAV2, TRAJ15)
CAVEDREQAGTALIF

SEQ ID NO: 477236 - protein, 13 aa, Homo sapiens
  CDR3 for beta chain variable domain of TCR clone 238618 (TRBV7-9, TRBJ1-2)
CASSLKQNYGYTF

SEQ ID NO: 477237 - protein, 15 aa, Homo sapiens
  CDR3 for alpha chain variable domain of TCR clone 238619 (TRAV3, TRAJ7)
CAVRDKDNGNNSLAF

SEQ ID NO: 477238 - protein, 19 aa, Homo sapiens
  CDR3 for beta chain variable domain of TCR clone 238619 (TRBV5-8, TRBJ2-3)
CASSFLGTSGSHRTDTQYF

SEQ ID NO: 477239 - protein, 15 aa, Homo sapiens
  CDR3 for alpha chain variable domain of TCR clone 238620 (TRAV38-1, TRAJ37)
CAFIFGSGNTGKLIF

SEQ ID NO: 477240 - protein, 12 aa, Homo sapiens
  CDR3 for beta chain variable domain of TCR clone 238620 (TRBV7-9, TRBJ2-7)
CASSLEDYEQYL

SEQ ID NO: 477241 - protein, 13 aa, Homo sapiens
  CDR3 for alpha chain variable domain of TCR clone 238621 (TRAV2, TRAJ29)
CAAGGPGNTPLVF

SEQ ID NO: 477242 - protein, 13 aa, Homo sapiens
  CDR3 for beta chain variable domain of TCR clone 238621 (TRBV14, TRBJ1-2)
CASSEDRRYGYTL

SEQ ID NO: 477243 - protein, 12 aa, Homo sapiens
  CDR3 for alpha chain variable domain of TCR clone 238622 (TRAV12-2, TRAJ47)
CAVAEYGNKLVF

SEQ ID NO: 477244 - protein, 14 aa, Homo sapiens
  CDR3 for beta chain variable domain of TCR clone 238622 (TRBV20-1, TRBJ1-1)
CSAMGGTANTEAFV

SEQ ID NO: 477245 - protein, 12 aa, Homo sapiens
  CDR3 for alpha chain variable domain of TCR clone 238623 (TRAV25, TRAJ16)
CAGPKDGQKLLF

SEQ ID NO: 477246 - protein, 13 aa, Homo sapiens
  CDR3 for beta chain variable domain of TCR clone 238623 (TRBV3-1, TRBJ1-2)
CASSQRAPGGDTF

SEQ ID NO: 477247 - protein, 11 aa, Homo sapiens
  CDR3 for alpha chain variable domain of TCR clone 238624 (TRAV35, TRAJ30)
CAPGGDDKIIF

SEQ ID NO: 477248 - protein, 14 aa, Homo sapiens
  CDR3 for beta chain variable domain of TCR clone 238624 (TRBV7-6, TRBJ2-1)
CASRLGGGADEQFF

SEQ ID NO: 477249 - protein, 14 aa, Homo sapiens
  CDR3 for alpha chain variable domain of TCR clone 238625 (TRAV27, TRAJ49)
CAGRPEGTGNQFYF

SEQ ID NO: 477250 - protein, 15 aa, Homo sapiens
  CDR3 for beta chain variable domain of TCR clone 238625 (TRBV19, TRBJ2-1)
CASSIQATSYDEQFF

SEQ ID NO: 477251 - protein, 17 aa, Homo sapiens
  CDR3 for alpha chain variable domain of TCR clone 238626 (TRAV3, TRAJ12)
CAVRDGGRMDSSYKLIF

SEQ ID NO: 477252 - protein, 14 aa, Homo sapiens
  CDR3 for beta chain variable domain of TCR clone 238626 (TRBV7-9, TRBJ1-2)
CASSRQGANYGHTF

SEQ ID NO: 477253 - protein, 10 aa, Homo sapiens
  CDR3 for alpha chain variable domain of TCR clone 238627 (TRAV26-2, TRAJ49)
CILLGNQFYF

SEQ ID NO: 477254 - protein, 13 aa, Homo sapiens
  CDR3 for beta chain variable domain of TCR clone 238627 (TRBV20-1, TRBJ2-7)
CSAEPGATYEQYF

SEQ ID NO: 477255 - protein, 14 aa, Homo sapiens
  CDR3 for alpha chain variable domain of TCR clone 238628 (TRAV12-3, TRAJ57)
CALSAWGGSEKLVF

SEQ ID NO: 477256 - protein, 14 aa, Homo sapiens
  CDR3 for beta chain variable domain of TCR clone 238628 (TRBV18, TRBJ2-5)
CASSPGVSQETQYF

SEQ ID NO: 477257 - protein, 16 aa, Homo sapiens
  CDR3 for alpha chain variable domain of TCR clone 238629 (TRAV21, TRAJ52)
CAGTNAGGTSYGKLTF

SEQ ID NO: 477258 - protein, 17 aa, Homo sapiens
  CDR3 for beta chain variable domain of TCR clone 238629 (TRBV28, TRBJ2-5)
CASSRQGGLAGAETQYF

SEQ ID NO: 477259 - protein, 14 aa, Homo sapiens
  CDR3 for alpha chain variable domain of TCR clone 238630 (TRAV12-1, TRAJ29)
CVVNEGSGNKPLVF

SEQ ID NO: 477260 - protein, 13 aa, Homo sapiens
  CDR3 for beta chain variable domain of TCR clone 238630 (TRBV7-9, TRBJ2-3)
CASSPGSTDTQYF

SEQ ID NO: 477261 - protein, 12 aa, Homo sapiens
  CDR3 for alpha chain variable domain of TCR clone 238631 (TRAV36/DV7, TRAJ40)
CAVGTGTYKYIF

SEQ ID NO: 477262 - protein, 20 aa, Homo sapiens
  CDR3 for beta chain variable domain of TCR clone 238631 (TRBV7-8, TRBJ2-2)
CASSHLFPGPTSHITGELFF

SEQ ID NO: 477263 - protein, 14 aa, Homo sapiens
  CDR3 for alpha chain variable domain of TCR clone 238632 (TRAV17, TRAJ15)
CATAPNQAGTAPIL

SEQ ID NO: 477264 - protein, 14 aa, Homo sapiens
  CDR3 for beta chain variable domain of TCR clone 238632 (TRBV19, TRBJ2-7)
CASSMGQGAIEQYF

SEQ ID NO: 477265 - protein, 15 aa, Homo sapiens
  CDR3 for alpha chain variable domain of TCR clone 238633 (TRAV13-1, TRAJ45)
CAAPHSGGGADGLTF

SEQ ID NO: 477266 - protein, 15 aa, Homo sapiens
  CDR3 for beta chain variable domain of TCR clone 238633 (TRBV19, TRBJ1-6)
CASSTQGAVGSPLHF

SEQ ID NO: 477267 - protein, 13 aa, Homo sapiens
  CDR3 for alpha chain variable domain of TCR clone 238634 (TRAV8-1, TRAJ41)
CAVNPGSGYALNF

SEQ ID NO: 477268 - protein, 14 aa, Homo sapiens
  CDR3 for beta chain variable domain of TCR clone 238634 (TRBV23-1, TRBJ2-5)
CASSFLRSQETQYF

SEQ ID NO: 477269 - protein, 11 aa, Homo sapiens
  CDR3 for alpha chain variable domain of TCR clone 238635 (TRAV17, TRAJ31)
CATSNNARLMF

SEQ ID NO: 477270 - protein, 14 aa, Homo sapiens
  CDR3 for beta chain variable domain of TCR clone 238635 (TRBV6-1, TRBJ1-3)
CASVQGGGGNTIYF

SEQ ID NO: 477271 - protein, 12 aa, Homo sapiens
  CDR3 for alpha chain variable domain of TCR clone 238636 (TRAV29/DV5, TRAJ43)
CAAPYNNNDMRF

SEQ ID NO: 477272 - protein, 18 aa, Homo sapiens
  CDR3 for beta chain variable domain of TCR clone 238636 (TRBV7-6, TRBJ2-1)
CASSPRTSGMSSYNEQFF

SEQ ID NO: 477273 - protein, 12 aa, Homo sapiens
  CDR3 for alpha chain variable domain of TCR clone 238637 (TRAV12-3, TRAJ17)
CAMTLTGNKLTF

SEQ ID NO: 477274 - protein, 17 aa, Homo sapiens
  CDR3 for beta chain variable domain of TCR clone 238637 (TRBV13, TRBJ2-3)
CASSLSRVSGGRNTQYF

SEQ ID NO: 477275 - protein, 15 aa, Homo sapiens
  CDR3 for alpha chain variable domain of TCR clone 238638 (TRAV25, TRAJ52)
CAGRPGGTSYGKLTF

SEQ ID NO: 477276 - protein, 17 aa, Homo sapiens
  CDR3 for beta chain variable domain of TCR clone 238638 (TRBV25-1, TRBJ2-1)
CASSAYGQGRGVYEQFF

SEQ ID NO: 477277 - protein, 18 aa, Homo sapiens
  CDR3 for alpha chain variable domain of TCR clone 238639 (TRAV12-2, )
CAVEDIQNPDPAVYQLRD

SEQ ID NO: 477278 - protein, 20 aa, Homo sapiens
  CDR3 for beta chain variable domain of TCR clone 238639 (TRBV11-3, TRBJ2-7)
FASSQRTSGSLRAVLRAGHQ

SEQ ID NO: 477279 - protein, 13 aa, Homo sapiens
  CDR3 for alpha chain variable domain of TCR clone 238640 (TRAV27, TRAJ6)
CVGGTRGSYIPTF

SEQ ID NO: 477280 - protein, 14 aa, Homo sapiens
  CDR3 for beta chain variable domain of TCR clone 238640 (TRBV6-3, TRBJ1-1)
CASSYQRRDTEAFF

SEQ ID NO: 477281 - protein, 15 aa, Homo sapiens
  CDR3 for alpha chain variable domain of TCR clone 238641 (TRAV21, TRAJ57)
CAVIITQGGSEKLVF

SEQ ID NO: 477282 - protein, 14 aa, Homo sapiens
  CDR3 for beta chain variable domain of TCR clone 238641 (TRBV5-1, TRBJ2-2)
CASSLIWMPGELFF

SEQ ID NO: 477283 - protein, 11 aa, Homo sapiens
  CDR3 for alpha chain variable domain of TCR clone 238642 (TRAV2, TRAJ13)
CASGGYQKVTF

SEQ ID NO: 477284 - protein, 13 aa, Homo sapiens
  CDR3 for beta chain variable domain of TCR clone 238642 (TRBV7-9, TRBJ2-2)
CASSLDPTGELFF

SEQ ID NO: 477285 - protein, 18 aa, Homo sapiens
  CDR3 for alpha chain variable domain of TCR clone 238643 (TRAV12-3, TRAJ52)
CAMSVGGAGGTSYGKLTF

SEQ ID NO: 477286 - protein, 15 aa, Homo sapiens
  CDR3 for beta chain variable domain of TCR clone 238643 (TRBV27, TRBJ1-6)
RASSFDRGLGSPLHS

SEQ ID NO: 477287 - protein, 16 aa, Homo sapiens
  CDR3 for alpha chain variable domain of TCR clone 238644 (TRAV3, TRAJ37)
CAVRGRGSGNTGKLIF

SEQ ID NO: 477288 - protein, 16 aa, Homo sapiens
  CDR3 for beta chain variable domain of TCR clone 238644 (TRBV11-2, TRBJ2-7)
CASSPTTGGVSYEQYF

SEQ ID NO: 477289 - protein, 14 aa, Homo sapiens
  CDR3 for alpha chain variable domain of TCR clone 238645 (TRAV10, TRAJ34)
CVVSRGGDTDKLIF

SEQ ID NO: 477290 - protein, 17 aa, Homo sapiens
  CDR3 for beta chain variable domain of TCR clone 238645 (TRBV6-3, TRBJ2-3)
CASRRPLGGGSTDTQYC

SEQ ID NO: 477291 - protein, 13 aa, Homo sapiens
  CDR3 for alpha chain variable domain of TCR clone 238646 (TRAV13-1, TRAJ10)
CAALEGGGNKLTL

SEQ ID NO: 477292 - protein, 14 aa, Homo sapiens
  CDR3 for beta chain variable domain of TCR clone 238646 (TRBV18, TRBJ2-5)
CASSPPGHQETQYF

SEQ ID NO: 477293 - protein, 15 aa, Homo sapiens
  CDR3 for alpha chain variable domain of TCR clone 238647 (TRAV35, TRAJ40)
CAGQLGQAGTYKYIF

SEQ ID NO: 477294 - protein, 16 aa, Homo sapiens
  CDR3 for beta chain variable domain of TCR clone 238647 (TRBV7-3, TRBJ2-2)
CASSLKRGTLSGELFF

SEQ ID NO: 477295 - protein, 14 aa, Homo sapiens
  CDR3 for alpha chain variable domain of TCR clone 238648 (TRAV17, TRAJ16)
CATADFSDGQRLLF

SEQ ID NO: 477296 - protein, 17 aa, Homo sapiens
  CDR3 for beta chain variable domain of TCR clone 238648 (TRBV20-1, TRBJ2-1)
CSASSSGLAGSYNEQFF

SEQ ID NO: 477297 - protein, 15 aa, Homo sapiens
  CDR3 for alpha chain variable domain of TCR clone 238649 (TRAV17, TRAJ45)
CATAALGGGADGLTF

SEQ ID NO: 477298 - protein, 14 aa, Homo sapiens
  CDR3 for beta chain variable domain of TCR clone 238649 (TRBV3-1, TRBJ2-5)
CASSQAVRQETQYF

SEQ ID NO: 477299 - protein, 14 aa, Homo sapiens
  CDR3 for alpha chain variable domain of TCR clone 238650 (TRAV14/DV4, TRAJ42)
CPRGSLRSQGNLIF

SEQ ID NO: 477300 - protein, 16 aa, Homo sapiens
  CDR3 for beta chain variable domain of TCR clone 238650 (TRBV27, TRBJ2-2)
CASSCRGLVRTGELFF

SEQ ID NO: 477301 - protein, 11 aa, Homo sapiens
  CDR3 for alpha chain variable domain of TCR clone 238651 (TRAV21, TRAJ34)
CAPLDTDKLIF

SEQ ID NO: 477302 - protein, 12 aa, Homo sapiens
  CDR3 for beta chain variable domain of TCR clone 238651 (TRBV11-2, TRBJ2-2)
CASSLGGGELFF

SEQ ID NO: 477303 - protein, 13 aa, Homo sapiens
  CDR3 for alpha chain variable domain of TCR clone 238652 (TRAV5, TRAJ11)
CAETTSGYSTLTF

SEQ ID NO: 477304 - protein, 13 aa, Homo sapiens
  CDR3 for beta chain variable domain of TCR clone 238652 (TRBV12-5, TRBJ2-3)
CASGDRQSDTQYF

SEQ ID NO: 477305 - protein, 13 aa, Homo sapiens
  CDR3 for alpha chain variable domain of TCR clone 238653 (TRAV21, TRAJ27)
CAARPGNAGKSTF

SEQ ID NO: 477306 - protein, 13 aa, Homo sapiens
  CDR3 for beta chain variable domain of TCR clone 238653 (TRBV13, TRBJ2-1)
CSSILGGRGEQFF

SEQ ID NO: 477307 - protein, 13 aa, Homo sapiens
  CDR3 for alpha chain variable domain of TCR clone 238654 (TRAV8-6, TRAJ49)
CAVITNTGNQFYF

SEQ ID NO: 477308 - protein, 15 aa, Homo sapiens
  CDR3 for beta chain variable domain of TCR clone 238654 (TRBV6-3, TRBJ2-7)
CASSSPGTVFYEQYV

SEQ ID NO: 477309 - protein, 13 aa, Homo sapiens
  CDR3 for alpha chain variable domain of TCR clone 238655 (TRAV8-1, TRAJ30)
CAVIMNRDDKVIF

SEQ ID NO: 477310 - protein, 14 aa, Homo sapiens
  CDR3 for beta chain variable domain of TCR clone 238655 (TRBV12-4, TRBJ1-2)
CASSFVGTAYGYTF

SEQ ID NO: 477311 - protein, 21 aa, Homo sapiens
  CDR3 for alpha chain variable domain of TCR clone 238656 (TRAV21, )
CVVRQDAGHNNIQNPDPAVYQ

SEQ ID NO: 477312 - protein, 16 aa, Homo sapiens
  CDR3 for beta chain variable domain of TCR clone 238656 (TRBV4-2, TRBJ1-1)
CASRPLDGGGDTEAFF

SEQ ID NO: 477313 - protein, 14 aa, Homo sapiens
  CDR3 for alpha chain variable domain of TCR clone 238657 (TRAV12-2, TRAJ13)
CAVKKTAGYQKVTF

SEQ ID NO: 477314 - protein, 15 aa, Homo sapiens
  CDR3 for beta chain variable domain of TCR clone 238657 (TRBV27, TRBJ2-1)
CASSNGAGSSNEQFF

SEQ ID NO: 477315 - protein, 14 aa, Homo sapiens
  CDR3 for alpha chain variable domain of TCR clone 238658 (TRAV26-1, TRAJ45)
CIEVTGGGADGLTF

SEQ ID NO: 477316 - protein, 13 aa, Homo sapiens
  CDR3 for beta chain variable domain of TCR clone 238658 (TRBV2, TRBJ1-4)
CASSELGVEKLFF

SEQ ID NO: 477317 - protein, 12 aa, Homo sapiens
  CDR3 for alpha chain variable domain of TCR clone 238659 (TRAV12-2, TRAJ3)
CDVWSSASKIIF

SEQ ID NO: 477318 - protein, 12 aa, Homo sapiens
  CDR3 for beta chain variable domain of TCR clone 238659 (TRBV11-2, TRBJ2-1)
CASSPGNNEQFF

SEQ ID NO: 477319 - protein, 14 aa, Homo sapiens
  CDR3 for alpha chain variable domain of TCR clone 238660 (TRAV8-3, TRAJ47)
CAVGVREYGNKLVF

SEQ ID NO: 477320 - protein, 15 aa, Homo sapiens
  CDR3 for beta chain variable domain of TCR clone 238660 (TRBV7-2, TRBJ2-7)
CASSLKGALTYEQYF

SEQ ID NO: 477321 - protein, 11 aa, Homo sapiens
  CDR3 for alpha chain variable domain of TCR clone 238661 (TRAV2, TRAJ13)
CASGGYQKVTF

SEQ ID NO: 477322 - protein, 15 aa, Homo sapiens
  CDR3 for beta chain variable domain of TCR clone 238661 (TRBV13, TRBJ2-1)
CASSLLSGLNNEQFF

SEQ ID NO: 477323 - protein, 12 aa, Homo sapiens
  CDR3 for alpha chain variable domain of TCR clone 238662 (TRAV16, TRAJ9)
CALSSGGFKTIF

SEQ ID NO: 477324 - protein, 15 aa, Homo sapiens
  CDR3 for beta chain variable domain of TCR clone 238662 (TRBV5-5, TRBJ2-2)
CASSRQASGAGELFF

SEQ ID NO: 477325 - protein, 13 aa, Homo sapiens
  CDR3 for alpha chain variable domain of TCR clone 238663 (TRAV12-1, TRAJ29)
CVVNGPGNTTLVF

SEQ ID NO: 477326 - protein, 13 aa, Homo sapiens
  CDR3 for beta chain variable domain of TCR clone 238663 (TRBV7-2, TRBJ2-5)
CASSRGGLETQYF

SEQ ID NO: 477327 - protein, 15 aa, Homo sapiens
  CDR3 for alpha chain variable domain of TCR clone 238664 (TRAV17, TRAJ57)
CATGPSQGGSEKPVL

SEQ ID NO: 477328 - protein, 16 aa, Homo sapiens
  CDR3 for beta chain variable domain of TCR clone 238664 (TRBV12-4, TRBJ1-5)
CASSRPVGGSNQPQHF

SEQ ID NO: 477329 - protein, 13 aa, Homo sapiens
  CDR3 for alpha chain variable domain of TCR clone 238665 (TRAV3, TRAJ36)
CAVKRTGANNLFF

SEQ ID NO: 477330 - protein, 14 aa, Homo sapiens
  CDR3 for beta chain variable domain of TCR clone 238665 (TRBV7-9, TRBJ2-1)
CASSPRDSLYEQFF

SEQ ID NO: 477331 - protein, 15 aa, Homo sapiens
  CDR3 for alpha chain variable domain of TCR clone 238666 (TRAV8-3, TRAJ7)
CAVGSISYGNNRLAF

SEQ ID NO: 477332 - protein, 16 aa, Homo sapiens
  CDR3 for beta chain variable domain of TCR clone 238666 (TRBV19, TRBJ2-2)
CASRSPGTGATGELFF

SEQ ID NO: 477333 - protein, 11 aa, Homo sapiens
  CDR3 for alpha chain variable domain of TCR clone 238667 (TRAV2, TRAJ31)
CAVNNNARLMF

SEQ ID NO: 477334 - protein, 16 aa, Homo sapiens
  CDR3 for beta chain variable domain of TCR clone 238667 (TRBV28, TRBJ1-6)
CASSSLLEGDNSPLHF

SEQ ID NO: 477335 - protein, 10 aa, Homo sapiens
  CDR3 for alpha chain variable domain of TCR clone 238668 (TRAV25, TRAJ20)
CAVNDYELSF

SEQ ID NO: 477336 - protein, 18 aa, Homo sapiens
  CDR3 for beta chain variable domain of TCR clone 238668 (TRBV20-1, TRBJ2-6)
CSAETTPTHGSGANVLTF

SEQ ID NO: 477337 - protein, 16 aa, Homo sapiens
  CDR3 for alpha chain variable domain of TCR clone 238669 (TRAV27, TRAJ53)
CAAPEGSGGSNCKLTF

SEQ ID NO: 477338 - protein, 14 aa, Homo sapiens
  CDR3 for beta chain variable domain of TCR clone 238669 (TRBV19, TRBJ2-1)
CASPTFVLSGEQFF

SEQ ID NO: 477339 - protein, 13 aa, Homo sapiens
  CDR3 for alpha chain variable domain of TCR clone 238670 (TRAV19, TRAJ57)
CALLQGGSEKLVF

SEQ ID NO: 477340 - protein, 14 aa, Homo sapiens
  CDR3 for beta chain variable domain of TCR clone 238670 (TRBV25-1, TRBJ1-1)
CASTHLGGNTEAFF

SEQ ID NO: 477341 - protein, 14 aa, Homo sapiens
  CDR3 for alpha chain variable domain of TCR clone 238671 (TRAV12-2, TRAJ44)
CAVNPAGTASKLTF

SEQ ID NO: 477342 - protein, 12 aa, Homo sapiens
  CDR3 for beta chain variable domain of TCR clone 238671 (TRBV7-8, TRBJ2-7)
CASSRGDREQYF

SEQ ID NO: 477343 - protein, 15 aa, Homo sapiens
  CDR3 for alpha chain variable domain of TCR clone 238672 (TRAV12-2, TRAJ8)
CAVMEENTGFRKLVF

SEQ ID NO: 477344 - protein, 15 aa, Homo sapiens
  CDR3 for beta chain variable domain of TCR clone 238672 (TRBV28, TRBJ2-4)
CAAGSGTLLMGIQYF

SEQ ID NO: 477345 - protein, 15 aa, Homo sapiens
  CDR3 for alpha chain variable domain of TCR clone 238673 (TRAV3, TRAJ4)
CAQNMFSGGYNKLIF

SEQ ID NO: 477346 - protein, 15 aa, Homo sapiens
  CDR3 for beta chain variable domain of TCR clone 238673 (TRBV28, TRBJ2-1)
CASSIKAGGRSEQFF

SEQ ID NO: 477347 - protein, 13 aa, Homo sapiens
  CDR3 for alpha chain variable domain of TCR clone 238674 (TRAV12-3, TRAJ6)
CAMIPGGSYIPTF

SEQ ID NO: 477348 - protein, 18 aa, Homo sapiens
  CDR3 for beta chain variable domain of TCR clone 238674 (TRBV20-1, TRBJ2-6)
CSARTLAGGPSGANVLTF

SEQ ID NO: 477349 - protein, 15 aa, Homo sapiens
  CDR3 for alpha chain variable domain of TCR clone 238675 (TRAV38-1, TRAJ37)
CAVIFGSGNTGKLIF

SEQ ID NO: 477350 - protein, 12 aa, Homo sapiens
  CDR3 for beta chain variable domain of TCR clone 238675 (TRBV7-9, TRBJ2-7)
CASSLEGYEQYF

SEQ ID NO: 477351 - protein, 15 aa, Homo sapiens
  CDR3 for alpha chain variable domain of TCR clone 238676 (TRAV23/DV6, TRAJ13)
CAAWPGGGGYQKVTF

SEQ ID NO: 477352 - protein, 19 aa, Homo sapiens
  CDR3 for beta chain variable domain of TCR clone 238676 (TRBV19, TRBJ2-7)
CASSIPFTTVIPTSSTSGR

SEQ ID NO: 477353 - protein, 15 aa, Homo sapiens
  CDR3 for alpha chain variable domain of TCR clone 238677 (TRAV8-4, TRAJ47)
CAVSDPEEDGNKLVF

SEQ ID NO: 477354 - protein, 15 aa, Homo sapiens
  CDR3 for beta chain variable domain of TCR clone 238677 (TRBV11-2, TRBJ2-1)
CASSLGPDSYNEQFF

SEQ ID NO: 477355 - protein, 12 aa, Homo sapiens
  CDR3 for alpha chain variable domain of TCR clone 238678 (TRAV26-1, TRAJ21)
CIVRVPNYNLTN

SEQ ID NO: 477356 - protein, 16 aa, Homo sapiens
  CDR3 for beta chain variable domain of TCR clone 238678 (TRBV7-9, TRBJ2-3)
CASSLQGNPGTDTQYF

SEQ ID NO: 477357 - protein, 13 aa, Homo sapiens
  CDR3 for alpha chain variable domain of TCR clone 238679 (TRAV12-2, TRAJ39)
CAVNNNAGNMLTF

SEQ ID NO: 477358 - protein, 14 aa, Homo sapiens
  CDR3 for beta chain variable domain of TCR clone 238679 (TRBV12-5, TRBJ2-5)
CASGSRTHQETQYF

SEQ ID NO: 477359 - protein, 13 aa, Homo sapiens
  CDR3 for alpha chain variable domain of TCR clone 238680 (TRAV20, TRAJ37)
CAGCSSNTGKLIF

SEQ ID NO: 477360 - protein, 13 aa, Homo sapiens
  CDR3 for beta chain variable domain of TCR clone 238680 (TRBV7-2, TRBJ2-2)
CASSLAVTGELFF

SEQ ID NO: 477361 - protein, 13 aa, Homo sapiens
  CDR3 for alpha chain variable domain of TCR clone 238681 (TRAV6, TRAJ20)
CALAVSNDYKLSF

SEQ ID NO: 477362 - protein, 16 aa, Homo sapiens
  CDR3 for beta chain variable domain of TCR clone 238681 (TRBV7-9, TRBJ2-1)
CASSDVAGGSYNEQCF

SEQ ID NO: 477363 - protein, 13 aa, Homo sapiens
  CDR3 for alpha chain variable domain of TCR clone 238682 (TRAV12-1, TRAJ7)
CVVNMRGNNRLAF

SEQ ID NO: 477364 - protein, 16 aa, Homo sapiens
  CDR3 for beta chain variable domain of TCR clone 238682 (TRBV4-2, TRBJ1-1)
CASSQAGFGMNTEAFF

SEQ ID NO: 477365 - protein, 15 aa, Homo sapiens
  CDR3 for alpha chain variable domain of TCR clone 238683 (TRAV17, TRAJ54)
CATADLLQGAQKLVF

SEQ ID NO: 477366 - protein, 13 aa, Homo sapiens
  CDR3 for beta chain variable domain of TCR clone 238683 (TRBV2, TRBJ2-7)
CANGLAGDYEQYF

SEQ ID NO: 477367 - protein, 16 aa, Homo sapiens
  CDR3 for alpha chain variable domain of TCR clone 238684 (TRAV26-1, )
CIDIQNPDPAVYQLRD

SEQ ID NO: 477368 - protein, 19 aa, Homo sapiens
  CDR3 for beta chain variable domain of TCR clone 238684 (TRBV19, TRBJ2-5)
CASSIGQVTDCFLGETQYF

SEQ ID NO: 477369 - protein, 14 aa, Homo sapiens
  CDR3 for alpha chain variable domain of TCR clone 238685 (TRAV13-1, TRAJ13)
CAASRVGGYQKGTF

SEQ ID NO: 477370 - protein, 17 aa, Homo sapiens
  CDR3 for beta chain variable domain of TCR clone 238685 (TRBV15, TRBJ1-5)
CATSRAPPGTRNQHQHF

SEQ ID NO: 477371 - protein, 12 aa, Homo sapiens
  CDR3 for alpha chain variable domain of TCR clone 238686 (TRAV2, TRAJ10)
CASTGGGNKLTS

SEQ ID NO: 477372 - protein, 14 aa, Homo sapiens
  CDR3 for beta chain variable domain of TCR clone 238686 (TRBV7-2, TRBJ2-2)
CASRGQGASGELFF

SEQ ID NO: 477373 - protein, 23 aa, Homo sapiens
  CDR3 for alpha chain variable domain of TCR clone 238687 (TRAV4, TRAJ26)
IPADRKSSTLSLPRVYYGQNFVF

SEQ ID NO: 477374 - protein, 18 aa, Homo sapiens
  CDR3 for beta chain variable domain of TCR clone 238687 (TRBV7-2, TRBJ2-1)
CASSLVGLAGANYNERFF

SEQ ID NO: 477375 - protein, 14 aa, Homo sapiens
  CDR3 for alpha chain variable domain of TCR clone 238688 (TRAV26-2, TRAJ32)
CCVGYGGATNKLIF

SEQ ID NO: 477376 - protein, 15 aa, Homo sapiens
  CDR3 for beta chain variable domain of TCR clone 238688 (TRBV7-2, TRBJ2-2)
CASRRPGQNTGELFF

SEQ ID NO: 477377 - protein, 12 aa, Homo sapiens
  CDR3 for alpha chain variable domain of TCR clone 238689 (TRAV17, TRAJ20)
CATLANDYKLSF

SEQ ID NO: 477378 - protein, 17 aa, Homo sapiens
  CDR3 for beta chain variable domain of TCR clone 238689 (TRBV13, TRBJ2-3)
CASSLSRVAGGRNTQYF

SEQ ID NO: 477379 - protein, 15 aa, Homo sapiens
  CDR3 for alpha chain variable domain of TCR clone 238690 (TRAV2, TRAJ22)
CAVPSRGGSARQLTF

SEQ ID NO: 477380 - protein, 11 aa, Homo sapiens
  CDR3 for beta chain variable domain of TCR clone 238690 (TRBV27, TRBJ2-3)
CSSSLGDTQYF

SEQ ID NO: 477381 - protein, 13 aa, Homo sapiens
  CDR3 for alpha chain variable domain of TCR clone 238691 (TRAV8-6, TRAJ49)
CAVITNTGNQFYF

SEQ ID NO: 477382 - protein, 15 aa, Homo sapiens
  CDR3 for beta chain variable domain of TCR clone 238691 (TRBV4-1, TRBJ2-5)
CASSQWDLYQETQYF

SEQ ID NO: 477383 - protein, 19 aa, Homo sapiens
  CDR3 for alpha chain variable domain of TCR clone 238692 (TRAV26-1, TRAJ52)
CIVRAHRNAGGTSYGKLTF

SEQ ID NO: 477384 - protein, 15 aa, Homo sapiens
  CDR3 for beta chain variable domain of TCR clone 238692 (TRBV12-4, TRBJ2-5)
WASSPPTGLQETQYF

SEQ ID NO: 477385 - protein, 16 aa, Homo sapiens
  CDR3 for alpha chain variable domain of TCR clone 238693 (TRAV20, TRAJ53)
CAVQAESGGSNYKLTF

SEQ ID NO: 477386 - protein, 14 aa, Homo sapiens
  CDR3 for beta chain variable domain of TCR clone 238693 (TRBV7-2, TRBJ2-7)
CASSPKTSFYEQYF

SEQ ID NO: 477387 - protein, 14 aa, Homo sapiens
  CDR3 for alpha chain variable domain of TCR clone 238694 (TRAV12-2, TRAJ40)
CAVKIPSGTYKYIF

SEQ ID NO: 477388 - protein, 13 aa, Homo sapiens
  CDR3 for beta chain variable domain of TCR clone 238694 (TRBV7-9, TRBJ1-2)
CASSLKQIYGYTF

SEQ ID NO: 477389 - protein, 13 aa, Homo sapiens
  CDR3 for alpha chain variable domain of TCR clone 238695 (TRAV12-3, TRAJ33)
CAISVNSNYQLIW

SEQ ID NO: 477390 - protein, 14 aa, Homo sapiens
  CDR3 for beta chain variable domain of TCR clone 238695 (TRBV27, TRBJ2-5)
CASSSLKGWETQYF

SEQ ID NO: 477391 - protein, 12 aa, Homo sapiens
  CDR3 for alpha chain variable domain of TCR clone 238696 (TRAV12-1, TRAJ40)
CVVYSGTYKYIF

SEQ ID NO: 477392 - protein, 15 aa, Homo sapiens
  CDR3 for beta chain variable domain of TCR clone 238696 (TRBV27, TRBJ1-6)
CASIFDRGLGSPLHF

SEQ ID NO: 477393 - protein, 15 aa, Homo sapiens
  CDR3 for alpha chain variable domain of TCR clone 238697 (TRAV12-3, TRAJ42)
CAMITSVGSQGNLIF

SEQ ID NO: 477394 - protein, 14 aa, Homo sapiens
  CDR3 for beta chain variable domain of TCR clone 238697 (TRBV12-4, TRBJ2-3)
CASSLGQGTDTQYS

SEQ ID NO: 477395 - protein, 11 aa, Homo sapiens
  CDR3 for alpha chain variable domain of TCR clone 238698 (TRAV2, TRAJ33)
CAVDSNYQLIW

SEQ ID NO: 477396 - protein, 16 aa, Homo sapiens
  CDR3 for beta chain variable domain of TCR clone 238698 (TRBV6-3, TRBJ2-7)
CTSVPAVTVRVYEQYF

SEQ ID NO: 477397 - protein, 16 aa, Homo sapiens
  CDR3 for alpha chain variable domain of TCR clone 238699 (TRAV12-1, TRAJ48)
CVVNMVSNFGNEKLTF

SEQ ID NO: 477398 - protein, 18 aa, Homo sapiens
  CDR3 for beta chain variable domain of TCR clone 238699 (TRBV11-2, TRBJ2-6)
CASSLNPFLGTGANVPTF

SEQ ID NO: 477399 - protein, 14 aa, Homo sapiens
  CDR3 for alpha chain variable domain of TCR clone 238700 (TRAV12-3, TRAJ10)
SHLPLTGGGNKLTF

SEQ ID NO: 477400 - protein, 12 aa, Homo sapiens
  CDR3 for beta chain variable domain of TCR clone 238700 (TRBV7-9, TRBJ2-7)
CATRTDAYEQYC

SEQ ID NO: 477401 - protein, 16 aa, Homo sapiens
  CDR3 for alpha chain variable domain of TCR clone 238701 (TRAV22, TRAJ45)
CAMERGKRGGADGLTF

SEQ ID NO: 477402 - protein, 13 aa, Homo sapiens
  CDR3 for beta chain variable domain of TCR clone 238701 (TRBV27, TRBJ1-1)
CPSSLSIGAEAFF

SEQ ID NO: 477403 - protein, 13 aa, Homo sapiens
  CDR3 for alpha chain variable domain of TCR clone 238702 (TRAV27, TRAJ6)
CAGGTRGSYIPTF

SEQ ID NO: 477404 - protein, 11 aa, Homo sapiens
  CDR3 for beta chain variable domain of TCR clone 238702 (TRBV27, TRBJ2-3)
CASSLGDTQYF

SEQ ID NO: 477405 - protein, 16 aa, Homo sapiens
  CDR3 for alpha chain variable domain of TCR clone 238703 (TRAV3, TRAJ10)
CAVRDMRAGGGNKLTF

SEQ ID NO: 477406 - protein, 20 aa, Homo sapiens
  CDR3 for beta chain variable domain of TCR clone 238703 (TRBV28, TRBJ2-1)
CASPPIGRSPGLAGGNEQFF

SEQ ID NO: 477407 - protein, 14 aa, Homo sapiens
  CDR3 for alpha chain variable domain of TCR clone 238704 (TRAV34, TRAJ44)
CGADGTGTASKLTF

SEQ ID NO: 477408 - protein, 11 aa, Homo sapiens
  CDR3 for beta chain variable domain of TCR clone 238704 (TRBV12-4, TRBJ2-7)
CASRQSYEQYF

SEQ ID NO: 477409 - protein, 14 aa, Homo sapiens
  CDR3 for alpha chain variable domain of TCR clone 238705 (TRAV30, TRAJ39)
CGTEWRNAGNMLTF

SEQ ID NO: 477410 - protein, 14 aa, Homo sapiens
  CDR3 for beta chain variable domain of TCR clone 238705 (TRBV7-6, TRBJ2-5)
CASSPSTGLSAQYF

SEQ ID NO: 477411 - protein, 13 aa, Homo sapiens
  CDR3 for alpha chain variable domain of TCR clone 238706 (TRAV26-1, TRAJ34)
CIVRPWITDKLIF

SEQ ID NO: 477412 - protein, 17 aa, Homo sapiens
  CDR3 for beta chain variable domain of TCR clone 238706 (TRBV20-1, TRBJ2-1)
CSASSSGLAGSYNEQFF

SEQ ID NO: 477413 - protein, 10 aa, Homo sapiens
  CDR3 for alpha chain variable domain of TCR clone 238707 (TRAV1-2, TRAJ20)
CACNDYKLSF

SEQ ID NO: 477414 - protein, 16 aa, Homo sapiens
  CDR3 for beta chain variable domain of TCR clone 238707 (TRBV20-1, TRBJ2-1)
CRARDLKQGMNNEQFF

SEQ ID NO: 477415 - protein, 13 aa, Homo sapiens
  CDR3 for alpha chain variable domain of TCR clone 238708 (TRAV3, TRAJ8)
CAVRFTGFQKLVF

SEQ ID NO: 477416 - protein, 15 aa, Homo sapiens
  CDR3 for beta chain variable domain of TCR clone 238708 (TRBV28, TRBJ2-1)
CASSIIAGGRSEQFF

SEQ ID NO: 477417 - protein, 10 aa, Homo sapiens
  CDR3 for alpha chain variable domain of TCR clone 238709 (TRAV16, TRAJ26)
CALSGSEFCF

SEQ ID NO: 477418 - protein, 12 aa, Homo sapiens
  CDR3 for beta chain variable domain of TCR clone 238709 (TRBV11-2, TRBJ2-1)
CAISPGNNEQFF

SEQ ID NO: 477419 - protein, 15 aa, Homo sapiens
  CDR3 for alpha chain variable domain of TCR clone 238710 (TRAV17, TRAJ57)
CATGPSQGGSEKMVF

SEQ ID NO: 477420 - protein, 12 aa, Homo sapiens
  CDR3 for beta chain variable domain of TCR clone 238710 (TRBV11-2, TRBJ2-1)
CASSPGNNEQFF

SEQ ID NO: 477421 - protein, 15 aa, Homo sapiens
  CDR3 for alpha chain variable domain of TCR clone 238711 (TRAV17, TRAJ35)
CATAFVIGFGNVLHF

SEQ ID NO: 477422 - protein, 16 aa, Homo sapiens
  CDR3 for beta chain variable domain of TCR clone 238711 (TRBV11-2, TRBJ2-7)
CASSPRAGGPRYEQYF

SEQ ID NO: 477423 - protein, 11 aa, Homo sapiens
  CDR3 for alpha chain variable domain of TCR clone 238712 (TRAV6, TRAJ41)
CALNSGYALNF

SEQ ID NO: 477424 - protein, 15 aa, Homo sapiens
  CDR3 for beta chain variable domain of TCR clone 238712 (TRBV20-1, TRBJ1-5)
CSAFKNGQGNQPQHF

SEQ ID NO: 477425 - protein, 15 aa, Homo sapiens
  CDR3 for alpha chain variable domain of TCR clone 238713 (TRAV8-4, TRAJ13)
CAVSDWGGGCQKVTF

SEQ ID NO: 477426 - protein, 15 aa, Homo sapiens
  CDR3 for beta chain variable domain of TCR clone 238713 (TRBV25-1, TRBJ1-4)
CASSPGDSTNEKLFF

SEQ ID NO: 477427 - protein, 13 aa, Homo sapiens
  CDR3 for alpha chain variable domain of TCR clone 238714 (TRAV13-2, TRAJ48)
CAEMDFGNEKLTF

SEQ ID NO: 477428 - protein, 14 aa, Homo sapiens
  CDR3 for beta chain variable domain of TCR clone 238714 (TRBV7-8, TRBJ2-3)
CASSFKSSTDTQYF

SEQ ID NO: 477429 - protein, 12 aa, Homo sapiens
  CDR3 for alpha chain variable domain of TCR clone 238715 (TRAV12-3, TRAJ17)
CAMTLTGNKLNF

SEQ ID NO: 477430 - protein, 14 aa, Homo sapiens
  CDR3 for beta chain variable domain of TCR clone 238715 (TRBV7-2, TRBJ2-7)
CASRSQGAAYEQYF

SEQ ID NO: 477431 - protein, 13 aa, Homo sapiens
  CDR3 for alpha chain variable domain of TCR clone 238716 (TRAV1-2, TRAJ9)
CAALNTGGFETIF

SEQ ID NO: 477432 - protein, 13 aa, Homo sapiens
  CDR3 for beta chain variable domain of TCR clone 238716 (TRBV15, TRBJ1-6)
CATSGGLNSPLHF

SEQ ID NO: 477433 - protein, 16 aa, Homo sapiens
  CDR3 for alpha chain variable domain of TCR clone 238717 (TRAV17, TRAJ22)
CATGPISSGSARQLTF

SEQ ID NO: 477434 - protein, 13 aa, Homo sapiens
  CDR3 for beta chain variable domain of TCR clone 238717 (TRBV11-2, TRBJ2-1)
CASSLRLAGGRFF

SEQ ID NO: 477435 - protein, 14 aa, Homo sapiens
  CDR3 for alpha chain variable domain of TCR clone 238718 (TRAV12-2, TRAJ40)
CTVKIPSGTYKYIF

SEQ ID NO: 477436 - protein, 13 aa, Homo sapiens
  CDR3 for beta chain variable domain of TCR clone 238718 (TRBV7-9, TRBJ1-2)
CASSLKQNYGYTF

SEQ ID NO: 477437 - protein, 13 aa, Homo sapiens
  CDR3 for alpha chain variable domain of TCR clone 238719 (TRAV12-3, TRAJ13)
CAMSSGGYQKVTF

SEQ ID NO: 477438 - protein, 17 aa, Homo sapiens
  CDR3 for beta chain variable domain of TCR clone 238719 (TRBV4-1, TRBJ1-4)
CASSPEGPRGVEEKLFF

SEQ ID NO: 477439 - protein, 14 aa, Homo sapiens
  CDR3 for alpha chain variable domain of TCR clone 238720 (TRAV1-2, TRAJ16)
CAVNRFSDGQKLLF

SEQ ID NO: 477440 - protein, 16 aa, Homo sapiens
  CDR3 for beta chain variable domain of TCR clone 238720 (TRBV19, TRBJ2-1)
CASSKAGASSYNEQFF

SEQ ID NO: 477441 - protein, 13 aa, Homo sapiens
  CDR3 for alpha chain variable domain of TCR clone 238721 (TRAV8-6, TRAJ20)
CAVSYSNDYKLSF

SEQ ID NO: 477442 - protein, 16 aa, Homo sapiens
  CDR3 for beta chain variable domain of TCR clone 238721 (TRBV20-1, TRBJ1-4)
CSAPGQGLLTNEKLFF

SEQ ID NO: 477443 - protein, 13 aa, Homo sapiens
  CDR3 for alpha chain variable domain of TCR clone 238722 (TRAV36/DV7, TRAJ37)
CAVFSSNTGKLIF

SEQ ID NO: 477444 - protein, 16 aa, Homo sapiens
  CDR3 for beta chain variable domain of TCR clone 238722 (TRBV3-1, TRBJ2-5)
CASSPGQFNGFGTQCF

SEQ ID NO: 477445 - protein, 18 aa, Homo sapiens
  CDR3 for alpha chain variable domain of TCR clone 238723 (TRAV9-2, TRAJ52)
CALSRHNAGGTSYGKLTF

SEQ ID NO: 477446 - protein, 13 aa, Homo sapiens
  CDR3 for beta chain variable domain of TCR clone 238723 (TRBV7-9, TRBJ1-2)
CGSSLKQNYGYTF

SEQ ID NO: 477447 - protein, 14 aa, Homo sapiens
  CDR3 for alpha chain variable domain of TCR clone 238724 (TRAV8-2, TRAJ4)
CVGRPSGGYNKLIF

SEQ ID NO: 477448 - protein, 15 aa, Homo sapiens
  CDR3 for beta chain variable domain of TCR clone 238724 (TRBV2, TRBJ2-1)
CASSELAGSYNEQFF

SEQ ID NO: 477449 - protein, 11 aa, Homo sapiens
  CDR3 for alpha chain variable domain of TCR clone 238725 (TRAV21, TRAJ34)
CAHYNTDKLIF

SEQ ID NO: 477450 - protein, 13 aa, Homo sapiens
  CDR3 for beta chain variable domain of TCR clone 238725 (TRBV7-6, TRBJ1-2)
CASSSVADYGYTF

SEQ ID NO: 477451 - protein, 14 aa, Homo sapiens
  CDR3 for alpha chain variable domain of TCR clone 238726 (TRAV13-2, TRAJ17)
CAENSKAAGNKLTF

SEQ ID NO: 477452 - protein, 12 aa, Homo sapiens
  CDR3 for beta chain variable domain of TCR clone 238726 (TRBV2, TRBJ2-1)
CAKREGYNEQFF

SEQ ID NO: 477453 - protein, 14 aa, Homo sapiens
  CDR3 for alpha chain variable domain of TCR clone 238727 (TRAV26-1, TRAJ39)
CIVRGSRAGNMLTF

SEQ ID NO: 477454 - protein, 16 aa, Homo sapiens
  CDR3 for beta chain variable domain of TCR clone 238727 (TRBV12-4, TRBJ2-7)
CASSVIGGTGTYEQYF

SEQ ID NO: 477455 - protein, 12 aa, Homo sapiens
  CDR3 for alpha chain variable domain of TCR clone 238728 (TRAV12-3, TRAJ40)
CAMTSGTYKYIF

SEQ ID NO: 477456 - protein, 15 aa, Homo sapiens
  CDR3 for beta chain variable domain of TCR clone 238728 (TRBV7-3, TRBJ2-2)
CASSLTGHGTGELFF

SEQ ID NO: 477457 - protein, 13 aa, Homo sapiens
  CDR3 for alpha chain variable domain of TCR clone 238729 (TRAV26-1, TRAJ34)
CIVRGHNTYKLIF

SEQ ID NO: 477458 - protein, 15 aa, Homo sapiens
  CDR3 for beta chain variable domain of TCR clone 238729 (TRBV4-1, TRBJ2-7)
CASSQEWGPSYEQYF

SEQ ID NO: 477459 - protein, 14 aa, Homo sapiens
  CDR3 for alpha chain variable domain of TCR clone 238730 (TRAV21, TRAJ36)
CAARRKTGANNLFF

SEQ ID NO: 477460 - protein, 14 aa, Homo sapiens
  CDR3 for beta chain variable domain of TCR clone 238730 (TRBV12-5, TRBJ2-5)
CASGSRTHQETQYF

SEQ ID NO: 477461 - protein, 17 aa, Homo sapiens
  CDR3 for alpha chain variable domain of TCR clone 238731 (TRAV1-1, TRAJ4)
CALYNKLMFGAGTRLAV

SEQ ID NO: 477462 - protein, 16 aa, Homo sapiens
  CDR3 for beta chain variable domain of TCR clone 238731 (TRBV7-3, TRBJ2-2)
CASSLKRGTLSGELFF

SEQ ID NO: 477463 - protein, 23 aa, Homo sapiens
  CDR3 for alpha chain variable domain of TCR clone 238732 (TRAV26-1, TRAJ38)
CIADNAGNNHIQNPDHAVYQLRD

SEQ ID NO: 477464 - protein, 17 aa, Homo sapiens
  CDR3 for beta chain variable domain of TCR clone 238732 (TRBV11-2, TRBJ2-6)
CASSQRDIFSGANVLTF

SEQ ID NO: 477465 - protein, 14 aa, Homo sapiens
  CDR3 for alpha chain variable domain of TCR clone 238733 (TRAV1-2, TRAJ16)
CAVNRFSDGQKLLF

SEQ ID NO: 477466 - protein, 12 aa, Homo sapiens
  CDR3 for beta chain variable domain of TCR clone 238733 (TRBV20-1, TRBJ1-5)
CSAAGWDQHQHC

SEQ ID NO: 477467 - protein, 13 aa, Homo sapiens
  CDR3 for alpha chain variable domain of TCR clone 238734 (TRAV8-6, TRAJ32)
CAVSDRATNKRIF

SEQ ID NO: 477468 - protein, 13 aa, Homo sapiens
  CDR3 for beta chain variable domain of TCR clone 238734 (TRBV11-2, TRBJ2-7)
CASSLDLGYEQYF

SEQ ID NO: 477469 - protein, 11 aa, Homo sapiens
  CDR3 for alpha chain variable domain of TCR clone 238735 (TRAV12-2, TRAJ33)
CAVTSNYQMIW

SEQ ID NO: 477470 - protein, 14 aa, Homo sapiens
  CDR3 for beta chain variable domain of TCR clone 238735 (TRBV12-4, TRBJ2-2)
CASNQGANTGELFF

SEQ ID NO: 477471 - protein, 14 aa, Homo sapiens
  CDR3 for alpha chain variable domain of TCR clone 238736 (TRAV8-3, TRAJ10)
CAVGNAGGGNKLTF

SEQ ID NO: 477472 - protein, 13 aa, Homo sapiens
  CDR3 for beta chain variable domain of TCR clone 238736 (TRBV10-3, TRBJ2-7)
CASKLAVNYEQYF

SEQ ID NO: 477473 - protein, 18 aa, Homo sapiens
  CDR3 for alpha chain variable domain of TCR clone 238737 (TRAV21, TRAJ52)
CAVRPAPAGGTSDGKLTV

SEQ ID NO: 477474 - protein, 17 aa, Homo sapiens
  CDR3 for beta chain variable domain of TCR clone 238737 (TRBV13, TRBJ2-3)
CARSLSRVAGGRNTQYF

SEQ ID NO: 477475 - protein, 23 aa, Homo sapiens
  CDR3 for alpha chain variable domain of TCR clone 238738 (TRAV36/DV7, TRAJ50)
CAVEPENLLRQDIQNPDPAVYQL

SEQ ID NO: 477476 - protein, 15 aa, Homo sapiens
  CDR3 for beta chain variable domain of TCR clone 238738 (TRBV7-8, TRBJ2-1)
CASSLAGGLYNEQFF

SEQ ID NO: 477477 - protein, 14 aa, Homo sapiens
  CDR3 for alpha chain variable domain of TCR clone 238739 (TRAV38-1, TRAJ40)
CALRPTSGTYKDIF

SEQ ID NO: 477478 - protein, 13 aa, Homo sapiens
  CDR3 for beta chain variable domain of TCR clone 238739 (TRBV7-9, TRBJ1-2)
CASSLKQNYGYTF

SEQ ID NO: 477479 - protein, 14 aa, Homo sapiens
  CDR3 for alpha chain variable domain of TCR clone 238740 (TRAV8-2, TRAJ4)
CVVSPSGVYNKLIF

SEQ ID NO: 477480 - protein, 15 aa, Homo sapiens
  CDR3 for beta chain variable domain of TCR clone 238740 (TRBV4-1, TRBJ1-4)
CASSDTGGTNDKLFF

SEQ ID NO: 477481 - protein, 11 aa, Homo sapiens
  CDR3 for alpha chain variable domain of TCR clone 238741 (TRAV13-1, TRAJ6)
SATLGSYIPTF

SEQ ID NO: 477482 - protein, 12 aa, Homo sapiens
  CDR3 for beta chain variable domain of TCR clone 238741 (TRBV11-2, TRBJ2-1)
CASSPGNTEQFF

SEQ ID NO: 477483 - protein, 14 aa, Homo sapiens
  CDR3 for alpha chain variable domain of TCR clone 238742 (TRAV8-4, TRAJ54)
CAVSEVLGAQKLEF

SEQ ID NO: 477484 - protein, 15 aa, Homo sapiens
  CDR3 for beta chain variable domain of TCR clone 238742 (TRBV10-2, TRBJ2-6)
CASSEQGTGANVLTF

SEQ ID NO: 477485 - protein, 17 aa, Homo sapiens
  CDR3 for alpha chain variable domain of TCR clone 238743 (TRAV8-1, TRAJ43)
CAVTNDMRVGAGTRLTV

SEQ ID NO: 477486 - protein, 17 aa, Homo sapiens
  CDR3 for beta chain variable domain of TCR clone 238743 (TRBV5-4, TRBJ2-1)
CASSSAGGRGPYNEQFF

SEQ ID NO: 477487 - protein, 11 aa, Homo sapiens
  CDR3 for alpha chain variable domain of TCR clone 238744 (TRAV12-2, TRAJ33)
CAVGSNYQLIW

SEQ ID NO: 477488 - protein, 14 aa, Homo sapiens
  CDR3 for beta chain variable domain of TCR clone 238744 (TRBV6-1, TRBJ2-2)
CAIVEHIESGELFF

SEQ ID NO: 477489 - protein, 15 aa, Homo sapiens
  CDR3 for alpha chain variable domain of TCR clone 238745 (TRAV17, TRAJ16)
CATALRFSDGQKLLF

SEQ ID NO: 477490 - protein, 18 aa, Homo sapiens
  CDR3 for beta chain variable domain of TCR clone 238745 (TRBV7-7, TRBJ2-1)
CASSLALTSGGSYNEQFF

SEQ ID NO: 477491 - protein, 13 aa, Homo sapiens
  CDR3 for alpha chain variable domain of TCR clone 238746 (TRAV30, TRAJ24)
FGTVTDSWGKLQF

SEQ ID NO: 477492 - protein, 15 aa, Homo sapiens
  CDR3 for beta chain variable domain of TCR clone 238746 (TRBV19, TRBJ1-1)
CASTSGQIQNTEAFF

SEQ ID NO: 477493 - protein, 12 aa, Homo sapiens
  CDR3 for alpha chain variable domain of TCR clone 238747 (TRAV1-1, TRAJ43)
CAPRVSSNDMRF

SEQ ID NO: 477494 - protein, 16 aa, Homo sapiens
  CDR3 for beta chain variable domain of TCR clone 238747 (TRBV12-5, TRBJ2-5)
CASGPRTSGNQETQYF

SEQ ID NO: 477495 - protein, 15 aa, Homo sapiens
  CDR3 for alpha chain variable domain of TCR clone 238748 (TRAV12-3, TRAJ6)
CAISASTGGSYIPTF

SEQ ID NO: 477496 - protein, 16 aa, Homo sapiens
  CDR3 for beta chain variable domain of TCR clone 238748 (TRBV20-1, TRBJ1-4)
CSAPGQGLLTNEKLFF

SEQ ID NO: 477497 - protein, 13 aa, Homo sapiens
  CDR3 for alpha chain variable domain of TCR clone 238749 (TRAV13-1, TRAJ5)
CAASDTSRRALTF

SEQ ID NO: 477498 - protein, 14 aa, Homo sapiens
  CDR3 for beta chain variable domain of TCR clone 238749 (TRBV4-2, TRBJ2-1)
CASGLDRAYNEQFF

SEQ ID NO: 477499 - protein, 15 aa, Homo sapiens
  CDR3 for alpha chain variable domain of TCR clone 238750 (TRAV4, TRAJ8)
CLVGEQNTGFQKLVF

SEQ ID NO: 477500 - protein, 15 aa, Homo sapiens
  CDR3 for beta chain variable domain of TCR clone 238750 (TRBV7-9, TRBJ2-5)
CASSNRDYLQETQYF

SEQ ID NO: 477501 - protein, 17 aa, Homo sapiens
  CDR3 for alpha chain variable domain of TCR clone 238751 (TRAV3, TRAJ42)
CAVRDRDYGGSQGNLIV

SEQ ID NO: 477502 - protein, 14 aa, Homo sapiens
  CDR3 for beta chain variable domain of TCR clone 238751 (TRBV2, TRBJ1-5)
CASSENRGGQPQHF

SEQ ID NO: 477503 - protein, 12 aa, Homo sapiens
  CDR3 for alpha chain variable domain of TCR clone 238752 (TRAV12-3, TRAJ17)
CAMTLTGNKQNS

SEQ ID NO: 477504 - protein, 15 aa, Homo sapiens
  CDR3 for beta chain variable domain of TCR clone 238752 (TRBV20-1, TRBJ2-7)
CSARDRVSGMDEQYF

SEQ ID NO: 477505 - protein, 11 aa, Homo sapiens
  CDR3 for alpha chain variable domain of TCR clone 238753 (TRAV3, TRAJ21)
CAVGNFNKFYF

SEQ ID NO: 477506 - protein, 16 aa, Homo sapiens
  CDR3 for beta chain variable domain of TCR clone 238753 (TRBV19, TRBJ2-2)
CASSTARASNTGELFF

SEQ ID NO: 477507 - protein, 15 aa, Homo sapiens
  CDR3 for alpha chain variable domain of TCR clone 238754 (TRAV27, TRAJ38)
CAARRNAGNHRKLIW

SEQ ID NO: 477508 - protein, 15 aa, Homo sapiens
  CDR3 for beta chain variable domain of TCR clone 238754 (TRBV5-1, TRBJ2-1)
CASSPPRAPYNEQFF

SEQ ID NO: 477509 - protein, 12 aa, Homo sapiens
  CDR3 for alpha chain variable domain of TCR clone 238755 (TRAV30, TRAJ39)
CGRGNAGNMLTF

SEQ ID NO: 477510 - protein, 20 aa, Homo sapiens
  CDR3 for beta chain variable domain of TCR clone 238755 (TRBV28, TRBJ2-1)
CASTPIGRSPGLAGGNERFF

SEQ ID NO: 477511 - protein, 13 aa, Homo sapiens
  CDR3 for alpha chain variable domain of TCR clone 238756 (TRAV36/DV7, TRAJ53)
CALSGGSNYKLTF

SEQ ID NO: 477512 - protein, 13 aa, Homo sapiens
  CDR3 for beta chain variable domain of TCR clone 238756 (TRBV28, TRBJ2-4)
CASSQSSKHIQYF

SEQ ID NO: 477513 - protein, 14 aa, Homo sapiens
  CDR3 for alpha chain variable domain of TCR clone 238757 (TRAV8-6, TRAJ52)
CAVVGGTSYGKLTF

SEQ ID NO: 477514 - protein, 15 aa, Homo sapiens
  CDR3 for beta chain variable domain of TCR clone 238757 (TRBV11-2, TRBJ2-5)
CASSLWAGGVETQYF

SEQ ID NO: 477515 - protein, 16 aa, Homo sapiens
  CDR3 for alpha chain variable domain of TCR clone 238758 (TRAV26-1, TRAJ37)
CIVRGDGSGNTGKLIF

SEQ ID NO: 477516 - protein, 14 aa, Homo sapiens
  CDR3 for beta chain variable domain of TCR clone 238758 (TRBV7-3, TRBJ2-1)
CQQPDGGREVEQFF

SEQ ID NO: 477517 - protein, 12 aa, Homo sapiens
  CDR3 for alpha chain variable domain of TCR clone 238759 (TRAV29/DV5, TRAJ26)
CAAIQSGQNFVF

SEQ ID NO: 477518 - protein, 15 aa, Homo sapiens
  CDR3 for beta chain variable domain of TCR clone 238759 (TRBV19, TRBJ1-5)
CASSDSGPRNQPQHF

SEQ ID NO: 477519 - protein, 14 aa, Homo sapiens
  CDR3 for alpha chain variable domain of TCR clone 238760 (TRAV17, TRAJ33)
CATDARRSNYQLIW

SEQ ID NO: 477520 - protein, 14 aa, Homo sapiens
  CDR3 for beta chain variable domain of TCR clone 238760 (TRBV25-1, TRBJ1-4)
CASSGGGQPEKLFF

SEQ ID NO: 477521 - protein, 17 aa, Homo sapiens
  CDR3 for alpha chain variable domain of TCR clone 238761 (TRAV3, TRAJ6)
CAVRDGPSAGGSYIPTF

SEQ ID NO: 477522 - protein, 14 aa, Homo sapiens
  CDR3 for beta chain variable domain of TCR clone 238761 (TRBV7-2, TRBJ2-7)
CASNPKTSFYEQYF

SEQ ID NO: 477523 - protein, 14 aa, Homo sapiens
  CDR3 for alpha chain variable domain of TCR clone 238762 (TRAV9-2, TRAJ39)
CALYIYNAGNMLTF

SEQ ID NO: 477524 - protein, 16 aa, Homo sapiens
  CDR3 for beta chain variable domain of TCR clone 238762 (TRBV19, TRBJ2-3)
CASSPGAASRTDTQYF

SEQ ID NO: 477525 - protein, 13 aa, Homo sapiens
  CDR3 for alpha chain variable domain of TCR clone 238763 (TRAV13-2, TRAJ48)
CAEMDFGNEKLTF

SEQ ID NO: 477526 - protein, 15 aa, Homo sapiens
  CDR3 for beta chain variable domain of TCR clone 238763 (TRBV14, TRBJ2-5)
CASSQGEAVQETQYF

SEQ ID NO: 477527 - protein, 16 aa, Homo sapiens
  CDR3 for alpha chain variable domain of TCR clone 238764 (TRAV30, TRAJ24)
CGTEIVDADSWGRFQF

SEQ ID NO: 477528 - protein, 15 aa, Homo sapiens
  CDR3 for beta chain variable domain of TCR clone 238764 (TRBV4-1, TRBJ2-5)
CASSQWDLYQETQYF

SEQ ID NO: 477529 - protein, 17 aa, Homo sapiens
  CDR3 for alpha chain variable domain of TCR clone 238765 (TRAV39, TRAJ32)
CAVDIKGVGGATNKPIF

SEQ ID NO: 477530 - protein, 11 aa, Homo sapiens
  CDR3 for beta chain variable domain of TCR clone 238765 (TRBV18, TRBJ1-2)
CASSPLNGYTF

SEQ ID NO: 477531 - protein, 13 aa, Homo sapiens
  CDR3 for alpha chain variable domain of TCR clone 238766 (TRAV1-2, TRAJ9)
CAALNTGGFKTIF

SEQ ID NO: 477532 - protein, 13 aa, Homo sapiens
  CDR3 for beta chain variable domain of TCR clone 238766 (TRBV15, TRBJ1-6)
CATSGGLNSHLHF

SEQ ID NO: 477533 - protein, 12 aa, Homo sapiens
  CDR3 for alpha chain variable domain of TCR clone 238767 (TRAV20, TRAJ39)
CAVGTAGNMLTF

SEQ ID NO: 477534 - protein, 16 aa, Homo sapiens
  CDR3 for beta chain variable domain of TCR clone 238767 (TRBV15, TRBJ1-2)
CATSRGPRTGGGGYTF

SEQ ID NO: 477535 - protein, 10 aa, Homo sapiens
  CDR3 for alpha chain variable domain of TCR clone 238768 (TRAV36/DV7, TRAJ49)
CALTGNQFYF

SEQ ID NO: 477536 - protein, 16 aa, Homo sapiens
  CDR3 for beta chain variable domain of TCR clone 238768 (TRBV18, TRBJ1-1)
CASSPGVGGRGGEAFF

SEQ ID NO: 477537 - protein, 14 aa, Homo sapiens
  CDR3 for alpha chain variable domain of TCR clone 238769 (TRAV16, TRAJ54)
CALSGVQGAQKLVF

SEQ ID NO: 477538 - protein, 15 aa, Homo sapiens
  CDR3 for beta chain variable domain of TCR clone 238769 (TRBV18, TRBJ2-2)
CASSTSGLHTEELFF

SEQ ID NO: 477539 - protein, 14 aa, Homo sapiens
  CDR3 for alpha chain variable domain of TCR clone 238770 (TRAV1-2, TRAJ16)
CAGNRFSDGQKLLF

SEQ ID NO: 477540 - protein, 15 aa, Homo sapiens
  CDR3 for beta chain variable domain of TCR clone 238770 (TRBV28, TRBJ2-5)
CASSPGQGSIETQYF

SEQ ID NO: 477541 - protein, 13 aa, Homo sapiens
  CDR3 for alpha chain variable domain of TCR clone 238771 (TRAV17, TRAJ9)
CATDYTGGFKTIF

SEQ ID NO: 477542 - protein, 15 aa, Homo sapiens
  CDR3 for beta chain variable domain of TCR clone 238771 (TRBV11-2, TRBJ2-1)
CASSLGTSGLNEQFF

SEQ ID NO: 477543 - protein, 12 aa, Homo sapiens
  CDR3 for alpha chain variable domain of TCR clone 238772 (TRAV8-6, TRAJ43)
CAVSHNNNDMRF

SEQ ID NO: 477544 - protein, 14 aa, Homo sapiens
  CDR3 for beta chain variable domain of TCR clone 238772 (TRBV10-3, TRBJ1-1)
CAISDGSGVTEAFL

SEQ ID NO: 477545 - protein, 12 aa, Homo sapiens
  CDR3 for alpha chain variable domain of TCR clone 238773 (TRAV13-1, TRAJ49)
CAASPMGNQCYF

SEQ ID NO: 477546 - protein, 13 aa, Homo sapiens
  CDR3 for beta chain variable domain of TCR clone 238773 (TRBV20-1, TRBJ2-2)
CSASAAGTGELFF

SEQ ID NO: 477547 - protein, 15 aa, Homo sapiens
  CDR3 for alpha chain variable domain of TCR clone 238774 (TRAV26-1, TRAJ23)
CIVRVAGYQGGKLIF

SEQ ID NO: 477548 - protein, 12 aa, Homo sapiens
  CDR3 for beta chain variable domain of TCR clone 238774 (TRBV7-2, TRBJ2-5)
CASSRYQETQYF

SEQ ID NO: 477549 - protein, 17 aa, Homo sapiens
  CDR3 for alpha chain variable domain of TCR clone 238775 (TRAV8-6, TRAJ58)
CAVSSWVGETSGSRFTF

SEQ ID NO: 477550 - protein, 17 aa, Homo sapiens
  CDR3 for beta chain variable domain of TCR clone 238775 (TRBV11-2, TRBJ2-1)
CASSLYPPGVEYNGQFF

SEQ ID NO: 477551 - protein, 13 aa, Homo sapiens
  CDR3 for alpha chain variable domain of TCR clone 238776 (TRAV2, TRAJ13)
CASGGYQKLPLEL

SEQ ID NO: 477552 - protein, 13 aa, Homo sapiens
  CDR3 for beta chain variable domain of TCR clone 238776 (TRBV6-1, TRBJ1-1)
CASSRQGNTEAFF

SEQ ID NO: 477553 - protein, 18 aa, Homo sapiens
  CDR3 for alpha chain variable domain of TCR clone 238777 (TRAV26-1, TRAJ30)
CCVLLHRQRTNRDDTIIF

SEQ ID NO: 477554 - protein, 18 aa, Homo sapiens
  CDR3 for beta chain variable domain of TCR clone 238777 (TRBV4-1, TRBJ1-5)
CASSQDPRGQGLNQPQHF

SEQ ID NO: 477555 - protein, 14 aa, Homo sapiens
  CDR3 for alpha chain variable domain of TCR clone 238778 (TRAV9-2, TRAJ39)
CALYIYNAGNMLTF

SEQ ID NO: 477556 - protein, 15 aa, Homo sapiens
  CDR3 for beta chain variable domain of TCR clone 238778 (TRBV5-1, TRBJ2-1)
GASSPPRAPYNEQFF

SEQ ID NO: 477557 - protein, 11 aa, Homo sapiens
  CDR3 for alpha chain variable domain of TCR clone 238779 (TRAV21, TRAJ9)
CAVPGGFKTIF

SEQ ID NO: 477558 - protein, 14 aa, Homo sapiens
  CDR3 for beta chain variable domain of TCR clone 238779 (TRBV4-2, TRBJ2-1)
CASGLDRAYNEQFF

SEQ ID NO: 477559 - protein, 13 aa, Homo sapiens
  CDR3 for alpha chain variable domain of TCR clone 238780 (TRAV12-3, TRAJ46)
CAVKKSSGDKLTF

SEQ ID NO: 477560 - protein, 19 aa, Homo sapiens
  CDR3 for beta chain variable domain of TCR clone 238780 (TRBV25-1, TRBJ2-2)
CAILVYRVDRGRKTGELFF

SEQ ID NO: 477561 - protein, 14 aa, Homo sapiens
  CDR3 for alpha chain variable domain of TCR clone 238781 (TRAV8-3, TRAJ4)
CDVGASGGDNKLIF

SEQ ID NO: 477562 - protein, 13 aa, Homo sapiens
  CDR3 for beta chain variable domain of TCR clone 238781 (TRBV18, TRBJ2-5)
CASSLQGQETQYF

SEQ ID NO: 477563 - protein, 13 aa, Homo sapiens
  CDR3 for alpha chain variable domain of TCR clone 238782 (TRAV20, TRAJ37)
CAGCSSNTGKLIF

SEQ ID NO: 477564 - protein, 15 aa, Homo sapiens
  CDR3 for beta chain variable domain of TCR clone 238782 (TRBV27, TRBJ2-1)
CASSNGGGSSNEQFF

SEQ ID NO: 477565 - protein, 19 aa, Homo sapiens
  CDR3 for alpha chain variable domain of TCR clone 238783 (TRAV1-2, TRAJ26)
CLLPLCCERPDNYGQNFVC

SEQ ID NO: 477566 - protein, 12 aa, Homo sapiens
  CDR3 for beta chain variable domain of TCR clone 238783 (TRBV7-9, TRBJ2-7)
CATRTDAYEQYF

SEQ ID NO: 477567 - protein, 13 aa, Homo sapiens
  CDR3 for alpha chain variable domain of TCR clone 238784 (TRAV21, TRAJ45)
FAVMGGGADGLTF

SEQ ID NO: 477568 - protein, 14 aa, Homo sapiens
  CDR3 for beta chain variable domain of TCR clone 238784 (TRBV4-3, TRBJ1-4)
CASSPLQRNEKLFF

SEQ ID NO: 477569 - protein, 17 aa, Homo sapiens
  CDR3 for alpha chain variable domain of TCR clone 238785 (TRAV3, TRAJ38)
CAVRDCLNAGNNRKLIW

SEQ ID NO: 477570 - protein, 12 aa, Homo sapiens
  CDR3 for beta chain variable domain of TCR clone 238785 (TRBV14, TRBJ2-7)
CASSLYKDEQYF

SEQ ID NO: 477571 - protein, 14 aa, Homo sapiens
  CDR3 for alpha chain variable domain of TCR clone 238786 (TRAV3, TRAJ30)
CAVRDIGRDEKIIF

SEQ ID NO: 477572 - protein, 15 aa, Homo sapiens
  CDR3 for beta chain variable domain of TCR clone 238786 (TRBV10-3, TRBJ1-1)
CAISEAGTGGTEAFF

SEQ ID NO: 477573 - protein, 11 aa, Homo sapiens
  CDR3 for alpha chain variable domain of TCR clone 238787 (TRAV12-3, TRAJ49)
CAMISGNQFYF

SEQ ID NO: 477574 - protein, 17 aa, Homo sapiens
  CDR3 for beta chain variable domain of TCR clone 238787 (TRBV5-7, TRBJ2-7)
CASSLWRVLAGSYGQYF

SEQ ID NO: 477575 - protein, 12 aa, Homo sapiens
  CDR3 for alpha chain variable domain of TCR clone 238788 (TRAV29/DV5, TRAJ49)
CAATGTGNQFYF

SEQ ID NO: 477576 - protein, 13 aa, Homo sapiens
  CDR3 for beta chain variable domain of TCR clone 238788 (TRBV7-3, TRBJ1-1)
CASSQDWGAEAFF

SEQ ID NO: 477577 - protein, 11 aa, Homo sapiens
  CDR3 for alpha chain variable domain of TCR clone 238789 (TRAV3, TRAJ21)
CAVGNFNKFYF

SEQ ID NO: 477578 - protein, 13 aa, Homo sapiens
  CDR3 for beta chain variable domain of TCR clone 238789 (TRBV7-3, TRBJ1-1)
CASSQDWGSEAFF

SEQ ID NO: 477579 - protein, 16 aa, Homo sapiens
  CDR3 for alpha chain variable domain of TCR clone 238790 (TRAV12-2, TRAJ18)
CAVFAGRGSTLGRLYF

SEQ ID NO: 477580 - protein, 12 aa, Homo sapiens
  CDR3 for beta chain variable domain of TCR clone 238790 (TRBV7-8, TRBJ2-7)
CASSLGDREQYF

SEQ ID NO: 477581 - protein, 12 aa, Homo sapiens
  CDR3 for alpha chain variable domain of TCR clone 238791 (TRAV1-1, TRAJ39)
CAVPVVGNMHTF

SEQ ID NO: 477582 - protein, 13 aa, Homo sapiens
  CDR3 for beta chain variable domain of TCR clone 238791 (TRBV4-1, TRBJ1-1)
CASSRKMNTEAFF

SEQ ID NO: 477583 - protein, 10 aa, Homo sapiens
  CDR3 for alpha chain variable domain of TCR clone 238792 (TRAV36/DV7, TRAJ49)
CALTGNQVYF

SEQ ID NO: 477584 - protein, 14 aa, Homo sapiens
  CDR3 for beta chain variable domain of TCR clone 238792 (TRBV2, TRBJ1-2)
CASRRTGSPYGYTF

SEQ ID NO: 477585 - protein, 22 aa, Homo sapiens
  CDR3 for alpha chain variable domain of TCR clone 238793 (TRAV27, TRAJ41)
CAVRTQIPDIQNPDPAVYQLRY

SEQ ID NO: 477586 - protein, 13 aa, Homo sapiens
  CDR3 for beta chain variable domain of TCR clone 238793 (TRBV20-1, TRBJ1-1)
CSARGGGNTEAFF

SEQ ID NO: 477587 - protein, 18 aa, Homo sapiens
  CDR3 for alpha chain variable domain of TCR clone 238794 (TRAV29/DV5, TRAJ52)
CAAGFRGAGGTSYGKLTF

SEQ ID NO: 477588 - protein, 16 aa, Homo sapiens
  CDR3 for beta chain variable domain of TCR clone 238794 (TRBV7-3, TRBJ2-2)
CDSSLKRGTFSGELFF

SEQ ID NO: 477589 - protein, 14 aa, Homo sapiens
  CDR3 for alpha chain variable domain of TCR clone 238795 (TRAV1-2, TRAJ8)
CAVRADTGFQKLVF

SEQ ID NO: 477590 - protein, 14 aa, Homo sapiens
  CDR3 for beta chain variable domain of TCR clone 238795 (TRBV19, TRBJ2-1)
CASPTFVLSGEQFF

SEQ ID NO: 477591 - protein, 14 aa, Homo sapiens
  CDR3 for alpha chain variable domain of TCR clone 238796 (TRAV12-2, TRAJ13)
CAVTKTGGYQKVTF

SEQ ID NO: 477592 - protein, 15 aa, Homo sapiens
  CDR3 for beta chain variable domain of TCR clone 238796 (TRBV7-9, TRBJ1-6)
CASSSPGRGNSPLHF

SEQ ID NO: 477593 - protein, 15 aa, Homo sapiens
  CDR3 for alpha chain variable domain of TCR clone 238797 (TRAV12-2, TRAJ53)
CAVNGGGGSHYKLTF

SEQ ID NO: 477594 - protein, 16 aa, Homo sapiens
  CDR3 for beta chain variable domain of TCR clone 238797 (TRBV4-1, TRBJ1-2)
CASSQDAGQVLYGYTF

SEQ ID NO: 477595 - protein, 10 aa, Homo sapiens
  CDR3 for alpha chain variable domain of TCR clone 238798 (TRAV12-1, TRAJ15)
CVNAGTALIF

SEQ ID NO: 477596 - protein, 16 aa, Homo sapiens
  CDR3 for beta chain variable domain of TCR clone 238798 (TRBV28, TRBJ2-1)
CASSSRVRDSYNEQFF

SEQ ID NO: 477597 - protein, 17 aa, Homo sapiens
  CDR3 for alpha chain variable domain of TCR clone 238799 (TRAV13-2, TRAJ22)
CRESPIASSGSARQLTF

SEQ ID NO: 477598 - protein, 14 aa, Homo sapiens
  CDR3 for beta chain variable domain of TCR clone 238799 (TRBV5-4, TRBJ1-6)
CASSLWSDNSPLHF

SEQ ID NO: 477599 - protein, 12 aa, Homo sapiens
  CDR3 for alpha chain variable domain of TCR clone 238800 (TRAV20, TRAJ33)
CAVRGSNSQLIW

SEQ ID NO: 477600 - protein, 15 aa, Homo sapiens
  CDR3 for beta chain variable domain of TCR clone 238800 (TRBV11-3, TRBJ2-3)
CASLKDGREGDTQYF

SEQ ID NO: 477601 - protein, 13 aa, Homo sapiens
  CDR3 for alpha chain variable domain of TCR clone 238801 (TRAV2, TRAJ23)
CAVMGNQGGKLIF

SEQ ID NO: 477602 - protein, 14 aa, Homo sapiens
  CDR3 for beta chain variable domain of TCR clone 238801 (TRBV11-2, TRBJ2-1)
CASSPATPYHEQFF

SEQ ID NO: 477603 - protein, 14 aa, Homo sapiens
  CDR3 for alpha chain variable domain of TCR clone 238802 (TRAV1-2, TRAJ16)
CAVNRFSDGQKLLF

SEQ ID NO: 477604 - protein, 15 aa, Homo sapiens
  CDR3 for beta chain variable domain of TCR clone 238802 (TRBV7-9, TRBJ1-5)
CASSQGHQHNQPQHF

SEQ ID NO: 477605 - protein, 15 aa, Homo sapiens
  CDR3 for alpha chain variable domain of TCR clone 238803 (TRAV3, TRAJ37)
CCERKGVWNTGKLIF

SEQ ID NO: 477606 - protein, 15 aa, Homo sapiens
  CDR3 for beta chain variable domain of TCR clone 238803 (TRBV9, TRBJ1-4)
CASSVGGSTNEKLFF

SEQ ID NO: 477607 - protein, 14 aa, Homo sapiens
  CDR3 for alpha chain variable domain of TCR clone 238804 (TRAV34, TRAJ22)
CGADTSGSARQLTF

SEQ ID NO: 477608 - protein, 17 aa, Homo sapiens
  CDR3 for beta chain variable domain of TCR clone 238804 (TRBV2, TRBJ2-3)
CASTEGPPRRWTDTQYF

SEQ ID NO: 477609 - protein, 13 aa, Homo sapiens
  CDR3 for alpha chain variable domain of TCR clone 238805 (TRAV14/DV4, TRAJ23)
CAMREVKGGKLIF

SEQ ID NO: 477610 - protein, 16 aa, Homo sapiens
  CDR3 for beta chain variable domain of TCR clone 238805 (TRBV7-7, TRBJ2-1)
CASSLASGTSYNEQFF

SEQ ID NO: 477611 - protein, 13 aa, Homo sapiens
  CDR3 for alpha chain variable domain of TCR clone 238806 (TRAV8-3, TRAJ28)
CTVGAVGVYQLTF

SEQ ID NO: 477612 - protein, 16 aa, Homo sapiens
  CDR3 for beta chain variable domain of TCR clone 238806 (TRBV19, TRBJ2-1)
CASSKAGPSSYNEQFF

SEQ ID NO: 477613 - protein, 15 aa, Homo sapiens
  CDR3 for alpha chain variable domain of TCR clone 238807 (TRAV26-1, TRAJ44)
CIVRIGTGTASKLTF

SEQ ID NO: 477614 - protein, 15 aa, Homo sapiens
  CDR3 for beta chain variable domain of TCR clone 238807 (TRBV7-6, TRBJ2-1)
CASSALAGEGNEQFF

SEQ ID NO: 477615 - protein, 12 aa, Homo sapiens
  CDR3 for alpha chain variable domain of TCR clone 238808 (TRAV3, TRAJ31)
CAVRDGNARLMF

SEQ ID NO: 477616 - protein, 14 aa, Homo sapiens
  CDR3 for beta chain variable domain of TCR clone 238808 (TRBV20-1, TRBJ1-6)
CSARGTGYNSPLHF

SEQ ID NO: 477617 - protein, 14 aa, Homo sapiens
  CDR3 for alpha chain variable domain of TCR clone 238809 (TRAV13-1, TRAJ44)
CAAKATGTASKLTF

SEQ ID NO: 477618 - protein, 12 aa, Homo sapiens
  CDR3 for beta chain variable domain of TCR clone 238809 (TRBV27, TRBJ2-7)
CASSGGFYEQYF

SEQ ID NO: 477619 - protein, 14 aa, Homo sapiens
  CDR3 for alpha chain variable domain of TCR clone 238810 (TRAV16, TRAJ32)
CALKSGGATNKLIF

SEQ ID NO: 477620 - protein, 13 aa, Homo sapiens
  CDR3 for beta chain variable domain of TCR clone 238810 (TRBV15, TRBJ1-6)
CATSGGLNSPRHF

SEQ ID NO: 477621 - protein, 14 aa, Homo sapiens
  CDR3 for alpha chain variable domain of TCR clone 238811 (TRAV12-3, TRAJ58)
CAMSTETSGSGLTF

SEQ ID NO: 477622 - protein, 11 aa, Homo sapiens
  CDR3 for beta chain variable domain of TCR clone 238811 (TRBV29-1, TRBJ2-5)
CSEDRTGTQYF

SEQ ID NO: 477623 - protein, 14 aa, Homo sapiens
  CDR3 for alpha chain variable domain of TCR clone 238812 (TRAV29/DV5, TRAJ20)
CPASAPIEDYKLSF

SEQ ID NO: 477624 - protein, 15 aa, Homo sapiens
  CDR3 for beta chain variable domain of TCR clone 238812 (TRBV20-1, TRBJ2-5)
CSAPPRTGFGETQYF

SEQ ID NO: 477625 - protein, 16 aa, Homo sapiens
  CDR3 for alpha chain variable domain of TCR clone 238813 (TRAV27, TRAJ56)
CAGVSRKDGANSKLTF

SEQ ID NO: 477626 - protein, 14 aa, Homo sapiens
  CDR3 for beta chain variable domain of TCR clone 238813 (TRBV25-1, TRBJ1-1)
CASTHLGGNTEAFF

SEQ ID NO: 477627 - protein, 13 aa, Homo sapiens
  CDR3 for alpha chain variable domain of TCR clone 238814 (TRAV16, TRAJ54)
CALMVQGAQKLVF

SEQ ID NO: 477628 - protein, 12 aa, Homo sapiens
  CDR3 for beta chain variable domain of TCR clone 238814 (TRBV18, TRBJ2-7)
FASSTAMGEQYF

SEQ ID NO: 477629 - protein, 11 aa, Homo sapiens
  CDR3 for alpha chain variable domain of TCR clone 238815 (TRAV2, TRAJ33)
CAVDSNYQLIW

SEQ ID NO: 477630 - protein, 11 aa, Homo sapiens
  CDR3 for beta chain variable domain of TCR clone 238815 (TRBV7-2, TRBJ2-3)
CASSSSDTQYF

SEQ ID NO: 477631 - protein, 15 aa, Homo sapiens
  CDR3 for alpha chain variable domain of TCR clone 238816 (TRAV12-2, )
CAVEDIQNPDPAVYQ

SEQ ID NO: 477632 - protein, 15 aa, Homo sapiens
  CDR3 for beta chain variable domain of TCR clone 238816 (TRBV11-1, TRBJ2-7)
CASSLNYGASYEQYF

SEQ ID NO: 477633 - protein, 13 aa, Homo sapiens
  CDR3 for alpha chain variable domain of TCR clone 238817 (TRAV13-1, TRAJ5)
CAARVTGRRALTF

SEQ ID NO: 477634 - protein, 15 aa, Homo sapiens
  CDR3 for beta chain variable domain of TCR clone 238817 (TRBV7-9, TRBJ2-7)
CASSRGGGLTYEQYF

SEQ ID NO: 477635 - protein, 15 aa, Homo sapiens
  CDR3 for alpha chain variable domain of TCR clone 238818 (TRAV26-1, TRAJ11)
CIVRALNSGYSTITF

SEQ ID NO: 477636 - protein, 14 aa, Homo sapiens
  CDR3 for beta chain variable domain of TCR clone 238818 (TRBV18, TRBJ2-5)
CASSPGVSQETQYF

SEQ ID NO: 477637 - protein, 12 aa, Homo sapiens
  CDR3 for alpha chain variable domain of TCR clone 238819 (TRAV13-2, TRAJ54)
CGAHEGAQRLVF

SEQ ID NO: 477638 - protein, 16 aa, Homo sapiens
  CDR3 for beta chain variable domain of TCR clone 238819 (TRBV12-5, TRBJ2-5)
CASGPRTSGNQETQYF

SEQ ID NO: 477639 - protein, 15 aa, Homo sapiens
  CDR3 for alpha chain variable domain of TCR clone 238820 (TRAV16, TRAJ4)
CALEDPSGGYNKLIF

SEQ ID NO: 477640 - protein, 13 aa, Homo sapiens
  CDR3 for beta chain variable domain of TCR clone 238820 (TRBV7-2, TRBJ2-2)
CASSLAVTGELFF

SEQ ID NO: 477641 - protein, 10 aa, Homo sapiens
  CDR3 for alpha chain variable domain of TCR clone 238821 (TRAV8-2, TRAJ31)
CVVVNARLMF

SEQ ID NO: 477642 - protein, 15 aa, Homo sapiens
  CDR3 for beta chain variable domain of TCR clone 238821 (TRBV15, TRBJ1-5)
CATSRDPVSNQPQHF

SEQ ID NO: 477643 - protein, 13 aa, Homo sapiens
  CDR3 for alpha chain variable domain of TCR clone 238822 (TRAV8-3, TRAJ40)
CAVGAQYLRNLQI

SEQ ID NO: 477644 - protein, 14 aa, Homo sapiens
  CDR3 for beta chain variable domain of TCR clone 238822 (TRBV2, TRBJ2-1)
CASRTGSSYNEQFF

SEQ ID NO: 477645 - protein, 14 aa, Homo sapiens
  CDR3 for alpha chain variable domain of TCR clone 238823 (TRAV1-2, TRAJ16)
CAVNRFSDGHKLLF

SEQ ID NO: 477646 - protein, 13 aa, Homo sapiens
  CDR3 for beta chain variable domain of TCR clone 238823 (TRBV10-3, TRBJ2-1)
CATGLADNNEQFF

SEQ ID NO: 477647 - protein, 15 aa, Homo sapiens
  CDR3 for alpha chain variable domain of TCR clone 238824 (TRAV3, TRAJ32)
CAGSSYGGATNTLIF

SEQ ID NO: 477648 - protein, 13 aa, Homo sapiens
  CDR3 for beta chain variable domain of TCR clone 238824 (TRBV20-1, TRBJ2-7)
CSARPSTNYEQYF

SEQ ID NO: 477649 - protein, 15 aa, Homo sapiens
  CDR3 for alpha chain variable domain of TCR clone 238825 (TRAV12-1, TRAJ44)
CVVFVNTGTASKLTF

SEQ ID NO: 477650 - protein, 17 aa, Homo sapiens
  CDR3 for beta chain variable domain of TCR clone 238825 (TRBV7-8, TRBJ2-6)
CASSAGTGGAGANVLTI

SEQ ID NO: 477651 - protein, 11 aa, Homo sapiens
  CDR3 for alpha chain variable domain of TCR clone 238826 (TRAV21, TRAJ31)
CAVRDNARLMF

SEQ ID NO: 477652 - protein, 17 aa, Homo sapiens
  CDR3 for beta chain variable domain of TCR clone 238826 (TRBV28, TRBJ1-5)
CASSLSWLVSSNQPQHF

SEQ ID NO: 477653 - protein, 15 aa, Homo sapiens
  CDR3 for alpha chain variable domain of TCR clone 238827 (TRAV26-1, TRAJ29)
CIVRVEGSGNTPLVF

SEQ ID NO: 477654 - protein, 15 aa, Homo sapiens
  CDR3 for beta chain variable domain of TCR clone 238827 (TRBV11-3, TRBJ2-2)
CASSLVGTGAGELFF

SEQ ID NO: 477655 - protein, 23 aa, Homo sapiens
  CDR3 for alpha chain variable domain of TCR clone 238828 (TRAV26-1, TRAJ38)
CIAVNAGNNHIQNPDPSVYQLRD

SEQ ID NO: 477656 - protein, 13 aa, Homo sapiens
  CDR3 for beta chain variable domain of TCR clone 238828 (TRBV20-1, TRBJ1-1)
CSARGGGNTEAFF

SEQ ID NO: 477657 - protein, 11 aa, Homo sapiens
  CDR3 for alpha chain variable domain of TCR clone 238829 (TRAV2, TRAJ13)
CASGGYQKVTF

SEQ ID NO: 477658 - protein, 14 aa, Homo sapiens
  CDR3 for beta chain variable domain of TCR clone 238829 (TRBV12-5, TRBJ2-5)
CASGSRTHQDTQYF

SEQ ID NO: 477659 - protein, 16 aa, Homo sapiens
  CDR3 for alpha chain variable domain of TCR clone 238830 (TRAV27, TRAJ13)
CAGAKSDSGGYQKVTC

SEQ ID NO: 477660 - protein, 15 aa, Homo sapiens
  CDR3 for beta chain variable domain of TCR clone 238830 (TRBV29-1, TRBJ2-1)
CSVGRHALFYNEQFF

SEQ ID NO: 477661 - protein, 14 aa, Homo sapiens
  CDR3 for alpha chain variable domain of TCR clone 238831 (TRAV12-1, TRAJ30)
CVPTGTNRDDKIIF

SEQ ID NO: 477662 - protein, 11 aa, Homo sapiens
  CDR3 for beta chain variable domain of TCR clone 238831 (TRBV4-1, TRBJ2-2)
CASERTGELFF

SEQ ID NO: 477663 - protein, 12 aa, Homo sapiens
  CDR3 for alpha chain variable domain of TCR clone 238832 (TRAV3, TRAJ6)
CAVRDGMGRRKL

SEQ ID NO: 477664 - protein, 15 aa, Homo sapiens
  CDR3 for beta chain variable domain of TCR clone 238832 (TRBV5-1, TRBJ2-7)
CASSLGDFTTYEQYF

SEQ ID NO: 477665 - protein, 13 aa, Homo sapiens
  CDR3 for alpha chain variable domain of TCR clone 238833 (TRAV23/DV6, TRAJ12)
CAPRLGSSYKLIF

SEQ ID NO: 477666 - protein, 12 aa, Homo sapiens
  CDR3 for beta chain variable domain of TCR clone 238833 (TRBV7-6, TRBJ2-5)
CASSLSQETQYF

SEQ ID NO: 477667 - protein, 14 aa, Homo sapiens
  CDR3 for alpha chain variable domain of TCR clone 238834 (TRAV8-4, TRAJ13)
CAVSGVRGYQKVTF

SEQ ID NO: 477668 - protein, 13 aa, Homo sapiens
  CDR3 for beta chain variable domain of TCR clone 238834 (TRBV27, TRBJ2-7)
CASSLTTGYEQYF

SEQ ID NO: 477669 - protein, 18 aa, Homo sapiens
  CDR3 for alpha chain variable domain of TCR clone 238835 (TRAV26-1, TRAJ23)
FIVRVGLEVGNQGGKLIF

SEQ ID NO: 477670 - protein, 16 aa, Homo sapiens
  CDR3 for beta chain variable domain of TCR clone 238835 (TRBV12-4, TRBJ2-5)
CASSFFVRGRQETQYF

SEQ ID NO: 477671 - protein, 16 aa, Homo sapiens
  CDR3 for alpha chain variable domain of TCR clone 238836 (TRAV38-2/DV8, TRAJ57)
CAYRSVGQGGSEKLVF

SEQ ID NO: 477672 - protein, 16 aa, Homo sapiens
  CDR3 for beta chain variable domain of TCR clone 238836 (TRBV7-2, TRBJ1-4)
CASSPVGRFDREKLFF

SEQ ID NO: 477673 - protein, 11 aa, Homo sapiens
  CDR3 for alpha chain variable domain of TCR clone 238837 (TRAV35, TRAJ22)
CAGPGMGQLTF

SEQ ID NO: 477674 - protein, 11 aa, Homo sapiens
  CDR3 for beta chain variable domain of TCR clone 238837 (TRBV12-4, TRBJ2-2)
CASSSAGELFF

SEQ ID NO: 477675 - protein, 17 aa, Homo sapiens
  CDR3 for alpha chain variable domain of TCR clone 238838 (TRAV36/DV7, TRAJ52)
CAVAQRAGGNSYGKLTF

SEQ ID NO: 477676 - protein, 14 aa, Homo sapiens
  CDR3 for beta chain variable domain of TCR clone 238838 (TRBV19, TRBJ2-1)
CASPTFVLSGEQFF

SEQ ID NO: 477677 - protein, 14 aa, Homo sapiens
  CDR3 for alpha chain variable domain of TCR clone 238839 (TRAV12-2, TRAJ9)
CAVNMEGGGFKTII

SEQ ID NO: 477678 - protein, 14 aa, Homo sapiens
  CDR3 for beta chain variable domain of TCR clone 238839 (TRBV2, TRBJ2-5)
CASSEVLAQETQYF

SEQ ID NO: 477679 - protein, 15 aa, Homo sapiens
  CDR3 for alpha chain variable domain of TCR clone 238840 (TRAV27, TRAJ38)
CAARRNAGNNRALIW

SEQ ID NO: 477680 - protein, 13 aa, Homo sapiens
  CDR3 for beta chain variable domain of TCR clone 238840 (TRBV20-1, TRBJ1-1)
CSARAGGNTEAFF

SEQ ID NO: 477681 - protein, 14 aa, Homo sapiens
  CDR3 for alpha chain variable domain of TCR clone 238841 (TRAV6, TRAJ37)
CDLGSQGNTGKLVF

SEQ ID NO: 477682 - protein, 15 aa, Homo sapiens
  CDR3 for beta chain variable domain of TCR clone 238841 (TRBV2, TRBJ2-1)
CASSEEREGDNEQFF

SEQ ID NO: 477683 - protein, 14 aa, Homo sapiens
  CDR3 for alpha chain variable domain of TCR clone 238842 (TRAV16, TRAJ54)
CALSGVQGAPKLVF

SEQ ID NO: 477684 - protein, 15 aa, Homo sapiens
  CDR3 for beta chain variable domain of TCR clone 238842 (TRBV18, TRBJ2-2)
CASSTSGLHTGELFF

SEQ ID NO: 477685 - protein, 14 aa, Homo sapiens
  CDR3 for alpha chain variable domain of TCR clone 238843 (TRAV1-2, TRAJ8)
CAVREDTGFQKLVF

SEQ ID NO: 477686 - protein, 11 aa, Homo sapiens
  CDR3 for beta chain variable domain of TCR clone 238843 (TRBV11-2, TRBJ2-2)
CASSLPGELFL

SEQ ID NO: 477687 - protein, 15 aa, Homo sapiens
  CDR3 for alpha chain variable domain of TCR clone 238844 (TRAV3, TRAJ5)
CAVRDLDTGRRALTF

SEQ ID NO: 477688 - protein, 12 aa, Homo sapiens
  CDR3 for beta chain variable domain of TCR clone 238844 (TRBV11-2, TRBJ2-2)
CASSLGGGELFL

SEQ ID NO: 477689 - protein, 11 aa, Homo sapiens
  CDR3 for alpha chain variable domain of TCR clone 238845 (TRAV17, TRAJ49)
CATTTGNQFYF

SEQ ID NO: 477690 - protein, 12 aa, Homo sapiens
  CDR3 for beta chain variable domain of TCR clone 238845 (TRBV2, TRBJ2-7)
CASSGGSGIPYF

SEQ ID NO: 477691 - protein, 14 aa, Homo sapiens
  CDR3 for alpha chain variable domain of TCR clone 238846 (TRAV1-2, TRAJ16)
CAVSRFSDGQKLLF

SEQ ID NO: 477692 - protein, 13 aa, Homo sapiens
  CDR3 for beta chain variable domain of TCR clone 238846 (TRBV7-9, TRBJ2-3)
CASSPGSTDTQYF

SEQ ID NO: 477693 - protein, 13 aa, Homo sapiens
  CDR3 for alpha chain variable domain of TCR clone 238847 (TRAV12-1, TRAJ11)
CVVTLGGYSTLTF

SEQ ID NO: 477694 - protein, 13 aa, Homo sapiens
  CDR3 for beta chain variable domain of TCR clone 238847 (TRBV20-1, TRBJ1-2)
CSARDQGAYGYTF

SEQ ID NO: 477695 - protein, 10 aa, Homo sapiens
  CDR3 for alpha chain variable domain of TCR clone 238848 (TRAV13-1, TRAJ30)
CAARDDRIIF

SEQ ID NO: 477696 - protein, 13 aa, Homo sapiens
  CDR3 for beta chain variable domain of TCR clone 238848 (TRBV24-1, TRBJ2-2)
CATSDWSTGELFF

SEQ ID NO: 477697 - protein, 13 aa, Homo sapiens
  CDR3 for alpha chain variable domain of TCR clone 238849 (TRAV1-2, TRAJ12)
CAVSMDSSYKLIF

SEQ ID NO: 477698 - protein, 15 aa, Homo sapiens
  CDR3 for beta chain variable domain of TCR clone 238849 (TRBV27, TRBJ2-5)
CARSLIPSGGETQYF

SEQ ID NO: 477699 - protein, 10 aa, Homo sapiens
  CDR3 for alpha chain variable domain of TCR clone 238850 (TRAV23/DV6, TRAJ57)
CAASSTLSQG

SEQ ID NO: 477700 - protein, 18 aa, Homo sapiens
  CDR3 for beta chain variable domain of TCR clone 238850 (TRBV25-1, TRBJ1-2)
CASSGLQNGQGLIFGYTF

SEQ ID NO: 477701 - protein, 15 aa, Homo sapiens
  CDR3 for alpha chain variable domain of TCR clone 238851 (TRAV21, TRAJ24)
CAARSSTDSWGKLQF

SEQ ID NO: 477702 - protein, 13 aa, Homo sapiens
  CDR3 for beta chain variable domain of TCR clone 238851 (TRBV11-2, TRBJ2-5)
CASSSTGQETQYF

SEQ ID NO: 477703 - protein, 14 aa, Homo sapiens
  CDR3 for alpha chain variable domain of TCR clone 238852 (TRAV12-1, TRAJ12)
CVVTRMDSSYKLSS

SEQ ID NO: 477704 - protein, 13 aa, Homo sapiens
  CDR3 for beta chain variable domain of TCR clone 238852 (TRBV20-1, TRBJ1-1)
CSARGGGNTEAFF

SEQ ID NO: 477705 - protein, 16 aa, Homo sapiens
  CDR3 for alpha chain variable domain of TCR clone 238853 (TRAV8-6, TRAJ37)
CAVSGLGSSNTGKLFF

SEQ ID NO: 477706 - protein, 15 aa, Homo sapiens
  CDR3 for beta chain variable domain of TCR clone 238853 (TRBV20-1, TRBJ1-5)
CSARSGPSMNQPQHF

SEQ ID NO: 477707 - protein, 15 aa, Homo sapiens
  CDR3 for alpha chain variable domain of TCR clone 238854 (TRAV2, TRAJ9)
CAVAALNSGGFKTIF

SEQ ID NO: 477708 - protein, 14 aa, Homo sapiens
  CDR3 for beta chain variable domain of TCR clone 238854 (TRBV7-8, TRBJ2-5)
CASSATGGQETQYF

SEQ ID NO: 477709 - protein, 12 aa, Homo sapiens
  CDR3 for alpha chain variable domain of TCR clone 238855 (TRAV8-3, TRAJ36)
CAVGATGANNLF

SEQ ID NO: 477710 - protein, 15 aa, Homo sapiens
  CDR3 for beta chain variable domain of TCR clone 238855 (TRBV7-2, TRBJ1-2)
CASSPRAGWNYGYTF

SEQ ID NO: 477711 - protein, 10 aa, Homo sapiens
  CDR3 for alpha chain variable domain of TCR clone 238856 (TRAV8-3, TRAJ27)
CAVGPSKTTA

SEQ ID NO: 477712 - protein, 15 aa, Homo sapiens
  CDR3 for beta chain variable domain of TCR clone 238856 (TRBV7-2, TRBJ2-1)
CASSSGLAGGNEQFF

SEQ ID NO: 477713 - protein, 15 aa, Homo sapiens
  CDR3 for alpha chain variable domain of TCR clone 238857 (TRAV26-1, TRAJ22)
CIVRVSFWFCKATDL

SEQ ID NO: 477714 - protein, 15 aa, Homo sapiens
  CDR3 for beta chain variable domain of TCR clone 238857 (TRBV19, TRBJ1-2)
CASSVGQVLNYGYTF

SEQ ID NO: 477715 - protein, 21 aa, Homo sapiens
  CDR3 for alpha chain variable domain of TCR clone 238858 (TRAV30, TRAJ43)
GLPAQLLRNPLPIIELNDMRF

SEQ ID NO: 477716 - protein, 13 aa, Homo sapiens
  CDR3 for beta chain variable domain of TCR clone 238858 (TRBV12-4, TRBJ1-1)
CASSPGTGFEAFF

SEQ ID NO: 477717 - protein, 13 aa, Homo sapiens
  CDR3 for alpha chain variable domain of TCR clone 238859 (TRAV13-2, TRAJ13)
CADRPGGYQTVTF

SEQ ID NO: 477718 - protein, 15 aa, Homo sapiens
  CDR3 for beta chain variable domain of TCR clone 238859 (TRBV11-3, TRBJ2-7)
CASSPGPASSYEQYF

SEQ ID NO: 477719 - protein, 15 aa, Homo sapiens
  CDR3 for alpha chain variable domain of TCR clone 238860 (TRAV8-3, TRAJ45)
CASSYSGGGADGLTF

SEQ ID NO: 477720 - protein, 15 aa, Homo sapiens
  CDR3 for beta chain variable domain of TCR clone 238860 (TRBV27, TRBJ1-4)
CASSPRHTTNEKLFF

SEQ ID NO: 477721 - protein, 13 aa, Homo sapiens
  CDR3 for alpha chain variable domain of TCR clone 238861 (TRAV23/DV6, TRAJ22)
CAPYSGSAMQLTF

SEQ ID NO: 477722 - protein, 13 aa, Homo sapiens
  CDR3 for beta chain variable domain of TCR clone 238861 (TRBV6-1, TRBJ1-1)
CASSRQGNTEAFF

SEQ ID NO: 477723 - protein, 16 aa, Homo sapiens
  CDR3 for alpha chain variable domain of TCR clone 238862 (TRAV21, TRAJ52)
CAVTNAGGTSYGKLTF

SEQ ID NO: 477724 - protein, 14 aa, Homo sapiens
  CDR3 for beta chain variable domain of TCR clone 238862 (TRBV11-2, TRBJ1-5)
CASSLDRGRQPQHF

SEQ ID NO: 477725 - protein, 15 aa, Homo sapiens
  CDR3 for alpha chain variable domain of TCR clone 238863 (TRAV12-1, TRAJ41)
CVVNGASNSGNAPNF

SEQ ID NO: 477726 - protein, 15 aa, Homo sapiens
  CDR3 for beta chain variable domain of TCR clone 238863 (TRBV7-2, TRBJ1-5)
CASSSTGVDNQPQHF

SEQ ID NO: 477727 - protein, 15 aa, Homo sapiens
  CDR3 for alpha chain variable domain of TCR clone 238864 (TRAV8-4, TRAJ37)
CAVTYGSSNTGQLIF

SEQ ID NO: 477728 - protein, 13 aa, Homo sapiens
  CDR3 for beta chain variable domain of TCR clone 238864 (TRBV12-4, TRBJ2-5)
CASSVGGSRTQYF

SEQ ID NO: 477729 - protein, 12 aa, Homo sapiens
  CDR3 for alpha chain variable domain of TCR clone 238865 (TRAV17, TRAJ6)
CATGGGSYIPTF

SEQ ID NO: 477730 - protein, 13 aa, Homo sapiens
  CDR3 for beta chain variable domain of TCR clone 238865 (TRBV7-9, TRBJ2-7)
CASSFAGAYEQYF

SEQ ID NO: 477731 - protein, 16 aa, Homo sapiens
  CDR3 for alpha chain variable domain of TCR clone 238866 (TRAV23/DV6, TRAJ9)
CAASIGGNTGGFKTIF

SEQ ID NO: 477732 - protein, 17 aa, Homo sapiens
  CDR3 for beta chain variable domain of TCR clone 238866 (TRBV20-1, TRBJ2-1)
CSARDRRRASSYNEQFF

SEQ ID NO: 477733 - protein, 12 aa, Homo sapiens
  CDR3 for alpha chain variable domain of TCR clone 238867 (TRAV2, TRAJ31)
CAVEDKNARLMF

SEQ ID NO: 477734 - protein, 16 aa, Homo sapiens
  CDR3 for beta chain variable domain of TCR clone 238867 (TRBV7-7, TRBJ2-1)
CASSLASGTSYNEQFF

SEQ ID NO: 477735 - protein, 14 aa, Homo sapiens
  CDR3 for alpha chain variable domain of TCR clone 238868 (TRAV1-2, TRAJ17)
CSLRRGAAGNKLTF

SEQ ID NO: 477736 - protein, 12 aa, Homo sapiens
  CDR3 for beta chain variable domain of TCR clone 238868 (TRBV11-2, TRBJ2-2)
CASSLGGGELFF

SEQ ID NO: 477737 - protein, 12 aa, Homo sapiens
  CDR3 for alpha chain variable domain of TCR clone 238869 (TRAV12-3, TRAJ17)
CAMTLTGNKLTF

SEQ ID NO: 477738 - protein, 13 aa, Homo sapiens
  CDR3 for beta chain variable domain of TCR clone 238869 (TRBV3-1, TRBJ1-1)
CASRGAMNTEAFF

SEQ ID NO: 477739 - protein, 14 aa, Homo sapiens
  CDR3 for alpha chain variable domain of TCR clone 238870 (TRAV1-2, TRAJ8)
CAVREDTGLQKLVF

SEQ ID NO: 477740 - protein, 15 aa, Homo sapiens
  CDR3 for beta chain variable domain of TCR clone 238870 (TRBV6-3, TRBJ2-7)
CASSSPGTGSYEQYF

SEQ ID NO: 477741 - protein, 14 aa, Homo sapiens
  CDR3 for alpha chain variable domain of TCR clone 238871 (TRAV21, TRAJ45)
CAVSSGGGADGPTF

SEQ ID NO: 477742 - protein, 15 aa, Homo sapiens
  CDR3 for beta chain variable domain of TCR clone 238871 (TRBV19, TRBJ2-1)
CASSSPGVPLDEQFF

SEQ ID NO: 477743 - protein, 14 aa, Homo sapiens
  CDR3 for alpha chain variable domain of TCR clone 238872 (TRAV16, TRAJ54)
CALSLIKGAQKLVF

SEQ ID NO: 477744 - protein, 17 aa, Homo sapiens
  CDR3 for beta chain variable domain of TCR clone 238872 (TRBV11-2, TRBJ2-4)
CACSSVGPGGHRNIQYF

SEQ ID NO: 477745 - protein, 11 aa, Homo sapiens
  CDR3 for alpha chain variable domain of TCR clone 238873 (TRAV3, TRAJ21)
CAVGNLNKFYF

SEQ ID NO: 477746 - protein, 17 aa, Homo sapiens
  CDR3 for beta chain variable domain of TCR clone 238873 (TRBV24-1, TRBJ2-1)
CATSDVSTSGTYNEQFF

SEQ ID NO: 477747 - protein, 14 aa, Homo sapiens
  CDR3 for alpha chain variable domain of TCR clone 238874 (TRAV1-2, TRAJ16)
CAVNRFSDGQQLLF

SEQ ID NO: 477748 - protein, 14 aa, Homo sapiens
  CDR3 for beta chain variable domain of TCR clone 238874 (TRBV6-1, TRBJ2-6)
CASQQGAGANVLTF

SEQ ID NO: 477749 - protein, 15 aa, Homo sapiens
  CDR3 for alpha chain variable domain of TCR clone 238875 (TRAV40, TRAJ45)
CLLGDLGGGADGLTF

SEQ ID NO: 477750 - protein, 17 aa, Homo sapiens
  CDR3 for beta chain variable domain of TCR clone 238875 (TRBV18, TRBJ1-5)
CASSPTMGRGTNQPQHF

SEQ ID NO: 477751 - protein, 14 aa, Homo sapiens
  CDR3 for alpha chain variable domain of TCR clone 238876 (TRAV1-2, TRAJ8)
CAVREDTGFQKLVF

SEQ ID NO: 477752 - protein, 16 aa, Homo sapiens
  CDR3 for beta chain variable domain of TCR clone 238876 (TRBV6-1, TRBJ2-5)
CASSETLDREAETQYF

SEQ ID NO: 477753 - protein, 18 aa, Homo sapiens
  CDR3 for alpha chain variable domain of TCR clone 238877 (TRAV13-1, TRAJ52)
CAASKRSAGGTRYGKMTF

SEQ ID NO: 477754 - protein, 13 aa, Homo sapiens
  CDR3 for beta chain variable domain of TCR clone 238877 (TRBV12-4, TRBJ1-2)
CASSLRQGKGYTF

SEQ ID NO: 477755 - protein, 17 aa, Homo sapiens
  CDR3 for alpha chain variable domain of TCR clone 238878 (TRAV3, TRAJ6)
CAVRDGPRAGGSYIPTF

SEQ ID NO: 477756 - protein, 15 aa, Homo sapiens
  CDR3 for beta chain variable domain of TCR clone 238878 (TRBV4-3, TRBJ2-1)
CASSQESAIYNEQFF

SEQ ID NO: 477757 - protein, 12 aa, Homo sapiens
  CDR3 for alpha chain variable domain of TCR clone 238879 (TRAV13-2, TRAJ23)
CAERHRGGKLIF

SEQ ID NO: 477758 - protein, 13 aa, Homo sapiens
  CDR3 for beta chain variable domain of TCR clone 238879 (TRBV19, TRBJ2-2)
CASSQRSTGELFF

SEQ ID NO: 477759 - protein, 14 aa, Homo sapiens
  CDR3 for alpha chain variable domain of TCR clone 238880 (TRAV2, TRAJ9)
CAVEDRSGGFKTIF

SEQ ID NO: 477760 - protein, 15 aa, Homo sapiens
  CDR3 for beta chain variable domain of TCR clone 238880 (TRBV28, TRBJ1-3)
CASSMGRASGNTIYF

SEQ ID NO: 477761 - protein, 14 aa, Homo sapiens
  CDR3 for alpha chain variable domain of TCR clone 238881 (TRAV13-1, TRAJ44)
CAAKATGTASKLTF

SEQ ID NO: 477762 - protein, 15 aa, Homo sapiens
  CDR3 for beta chain variable domain of TCR clone 238881 (TRBV7-2, TRBJ2-3)
CASSLNLRDTDTQYF

SEQ ID NO: 477763 - protein, 13 aa, Homo sapiens
  CDR3 for alpha chain variable domain of TCR clone 238882 (TRAV2, TRAJ40)
FAVVTSGIYKYIF

SEQ ID NO: 477764 - protein, 14 aa, Homo sapiens
  CDR3 for beta chain variable domain of TCR clone 238882 (TRBV19, TRBJ2-1)
CASPTFVLSGEQFF

SEQ ID NO: 477765 - protein, 14 aa, Homo sapiens
  CDR3 for alpha chain variable domain of TCR clone 238883 (TRAV3, TRAJ9)
CAVRDDTGGFKTIF

SEQ ID NO: 477766 - protein, 16 aa, Homo sapiens
  CDR3 for beta chain variable domain of TCR clone 238883 (TRBV19, TRBJ2-1)
CASSKAGPSSYNEQFF

SEQ ID NO: 477767 - protein, 14 aa, Homo sapiens
  CDR3 for alpha chain variable domain of TCR clone 238884 (TRAV8-4, TRAJ9)
CAVRINTGGFKTIF

SEQ ID NO: 477768 - protein, 15 aa, Homo sapiens
  CDR3 for beta chain variable domain of TCR clone 238884 (TRBV2, TRBJ2-7)
CASSEGLARSYEQYF

SEQ ID NO: 477769 - protein, 11 aa, Homo sapiens
  CDR3 for alpha chain variable domain of TCR clone 238885 (TRAV21, TRAJ48)
CAVDGNEKLTF

SEQ ID NO: 477770 - protein, 14 aa, Homo sapiens
  CDR3 for beta chain variable domain of TCR clone 238885 (TRBV5-4, TRBJ2-7)
CASSRVGGSYEQYF

SEQ ID NO: 477771 - protein, 16 aa, Homo sapiens
  CDR3 for alpha chain variable domain of TCR clone 238886 (TRAV21, TRAJ37)
CAVRTAGSSSTGQLIF

SEQ ID NO: 477772 - protein, 13 aa, Homo sapiens
  CDR3 for beta chain variable domain of TCR clone 238886 (TRBV7-9, TRBJ2-5)
CVSLPSGRETQYF

SEQ ID NO: 477773 - protein, 14 aa, Homo sapiens
  CDR3 for alpha chain variable domain of TCR clone 238887 (TRAV1-2, TRAJ8)
CAVREDTGFQKLVF

SEQ ID NO: 477774 - protein, 16 aa, Homo sapiens
  CDR3 for beta chain variable domain of TCR clone 238887 (TRBV15, TRBJ2-3)
CATSSDLGIVTDTQYF

SEQ ID NO: 477775 - protein, 13 aa, Homo sapiens
  CDR3 for alpha chain variable domain of TCR clone 238888 (TRAV36/DV7, TRAJ57)
CAVALGGSEKLVF

SEQ ID NO: 477776 - protein, 14 aa, Homo sapiens
  CDR3 for beta chain variable domain of TCR clone 238888 (TRBV4-1, TRBJ1-2)
CASSQDGQVRGYSF

SEQ ID NO: 477777 - protein, 13 aa, Homo sapiens
  CDR3 for alpha chain variable domain of TCR clone 238889 (TRAV27, TRAJ57)
CAGFQGGSEKLVL

SEQ ID NO: 477778 - protein, 14 aa, Homo sapiens
  CDR3 for beta chain variable domain of TCR clone 238889 (TRBV20-1, TRBJ1-2)
CSGRKDGRAYGYTF

SEQ ID NO: 477779 - protein, 14 aa, Homo sapiens
  CDR3 for alpha chain variable domain of TCR clone 238890 (TRAV8-3, TRAJ9)
CAVVYNTGGFKTIF

SEQ ID NO: 477780 - protein, 15 aa, Homo sapiens
  CDR3 for beta chain variable domain of TCR clone 238890 (TRBV10-2, TRBJ2-6)
CASSEQGTGANVLTF

SEQ ID NO: 477781 - protein, 13 aa, Homo sapiens
  CDR3 for alpha chain variable domain of TCR clone 238891 (TRAV3, TRAJ21)
CAVREPDLNKFYF

SEQ ID NO: 477782 - protein, 18 aa, Homo sapiens
  CDR3 for beta chain variable domain of TCR clone 238891 (TRBV20-1, TRBJ2-6)
CSAETTPTHGSGANVLTF

SEQ ID NO: 477783 - protein, 14 aa, Homo sapiens
  CDR3 for alpha chain variable domain of TCR clone 238892 (TRAV12-3, TRAJ41)
CAMSAGNSRYALNF

SEQ ID NO: 477784 - protein, 11 aa, Homo sapiens
  CDR3 for beta chain variable domain of TCR clone 238892 (TRBV7-2, TRBJ2-3)
CASSSSDTQYF

SEQ ID NO: 477785 - protein, 15 aa, Homo sapiens
  CDR3 for alpha chain variable domain of TCR clone 238893 (TRAV3, TRAJ9)
CAVRARNTGGFRTTF

SEQ ID NO: 477786 - protein, 15 aa, Homo sapiens
  CDR3 for beta chain variable domain of TCR clone 238893 (TRBV27, TRBJ1-1)
CASSPYADPYTEAFF

SEQ ID NO: 477787 - protein, 18 aa, Homo sapiens
  CDR3 for alpha chain variable domain of TCR clone 238894 (TRAV21, TRAJ52)
CAVRPSPAGGTSCGKLTF

SEQ ID NO: 477788 - protein, 17 aa, Homo sapiens
  CDR3 for beta chain variable domain of TCR clone 238894 (TRBV13, TRBJ2-3)
CASSLSRVAGGRNTQYV

SEQ ID NO: 477789 - protein, 14 aa, Homo sapiens
  CDR3 for alpha chain variable domain of TCR clone 238895 (TRAV38-1, TRAJ40)
CALRPTSGTYKYIF

SEQ ID NO: 477790 - protein, 16 aa, Homo sapiens
  CDR3 for beta chain variable domain of TCR clone 238895 (TRBV11-3, TRBJ2-3)
CASSPGGLLGTDTQYF

SEQ ID NO: 477791 - protein, 13 aa, Homo sapiens
  CDR3 for alpha chain variable domain of TCR clone 238896 (TRAV21, TRAJ27)
CAARPGNAGKSTF

SEQ ID NO: 477792 - protein, 14 aa, Homo sapiens
  CDR3 for beta chain variable domain of TCR clone 238896 (TRBV7-6, TRBJ2-3)
CASCLGTVTDTQYF

SEQ ID NO: 477793 - protein, 10 aa, Homo sapiens
  CDR3 for alpha chain variable domain of TCR clone 238897 (TRAV12-3, TRAJ49)
CAMNDDQFYF

SEQ ID NO: 477794 - protein, 19 aa, Homo sapiens
  CDR3 for beta chain variable domain of TCR clone 238897 (TRBV25-1, TRBJ2-2)
CAILVYRVDRGRKTGELFF

SEQ ID NO: 477795 - protein, 14 aa, Homo sapiens
  CDR3 for alpha chain variable domain of TCR clone 238898 (TRAV13-1, TRAJ44)
CAAKATGTASKLTF

SEQ ID NO: 477796 - protein, 15 aa, Homo sapiens
  CDR3 for beta chain variable domain of TCR clone 238898 (TRBV4-3, TRBJ1-1)
CASSQELGRGNEAFF

SEQ ID NO: 477797 - protein, 13 aa, Homo sapiens
  CDR3 for alpha chain variable domain of TCR clone 238899 (TRAV20, TRAJ31)
CAVQAIGGARLMF

SEQ ID NO: 477798 - protein, 14 aa, Homo sapiens
  CDR3 for beta chain variable domain of TCR clone 238899 (TRBV2, TRBJ1-5)
CASSGTVGNQPQHF

SEQ ID NO: 477799 - protein, 16 aa, Homo sapiens
  CDR3 for alpha chain variable domain of TCR clone 238900 (TRAV30, TRAJ24)
CGTEIVDAESWGKFQF

SEQ ID NO: 477800 - protein, 16 aa, Homo sapiens
  CDR3 for beta chain variable domain of TCR clone 238900 (TRBV7-6, TRBJ2-3)
CASSDSRGEGTDTQYF

SEQ ID NO: 477801 - protein, 15 aa, Homo sapiens
  CDR3 for alpha chain variable domain of TCR clone 238901 (TRAV40, TRAJ48)
CLLFISNFGNEKLTF

SEQ ID NO: 477802 - protein, 18 aa, Homo sapiens
  CDR3 for beta chain variable domain of TCR clone 238901 (TRBV6-6, TRBJ1-3)
CASSYSKWDAISGNTIYF

SEQ ID NO: 477803 - protein, 14 aa, Homo sapiens
  CDR3 for alpha chain variable domain of TCR clone 238902 (TRAV1-2, TRAJ8)
CAVREDTGFQKLVF

SEQ ID NO: 477804 - protein, 17 aa, Homo sapiens
  CDR3 for beta chain variable domain of TCR clone 238902 (TRBV10-2, TRBJ1-6)
CASSENRGSSYNSPLHF

SEQ ID NO: 477805 - protein, 16 aa, Homo sapiens
  CDR3 for alpha chain variable domain of TCR clone 238903 (TRAV3, TRAJ10)
CAVRDMNAGGGNKLTF

SEQ ID NO: 477806 - protein, 15 aa, Homo sapiens
  CDR3 for beta chain variable domain of TCR clone 238903 (TRBV5-1, TRBJ1-2)
CASSLGSVTNYGDTF

SEQ ID NO: 477807 - protein, 14 aa, Homo sapiens
  CDR3 for alpha chain variable domain of TCR clone 238904 (TRAV38-1, TRAJ40)
CALRSTSGTYKYIF

SEQ ID NO: 477808 - protein, 16 aa, Homo sapiens
  CDR3 for beta chain variable domain of TCR clone 238904 (TRBV6-1, TRBJ1-2)
CASSGAWQGRSHGYTF

SEQ ID NO: 477809 - protein, 20 aa, Homo sapiens
  CDR3 for alpha chain variable domain of TCR clone 238905 (TRAV8-3, TRAJ45)
LSTSVLWGSYSGGGADGLTF

SEQ ID NO: 477810 - protein, 11 aa, Homo sapiens
  CDR3 for beta chain variable domain of TCR clone 238905 (TRBV20-1, TRBJ2-5)
CSADRAETQYF

SEQ ID NO: 477811 - protein, 15 aa, Homo sapiens
  CDR3 for alpha chain variable domain of TCR clone 238906 (TRAV8-3, TRAJ45)
CASSYSGGGADGLTF

SEQ ID NO: 477812 - protein, 15 aa, Homo sapiens
  CDR3 for beta chain variable domain of TCR clone 238906 (TRBV11-2, TRBJ2-1)
CASSLGTSGLNEQFF

SEQ ID NO: 477813 - protein, 12 aa, Homo sapiens
  CDR3 for alpha chain variable domain of TCR clone 238907 (TRAV38-1, TRAJ20)
CALIWNDYKLSF

SEQ ID NO: 477814 - protein, 14 aa, Homo sapiens
  CDR3 for beta chain variable domain of TCR clone 238907 (TRBV19, TRBJ2-1)
CASSMGSGATEQFF

SEQ ID NO: 477815 - protein, 12 aa, Homo sapiens
  CDR3 for alpha chain variable domain of TCR clone 238908 (TRAV12-2, TRAJ10)
WGVTGGGNKLTF

SEQ ID NO: 477816 - protein, 14 aa, Homo sapiens
  CDR3 for beta chain variable domain of TCR clone 238908 (TRBV20-1, TRBJ2-1)
CSAQIGGSANEQFF

SEQ ID NO: 477817 - protein, 14 aa, Homo sapiens
  CDR3 for alpha chain variable domain of TCR clone 238909 (TRAV26-1, TRAJ21)
CIVRPPYNFNKFYF

SEQ ID NO: 477818 - protein, 14 aa, Homo sapiens
  CDR3 for beta chain variable domain of TCR clone 238909 (TRBV15, TRBJ2-5)
CATSGDRGQETQYF

SEQ ID NO: 477819 - protein, 13 aa, Homo sapiens
  CDR3 for alpha chain variable domain of TCR clone 238910 (TRAV3, TRAJ20)
CAVRDTGDYKLSF

SEQ ID NO: 477820 - protein, 14 aa, Homo sapiens
  CDR3 for beta chain variable domain of TCR clone 238910 (TRBV19, TRBJ2-1)
CASPTFVLSGEQFF

SEQ ID NO: 477821 - protein, 15 aa, Homo sapiens
  CDR3 for alpha chain variable domain of TCR clone 238911 (TRAV12-1, TRAJ13)
CVVNPNSGGYQKVTF

SEQ ID NO: 477822 - protein, 15 aa, Homo sapiens
  CDR3 for beta chain variable domain of TCR clone 238911 (TRBV27, TRBJ2-5)
CASSLIPSGGETQCF

SEQ ID NO: 477823 - protein, 14 aa, Homo sapiens
  CDR3 for alpha chain variable domain of TCR clone 238912 (TRAV12-3, TRAJ54)
CAMRGIQGAQKLAF

SEQ ID NO: 477824 - protein, 14 aa, Homo sapiens
  CDR3 for beta chain variable domain of TCR clone 238912 (TRBV7-6, TRBJ2-3)
CASSLGTVTDTQYF

SEQ ID NO: 477825 - protein, 15 aa, Homo sapiens
  CDR3 for alpha chain variable domain of TCR clone 238913 (TRAV19, TRAJ23)
CALSEVGNQGGKFIF

SEQ ID NO: 477826 - protein, 13 aa, Homo sapiens
  CDR3 for beta chain variable domain of TCR clone 238913 (TRBV9, TRBJ2-7)
CASSVAEYYEQYF

SEQ ID NO: 477827 - protein, 14 aa, Homo sapiens
  CDR3 for alpha chain variable domain of TCR clone 238914 (TRAV13-2, TRAJ43)
CAEIPTYNNNDMRF

SEQ ID NO: 477828 - protein, 13 aa, Homo sapiens
  CDR3 for beta chain variable domain of TCR clone 238914 (TRBV7-9, TRBJ2-5)
CASLPSGRETQYF

SEQ ID NO: 477829 - protein, 12 aa, Homo sapiens
  CDR3 for alpha chain variable domain of TCR clone 238915 (TRAV3, TRAJ20)
CAVRDGDYKLSF

SEQ ID NO: 477830 - protein, 13 aa, Homo sapiens
  CDR3 for beta chain variable domain of TCR clone 238915 (TRBV7-3, TRBJ1-1)
CASSQGWGAEAFF

SEQ ID NO: 477831 - protein, 17 aa, Homo sapiens
  CDR3 for alpha chain variable domain of TCR clone 238916 (TRAV3, TRAJ42)
CAVRDRDYGGSQGNPIF

SEQ ID NO: 477832 - protein, 14 aa, Homo sapiens
  CDR3 for beta chain variable domain of TCR clone 238916 (TRBV7-2, TRBJ2-5)
CASSPRRSSETQYF

SEQ ID NO: 477833 - protein, 16 aa, Homo sapiens
  CDR3 for alpha chain variable domain of TCR clone 238917 (TRAV30, TRAJ24)
WGTEIVDADSWGKFQL

SEQ ID NO: 477834 - protein, 14 aa, Homo sapiens
  CDR3 for beta chain variable domain of TCR clone 238917 (TRBV12-5, TRBJ2-5)
CASGSRTHQETQYF

SEQ ID NO: 477835 - protein, 13 aa, Homo sapiens
  CDR3 for alpha chain variable domain of TCR clone 238918 (TRAV22, TRAJ40)
CAVGVSGTYKYIF

SEQ ID NO: 477836 - protein, 14 aa, Homo sapiens
  CDR3 for beta chain variable domain of TCR clone 238918 (TRBV19, TRBJ2-3)
CASSIDLGGDTQYF

SEQ ID NO: 477837 - protein, 14 aa, Homo sapiens
  CDR3 for alpha chain variable domain of TCR clone 238919 (TRAV4, TRAJ6)
CLVGEAGGSYIPTY

SEQ ID NO: 477838 - protein, 16 aa, Homo sapiens
  CDR3 for beta chain variable domain of TCR clone 238919 (TRBV7-6, TRBJ2-1)
CASSLNEGPSYNEQFF

SEQ ID NO: 477839 - protein, 16 aa, Homo sapiens
  CDR3 for alpha chain variable domain of TCR clone 238920 (TRAV16, TRAJ4)
CDISRMFSGGYNKLIF

SEQ ID NO: 477840 - protein, 16 aa, Homo sapiens
  CDR3 for beta chain variable domain of TCR clone 238920 (TRBV24-1, TRBJ2-3)
CATSDPGTGATDTQYF

SEQ ID NO: 477841 - protein, 16 aa, Homo sapiens
  CDR3 for alpha chain variable domain of TCR clone 238921 (TRAV4, TRAJ22)
CLVGDLYSGSARQLTF

SEQ ID NO: 477842 - protein, 15 aa, Homo sapiens
  CDR3 for beta chain variable domain of TCR clone 238921 (TRBV4-1, TRBJ2-7)
CASSQNTGRLYEQYL

SEQ ID NO: 477843 - protein, 17 aa, Homo sapiens
  CDR3 for alpha chain variable domain of TCR clone 238922 (TRAV21, TRAJ10)
CAVRVYILTGGGNKLTF

SEQ ID NO: 477844 - protein, 14 aa, Homo sapiens
  CDR3 for beta chain variable domain of TCR clone 238922 (TRBV4-1, TRBJ2-2)
CASSQAVNTGELFF

SEQ ID NO: 477845 - protein, 12 aa, Homo sapiens
  CDR3 for alpha chain variable domain of TCR clone 238923 (TRAV6, TRAJ5)
CAPDTGRRALTF

SEQ ID NO: 477846 - protein, 14 aa, Homo sapiens
  CDR3 for beta chain variable domain of TCR clone 238923 (TRBV12-5, TRBJ2-5)
CASGSRTHQETQYF

SEQ ID NO: 477847 - protein, 14 aa, Homo sapiens
  CDR3 for alpha chain variable domain of TCR clone 238924 (TRAV20, TRAJ37)
CAVQSSSHTGKLIF

SEQ ID NO: 477848 - protein, 13 aa, Homo sapiens
  CDR3 for beta chain variable domain of TCR clone 238924 (TRBV20-1, TRBJ1-5)
CSASWGRSQPQHF

SEQ ID NO: 477849 - protein, 20 aa, Homo sapiens
  CDR3 for alpha chain variable domain of TCR clone 238925 (TRAV8-3, )
CAVGAGDIQNPDPAVYQLRD

SEQ ID NO: 477850 - protein, 16 aa, Homo sapiens
  CDR3 for beta chain variable domain of TCR clone 238925 (TRBV5-1, TRBJ1-5)
CASSLGQGPSPSILVM

SEQ ID NO: 477851 - protein, 14 aa, Homo sapiens
  CDR3 for alpha chain variable domain of TCR clone 238926 (TRAV29/DV5, TRAJ36)
CAARRKTGANNLFF

SEQ ID NO: 477852 - protein, 16 aa, Homo sapiens
  CDR3 for beta chain variable domain of TCR clone 238926 (TRBV12-5, TRBJ2-5)
CASGPRTIGNQETQYF

SEQ ID NO: 477853 - protein, 11 aa, Homo sapiens
  CDR3 for alpha chain variable domain of TCR clone 238927 (TRAV12-3, TRAJ27)
CAMANAGKSTF

SEQ ID NO: 477854 - protein, 15 aa, Homo sapiens
  CDR3 for beta chain variable domain of TCR clone 238927 (TRBV20-1, TRBJ2-2)
CSARGGQGNTGELFF

SEQ ID NO: 477855 - protein, 15 aa, Homo sapiens
  CDR3 for alpha chain variable domain of TCR clone 238928 (TRAV17, TRAJ42)
CATDHYGGSQGNLIF

SEQ ID NO: 477856 - protein, 14 aa, Homo sapiens
  CDR3 for beta chain variable domain of TCR clone 238928 (TRBV19, TRBJ2-5)
CASSIEHSQETQCF

SEQ ID NO: 477857 - protein, 17 aa, Homo sapiens
  CDR3 for alpha chain variable domain of TCR clone 238929 (TRAV3, TRAJ42)
CAVRDRDYGGSQGNLIF

SEQ ID NO: 477858 - protein, 15 aa, Homo sapiens
  CDR3 for beta chain variable domain of TCR clone 238929 (TRBV6-5, TRBJ1-1)
CASSYLRGSVPEAFF

SEQ ID NO: 477859 - protein, 17 aa, Homo sapiens
  CDR3 for alpha chain variable domain of TCR clone 238930 (TRAV35, TRAJ52)
CAGQLAAGGTSYGKLTF

SEQ ID NO: 477860 - protein, 16 aa, Homo sapiens
  CDR3 for beta chain variable domain of TCR clone 238930 (TRBV10-3, TRBJ2-1)
CAISGVGDGGGGEQFF

SEQ ID NO: 477861 - protein, 11 aa, Homo sapiens
  CDR3 for alpha chain variable domain of TCR clone 238931 (TRAV13-2, TRAJ20)
CADSNDYKLSF

SEQ ID NO: 477862 - protein, 13 aa, Homo sapiens
  CDR3 for beta chain variable domain of TCR clone 238931 (TRBV13, TRBJ2-5)
CASSPEVGETQYF

SEQ ID NO: 477863 - protein, 14 aa, Homo sapiens
  CDR3 for alpha chain variable domain of TCR clone 238932 (TRAV12-2, TRAJ13)
CAVKKPGGYQKVTF

SEQ ID NO: 477864 - protein, 15 aa, Homo sapiens
  CDR3 for beta chain variable domain of TCR clone 238932 (TRBV20-1, TRBJ2-7)
CSARDWVSGMDEQYF

SEQ ID NO: 477865 - protein, 13 aa, Homo sapiens
  CDR3 for alpha chain variable domain of TCR clone 238933 (TRAV17, TRAJ8)
CATSPVGFQKLVF

SEQ ID NO: 477866 - protein, 15 aa, Homo sapiens
  CDR3 for beta chain variable domain of TCR clone 238933 (TRBV20-1, TRBJ2-5)
CSAGRLPSGQETQYF

SEQ ID NO: 477867 - protein, 14 aa, Homo sapiens
  CDR3 for alpha chain variable domain of TCR clone 238934 (TRAV1-2, TRAJ17)
CALRRGAAGNKLTF

SEQ ID NO: 477868 - protein, 13 aa, Homo sapiens
  CDR3 for beta chain variable domain of TCR clone 238934 (TRBV7-9, TRBJ1-2)
CASSLKQNYGYTF

SEQ ID NO: 477869 - protein, 14 aa, Homo sapiens
  CDR3 for alpha chain variable domain of TCR clone 238935 (TRAV23/DV6, TRAJ8)
CAASKATGFQKLVF

SEQ ID NO: 477870 - protein, 15 aa, Homo sapiens
  CDR3 for beta chain variable domain of TCR clone 238935 (TRBV28, TRBJ2-3)
CASSPDRQGANKQYF

SEQ ID NO: 477871 - protein, 14 aa, Homo sapiens
  CDR3 for alpha chain variable domain of TCR clone 238936 (TRAV12-1, TRAJ17)
CVVNYKAAGNKLTF

SEQ ID NO: 477872 - protein, 16 aa, Homo sapiens
  CDR3 for beta chain variable domain of TCR clone 238936 (TRBV4-1, TRBJ1-2)
CASSQDAGQVLYGYTF

SEQ ID NO: 477873 - protein, 12 aa, Homo sapiens
  CDR3 for alpha chain variable domain of TCR clone 238937 (TRAV35, TRAJ49)
CAGWNTGNQFYF

SEQ ID NO: 477874 - protein, 15 aa, Homo sapiens
  CDR3 for beta chain variable domain of TCR clone 238937 (TRBV5-1, TRBJ2-7)
CASSLNGGPAREQYF

SEQ ID NO: 477875 - protein, 16 aa, Homo sapiens
  CDR3 for alpha chain variable domain of TCR clone 238938 (TRAV3, TRAJ37)
CAGGGKGSGNTGKLIF

SEQ ID NO: 477876 - protein, 16 aa, Homo sapiens
  CDR3 for beta chain variable domain of TCR clone 238938 (TRBV12-5, TRBJ2-5)
CASGPRTSGSQETQYF

SEQ ID NO: 477877 - protein, 12 aa, Homo sapiens
  CDR3 for alpha chain variable domain of TCR clone 238939 (TRAV13-1, TRAJ17)
CAAPAAGNKLTF

SEQ ID NO: 477878 - protein, 13 aa, Homo sapiens
  CDR3 for beta chain variable domain of TCR clone 238939 (TRBV20-1, TRBJ2-5)
CSARYTGEETQYF

SEQ ID NO: 477879 - protein, 13 aa, Homo sapiens
  CDR3 for alpha chain variable domain of TCR clone 238940 (TRAV2, TRAJ40)
CAVVTSGTYKYIF

SEQ ID NO: 477880 - protein, 12 aa, Homo sapiens
  CDR3 for beta chain variable domain of TCR clone 238940 (TRBV11-2, TRBJ2-1)
SASSPGNNEQFF

SEQ ID NO: 477881 - protein, 17 aa, Homo sapiens
  CDR3 for alpha chain variable domain of TCR clone 238941 (TRAV3, TRAJ42)
CAVRDRDYGGSQGNLIF

SEQ ID NO: 477882 - protein, 13 aa, Homo sapiens
  CDR3 for beta chain variable domain of TCR clone 238941 (TRBV6-4, TRBJ2-3)
CASRDSGTDTQYF

SEQ ID NO: 477883 - protein, 15 aa, Homo sapiens
  CDR3 for alpha chain variable domain of TCR clone 238942 (TRAV3, TRAJ4)
CAVRDGTSGYNKLIF

SEQ ID NO: 477884 - protein, 14 aa, Homo sapiens
  CDR3 for beta chain variable domain of TCR clone 238942 (TRBV25-1, TRBJ1-1)
CASTHLGGNTEAFF

SEQ ID NO: 477885 - protein, 15 aa, Homo sapiens
  CDR3 for alpha chain variable domain of TCR clone 238943 (TRAV3, TRAJ22)
CAVRDRGGSARQLTF

SEQ ID NO: 477886 - protein, 14 aa, Homo sapiens
  CDR3 for beta chain variable domain of TCR clone 238943 (TRBV19, TRBJ2-2)
CASSTLHRSGELFF

SEQ ID NO: 477887 - protein, 15 aa, Homo sapiens
  CDR3 for alpha chain variable domain of TCR clone 238944 (TRAV35, TRAJ23)
CAGPLGNNQGGKLIF

SEQ ID NO: 477888 - protein, 14 aa, Homo sapiens
  CDR3 for beta chain variable domain of TCR clone 238944 (TRBV7-9, TRBJ1-1)
CATTPLQSYTEAFF

SEQ ID NO: 477889 - protein, 14 aa, Homo sapiens
  CDR3 for alpha chain variable domain of TCR clone 238945 (TRAV9-2, TRAJ39)
CALYIYNAGNMLTF

SEQ ID NO: 477890 - protein, 12 aa, Homo sapiens
  CDR3 for beta chain variable domain of TCR clone 238945 (TRBV6-3, TRBJ2-3)
CTSVPQADTQYF

SEQ ID NO: 477891 - protein, 16 aa, Homo sapiens
  CDR3 for alpha chain variable domain of TCR clone 238946 (TRAV30, TRAJ24)
CDTEIVDADGWGKFQF

SEQ ID NO: 477892 - protein, 12 aa, Homo sapiens
  CDR3 for beta chain variable domain of TCR clone 238946 (TRBV11-2, TRBJ2-2)
CASSLGGGELFF

SEQ ID NO: 477893 - protein, 15 aa, Homo sapiens
  CDR3 for alpha chain variable domain of TCR clone 238947 (TRAV17, TRAJ35)
CATAFVIGFVNVLHC

SEQ ID NO: 477894 - protein, 15 aa, Homo sapiens
  CDR3 for beta chain variable domain of TCR clone 238947 (TRBV7-9, TRBJ2-7)
CASSLALAEAYEQYF

SEQ ID NO: 477895 - protein, 14 aa, Homo sapiens
  CDR3 for alpha chain variable domain of TCR clone 238948 (TRAV1-2, TRAJ8)
CAVREDTGFQKLVF

SEQ ID NO: 477896 - protein, 15 aa, Homo sapiens
  CDR3 for beta chain variable domain of TCR clone 238948 (TRBV19, TRBJ2-5)
CASSQLHGAGETQYF

SEQ ID NO: 477897 - protein, 14 aa, Homo sapiens
  CDR3 for alpha chain variable domain of TCR clone 238949 (TRAV8-4, TRAJ8)
CAVSEDTGFQKLVF

SEQ ID NO: 477898 - protein, 16 aa, Homo sapiens
  CDR3 for beta chain variable domain of TCR clone 238949 (TRBV7-3, TRBJ2-1)
CASSKPLAGGYNEQFF

SEQ ID NO: 477899 - protein, 13 aa, Homo sapiens
  CDR3 for alpha chain variable domain of TCR clone 238950 (TRAV27, TRAJ45)
CMSSGGGAVGLTF

SEQ ID NO: 477900 - protein, 17 aa, Homo sapiens
  CDR3 for beta chain variable domain of TCR clone 238950 (TRBV11-2, TRBJ2-1)
CASSLYPPGVEYNEQFF

SEQ ID NO: 477901 - protein, 11 aa, Homo sapiens
  CDR3 for alpha chain variable domain of TCR clone 238951 (TRAV17, TRAJ31)
CATSNNARLMF

SEQ ID NO: 477902 - protein, 14 aa, Homo sapiens
  CDR3 for beta chain variable domain of TCR clone 238951 (TRBV7-3, TRBJ2-1)
CASSLAGGTNEQFF

SEQ ID NO: 477903 - protein, 14 aa, Homo sapiens
  CDR3 for alpha chain variable domain of TCR clone 238952 (TRAV12-2, TRAJ36)
CAVKISTGANNLFF

SEQ ID NO: 477904 - protein, 14 aa, Homo sapiens
  CDR3 for beta chain variable domain of TCR clone 238952 (TRBV25-1, TRBJ1-2)
CASSDTTGVVGYTS

SEQ ID NO: 477905 - protein, 15 aa, Homo sapiens
  CDR3 for alpha chain variable domain of TCR clone 238953 (TRAV26-2, TRAJ54)
CILRDVGQGAQKLVF

SEQ ID NO: 477906 - protein, 15 aa, Homo sapiens
  CDR3 for beta chain variable domain of TCR clone 238953 (TRBV28, TRBJ2-7)
CASRPWDRFSYEQYF

SEQ ID NO: 477907 - protein, 14 aa, Homo sapiens
  CDR3 for alpha chain variable domain of TCR clone 238954 (TRAV13-1, TRAJ6)
FAASKSGGSYIPTF

SEQ ID NO: 477908 - protein, 14 aa, Homo sapiens
  CDR3 for beta chain variable domain of TCR clone 238954 (TRBV2, TRBJ2-5)
CASKKATGLETQYF

SEQ ID NO: 477909 - protein, 13 aa, Homo sapiens
  CDR3 for alpha chain variable domain of TCR clone 238955 (TRAV3, TRAJ30)
CAVRDRGDDKIIF

SEQ ID NO: 477910 - protein, 13 aa, Homo sapiens
  CDR3 for beta chain variable domain of TCR clone 238955 (TRBV6-1, TRBJ1-1)
CASSRQGNTEAFF

SEQ ID NO: 477911 - protein, 15 aa, Homo sapiens
  CDR3 for alpha chain variable domain of TCR clone 238956 (TRAV12-3, TRAJ48)
CAMNAKNFGNEKFTF

SEQ ID NO: 477912 - protein, 14 aa, Homo sapiens
  CDR3 for beta chain variable domain of TCR clone 238956 (TRBV2, TRBJ1-6)
CASSESRNNSPLHF

SEQ ID NO: 477913 - protein, 13 aa, Homo sapiens
  CDR3 for alpha chain variable domain of TCR clone 238957 (TRAV12-2, TRAJ18)
CAVRGSTLGRLYF

SEQ ID NO: 477914 - protein, 14 aa, Homo sapiens
  CDR3 for beta chain variable domain of TCR clone 238957 (TRBV7-3, TRBJ2-1)
CASSLAGGTNEQFF

SEQ ID NO: 477915 - protein, 13 aa, Homo sapiens
  CDR3 for alpha chain variable domain of TCR clone 238958 (TRAV13-1, TRAJ21)
CAASIYNFNKFYF

SEQ ID NO: 477916 - protein, 13 aa, Homo sapiens
  CDR3 for beta chain variable domain of TCR clone 238958 (TRBV27, TRBJ1-4)
CASSLMGDEKPFF

SEQ ID NO: 477917 - protein, 16 aa, Homo sapiens
  CDR3 for alpha chain variable domain of TCR clone 238959 (TRAV30, TRAJ24)
CGTEIVDADGWGKFQF

SEQ ID NO: 477918 - protein, 18 aa, Homo sapiens
  CDR3 for beta chain variable domain of TCR clone 238959 (TRBV7-9, TRBJ2-7)
CASSLTTSGSRTWYEQYF

SEQ ID NO: 477919 - protein, 17 aa, Homo sapiens
  CDR3 for alpha chain variable domain of TCR clone 238960 (TRAV23/DV6, TRAJ57)
CAASSTLSQGGSEKLVF

SEQ ID NO: 477920 - protein, 13 aa, Homo sapiens
  CDR3 for beta chain variable domain of TCR clone 238960 (TRBV7-3, TRBJ1-1)
CASSQDWGAEAFF

SEQ ID NO: 477921 - protein, 12 aa, Homo sapiens
  CDR3 for alpha chain variable domain of TCR clone 238961 (TRAV12-1, TRAJ40)
RVVYSGTYKYIF

SEQ ID NO: 477922 - protein, 18 aa, Homo sapiens
  CDR3 for beta chain variable domain of TCR clone 238961 (TRBV11-2, TRBJ2-3)
CACSLGGASRGAPNTQYF

SEQ ID NO: 477923 - protein, 14 aa, Homo sapiens
  CDR3 for alpha chain variable domain of TCR clone 238962 (TRAV1-2, TRAJ16)
CAVNRFSDGQKLLF

SEQ ID NO: 477924 - protein, 13 aa, Homo sapiens
  CDR3 for beta chain variable domain of TCR clone 238962 (TRBV29-1, TRBJ1-1)
CSVGDSRNTDAFF

SEQ ID NO: 477925 - protein, 15 aa, Homo sapiens
  CDR3 for alpha chain variable domain of TCR clone 238963 (TRAV23/DV6, TRAJ45)
CAASARGGGADGLTF

SEQ ID NO: 477926 - protein, 13 aa, Homo sapiens
  CDR3 for beta chain variable domain of TCR clone 238963 (TRBV7-3, TRBJ1-1)
CASSQDWGAEAFF

SEQ ID NO: 477927 - protein, 14 aa, Homo sapiens
  CDR3 for alpha chain variable domain of TCR clone 238964 (TRAV13-1, TRAJ26)
CAASSAHYGQNFVF

SEQ ID NO: 477928 - protein, 17 aa, Homo sapiens
  CDR3 for beta chain variable domain of TCR clone 238964 (TRBV25-1, TRBJ2-5)
CASSRGGGGGGQETQYF

SEQ ID NO: 477929 - protein, 14 aa, Homo sapiens
  CDR3 for alpha chain variable domain of TCR clone 238965 (TRAV12-3, TRAJ10)
SHPPLTGGGNKLTF

SEQ ID NO: 477930 - protein, 13 aa, Homo sapiens
  CDR3 for beta chain variable domain of TCR clone 238965 (TRBV27, TRBJ1-1)
CASSLSIGAEAFF

SEQ ID NO: 477931 - protein, 13 aa, Homo sapiens
  CDR3 for alpha chain variable domain of TCR clone 238966 (TRAV17, TRAJ5)
CATMDTGRRALTF

SEQ ID NO: 477932 - protein, 15 aa, Homo sapiens
  CDR3 for beta chain variable domain of TCR clone 238966 (TRBV20-1, TRBJ2-5)
CSATRTSGRLETQYF

SEQ ID NO: 477933 - protein, 14 aa, Homo sapiens
  CDR3 for alpha chain variable domain of TCR clone 238967 (TRAV27, TRAJ22)
CAGVVPGSARQLTF

SEQ ID NO: 477934 - protein, 15 aa, Homo sapiens
  CDR3 for beta chain variable domain of TCR clone 238967 (TRBV29-1, TRBJ2-7)
CSVEFFDRGYYEQYF

SEQ ID NO: 477935 - protein, 12 aa, Homo sapiens
  CDR3 for alpha chain variable domain of TCR clone 238968 (TRAV13-2, TRAJ8)
CAPWLGFQKLVF

SEQ ID NO: 477936 - protein, 18 aa, Homo sapiens
  CDR3 for beta chain variable domain of TCR clone 238968 (TRBV11-2, TRBJ2-3)
WASSLGGASRGAPNTQYF

SEQ ID NO: 477937 - protein, 12 aa, Homo sapiens
  CDR3 for alpha chain variable domain of TCR clone 238969 (TRAV13-1, TRAJ21)
CAAKEGFNKFYF

SEQ ID NO: 477938 - protein, 15 aa, Homo sapiens
  CDR3 for beta chain variable domain of TCR clone 238969 (TRBV7-7, TRBJ2-5)
CASSLLERAEETQYF

SEQ ID NO: 477939 - protein, 13 aa, Homo sapiens
  CDR3 for alpha chain variable domain of TCR clone 238970 (TRAV39, TRAJ58)
CAGEETSGPGLTF

SEQ ID NO: 477940 - protein, 17 aa, Homo sapiens
  CDR3 for beta chain variable domain of TCR clone 238970 (TRBV7-2, TRBJ2-1)
CASSRGTSGAVGWEQFF

SEQ ID NO: 477941 - protein, 18 aa, Homo sapiens
  CDR3 for alpha chain variable domain of TCR clone 238971 (TRAV21, TRAJ52)
CAVRPSPAGGTSYGKLTF

SEQ ID NO: 477942 - protein, 17 aa, Homo sapiens
  CDR3 for beta chain variable domain of TCR clone 238971 (TRBV13, TRBJ2-3)
WASRLSRVAGGRNTQYF

SEQ ID NO: 477943 - protein, 14 aa, Homo sapiens
  CDR3 for alpha chain variable domain of TCR clone 238972 (TRAV38-1, TRAJ32)
CAFIYGGATNKLIF

SEQ ID NO: 477944 - protein, 17 aa, Homo sapiens
  CDR3 for beta chain variable domain of TCR clone 238972 (TRBV28, TRBJ2-1)
CASTGPGLAVSEDESSS

SEQ ID NO: 477945 - protein, 13 aa, Homo sapiens
  CDR3 for alpha chain variable domain of TCR clone 238973 (TRAV8-3, TRAJ28)
CAVGAVGCYQLTF

SEQ ID NO: 477946 - protein, 17 aa, Homo sapiens
  CDR3 for beta chain variable domain of TCR clone 238973 (TRBV11-2, TRBJ2-1)
CASSLYPPGVEYNEQFF

SEQ ID NO: 477947 - protein, 15 aa, Homo sapiens
  CDR3 for alpha chain variable domain of TCR clone 238974 (TRAV8-4, TRAJ37)
CAVSRGSGNTGKLIF

SEQ ID NO: 477948 - protein, 16 aa, Homo sapiens
  CDR3 for beta chain variable domain of TCR clone 238974 (TRBV7-3, TRBJ2-2)
CASSLKRGTLSGELFF

SEQ ID NO: 477949 - protein, 14 aa, Homo sapiens
  CDR3 for alpha chain variable domain of TCR clone 238975 (TRAV17, TRAJ39)
CATDPVRAGNMLIF

SEQ ID NO: 477950 - protein, 15 aa, Homo sapiens
  CDR3 for beta chain variable domain of TCR clone 238975 (TRBV13, TRBJ1-5)
CASSFGQGGVQPQHF

SEQ ID NO: 477951 - protein, 15 aa, Homo sapiens
  CDR3 for alpha chain variable domain of TCR clone 238976 (TRAV26-1, TRAJ56)
CIVRVATGANSKLTF

SEQ ID NO: 477952 - protein, 15 aa, Homo sapiens
  CDR3 for beta chain variable domain of TCR clone 238976 (TRBV27, TRBJ2-7)
CASSPQREGQREQNF

SEQ ID NO: 477953 - protein, 14 aa, Homo sapiens
  CDR3 for alpha chain variable domain of TCR clone 238977 (TRAV12-2, TRAJ17)
CAVNIKAAGNKLTF

SEQ ID NO: 477954 - protein, 13 aa, Homo sapiens
  CDR3 for beta chain variable domain of TCR clone 238977 (TRBV12-4, TRBJ1-2)
CASSLRQGKGYTF

SEQ ID NO: 477955 - protein, 12 aa, Homo sapiens
  CDR3 for alpha chain variable domain of TCR clone 238978 (TRAV2, TRAJ40)
CCGTSGTYKYIF

SEQ ID NO: 477956 - protein, 14 aa, Homo sapiens
  CDR3 for beta chain variable domain of TCR clone 238978 (TRBV19, TRBJ2-3)
CASSAPRGTDTQYF

SEQ ID NO: 477957 - protein, 11 aa, Homo sapiens
  CDR3 for alpha chain variable domain of TCR clone 238979 (TRAV3, TRAJ21)
CAVGNFNKFYF

SEQ ID NO: 477958 - protein, 15 aa, Homo sapiens
  CDR3 for beta chain variable domain of TCR clone 238979 (TRBV7-9, TRBJ2-7)
CASQVQGPATGEQYF

SEQ ID NO: 477959 - protein, 14 aa, Homo sapiens
  CDR3 for alpha chain variable domain of TCR clone 238980 (TRAV8-3, TRAJ23)
CAVIIYNPGGKLIF

SEQ ID NO: 477960 - protein, 15 aa, Homo sapiens
  CDR3 for beta chain variable domain of TCR clone 238980 (TRBV18, TRBJ2-1)
CASSPPSASYNEQFF

SEQ ID NO: 477961 - protein, 14 aa, Homo sapiens
  CDR3 for alpha chain variable domain of TCR clone 238981 (TRAV13-1, TRAJ44)
CAAKATGTASKPAF

SEQ ID NO: 477962 - protein, 17 aa, Homo sapiens
  CDR3 for beta chain variable domain of TCR clone 238981 (TRBV7-3, TRBJ2-3)
CASSLMKGMRGADTQYF

SEQ ID NO: 477963 - protein, 14 aa, Homo sapiens
  CDR3 for alpha chain variable domain of TCR clone 238982 (TRAV1-2, TRAJ16)
CAVNRFSDGQKLLF

SEQ ID NO: 477964 - protein, 16 aa, Homo sapiens
  CDR3 for beta chain variable domain of TCR clone 238982 (TRBV6-1, TRBJ1-6)
CASSAPRTGQNSPLHF

SEQ ID NO: 477965 - protein, 14 aa, Homo sapiens
  CDR3 for alpha chain variable domain of TCR clone 238983 (TRAV8-4, TRAJ39)
CAVSLNNAGNMLTF

SEQ ID NO: 477966 - protein, 16 aa, Homo sapiens
  CDR3 for beta chain variable domain of TCR clone 238983 (TRBV13, TRBJ2-7)
CASSSRESGRTYEQYC

SEQ ID NO: 477967 - protein, 15 aa, Homo sapiens
  CDR3 for alpha chain variable domain of TCR clone 238984 (TRAV2, TRAJ9)
CAVEDRGTGGFKTIF

SEQ ID NO: 477968 - protein, 14 aa, Homo sapiens
  CDR3 for beta chain variable domain of TCR clone 238984 (TRBV2, TRBJ2-1)
CASRTGSSYNEQFF

SEQ ID NO: 477969 - protein, 14 aa, Homo sapiens
  CDR3 for alpha chain variable domain of TCR clone 238985 (TRAV12-1, TRAJ42)
CVVIYGGSQGNLIF

SEQ ID NO: 477970 - protein, 15 aa, Homo sapiens
  CDR3 for beta chain variable domain of TCR clone 238985 (TRBV5-1, TRBJ2-1)
CASSPPRAPYNEQFF

SEQ ID NO: 477971 - protein, 14 aa, Homo sapiens
  CDR3 for alpha chain variable domain of TCR clone 238986 (TRAV12-2, TRAJ4)
CAEDLSGGDNKLIF

SEQ ID NO: 477972 - protein, 13 aa, Homo sapiens
  CDR3 for beta chain variable domain of TCR clone 238986 (TRBV7-9, TRBJ1-2)
CASSLKQNYGYTF

SEQ ID NO: 477973 - protein, 16 aa, Homo sapiens
  CDR3 for alpha chain variable domain of TCR clone 238987 (TRAV30, TRAJ24)
CATEIVDADSRGKFQF

SEQ ID NO: 477974 - protein, 14 aa, Homo sapiens
  CDR3 for beta chain variable domain of TCR clone 238987 (TRBV12-5, TRBJ2-5)
CASGSRTHQETQYF

SEQ ID NO: 477975 - protein, 17 aa, Homo sapiens
  CDR3 for alpha chain variable domain of TCR clone 238988 (TRAV3, TRAJ42)
CAVRDRDYGGSQGNLIF

SEQ ID NO: 477976 - protein, 14 aa, Homo sapiens
  CDR3 for beta chain variable domain of TCR clone 238988 (TRBV19, TRBJ2-5)
CVSSMTGQQETRYF

SEQ ID NO: 477977 - protein, 16 aa, Homo sapiens
  CDR3 for alpha chain variable domain of TCR clone 238989 (TRAV20, TRAJ38)
CAVQASNAGNNRKPIW

SEQ ID NO: 477978 - protein, 16 aa, Homo sapiens
  CDR3 for beta chain variable domain of TCR clone 238989 (TRBV7-8, TRBJ2-6)
CATRVGDSSGANVLTF

SEQ ID NO: 477979 - protein, 18 aa, Homo sapiens
  CDR3 for alpha chain variable domain of TCR clone 238990 (TRAV21, TRAJ45)
CCGGPQGGSGGGADGLTF

SEQ ID NO: 477980 - protein, 12 aa, Homo sapiens
  CDR3 for beta chain variable domain of TCR clone 238990 (TRBV29-1, TRBJ1-3)
CSTRDSGNTIDF

SEQ ID NO: 477981 - protein, 14 aa, Homo sapiens
  CDR3 for alpha chain variable domain of TCR clone 238991 (TRAV38-1, TRAJ40)
CASRPTSGTYEYIF

SEQ ID NO: 477982 - protein, 14 aa, Homo sapiens
  CDR3 for beta chain variable domain of TCR clone 238991 (TRBV5-4, TRBJ1-1)
CASSLDSRRDEAFF

SEQ ID NO: 477983 - protein, 14 aa, Homo sapiens
  CDR3 for alpha chain variable domain of TCR clone 238992 (TRAV14/DV4, TRAJ20)
CAMRESLNDYKLSF

SEQ ID NO: 477984 - protein, 15 aa, Homo sapiens
  CDR3 for beta chain variable domain of TCR clone 238992 (TRBV6-3, TRBJ2-7)
CASSSPGTVFYEQYF

SEQ ID NO: 477985 - protein, 14 aa, Homo sapiens
  CDR3 for alpha chain variable domain of TCR clone 238993 (TRAV12-3, TRAJ54)
CAMSALQGAQKLVF

SEQ ID NO: 477986 - protein, 15 aa, Homo sapiens
  CDR3 for beta chain variable domain of TCR clone 238993 (TRBV19, TRBJ2-4)
CASSTPGMAKNIQYF

SEQ ID NO: 477987 - protein, 17 aa, Homo sapiens
  CDR3 for alpha chain variable domain of TCR clone 238994 (TRAV3, TRAJ6)
CAVRDGPRAGGSYIPTF

SEQ ID NO: 477988 - protein, 14 aa, Homo sapiens
  CDR3 for beta chain variable domain of TCR clone 238994 (TRBV20-1, TRBJ2-7)
CSAISREASYEQYF

SEQ ID NO: 477989 - protein, 13 aa, Homo sapiens
  CDR3 for alpha chain variable domain of TCR clone 238995 (TRAV2, TRAJ40)
YAVVTSGTYKYIF

SEQ ID NO: 477990 - protein, 11 aa, Homo sapiens
  CDR3 for beta chain variable domain of TCR clone 238995 (TRBV19, TRBJ1-1)
CASSIGSEAYF

SEQ ID NO: 477991 - protein, 14 aa, Homo sapiens
  CDR3 for alpha chain variable domain of TCR clone 238996 (TRAV26-1, TRAJ38)
CIADNAGTNRKLIW

SEQ ID NO: 477992 - protein, 17 aa, Homo sapiens
  CDR3 for beta chain variable domain of TCR clone 238996 (TRBV7-9, TRBJ2-3)
CASSPTVAGDLTDTQYF

SEQ ID NO: 477993 - protein, 15 aa, Homo sapiens
  CDR3 for alpha chain variable domain of TCR clone 238997 (TRAV16, TRAJ12)
CSKWPLRDSSYKLIF

SEQ ID NO: 477994 - protein, 12 aa, Homo sapiens
  CDR3 for beta chain variable domain of TCR clone 238997 (TRBV11-2, TRBJ2-2)
CASSLGGGELFF

SEQ ID NO: 477995 - protein, 13 aa, Homo sapiens
  CDR3 for alpha chain variable domain of TCR clone 238998 (TRAV2, TRAJ40)
CAVVTSGTYKYIF

SEQ ID NO: 477996 - protein, 16 aa, Homo sapiens
  CDR3 for beta chain variable domain of TCR clone 238998 (TRBV7-9, TRBJ1-3)
CASSLGAGSAGNTIYV

SEQ ID NO: 477997 - protein, 14 aa, Homo sapiens
  CDR3 for alpha chain variable domain of TCR clone 238999 (TRAV26-2, TRAJ31)
CILIPGNNNARLMF

SEQ ID NO: 477998 - protein, 14 aa, Homo sapiens
  CDR3 for beta chain variable domain of TCR clone 238999 (TRBV25-1, TRBJ1-1)
CASTHLGGNTEAFF

SEQ ID NO: 477999 - protein, 21 aa, Homo sapiens
  CDR3 for alpha chain variable domain of TCR clone 239000 (TRAV12-1, TRAJ32)
SSVIQPPTSMNYGGATNKLIF

SEQ ID NO: 478000 - protein, 18 aa, Homo sapiens
  CDR3 for beta chain variable domain of TCR clone 239000 (TRBV20-1, TRBJ2-3)
CSASGLAGGAGDHRYAVF

SEQ ID NO: 478001 - protein, 14 aa, Homo sapiens
  CDR3 for alpha chain variable domain of TCR clone 239001 (TRAV4, TRAJ17)
CLVGDMAAGNKLTF

SEQ ID NO: 478002 - protein, 14 aa, Homo sapiens
  CDR3 for beta chain variable domain of TCR clone 239001 (TRBV4-1, TRBJ2-7)
CTSSPVAGGDEQYF

SEQ ID NO: 478003 - protein, 14 aa, Homo sapiens
  CDR3 for alpha chain variable domain of TCR clone 239002 (TRAV1-2, TRAJ8)
CAVREDTGFQNIVF

SEQ ID NO: 478004 - protein, 15 aa, Homo sapiens
  CDR3 for beta chain variable domain of TCR clone 239002 (TRBV29-1, TRBJ2-1)
CSVPTGLALYNEQFF

SEQ ID NO: 478005 - protein, 13 aa, Homo sapiens
  CDR3 for alpha chain variable domain of TCR clone 239003 (TRAV2, TRAJ40)
CSVVTSVTYKYIF

SEQ ID NO: 478006 - protein, 14 aa, Homo sapiens
  CDR3 for beta chain variable domain of TCR clone 239003 (TRBV19, TRBJ2-1)
CASPTFVLSGEQFF

SEQ ID NO: 478007 - protein, 14 aa, Homo sapiens
  CDR3 for alpha chain variable domain of TCR clone 239004 (TRAV12-2, TRAJ17)
CAVLFKAAGNKLPF

SEQ ID NO: 478008 - protein, 17 aa, Homo sapiens
  CDR3 for beta chain variable domain of TCR clone 239004 (TRBV11-2, TRBJ2-1)
CASSLYPPGVEYNEQFF

SEQ ID NO: 478009 - protein, 12 aa, Homo sapiens
  CDR3 for alpha chain variable domain of TCR clone 239005 (TRAV21, TRAJ33)
CAKMDSNYQLIW

SEQ ID NO: 478010 - protein, 19 aa, Homo sapiens
  CDR3 for beta chain variable domain of TCR clone 239005 (TRBV25-1, TRBJ2-2)
CAILVYRVDRGRKTGELFF

SEQ ID NO: 478011 - protein, 14 aa, Homo sapiens
  CDR3 for alpha chain variable domain of TCR clone 239006 (TRAV1-2, TRAJ16)
CGVNRFSDGQKLLF

SEQ ID NO: 478012 - protein, 16 aa, Homo sapiens
  CDR3 for beta chain variable domain of TCR clone 239006 (TRBV19, TRBJ2-1)
CASSKAGPSSYNEQFF

SEQ ID NO: 478013 - protein, 15 aa, Homo sapiens
  CDR3 for alpha chain variable domain of TCR clone 239007 (TRAV17, TRAJ57)
CATGPSQGGSEKLVF

SEQ ID NO: 478014 - protein, 15 aa, Homo sapiens
  CDR3 for beta chain variable domain of TCR clone 239007 (TRBV6-3, TRBJ2-7)
CASRSPGTVLYEQYF

SEQ ID NO: 478015 - protein, 11 aa, Homo sapiens
  CDR3 for alpha chain variable domain of TCR clone 239008 (TRAV2, TRAJ13)
CASGGYQKVTI

SEQ ID NO: 478016 - protein, 13 aa, Homo sapiens
  CDR3 for beta chain variable domain of TCR clone 239008 (TRBV20-1, TRBJ2-7)
CSATHTSGYEQYF

SEQ ID NO: 478017 - protein, 16 aa, Homo sapiens
  CDR3 for alpha chain variable domain of TCR clone 239009 (TRAV1-2, TRAJ6)
CAVRDQGKGGSYIPTV

SEQ ID NO: 478018 - protein, 13 aa, Homo sapiens
  CDR3 for beta chain variable domain of TCR clone 239009 (TRBV28, TRBJ2-7)
CASTPGLAGEQYF

SEQ ID NO: 478019 - protein, 14 aa, Homo sapiens
  CDR3 for alpha chain variable domain of TCR clone 239010 (TRAV26-1, TRAJ45)
CIEVTGGGADGLTF

SEQ ID NO: 478020 - protein, 15 aa, Homo sapiens
  CDR3 for beta chain variable domain of TCR clone 239010 (TRBV5-1, TRBJ1-1)
CASSSTTGTNTEAVF

SEQ ID NO: 478021 - protein, 13 aa, Homo sapiens
  CDR3 for alpha chain variable domain of TCR clone 239011 (TRAV38-1, TRAJ17)
CAFIKAAGNKLTF

SEQ ID NO: 478022 - protein, 11 aa, Homo sapiens
  CDR3 for beta chain variable domain of TCR clone 239011 (TRBV29-1, TRBJ2-5)
CSEDRTGTQYF

SEQ ID NO: 478023 - protein, 18 aa, Homo sapiens
  CDR3 for alpha chain variable domain of TCR clone 239012 (TRAV26-1, TRAJ23)
CIVRVGLEVWHQGGKLIF

SEQ ID NO: 478024 - protein, 15 aa, Homo sapiens
  CDR3 for beta chain variable domain of TCR clone 239012 (TRBV10-3, TRBJ2-3)
CAISDWDRDTDTQYF

SEQ ID NO: 478025 - protein, 13 aa, Homo sapiens
  CDR3 for alpha chain variable domain of TCR clone 239013 (TRAV12-3, TRAJ33)
CAMSLNSNYQLIW

SEQ ID NO: 478026 - protein, 13 aa, Homo sapiens
  CDR3 for beta chain variable domain of TCR clone 239013 (TRBV7-2, TRBJ2-2)
CASSLAVTGELLF

SEQ ID NO: 478027 - protein, 17 aa, Homo sapiens
  CDR3 for alpha chain variable domain of TCR clone 239014 (TRAV3, TRAJ30)
CAVRDGPRAGGSYIPTF

SEQ ID NO: 478028 - protein, 11 aa, Homo sapiens
  CDR3 for beta chain variable domain of TCR clone 239014 (TRBV4-1, TRBJ2-2)
CASEHNGELFF

SEQ ID NO: 478029 - protein, 14 aa, Homo sapiens
  CDR3 for alpha chain variable domain of TCR clone 239015 (TRAV12-2, TRAJ40)
CAVKIPSGTYKYIF

SEQ ID NO: 478030 - protein, 14 aa, Homo sapiens
  CDR3 for beta chain variable domain of TCR clone 239015 (TRBV7-9, TRBJ1-2)
CATSRQGANYGYTF

SEQ ID NO: 478031 - protein, 17 aa, Homo sapiens
  CDR3 for alpha chain variable domain of TCR clone 239016 (TRAV13-1, TRAJ53)
CAASWKGSGGSNYKLTF

SEQ ID NO: 478032 - protein, 19 aa, Homo sapiens
  CDR3 for beta chain variable domain of TCR clone 239016 (TRBV7-9, TRBJ2-1)
CASSHNRGALLRSYNEQFF

SEQ ID NO: 478033 - protein, 14 aa, Homo sapiens
  CDR3 for alpha chain variable domain of TCR clone 239017 (TRAV13-2, TRAJ11)
CEETGNSGYSTLTF

SEQ ID NO: 478034 - protein, 11 aa, Homo sapiens
  CDR3 for beta chain variable domain of TCR clone 239017 (TRBV10-3, TRBJ2-7)
CAISEGLEQYF

SEQ ID NO: 478035 - protein, 12 aa, Homo sapiens
  CDR3 for alpha chain variable domain of TCR clone 239018 (TRAV25, TRAJ11)
CAGATGYSTLTF

SEQ ID NO: 478036 - protein, 16 aa, Homo sapiens
  CDR3 for beta chain variable domain of TCR clone 239018 (TRBV12-4, TRBJ2-2)
CASSFWIVGNTGELFF

SEQ ID NO: 478037 - protein, 15 aa, Homo sapiens
  CDR3 for alpha chain variable domain of TCR clone 239019 (TRAV20, TRAJ43)
CAVQAGKSSNNDMRF

SEQ ID NO: 478038 - protein, 17 aa, Homo sapiens
  CDR3 for beta chain variable domain of TCR clone 239019 (TRBV20-1, TRBJ2-2)
CSASGSGQGGLTGELFF

SEQ ID NO: 478039 - protein, 14 aa, Homo sapiens
  CDR3 for alpha chain variable domain of TCR clone 239020 (TRAV14/DV4, TRAJ54)
CAMREAPVAQKLVF

SEQ ID NO: 478040 - protein, 15 aa, Homo sapiens
  CDR3 for beta chain variable domain of TCR clone 239020 (TRBV5-1, TRBJ2-7)
CASSLNGGPAREQYF

SEQ ID NO: 478041 - protein, 14 aa, Homo sapiens
  CDR3 for alpha chain variable domain of TCR clone 239021 (TRAV12-2, TRAJ44)
CAVNPAGTASKLTF

SEQ ID NO: 478042 - protein, 22 aa, Homo sapiens
  CDR3 for beta chain variable domain of TCR clone 239021 (TRBV6-1, TRBJ1-3)
CASVQGGGWKHHIFWRGKLAHC

SEQ ID NO: 478043 - protein, 18 aa, Homo sapiens
  CDR3 for alpha chain variable domain of TCR clone 239022 (TRAV26-2, TRAJ54)
CILIDVEVGMQGAQKLVF

SEQ ID NO: 478044 - protein, 14 aa, Homo sapiens
  CDR3 for beta chain variable domain of TCR clone 239022 (TRBV20-1, TRBJ1-1)
CSAQTRIGGTEAFF

SEQ ID NO: 478045 - protein, 17 aa, Homo sapiens
  CDR3 for alpha chain variable domain of TCR clone 239023 (TRAV3, TRAJ42)
CAVRDRDYGGSQGNLIF

SEQ ID NO: 478046 - protein, 15 aa, Homo sapiens
  CDR3 for beta chain variable domain of TCR clone 239023 (TRBV28, TRBJ1-1)
CASRIKGGLNTEAFF

SEQ ID NO: 478047 - protein, 15 aa, Homo sapiens
  CDR3 for alpha chain variable domain of TCR clone 239024 (TRAV3, TRAJ22)
CAVRDRGGSARQLTF

SEQ ID NO: 478048 - protein, 15 aa, Homo sapiens
  CDR3 for beta chain variable domain of TCR clone 239024 (TRBV11-2, TRBJ1-1)
CASSARSSLLLSLDK

SEQ ID NO: 478049 - protein, 17 aa, Homo sapiens
  CDR3 for alpha chain variable domain of TCR clone 239025 (TRAV3, TRAJ6)
CSVRDGPRAGGSYIPTF

SEQ ID NO: 478050 - protein, 17 aa, Homo sapiens
  CDR3 for beta chain variable domain of TCR clone 239025 (TRBV20-1, TRBJ1-5)
CSASLSPGQGGNQPQHF

SEQ ID NO: 478051 - protein, 14 aa, Homo sapiens
  CDR3 for alpha chain variable domain of TCR clone 239026 (TRAV1-2, TRAJ16)
CAVNRFSDDQKLLF

SEQ ID NO: 478052 - protein, 14 aa, Homo sapiens
  CDR3 for beta chain variable domain of TCR clone 239026 (TRBV12-5, TRBJ2-5)
CASGSRTHQETQYF

SEQ ID NO: 478053 - protein, 18 aa, Homo sapiens
  CDR3 for alpha chain variable domain of TCR clone 239027 (TRAV26-1, TRAJ23)
CIVRVGLEVWNQGGKLIF

SEQ ID NO: 478054 - protein, 15 aa, Homo sapiens
  CDR3 for beta chain variable domain of TCR clone 239027 (TRBV18, TRBJ2-6)
CASSPSYAGANVLTF

SEQ ID NO: 478055 - protein, 12 aa, Homo sapiens
  CDR3 for alpha chain variable domain of TCR clone 239028 (TRAV29/DV5, TRAJ49)
CAATGTGNQFYF

SEQ ID NO: 478056 - protein, 12 aa, Homo sapiens
  CDR3 for beta chain variable domain of TCR clone 239028 (TRBV12-4, TRBJ2-7)
CASSLGGYEQYF

SEQ ID NO: 478057 - protein, 17 aa, Homo sapiens
  CDR3 for alpha chain variable domain of TCR clone 239029 (TRAV13-1, TRAJ28)
CAASPPYSGAGSYQLTF

SEQ ID NO: 478058 - protein, 15 aa, Homo sapiens
  CDR3 for beta chain variable domain of TCR clone 239029 (TRBV11-3, TRBJ2-3)
CASLKDGREGDKQYF

SEQ ID NO: 478059 - protein, 14 aa, Homo sapiens
  CDR3 for alpha chain variable domain of TCR clone 239030 (TRAV3, TRAJ37)
CAVKESGNTGKLIF

SEQ ID NO: 478060 - protein, 15 aa, Homo sapiens
  CDR3 for beta chain variable domain of TCR clone 239030 (TRBV19, TRBJ2-1)
CASSSPGVPLDEQFF

SEQ ID NO: 478061 - protein, 12 aa, Homo sapiens
  CDR3 for alpha chain variable domain of TCR clone 239031 (TRAV21, TRAJ37)
CAVRGNTGKLIF

SEQ ID NO: 478062 - protein, 11 aa, Homo sapiens
  CDR3 for beta chain variable domain of TCR clone 239031 (TRBV7-8, TRBJ2-7)
CASSLSLEQYF

SEQ ID NO: 478063 - protein, 13 aa, Homo sapiens
  CDR3 for alpha chain variable domain of TCR clone 239032 (TRAV13-1, TRAJ5)
CAASDTGRRALTF

SEQ ID NO: 478064 - protein, 12 aa, Homo sapiens
  CDR3 for beta chain variable domain of TCR clone 239032 (TRBV28, TRBJ2-3)
CSSSLYRDTQYF

SEQ ID NO: 478065 - protein, 14 aa, Homo sapiens
  CDR3 for alpha chain variable domain of TCR clone 239033 (TRAV8-4, TRAJ57)
CAVSTQGGSEKLVF

SEQ ID NO: 478066 - protein, 16 aa, Homo sapiens
  CDR3 for beta chain variable domain of TCR clone 239033 (TRBV12-5, TRBJ2-5)
CASGPRTSGNQETQYF

SEQ ID NO: 478067 - protein, 12 aa, Homo sapiens
  CDR3 for alpha chain variable domain of TCR clone 239034 (TRAV13-1, TRAJ49)
CAASPMGNQFNF

SEQ ID NO: 478068 - protein, 13 aa, Homo sapiens
  CDR3 for beta chain variable domain of TCR clone 239034 (TRBV20-1, TRBJ2-2)
CSASAAGTGELFF

SEQ ID NO: 478069 - protein, 21 aa, Homo sapiens
  CDR3 for alpha chain variable domain of TCR clone 239035 (TRAV25, TRAJ3)
TATQTTDVGTFAYSSASKIIF

SEQ ID NO: 478070 - protein, 16 aa, Homo sapiens
  CDR3 for beta chain variable domain of TCR clone 239035 (TRBV5-4, TRBJ2-1)
CASSLALAGAYNEQFF

SEQ ID NO: 478071 - protein, 14 aa, Homo sapiens
  CDR3 for alpha chain variable domain of TCR clone 239036 (TRAV2, TRAJ37)
CAVDFTSNTGKLII

SEQ ID NO: 478072 - protein, 14 aa, Homo sapiens
  CDR3 for beta chain variable domain of TCR clone 239036 (TRBV25-1, TRBJ1-1)
CASTHLGGNTEAFF

SEQ ID NO: 478073 - protein, 13 aa, Homo sapiens
  CDR3 for alpha chain variable domain of TCR clone 239037 (TRAV17, TRAJ15)
CATANQAGTALIF

SEQ ID NO: 478074 - protein, 13 aa, Homo sapiens
  CDR3 for beta chain variable domain of TCR clone 239037 (TRBV20-1, TRBJ1-1)
CSARGGGNTEAFF

SEQ ID NO: 478075 - protein, 14 aa, Homo sapiens
  CDR3 for alpha chain variable domain of TCR clone 239038 (TRAV13-1, TRAJ44)
CAAKATGTASNLTF

SEQ ID NO: 478076 - protein, 17 aa, Homo sapiens
  CDR3 for beta chain variable domain of TCR clone 239038 (TRBV13, TRBJ2-3)
CASSLSRVAGGRNTQYF

SEQ ID NO: 478077 - protein, 14 aa, Homo sapiens
  CDR3 for alpha chain variable domain of TCR clone 239039 (TRAV8-2, TRAJ4)
CVVSPSGGYNKLIF

SEQ ID NO: 478078 - protein, 15 aa, Homo sapiens
  CDR3 for beta chain variable domain of TCR clone 239039 (TRBV2, TRBJ2-4)
CASRTQGAAKNIQYF

SEQ ID NO: 478079 - protein, 12 aa, Homo sapiens
  CDR3 for alpha chain variable domain of TCR clone 239040 (TRAV1-1, TRAJ8)
CAGGTGFQKLVF

SEQ ID NO: 478080 - protein, 14 aa, Homo sapiens
  CDR3 for beta chain variable domain of TCR clone 239040 (TRBV5-1, TRBJ2-7)
CASSRGESLYEQYF

SEQ ID NO: 478081 - protein, 15 aa, Homo sapiens
  CDR3 for alpha chain variable domain of TCR clone 239041 (TRAV12-1, TRAJ44)
CVVDEYTGTASKLTF

SEQ ID NO: 478082 - protein, 14 aa, Homo sapiens
  CDR3 for beta chain variable domain of TCR clone 239041 (TRBV5-1, TRBJ1-2)
CASSLEPVNYDYTF

SEQ ID NO: 478083 - protein, 16 aa, Homo sapiens
  CDR3 for alpha chain variable domain of TCR clone 239042 (TRAV1-2, TRAJ10)
FAVRGVLTGGGNKLTF

SEQ ID NO: 478084 - protein, 13 aa, Homo sapiens
  CDR3 for beta chain variable domain of TCR clone 239042 (TRBV20-1, TRBJ1-6)
CSAPLGVGSPLHF

SEQ ID NO: 478085 - protein, 13 aa, Homo sapiens
  CDR3 for alpha chain variable domain of TCR clone 239043 (TRAV35, TRAJ36)
CAGPRIGANNLFF

SEQ ID NO: 478086 - protein, 15 aa, Homo sapiens
  CDR3 for beta chain variable domain of TCR clone 239043 (TRBV5-1, TRBJ2-2)
CASSSQGGNTGELFF

SEQ ID NO: 478087 - protein, 13 aa, Homo sapiens
  CDR3 for alpha chain variable domain of TCR clone 239044 (TRAV22, TRAJ29)
CAVGGSGNTPLVF

SEQ ID NO: 478088 - protein, 13 aa, Homo sapiens
  CDR3 for beta chain variable domain of TCR clone 239044 (TRBV4-2, TRBJ1-1)
FASSQAGNTEAFF

SEQ ID NO: 478089 - protein, 16 aa, Homo sapiens
  CDR3 for alpha chain variable domain of TCR clone 239045 (TRAV3, TRAJ10)
CAVRDLNAGGGNKLTF

SEQ ID NO: 478090 - protein, 16 aa, Homo sapiens
  CDR3 for beta chain variable domain of TCR clone 239045 (TRBV5-4, TRBJ2-3)
CASQQPGAGGADTQYF

SEQ ID NO: 478091 - protein, 13 aa, Homo sapiens
  CDR3 for alpha chain variable domain of TCR clone 239046 (TRAV17, TRAJ9)
FATDYTGGFKTIF

SEQ ID NO: 478092 - protein, 14 aa, Homo sapiens
  CDR3 for beta chain variable domain of TCR clone 239046 (TRBV19, TRBJ2-5)
CAGSMTGQQETQYF

SEQ ID NO: 478093 - protein, 13 aa, Homo sapiens
  CDR3 for alpha chain variable domain of TCR clone 239047 (TRAV17, TRAJ40)
CAGALVGTYKYIF

SEQ ID NO: 478094 - protein, 16 aa, Homo sapiens
  CDR3 for beta chain variable domain of TCR clone 239047 (TRBV11-2, TRBJ1-2)
CASSLDTGGADYGYTF

SEQ ID NO: 478095 - protein, 12 aa, Homo sapiens
  CDR3 for alpha chain variable domain of TCR clone 239048 (TRAV19, TRAJ23)
CALRAWGGKLIF

SEQ ID NO: 478096 - protein, 15 aa, Homo sapiens
  CDR3 for beta chain variable domain of TCR clone 239048 (TRBV11-2, TRBJ2-1)
CASSKNRGLIYEQFF

SEQ ID NO: 478097 - protein, 14 aa, Homo sapiens
  CDR3 for alpha chain variable domain of TCR clone 239049 (TRAV1-1, TRAJ27)
CAVIYNTNAGKSTF

SEQ ID NO: 478098 - protein, 15 aa, Homo sapiens
  CDR3 for beta chain variable domain of TCR clone 239049 (TRBV11-1, TRBJ2-7)
CASSLNYGASYEQYF

SEQ ID NO: 478099 - protein, 14 aa, Homo sapiens
  CDR3 for alpha chain variable domain of TCR clone 239050 (TRAV2, TRAJ20)
CAVEDGTNDYMLSF

SEQ ID NO: 478100 - protein, 14 aa, Homo sapiens
  CDR3 for beta chain variable domain of TCR clone 239050 (TRBV20-1, TRBJ2-5)
CSARDGRAGETQYF

SEQ ID NO: 478101 - protein, 13 aa, Homo sapiens
  CDR3 for alpha chain variable domain of TCR clone 239051 (TRAV2, TRAJ40)
CAVVTSGTYKYIF

SEQ ID NO: 478102 - protein, 14 aa, Homo sapiens
  CDR3 for beta chain variable domain of TCR clone 239051 (TRBV19, TRBJ2-1)
CASPTCVLGGEQFF

SEQ ID NO: 478103 - protein, 10 aa, Homo sapiens
  CDR3 for alpha chain variable domain of TCR clone 239052 (TRAV8-4, TRAJ43)
CAVSADDMRF

SEQ ID NO: 478104 - protein, 13 aa, Homo sapiens
  CDR3 for beta chain variable domain of TCR clone 239052 (TRBV12-4, TRBJ2-5)
CASSPGTEKTQYF

SEQ ID NO: 478105 - protein, 11 aa, Homo sapiens
  CDR3 for alpha chain variable domain of TCR clone 239053 (TRAV12-1, TRAJ30)
CAVNGQDKIIF

SEQ ID NO: 478106 - protein, 15 aa, Homo sapiens
  CDR3 for beta chain variable domain of TCR clone 239053 (TRBV18, TRBJ2-1)
CASSPPSASYNEQFF

SEQ ID NO: 478107 - protein, 15 aa, Homo sapiens
  CDR3 for alpha chain variable domain of TCR clone 239054 (TRAV26-1, TRAJ29)
FIVRVEGSGNTPLVF

SEQ ID NO: 478108 - protein, 14 aa, Homo sapiens
  CDR3 for beta chain variable domain of TCR clone 239054 (TRBV7-2, TRBJ2-7)
CASRSQGAAYEQYF

SEQ ID NO: 478109 - protein, 13 aa, Homo sapiens
  CDR3 for alpha chain variable domain of TCR clone 239055 (TRAV1-1, TRAJ9)
CASKNTGGFTTIF

SEQ ID NO: 478110 - protein, 14 aa, Homo sapiens
  CDR3 for beta chain variable domain of TCR clone 239055 (TRBV20-1, TRBJ2-1)
CSAQIGGSANEQFF

SEQ ID NO: 478111 - protein, 14 aa, Homo sapiens
  CDR3 for alpha chain variable domain of TCR clone 239056 (TRAV38-1, TRAJ45)
CASHSGGCADGLTF

SEQ ID NO: 478112 - protein, 14 aa, Homo sapiens
  CDR3 for beta chain variable domain of TCR clone 239056 (TRBV20-1, TRBJ1-1)
CSAQTRIGGTEAFF

SEQ ID NO: 478113 - protein, 15 aa, Homo sapiens
  CDR3 for alpha chain variable domain of TCR clone 239057 (TRAV25, TRAJ53)
CAATGGGGSNYKLTF

SEQ ID NO: 478114 - protein, 14 aa, Homo sapiens
  CDR3 for beta chain variable domain of TCR clone 239057 (TRBV11-2, TRBJ2-5)
CASSRTGGIETQYF

SEQ ID NO: 478115 - protein, 14 aa, Homo sapiens
  CDR3 for alpha chain variable domain of TCR clone 239058 (TRAV16, TRAJ31)
CALSGRNNNARLMF

SEQ ID NO: 478116 - protein, 12 aa, Homo sapiens
  CDR3 for beta chain variable domain of TCR clone 239058 (TRBV11-2, TRBJ1-2)
SASSREGDGYTF

SEQ ID NO: 478117 - protein, 14 aa, Homo sapiens
  CDR3 for alpha chain variable domain of TCR clone 239059 (TRAV16, TRAJ54)
CALSLIQGAQKLVF

SEQ ID NO: 478118 - protein, 12 aa, Homo sapiens
  CDR3 for beta chain variable domain of TCR clone 239059 (TRBV11-2, TRBJ2-2)
CASSLGGGELFF

SEQ ID NO: 478119 - protein, 13 aa, Homo sapiens
  CDR3 for alpha chain variable domain of TCR clone 239060 (TRAV13-1, TRAJ43)
CAASLSNNNDMRF

SEQ ID NO: 478120 - protein, 15 aa, Homo sapiens
  CDR3 for beta chain variable domain of TCR clone 239060 (TRBV5-1, TRBJ2-1)
CASSQAGYWRNEQFF

SEQ ID NO: 478121 - protein, 15 aa, Homo sapiens
  CDR3 for alpha chain variable domain of TCR clone 239061 (TRAV35, TRAJ38)
CAGFSNAGNNRKLIG

SEQ ID NO: 478122 - protein, 18 aa, Homo sapiens
  CDR3 for beta chain variable domain of TCR clone 239061 (TRBV3-1, TRBJ1-2)
CASSQGVIGWNGDYGYSF

SEQ ID NO: 478123 - protein, 15 aa, Homo sapiens
  CDR3 for alpha chain variable domain of TCR clone 239062 (TRAV9-2, TRAJ10)
FALKVLTGGGNKLTF

SEQ ID NO: 478124 - protein, 15 aa, Homo sapiens
  CDR3 for beta chain variable domain of TCR clone 239062 (TRBV20-1, TRBJ2-5)
CSASGTSGGGETQYF

SEQ ID NO: 478125 - protein, 18 aa, Homo sapiens
  CDR3 for alpha chain variable domain of TCR clone 239063 (TRAV9-2, TRAJ52)
CALSRHNAGGTSHGKLTF

SEQ ID NO: 478126 - protein, 16 aa, Homo sapiens
  CDR3 for beta chain variable domain of TCR clone 239063 (TRBV19, TRBJ2-1)
CASSKAGPSSYNEQFF

SEQ ID NO: 478127 - protein, 16 aa, Homo sapiens
  CDR3 for alpha chain variable domain of TCR clone 239064 (TRAV2, TRAJ4)
CAVEDRFSGDYNKLIF

SEQ ID NO: 478128 - protein, 13 aa, Homo sapiens
  CDR3 for beta chain variable domain of TCR clone 239064 (TRBV7-7, TRBJ2-5)
CASSRSGQETQYF

SEQ ID NO: 478129 - protein, 15 aa, Homo sapiens
  CDR3 for alpha chain variable domain of TCR clone 239065 (TRAV1-1, TRAJ5)
CAVRHMATGRRALTF

SEQ ID NO: 478130 - protein, 17 aa, Homo sapiens
  CDR3 for beta chain variable domain of TCR clone 239065 (TRBV28, TRBJ2-7)
CASSPGLAGGDSSEQYF

SEQ ID NO: 478131 - protein, 15 aa, Homo sapiens
  CDR3 for alpha chain variable domain of TCR clone 239066 (TRAV12-3, TRAJ6)
CAMSAASGGSYIPTF

SEQ ID NO: 478132 - protein, 16 aa, Homo sapiens
  CDR3 for beta chain variable domain of TCR clone 239066 (TRBV19, TRBJ2-3)
CASSPGAASRTDTQYF

SEQ ID NO: 478133 - protein, 11 aa, Homo sapiens
  CDR3 for alpha chain variable domain of TCR clone 239067 (TRAV13-1, TRAJ24)
CAASGWGKLQF

SEQ ID NO: 478134 - protein, 15 aa, Homo sapiens
  CDR3 for beta chain variable domain of TCR clone 239067 (TRBV11-2, TRBJ2-2)
CASSLDTGNTGELFL

SEQ ID NO: 478135 - protein, 15 aa, Homo sapiens
  CDR3 for alpha chain variable domain of TCR clone 239068 (TRAV12-2, TRAJ57)
CAVSRGQGGSEKLVF

SEQ ID NO: 478136 - protein, 14 aa, Homo sapiens
  CDR3 for beta chain variable domain of TCR clone 239068 (TRBV20-1, TRBJ2-1)
CSAHPGLPYNGQFF

SEQ ID NO: 478137 - protein, 11 aa, Homo sapiens
  CDR3 for alpha chain variable domain of TCR clone 239069 (TRAV21, TRAJ31)
CAVRNNASLMF

SEQ ID NO: 478138 - protein, 15 aa, Homo sapiens
  CDR3 for beta chain variable domain of TCR clone 239069 (TRBV20-1, TRBJ2-7)
CSARDRVSGMDEQYF

SEQ ID NO: 478139 - protein, 12 aa, Homo sapiens
  CDR3 for alpha chain variable domain of TCR clone 239070 (TRAV12-3, TRAJ40)
CAMSSGTYKYIF

SEQ ID NO: 478140 - protein, 15 aa, Homo sapiens
  CDR3 for beta chain variable domain of TCR clone 239070 (TRBV20-1, TRBJ2-7)
CSAESGTSGAYEQYF

SEQ ID NO: 478141 - protein, 12 aa, Homo sapiens
  CDR3 for alpha chain variable domain of TCR clone 239071 (TRAV12-3, TRAJ21)
CALFNNFNKFYF

SEQ ID NO: 478142 - protein, 16 aa, Homo sapiens
  CDR3 for beta chain variable domain of TCR clone 239071 (TRBV7-9, TRBJ1-2)
CASSLAPLRAAYGYTF

SEQ ID NO: 478143 - protein, 14 aa, Homo sapiens
  CDR3 for alpha chain variable domain of TCR clone 239072 (TRAV12-3, TRAJ10)
SHLPLTGGGNKLTF

SEQ ID NO: 478144 - protein, 15 aa, Homo sapiens
  CDR3 for beta chain variable domain of TCR clone 239072 (TRBV27, TRBJ2-3)
CASSLGLAATDTQYF

SEQ ID NO: 478145 - protein, 17 aa, Homo sapiens
  CDR3 for alpha chain variable domain of TCR clone 239073 (TRAV23/DV6, TRAJ53)
CAVSKLGSGGSNYKLTF

SEQ ID NO: 478146 - protein, 14 aa, Homo sapiens
  CDR3 for beta chain variable domain of TCR clone 239073 (TRBV7-9, TRBJ2-3)
CASSLEQGTNTQYF

SEQ ID NO: 478147 - protein, 10 aa, Homo sapiens
  CDR3 for alpha chain variable domain of TCR clone 239074 (TRAV21, TRAJ43)
CAVRIVDMRF

SEQ ID NO: 478148 - protein, 13 aa, Homo sapiens
  CDR3 for beta chain variable domain of TCR clone 239074 (TRBV20-1, TRBJ2-7)
CSAPGLADYEQYF

SEQ ID NO: 478149 - protein, 15 aa, Homo sapiens
  CDR3 for alpha chain variable domain of TCR clone 239075 (TRAV23/DV6, TRAJ13)
CAAWPGGGGYQKVTF

SEQ ID NO: 478150 - protein, 13 aa, Homo sapiens
  CDR3 for beta chain variable domain of TCR clone 239075 (TRBV10-3, TRBJ2-7)
CASKLAVNYEQYF

SEQ ID NO: 478151 - protein, 15 aa, Homo sapiens
  CDR3 for alpha chain variable domain of TCR clone 239076 (TRAV3, TRAJ22)
CAVRDRGGSARQLTF

SEQ ID NO: 478152 - protein, 15 aa, Homo sapiens
  CDR3 for beta chain variable domain of TCR clone 239076 (TRBV5-7, TRBJ2-2)
CASSLASSNTGELFF

SEQ ID NO: 478153 - protein, 17 aa, Homo sapiens
  CDR3 for alpha chain variable domain of TCR clone 239077 (TRAV8-3, TRAJ8)
CAVGPNEHRISETCIWN

SEQ ID NO: 478154 - protein, 13 aa, Homo sapiens
  CDR3 for beta chain variable domain of TCR clone 239077 (TRBV10-2, TRBJ2-3)
CASSESGDHTQYF

SEQ ID NO: 478155 - protein, 11 aa, Homo sapiens
  CDR3 for alpha chain variable domain of TCR clone 239078 (TRAV2, TRAJ33)
CAVESNYQLIW

SEQ ID NO: 478156 - protein, 12 aa, Homo sapiens
  CDR3 for beta chain variable domain of TCR clone 239078 (TRBV11-2, TRBJ2-2)
CASSLGGGELFL

SEQ ID NO: 478157 - protein, 12 aa, Homo sapiens
  CDR3 for alpha chain variable domain of TCR clone 239079 (TRAV10, TRAJ6)
CVVSEGSYIPTF

SEQ ID NO: 478158 - protein, 12 aa, Homo sapiens
  CDR3 for beta chain variable domain of TCR clone 239079 (TRBV4-2, TRBJ2-7)
CASSLEGYEQYF

SEQ ID NO: 478159 - protein, 12 aa, Homo sapiens
  CDR3 for alpha chain variable domain of TCR clone 239080 (TRAV8-4, TRAJ43)
CAVSVNNNDMRF

SEQ ID NO: 478160 - protein, 15 aa, Homo sapiens
  CDR3 for beta chain variable domain of TCR clone 239080 (TRBV27, TRBJ2-7)
CASSTAGTGSYEQYF

SEQ ID NO: 478161 - protein, 15 aa, Homo sapiens
  CDR3 for alpha chain variable domain of TCR clone 239081 (TRAV8-3, TRAJ44)
CAVGAGAGTASKLTF

SEQ ID NO: 478162 - protein, 12 aa, Homo sapiens
  CDR3 for beta chain variable domain of TCR clone 239081 (TRBV7-8, TRBJ2-4)
CASRLGGNNQYF

SEQ ID NO: 478163 - protein, 15 aa, Homo sapiens
  CDR3 for alpha chain variable domain of TCR clone 239082 (TRAV26-1, TRAJ22)
CIVRVSFWLCKATDL

SEQ ID NO: 478164 - protein, 14 aa, Homo sapiens
  CDR3 for beta chain variable domain of TCR clone 239082 (TRBV18, TRBJ2-7)
CARSPRGGAYEQYF

SEQ ID NO: 478165 - protein, 15 aa, Homo sapiens
  CDR3 for alpha chain variable domain of TCR clone 239083 (TRAV21, TRAJ52)
CAVRGGGTSYGKLTF

SEQ ID NO: 478166 - protein, 13 aa, Homo sapiens
  CDR3 for beta chain variable domain of TCR clone 239083 (TRBV6-5, TRBJ2-5)
CATAHSPQETQYF

SEQ ID NO: 478167 - protein, 13 aa, Homo sapiens
  CDR3 for alpha chain variable domain of TCR clone 239084 (TRAV3, TRAJ27)
CAVRPLGAGKSTS

SEQ ID NO: 478168 - protein, 13 aa, Homo sapiens
  CDR3 for beta chain variable domain of TCR clone 239084 (TRBV7-9, TRBJ2-3)
CACSPGSTDTQYF

SEQ ID NO: 478169 - protein, 12 aa, Homo sapiens
  CDR3 for alpha chain variable domain of TCR clone 239085 (TRAV13-1, TRAJ27)
CAAHTNAGISTF

SEQ ID NO: 478170 - protein, 15 aa, Homo sapiens
  CDR3 for beta chain variable domain of TCR clone 239085 (TRBV7-9, TRBJ1-6)
CASSSPGRGNSPLHF

SEQ ID NO: 478171 - protein, 14 aa, Homo sapiens
  CDR3 for alpha chain variable domain of TCR clone 239086 (TRAV1-2, TRAJ33)
CAVRAPDSNYQLIW

SEQ ID NO: 478172 - protein, 12 aa, Homo sapiens
  CDR3 for beta chain variable domain of TCR clone 239086 (TRBV12-4, TRBJ1-2)
CASSFIWLHLRF

SEQ ID NO: 478173 - protein, 16 aa, Homo sapiens
  CDR3 for alpha chain variable domain of TCR clone 239087 (TRAV17, TRAJ28)
CACGSYSGAGSYQLTF

SEQ ID NO: 478174 - protein, 13 aa, Homo sapiens
  CDR3 for beta chain variable domain of TCR clone 239087 (TRBV28, TRBJ2-7)
CASKAGGVYEQYF

SEQ ID NO: 478175 - protein, 15 aa, Homo sapiens
  CDR3 for alpha chain variable domain of TCR clone 239088 (TRAV8-3, TRAJ15)
CAVGAPNRAGTALIF

SEQ ID NO: 478176 - protein, 14 aa, Homo sapiens
  CDR3 for beta chain variable domain of TCR clone 239088 (TRBV20-1, TRBJ2-1)
CSPNDEASYNEQFF

SEQ ID NO: 478177 - protein, 13 aa, Homo sapiens
  CDR3 for alpha chain variable domain of TCR clone 239089 (TRAV13-1, TRAJ21)
WAASIYNFNKFYF

SEQ ID NO: 478178 - protein, 20 aa, Homo sapiens
  CDR3 for beta chain variable domain of TCR clone 239089 (TRBV7-8, TRBJ2-2)
CASSHLFPGPTIHITGELFF

SEQ ID NO: 478179 - protein, 14 aa, Homo sapiens
  CDR3 for alpha chain variable domain of TCR clone 239090 (TRAV38-2/DV8, TRAJ30)
CAYMDCLGGDKIIF

SEQ ID NO: 478180 - protein, 15 aa, Homo sapiens
  CDR3 for beta chain variable domain of TCR clone 239090 (TRBV7-9, TRBJ2-2)
CASRPADRDTGELFF

SEQ ID NO: 478181 - protein, 16 aa, Homo sapiens
  CDR3 for alpha chain variable domain of TCR clone 239091 (TRAV20, TRAJ52)
RAVLPDGGTSYGKLTF

SEQ ID NO: 478182 - protein, 12 aa, Homo sapiens
  CDR3 for beta chain variable domain of TCR clone 239091 (TRBV19, TRBJ2-1)
CASSQISNEQFF

SEQ ID NO: 478183 - protein, 14 aa, Homo sapiens
  CDR3 for alpha chain variable domain of TCR clone 239092 (TRAV13-1, TRAJ26)
CAAPKGPDGPNFVF

SEQ ID NO: 478184 - protein, 15 aa, Homo sapiens
  CDR3 for beta chain variable domain of TCR clone 239092 (TRBV28, TRBJ2-5)
CASSCRQGALETQYF

SEQ ID NO: 478185 - protein, 18 aa, Homo sapiens
  CDR3 for alpha chain variable domain of TCR clone 239093 (TRAV13-1, TRAJ52)
CAASKRSAGGTSYGKLTF

SEQ ID NO: 478186 - protein, 12 aa, Homo sapiens
  CDR3 for beta chain variable domain of TCR clone 239093 (TRBV7-3, TRBJ2-5)
CASSSPGGTQYF

SEQ ID NO: 478187 - protein, 15 aa, Homo sapiens
  CDR3 for alpha chain variable domain of TCR clone 239094 (TRAV12-2, TRAJ53)
CAVNGGGGSNYKLTF

SEQ ID NO: 478188 - protein, 14 aa, Homo sapiens
  CDR3 for beta chain variable domain of TCR clone 239094 (TRBV19, TRBJ2-2)
CASSTLHRSGELSF

SEQ ID NO: 478189 - protein, 11 aa, Homo sapiens
  CDR3 for alpha chain variable domain of TCR clone 239095 (TRAV3, TRAJ21)
CAVGNFNKFYF

SEQ ID NO: 478190 - protein, 14 aa, Homo sapiens
  CDR3 for beta chain variable domain of TCR clone 239095 (TRBV11-1, TRBJ2-7)
CASSFRQGSYEQYF

SEQ ID NO: 478191 - protein, 23 aa, Homo sapiens
  CDR3 for alpha chain variable domain of TCR clone 239096 (TRAV1-1, TRAJ11)
LLQELQMKDSASYFCAGYSTFTF

SEQ ID NO: 478192 - protein, 15 aa, Homo sapiens
  CDR3 for beta chain variable domain of TCR clone 239096 (TRBV6-5, TRBJ2-1)
CASRGDFDSYNEQFF

SEQ ID NO: 478193 - protein, 14 aa, Homo sapiens
  CDR3 for alpha chain variable domain of TCR clone 239097 (TRAV12-2, TRAJ15)
CAPHTGQAGTALIF

SEQ ID NO: 478194 - protein, 14 aa, Homo sapiens
  CDR3 for beta chain variable domain of TCR clone 239097 (TRBV7-3, TRBJ1-1)
CASSLKGGNTEAFF

SEQ ID NO: 478195 - protein, 16 aa, Homo sapiens
  CDR3 for alpha chain variable domain of TCR clone 239098 (TRAV16, TRAJ52)
CALRGVGGTSYGNLTF

SEQ ID NO: 478196 - protein, 14 aa, Homo sapiens
  CDR3 for beta chain variable domain of TCR clone 239098 (TRBV19, TRBJ1-2)
CASSLQGQAYGYTF

SEQ ID NO: 478197 - protein, 12 aa, Homo sapiens
  CDR3 for alpha chain variable domain of TCR clone 239099 (TRAV13-2, TRAJ8)
CAPWLGFQKLVF

SEQ ID NO: 478198 - protein, 13 aa, Homo sapiens
  CDR3 for beta chain variable domain of TCR clone 239099 (TRBV7-2, TRBJ2-7)
CASSFGQEKEQYF

SEQ ID NO: 478199 - protein, 17 aa, Homo sapiens
  CDR3 for alpha chain variable domain of TCR clone 239100 (TRAV3, TRAJ6)
CAVRDGPRAGGSYIPTF

SEQ ID NO: 478200 - protein, 15 aa, Homo sapiens
  CDR3 for beta chain variable domain of TCR clone 239100 (TRBV19, TRBJ1-1)
CASTSGQIQNAEAFF

SEQ ID NO: 478201 - protein, 15 aa, Homo sapiens
  CDR3 for alpha chain variable domain of TCR clone 239101 (TRAV2, TRAJ42)
CAVEVYGGSQGNLIF

SEQ ID NO: 478202 - protein, 12 aa, Homo sapiens
  CDR3 for beta chain variable domain of TCR clone 239101 (TRBV11-2, TRBJ2-1)
CASSPGNNEQFF

SEQ ID NO: 478203 - protein, 14 aa, Homo sapiens
  CDR3 for alpha chain variable domain of TCR clone 239102 (TRAV12-3, TRAJ6)
CAMSATGGSYIPTF

SEQ ID NO: 478204 - protein, 13 aa, Homo sapiens
  CDR3 for beta chain variable domain of TCR clone 239102 (TRBV7-9, TRBJ2-3)
CASSPGSTDTQYF

SEQ ID NO: 478205 - protein, 11 aa, Homo sapiens
  CDR3 for alpha chain variable domain of TCR clone 239103 (TRAV2, TRAJ33)
CAVESNYQLIW

SEQ ID NO: 478206 - protein, 15 aa, Homo sapiens
  CDR3 for beta chain variable domain of TCR clone 239103 (TRBV5-1, TRBJ2-7)
CASSLGDFTTYEQYF

SEQ ID NO: 478207 - protein, 14 aa, Homo sapiens
  CDR3 for alpha chain variable domain of TCR clone 239104 (TRAV13-2, TRAJ57)
CAENFQGGSEKLVF

SEQ ID NO: 478208 - protein, 15 aa, Homo sapiens
  CDR3 for beta chain variable domain of TCR clone 239104 (TRBV6-1, TRBJ2-1)
CASSELRGQYNEQFF

SEQ ID NO: 478209 - protein, 18 aa, Homo sapiens
  CDR3 for alpha chain variable domain of TCR clone 239105 (TRAV9-2, TRAJ52)
CALSRHNAGGASYGKLTF

SEQ ID NO: 478210 - protein, 13 aa, Homo sapiens
  CDR3 for beta chain variable domain of TCR clone 239105 (TRBV7-9, TRBJ1-2)
CASSLKQNYGYTF

SEQ ID NO: 478211 - protein, 10 aa, Homo sapiens
  CDR3 for alpha chain variable domain of TCR clone 239106 (TRAV5, TRAJ43)
CAESMGALRF

SEQ ID NO: 478212 - protein, 13 aa, Homo sapiens
  CDR3 for beta chain variable domain of TCR clone 239106 (TRBV7-9, TRBJ2-5)
CASTPVGQETQYF

SEQ ID NO: 478213 - protein, 14 aa, Homo sapiens
  CDR3 for alpha chain variable domain of TCR clone 239107 (TRAV8-1, TRAJ4)
CAVPFSGGYNKLIF

SEQ ID NO: 478214 - protein, 12 aa, Homo sapiens
  CDR3 for beta chain variable domain of TCR clone 239107 (TRBV7-3, TRBJ2-1)
CASSFINNEQFF

SEQ ID NO: 478215 - protein, 10 aa, Homo sapiens
  CDR3 for alpha chain variable domain of TCR clone 239108 (TRAV36/DV7, TRAJ31)
CAGGEARLMF

SEQ ID NO: 478216 - protein, 15 aa, Homo sapiens
  CDR3 for beta chain variable domain of TCR clone 239108 (TRBV19, TRBJ1-1)
CASSIGGGRNTEAFF

SEQ ID NO: 478217 - protein, 13 aa, Homo sapiens
  CDR3 for alpha chain variable domain of TCR clone 239109 (TRAV21, TRAJ27)
CAARPGNAGKSTF

SEQ ID NO: 478218 - protein, 13 aa, Homo sapiens
  CDR3 for beta chain variable domain of TCR clone 239109 (TRBV13, TRBJ2-7)
CASSKGLTYEQYF

SEQ ID NO: 478219 - protein, 13 aa, Homo sapiens
  CDR3 for alpha chain variable domain of TCR clone 239110 (TRAV3, TRAJ43)
CAVKARNNNDMLF

SEQ ID NO: 478220 - protein, 16 aa, Homo sapiens
  CDR3 for beta chain variable domain of TCR clone 239110 (TRBV7-9, TRBJ2-3)
CASSFSVAGGTDTQYF

SEQ ID NO: 478221 - protein, 11 aa, Homo sapiens
  CDR3 for alpha chain variable domain of TCR clone 239111 (TRAV35, TRAJ31)
CAASGDARLMF

SEQ ID NO: 478222 - protein, 11 aa, Homo sapiens
  CDR3 for beta chain variable domain of TCR clone 239111 (TRBV24-1, TRBJ2-3)
CATSDLDTQYF

SEQ ID NO: 478223 - protein, 20 aa, Homo sapiens
  CDR3 for alpha chain variable domain of TCR clone 239112 (TRAV8-4, TRAJ38)
CARLNAGNNHIQNPDPAVYQ

SEQ ID NO: 478224 - protein, 14 aa, Homo sapiens
  CDR3 for beta chain variable domain of TCR clone 239112 (TRBV7-8, TRBJ2-3)
CASSLEAGTDTQYF

SEQ ID NO: 478225 - protein, 13 aa, Homo sapiens
  CDR3 for alpha chain variable domain of TCR clone 239113 (TRAV8-2, TRAJ21)
CVVSSYNFNKFYF

SEQ ID NO: 478226 - protein, 15 aa, Homo sapiens
  CDR3 for beta chain variable domain of TCR clone 239113 (TRBV18, TRBJ1-1)
CASSDRGTGDTEAVF

SEQ ID NO: 478227 - protein, 12 aa, Homo sapiens
  CDR3 for alpha chain variable domain of TCR clone 239114 (TRAV2, TRAJ9)
CAVGAGGLKTIF

SEQ ID NO: 478228 - protein, 16 aa, Homo sapiens
  CDR3 for beta chain variable domain of TCR clone 239114 (TRBV13, TRBJ2-2)
CASSPRSGEHTGELFF

SEQ ID NO: 478229 - protein, 16 aa, Homo sapiens
  CDR3 for alpha chain variable domain of TCR clone 239115 (TRAV12-3, TRAJ10)
CAMKKGITGGGNKLTF

SEQ ID NO: 478230 - protein, 12 aa, Homo sapiens
  CDR3 for beta chain variable domain of TCR clone 239115 (TRBV20-1, TRBJ2-7)
CSAITPTKEQCF

SEQ ID NO: 478231 - protein, 15 aa, Homo sapiens
  CDR3 for alpha chain variable domain of TCR clone 239116 (TRAV3, TRAJ4)
CAVREGTGGYNKLIF

SEQ ID NO: 478232 - protein, 13 aa, Homo sapiens
  CDR3 for beta chain variable domain of TCR clone 239116 (TRBV7-2, TRBJ2-2)
CASSLAVTGELFF

SEQ ID NO: 478233 - protein, 14 aa, Homo sapiens
  CDR3 for alpha chain variable domain of TCR clone 239117 (TRAV17, TRAJ39)
CATHPVRSGNMLTF

SEQ ID NO: 478234 - protein, 15 aa, Homo sapiens
  CDR3 for beta chain variable domain of TCR clone 239117 (TRBV13, TRBJ1-5)
CASSFGQGGVQPQHF

SEQ ID NO: 478235 - protein, 12 aa, Homo sapiens
  CDR3 for alpha chain variable domain of TCR clone 239118 (TRAV2, TRAJ31)
CAVEDNNARLMF

SEQ ID NO: 478236 - protein, 13 aa, Homo sapiens
  CDR3 for beta chain variable domain of TCR clone 239118 (TRBV7-3, TRBJ2-7)
CASSPGQGSEQYF

SEQ ID NO: 478237 - protein, 16 aa, Homo sapiens
  CDR3 for alpha chain variable domain of TCR clone 239119 (TRAV8-3, TRAJ13)
CAVGAYPSGGYQKVTF

SEQ ID NO: 478238 - protein, 15 aa, Homo sapiens
  CDR3 for beta chain variable domain of TCR clone 239119 (TRBV28, TRBJ2-5)
CASSPPWSYQETQYF

SEQ ID NO: 478239 - protein, 16 aa, Homo sapiens
  CDR3 for alpha chain variable domain of TCR clone 239120 (TRAV2, TRAJ38)
CAVEDFPNAGNNHLQN

SEQ ID NO: 478240 - protein, 14 aa, Homo sapiens
  CDR3 for beta chain variable domain of TCR clone 239120 (TRBV29-1, TRBJ1-4)
CSVSGRQGGEKLFF

SEQ ID NO: 478241 - protein, 12 aa, Homo sapiens
  CDR3 for alpha chain variable domain of TCR clone 239121 (TRAV12-3, TRAJ3)
CAIDSSASKIIF

SEQ ID NO: 478242 - protein, 15 aa, Homo sapiens
  CDR3 for beta chain variable domain of TCR clone 239121 (TRBV27, TRBJ2-1)
CASSNGGGSSNEQFF

SEQ ID NO: 478243 - protein, 18 aa, Homo sapiens
  CDR3 for alpha chain variable domain of TCR clone 239122 (TRAV21, TRAJ52)
CAVRPSPAGGNSYGKLTF

SEQ ID NO: 478244 - protein, 15 aa, Homo sapiens
  CDR3 for beta chain variable domain of TCR clone 239122 (TRBV7-9, TRBJ2-7)
CASSSSGLAVYEQYF

SEQ ID NO: 478245 - protein, 16 aa, Homo sapiens
  CDR3 for alpha chain variable domain of TCR clone 239123 (TRAV16, TRAJ52)
CALSAAGGTSYGKLTF

SEQ ID NO: 478246 - protein, 15 aa, Homo sapiens
  CDR3 for beta chain variable domain of TCR clone 239123 (TRBV5-4, TRBJ1-4)
CASSHGDGENEKLFF

SEQ ID NO: 478247 - protein, 14 aa, Homo sapiens
  CDR3 for alpha chain variable domain of TCR clone 239124 (TRAV26-1, TRAJ38)
CIADNAGNNRKLLW

SEQ ID NO: 478248 - protein, 15 aa, Homo sapiens
  CDR3 for beta chain variable domain of TCR clone 239124 (TRBV6-3, TRBJ2-7)
CASSSPGTVFYEQYF

SEQ ID NO: 478249 - protein, 21 aa, Homo sapiens
  CDR3 for alpha chain variable domain of TCR clone 239125 (TRAV6, TRAJ36)
CARQTTSSLGLERDSPLFPIS

SEQ ID NO: 478250 - protein, 14 aa, Homo sapiens
  CDR3 for beta chain variable domain of TCR clone 239125 (TRBV10-2, TRBJ1-5)
CASSSTGRKQPQHF

SEQ ID NO: 478251 - protein, 13 aa, Homo sapiens
  CDR3 for alpha chain variable domain of TCR clone 239126 (TRAV21, TRAJ27)
CAARPGNAGQSTF

SEQ ID NO: 478252 - protein, 14 aa, Homo sapiens
  CDR3 for beta chain variable domain of TCR clone 239126 (TRBV11-2, TRBJ2-7)
CASSLGAGAYEQYF

SEQ ID NO: 478253 - protein, 15 aa, Homo sapiens
  CDR3 for alpha chain variable domain of TCR clone 239127 (TRAV41, TRAJ45)
RAASYSGGGADGLTF

SEQ ID NO: 478254 - protein, 14 aa, Homo sapiens
  CDR3 for beta chain variable domain of TCR clone 239127 (TRBV12-5, TRBJ2-5)
CASGSRTHQETQYF

SEQ ID NO: 478255 - protein, 13 aa, Homo sapiens
  CDR3 for alpha chain variable domain of TCR clone 239128 (TRAV12-2, TRAJ37)
CAGGSGNTGKLIF

SEQ ID NO: 478256 - protein, 16 aa, Homo sapiens
  CDR3 for beta chain variable domain of TCR clone 239128 (TRBV19, TRBJ2-2)
CASSPSGGLNTGELFF

SEQ ID NO: 478257 - protein, 15 aa, Homo sapiens
  CDR3 for alpha chain variable domain of TCR clone 239129 (TRAV8-3, TRAJ21)
CAVGALPPPGVQILL

SEQ ID NO: 478258 - protein, 18 aa, Homo sapiens
  CDR3 for beta chain variable domain of TCR clone 239129 (TRBV25-1, TRBJ1-2)
CASSGLQNGQGLIFGYTF

SEQ ID NO: 478259 - protein, 15 aa, Homo sapiens
  CDR3 for alpha chain variable domain of TCR clone 239130 (TRAV17, TRAJ10)
CATVLLTGVGNKLTL

SEQ ID NO: 478260 - protein, 16 aa, Homo sapiens
  CDR3 for beta chain variable domain of TCR clone 239130 (TRBV7-9, TRBJ2-3)
CASSPWREVGTDTQYF

SEQ ID NO: 478261 - protein, 14 aa, Homo sapiens
  CDR3 for alpha chain variable domain of TCR clone 239131 (TRAV21, )
CAVMGAGNNHIQNP

SEQ ID NO: 478262 - protein, 13 aa, Homo sapiens
  CDR3 for beta chain variable domain of TCR clone 239131 (TRBV7-3, TRBJ2-5)
CASSIGFFETQYF

SEQ ID NO: 478263 - protein, 15 aa, Homo sapiens
  CDR3 for alpha chain variable domain of TCR clone 239132 (TRAV13-1, TRAJ16)
CAARYQMARSCPLPG

SEQ ID NO: 478264 - protein, 13 aa, Homo sapiens
  CDR3 for beta chain variable domain of TCR clone 239132 (TRBV4-1, TRBJ2-1)
CASSQAGGDEQFF

SEQ ID NO: 478265 - protein, 12 aa, Homo sapiens
  CDR3 for alpha chain variable domain of TCR clone 239133 (TRAV17, TRAJ36)
CATLTGANNLFF

SEQ ID NO: 478266 - protein, 12 aa, Homo sapiens
  CDR3 for beta chain variable domain of TCR clone 239133 (TRBV7-9, TRBJ1-4)
CASSTDREKLFF

SEQ ID NO: 478267 - protein, 13 aa, Homo sapiens
  CDR3 for alpha chain variable domain of TCR clone 239134 (TRAV17, TRAJ5)
CAPMDTGGRALTF

SEQ ID NO: 478268 - protein, 11 aa, Homo sapiens
  CDR3 for beta chain variable domain of TCR clone 239134 (TRBV19, TRBJ1-1)
CASSIGSEAFF

SEQ ID NO: 478269 - protein, 17 aa, Homo sapiens
  CDR3 for alpha chain variable domain of TCR clone 239135 (TRAV3, TRAJ42)
CAVRDRDYGGSKGNLIF

SEQ ID NO: 478270 - protein, 13 aa, Homo sapiens
  CDR3 for beta chain variable domain of TCR clone 239135 (TRBV7-3, TRBJ1-1)
CASSQDWGAEAFF

SEQ ID NO: 478271 - protein, 14 aa, Homo sapiens
  CDR3 for alpha chain variable domain of TCR clone 239136 (TRAV12-2, TRAJ13)
CAVKKTGGYQKVTF

SEQ ID NO: 478272 - protein, 13 aa, Homo sapiens
  CDR3 for beta chain variable domain of TCR clone 239136 (TRBV15, TRBJ1-6)
CATSGGLNSPLDF

SEQ ID NO: 478273 - protein, 12 aa, Homo sapiens
  CDR3 for alpha chain variable domain of TCR clone 239137 (TRAV13-1, TRAJ27)
CAAHTNAGKSTF

SEQ ID NO: 478274 - protein, 14 aa, Homo sapiens
  CDR3 for beta chain variable domain of TCR clone 239137 (TRBV19, TRBJ2-2)
CASSGQGIAGELCF

SEQ ID NO: 478275 - protein, 14 aa, Homo sapiens
  CDR3 for alpha chain variable domain of TCR clone 239138 (TRAV17, TRAJ57)
CATDPQGGSEKLVF

SEQ ID NO: 478276 - protein, 15 aa, Homo sapiens
  CDR3 for beta chain variable domain of TCR clone 239138 (TRBV18, TRBJ2-1)
CATSPPSASYNEQFF

SEQ ID NO: 478277 - protein, 13 aa, Homo sapiens
  CDR3 for alpha chain variable domain of TCR clone 239139 (TRAV8-3, TRAJ28)
CAVGAVGSYQLTF

SEQ ID NO: 478278 - protein, 16 aa, Homo sapiens
  CDR3 for beta chain variable domain of TCR clone 239139 (TRBV3-1, TRBJ2-7)
CASSQGATGVAYEQYF

SEQ ID NO: 478279 - protein, 15 aa, Homo sapiens
  CDR3 for alpha chain variable domain of TCR clone 239140 (TRAV2, TRAJ9)
CAVEDRGTGGFKTVF

SEQ ID NO: 478280 - protein, 16 aa, Homo sapiens
  CDR3 for beta chain variable domain of TCR clone 239140 (TRBV24-1, TRBJ2-3)
FATSDPGTGATDTQYF

SEQ ID NO: 478281 - protein, 11 aa, Homo sapiens
  CDR3 for alpha chain variable domain of TCR clone 239141 (TRAV12-2, TRAJ39)
CAVNNMLTFGG

SEQ ID NO: 478282 - protein, 16 aa, Homo sapiens
  CDR3 for beta chain variable domain of TCR clone 239141 (TRBV12-4, TRBJ2-5)
CASSFFVRGRQETQYF

SEQ ID NO: 478283 - protein, 11 aa, Homo sapiens
  CDR3 for alpha chain variable domain of TCR clone 239142 (TRAV23/DV6, TRAJ48)
RSPRWGEKLTF

SEQ ID NO: 478284 - protein, 13 aa, Homo sapiens
  CDR3 for beta chain variable domain of TCR clone 239142 (TRBV12-4, TRBJ2-5)
CASSPGTEETQYF

SEQ ID NO: 478285 - protein, 11 aa, Homo sapiens
  CDR3 for alpha chain variable domain of TCR clone 239143 (TRAV1-1, TRAJ3)
CAVRSASKIIF

SEQ ID NO: 478286 - protein, 18 aa, Homo sapiens
  CDR3 for beta chain variable domain of TCR clone 239143 (TRBV7-8, TRBJ2-1)
CASSPYLGQRGSNNEQFF

SEQ ID NO: 478287 - protein, 12 aa, Homo sapiens
  CDR3 for alpha chain variable domain of TCR clone 239144 (TRAV20, TRAJ56)
CAVTGANSKLTF

SEQ ID NO: 478288 - protein, 13 aa, Homo sapiens
  CDR3 for beta chain variable domain of TCR clone 239144 (TRBV20-1, TRBJ2-5)
QCPGTGYQENQYF

SEQ ID NO: 478289 - protein, 13 aa, Homo sapiens
  CDR3 for alpha chain variable domain of TCR clone 239145 (TRAV27, TRAJ39)
CAGVNNAGNMLTF

SEQ ID NO: 478290 - protein, 15 aa, Homo sapiens
  CDR3 for beta chain variable domain of TCR clone 239145 (TRBV28, TRBJ2-7)
CASSPGGRGFYEQYF

SEQ ID NO: 478291 - protein, 13 aa, Homo sapiens
  CDR3 for alpha chain variable domain of TCR clone 239146 (TRAV12-3, TRAJ7)
CAMTPYGNNRLAF

SEQ ID NO: 478292 - protein, 16 aa, Homo sapiens
  CDR3 for beta chain variable domain of TCR clone 239146 (TRBV20-1, TRBJ1-4)
CSARPYGGELNEKLFF

SEQ ID NO: 478293 - protein, 14 aa, Homo sapiens
  CDR3 for alpha chain variable domain of TCR clone 239147 (TRAV1-2, TRAJ16)
CAVNRFSDGQKLPF

SEQ ID NO: 478294 - protein, 13 aa, Homo sapiens
  CDR3 for beta chain variable domain of TCR clone 239147 (TRBV29-1, TRBJ2-1)
CSVEGGRVNEQFF

SEQ ID NO: 478295 - protein, 12 aa, Homo sapiens
  CDR3 for alpha chain variable domain of TCR clone 239148 (TRAV26-1, TRAJ26)
CIVYNYGQNYVF

SEQ ID NO: 478296 - protein, 15 aa, Homo sapiens
  CDR3 for beta chain variable domain of TCR clone 239148 (TRBV7-2, TRBJ2-3)
CASSLRGGSTDTQYF

SEQ ID NO: 478297 - protein, 15 aa, Homo sapiens
  CDR3 for alpha chain variable domain of TCR clone 239149 (TRAV17, TRAJ4)
CATGTWSGGYNKLIF

SEQ ID NO: 478298 - protein, 13 aa, Homo sapiens
  CDR3 for beta chain variable domain of TCR clone 239149 (TRBV20-1, TRBJ1-1)
CSARGGGNTEAFF

SEQ ID NO: 478299 - protein, 13 aa, Homo sapiens
  CDR3 for alpha chain variable domain of TCR clone 239150 (TRAV20, TRAJ21)
CAVEGYDFNKFYF

SEQ ID NO: 478300 - protein, 13 aa, Homo sapiens
  CDR3 for beta chain variable domain of TCR clone 239150 (TRBV7-8, TRBJ2-7)
CASSLTGGREQYF

SEQ ID NO: 478301 - protein, 14 aa, Homo sapiens
  CDR3 for alpha chain variable domain of TCR clone 239151 (TRAV2, TRAJ37)
CAVDFTSNTGKLIF

SEQ ID NO: 478302 - protein, 15 aa, Homo sapiens
  CDR3 for beta chain variable domain of TCR clone 239151 (TRBV5-1, TRBJ2-1)
CASTGSGRTYNEQFF

SEQ ID NO: 478303 - protein, 14 aa, Homo sapiens
  CDR3 for alpha chain variable domain of TCR clone 239152 (TRAV17, TRAJ57)
CATDPQGGSEKLVF

SEQ ID NO: 478304 - protein, 13 aa, Homo sapiens
  CDR3 for beta chain variable domain of TCR clone 239152 (TRBV19, TRBJ2-7)
CASSPRQPYEQYF

SEQ ID NO: 478305 - protein, 14 aa, Homo sapiens
  CDR3 for alpha chain variable domain of TCR clone 239153 (TRAV12-2, TRAJ9)
CAVRGQTGGFKTIF

SEQ ID NO: 478306 - protein, 15 aa, Homo sapiens
  CDR3 for beta chain variable domain of TCR clone 239153 (TRBV4-2, TRBJ2-1)
CASSPSGGLYNEQFF

SEQ ID NO: 478307 - protein, 15 aa, Homo sapiens
  CDR3 for alpha chain variable domain of TCR clone 239154 (TRAV26-1, TRAJ29)
CIVRVEGSGNTPLVF

SEQ ID NO: 478308 - protein, 14 aa, Homo sapiens
  CDR3 for beta chain variable domain of TCR clone 239154 (TRBV25-1, TRBJ1-1)
CASTHLGGTTEAFF

SEQ ID NO: 478309 - protein, 14 aa, Homo sapiens
  CDR3 for alpha chain variable domain of TCR clone 239155 (TRAV3, TRAJ9)
CAVRDDTGGFKNIF

SEQ ID NO: 478310 - protein, 18 aa, Homo sapiens
  CDR3 for beta chain variable domain of TCR clone 239155 (TRBV20-1, TRBJ2-6)
CSAETTPTHGSGANVLTF

SEQ ID NO: 478311 - protein, 15 aa, Homo sapiens
  CDR3 for alpha chain variable domain of TCR clone 239156 (TRAV17, TRAJ52)
CATEAGGTSYGELTF

SEQ ID NO: 478312 - protein, 14 aa, Homo sapiens
  CDR3 for beta chain variable domain of TCR clone 239156 (TRBV28, TRBJ1-5)
CASSLGVLVKPQHF

SEQ ID NO: 478313 - protein, 12 aa, Homo sapiens
  CDR3 for alpha chain variable domain of TCR clone 239157 (TRAV27, TRAJ41)
CAGRNSGYALNF

SEQ ID NO: 478314 - protein, 16 aa, Homo sapiens
  CDR3 for beta chain variable domain of TCR clone 239157 (TRBV19, TRBJ2-1)
CASSKAGPSSYNEQFF

SEQ ID NO: 478315 - protein, 17 aa, Homo sapiens
  CDR3 for alpha chain variable domain of TCR clone 239158 (TRAV3, TRAJ42)
CAVRGRDYGGSKGNLIF

SEQ ID NO: 478316 - protein, 14 aa, Homo sapiens
  CDR3 for beta chain variable domain of TCR clone 239158 (TRBV5-4, TRBJ1-1)
CASSLDSRRDEAFF

SEQ ID NO: 478317 - protein, 13 aa, Homo sapiens
  CDR3 for alpha chain variable domain of TCR clone 239159 (TRAV8-6, TRAJ49)
CAVITNTGDQFYF

SEQ ID NO: 478318 - protein, 14 aa, Homo sapiens
  CDR3 for beta chain variable domain of TCR clone 239159 (TRBV5-1, TRBJ2-7)
CASSRGESLYEQYF

SEQ ID NO: 478319 - protein, 15 aa, Homo sapiens
  CDR3 for alpha chain variable domain of TCR clone 239160 (TRAV2, TRAJ22)
CAVPSRGGSARQLTF

SEQ ID NO: 478320 - protein, 14 aa, Homo sapiens
  CDR3 for beta chain variable domain of TCR clone 239160 (TRBV7-6, TRBJ2-3)
CASSVAGGTDTQYF

SEQ ID NO: 478321 - protein, 16 aa, Homo sapiens
  CDR3 for alpha chain variable domain of TCR clone 239161 (TRAV3, TRAJ37)
CAVRPHGSGHTGKLIF

SEQ ID NO: 478322 - protein, 16 aa, Homo sapiens
  CDR3 for beta chain variable domain of TCR clone 239161 (TRBV9, TRBJ1-2)
CASSVEEKVSPYGYTL

SEQ ID NO: 478323 - protein, 17 aa, Homo sapiens
  CDR3 for alpha chain variable domain of TCR clone 239162 (TRAV3, TRAJ42)
CAVRDRDYGGSQGNPIF

SEQ ID NO: 478324 - protein, 14 aa, Homo sapiens
  CDR3 for beta chain variable domain of TCR clone 239162 (TRBV19, TRBJ2-2)
CTSSGQGIAGELFF

SEQ ID NO: 478325 - protein, 14 aa, Homo sapiens
  CDR3 for alpha chain variable domain of TCR clone 239163 (TRAV12-2, TRAJ17)
CAVNIKAAGNKLTF

SEQ ID NO: 478326 - protein, 16 aa, Homo sapiens
  CDR3 for beta chain variable domain of TCR clone 239163 (TRBV20-1, TRBJ2-6)
CSASTQGYDGANVLTF

SEQ ID NO: 478327 - protein, 15 aa, Homo sapiens
  CDR3 for alpha chain variable domain of TCR clone 239164 (TRAV26-1, TRAJ15)
CIVRDANQAGTALTF

SEQ ID NO: 478328 - protein, 13 aa, Homo sapiens
  CDR3 for beta chain variable domain of TCR clone 239164 (TRBV10-3, TRBJ2-7)
CASSEAGPYEQYF

SEQ ID NO: 478329 - protein, 12 aa, Homo sapiens
  CDR3 for alpha chain variable domain of TCR clone 239165 (TRAV2, TRAJ33)
CDFMDSNYQLIW

SEQ ID NO: 478330 - protein, 16 aa, Homo sapiens
  CDR3 for beta chain variable domain of TCR clone 239165 (TRBV2, TRBJ2-7)
CASSEPWTGPSYEQYF

SEQ ID NO: 478331 - protein, 18 aa, Homo sapiens
  CDR3 for alpha chain variable domain of TCR clone 239166 (TRAV13-1, TRAJ52)
CAAKNPNAGGPSYGKLTF

SEQ ID NO: 478332 - protein, 17 aa, Homo sapiens
  CDR3 for beta chain variable domain of TCR clone 239166 (TRBV11-2, TRBJ2-1)
CASSLYPPGVEYNEQFF

SEQ ID NO: 478333 - protein, 15 aa, Homo sapiens
  CDR3 for alpha chain variable domain of TCR clone 239167 (TRAV3, TRAJ4)
CAVRDGTGGYNKLIF

SEQ ID NO: 478334 - protein, 16 aa, Homo sapiens
  CDR3 for beta chain variable domain of TCR clone 239167 (TRBV2, TRBJ1-5)
CASSEGGFYSNQPQHF

SEQ ID NO: 478335 - protein, 13 aa, Homo sapiens
  CDR3 for alpha chain variable domain of TCR clone 239168 (TRAV21, TRAJ37)
WAVSSGNTGKLIF

SEQ ID NO: 478336 - protein, 17 aa, Homo sapiens
  CDR3 for beta chain variable domain of TCR clone 239168 (TRBV5-1, TRBJ2-5)
CASSLLGLAANQETQYF

SEQ ID NO: 478337 - protein, 17 aa, Homo sapiens
  CDR3 for alpha chain variable domain of TCR clone 239169 (TRAV27, TRAJ18)
CAGLHRGRGSTLGRRYF

SEQ ID NO: 478338 - protein, 13 aa, Homo sapiens
  CDR3 for beta chain variable domain of TCR clone 239169 (TRBV7-7, TRBJ2-2)
CASSLTSAGELFF

SEQ ID NO: 478339 - protein, 13 aa, Homo sapiens
  CDR3 for alpha chain variable domain of TCR clone 239170 (TRAV27, TRAJ6)
CAGGTRGSYIPTF

SEQ ID NO: 478340 - protein, 13 aa, Homo sapiens
  CDR3 for beta chain variable domain of TCR clone 239170 (TRBV11-2, TRBJ1-6)
CASSLAGTSPLHF

SEQ ID NO: 478341 - protein, 10 aa, Homo sapiens
  CDR3 for alpha chain variable domain of TCR clone 239171 (TRAV30, TRAJ24)
CGTEMWMLTA

SEQ ID NO: 478342 - protein, 13 aa, Homo sapiens
  CDR3 for beta chain variable domain of TCR clone 239171 (TRBV7-2, TRBJ1-4)
CASSLAGLEKLFF

SEQ ID NO: 478343 - protein, 18 aa, Homo sapiens
  CDR3 for alpha chain variable domain of TCR clone 239172 (TRAV26-2, TRAJ33)
CCVLLHPEEPASNYQLIW

SEQ ID NO: 478344 - protein, 15 aa, Homo sapiens
  CDR3 for beta chain variable domain of TCR clone 239172 (TRBV7-9, TRBJ1-4)
CASSRTGGFNEKLFF

SEQ ID NO: 478345 - protein, 12 aa, Homo sapiens
  CDR3 for alpha chain variable domain of TCR clone 239173 (TRAV25, TRAJ11)
CAGASGYSTLNF

SEQ ID NO: 478346 - protein, 14 aa, Homo sapiens
  CDR3 for beta chain variable domain of TCR clone 239173 (TRBV5-8, TRBJ2-3)
CASSLGQGTDTQYF

SEQ ID NO: 478347 - protein, 16 aa, Homo sapiens
  CDR3 for alpha chain variable domain of TCR clone 239174 (TRAV16, TRAJ4)
CALSRMFSGGYNKLIF

SEQ ID NO: 478348 - protein, 13 aa, Homo sapiens
  CDR3 for beta chain variable domain of TCR clone 239174 (TRBV19, TRBJ1-5)
CASSIGGNQTQHF

SEQ ID NO: 478349 - protein, 13 aa, Homo sapiens
  CDR3 for alpha chain variable domain of TCR clone 239175 (TRAV13-2, TRAJ13)
CAERPGGYQKVTF

SEQ ID NO: 478350 - protein, 19 aa, Homo sapiens
  CDR3 for beta chain variable domain of TCR clone 239175 (TRBV4-1, TRBJ2-1)
CASSQGPLPGLGSRNEQFL

SEQ ID NO: 478351 - protein, 10 aa, Homo sapiens
  CDR3 for alpha chain variable domain of TCR clone 239176 (TRAV30, TRAJ48)
CGIGNEKLTF

SEQ ID NO: 478352 - protein, 16 aa, Homo sapiens
  CDR3 for beta chain variable domain of TCR clone 239176 (TRBV20-1, TRBJ1-4)
YSAPGQGLLTNEKLFF

SEQ ID NO: 478353 - protein, 13 aa, Homo sapiens
  CDR3 for alpha chain variable domain of TCR clone 239177 (TRAV16, TRAJ20)
CALGHSNDYKLSF

SEQ ID NO: 478354 - protein, 15 aa, Homo sapiens
  CDR3 for beta chain variable domain of TCR clone 239177 (TRBV5-1, TRBJ2-2)
CASSRVGSDTGELFF

SEQ ID NO: 478355 - protein, 13 aa, Homo sapiens
  CDR3 for alpha chain variable domain of TCR clone 239178 (TRAV20, TRAJ34)
CAVRSYNNDKLIF

SEQ ID NO: 478356 - protein, 14 aa, Homo sapiens
  CDR3 for beta chain variable domain of TCR clone 239178 (TRBV27, TRBJ1-3)
CQQSSPGSGNTIYF

SEQ ID NO: 478357 - protein, 11 aa, Homo sapiens
  CDR3 for alpha chain variable domain of TCR clone 239179 (TRAV12-3, TRAJ43)
CAMSFSNDMRF

SEQ ID NO: 478358 - protein, 12 aa, Homo sapiens
  CDR3 for beta chain variable domain of TCR clone 239179 (TRBV20-1, TRBJ1-1)
QCSTWGGTEAFF

SEQ ID NO: 478359 - protein, 12 aa, Homo sapiens
  CDR3 for alpha chain variable domain of TCR clone 239180 (TRAV2, TRAJ32)
CAVGGATNKLIC

SEQ ID NO: 478360 - protein, 15 aa, Homo sapiens
  CDR3 for beta chain variable domain of TCR clone 239180 (TRBV7-2, TRBJ2-1)
CASSSRTSREDEQFF

SEQ ID NO: 478361 - protein, 15 aa, Homo sapiens
  CDR3 for alpha chain variable domain of TCR clone 239181 (TRAV26-1, TRAJ3)
CIVRSGYSSASKIIF

SEQ ID NO: 478362 - protein, 14 aa, Homo sapiens
  CDR3 for beta chain variable domain of TCR clone 239181 (TRBV13, TRBJ2-5)
CVSYRRLAEETQYF

SEQ ID NO: 478363 - protein, 13 aa, Homo sapiens
  CDR3 for alpha chain variable domain of TCR clone 239182 (TRAV12-2, TRAJ50)
CAVIVTSYDKVIF

SEQ ID NO: 478364 - protein, 14 aa, Homo sapiens
  CDR3 for beta chain variable domain of TCR clone 239182 (TRBV9, TRBJ2-1)
CARSVDPRGKEQFF

SEQ ID NO: 478365 - protein, 15 aa, Homo sapiens
  CDR3 for alpha chain variable domain of TCR clone 239183 (TRAV12-3, TRAJ48)
CAMNAKNFGNEKLTF

SEQ ID NO: 478366 - protein, 15 aa, Homo sapiens
  CDR3 for beta chain variable domain of TCR clone 239183 (TRBV7-3, TRBJ2-1)
CASSLGQGPFGEQFF

SEQ ID NO: 478367 - protein, 14 aa, Homo sapiens
  CDR3 for alpha chain variable domain of TCR clone 239184 (TRAV1-2, TRAJ8)
CAVREDTGCQKLVF

SEQ ID NO: 478368 - protein, 12 aa, Homo sapiens
  CDR3 for beta chain variable domain of TCR clone 239184 (TRBV4-1, TRBJ2-3)
CASSQGTDTQYF

SEQ ID NO: 478369 - protein, 15 aa, Homo sapiens
  CDR3 for alpha chain variable domain of TCR clone 239185 (TRAV26-1, TRAJ37)
CIVRVATGNTGKLIF

SEQ ID NO: 478370 - protein, 17 aa, Homo sapiens
  CDR3 for beta chain variable domain of TCR clone 239185 (TRBV7-2, TRBJ2-2)
CASSPRGAGEGTGELFF

SEQ ID NO: 478371 - protein, 13 aa, Homo sapiens
  CDR3 for alpha chain variable domain of TCR clone 239186 (TRAV8-2, TRAJ11)
CVVNRSGYSTLTF

SEQ ID NO: 478372 - protein, 15 aa, Homo sapiens
  CDR3 for beta chain variable domain of TCR clone 239186 (TRBV7-2, TRBJ1-2)
CASSPRAGWNYGYTF

SEQ ID NO: 478373 - protein, 14 aa, Homo sapiens
  CDR3 for alpha chain variable domain of TCR clone 239187 (TRAV13-1, TRAJ35)
CAASKGGFGNVLHC

SEQ ID NO: 478374 - protein, 15 aa, Homo sapiens
  CDR3 for beta chain variable domain of TCR clone 239187 (TRBV11-3, TRBJ2-1)
CASSLGDSSHNEQFF

SEQ ID NO: 478375 - protein, 17 aa, Homo sapiens
  CDR3 for alpha chain variable domain of TCR clone 239188 (TRAV12-3, TRAJ18)
CAMIRADRGSTLGRLYF

SEQ ID NO: 478376 - protein, 14 aa, Homo sapiens
  CDR3 for beta chain variable domain of TCR clone 239188 (TRBV5-7, TRBJ1-6)
CASTPWPADSPLHV

SEQ ID NO: 478377 - protein, 13 aa, Homo sapiens
  CDR3 for alpha chain variable domain of TCR clone 239189 (TRAV3, TRAJ20)
CAVRPLNDSKLSF

SEQ ID NO: 478378 - protein, 12 aa, Homo sapiens
  CDR3 for beta chain variable domain of TCR clone 239189 (TRBV6-1, TRBJ2-1)
CATYGLNNEQFF

SEQ ID NO: 478379 - protein, 17 aa, Homo sapiens
  CDR3 for alpha chain variable domain of TCR clone 239190 (TRAV3, TRAJ38)
CAARDCLNAGNNRKLIW

SEQ ID NO: 478380 - protein, 13 aa, Homo sapiens
  CDR3 for beta chain variable domain of TCR clone 239190 (TRBV23-1, TRBJ1-4)
CASRGKFNEKLFC

SEQ ID NO: 478381 - protein, 13 aa, Homo sapiens
  CDR3 for alpha chain variable domain of TCR clone 239191 (TRAV26-2, TRAJ57)
CILHQGGSEKLVF

SEQ ID NO: 478382 - protein, 13 aa, Homo sapiens
  CDR3 for beta chain variable domain of TCR clone 239191 (TRBV7-9, TRBJ2-7)
CASSLPLTYEQYF

SEQ ID NO: 478383 - protein, 14 aa, Homo sapiens
  CDR3 for alpha chain variable domain of TCR clone 239192 (TRAV27, TRAJ36)
CAGPPKRGANNLLF

SEQ ID NO: 478384 - protein, 15 aa, Homo sapiens
  CDR3 for beta chain variable domain of TCR clone 239192 (TRBV18, TRBJ2-7)
CASAPASTPNYEQYF

SEQ ID NO: 478385 - protein, 15 aa, Homo sapiens
  CDR3 for alpha chain variable domain of TCR clone 239193 (TRAV38-1, TRAJ28)
CAFIRSGAGSYQLTF

SEQ ID NO: 478386 - protein, 15 aa, Homo sapiens
  CDR3 for beta chain variable domain of TCR clone 239193 (TRBV27, TRBJ2-7)
CASSLGSSVSHEQYF

SEQ ID NO: 478387 - protein, 18 aa, Homo sapiens
  CDR3 for alpha chain variable domain of TCR clone 239194 (TRAV12-3, TRAJ52)
CAMSVGGAGGTSYGKLTF

SEQ ID NO: 478388 - protein, 16 aa, Homo sapiens
  CDR3 for beta chain variable domain of TCR clone 239194 (TRBV11-3, TRBJ2-7)
CASSPTTGGVSYEQYF

SEQ ID NO: 478389 - protein, 15 aa, Homo sapiens
  CDR3 for alpha chain variable domain of TCR clone 239195 (TRAV12-1, TRAJ37)
CVVNIMGGNTGKLIF

SEQ ID NO: 478390 - protein, 14 aa, Homo sapiens
  CDR3 for beta chain variable domain of TCR clone 239195 (TRBV12-4, TRBJ1-1)
CASSLGTGGTEALF

SEQ ID NO: 478391 - protein, 16 aa, Homo sapiens
  CDR3 for alpha chain variable domain of TCR clone 239196 (TRAV3, TRAJ3)
CAVRDREKSSASKIIF

SEQ ID NO: 478392 - protein, 13 aa, Homo sapiens
  CDR3 for beta chain variable domain of TCR clone 239196 (TRBV10-3, TRBJ2-7)
CASKLAVNYEQYF

SEQ ID NO: 478393 - protein, 12 aa, Homo sapiens
  CDR3 for alpha chain variable domain of TCR clone 239197 (TRAV36/DV7, TRAJ40)
CAVGTGTYKYIF

SEQ ID NO: 478394 - protein, 15 aa, Homo sapiens
  CDR3 for beta chain variable domain of TCR clone 239197 (TRBV18, TRBJ1-1)
CASSPRQGENTEAFF

SEQ ID NO: 478395 - protein, 13 aa, Homo sapiens
  CDR3 for alpha chain variable domain of TCR clone 239198 (TRAV38-2/DV8, TRAJ34)
CAYRTWNTDKLIF

SEQ ID NO: 478396 - protein, 12 aa, Homo sapiens
  CDR3 for beta chain variable domain of TCR clone 239198 (TRBV19, TRBJ2-1)
CASSRQGAEQFF

SEQ ID NO: 478397 - protein, 19 aa, Homo sapiens
  CDR3 for alpha chain variable domain of TCR clone 239199 (TRAV26-1, TRAJ52)
CIVRAHRNAGGISDGKLTF

SEQ ID NO: 478398 - protein, 15 aa, Homo sapiens
  CDR3 for beta chain variable domain of TCR clone 239199 (TRBV29-1, TRBJ2-1)
CSGRDRKSSYNEQFF

SEQ ID NO: 478399 - protein, 11 aa, Homo sapiens
  CDR3 for alpha chain variable domain of TCR clone 239200 (TRAV1-1, TRAJ23)
CAVRQGGKLIF

SEQ ID NO: 478400 - protein, 16 aa, Homo sapiens
  CDR3 for beta chain variable domain of TCR clone 239200 (TRBV15, TRBJ1-2)
CATSRGPRTGGGGYTF

SEQ ID NO: 478401 - protein, 15 aa, Homo sapiens
  CDR3 for alpha chain variable domain of TCR clone 239201 (TRAV3, TRAJ29)
CAVRDLYSGNTPLLF

SEQ ID NO: 478402 - protein, 17 aa, Homo sapiens
  CDR3 for beta chain variable domain of TCR clone 239201 (TRBV20-1, TRBJ2-1)
CSARDPLAGVWDNEQFF

SEQ ID NO: 478403 - protein, 13 aa, Homo sapiens
  CDR3 for alpha chain variable domain of TCR clone 239202 (TRAV2, TRAJ15)
CAVASQAGTALIF

SEQ ID NO: 478404 - protein, 15 aa, Homo sapiens
  CDR3 for beta chain variable domain of TCR clone 239202 (TRBV11-2, TRBJ2-1)
CASSSPSTRYNEQFF

SEQ ID NO: 478405 - protein, 10 aa, Homo sapiens
  CDR3 for alpha chain variable domain of TCR clone 239203 (TRAV12-3, TRAJ49)
CAMNDDQFYF

SEQ ID NO: 478406 - protein, 13 aa, Homo sapiens
  CDR3 for beta chain variable domain of TCR clone 239203 (TRBV12-4, TRBJ1-1)
CASSPGTGFEAFY

SEQ ID NO: 478407 - protein, 14 aa, Homo sapiens
  CDR3 for alpha chain variable domain of TCR clone 239204 (TRAV26-1, TRAJ38)
CIADNAVNNRKLIW

SEQ ID NO: 478408 - protein, 13 aa, Homo sapiens
  CDR3 for beta chain variable domain of TCR clone 239204 (TRBV4-1, TRBJ2-7)
CASSQGQAYEQYF

SEQ ID NO: 478409 - protein, 12 aa, Homo sapiens
  CDR3 for alpha chain variable domain of TCR clone 239205 (TRAV12-1, TRAJ31)
CVVSLLRARLMF

SEQ ID NO: 478410 - protein, 13 aa, Homo sapiens
  CDR3 for beta chain variable domain of TCR clone 239205 (TRBV7-9, TRBJ1-2)
CASSLKQNYGYTF

SEQ ID NO: 478411 - protein, 15 aa, Homo sapiens
  CDR3 for alpha chain variable domain of TCR clone 239206 (TRAV17, TRAJ57)
CATGPSQGGSEKLVF

SEQ ID NO: 478412 - protein, 15 aa, Homo sapiens
  CDR3 for beta chain variable domain of TCR clone 239206 (TRBV7-2, TRBJ2-1)
CASSLASGRVNEQFF

SEQ ID NO: 478413 - protein, 11 aa, Homo sapiens
  CDR3 for alpha chain variable domain of TCR clone 239207 (TRAV12-2, TRAJ33)
CALGSNYQLIW

SEQ ID NO: 478414 - protein, 14 aa, Homo sapiens
  CDR3 for beta chain variable domain of TCR clone 239207 (TRBV6-1, TRBJ2-2)
CASVEHIESGELFF

SEQ ID NO: 478415 - protein, 16 aa, Homo sapiens
  CDR3 for alpha chain variable domain of TCR clone 239208 (TRAV3, TRAJ37)
CSVRGKGSGNTGKLIF

SEQ ID NO: 478416 - protein, 13 aa, Homo sapiens
  CDR3 for beta chain variable domain of TCR clone 239208 (TRBV4-2, TRBJ1-1)
CASSQAGNTEAFF

SEQ ID NO: 478417 - protein, 17 aa, Homo sapiens
  CDR3 for alpha chain variable domain of TCR clone 239209 (TRAV3, TRAJ42)
CAVRDRDYGGSQGNLIF

SEQ ID NO: 478418 - protein, 13 aa, Homo sapiens
  CDR3 for beta chain variable domain of TCR clone 239209 (TRBV7-3, TRBJ2-1)
CDSSPVAYNEQFF

SEQ ID NO: 478419 - protein, 13 aa, Homo sapiens
  CDR3 for alpha chain variable domain of TCR clone 239210 (TRAV12-2, TRAJ37)
CAGGSGNTGKLIF

SEQ ID NO: 478420 - protein, 14 aa, Homo sapiens
  CDR3 for beta chain variable domain of TCR clone 239210 (TRBV6-1, TRBJ2-6)
CASQQGAGANDLSF

SEQ ID NO: 478421 - protein, 12 aa, Homo sapiens
  CDR3 for alpha chain variable domain of TCR clone 239211 (TRAV2, TRAJ36)
CAELTGANNIFF

SEQ ID NO: 478422 - protein, 14 aa, Homo sapiens
  CDR3 for beta chain variable domain of TCR clone 239211 (TRBV18, TRBJ2-7)
CASSPRGGAYEQYF

SEQ ID NO: 478423 - protein, 12 aa, Homo sapiens
  CDR3 for alpha chain variable domain of TCR clone 239212 (TRAV30, TRAJ43)
CGKEERGNDMRF

SEQ ID NO: 478424 - protein, 13 aa, Homo sapiens
  CDR3 for beta chain variable domain of TCR clone 239212 (TRBV27, TRBJ2-7)
CASSFSQGYEQYF

SEQ ID NO: 478425 - protein, 16 aa, Homo sapiens
  CDR3 for alpha chain variable domain of TCR clone 239213 (TRAV30, TRAJ24)
CGTEIVDADSWGKFQF

SEQ ID NO: 478426 - protein, 13 aa, Homo sapiens
  CDR3 for beta chain variable domain of TCR clone 239213 (TRBV2, TRBJ1-6)
CADSGAYNSPLHF

SEQ ID NO: 478427 - protein, 12 aa, Homo sapiens
  CDR3 for alpha chain variable domain of TCR clone 239214 (TRAV12-3, TRAJ3)
CAIDSSASKIIF

SEQ ID NO: 478428 - protein, 17 aa, Homo sapiens
  CDR3 for beta chain variable domain of TCR clone 239214 (TRBV7-9, TRBJ2-3)
CASSLEEAGAYPNTQYF

SEQ ID NO: 478429 - protein, 14 aa, Homo sapiens
  CDR3 for alpha chain variable domain of TCR clone 239215 (TRAV1-2, TRAJ15)
CAVRDRQAGTALIF

SEQ ID NO: 478430 - protein, 14 aa, Homo sapiens
  CDR3 for beta chain variable domain of TCR clone 239215 (TRBV7-6, TRBJ2-1)
CASSLGGGADEQFF

SEQ ID NO: 478431 - protein, 12 aa, Homo sapiens
  CDR3 for alpha chain variable domain of TCR clone 239216 (TRAV12-1, TRAJ6)
CVVSERSYIPTF

SEQ ID NO: 478432 - protein, 21 aa, Homo sapiens
  CDR3 for beta chain variable domain of TCR clone 239216 (TRBV7-3, TRBJ2-1)
CASSLGPSGSPVLRARDTAHR

SEQ ID NO: 478433 - protein, 13 aa, Homo sapiens
  CDR3 for alpha chain variable domain of TCR clone 239217 (TRAV35, TRAJ43)
CAGYPYNNYEMRF

SEQ ID NO: 478434 - protein, 15 aa, Homo sapiens
  CDR3 for beta chain variable domain of TCR clone 239217 (TRBV25-1, TRBJ1-4)
CASSKRIATNEKLFF

SEQ ID NO: 478435 - protein, 11 aa, Homo sapiens
  CDR3 for alpha chain variable domain of TCR clone 239218 (TRAV2, TRAJ20)
CAVPNDYKLSF

SEQ ID NO: 478436 - protein, 20 aa, Homo sapiens
  CDR3 for beta chain variable domain of TCR clone 239218 (TRBV19, TRBJ2-7)
CASTQVAPESLRAVLRAGHQ

SEQ ID NO: 478437 - protein, 16 aa, Homo sapiens
  CDR3 for alpha chain variable domain of TCR clone 239219 (TRAV3, TRAJ37)
CAVRGKGSGNPGKLIF

SEQ ID NO: 478438 - protein, 15 aa, Homo sapiens
  CDR3 for beta chain variable domain of TCR clone 239219 (TRBV6-6, TRBJ2-7)
CASSYSYGGSYEQYF

SEQ ID NO: 478439 - protein, 16 aa, Homo sapiens
  CDR3 for alpha chain variable domain of TCR clone 239220 (TRAV12-1, TRAJ45)
CVVIRYSGGRADGLTF

SEQ ID NO: 478440 - protein, 12 aa, Homo sapiens
  CDR3 for beta chain variable domain of TCR clone 239220 (TRBV6-5, TRBJ2-2)
CASRQITGELFF

SEQ ID NO: 478441 - protein, 16 aa, Homo sapiens
  CDR3 for alpha chain variable domain of TCR clone 239221 (TRAV12-3, TRAJ20)
CAMDKLSFGAGTTVTV

SEQ ID NO: 478442 - protein, 12 aa, Homo sapiens
  CDR3 for beta chain variable domain of TCR clone 239221 (TRBV19, TRBJ2-7)
CASTDRDYEQYF

SEQ ID NO: 478443 - protein, 14 aa, Homo sapiens
  CDR3 for alpha chain variable domain of TCR clone 239222 (TRAV8-3, TRAJ6)
CAVGASGGSYIPTF

SEQ ID NO: 478444 - protein, 17 aa, Homo sapiens
  CDR3 for beta chain variable domain of TCR clone 239222 (TRBV18, TRBJ2-2)
CASSPSDPWQNTGELIF

SEQ ID NO: 478445 - protein, 14 aa, Homo sapiens
  CDR3 for alpha chain variable domain of TCR clone 239223 (TRAV2, TRAJ9)
CAVEDRSGGFKTFF

SEQ ID NO: 478446 - protein, 14 aa, Homo sapiens
  CDR3 for beta chain variable domain of TCR clone 239223 (TRBV7-9, TRBJ2-7)
CASSPSGGQNEQYF

SEQ ID NO: 478447 - protein, 15 aa, Homo sapiens
  CDR3 for alpha chain variable domain of TCR clone 239224 (TRAV12-3, TRAJ42)
CAMSGHGGSQGKLIF

SEQ ID NO: 478448 - protein, 13 aa, Homo sapiens
  CDR3 for beta chain variable domain of TCR clone 239224 (TRBV19, TRBJ2-5)
CASSGRAGETQYF

SEQ ID NO: 478449 - protein, 15 aa, Homo sapiens
  CDR3 for alpha chain variable domain of TCR clone 239225 (TRAV27, TRAJ24)
CAGSMTTDSWGNWQF

SEQ ID NO: 478450 - protein, 15 aa, Homo sapiens
  CDR3 for beta chain variable domain of TCR clone 239225 (TRBV6-6, TRBJ1-5)
CASSSPRGQGQPQHF

SEQ ID NO: 478451 - protein, 14 aa, Homo sapiens
  CDR3 for alpha chain variable domain of TCR clone 239226 (TRAV12-3, TRAJ13)
CATLDAGGYQTVTF

SEQ ID NO: 478452 - protein, 13 aa, Homo sapiens
  CDR3 for beta chain variable domain of TCR clone 239226 (TRBV2, TRBJ2-7)
CASRINTGWEQYF

SEQ ID NO: 478453 - protein, 13 aa, Homo sapiens
  CDR3 for alpha chain variable domain of TCR clone 239227 (TRAV12-1, TRAJ16)
CVVNGPDGQKLLF

SEQ ID NO: 478454 - protein, 10 aa, Homo sapiens
  CDR3 for beta chain variable domain of TCR clone 239227 (TRBV20-1, TRBJ2-5)
CSARFETQYF

SEQ ID NO: 478455 - protein, 15 aa, Homo sapiens
  CDR3 for alpha chain variable domain of TCR clone 239228 (TRAV13-1, TRAJ5)
CAASKADTGRRALTF

SEQ ID NO: 478456 - protein, 14 aa, Homo sapiens
  CDR3 for beta chain variable domain of TCR clone 239228 (TRBV18, TRBJ2-7)
CASSPRGGAYEQYF

SEQ ID NO: 478457 - protein, 14 aa, Homo sapiens
  CDR3 for alpha chain variable domain of TCR clone 239229 (TRAV1-1, TRAJ27)
CAVIYKTNAGKSTF

SEQ ID NO: 478458 - protein, 15 aa, Homo sapiens
  CDR3 for beta chain variable domain of TCR clone 239229 (TRBV7-2, TRBJ2-1)
CASSSGLAGGNEQFV

SEQ ID NO: 478459 - protein, 13 aa, Homo sapiens
  CDR3 for alpha chain variable domain of TCR clone 239230 (TRAV29/DV5, TRAJ31)
CAASRNNNARLMF

SEQ ID NO: 478460 - protein, 15 aa, Homo sapiens
  CDR3 for beta chain variable domain of TCR clone 239230 (TRBV7-3, TRBJ2-7)
CASSPSTGPNYEQYF

SEQ ID NO: 478461 - protein, 18 aa, Homo sapiens
  CDR3 for alpha chain variable domain of TCR clone 239231 (TRAV26-1, TRAJ23)
CIVRVGLEVWNQGGKLIF

SEQ ID NO: 478462 - protein, 15 aa, Homo sapiens
  CDR3 for beta chain variable domain of TCR clone 239231 (TRBV10-3, TRBJ2-3)
CAIGDWDRDTDTQYF

SEQ ID NO: 478463 - protein, 14 aa, Homo sapiens
  CDR3 for alpha chain variable domain of TCR clone 239232 (TRAV2, TRAJ37)
CAVDFTSNTGKLIF

SEQ ID NO: 478464 - protein, 17 aa, Homo sapiens
  CDR3 for beta chain variable domain of TCR clone 239232 (TRBV11-2, TRBJ2-1)
CASSLYPPGVEYNEQFL

SEQ ID NO: 478465 - protein, 14 aa, Homo sapiens
  CDR3 for alpha chain variable domain of TCR clone 239233 (TRAV1-2, TRAJ8)
CAVREDTGFQKLVF

SEQ ID NO: 478466 - protein, 17 aa, Homo sapiens
  CDR3 for beta chain variable domain of TCR clone 239233 (TRBV10-3, TRBJ2-6)
CAISESTAPPGANVLTF

SEQ ID NO: 478467 - protein, 13 aa, Homo sapiens
  CDR3 for alpha chain variable domain of TCR clone 239234 (TRAV36/DV7, TRAJ34)
CAVGEVNTDKLIF

SEQ ID NO: 478468 - protein, 16 aa, Homo sapiens
  CDR3 for beta chain variable domain of TCR clone 239234 (TRBV19, TRBJ2-1)
CASSIDGSFAYNEQFF

SEQ ID NO: 478469 - protein, 14 aa, Homo sapiens
  CDR3 for alpha chain variable domain of TCR clone 239235 (TRAV1-2, TRAJ16)
CAVNRFSDGQNLLF

SEQ ID NO: 478470 - protein, 15 aa, Homo sapiens
  CDR3 for beta chain variable domain of TCR clone 239235 (TRBV7-9, TRBJ1-6)
CASSSPGRGNSPLHL

SEQ ID NO: 478471 - protein, 17 aa, Homo sapiens
  CDR3 for alpha chain variable domain of TCR clone 239236 (TRAV17, TRAJ28)
CATEPRRGGAGSYQLTF

SEQ ID NO: 478472 - protein, 16 aa, Homo sapiens
  CDR3 for beta chain variable domain of TCR clone 239236 (TRBV25-1, TRBJ1-1)
CASSGDRDRGRIEAFF

SEQ ID NO: 478473 - protein, 18 aa, Homo sapiens
  CDR3 for alpha chain variable domain of TCR clone 239237 (TRAV21, TRAJ52)
CAVRPSPAGGTSYGKMTF

SEQ ID NO: 478474 - protein, 15 aa, Homo sapiens
  CDR3 for beta chain variable domain of TCR clone 239237 (TRBV20-1, TRBJ2-7)
CSARKGLAESYEQYF

SEQ ID NO: 478475 - protein, 13 aa, Homo sapiens
  CDR3 for alpha chain variable domain of TCR clone 239238 (TRAV12-2, TRAJ4)
CAGFSVGSNKLIF

SEQ ID NO: 478476 - protein, 14 aa, Homo sapiens
  CDR3 for beta chain variable domain of TCR clone 239238 (TRBV24-1, TRBJ1-1)
CATSIPRGDTEAFF

SEQ ID NO: 478477 - protein, 14 aa, Homo sapiens
  CDR3 for alpha chain variable domain of TCR clone 239239 (TRAV27, TRAJ45)
CAGAQEEVPTDSPL

SEQ ID NO: 478478 - protein, 17 aa, Homo sapiens
  CDR3 for beta chain variable domain of TCR clone 239239 (TRBV11-2, TRBJ2-1)
CASSLYPPGVEYNEQFF

SEQ ID NO: 478479 - protein, 10 aa, Homo sapiens
  CDR3 for alpha chain variable domain of TCR clone 239240 (TRAV5, TRAJ34)
CAQDTDKLIF

SEQ ID NO: 478480 - protein, 12 aa, Homo sapiens
  CDR3 for beta chain variable domain of TCR clone 239240 (TRBV11-2, TRBJ2-2)
CASSLGGGELFF

SEQ ID NO: 478481 - protein, 14 aa, Homo sapiens
  CDR3 for alpha chain variable domain of TCR clone 239241 (TRAV12-2, TRAJ13)
CAVKKTGGYQKVTF

SEQ ID NO: 478482 - protein, 15 aa, Homo sapiens
  CDR3 for beta chain variable domain of TCR clone 239241 (TRBV10-3, TRBJ2-1)
SISGVGDGGGGEQFF

SEQ ID NO: 478483 - protein, 14 aa, Homo sapiens
  CDR3 for alpha chain variable domain of TCR clone 239242 (TRAV1-2, TRAJ16)
CADNRFSDGQKLLF

SEQ ID NO: 478484 - protein, 13 aa, Homo sapiens
  CDR3 for beta chain variable domain of TCR clone 239242 (TRBV20-1, TRBJ1-1)
CSARLGQGTEAFF

SEQ ID NO: 478485 - protein, 15 aa, Homo sapiens
  CDR3 for alpha chain variable domain of TCR clone 239243 (TRAV20, TRAJ34)
CAVPSYNPTSSSLGL

SEQ ID NO: 478486 - protein, 15 aa, Homo sapiens
  CDR3 for beta chain variable domain of TCR clone 239243 (TRBV20-1, TRBJ1-2)
CSAAGEGARIYGYTF

SEQ ID NO: 478487 - protein, 16 aa, Homo sapiens
  CDR3 for alpha chain variable domain of TCR clone 239244 (TRAV8-3, TRAJ8)
CAVPRDGNTGFQKLVF

SEQ ID NO: 478488 - protein, 13 aa, Homo sapiens
  CDR3 for beta chain variable domain of TCR clone 239244 (TRBV7-9, TRBJ1-2)
CASSLKQNYGYTF

SEQ ID NO: 478489 - protein, 17 aa, Homo sapiens
  CDR3 for alpha chain variable domain of TCR clone 239245 (TRAV27, TRAJ42)
CAERVIYYGGSQGNLIF

SEQ ID NO: 478490 - protein, 13 aa, Homo sapiens
  CDR3 for beta chain variable domain of TCR clone 239245 (TRBV20-1, TRBJ2-2)
CSALSGGAGELFF

SEQ ID NO: 478491 - protein, 14 aa, Homo sapiens
  CDR3 for alpha chain variable domain of TCR clone 239246 (TRAV1-2, TRAJ16)
CAVNRFSDGQKLLF

SEQ ID NO: 478492 - protein, 14 aa, Homo sapiens
  CDR3 for beta chain variable domain of TCR clone 239246 (TRBV7-9, TRBJ2-1)
CASSHGQAEAEQFF

SEQ ID NO: 478493 - protein, 18 aa, Homo sapiens
  CDR3 for alpha chain variable domain of TCR clone 239247 (TRAV13-1, TRAJ52)
CAAKNPNAFGTSYGKLTF

SEQ ID NO: 478494 - protein, 15 aa, Homo sapiens
  CDR3 for beta chain variable domain of TCR clone 239247 (TRBV6-1, TRBJ2-3)
CASSERGGITDTQYF

SEQ ID NO: 478495 - protein, 15 aa, Homo sapiens
  CDR3 for alpha chain variable domain of TCR clone 239248 (TRAV8-3, TRAJ45)
CASSYSGGGAAGVTF

SEQ ID NO: 478496 - protein, 13 aa, Homo sapiens
  CDR3 for beta chain variable domain of TCR clone 239248 (TRBV10-3, TRBJ2-7)
CASKLAVNYEQYF

SEQ ID NO: 478497 - protein, 15 aa, Homo sapiens
  CDR3 for alpha chain variable domain of TCR clone 239249 (TRAV26-1, TRAJ22)
CIVRVSFWFCKATDL

SEQ ID NO: 478498 - protein, 14 aa, Homo sapiens
  CDR3 for beta chain variable domain of TCR clone 239249 (TRBV18, TRBJ2-7)
CASSPRGGAYEHYF

SEQ ID NO: 478499 - protein, 14 aa, Homo sapiens
  CDR3 for alpha chain variable domain of TCR clone 239250 (TRAV12-1, TRAJ40)
CVVYSGTYKYILEQ

SEQ ID NO: 478500 - protein, 15 aa, Homo sapiens
  CDR3 for beta chain variable domain of TCR clone 239250 (TRBV7-9, TRBJ1-6)
CASSSPGRGNSPLHF

SEQ ID NO: 478501 - protein, 14 aa, Homo sapiens
  CDR3 for alpha chain variable domain of TCR clone 239251 (TRAV13-2, TRAJ17)
CAENSKAAGNKLTF

SEQ ID NO: 478502 - protein, 18 aa, Homo sapiens
  CDR3 for beta chain variable domain of TCR clone 239251 (TRBV10-2, TRBJ2-2)
CISAPAVHRQADAGELFF

SEQ ID NO: 478503 - protein, 12 aa, Homo sapiens
  CDR3 for alpha chain variable domain of TCR clone 239252 (TRAV26-1, TRAJ43)
CIVRPRGDDMRL

SEQ ID NO: 478504 - protein, 16 aa, Homo sapiens
  CDR3 for beta chain variable domain of TCR clone 239252 (TRBV3-1, TRBJ2-1)
CASSQGGRRSFDEQFF

SEQ ID NO: 478505 - protein, 17 aa, Homo sapiens
  CDR3 for alpha chain variable domain of TCR clone 239253 (TRAV8-6, TRAJ58)
CAVSSWVGETSGSRLTF

SEQ ID NO: 478506 - protein, 14 aa, Homo sapiens
  CDR3 for beta chain variable domain of TCR clone 239253 (TRBV4-2, TRBJ2-1)
CASGLDRAYDEQFL

SEQ ID NO: 478507 - protein, 17 aa, Homo sapiens
  CDR3 for alpha chain variable domain of TCR clone 239254 (TRAV3, TRAJ6)
CAVRDGPRAGGSYRPTF

SEQ ID NO: 478508 - protein, 20 aa, Homo sapiens
  CDR3 for beta chain variable domain of TCR clone 239254 (TRBV28, TRBJ2-1)
CASTPIGRSPGLAGGNEQFL

SEQ ID NO: 478509 - protein, 14 aa, Homo sapiens
  CDR3 for alpha chain variable domain of TCR clone 239255 (TRAV13-2, TRAJ17)
CAENSKAAGKKLTF

SEQ ID NO: 478510 - protein, 11 aa, Homo sapiens
  CDR3 for beta chain variable domain of TCR clone 239255 (TRBV6-3, TRBJ2-3)
CATGQADTQYF

SEQ ID NO: 478511 - protein, 16 aa, Homo sapiens
  CDR3 for alpha chain variable domain of TCR clone 239256 (TRAV30, TRAJ24)
CCTEIVDADSWGKFQF

SEQ ID NO: 478512 - protein, 14 aa, Homo sapiens
  CDR3 for beta chain variable domain of TCR clone 239256 (TRBV19, TRBJ2-1)
CASPTFVLSGEQFF

SEQ ID NO: 478513 - protein, 18 aa, Homo sapiens
  CDR3 for alpha chain variable domain of TCR clone 239257 (TRAV21, TRAJ52)
CAVRPSPAGGTSYGKLPF

SEQ ID NO: 478514 - protein, 13 aa, Homo sapiens
  CDR3 for beta chain variable domain of TCR clone 239257 (TRBV7-3, TRBJ1-1)
CASSQDWGAGAFF

SEQ ID NO: 478515 - protein, 14 aa, Homo sapiens
  CDR3 for alpha chain variable domain of TCR clone 239258 (TRAV10, TRAJ36)
CVVKYEGGANNLCF

SEQ ID NO: 478516 - protein, 16 aa, Homo sapiens
  CDR3 for beta chain variable domain of TCR clone 239258 (TRBV7-3, TRBJ2-2)
CASSLKRGTLSGELFF

SEQ ID NO: 478517 - protein, 14 aa, Homo sapiens
  CDR3 for alpha chain variable domain of TCR clone 239259 (TRAV26-1, TRAJ39)
CIVRGSRAGNMLTF

SEQ ID NO: 478518 - protein, 14 aa, Homo sapiens
  CDR3 for beta chain variable domain of TCR clone 239259 (TRBV11-2, TRBJ2-5)
CASSRTGGIETQYF

SEQ ID NO: 478519 - protein, 16 aa, Homo sapiens
  CDR3 for alpha chain variable domain of TCR clone 239260 (TRAV12-2, TRAJ13)
CAVKKTGGYQKVTLEL

SEQ ID NO: 478520 - protein, 15 aa, Homo sapiens
  CDR3 for beta chain variable domain of TCR clone 239260 (TRBV7-3, TRBJ2-1)
CASSPTGGGEVEQFF

SEQ ID NO: 478521 - protein, 13 aa, Homo sapiens
  CDR3 for alpha chain variable domain of TCR clone 239261 (TRAV23/DV6, TRAJ17)
CAAAKAAGNKLPF

SEQ ID NO: 478522 - protein, 13 aa, Homo sapiens
  CDR3 for beta chain variable domain of TCR clone 239261 (TRBV5-1, TRBJ2-2)
QRSDRGPDRELFF

SEQ ID NO: 478523 - protein, 13 aa, Homo sapiens
  CDR3 for alpha chain variable domain of TCR clone 239262 (TRAV12-3, TRAJ13)
CAMTSGGYQKVTF

SEQ ID NO: 478524 - protein, 17 aa, Homo sapiens
  CDR3 for beta chain variable domain of TCR clone 239262 (TRBV28, TRBJ2-5)
CASSTPEGDALQEAQYF

SEQ ID NO: 478525 - protein, 13 aa, Homo sapiens
  CDR3 for alpha chain variable domain of TCR clone 239263 (TRAV13-1, TRAJ49)
CAAMLYTGNQFYF

SEQ ID NO: 478526 - protein, 14 aa, Homo sapiens
  CDR3 for beta chain variable domain of TCR clone 239263 (TRBV6-5, TRBJ1-2)
CASSYDGTGGGYTF

SEQ ID NO: 478527 - protein, 13 aa, Homo sapiens
  CDR3 for alpha chain variable domain of TCR clone 239264 (TRAV12-2, TRAJ10)
CAVPTRGGNKLTF

SEQ ID NO: 478528 - protein, 14 aa, Homo sapiens
  CDR3 for beta chain variable domain of TCR clone 239264 (TRBV14, TRBJ2-1)
CASSQVQGRGEQFF

SEQ ID NO: 478529 - protein, 19 aa, Homo sapiens
  CDR3 for alpha chain variable domain of TCR clone 239265 (TRAV3, TRAJ37)
CAVRDIVGGYPSNTCKLIF

SEQ ID NO: 478530 - protein, 14 aa, Homo sapiens
  CDR3 for beta chain variable domain of TCR clone 239265 (TRBV7-8, TRBJ2-3)
CASSLEAGTDTQYF

SEQ ID NO: 478531 - protein, 14 aa, Homo sapiens
  CDR3 for alpha chain variable domain of TCR clone 239266 (TRAV26-2, TRAJ31)
CILIPGNNNARLMF

SEQ ID NO: 478532 - protein, 16 aa, Homo sapiens
  CDR3 for beta chain variable domain of TCR clone 239266 (TRBV12-5, TRBJ2-5)
CASGPRTSGNQETQYF

SEQ ID NO: 478533 - protein, 14 aa, Homo sapiens
  CDR3 for alpha chain variable domain of TCR clone 239267 (TRAV20, TRAJ57)
CAVQGQGGSEKLVF

SEQ ID NO: 478534 - protein, 15 aa, Homo sapiens
  CDR3 for beta chain variable domain of TCR clone 239267 (TRBV12-4, TRBJ2-1)
CASSLLATGNNEQFF

SEQ ID NO: 478535 - protein, 17 aa, Homo sapiens
  CDR3 for alpha chain variable domain of TCR clone 239268 (TRAV4, )
CLVDIQNPDPAVYHLRD

SEQ ID NO: 478536 - protein, 15 aa, Homo sapiens
  CDR3 for beta chain variable domain of TCR clone 239268 (TRBV20-1, TRBJ1-5)
CSASRRGDLGQPQHF

SEQ ID NO: 478537 - protein, 18 aa, Homo sapiens
  CDR3 for alpha chain variable domain of TCR clone 239269 (TRAV1-2, TRAJ10)
CAVRALTPVTGGGNKLTF

SEQ ID NO: 478538 - protein, 14 aa, Homo sapiens
  CDR3 for beta chain variable domain of TCR clone 239269 (TRBV4-1, TRBJ1-1)
CASSQQGNGHEAFF

SEQ ID NO: 478539 - protein, 16 aa, Homo sapiens
  CDR3 for alpha chain variable domain of TCR clone 239270 (TRAV3, TRAJ10)
CAVRDMRAGGGNKLTF

SEQ ID NO: 478540 - protein, 13 aa, Homo sapiens
  CDR3 for beta chain variable domain of TCR clone 239270 (TRBV20-1, TRBJ2-2)
CSASAAGTGELFF

SEQ ID NO: 478541 - protein, 14 aa, Homo sapiens
  CDR3 for alpha chain variable domain of TCR clone 239271 (TRAV17, TRAJ11)
CATDARSGYSTLTF

SEQ ID NO: 478542 - protein, 15 aa, Homo sapiens
  CDR3 for beta chain variable domain of TCR clone 239271 (TRBV11-3, TRBJ2-3)
CASLKDGREGDTQYF

SEQ ID NO: 478543 - protein, 11 aa, Homo sapiens
  CDR3 for alpha chain variable domain of TCR clone 239272 (TRAV1-1, TRAJ23)
CAVRQGGNLIF

SEQ ID NO: 478544 - protein, 13 aa, Homo sapiens
  CDR3 for beta chain variable domain of TCR clone 239272 (TRBV11-2, TRBJ2-5)
CASSRGPSETQYF

SEQ ID NO: 478545 - protein, 16 aa, Homo sapiens
  CDR3 for alpha chain variable domain of TCR clone 239273 (TRAV30, TRAJ24)
CGTEIVDADSWGKFQF

SEQ ID NO: 478546 - protein, 10 aa, Homo sapiens
  CDR3 for beta chain variable domain of TCR clone 239273 (TRBV28, TRBJ1-2)
CASSSDRAVF

SEQ ID NO: 478547 - protein, 12 aa, Homo sapiens
  CDR3 for alpha chain variable domain of TCR clone 239274 (TRAV13-1, TRAJ21)
CAAKEGFNKFYF

SEQ ID NO: 478548 - protein, 17 aa, Homo sapiens
  CDR3 for beta chain variable domain of TCR clone 239274 (TRBV19, TRBJ2-5)
CASSIAAWGTGSGTQYF

SEQ ID NO: 478549 - protein, 12 aa, Homo sapiens
  CDR3 for alpha chain variable domain of TCR clone 239275 (TRAV1-1, TRAJ39)
CAVPVVGNMLTF

SEQ ID NO: 478550 - protein, 17 aa, Homo sapiens
  CDR3 for beta chain variable domain of TCR clone 239275 (TRBV28, TRBJ2-5)
CASSTPEGDALQETKYF

SEQ ID NO: 478551 - protein, 12 aa, Homo sapiens
  CDR3 for alpha chain variable domain of TCR clone 239276 (TRAV3, TRAJ31)
FAVRPRGPRLMF

SEQ ID NO: 478552 - protein, 17 aa, Homo sapiens
  CDR3 for beta chain variable domain of TCR clone 239276 (TRBV7-9, TRBJ1-5)
CASSASQGGYSNQPQHF

SEQ ID NO: 478553 - protein, 10 aa, Homo sapiens
  CDR3 for alpha chain variable domain of TCR clone 239277 (TRAV1-2, TRAJ23)
CAGQGGKLIF

SEQ ID NO: 478554 - protein, 13 aa, Homo sapiens
  CDR3 for beta chain variable domain of TCR clone 239277 (TRBV12-4, TRBJ1-2)
CASSSGLTVISTF

SEQ ID NO: 478555 - protein, 15 aa, Homo sapiens
  CDR3 for alpha chain variable domain of TCR clone 239278 (TRAV16, TRAJ20)
CALKGGLRADYKLSC

SEQ ID NO: 478556 - protein, 16 aa, Homo sapiens
  CDR3 for beta chain variable domain of TCR clone 239278 (TRBV11-3, TRBJ2-2)
CASSSRTSPGTGELFF

SEQ ID NO: 478557 - protein, 17 aa, Homo sapiens
  CDR3 for alpha chain variable domain of TCR clone 239279 (TRAV12-3, TRAJ18)
CALIRADRGSTLGRLYF

SEQ ID NO: 478558 - protein, 14 aa, Homo sapiens
  CDR3 for beta chain variable domain of TCR clone 239279 (TRBV5-7, TRBJ1-6)
CASTPWPADSPLHF

SEQ ID NO: 478559 - protein, 14 aa, Homo sapiens
  CDR3 for alpha chain variable domain of TCR clone 239280 (TRAV1-2, TRAJ8)
CAVREDTGFEKLVF

SEQ ID NO: 478560 - protein, 16 aa, Homo sapiens
  CDR3 for beta chain variable domain of TCR clone 239280 (TRBV20-1, TRBJ2-4)
CSARAILAGQGDIQYF

SEQ ID NO: 478561 - protein, 14 aa, Homo sapiens
  CDR3 for alpha chain variable domain of TCR clone 239281 (TRAV14/DV4, TRAJ58)
CAMIKETSGSRLTF

SEQ ID NO: 478562 - protein, 12 aa, Homo sapiens
  CDR3 for beta chain variable domain of TCR clone 239281 (TRBV12-4, TRBJ2-1)
CASTYVLNEQFF

SEQ ID NO: 478563 - protein, 10 aa, Homo sapiens
  CDR3 for alpha chain variable domain of TCR clone 239282 (TRAV20, TRAJ22)
CAAPARQLTF

SEQ ID NO: 478564 - protein, 14 aa, Homo sapiens
  CDR3 for beta chain variable domain of TCR clone 239282 (TRBV19, TRBJ2-1)
CASRMGSGATEQFF

SEQ ID NO: 478565 - protein, 15 aa, Homo sapiens
  CDR3 for alpha chain variable domain of TCR clone 239283 (TRAV8-4, TRAJ40)
CAVSSITSGTYKYSF

SEQ ID NO: 478566 - protein, 13 aa, Homo sapiens
  CDR3 for beta chain variable domain of TCR clone 239283 (TRBV2, TRBJ2-1)
CATSRGTDNEQFF

SEQ ID NO: 478567 - protein, 14 aa, Homo sapiens
  CDR3 for alpha chain variable domain of TCR clone 239284 (TRAV1-2, TRAJ8)
CAVREDTGFQKLVC

SEQ ID NO: 478568 - protein, 15 aa, Homo sapiens
  CDR3 for beta chain variable domain of TCR clone 239284 (TRBV6-3, TRBJ2-7)
CASSSPGTVFYAQYF

SEQ ID NO: 478569 - protein, 16 aa, Homo sapiens
  CDR3 for alpha chain variable domain of TCR clone 239285 (TRAV30, TRAJ24)
CGTEIVGADSWGKFQF

SEQ ID NO: 478570 - protein, 15 aa, Homo sapiens
  CDR3 for beta chain variable domain of TCR clone 239285 (TRBV11-3, TRBJ2-3)
CASLKDGREGDTQYF

SEQ ID NO: 478571 - protein, 12 aa, Homo sapiens
  CDR3 for alpha chain variable domain of TCR clone 239286 (TRAV38-1, TRAJ20)
CAFIWNDYKLSF

SEQ ID NO: 478572 - protein, 14 aa, Homo sapiens
  CDR3 for beta chain variable domain of TCR clone 239286 (TRBV19, TRBJ2-1)
CASSMGSGATEQFL

SEQ ID NO: 478573 - protein, 14 aa, Homo sapiens
  CDR3 for alpha chain variable domain of TCR clone 239287 (TRAV26-1, TRAJ39)
CIVRGSRAGNMLTF

SEQ ID NO: 478574 - protein, 15 aa, Homo sapiens
  CDR3 for beta chain variable domain of TCR clone 239287 (TRBV28, TRBJ2-5)
CASSPGQGSIETQSF

SEQ ID NO: 478575 - protein, 11 aa, Homo sapiens
  CDR3 for alpha chain variable domain of TCR clone 239288 (TRAV2, TRAJ13)
CASGGCQKVTF

SEQ ID NO: 478576 - protein, 20 aa, Homo sapiens
  CDR3 for beta chain variable domain of TCR clone 239288 (TRBV28, TRBJ2-1)
CASTPIGRSPGLAGGNEQFF

SEQ ID NO: 478577 - protein, 12 aa, Homo sapiens
  CDR3 for alpha chain variable domain of TCR clone 239289 (TRAV12-3, TRAJ29)
CAAREGNTPLVF

SEQ ID NO: 478578 - protein, 17 aa, Homo sapiens
  CDR3 for beta chain variable domain of TCR clone 239289 (TRBV18, TRBJ2-1)
CASSPLAAGAGYNEQFF

SEQ ID NO: 478579 - protein, 13 aa, Homo sapiens
  CDR3 for alpha chain variable domain of TCR clone 239290 (TRAV8-6, TRAJ49)
CAVITNTGNQFYF

SEQ ID NO: 478580 - protein, 15 aa, Homo sapiens
  CDR3 for beta chain variable domain of TCR clone 239290 (TRBV19, TRBJ1-2)
CASGRDGGGGYGYTF

SEQ ID NO: 478581 - protein, 13 aa, Homo sapiens
  CDR3 for alpha chain variable domain of TCR clone 239291 (TRAV2, TRAJ15)
CAVASQAGTALIF

SEQ ID NO: 478582 - protein, 15 aa, Homo sapiens
  CDR3 for beta chain variable domain of TCR clone 239291 (TRBV4-2, TRBJ2-3)
CQQPRRGEGGVKQYF

SEQ ID NO: 478583 - protein, 13 aa, Homo sapiens
  CDR3 for alpha chain variable domain of TCR clone 239292 (TRAV13-1, TRAJ21)
CAASIYHFNKFYF

SEQ ID NO: 478584 - protein, 13 aa, Homo sapiens
  CDR3 for beta chain variable domain of TCR clone 239292 (TRBV12-4, TRBJ1-2)
CASSLRQGKGYTF

SEQ ID NO: 478585 - protein, 13 aa, Homo sapiens
  CDR3 for alpha chain variable domain of TCR clone 239293 (TRAV20, TRAJ31)
CAVQAWNNARLMF

SEQ ID NO: 478586 - protein, 16 aa, Homo sapiens
  CDR3 for beta chain variable domain of TCR clone 239293 (TRBV2, TRBJ2-3)
CASSTSVEGVADTQYF

SEQ ID NO: 478587 - protein, 14 aa, Homo sapiens
  CDR3 for alpha chain variable domain of TCR clone 239294 (TRAV13-1, TRAJ35)
CAASKGGFGTVLHG

SEQ ID NO: 478588 - protein, 13 aa, Homo sapiens
  CDR3 for beta chain variable domain of TCR clone 239294 (TRBV7-3, TRBJ1-1)
CASSQDWGAEAFF

SEQ ID NO: 478589 - protein, 16 aa, Homo sapiens
  CDR3 for alpha chain variable domain of TCR clone 239295 (TRAV3, TRAJ37)
CAVRGRGSGNTGKLIF

SEQ ID NO: 478590 - protein, 16 aa, Homo sapiens
  CDR3 for beta chain variable domain of TCR clone 239295 (TRBV7-2, TRBJ2-5)
CASSPFPTGGEETQYF

SEQ ID NO: 478591 - protein, 13 aa, Homo sapiens
  CDR3 for alpha chain variable domain of TCR clone 239296 (TRAV3, TRAJ33)
CAVRDRSNYQLIW

SEQ ID NO: 478592 - protein, 16 aa, Homo sapiens
  CDR3 for beta chain variable domain of TCR clone 239296 (TRBV4-2, TRBJ2-7)
CASSKDRGTSSYEQYF

SEQ ID NO: 478593 - protein, 17 aa, Homo sapiens
  CDR3 for alpha chain variable domain of TCR clone 239297 (TRAV26-2, TRAJ42)
CILRDVGYGGSQGNLIF

SEQ ID NO: 478594 - protein, 16 aa, Homo sapiens
  CDR3 for beta chain variable domain of TCR clone 239297 (TRBV12-4, TRBJ2-7)
CASSLIGGTGTNEQYF

SEQ ID NO: 478595 - protein, 11 aa, Homo sapiens
  CDR3 for alpha chain variable domain of TCR clone 239298 (TRAV3, TRAJ21)
CAVGNFNKFYF

SEQ ID NO: 478596 - protein, 18 aa, Homo sapiens
  CDR3 for beta chain variable domain of TCR clone 239298 (TRBV6-1, TRBJ1-6)
FASSGSDGRRINNSPLHF

SEQ ID NO: 478597 - protein, 13 aa, Homo sapiens
  CDR3 for alpha chain variable domain of TCR clone 239299 (TRAV1-1, TRAJ33)
CASHMDSNYQLIL

SEQ ID NO: 478598 - protein, 12 aa, Homo sapiens
  CDR3 for beta chain variable domain of TCR clone 239299 (TRBV7-8, TRBJ2-7)
CASSLGDREQYF

SEQ ID NO: 478599 - protein, 14 aa, Homo sapiens
  CDR3 for alpha chain variable domain of TCR clone 239300 (TRAV12-1, TRAJ6)
CVVPTSGGSYIPTF

SEQ ID NO: 478600 - protein, 13 aa, Homo sapiens
  CDR3 for beta chain variable domain of TCR clone 239300 (TRBV7-9, TRBJ1-2)
CASSLKQNYGYTF

SEQ ID NO: 478601 - protein, 15 aa, Homo sapiens
  CDR3 for alpha chain variable domain of TCR clone 239301 (TRAV21, TRAJ53)
CATLNSGGSTYKLTF

SEQ ID NO: 478602 - protein, 16 aa, Homo sapiens
  CDR3 for beta chain variable domain of TCR clone 239301 (TRBV24-1, TRBJ2-3)
CATSGPGTGATDTQYF

SEQ ID NO: 478603 - protein, 14 aa, Homo sapiens
  CDR3 for alpha chain variable domain of TCR clone 239302 (TRAV16, TRAJ33)
CALSAMDSNYKLIW

SEQ ID NO: 478604 - protein, 15 aa, Homo sapiens
  CDR3 for beta chain variable domain of TCR clone 239302 (TRBV9, TRBJ1-6)
CASSVAGTGDSPLHF

SEQ ID NO: 478605 - protein, 14 aa, Homo sapiens
  CDR3 for alpha chain variable domain of TCR clone 239303 (TRAV8-4, TRAJ54)
CAVREVLGAQKRGF

SEQ ID NO: 478606 - protein, 13 aa, Homo sapiens
  CDR3 for beta chain variable domain of TCR clone 239303 (TRBV27, TRBJ2-7)
CASSFVSSYEQYF

SEQ ID NO: 478607 - protein, 14 aa, Homo sapiens
  CDR3 for alpha chain variable domain of TCR clone 239304 (TRAV12-1, TRAJ17)
CLVNYKAAGNKLTF

SEQ ID NO: 478608 - protein, 17 aa, Homo sapiens
  CDR3 for beta chain variable domain of TCR clone 239304 (TRBV20-1, TRBJ2-1)
CSASSSGLAGAYNEQFF

SEQ ID NO: 478609 - protein, 15 aa, Homo sapiens
  CDR3 for alpha chain variable domain of TCR clone 239305 (TRAV3, TRAJ5)
CAVRDRNTGRKALTF

SEQ ID NO: 478610 - protein, 15 aa, Homo sapiens
  CDR3 for beta chain variable domain of TCR clone 239305 (TRBV7-8, TRBJ2-1)
CASSLADSLYNEQFF

SEQ ID NO: 478611 - protein, 10 aa, Homo sapiens
  CDR3 for alpha chain variable domain of TCR clone 239306 (TRAV30, TRAJ48)
CGIGNEKLTF

SEQ ID NO: 478612 - protein, 13 aa, Homo sapiens
  CDR3 for beta chain variable domain of TCR clone 239306 (TRBV29-1, TRBJ2-7)
CSGGPSGGYEQYF

SEQ ID NO: 478613 - protein, 14 aa, Homo sapiens
  CDR3 for alpha chain variable domain of TCR clone 239307 (TRAV1-2, TRAJ8)
CAVREDTVFQKLVF

SEQ ID NO: 478614 - protein, 15 aa, Homo sapiens
  CDR3 for beta chain variable domain of TCR clone 239307 (TRBV11-3, TRBJ2-3)
CASLKDGREGDTQYF

SEQ ID NO: 478615 - protein, 12 aa, Homo sapiens
  CDR3 for alpha chain variable domain of TCR clone 239308 (TRAV12-3, TRAJ17)
CAMTLTGNKLTF

SEQ ID NO: 478616 - protein, 16 aa, Homo sapiens
  CDR3 for beta chain variable domain of TCR clone 239308 (TRBV20-1, TRBJ2-7)
SAVLEIGVSGMDEQYF

SEQ ID NO: 478617 - protein, 12 aa, Homo sapiens
  CDR3 for alpha chain variable domain of TCR clone 239309 (TRAV13-2, TRAJ23)
CAERHRGGKLIF

SEQ ID NO: 478618 - protein, 16 aa, Homo sapiens
  CDR3 for beta chain variable domain of TCR clone 239309 (TRBV19, TRBJ2-1)
CASSKAGPSSYNEQVF

SEQ ID NO: 478619 - protein, 14 aa, Homo sapiens
  CDR3 for alpha chain variable domain of TCR clone 239310 (TRAV4, TRAJ17)
CLVGDMAAGNKLTF

SEQ ID NO: 478620 - protein, 14 aa, Homo sapiens
  CDR3 for beta chain variable domain of TCR clone 239310 (TRBV5-8, TRBJ2-7)
CASKKGPSSYEQYF

SEQ ID NO: 478621 - protein, 12 aa, Homo sapiens
  CDR3 for alpha chain variable domain of TCR clone 239311 (TRAV21, TRAJ15)
CAVNQAGAALIF

SEQ ID NO: 478622 - protein, 13 aa, Homo sapiens
  CDR3 for beta chain variable domain of TCR clone 239311 (TRBV11-2, TRBJ2-5)
CASSSTGEETQYF

SEQ ID NO: 478623 - protein, 14 aa, Homo sapiens
  CDR3 for alpha chain variable domain of TCR clone 239312 (TRAV16, TRAJ4)
CALHFSGGYNKLIF

SEQ ID NO: 478624 - protein, 15 aa, Homo sapiens
  CDR3 for beta chain variable domain of TCR clone 239312 (TRBV7-2, TRBJ2-7)
CATSTRLAGVDEQYF

SEQ ID NO: 478625 - protein, 13 aa, Homo sapiens
  CDR3 for alpha chain variable domain of TCR clone 239313 (TRAV30, TRAJ39)
CGTEKNAGNMLTF

SEQ ID NO: 478626 - protein, 14 aa, Homo sapiens
  CDR3 for beta chain variable domain of TCR clone 239313 (TRBV7-2, TRBJ1-2)
CASSSQGAHYGYTF

SEQ ID NO: 478627 - protein, 14 aa, Homo sapiens
  CDR3 for alpha chain variable domain of TCR clone 239314 (TRAV2, TRAJ22)
CAVEVKRAARQLAF

SEQ ID NO: 478628 - protein, 14 aa, Homo sapiens
  CDR3 for beta chain variable domain of TCR clone 239314 (TRBV19, TRBJ2-2)
CASTPGYSGGELFF

SEQ ID NO: 478629 - protein, 13 aa, Homo sapiens
  CDR3 for alpha chain variable domain of TCR clone 239315 (TRAV12-2, TRAJ42)
CAVKRGSQGNLIF

SEQ ID NO: 478630 - protein, 16 aa, Homo sapiens
  CDR3 for beta chain variable domain of TCR clone 239315 (TRBV9, TRBJ2-2)
CASSAMGKGNAGELFF

SEQ ID NO: 478631 - protein, 11 aa, Homo sapiens
  CDR3 for alpha chain variable domain of TCR clone 239316 (TRAV1-1, TRAJ23)
CAVRQGGKLIF

SEQ ID NO: 478632 - protein, 11 aa, Homo sapiens
  CDR3 for beta chain variable domain of TCR clone 239316 (TRBV6-1, TRBJ2-1)
CASISSNEQFF

SEQ ID NO: 478633 - protein, 13 aa, Homo sapiens
  CDR3 for alpha chain variable domain of TCR clone 239317 (TRAV12-1, TRAJ42)
CVLNDPRQGNLIF

SEQ ID NO: 478634 - protein, 17 aa, Homo sapiens
  CDR3 for beta chain variable domain of TCR clone 239317 (TRBV20-1, TRBJ2-1)
CSAPPRLAGTRYNEQFF

SEQ ID NO: 478635 - protein, 14 aa, Homo sapiens
  CDR3 for alpha chain variable domain of TCR clone 239318 (TRAV3, TRAJ21)
CAVESQANFNKFYF

SEQ ID NO: 478636 - protein, 13 aa, Homo sapiens
  CDR3 for beta chain variable domain of TCR clone 239318 (TRBV5-7, TRBJ2-7)
CASSLGQTYEQYF

SEQ ID NO: 478637 - protein, 13 aa, Homo sapiens
  CDR3 for alpha chain variable domain of TCR clone 239319 (TRAV17, TRAJ5)
CAPMDTGRRALTF

SEQ ID NO: 478638 - protein, 15 aa, Homo sapiens
  CDR3 for beta chain variable domain of TCR clone 239319 (TRBV7-8, TRBJ1-5)
CASSLERRGLEPQHF

SEQ ID NO: 478639 - protein, 13 aa, Homo sapiens
  CDR3 for alpha chain variable domain of TCR clone 239320 (TRAV35, TRAJ57)
CAGSQGGSEKLVF

SEQ ID NO: 478640 - protein, 15 aa, Homo sapiens
  CDR3 for beta chain variable domain of TCR clone 239320 (TRBV20-1, TRBJ2-7)
CSARDRVAGMEEQYF

SEQ ID NO: 478641 - protein, 13 aa, Homo sapiens
  CDR3 for alpha chain variable domain of TCR clone 239321 (TRAV13-1, TRAJ40)
CAAISPGTYNYIF

SEQ ID NO: 478642 - protein, 13 aa, Homo sapiens
  CDR3 for beta chain variable domain of TCR clone 239321 (TRBV10-3, TRBJ2-7)
CGIRAGGPHEQYF

SEQ ID NO: 478643 - protein, 12 aa, Homo sapiens
  CDR3 for alpha chain variable domain of TCR clone 239322 (TRAV21, TRAJ7)
CAVKDGNNRLAF

SEQ ID NO: 478644 - protein, 14 aa, Homo sapiens
  CDR3 for beta chain variable domain of TCR clone 239322 (TRBV5-4, TRBJ1-1)
CASSLDSRRDEAFF

SEQ ID NO: 478645 - protein, 17 aa, Homo sapiens
  CDR3 for alpha chain variable domain of TCR clone 239323 (TRAV3, TRAJ6)
CAVRDGARAGGSYIPTF

SEQ ID NO: 478646 - protein, 13 aa, Homo sapiens
  CDR3 for beta chain variable domain of TCR clone 239323 (TRBV27, TRBJ2-1)
CASRTLGVGEQFF

SEQ ID NO: 478647 - protein, 13 aa, Homo sapiens
  CDR3 for alpha chain variable domain of TCR clone 239324 (TRAV8-4, TRAJ30)
CAVSVNRDDKIIF

SEQ ID NO: 478648 - protein, 17 aa, Homo sapiens
  CDR3 for beta chain variable domain of TCR clone 239324 (TRBV7-3, TRBJ2-3)
CASSLMKRMRGADTQYF

SEQ ID NO: 478649 - protein, 12 aa, Homo sapiens
  CDR3 for alpha chain variable domain of TCR clone 239325 (TRAV13-2, TRAJ23)
CAESHRGGKLIF

SEQ ID NO: 478650 - protein, 16 aa, Homo sapiens
  CDR3 for beta chain variable domain of TCR clone 239325 (TRBV7-2, TRBJ2-6)
CAILSGVSSGANVLTF

SEQ ID NO: 478651 - protein, 14 aa, Homo sapiens
  CDR3 for alpha chain variable domain of TCR clone 239326 (TRAV1-1, TRAJ23)
CAAPIYNQGGKLIF

SEQ ID NO: 478652 - protein, 13 aa, Homo sapiens
  CDR3 for beta chain variable domain of TCR clone 239326 (TRBV7-9, TRBJ1-2)
CASSLKQNYGYTF

SEQ ID NO: 478653 - protein, 11 aa, Homo sapiens
  CDR3 for alpha chain variable domain of TCR clone 239327 (TRAV13-1, TRAJ39)
CASHAGNMITF

SEQ ID NO: 478654 - protein, 15 aa, Homo sapiens
  CDR3 for beta chain variable domain of TCR clone 239327 (TRBV6-3, TRBJ2-7)
CASSSPGTVFYEQYF

SEQ ID NO: 478655 - protein, 13 aa, Homo sapiens
  CDR3 for alpha chain variable domain of TCR clone 239328 (TRAV3, TRAJ27)
CAVRPLGAGNQPL

SEQ ID NO: 478656 - protein, 13 aa, Homo sapiens
  CDR3 for beta chain variable domain of TCR clone 239328 (TRBV7-9, TRBJ2-3)
CASSPGSTDTQYF

SEQ ID NO: 478657 - protein, 18 aa, Homo sapiens
  CDR3 for alpha chain variable domain of TCR clone 239329 (TRAV12-3, TRAJ18)
CAMSAAGDRGSTLGRLYF

SEQ ID NO: 478658 - protein, 17 aa, Homo sapiens
  CDR3 for beta chain variable domain of TCR clone 239329 (TRBV24-1, TRBJ2-1)
CATSDVSTSGTYNEQFF

SEQ ID NO: 478659 - protein, 14 aa, Homo sapiens
  CDR3 for alpha chain variable domain of TCR clone 239330 (TRAV8-3, TRAJ39)
CAVGANNAGNMITF

SEQ ID NO: 478660 - protein, 13 aa, Homo sapiens
  CDR3 for beta chain variable domain of TCR clone 239330 (TRBV3-1, TRBJ2-5)
CASSPVLSETQYF

SEQ ID NO: 478661 - protein, 15 aa, Homo sapiens
  CDR3 for alpha chain variable domain of TCR clone 239331 (TRAV8-3, TRAJ45)
CASSYSGGGADGLTF

SEQ ID NO: 478662 - protein, 17 aa, Homo sapiens
  CDR3 for beta chain variable domain of TCR clone 239331 (TRBV4-3, TRBJ1-5)
CASSQWGDGGPNQPQHF

SEQ ID NO: 478663 - protein, 11 aa, Homo sapiens
  CDR3 for alpha chain variable domain of TCR clone 239332 (TRAV4, TRAJ23)
CLVAPGGKLIF

SEQ ID NO: 478664 - protein, 16 aa, Homo sapiens
  CDR3 for beta chain variable domain of TCR clone 239332 (TRBV7-3, TRBJ2-2)
CASSLKRGTLSGELFF

SEQ ID NO: 478665 - protein, 11 aa, Homo sapiens
  CDR3 for alpha chain variable domain of TCR clone 239333 (TRAV13-2, TRAJ26)
CAEIPGQNFVF

SEQ ID NO: 478666 - protein, 19 aa, Homo sapiens
  CDR3 for beta chain variable domain of TCR clone 239333 (TRBV19, TRBJ2-2)
CASTSPGLAGGRVTGELFF

SEQ ID NO: 478667 - protein, 20 aa, Homo sapiens
  CDR3 for alpha chain variable domain of TCR clone 239334 (TRAV4, TRAJ29)
CCVLLPRGCVPFSGNTPLVF

SEQ ID NO: 478668 - protein, 16 aa, Homo sapiens
  CDR3 for beta chain variable domain of TCR clone 239334 (TRBV4-2, TRBJ2-1)
CASSQAGTFAAGEQFF

SEQ ID NO: 478669 - protein, 15 aa, Homo sapiens
  CDR3 for alpha chain variable domain of TCR clone 239335 (TRAV8-3, TRAJ27)
CAVGPSKTTAGKSTF

SEQ ID NO: 478670 - protein, 14 aa, Homo sapiens
  CDR3 for beta chain variable domain of TCR clone 239335 (TRBV11-2, TRBJ2-3)
CASSRLARTDTQYF

SEQ ID NO: 478671 - protein, 14 aa, Homo sapiens
  CDR3 for alpha chain variable domain of TCR clone 239336 (TRAV12-3, TRAJ10)
SHLPLTGGGNKLTF

SEQ ID NO: 478672 - protein, 15 aa, Homo sapiens
  CDR3 for beta chain variable domain of TCR clone 239336 (TRBV13, TRBJ1-5)
CASSRTGRGHQPQHF

SEQ ID NO: 478673 - protein, 13 aa, Homo sapiens
  CDR3 for alpha chain variable domain of TCR clone 239337 (TRAV27, TRAJ42)
CAGARGSQGHLTF

SEQ ID NO: 478674 - protein, 14 aa, Homo sapiens
  CDR3 for beta chain variable domain of TCR clone 239337 (TRBV20-1, TRBJ1-1)
CSAQTRIGGTEAFF

SEQ ID NO: 478675 - protein, 14 aa, Homo sapiens
  CDR3 for alpha chain variable domain of TCR clone 239338 (TRAV1-2, TRAJ16)
CAVNRFSDGQKLLF

SEQ ID NO: 478676 - protein, 13 aa, Homo sapiens
  CDR3 for beta chain variable domain of TCR clone 239338 (TRBV20-1, TRBJ2-1)
CSAHGSAYNEQFF

SEQ ID NO: 478677 - protein, 13 aa, Homo sapiens
  CDR3 for alpha chain variable domain of TCR clone 239339 (TRAV13-1, TRAJ43)
CAASLSNNNDMRF

SEQ ID NO: 478678 - protein, 17 aa, Homo sapiens
  CDR3 for beta chain variable domain of TCR clone 239339 (TRBV13, TRBJ2-3)
CASSLSRVAGGRNTQHF

SEQ ID NO: 478679 - protein, 14 aa, Homo sapiens
  CDR3 for alpha chain variable domain of TCR clone 239340 (TRAV12-1, TRAJ23)
FVVIVYNQGGKLIF

SEQ ID NO: 478680 - protein, 15 aa, Homo sapiens
  CDR3 for beta chain variable domain of TCR clone 239340 (TRBV20-1, TRBJ1-5)
CSAKPPGQGSQPQHF

SEQ ID NO: 478681 - protein, 11 aa, Homo sapiens
  CDR3 for alpha chain variable domain of TCR clone 239341 (TRAV12-3, TRAJ27)
CAMANAGKSTF

SEQ ID NO: 478682 - protein, 12 aa, Homo sapiens
  CDR3 for beta chain variable domain of TCR clone 239341 (TRBV12-4, TRBJ2-7)
CTSSLGGYEQYF

SEQ ID NO: 478683 - protein, 13 aa, Homo sapiens
  CDR3 for alpha chain variable domain of TCR clone 239342 (TRAV1-1, TRAJ9)
CAAKNTGGFKTIF

SEQ ID NO: 478684 - protein, 14 aa, Homo sapiens
  CDR3 for beta chain variable domain of TCR clone 239342 (TRBV4-1, TRBJ2-7)
CASSPVAGGDEQYF

SEQ ID NO: 478685 - protein, 15 aa, Homo sapiens
  CDR3 for alpha chain variable domain of TCR clone 239343 (TRAV1-2, TRAJ9)
CAVRDDGTGGLKTIF

SEQ ID NO: 478686 - protein, 17 aa, Homo sapiens
  CDR3 for beta chain variable domain of TCR clone 239343 (TRBV20-1, TRBJ2-1)
CSASSSGLAGSYNEQFF

SEQ ID NO: 478687 - protein, 11 aa, Homo sapiens
  CDR3 for alpha chain variable domain of TCR clone 239344 (TRAV3, TRAJ17)
PRGAAGYKLTF

SEQ ID NO: 478688 - protein, 12 aa, Homo sapiens
  CDR3 for beta chain variable domain of TCR clone 239344 (TRBV11-2, TRBJ2-2)
CASSLGGGELFF

SEQ ID NO: 478689 - protein, 18 aa, Homo sapiens
  CDR3 for alpha chain variable domain of TCR clone 239345 (TRAV21, TRAJ52)
CAVRPSPAGGTSYGKLTF

SEQ ID NO: 478690 - protein, 14 aa, Homo sapiens
  CDR3 for beta chain variable domain of TCR clone 239345 (TRBV11-2, TRBJ2-7)
CASSLKLEGYEQYF

SEQ ID NO: 478691 - protein, 14 aa, Homo sapiens
  CDR3 for alpha chain variable domain of TCR clone 239346 (TRAV23/DV6, TRAJ6)
CAAIPSGGSYTPTF

SEQ ID NO: 478692 - protein, 17 aa, Homo sapiens
  CDR3 for beta chain variable domain of TCR clone 239346 (TRBV7-2, TRBJ2-3)
CASSLGGRAAWRDTQYF

SEQ ID NO: 478693 - protein, 12 aa, Homo sapiens
  CDR3 for alpha chain variable domain of TCR clone 239347 (TRAV12-3, TRAJ17)
CAMTLTGNKLTL

SEQ ID NO: 478694 - protein, 13 aa, Homo sapiens
  CDR3 for beta chain variable domain of TCR clone 239347 (TRBV19, TRBJ2-5)
CASSETAPETQYF

SEQ ID NO: 478695 - protein, 14 aa, Homo sapiens
  CDR3 for alpha chain variable domain of TCR clone 239348 (TRAV13-1, TRAJ24)
CAASRTDIWGKLQF

SEQ ID NO: 478696 - protein, 15 aa, Homo sapiens
  CDR3 for beta chain variable domain of TCR clone 239348 (TRBV7-9, TRBJ1-5)
CASSQGHQPNQPQHF

SEQ ID NO: 478697 - protein, 11 aa, Homo sapiens
  CDR3 for alpha chain variable domain of TCR clone 239349 (TRAV21, TRAJ17)
CAAPAGNKLTF

SEQ ID NO: 478698 - protein, 12 aa, Homo sapiens
  CDR3 for beta chain variable domain of TCR clone 239349 (TRBV7-9, TRBJ1-5)
CASSPQGQPQHF

SEQ ID NO: 478699 - protein, 16 aa, Homo sapiens
  CDR3 for alpha chain variable domain of TCR clone 239350 (TRAV30, TRAJ24)
CGTEIVDAGSWGKSQF

SEQ ID NO: 478700 - protein, 14 aa, Homo sapiens
  CDR3 for beta chain variable domain of TCR clone 239350 (TRBV12-5, TRBJ2-5)
CASGSRTHQETQYF

SEQ ID NO: 478701 - protein, 16 aa, Homo sapiens
  CDR3 for alpha chain variable domain of TCR clone 239351 (TRAV23/DV6, TRAJ9)
CAASIGGNTGGFKTIF

SEQ ID NO: 478702 - protein, 15 aa, Homo sapiens
  CDR3 for beta chain variable domain of TCR clone 239351 (TRBV10-3, TRBJ2-1)
CAIRNGTSGHNEQFF

SEQ ID NO: 478703 - protein, 14 aa, Homo sapiens
  CDR3 for alpha chain variable domain of TCR clone 239352 (TRAV17, TRAJ6)
CATDASGGSYIPTF

SEQ ID NO: 478704 - protein, 19 aa, Homo sapiens
  CDR3 for beta chain variable domain of TCR clone 239352 (TRBV4-3, TRBJ2-7)
SASSQEFIGWQVTPYEQYF

SEQ ID NO: 478705 - protein, 15 aa, Homo sapiens
  CDR3 for alpha chain variable domain of TCR clone 239353 (TRAV12-1, TRAJ48)
CVVNKVNFGNEKLTF

SEQ ID NO: 478706 - protein, 17 aa, Homo sapiens
  CDR3 for beta chain variable domain of TCR clone 239353 (TRBV20-1, TRBJ2-1)
CSASSSGLAGSYNEQFF

SEQ ID NO: 478707 - protein, 12 aa, Homo sapiens
  CDR3 for alpha chain variable domain of TCR clone 239354 (TRAV16, TRAJ56)
CAPTGANSKLTF

SEQ ID NO: 478708 - protein, 17 aa, Homo sapiens
  CDR3 for beta chain variable domain of TCR clone 239354 (TRBV27, TRBJ2-6)
CASSLTVFASGANVLTF

SEQ ID NO: 478709 - protein, 15 aa, Homo sapiens
  CDR3 for alpha chain variable domain of TCR clone 239355 (TRAV2, TRAJ13)
CCLLLCFRGYQKVTF

SEQ ID NO: 478710 - protein, 16 aa, Homo sapiens
  CDR3 for beta chain variable domain of TCR clone 239355 (TRBV6-1, TRBJ2-5)
CAGSETLDRGAETQYF

SEQ ID NO: 478711 - protein, 13 aa, Homo sapiens
  CDR3 for alpha chain variable domain of TCR clone 239356 (TRAV12-3, TRAJ7)
CAMTPYGNNRLAF

SEQ ID NO: 478712 - protein, 14 aa, Homo sapiens
  CDR3 for beta chain variable domain of TCR clone 239356 (TRBV19, TRBJ2-1)
CASPTFVLSGEQFF

SEQ ID NO: 478713 - protein, 14 aa, Homo sapiens
  CDR3 for alpha chain variable domain of TCR clone 239357 (TRAV12-1, TRAJ13)
CVVIDSEGYQKVTF

SEQ ID NO: 478714 - protein, 13 aa, Homo sapiens
  CDR3 for beta chain variable domain of TCR clone 239357 (TRBV20-1, TRBJ1-1)
CSAPPGGHTEAFF

SEQ ID NO: 478715 - protein, 13 aa, Homo sapiens
  CDR3 for alpha chain variable domain of TCR clone 239358 (TRAV3, TRAJ21)
CAVREPDFIKFYF

SEQ ID NO: 478716 - protein, 12 aa, Homo sapiens
  CDR3 for beta chain variable domain of TCR clone 239358 (TRBV5-1, TRBJ2-4)
LAGEWTKNIQYF

SEQ ID NO: 478717 - protein, 14 aa, Homo sapiens
  CDR3 for alpha chain variable domain of TCR clone 239359 (TRAV12-2, TRAJ48)
CAVNALFGNEKLTF

SEQ ID NO: 478718 - protein, 13 aa, Homo sapiens
  CDR3 for beta chain variable domain of TCR clone 239359 (TRBV28, TRBJ2-7)
CAGAQQGLDEQYF

SEQ ID NO: 478719 - protein, 12 aa, Homo sapiens
  CDR3 for alpha chain variable domain of TCR clone 239360 (TRAV29/DV5, TRAJ49)
CAATDTGNQIYF

SEQ ID NO: 478720 - protein, 12 aa, Homo sapiens
  CDR3 for beta chain variable domain of TCR clone 239360 (TRBV12-4, TRBJ2-7)
CASSLGGYEQYF

SEQ ID NO: 478721 - protein, 14 aa, Homo sapiens
  CDR3 for alpha chain variable domain of TCR clone 239361 (TRAV12-3, TRAJ10)
SHLPLTGGGNTLTF

SEQ ID NO: 478722 - protein, 14 aa, Homo sapiens
  CDR3 for beta chain variable domain of TCR clone 239361 (TRBV6-1, TRBJ1-3)
CASVQGGGGNTIYF

SEQ ID NO: 478723 - protein, 17 aa, Homo sapiens
  CDR3 for alpha chain variable domain of TCR clone 239362 (TRAV13-1, TRAJ41)
CAASTRRAQIPGMHSTS

SEQ ID NO: 478724 - protein, 15 aa, Homo sapiens
  CDR3 for beta chain variable domain of TCR clone 239362 (TRBV3-1, TRBJ2-7)
CASSQAPSGSYEQYF

SEQ ID NO: 478725 - protein, 13 aa, Homo sapiens
  CDR3 for alpha chain variable domain of TCR clone 239363 (TRAV30, TRAJ20)
CGTEDRSDYKLSF

SEQ ID NO: 478726 - protein, 14 aa, Homo sapiens
  CDR3 for beta chain variable domain of TCR clone 239363 (TRBV5-1, TRBJ2-7)
CASSRGESLYEQYF

SEQ ID NO: 478727 - protein, 16 aa, Homo sapiens
  CDR3 for alpha chain variable domain of TCR clone 239364 (TRAV3, TRAJ10)
CAVRDMRAGGGNKRTF

SEQ ID NO: 478728 - protein, 15 aa, Homo sapiens
  CDR3 for beta chain variable domain of TCR clone 239364 (TRBV20-1, TRBJ2-7)
CSARDRVSGMDEQYF

SEQ ID NO: 478729 - protein, 13 aa, Homo sapiens
  CDR3 for alpha chain variable domain of TCR clone 239365 (TRAV35, TRAJ48)
GRSRVFGNEKLTF

SEQ ID NO: 478730 - protein, 17 aa, Homo sapiens
  CDR3 for beta chain variable domain of TCR clone 239365 (TRBV11-2, TRBJ2-1)
CASSLYPPGVEYNEQFF

SEQ ID NO: 478731 - protein, 12 aa, Homo sapiens
  CDR3 for alpha chain variable domain of TCR clone 239366 (TRAV29/DV5, TRAJ15)
CASNQAGTALIF

SEQ ID NO: 478732 - protein, 12 aa, Homo sapiens
  CDR3 for beta chain variable domain of TCR clone 239366 (TRBV11-2, TRBJ2-1)
CASSPGNNEQFF

SEQ ID NO: 478733 - protein, 11 aa, Homo sapiens
  CDR3 for alpha chain variable domain of TCR clone 239367 (TRAV23/DV6, TRAJ21)
CAANTFNKFYF

SEQ ID NO: 478734 - protein, 12 aa, Homo sapiens
  CDR3 for beta chain variable domain of TCR clone 239367 (TRBV11-2, TRBJ2-1)
CASSPGNNEQFF

SEQ ID NO: 478735 - protein, 13 aa, Homo sapiens
  CDR3 for alpha chain variable domain of TCR clone 239368 (TRAV20, TRAJ9)
CAVPDTGGFKTIF

SEQ ID NO: 478736 - protein, 14 aa, Homo sapiens
  CDR3 for beta chain variable domain of TCR clone 239368 (TRBV7-2, TRBJ2-5)
CASSPRGSSETTYF

SEQ ID NO: 478737 - protein, 14 aa, Homo sapiens
  CDR3 for alpha chain variable domain of TCR clone 239369 (TRAV12-1, TRAJ4)
CVVGASGGYNKLIF

SEQ ID NO: 478738 - protein, 14 aa, Homo sapiens
  CDR3 for beta chain variable domain of TCR clone 239369 (TRBV20-1, TRBJ1-5)
CSARGRGSNQPQHF

SEQ ID NO: 478739 - protein, 16 aa, Homo sapiens
  CDR3 for alpha chain variable domain of TCR clone 239370 (TRAV30, TRAJ24)
CGTEIVDADSLGKFQF

SEQ ID NO: 478740 - protein, 15 aa, Homo sapiens
  CDR3 for beta chain variable domain of TCR clone 239370 (TRBV12-4, TRBJ2-2)
CASSPNDSGTGELFF

SEQ ID NO: 478741 - protein, 14 aa, Homo sapiens
  CDR3 for alpha chain variable domain of TCR clone 239371 (TRAV12-2, TRAJ13)
CAVKKTRGYQKVTF

SEQ ID NO: 478742 - protein, 13 aa, Homo sapiens
  CDR3 for beta chain variable domain of TCR clone 239371 (TRBV20-1, TRBJ1-1)
CSARLGQGTEAFC

SEQ ID NO: 478743 - protein, 14 aa, Homo sapiens
  CDR3 for alpha chain variable domain of TCR clone 239372 (TRAV21, TRAJ58)
CAERRGRSGSRLTF

SEQ ID NO: 478744 - protein, 13 aa, Homo sapiens
  CDR3 for beta chain variable domain of TCR clone 239372 (TRBV7-2, TRBJ1-6)
CASSLKFDSPLHF

SEQ ID NO: 478745 - protein, 12 aa, Homo sapiens
  CDR3 for alpha chain variable domain of TCR clone 239373 (TRAV1-1, TRAJ29)
CASGTGNTPLVF

SEQ ID NO: 478746 - protein, 15 aa, Homo sapiens
  CDR3 for beta chain variable domain of TCR clone 239373 (TRBV27, TRBJ2-1)
CASSNGGGSSNEQFF

SEQ ID NO: 478747 - protein, 13 aa, Homo sapiens
  CDR3 for alpha chain variable domain of TCR clone 239374 (TRAV35, TRAJ48)
CAGREFGNEKLTF

SEQ ID NO: 478748 - protein, 16 aa, Homo sapiens
  CDR3 for beta chain variable domain of TCR clone 239374 (TRBV12-5, TRBJ2-5)
CASGPRTSGNQETQYF

SEQ ID NO: 478749 - protein, 10 aa, Homo sapiens
  CDR3 for alpha chain variable domain of TCR clone 239375 (TRAV1-2, TRAJ20)
CALNDYKLSF

SEQ ID NO: 478750 - protein, 16 aa, Homo sapiens
  CDR3 for beta chain variable domain of TCR clone 239375 (TRBV20-1, TRBJ1-1)
CSARALTQGMSTEAFF

SEQ ID NO: 478751 - protein, 15 aa, Homo sapiens
  CDR3 for alpha chain variable domain of TCR clone 239376 (TRAV3, TRAJ20)
CAVRDIKLRDYKLSF

SEQ ID NO: 478752 - protein, 18 aa, Homo sapiens
  CDR3 for beta chain variable domain of TCR clone 239376 (TRBV20-1, TRBJ2-5)
CSQTGDSGRLGGKETQYF

SEQ ID NO: 478753 - protein, 14 aa, Homo sapiens
  CDR3 for alpha chain variable domain of TCR clone 239377 (TRAV17, TRAJ45)
CATDARGGADGLPF

SEQ ID NO: 478754 - protein, 11 aa, Homo sapiens
  CDR3 for beta chain variable domain of TCR clone 239377 (TRBV28, TRBJ2-5)
CATGNQETQYF

SEQ ID NO: 478755 - protein, 15 aa, Homo sapiens
  CDR3 for alpha chain variable domain of TCR clone 239378 (TRAV17, TRAJ22)
CATVAPSGSARQLTF

SEQ ID NO: 478756 - protein, 16 aa, Homo sapiens
  CDR3 for beta chain variable domain of TCR clone 239378 (TRBV10-3, TRBJ2-7)
CTISADFADRPYEQYF

SEQ ID NO: 478757 - protein, 13 aa, Homo sapiens
  CDR3 for alpha chain variable domain of TCR clone 239379 (TRAV8-1, TRAJ13)
CAVRKGGYKKVTF

SEQ ID NO: 478758 - protein, 18 aa, Homo sapiens
  CDR3 for beta chain variable domain of TCR clone 239379 (TRBV11-2, TRBJ2-7)
CASSWRTVQTGQSYEQYF

SEQ ID NO: 478759 - protein, 11 aa, Homo sapiens
  CDR3 for alpha chain variable domain of TCR clone 239380 (TRAV3, TRAJ21)
CAVGNFNNFYF

SEQ ID NO: 478760 - protein, 16 aa, Homo sapiens
  CDR3 for beta chain variable domain of TCR clone 239380 (TRBV19, TRBJ2-1)
CASSKAGPSSYNEQSF

SEQ ID NO: 478761 - protein, 11 aa, Homo sapiens
  CDR3 for alpha chain variable domain of TCR clone 239381 (TRAV13-1, TRAJ15)
CAGTGGTALIF

SEQ ID NO: 478762 - protein, 13 aa, Homo sapiens
  CDR3 for beta chain variable domain of TCR clone 239381 (TRBV7-9, TRBJ1-2)
CASSLKQNYGYTF

SEQ ID NO: 478763 - protein, 15 aa, Homo sapiens
  CDR3 for alpha chain variable domain of TCR clone 239382 (TRAV8-3, TRAJ45)
CASSYSGGGGDGLTF

SEQ ID NO: 478764 - protein, 13 aa, Homo sapiens
  CDR3 for beta chain variable domain of TCR clone 239382 (TRBV10-3, TRBJ2-7)
CASKLAVNYEQHF

SEQ ID NO: 478765 - protein, 16 aa, Homo sapiens
  CDR3 for alpha chain variable domain of TCR clone 239383 (TRAV3, TRAJ3)
CAVRDRAKSSASNIIF

SEQ ID NO: 478766 - protein, 16 aa, Homo sapiens
  CDR3 for beta chain variable domain of TCR clone 239383 (TRBV20-1, TRBJ2-4)
CSATSLAELAKNIQYF

SEQ ID NO: 478767 - protein, 14 aa, Homo sapiens
  CDR3 for alpha chain variable domain of TCR clone 239384 (TRAV17, TRAJ57)
CATDPQGGSEKLVF

SEQ ID NO: 478768 - protein, 14 aa, Homo sapiens
  CDR3 for beta chain variable domain of TCR clone 239384 (TRBV18, TRBJ2-1)
CASSPQGRFNEQFF

SEQ ID NO: 478769 - protein, 12 aa, Homo sapiens
  CDR3 for alpha chain variable domain of TCR clone 239385 (TRAV13-1, TRAJ15)
CAASQAGAALIF

SEQ ID NO: 478770 - protein, 18 aa, Homo sapiens
  CDR3 for beta chain variable domain of TCR clone 239385 (TRBV7-9, TRBJ2-3)
CASSLPINGQISTDTQYF

SEQ ID NO: 478771 - protein, 13 aa, Homo sapiens
  CDR3 for alpha chain variable domain of TCR clone 239386 (TRAV1-2, TRAJ24)
CALRADSWVKFQF

SEQ ID NO: 478772 - protein, 13 aa, Homo sapiens
  CDR3 for beta chain variable domain of TCR clone 239386 (TRBV20-1, TRBJ2-1)
CSATGLAGDEQFF

SEQ ID NO: 478773 - protein, 13 aa, Homo sapiens
  CDR3 for alpha chain variable domain of TCR clone 239387 (TRAV12-3, TRAJ43)
CAMIRPNNNDIRF

SEQ ID NO: 478774 - protein, 17 aa, Homo sapiens
  CDR3 for beta chain variable domain of TCR clone 239387 (TRBV20-1, TRBJ2-1)
CSASSSGLAGSYNEQFF

SEQ ID NO: 478775 - protein, 14 aa, Homo sapiens
  CDR3 for alpha chain variable domain of TCR clone 239388 (TRAV25, TRAJ45)
CARKSGGGADGLTF

SEQ ID NO: 478776 - protein, 12 aa, Homo sapiens
  CDR3 for beta chain variable domain of TCR clone 239388 (TRBV7-9, TRBJ2-7)
CASSFDSYEQYF

SEQ ID NO: 478777 - protein, 12 aa, Homo sapiens
  CDR3 for alpha chain variable domain of TCR clone 239389 (TRAV3, TRAJ20)
CAVRDGDYKFSF

SEQ ID NO: 478778 - protein, 13 aa, Homo sapiens
  CDR3 for beta chain variable domain of TCR clone 239389 (TRBV9, TRBJ2-1)
CASSVGQGGEQFF

SEQ ID NO: 478779 - protein, 11 aa, Homo sapiens
  CDR3 for alpha chain variable domain of TCR clone 239390 (TRAV12-1, TRAJ30)
CVVNGQDKINF

SEQ ID NO: 478780 - protein, 12 aa, Homo sapiens
  CDR3 for beta chain variable domain of TCR clone 239390 (TRBV27, TRBJ2-2)
CASKLFTGELFF

SEQ ID NO: 478781 - protein, 11 aa, Homo sapiens
  CDR3 for alpha chain variable domain of TCR clone 239391 (TRAV1-1, TRAJ20)
CAVFNDYKLSF

SEQ ID NO: 478782 - protein, 13 aa, Homo sapiens
  CDR3 for beta chain variable domain of TCR clone 239391 (TRBV7-3, TRBJ1-1)
CASSQDWGAEAFF

SEQ ID NO: 478783 - protein, 11 aa, Homo sapiens
  CDR3 for alpha chain variable domain of TCR clone 239392 (TRAV6, TRAJ41)
CALNSGYALNF

SEQ ID NO: 478784 - protein, 15 aa, Homo sapiens
  CDR3 for beta chain variable domain of TCR clone 239392 (TRBV20-1, TRBJ1-5)
CSAFKNGKRNQPQHF

SEQ ID NO: 478785 - protein, 12 aa, Homo sapiens
  CDR3 for alpha chain variable domain of TCR clone 239393 (TRAV17, TRAJ57)
CAADGGSEKLVF

SEQ ID NO: 478786 - protein, 13 aa, Homo sapiens
  CDR3 for beta chain variable domain of TCR clone 239393 (TRBV7-9, TRBJ2-7)
RASSVAGAYEQYF

SEQ ID NO: 478787 - protein, 11 aa, Homo sapiens
  CDR3 for alpha chain variable domain of TCR clone 239394 (TRAV17, TRAJ9)
CATTGGFKTSF

SEQ ID NO: 478788 - protein, 14 aa, Homo sapiens
  CDR3 for beta chain variable domain of TCR clone 239394 (TRBV7-9, TRBJ2-2)
CASSGLADPGELFF

SEQ ID NO: 478789 - protein, 18 aa, Homo sapiens
  CDR3 for alpha chain variable domain of TCR clone 239395 (TRAV26-1, TRAJ23)
CIVRVGLEVWNQGGKLVF

SEQ ID NO: 478790 - protein, 14 aa, Homo sapiens
  CDR3 for beta chain variable domain of TCR clone 239395 (TRBV7-6, TRBJ2-3)
CASSLGTVTDTQYF

SEQ ID NO: 478791 - protein, 13 aa, Homo sapiens
  CDR3 for alpha chain variable domain of TCR clone 239396 (TRAV13-1, TRAJ33)
CAASRAGNYQLIC

SEQ ID NO: 478792 - protein, 12 aa, Homo sapiens
  CDR3 for beta chain variable domain of TCR clone 239396 (TRBV11-2, TRBJ1-2)
CASSREGDGHTF

SEQ ID NO: 478793 - protein, 14 aa, Homo sapiens
  CDR3 for alpha chain variable domain of TCR clone 239397 (TRAV27, TRAJ38)
CAGDRAGNNRKLIW

SEQ ID NO: 478794 - protein, 17 aa, Homo sapiens
  CDR3 for beta chain variable domain of TCR clone 239397 (TRBV20-1, TRBJ2-1)
CSAPPRLAGTRYDEQFF

SEQ ID NO: 478795 - protein, 17 aa, Homo sapiens
  CDR3 for alpha chain variable domain of TCR clone 239398 (TRAV4, )
CLVDIQNPDPAVYHLRD

SEQ ID NO: 478796 - protein, 12 aa, Homo sapiens
  CDR3 for beta chain variable domain of TCR clone 239398 (TRBV6-1, TRBJ2-7)
CASSDYSYEQYF

SEQ ID NO: 478797 - protein, 14 aa, Homo sapiens
  CDR3 for alpha chain variable domain of TCR clone 239399 (TRAV12-2, TRAJ9)
CAVNALEGGFKTIF

SEQ ID NO: 478798 - protein, 11 aa, Homo sapiens
  CDR3 for beta chain variable domain of TCR clone 239399 (TRBV12-4, TRBJ2-3)
CASTATDTQYF

SEQ ID NO: 478799 - protein, 13 aa, Homo sapiens
  CDR3 for alpha chain variable domain of TCR clone 239400 (TRAV12-3, TRAJ21)
CAPGHHNFNKFYF

SEQ ID NO: 478800 - protein, 13 aa, Homo sapiens
  CDR3 for beta chain variable domain of TCR clone 239400 (TRBV4-2, TRBJ1-1)
CASSQAGNTEAFF

SEQ ID NO: 478801 - protein, 21 aa, Homo sapiens
  CDR3 for alpha chain variable domain of TCR clone 239401 (TRAV1-1, TRAJ6)
CAVRREEATYLHLEEEPDLLF

SEQ ID NO: 478802 - protein, 15 aa, Homo sapiens
  CDR3 for beta chain variable domain of TCR clone 239401 (TRBV6-6, TRBJ2-1)
CAARQGVSSYNEQFF

SEQ ID NO: 478803 - protein, 13 aa, Homo sapiens
  CDR3 for alpha chain variable domain of TCR clone 239402 (TRAV17, TRAJ5)
CAPMDTGRRALTF

SEQ ID NO: 478804 - protein, 13 aa, Homo sapiens
  CDR3 for beta chain variable domain of TCR clone 239402 (TRBV19, TRBJ1-2)
RASSVPGQDGCTF

SEQ ID NO: 478805 - protein, 13 aa, Homo sapiens
  CDR3 for alpha chain variable domain of TCR clone 239403 (TRAV35, TRAJ36)
CAGLRIGANNLFF

SEQ ID NO: 478806 - protein, 15 aa, Homo sapiens
  CDR3 for beta chain variable domain of TCR clone 239403 (TRBV28, TRBJ2-5)
CASSPTWSYQETQYF

SEQ ID NO: 478807 - protein, 14 aa, Homo sapiens
  CDR3 for alpha chain variable domain of TCR clone 239404 (TRAV8-2, TRAJ4)
CVVSPSGGYNKLIF

SEQ ID NO: 478808 - protein, 14 aa, Homo sapiens
  CDR3 for beta chain variable domain of TCR clone 239404 (TRBV19, TRBJ2-5)
CASSSSGIQETRYF

SEQ ID NO: 478809 - protein, 16 aa, Homo sapiens
  CDR3 for alpha chain variable domain of TCR clone 239405 (TRAV13-1, TRAJ48)
CAASIFGNFGNEKLTF

SEQ ID NO: 478810 - protein, 14 aa, Homo sapiens
  CDR3 for beta chain variable domain of TCR clone 239405 (TRBV24-1, TRBJ1-1)
CATSIPGGDTEAFF

SEQ ID NO: 478811 - protein, 12 aa, Homo sapiens
  CDR3 for alpha chain variable domain of TCR clone 239406 (TRAV17, TRAJ12)
CATLRSSYKLIF

SEQ ID NO: 478812 - protein, 16 aa, Homo sapiens
  CDR3 for beta chain variable domain of TCR clone 239406 (TRBV28, TRBJ2-7)
CASSLFFETGVPEQYF

SEQ ID NO: 478813 - protein, 14 aa, Homo sapiens
  CDR3 for alpha chain variable domain of TCR clone 239407 (TRAV20, TRAJ32)
CCGRYGGATNKLIF

SEQ ID NO: 478814 - protein, 16 aa, Homo sapiens
  CDR3 for beta chain variable domain of TCR clone 239407 (TRBV19, TRBJ2-2)
CGSRSPGTGATGELFF

SEQ ID NO: 478815 - protein, 20 aa, Homo sapiens
  CDR3 for alpha chain variable domain of TCR clone 239408 (TRAV21, TRAJ30)
CAVGRRMTRSSLEKGHDFIF

SEQ ID NO: 478816 - protein, 15 aa, Homo sapiens
  CDR3 for beta chain variable domain of TCR clone 239408 (TRBV6-6, TRBJ2-7)
CASSYSYGGSYEQYF

SEQ ID NO: 478817 - protein, 14 aa, Homo sapiens
  CDR3 for alpha chain variable domain of TCR clone 239409 (TRAV12-2, TRAJ13)
CAVKKTGGYQKFTF

SEQ ID NO: 478818 - protein, 15 aa, Homo sapiens
  CDR3 for beta chain variable domain of TCR clone 239409 (TRBV27, TRBJ2-1)
CAGSNGGGSSNEQFF

SEQ ID NO: 478819 - protein, 13 aa, Homo sapiens
  CDR3 for alpha chain variable domain of TCR clone 239410 (TRAV12-2, TRAJ7)
CAGLIYGNNRLAF

SEQ ID NO: 478820 - protein, 17 aa, Homo sapiens
  CDR3 for beta chain variable domain of TCR clone 239410 (TRBV3-1, TRBJ2-3)
CASSQDSPGASTDTQYF

SEQ ID NO: 478821 - protein, 10 aa, Homo sapiens
  CDR3 for alpha chain variable domain of TCR clone 239411 (TRAV8-4, TRAJ20)
CAVTNVLTTT

SEQ ID NO: 478822 - protein, 16 aa, Homo sapiens
  CDR3 for beta chain variable domain of TCR clone 239411 (TRBV6-1, TRBJ1-2)
CASSGAWQGRSHGDTF

SEQ ID NO: 478823 - protein, 12 aa, Homo sapiens
  CDR3 for alpha chain variable domain of TCR clone 239412 (TRAV1-1, TRAJ24)
CAVRGSWGKFQF

SEQ ID NO: 478824 - protein, 13 aa, Homo sapiens
  CDR3 for beta chain variable domain of TCR clone 239412 (TRBV7-3, TRBJ2-7)
CASSSSGPYEQYF

SEQ ID NO: 478825 - protein, 14 aa, Homo sapiens
  CDR3 for alpha chain variable domain of TCR clone 239413 (TRAV8-2, TRAJ37)
CVGSISGNTGKLIF

SEQ ID NO: 478826 - protein, 11 aa, Homo sapiens
  CDR3 for beta chain variable domain of TCR clone 239413 (TRBV18, TRBJ2-5)
CASSPRETQYF

SEQ ID NO: 478827 - protein, 16 aa, Homo sapiens
  CDR3 for alpha chain variable domain of TCR clone 239414 (TRAV3, TRAJ10)
CAVRDMRAGGGNKLTF

SEQ ID NO: 478828 - protein, 15 aa, Homo sapiens
  CDR3 for beta chain variable domain of TCR clone 239414 (TRBV4-1, TRBJ2-1)
CASSQGGELYNEQFF

SEQ ID NO: 478829 - protein, 17 aa, Homo sapiens
  CDR3 for alpha chain variable domain of TCR clone 239415 (TRAV3, TRAJ6)
CAVRDGPRAGGSYIPTF

SEQ ID NO: 478830 - protein, 14 aa, Homo sapiens
  CDR3 for beta chain variable domain of TCR clone 239415 (TRBV7-3, TRBJ2-1)
CTSSTSGGWDEQFF

SEQ ID NO: 478831 - protein, 14 aa, Homo sapiens
  CDR3 for alpha chain variable domain of TCR clone 239416 (TRAV29/DV5, TRAJ36)
CSARRKTGANNLFF

SEQ ID NO: 478832 - protein, 13 aa, Homo sapiens
  CDR3 for beta chain variable domain of TCR clone 239416 (TRBV19, TRBJ2-7)
CASSIDRTYEQYF

SEQ ID NO: 478833 - protein, 15 aa, Homo sapiens
  CDR3 for alpha chain variable domain of TCR clone 239417 (TRAV14/DV4, TRAJ9)
CAMREGNTGGFKTIF

SEQ ID NO: 478834 - protein, 15 aa, Homo sapiens
  CDR3 for beta chain variable domain of TCR clone 239417 (TRBV7-3, TRBJ2-2)
CASSETGQGTGELFF

SEQ ID NO: 478835 - protein, 14 aa, Homo sapiens
  CDR3 for alpha chain variable domain of TCR clone 239418 (TRAV12-2, TRAJ40)
CAVKIPSGTYKYIF

SEQ ID NO: 478836 - protein, 13 aa, Homo sapiens
  CDR3 for beta chain variable domain of TCR clone 239418 (TRBV7-2, TRBJ2-2)
CASSFAETGELFF

SEQ ID NO: 478837 - protein, 12 aa, Homo sapiens
  CDR3 for alpha chain variable domain of TCR clone 239419 (TRAV17, TRAJ47)
TSVPTYGNKLVF

SEQ ID NO: 478838 - protein, 13 aa, Homo sapiens
  CDR3 for beta chain variable domain of TCR clone 239419 (TRBV20-1, TRBJ1-1)
CSARGGGNTEAFF

SEQ ID NO: 478839 - protein, 14 aa, Homo sapiens
  CDR3 for alpha chain variable domain of TCR clone 239420 (TRAV17, TRAJ29)
CATDQNSGNTPLVF

SEQ ID NO: 478840 - protein, 16 aa, Homo sapiens
  CDR3 for beta chain variable domain of TCR clone 239420 (TRBV7-3, TRBJ2-2)
CASSLKRGTLSGELFF

SEQ ID NO: 478841 - protein, 10 aa, Homo sapiens
  CDR3 for alpha chain variable domain of TCR clone 239421 (TRAV13-1, TRAJ7)
LIGGNNRLAF

SEQ ID NO: 478842 - protein, 18 aa, Homo sapiens
  CDR3 for beta chain variable domain of TCR clone 239421 (TRBV7-9, TRBJ2-7)
CASSLTTSGSRTWYEQYF

SEQ ID NO: 478843 - protein, 13 aa, Homo sapiens
  CDR3 for alpha chain variable domain of TCR clone 239422 (TRAV21, TRAJ27)
CAALNTNAGKSTF

SEQ ID NO: 478844 - protein, 15 aa, Homo sapiens
  CDR3 for beta chain variable domain of TCR clone 239422 (TRBV20-1, TRBJ2-7)
CSARKGPAESYEQYF

SEQ ID NO: 478845 - protein, 11 aa, Homo sapiens
  CDR3 for alpha chain variable domain of TCR clone 239423 (TRAV2, TRAJ13)
CASGGYQKVTF

SEQ ID NO: 478846 - protein, 14 aa, Homo sapiens
  CDR3 for beta chain variable domain of TCR clone 239423 (TRBV19, TRBJ2-7)
CASSMGQVAIEQYF

SEQ ID NO: 478847 - protein, 13 aa, Homo sapiens
  CDR3 for alpha chain variable domain of TCR clone 239424 (TRAV13-1, TRAJ6)
CAARRGGGYIPTF

SEQ ID NO: 478848 - protein, 16 aa, Homo sapiens
  CDR3 for beta chain variable domain of TCR clone 239424 (TRBV7-9, TRBJ2-2)
CASSLATGVGTGELFF

SEQ ID NO: 478849 - protein, 14 aa, Homo sapiens
  CDR3 for alpha chain variable domain of TCR clone 239425 (TRAV4, TRAJ30)
CLLTLMNRDDKISF

SEQ ID NO: 478850 - protein, 14 aa, Homo sapiens
  CDR3 for beta chain variable domain of TCR clone 239425 (TRBV7-2, TRBJ2-7)
CASSPKTSFYEQYF

SEQ ID NO: 478851 - protein, 14 aa, Homo sapiens
  CDR3 for alpha chain variable domain of TCR clone 239426 (TRAV1-2, TRAJ8)
CAVRDDTGFQKLVC

SEQ ID NO: 478852 - protein, 15 aa, Homo sapiens
  CDR3 for beta chain variable domain of TCR clone 239426 (TRBV6-3, TRBJ2-7)
CASSSPGTVFYEQYF

SEQ ID NO: 478853 - protein, 12 aa, Homo sapiens
  CDR3 for alpha chain variable domain of TCR clone 239427 (TRAV12-2, TRAJ10)
WGVTGGGNKLTF

SEQ ID NO: 478854 - protein, 14 aa, Homo sapiens
  CDR3 for beta chain variable domain of TCR clone 239427 (TRBV6-1, TRBJ1-3)
CASVQGGGGNTIHF

SEQ ID NO: 478855 - protein, 16 aa, Homo sapiens
  CDR3 for alpha chain variable domain of TCR clone 239428 (TRAV30, TRAJ24)
YGTEIVDADSWGKFKF

SEQ ID NO: 478856 - protein, 14 aa, Homo sapiens
  CDR3 for beta chain variable domain of TCR clone 239428 (TRBV12-5, TRBJ2-5)
CASGSRTHQETQYF

SEQ ID NO: 478857 - protein, 13 aa, Homo sapiens
  CDR3 for alpha chain variable domain of TCR clone 239429 (TRAV30, TRAJ49)
CGTESQPVTRSIL

SEQ ID NO: 478858 - protein, 13 aa, Homo sapiens
  CDR3 for beta chain variable domain of TCR clone 239429 (TRBV7-2, TRBJ2-2)
CASSLAVTEELFF

SEQ ID NO: 478859 - protein, 16 aa, Homo sapiens
  CDR3 for alpha chain variable domain of TCR clone 239430 (TRAV26-1, TRAJ22)
CIVSLNFFWFCKATDF

SEQ ID NO: 478860 - protein, 15 aa, Homo sapiens
  CDR3 for beta chain variable domain of TCR clone 239430 (TRBV4-2, TRBJ1-2)
CASSQRTGGRDGYTF

SEQ ID NO: 478861 - protein, 12 aa, Homo sapiens
  CDR3 for alpha chain variable domain of TCR clone 239431 (TRAV4, TRAJ6)
CLAPGGSYIPTF

SEQ ID NO: 478862 - protein, 14 aa, Homo sapiens
  CDR3 for beta chain variable domain of TCR clone 239431 (TRBV19, TRBJ2-1)
CASPTFVLSGEQFF

SEQ ID NO: 478863 - protein, 13 aa, Homo sapiens
  CDR3 for alpha chain variable domain of TCR clone 239432 (TRAV8-6, TRAJ21)
CAVSPSSPNKFYF

SEQ ID NO: 478864 - protein, 14 aa, Homo sapiens
  CDR3 for beta chain variable domain of TCR clone 239432 (TRBV7-9, TRBJ2-5)
CASTLDTAQETQYF

SEQ ID NO: 478865 - protein, 13 aa, Homo sapiens
  CDR3 for alpha chain variable domain of TCR clone 239433 (TRAV1-2, TRAJ31)
CAVRPNNNAGLMF

SEQ ID NO: 478866 - protein, 14 aa, Homo sapiens
  CDR3 for beta chain variable domain of TCR clone 239433 (TRBV11-2, TRBJ2-1)
CASSLSGPYNEQFF

SEQ ID NO: 478867 - protein, 16 aa, Homo sapiens
  CDR3 for alpha chain variable domain of TCR clone 239434 (TRAV12-1, TRAJ18)
CVVNTDRGSTLGRLYF

SEQ ID NO: 478868 - protein, 15 aa, Homo sapiens
  CDR3 for beta chain variable domain of TCR clone 239434 (TRBV7-9, TRBJ1-4)
CASSFVGFTNEKLFF

SEQ ID NO: 478869 - protein, 15 aa, Homo sapiens
  CDR3 for alpha chain variable domain of TCR clone 239435 (TRAV25, TRAJ10)
CAGPLLTGGGNKLTF

SEQ ID NO: 478870 - protein, 14 aa, Homo sapiens
  CDR3 for beta chain variable domain of TCR clone 239435 (TRBV12-5, TRBJ2-5)
CASGSRTHQETQYF

SEQ ID NO: 478871 - protein, 17 aa, Homo sapiens
  CDR3 for alpha chain variable domain of TCR clone 239436 (TRAV3, TRAJ6)
CAVRDGPRAGGSYVPTF

SEQ ID NO: 478872 - protein, 15 aa, Homo sapiens
  CDR3 for beta chain variable domain of TCR clone 239436 (TRBV7-9, TRBJ2-7)
CASSPGGGLTYEQYF

SEQ ID NO: 478873 - protein, 15 aa, Homo sapiens
  CDR3 for alpha chain variable domain of TCR clone 239437 (TRAV12-1, TRAJ44)
CVVFVNTATASKLTF

SEQ ID NO: 478874 - protein, 17 aa, Homo sapiens
  CDR3 for beta chain variable domain of TCR clone 239437 (TRBV7-8, TRBJ2-6)
CASSAGTGGAGANVLTF

SEQ ID NO: 478875 - protein, 17 aa, Homo sapiens
  CDR3 for alpha chain variable domain of TCR clone 239438 (TRAV27, TRAJ52)
CAGAGWAGGTSYGKLTF

SEQ ID NO: 478876 - protein, 16 aa, Homo sapiens
  CDR3 for beta chain variable domain of TCR clone 239438 (TRBV19, TRBJ2-1)
CATSKAGPSSYNEQLF

SEQ ID NO: 478877 - protein, 23 aa, Homo sapiens
  CDR3 for alpha chain variable domain of TCR clone 239439 (TRAV26-1, TRAJ38)
CIADNAGNNHIQNPDHAVYQLSD

SEQ ID NO: 478878 - protein, 13 aa, Homo sapiens
  CDR3 for beta chain variable domain of TCR clone 239439 (TRBV20-1, TRBJ1-1)
CSARGGGNTEAFF

SEQ ID NO: 478879 - protein, 14 aa, Homo sapiens
  CDR3 for alpha chain variable domain of TCR clone 239440 (TRAV12-2, TRAJ13)
CAVKKTGGYQKVTF

SEQ ID NO: 478880 - protein, 15 aa, Homo sapiens
  CDR3 for beta chain variable domain of TCR clone 239440 (TRBV2, TRBJ1-5)
CASAPPGGSNQPQHF

SEQ ID NO: 478881 - protein, 15 aa, Homo sapiens
  CDR3 for alpha chain variable domain of TCR clone 239441 (TRAV4, TRAJ15)
CLVGDIRRAGTALFF

SEQ ID NO: 478882 - protein, 16 aa, Homo sapiens
  CDR3 for beta chain variable domain of TCR clone 239441 (TRBV12-5, TRBJ2-5)
CASGPRTSGNQETQYV

SEQ ID NO: 478883 - protein, 15 aa, Homo sapiens
  CDR3 for alpha chain variable domain of TCR clone 239442 (TRAV8-3, TRAJ11)
CAVCLFNSGYSTLTF

SEQ ID NO: 478884 - protein, 16 aa, Homo sapiens
  CDR3 for beta chain variable domain of TCR clone 239442 (TRBV7-9, TRBJ1-2)
CASSLGFSSGEDGYTF

SEQ ID NO: 478885 - protein, 11 aa, Homo sapiens
  CDR3 for alpha chain variable domain of TCR clone 239443 (TRAV21, TRAJ9)
CAVPGGFKTIF

SEQ ID NO: 478886 - protein, 12 aa, Homo sapiens
  CDR3 for beta chain variable domain of TCR clone 239443 (TRBV20-1, TRBJ2-3)
CSARVGTDTQYV

SEQ ID NO: 478887 - protein, 14 aa, Homo sapiens
  CDR3 for alpha chain variable domain of TCR clone 239444 (TRAV26-1, TRAJ5)
CIVRFRFSRRELTF

SEQ ID NO: 478888 - protein, 17 aa, Homo sapiens
  CDR3 for beta chain variable domain of TCR clone 239444 (TRBV29-1, TRBJ2-3)
CSVEVLAGETSTDTQYF

SEQ ID NO: 478889 - protein, 14 aa, Homo sapiens
  CDR3 for alpha chain variable domain of TCR clone 239445 (TRAV38-2/DV8, TRAJ30)
CAYMDGLGGDKIIF

SEQ ID NO: 478890 - protein, 15 aa, Homo sapiens
  CDR3 for beta chain variable domain of TCR clone 239445 (TRBV7-9, TRBJ2-2)
CASRPADRDTGELFL

SEQ ID NO: 478891 - protein, 10 aa, Homo sapiens
  CDR3 for alpha chain variable domain of TCR clone 239446 (TRAV30, TRAJ48)
CGIGNEKLTF

SEQ ID NO: 478892 - protein, 15 aa, Homo sapiens
  CDR3 for beta chain variable domain of TCR clone 239446 (TRBV4-1, TRBJ1-4)
CASSDTGGTNEKLFF

SEQ ID NO: 478893 - protein, 14 aa, Homo sapiens
  CDR3 for alpha chain variable domain of TCR clone 239447 (TRAV16, TRAJ31)
CALSGRNNNARLMF

SEQ ID NO: 478894 - protein, 12 aa, Homo sapiens
  CDR3 for beta chain variable domain of TCR clone 239447 (TRBV11-2, TRBJ1-2)
CGSSREGDGYTF

SEQ ID NO: 478895 - protein, 16 aa, Homo sapiens
  CDR3 for alpha chain variable domain of TCR clone 239448 (TRAV3, TRAJ3)
CAVRDRAKSSASQIIF

SEQ ID NO: 478896 - protein, 16 aa, Homo sapiens
  CDR3 for beta chain variable domain of TCR clone 239448 (TRBV20-1, TRBJ2-4)
CSATSLAELAKNIQYF

SEQ ID NO: 478897 - protein, 13 aa, Homo sapiens
  CDR3 for alpha chain variable domain of TCR clone 239449 (TRAV3, TRAJ31)
CAVREGNNARLMF

SEQ ID NO: 478898 - protein, 17 aa, Homo sapiens
  CDR3 for beta chain variable domain of TCR clone 239449 (TRBV7-8, TRBJ2-6)
CASSAGTGGAGANVLTF

SEQ ID NO: 478899 - protein, 16 aa, Homo sapiens
  CDR3 for alpha chain variable domain of TCR clone 239450 (TRAV4, TRAJ22)
CLVGDLYSGSARQLTF

SEQ ID NO: 478900 - protein, 16 aa, Homo sapiens
  CDR3 for beta chain variable domain of TCR clone 239450 (TRBV7-9, TRBJ2-1)
CASSVVAGGSYNEQFF

SEQ ID NO: 478901 - protein, 12 aa, Homo sapiens
  CDR3 for alpha chain variable domain of TCR clone 239451 (TRAV13-1, TRAJ21)
CAAKEGVNKFYF

SEQ ID NO: 478902 - protein, 17 aa, Homo sapiens
  CDR3 for beta chain variable domain of TCR clone 239451 (TRBV7-3, TRBJ2-3)
CASSLMKRMRGADTQYF

SEQ ID NO: 478903 - protein, 14 aa, Homo sapiens
  CDR3 for alpha chain variable domain of TCR clone 239452 (TRAV38-1, TRAJ45)
CAYYSGGGADGLTF

SEQ ID NO: 478904 - protein, 15 aa, Homo sapiens
  CDR3 for beta chain variable domain of TCR clone 239452 (TRBV7-8, TRBJ2-1)
CASSLAGGLYNEQFF

SEQ ID NO: 478905 - protein, 13 aa, Homo sapiens
  CDR3 for alpha chain variable domain of TCR clone 239453 (TRAV35, TRAJ42)
CAGFPGSQGNLIF

SEQ ID NO: 478906 - protein, 12 aa, Homo sapiens
  CDR3 for beta chain variable domain of TCR clone 239453 (TRBV7-9, TRBJ2-1)
VASYPSYNEQFF

SEQ ID NO: 478907 - protein, 16 aa, Homo sapiens
  CDR3 for alpha chain variable domain of TCR clone 239454 (TRAV25, TRAJ24)
CAQRRGTTDSWGKLQC

SEQ ID NO: 478908 - protein, 14 aa, Homo sapiens
  CDR3 for beta chain variable domain of TCR clone 239454 (TRBV6-6, TRBJ1-5)
CASSYGPANQPQHF

SEQ ID NO: 478909 - protein, 15 aa, Homo sapiens
  CDR3 for alpha chain variable domain of TCR clone 239455 (TRAV27, TRAJ38)
CAARRNAGNNRKLTW

SEQ ID NO: 478910 - protein, 13 aa, Homo sapiens
  CDR3 for beta chain variable domain of TCR clone 239455 (TRBV12-5, TRBJ2-3)
CASGDRQSDTQYL

SEQ ID NO: 478911 - protein, 15 aa, Homo sapiens
  CDR3 for alpha chain variable domain of TCR clone 239456 (TRAV3, TRAJ7)
CAVRDKENGNNRLAF

SEQ ID NO: 478912 - protein, 19 aa, Homo sapiens
  CDR3 for beta chain variable domain of TCR clone 239456 (TRBV5-8, TRBJ2-3)
CASSFLGTSGSHRTDTQYF

SEQ ID NO: 478913 - protein, 14 aa, Homo sapiens
  CDR3 for alpha chain variable domain of TCR clone 239457 (TRAV12-1, TRAJ17)
CAVNYKTAGNKLTF

SEQ ID NO: 478914 - protein, 17 aa, Homo sapiens
  CDR3 for beta chain variable domain of TCR clone 239457 (TRBV20-1, TRBJ2-1)
CSASSSGLAGSYNEQFF

SEQ ID NO: 478915 - protein, 12 aa, Homo sapiens
  CDR3 for alpha chain variable domain of TCR clone 239458 (TRAV3, TRAJ39)
CAVIEWSNMLTF

SEQ ID NO: 478916 - protein, 14 aa, Homo sapiens
  CDR3 for beta chain variable domain of TCR clone 239458 (TRBV7-8, TRBJ2-3)
CASSSRDSTDTQYF

SEQ ID NO: 478917 - protein, 13 aa, Homo sapiens
  CDR3 for alpha chain variable domain of TCR clone 239459 (TRAV23/DV6, TRAJ50)
CAASKERRAKVIF

SEQ ID NO: 478918 - protein, 17 aa, Homo sapiens
  CDR3 for beta chain variable domain of TCR clone 239459 (TRBV20-1, TRBJ2-1)
CSAPPRLAGTRYNEQFF

SEQ ID NO: 478919 - protein, 17 aa, Homo sapiens
  CDR3 for alpha chain variable domain of TCR clone 239460 (TRAV13-1, )
CAANIQNPDPAVYQLRD

SEQ ID NO: 478920 - protein, 16 aa, Homo sapiens
  CDR3 for beta chain variable domain of TCR clone 239460 (TRBV4-2, TRBJ2-3)
CASSQGGARGGVKQYF

SEQ ID NO: 478921 - protein, 15 aa, Homo sapiens
  CDR3 for alpha chain variable domain of TCR clone 239461 (TRAV13-1, TRAJ32)
CAASIYGGATNKLIF

SEQ ID NO: 478922 - protein, 17 aa, Homo sapiens
  CDR3 for beta chain variable domain of TCR clone 239461 (TRBV7-3, TRBJ2-5)
CASSLGSGRSGLETQYF

SEQ ID NO: 478923 - protein, 16 aa, Homo sapiens
  CDR3 for alpha chain variable domain of TCR clone 239462 (TRAV3, TRAJ37)
CAVRGKGSGNTGKLIF

SEQ ID NO: 478924 - protein, 16 aa, Homo sapiens
  CDR3 for beta chain variable domain of TCR clone 239462 (TRBV12-4, TRBJ1-5)
CSSSRPVGGSNQPQHF

SEQ ID NO: 478925 - protein, 15 aa, Homo sapiens
  CDR3 for alpha chain variable domain of TCR clone 239463 (TRAV3, TRAJ3)
CAVRDMSSSASKIIF

SEQ ID NO: 478926 - protein, 13 aa, Homo sapiens
  CDR3 for beta chain variable domain of TCR clone 239463 (TRBV4-1, TRBJ2-1)
CASSQAGGDEQFF

SEQ ID NO: 478927 - protein, 14 aa, Homo sapiens
  CDR3 for alpha chain variable domain of TCR clone 239464 (TRAV26-2, TRAJ32)
CILFRGGATNKLIF

SEQ ID NO: 478928 - protein, 11 aa, Homo sapiens
  CDR3 for beta chain variable domain of TCR clone 239464 (TRBV20-1, TRBJ2-5)
CSADRAETQYF

SEQ ID NO: 478929 - protein, 10 aa, Homo sapiens
  CDR3 for alpha chain variable domain of TCR clone 239465 (TRAV12-2, TRAJ27)
CGANAGKSTF

SEQ ID NO: 478930 - protein, 15 aa, Homo sapiens
  CDR3 for beta chain variable domain of TCR clone 239465 (TRBV20-1, TRBJ2-7)
CSARDRVSGMDEQYF

SEQ ID NO: 478931 - protein, 14 aa, Homo sapiens
  CDR3 for alpha chain variable domain of TCR clone 239466 (TRAV8-1, TRAJ4)
CAVPFSGGYNKLIF

SEQ ID NO: 478932 - protein, 16 aa, Homo sapiens
  CDR3 for beta chain variable domain of TCR clone 239466 (TRBV6-1, TRBJ1-2)
CASSGAWQGRSNGYTF

SEQ ID NO: 478933 - protein, 16 aa, Homo sapiens
  CDR3 for alpha chain variable domain of TCR clone 239467 (TRAV16, TRAJ4)
CALSRMFSGGYNKLIF

SEQ ID NO: 478934 - protein, 18 aa, Homo sapiens
  CDR3 for beta chain variable domain of TCR clone 239467 (TRBV2, TRBJ2-1)
CASRGLAGGPRTYNEQFF

SEQ ID NO: 478935 - protein, 13 aa, Homo sapiens
  CDR3 for alpha chain variable domain of TCR clone 239468 (TRAV17, TRAJ7)
CATDNYGNNRLAF

SEQ ID NO: 478936 - protein, 16 aa, Homo sapiens
  CDR3 for beta chain variable domain of TCR clone 239468 (TRBV4-1, TRBJ2-5)
CASSQAIASSSATQYF

SEQ ID NO: 478937 - protein, 12 aa, Homo sapiens
  CDR3 for alpha chain variable domain of TCR clone 239469 (TRAV8-6, TRAJ43)
CAVSHNNNDMRF

SEQ ID NO: 478938 - protein, 15 aa, Homo sapiens
  CDR3 for beta chain variable domain of TCR clone 239469 (TRBV7-3, TRBJ2-6)
CASSLGGSGANVLTF

SEQ ID NO: 478939 - protein, 11 aa, Homo sapiens
  CDR3 for alpha chain variable domain of TCR clone 239470 (TRAV1-2, TRAJ31)
CAVSNNARLMF

SEQ ID NO: 478940 - protein, 15 aa, Homo sapiens
  CDR3 for beta chain variable domain of TCR clone 239470 (TRBV28, TRBJ2-1)
CASGIIAGGRSEQFF

SEQ ID NO: 478941 - protein, 13 aa, Homo sapiens
  CDR3 for alpha chain variable domain of TCR clone 239471 (TRAV27, TRAJ29)
CAGAHSGNTPLVF

SEQ ID NO: 478942 - protein, 16 aa, Homo sapiens
  CDR3 for beta chain variable domain of TCR clone 239471 (TRBV5-1, TRBJ2-2)
CSSSLWDTTNTGELFF

SEQ ID NO: 478943 - protein, 13 aa, Homo sapiens
  CDR3 for alpha chain variable domain of TCR clone 239472 (TRAV21, TRAJ57)
CAVTQGGSEKLVF

SEQ ID NO: 478944 - protein, 14 aa, Homo sapiens
  CDR3 for beta chain variable domain of TCR clone 239472 (TRBV25-1, TRBJ1-4)
CASSGGGQPEKLFF

SEQ ID NO: 478945 - protein, 13 aa, Homo sapiens
  CDR3 for alpha chain variable domain of TCR clone 239473 (TRAV16, TRAJ54)
CALMVRGAQKLVF

SEQ ID NO: 478946 - protein, 12 aa, Homo sapiens
  CDR3 for beta chain variable domain of TCR clone 239473 (TRBV18, TRBJ2-7)
CASSTAMGEQYF

SEQ ID NO: 478947 - protein, 15 aa, Homo sapiens
  CDR3 for alpha chain variable domain of TCR clone 239474 (TRAV12-1, TRAJ44)
CVVFVNTGTASKLTL

SEQ ID NO: 478948 - protein, 17 aa, Homo sapiens
  CDR3 for beta chain variable domain of TCR clone 239474 (TRBV7-8, TRBJ2-6)
CASSAGTGGAGANDLTF

SEQ ID NO: 478949 - protein, 17 aa, Homo sapiens
  CDR3 for alpha chain variable domain of TCR clone 239475 (TRAV26-1, TRAJ58)
CIVRVGAEETSCSRLTF

SEQ ID NO: 478950 - protein, 13 aa, Homo sapiens
  CDR3 for beta chain variable domain of TCR clone 239475 (TRBV12-5, TRBJ1-2)
CASGVRTGNGYTF

SEQ ID NO: 478951 - protein, 13 aa, Homo sapiens
  CDR3 for alpha chain variable domain of TCR clone 239476 (TRAV2, TRAJ40)
CAVVTSGTYKYIF

SEQ ID NO: 478952 - protein, 16 aa, Homo sapiens
  CDR3 for beta chain variable domain of TCR clone 239476 (TRBV29-1, TRBJ2-6)
CSVGDITYSGANVLTF

SEQ ID NO: 478953 - protein, 15 aa, Homo sapiens
  CDR3 for alpha chain variable domain of TCR clone 239477 (TRAV27, TRAJ17)
CRSTMIKAAGNKLTF

SEQ ID NO: 478954 - protein, 13 aa, Homo sapiens
  CDR3 for beta chain variable domain of TCR clone 239477 (TRBV18, TRBJ2-7)
CASQSGGGYEQYL

SEQ ID NO: 478955 - protein, 13 aa, Homo sapiens
  CDR3 for alpha chain variable domain of TCR clone 239478 (TRAV4, TRAJ20)
CLVGSSNDYKLSF

SEQ ID NO: 478956 - protein, 15 aa, Homo sapiens
  CDR3 for beta chain variable domain of TCR clone 239478 (TRBV27, TRBJ1-5)
CASSLGTGFDQPQHF

SEQ ID NO: 478957 - protein, 12 aa, Homo sapiens
  CDR3 for alpha chain variable domain of TCR clone 239479 (TRAV12-3, TRAJ17)
CAMTLTGNELTF

SEQ ID NO: 478958 - protein, 15 aa, Homo sapiens
  CDR3 for beta chain variable domain of TCR clone 239479 (TRBV20-1, TRBJ2-7)
CSARDRVSGMDEQDF

SEQ ID NO: 478959 - protein, 16 aa, Homo sapiens
  CDR3 for alpha chain variable domain of TCR clone 239480 (TRAV30, TRAJ24)
CGSEIVDADSWGKFQF

SEQ ID NO: 478960 - protein, 17 aa, Homo sapiens
  CDR3 for beta chain variable domain of TCR clone 239480 (TRBV7-8, TRBJ2-6)
CASSAGTGGAGANVLTF

SEQ ID NO: 478961 - protein, 14 aa, Homo sapiens
  CDR3 for alpha chain variable domain of TCR clone 239481 (TRAV8-1, TRAJ39)
CAVNASNAGNMLTF

SEQ ID NO: 478962 - protein, 16 aa, Homo sapiens
  CDR3 for beta chain variable domain of TCR clone 239481 (TRBV12-5, TRBJ2-5)
CASGPRTSGNQETQYF

SEQ ID NO: 478963 - protein, 14 aa, Homo sapiens
  CDR3 for alpha chain variable domain of TCR clone 239482 (TRAV13-1, TRAJ9)
CAASALTGGFETIF

SEQ ID NO: 478964 - protein, 16 aa, Homo sapiens
  CDR3 for beta chain variable domain of TCR clone 239482 (TRBV12-4, TRBJ2-3)
CASSFGTGGISDTQYF

SEQ ID NO: 478965 - protein, 13 aa, Homo sapiens
  CDR3 for alpha chain variable domain of TCR clone 239483 (TRAV3, TRAJ29)
CAVRDIIDTPLVF

SEQ ID NO: 478966 - protein, 13 aa, Homo sapiens
  CDR3 for beta chain variable domain of TCR clone 239483 (TRBV7-9, TRBJ1-2)
CASSLKQNYGYTF

SEQ ID NO: 478967 - protein, 13 aa, Homo sapiens
  CDR3 for alpha chain variable domain of TCR clone 239484 (TRAV8-3, TRAJ43)
CAVGPDNNNDMRF

SEQ ID NO: 478968 - protein, 18 aa, Homo sapiens
  CDR3 for beta chain variable domain of TCR clone 239484 (TRBV7-2, TRBJ2-3)
CASSLGGASRGAPNTQYF

SEQ ID NO: 478969 - protein, 12 aa, Homo sapiens
  CDR3 for alpha chain variable domain of TCR clone 239485 (TRAV12-3, TRAJ17)
FAMTLTGNKLTF

SEQ ID NO: 478970 - protein, 15 aa, Homo sapiens
  CDR3 for beta chain variable domain of TCR clone 239485 (TRBV20-1, TRBJ2-7)
CSARERVSGMDEQYF

SEQ ID NO: 478971 - protein, 11 aa, Homo sapiens
  CDR3 for alpha chain variable domain of TCR clone 239486 (TRAV1-2, TRAJ20)
CAVSNDYKLSF

SEQ ID NO: 478972 - protein, 12 aa, Homo sapiens
  CDR3 for beta chain variable domain of TCR clone 239486 (TRBV12-4, TRBJ2-7)
CASSLGGYEQYF

SEQ ID NO: 478973 - protein, 13 aa, Homo sapiens
  CDR3 for alpha chain variable domain of TCR clone 239487 (TRAV17, TRAJ40)
CATDEGGTYKYIF

SEQ ID NO: 478974 - protein, 12 aa, Homo sapiens
  CDR3 for beta chain variable domain of TCR clone 239487 (TRBV7-8, TRBJ2-7)
CASSLGDREQYF

SEQ ID NO: 478975 - protein, 12 aa, Homo sapiens
  CDR3 for alpha chain variable domain of TCR clone 239488 (TRAV9-2, TRAJ5)
CALSPGRRALTF

SEQ ID NO: 478976 - protein, 14 aa, Homo sapiens
  CDR3 for beta chain variable domain of TCR clone 239488 (TRBV4-1, TRBJ2-5)
CASSRSGSGETQYF

SEQ ID NO: 478977 - protein, 14 aa, Homo sapiens
  CDR3 for alpha chain variable domain of TCR clone 239489 (TRAV17, TRAJ53)
CVTDAGGSNYKLTI

SEQ ID NO: 478978 - protein, 16 aa, Homo sapiens
  CDR3 for beta chain variable domain of TCR clone 239489 (TRBV4-1, TRBJ1-1)
CASSQDAGMGNTEAFF

SEQ ID NO: 478979 - protein, 17 aa, Homo sapiens
  CDR3 for alpha chain variable domain of TCR clone 239490 (TRAV3, TRAJ42)
CAVRDRDYGGSQGNLIF

SEQ ID NO: 478980 - protein, 15 aa, Homo sapiens
  CDR3 for beta chain variable domain of TCR clone 239490 (TRBV11-2, TRBJ2-1)
CASSLGTSGLNEQFF

SEQ ID NO: 478981 - protein, 15 aa, Homo sapiens
  CDR3 for alpha chain variable domain of TCR clone 239491 (TRAV8-1, TRAJ6)
CAVNTPPRRKLHTYI

SEQ ID NO: 478982 - protein, 15 aa, Homo sapiens
  CDR3 for beta chain variable domain of TCR clone 239491 (TRBV11-2, TRBJ2-2)
CASSSDRVNAGELFF

SEQ ID NO: 478983 - protein, 12 aa, Homo sapiens
  CDR3 for alpha chain variable domain of TCR clone 239492 (TRAV16, TRAJ10)
CSRTGGGNKLTF

SEQ ID NO: 478984 - protein, 17 aa, Homo sapiens
  CDR3 for beta chain variable domain of TCR clone 239492 (TRBV19, TRBJ2-7)
CASSISFYDSYPYEQYF

SEQ ID NO: 478985 - protein, 14 aa, Homo sapiens
  CDR3 for alpha chain variable domain of TCR clone 239493 (TRAV26-1, TRAJ38)
CIAANAGNNRQLIW

SEQ ID NO: 478986 - protein, 13 aa, Homo sapiens
  CDR3 for beta chain variable domain of TCR clone 239493 (TRBV20-1, TRBJ1-1)
CSARGGGNTEAFF

SEQ ID NO: 478987 - protein, 10 aa, Homo sapiens
  CDR3 for alpha chain variable domain of TCR clone 239494 (TRAV13-2, TRAJ20)
SARRDYKLSF

SEQ ID NO: 478988 - protein, 15 aa, Homo sapiens
  CDR3 for beta chain variable domain of TCR clone 239494 (TRBV6-6, TRBJ2-7)
CASSYSIRGVYEQYF

SEQ ID NO: 478989 - protein, 21 aa, Homo sapiens
  CDR3 for alpha chain variable domain of TCR clone 239495 (TRAV17, TRAJ57)
TASRAADTASYFRANPEKRVF

SEQ ID NO: 478990 - protein, 16 aa, Homo sapiens
  CDR3 for beta chain variable domain of TCR clone 239495 (TRBV11-2, TRBJ2-3)
CASSFQGRGALDTQYF

SEQ ID NO: 478991 - protein, 13 aa, Homo sapiens
  CDR3 for alpha chain variable domain of TCR clone 239496 (TRAV13-1, TRAJ21)
CAASIYNFNKFYF

SEQ ID NO: 478992 - protein, 15 aa, Homo sapiens
  CDR3 for beta chain variable domain of TCR clone 239496 (TRBV27, TRBJ2-1)
CASSNGGGSSNEQFF

SEQ ID NO: 478993 - protein, 15 aa, Homo sapiens
  CDR3 for alpha chain variable domain of TCR clone 239497 (TRAV17, TRAJ16)
CATALRFSDGRKLPF

SEQ ID NO: 478994 - protein, 15 aa, Homo sapiens
  CDR3 for beta chain variable domain of TCR clone 239497 (TRBV20-1, TRBJ1-1)
CSASRGVTGNTEAFF

SEQ ID NO: 478995 - protein, 15 aa, Homo sapiens
  CDR3 for alpha chain variable domain of TCR clone 239498 (TRAV17, TRAJ40)
CATVSSTSGTYKYIF

SEQ ID NO: 478996 - protein, 15 aa, Homo sapiens
  CDR3 for beta chain variable domain of TCR clone 239498 (TRBV7-2, TRBJ2-7)
CASSTPGLTRGEQYF

SEQ ID NO: 478997 - protein, 16 aa, Homo sapiens
  CDR3 for alpha chain variable domain of TCR clone 239499 (TRAV16, TRAJ52)
RALSGVGGTSYGKLTF

SEQ ID NO: 478998 - protein, 14 aa, Homo sapiens
  CDR3 for beta chain variable domain of TCR clone 239499 (TRBV19, TRBJ1-2)
CASSLQGQAYGYTF

SEQ ID NO: 478999 - protein, 16 aa, Homo sapiens
  CDR3 for alpha chain variable domain of TCR clone 239500 (TRAV12-2, TRAJ37)
CAVKEKGSSNTGELIF

SEQ ID NO: 479000 - protein, 12 aa, Homo sapiens
  CDR3 for beta chain variable domain of TCR clone 239500 (TRBV10-1, TRBJ1-5)
CASSDSNQPQHF

SEQ ID NO: 479001 - protein, 13 aa, Homo sapiens
  CDR3 for alpha chain variable domain of TCR clone 239501 (TRAV25, TRAJ30)
CAGRVYRDDKIIF

SEQ ID NO: 479002 - protein, 17 aa, Homo sapiens
  CDR3 for beta chain variable domain of TCR clone 239501 (TRBV7-9, TRBJ2-6)
CASSFGAGYSGANVLTF

SEQ ID NO: 479003 - protein, 15 aa, Homo sapiens
  CDR3 for alpha chain variable domain of TCR clone 239502 (TRAV8-3, TRAJ27)
CAVGPSKTNAGKSTF

SEQ ID NO: 479004 - protein, 12 aa, Homo sapiens
  CDR3 for beta chain variable domain of TCR clone 239502 (TRBV28, TRBJ2-3)
CASRLYRDTQYF

SEQ ID NO: 479005 - protein, 15 aa, Homo sapiens
  CDR3 for alpha chain variable domain of TCR clone 239503 (TRAV9-2, TRAJ49)
CALSPPDHTVNQFYF

SEQ ID NO: 479006 - protein, 14 aa, Homo sapiens
  CDR3 for beta chain variable domain of TCR clone 239503 (TRBV12-4, TRBJ1-1)
CASSLGTGGTEAFF

SEQ ID NO: 479007 - protein, 12 aa, Homo sapiens
  CDR3 for alpha chain variable domain of TCR clone 239504 (TRAV13-1, TRAJ21)
CAAKEGFNKFYF

SEQ ID NO: 479008 - protein, 20 aa, Homo sapiens
  CDR3 for beta chain variable domain of TCR clone 239504 (TRBV19, TRBJ2-1)
CASSISRTVTSTRLNNEQFL

SEQ ID NO: 479009 - protein, 16 aa, Homo sapiens
  CDR3 for alpha chain variable domain of TCR clone 239505 (TRAV23/DV6, TRAJ48)
CAASGVVTFGNEKLTF

SEQ ID NO: 479010 - protein, 15 aa, Homo sapiens
  CDR3 for beta chain variable domain of TCR clone 239505 (TRBV20-1, TRBJ2-5)
CSAGLAGVSQETQYF

SEQ ID NO: 479011 - protein, 13 aa, Homo sapiens
  CDR3 for alpha chain variable domain of TCR clone 239506 (TRAV21, TRAJ27)
CAARPGNAGKSTF

SEQ ID NO: 479012 - protein, 14 aa, Homo sapiens
  CDR3 for beta chain variable domain of TCR clone 239506 (TRBV20-1, TRBJ2-1)
CSAQIGGSANEQFF

SEQ ID NO: 479013 - protein, 10 aa, Homo sapiens
  CDR3 for alpha chain variable domain of TCR clone 239507 (TRAV21, TRAJ49)
CAVTRNQFYF

SEQ ID NO: 479014 - protein, 12 aa, Homo sapiens
  CDR3 for beta chain variable domain of TCR clone 239507 (TRBV20-1, TRBJ2-7)
CSASPQGYEQYF

SEQ ID NO: 479015 - protein, 13 aa, Homo sapiens
  CDR3 for alpha chain variable domain of TCR clone 239508 (TRAV2, TRAJ15)
YAVASQAGTALIF

SEQ ID NO: 479016 - protein, 16 aa, Homo sapiens
  CDR3 for beta chain variable domain of TCR clone 239508 (TRBV20-1, TRBJ1-4)
CSAPGQGLLTNEKLFF

SEQ ID NO: 479017 - protein, 13 aa, Homo sapiens
  CDR3 for alpha chain variable domain of TCR clone 239509 (TRAV5, TRAJ30)
CAESPNRDDKIIF

SEQ ID NO: 479018 - protein, 15 aa, Homo sapiens
  CDR3 for beta chain variable domain of TCR clone 239509 (TRBV4-1, TRBJ2-7)
CASSQQGQGFDEQYF

SEQ ID NO: 479019 - protein, 13 aa, Homo sapiens
  CDR3 for alpha chain variable domain of TCR clone 239510 (TRAV13-1, TRAJ11)
CAAVLAGYRTLTF

SEQ ID NO: 479020 - protein, 17 aa, Homo sapiens
  CDR3 for beta chain variable domain of TCR clone 239510 (TRBV25-1, TRBJ2-7)
CASSDARVVFSSYERYF

SEQ ID NO: 479021 - protein, 16 aa, Homo sapiens
  CDR3 for alpha chain variable domain of TCR clone 239511 (TRAV12-3, TRAJ53)
CAMSPGSGGSNYKLTF

SEQ ID NO: 479022 - protein, 15 aa, Homo sapiens
  CDR3 for beta chain variable domain of TCR clone 239511 (TRBV7-9, TRBJ2-7)
CASSLPMGQANGQYF

SEQ ID NO: 479023 - protein, 13 aa, Homo sapiens
  CDR3 for alpha chain variable domain of TCR clone 239512 (TRAV3, TRAJ27)
CAVRPLVAGKSTV

SEQ ID NO: 479024 - protein, 13 aa, Homo sapiens
  CDR3 for beta chain variable domain of TCR clone 239512 (TRBV7-9, TRBJ2-3)
CASSPGSTDTQYF

SEQ ID NO: 479025 - protein, 14 aa, Homo sapiens
  CDR3 for alpha chain variable domain of TCR clone 239513 (TRAV12-1, TRAJ37)
CVVNRRSNTGKLIF

SEQ ID NO: 479026 - protein, 14 aa, Homo sapiens
  CDR3 for beta chain variable domain of TCR clone 239513 (TRBV5-7, TRBJ2-7)
CASSSGQVTYEQYF

SEQ ID NO: 479027 - protein, 10 aa, Homo sapiens
  CDR3 for alpha chain variable domain of TCR clone 239514 (TRAV38-2/DV8, TRAJ40)
CASGTYKYIF

SEQ ID NO: 479028 - protein, 16 aa, Homo sapiens
  CDR3 for beta chain variable domain of TCR clone 239514 (TRBV10-3, TRBJ2-1)
CAISGVGDGGGGEQFF

SEQ ID NO: 479029 - protein, 16 aa, Homo sapiens
  CDR3 for alpha chain variable domain of TCR clone 239515 (TRAV30, TRAJ24)
CCTEIVDADSWGKFQF

SEQ ID NO: 479030 - protein, 13 aa, Homo sapiens
  CDR3 for beta chain variable domain of TCR clone 239515 (TRBV18, TRBJ1-2)
CASSASATEGYTF

SEQ ID NO: 479031 - protein, 15 aa, Homo sapiens
  CDR3 for alpha chain variable domain of TCR clone 239516 (TRAV3, TRAJ20)
CAVRDIKLSDYKPSF

SEQ ID NO: 479032 - protein, 13 aa, Homo sapiens
  CDR3 for beta chain variable domain of TCR clone 239516 (TRBV20-1, TRBJ1-1)
CSARVGGNTEAFF

SEQ ID NO: 479033 - protein, 13 aa, Homo sapiens
  CDR3 for alpha chain variable domain of TCR clone 239517 (TRAV3, TRAJ27)
CAVTNTNAGKSTF

SEQ ID NO: 479034 - protein, 13 aa, Homo sapiens
  CDR3 for beta chain variable domain of TCR clone 239517 (TRBV19, TRBJ2-7)
CASQSYGDGEQYF

SEQ ID NO: 479035 - protein, 14 aa, Homo sapiens
  CDR3 for alpha chain variable domain of TCR clone 239518 (TRAV2, TRAJ37)
CAVDFTSNTGKLIF

SEQ ID NO: 479036 - protein, 15 aa, Homo sapiens
  CDR3 for beta chain variable domain of TCR clone 239518 (TRBV5-1, TRBJ2-3)
CASSSTSGSTDTQYF

SEQ ID NO: 479037 - protein, 16 aa, Homo sapiens
  CDR3 for alpha chain variable domain of TCR clone 239519 (TRAV12-3, TRAJ53)
CAMSPGSGGSNYKLTF

SEQ ID NO: 479038 - protein, 20 aa, Homo sapiens
  CDR3 for beta chain variable domain of TCR clone 239519 (TRBV7-8, TRBJ2-2)
CASSHLFPGPNIHITGELFF

SEQ ID NO: 479039 - protein, 14 aa, Homo sapiens
  CDR3 for alpha chain variable domain of TCR clone 239520 (TRAV8-3, TRAJ4)
CAVGAAGGYNKLIF

SEQ ID NO: 479040 - protein, 23 aa, Homo sapiens
  CDR3 for beta chain variable domain of TCR clone 239520 (TRBV7-9, TRBJ1-2)
EAQLEKSRLLSDRFSSGEDGYTF

SEQ ID NO: 479041 - protein, 10 aa, Homo sapiens
  CDR3 for alpha chain variable domain of TCR clone 239521 (TRAV12-3, TRAJ49)
CAMNDDQFYF

SEQ ID NO: 479042 - protein, 13 aa, Homo sapiens
  CDR3 for beta chain variable domain of TCR clone 239521 (TRBV19, TRBJ1-2)
CASSVPGKDGYTF

SEQ ID NO: 479043 - protein, 14 aa, Homo sapiens
  CDR3 for alpha chain variable domain of TCR clone 239522 (TRAV8-2, TRAJ13)
CVVSDSGGYQKVTF

SEQ ID NO: 479044 - protein, 14 aa, Homo sapiens
  CDR3 for beta chain variable domain of TCR clone 239522 (TRBV5-5, TRBJ1-4)
CASSPRGYNEKLLF

SEQ ID NO: 479045 - protein, 14 aa, Homo sapiens
  CDR3 for alpha chain variable domain of TCR clone 239523 (TRAV3, TRAJ7)
CAVRQEEREQQTRF

SEQ ID NO: 479046 - protein, 12 aa, Homo sapiens
  CDR3 for beta chain variable domain of TCR clone 239523 (TRBV7-8, TRBJ2-7)
CASSLGDREQYF

SEQ ID NO: 479047 - protein, 16 aa, Homo sapiens
  CDR3 for alpha chain variable domain of TCR clone 239524 (TRAV8-3, TRAJ13)
CAVGAEVSGGYQKVTF

SEQ ID NO: 479048 - protein, 14 aa, Homo sapiens
  CDR3 for beta chain variable domain of TCR clone 239524 (TRBV7-2, TRBJ1-1)
CASSFLTGTTEAFF

SEQ ID NO: 479049 - protein, 15 aa, Homo sapiens
  CDR3 for alpha chain variable domain of TCR clone 239525 (TRAV26-2, TRAJ39)
CSLRGNNNAGNMLTF

SEQ ID NO: 479050 - protein, 13 aa, Homo sapiens
  CDR3 for beta chain variable domain of TCR clone 239525 (TRBV28, TRBJ1-2)
CAGRDRGNYGYTF

SEQ ID NO: 479051 - protein, 14 aa, Homo sapiens
  CDR3 for alpha chain variable domain of TCR clone 239526 (TRAV1-2, TRAJ16)
CAVNRFSDGQKRLF

SEQ ID NO: 479052 - protein, 15 aa, Homo sapiens
  CDR3 for beta chain variable domain of TCR clone 239526 (TRBV2, TRBJ2-1)
CASSEEREGDNEQFF

SEQ ID NO: 479053 - protein, 14 aa, Homo sapiens
  CDR3 for alpha chain variable domain of TCR clone 239527 (TRAV30, TRAJ26)
CGTEIVSYGQNFVF

SEQ ID NO: 479054 - protein, 14 aa, Homo sapiens
  CDR3 for beta chain variable domain of TCR clone 239527 (TRBV7-2, TRBJ1-1)
CASSFLTGTTEAFF

SEQ ID NO: 479055 - protein, 13 aa, Homo sapiens
  CDR3 for alpha chain variable domain of TCR clone 239528 (TRAV13-2, TRAJ21)
CAETSDNFNKFYF

SEQ ID NO: 479056 - protein, 13 aa, Homo sapiens
  CDR3 for beta chain variable domain of TCR clone 239528 (TRBV7-9, TRBJ1-2)
CASSLKQNYGYTF

SEQ ID NO: 479057 - protein, 14 aa, Homo sapiens
  CDR3 for alpha chain variable domain of TCR clone 239529 (TRAV26-1, TRAJ38)
CIADNAGNNRKLIW

SEQ ID NO: 479058 - protein, 16 aa, Homo sapiens
  CDR3 for beta chain variable domain of TCR clone 239529 (TRBV7-9, TRBJ2-2)
CASSGFGGANTGELFF

SEQ ID NO: 479059 - protein, 12 aa, Homo sapiens
  CDR3 for alpha chain variable domain of TCR clone 239530 (TRAV8-6, TRAJ31)
CAVSPNNARLMF

SEQ ID NO: 479060 - protein, 14 aa, Homo sapiens
  CDR3 for beta chain variable domain of TCR clone 239530 (TRBV20-1, TRBJ2-1)
CSAQIGGSANEQFF

SEQ ID NO: 479061 - protein, 12 aa, Homo sapiens
  CDR3 for alpha chain variable domain of TCR clone 239531 (TRAV8-3, TRAJ34)
WASGYNTGKLIF

SEQ ID NO: 479062 - protein, 13 aa, Homo sapiens
  CDR3 for beta chain variable domain of TCR clone 239531 (TRBV6-4, TRBJ2-3)
CASSVSWADTQYF

SEQ ID NO: 479063 - protein, 16 aa, Homo sapiens
  CDR3 for alpha chain variable domain of TCR clone 239532 (TRAV22, TRAJ45)
CAVERGKSGGADGLTF

SEQ ID NO: 479064 - protein, 13 aa, Homo sapiens
  CDR3 for beta chain variable domain of TCR clone 239532 (TRBV27, TRBJ1-1)
CDSSLSIGAEAFF

SEQ ID NO: 479065 - protein, 15 aa, Homo sapiens
  CDR3 for alpha chain variable domain of TCR clone 239533 (TRAV3, TRAJ17)
CAVRDTGAAGNKLTF

SEQ ID NO: 479066 - protein, 15 aa, Homo sapiens
  CDR3 for beta chain variable domain of TCR clone 239533 (TRBV7-9, TRBJ1-1)
CASSLLEQGGTEAFF

SEQ ID NO: 479067 - protein, 15 aa, Homo sapiens
  CDR3 for alpha chain variable domain of TCR clone 239534 (TRAV8-3, TRAJ45)
CALSYSGGGADGLTF

SEQ ID NO: 479068 - protein, 15 aa, Homo sapiens
  CDR3 for beta chain variable domain of TCR clone 239534 (TRBV7-2, TRBJ2-2)
CASRRPGQNTGELFF

SEQ ID NO: 479069 - protein, 13 aa, Homo sapiens
  CDR3 for alpha chain variable domain of TCR clone 239535 (TRAV35, TRAJ36)
CAGPRIWANNLFF

SEQ ID NO: 479070 - protein, 15 aa, Homo sapiens
  CDR3 for beta chain variable domain of TCR clone 239535 (TRBV28, TRBJ2-5)
CASSPPWSYQETQYF

SEQ ID NO: 479071 - protein, 15 aa, Homo sapiens
  CDR3 for alpha chain variable domain of TCR clone 239536 (TRAV14/DV4, TRAJ49)
CAMREGRETGNQFYF

SEQ ID NO: 479072 - protein, 17 aa, Homo sapiens
  CDR3 for beta chain variable domain of TCR clone 239536 (TRBV12-4, TRBJ1-5)
CASSLRGDRGPNQPQHF

SEQ ID NO: 479073 - protein, 13 aa, Homo sapiens
  CDR3 for alpha chain variable domain of TCR clone 239537 (TRAV36/DV7, TRAJ21)
CAGEAYNFNRFYF

SEQ ID NO: 479074 - protein, 14 aa, Homo sapiens
  CDR3 for beta chain variable domain of TCR clone 239537 (TRBV6-1, TRBJ1-1)
CASSGTGLNTEAFF

SEQ ID NO: 479075 - protein, 14 aa, Homo sapiens
  CDR3 for alpha chain variable domain of TCR clone 239538 (TRAV9-2, TRAJ39)
CALYIYNAGNMLTF

SEQ ID NO: 479076 - protein, 17 aa, Homo sapiens
  CDR3 for beta chain variable domain of TCR clone 239538 (TRBV2, TRBJ1-6)
CASSLRSGGLMTSPLHF

SEQ ID NO: 479077 - protein, 14 aa, Homo sapiens
  CDR3 for alpha chain variable domain of TCR clone 239539 (TRAV9-2, TRAJ38)
CALSRAGNNRKLIW

SEQ ID NO: 479078 - protein, 12 aa, Homo sapiens
  CDR3 for beta chain variable domain of TCR clone 239539 (TRBV7-2, TRBJ2-5)
CASSQYEETQYF

SEQ ID NO: 479079 - protein, 13 aa, Homo sapiens
  CDR3 for alpha chain variable domain of TCR clone 239540 (TRAV12-1, TRAJ29)
CVVNSIGNTPLVF

SEQ ID NO: 479080 - protein, 12 aa, Homo sapiens
  CDR3 for beta chain variable domain of TCR clone 239540 (TRBV14, TRBJ2-7)
CASSRLKGEQYF

SEQ ID NO: 479081 - protein, 14 aa, Homo sapiens
  CDR3 for alpha chain variable domain of TCR clone 239541 (TRAV27, TRAJ44)
CAASFTGTASKLTF

SEQ ID NO: 479082 - protein, 13 aa, Homo sapiens
  CDR3 for beta chain variable domain of TCR clone 239541 (TRBV27, TRBJ2-3)
CATSKGGLYTQYF

SEQ ID NO: 479083 - protein, 11 aa, Homo sapiens
  CDR3 for alpha chain variable domain of TCR clone 239542 (TRAV23/DV6, TRAJ58)
CAARLLRGETS

SEQ ID NO: 479084 - protein, 13 aa, Homo sapiens
  CDR3 for beta chain variable domain of TCR clone 239542 (TRBV6-4, TRBJ1-5)
CASSADLNQPQQF

SEQ ID NO: 479085 - protein, 12 aa, Homo sapiens
  CDR3 for alpha chain variable domain of TCR clone 239543 (TRAV4, TRAJ6)
CLAPGGSYIPTF

SEQ ID NO: 479086 - protein, 17 aa, Homo sapiens
  CDR3 for beta chain variable domain of TCR clone 239543 (TRBV13, TRBJ2-3)
CASSRSRVAGGRNTQYF

SEQ ID NO: 479087 - protein, 13 aa, Homo sapiens
  CDR3 for alpha chain variable domain of TCR clone 239544 (TRAV9-2, TRAJ12)
CARGEDSSYKLIF

SEQ ID NO: 479088 - protein, 13 aa, Homo sapiens
  CDR3 for beta chain variable domain of TCR clone 239544 (TRBV7-9, TRBJ1-2)
CASSLKQNYGYTF

SEQ ID NO: 479089 - protein, 15 aa, Homo sapiens
  CDR3 for alpha chain variable domain of TCR clone 239545 (TRAV23/DV6, TRAJ38)
CAARSNAGNNRTLIW

SEQ ID NO: 479090 - protein, 16 aa, Homo sapiens
  CDR3 for beta chain variable domain of TCR clone 239545 (TRBV10-2, TRBJ1-5)
CASSRDRDYSNQPQHF

SEQ ID NO: 479091 - protein, 12 aa, Homo sapiens
  CDR3 for alpha chain variable domain of TCR clone 239546 (TRAV13-2, TRAJ23)
CAERHRGGKLIF

SEQ ID NO: 479092 - protein, 15 aa, Homo sapiens
  CDR3 for beta chain variable domain of TCR clone 239546 (TRBV29-1, TRBJ2-1)
CSVRTSLSSYNEQFF

SEQ ID NO: 479093 - protein, 12 aa, Homo sapiens
  CDR3 for alpha chain variable domain of TCR clone 239547 (TRAV25, TRAJ7)
CAGSYGNNGLAF

SEQ ID NO: 479094 - protein, 12 aa, Homo sapiens
  CDR3 for beta chain variable domain of TCR clone 239547 (TRBV5-1, TRBJ1-2)
CASSQDTYGYTF

SEQ ID NO: 479095 - protein, 16 aa, Homo sapiens
  CDR3 for alpha chain variable domain of TCR clone 239548 (TRAV8-3, TRAJ13)
CAVGAYPSGGYQKVTF

SEQ ID NO: 479096 - protein, 13 aa, Homo sapiens
  CDR3 for beta chain variable domain of TCR clone 239548 (TRBV9, TRBJ2-7)
CASSVAEYYEQYF

SEQ ID NO: 479097 - protein, 11 aa, Homo sapiens
  CDR3 for alpha chain variable domain of TCR clone 239549 (TRAV21, TRAJ34)
CAHYNTDKLIF

SEQ ID NO: 479098 - protein, 14 aa, Homo sapiens
  CDR3 for beta chain variable domain of TCR clone 239549 (TRBV25-1, TRBJ1-1)
CATTHLGGNTEAFF

SEQ ID NO: 479099 - protein, 11 aa, Homo sapiens
  CDR3 for alpha chain variable domain of TCR clone 239550 (TRAV1-2, TRAJ20)
CAVANDYKLSF

SEQ ID NO: 479100 - protein, 18 aa, Homo sapiens
  CDR3 for beta chain variable domain of TCR clone 239550 (TRBV20-1, TRBJ2-6)
CSAATTPSHGSGANVLTF

SEQ ID NO: 479101 - protein, 16 aa, Homo sapiens
  CDR3 for alpha chain variable domain of TCR clone 239551 (TRAV20, TRAJ10)
CAVLRGLTGGGNKLTF

SEQ ID NO: 479102 - protein, 14 aa, Homo sapiens
  CDR3 for beta chain variable domain of TCR clone 239551 (TRBV19, TRBJ1-5)
CASRAPDSFLAQHS

SEQ ID NO: 479103 - protein, 13 aa, Homo sapiens
  CDR3 for alpha chain variable domain of TCR clone 239552 (TRAV8-3, TRAJ36)
CAVGATGANNLFF

SEQ ID NO: 479104 - protein, 13 aa, Homo sapiens
  CDR3 for beta chain variable domain of TCR clone 239552 (TRBV20-1, TRBJ1-1)
CSARGGGNTEAFF

SEQ ID NO: 479105 - protein, 14 aa, Homo sapiens
  CDR3 for alpha chain variable domain of TCR clone 239553 (TRAV1-2, TRAJ16)
CAVNRFSDGQKLLF

SEQ ID NO: 479106 - protein, 15 aa, Homo sapiens
  CDR3 for beta chain variable domain of TCR clone 239553 (TRBV27, TRBJ2-7)
CASSPIVTGAYEQCF

SEQ ID NO: 479107 - protein, 11 aa, Homo sapiens
  CDR3 for alpha chain variable domain of TCR clone 239554 (TRAV12-2, TRAJ29)
FAVTLRSPLVF

SEQ ID NO: 479108 - protein, 15 aa, Homo sapiens
  CDR3 for beta chain variable domain of TCR clone 239554 (TRBV4-1, TRBJ2-5)
CASSQWDLYQETQYF

SEQ ID NO: 479109 - protein, 11 aa, Homo sapiens
  CDR3 for alpha chain variable domain of TCR clone 239555 (TRAV1-1, TRAJ23)
CAVRQGGKLNF

SEQ ID NO: 479110 - protein, 14 aa, Homo sapiens
  CDR3 for beta chain variable domain of TCR clone 239555 (TRBV19, TRBJ2-1)
CANPTFVLSGEQFF

SEQ ID NO: 479111 - protein, 11 aa, Homo sapiens
  CDR3 for alpha chain variable domain of TCR clone 239556 (TRAV12-1, TRAJ30)
CVVNGQDKFIF

SEQ ID NO: 479112 - protein, 12 aa, Homo sapiens
  CDR3 for beta chain variable domain of TCR clone 239556 (TRBV27, TRBJ2-2)
CASKLFTGELFF

SEQ ID NO: 479113 - protein, 15 aa, Homo sapiens
  CDR3 for alpha chain variable domain of TCR clone 239557 (TRAV17, TRAJ23)
CATDAQDNQGGKLIF

SEQ ID NO: 479114 - protein, 12 aa, Homo sapiens
  CDR3 for beta chain variable domain of TCR clone 239557 (TRBV2, TRBJ2-1)
CAKREGYNEQFF

SEQ ID NO: 479115 - protein, 13 aa, Homo sapiens
  CDR3 for alpha chain variable domain of TCR clone 239558 (TRAV20, TRAJ37)
CAGCSSNTGKLIF

SEQ ID NO: 479116 - protein, 14 aa, Homo sapiens
  CDR3 for beta chain variable domain of TCR clone 239558 (TRBV2, TRBJ2-1)
CASRTGSSYNEQFF

SEQ ID NO: 479117 - protein, 16 aa, Homo sapiens
  CDR3 for alpha chain variable domain of TCR clone 239559 (TRAV3, TRAJ37)
CAVRVRGSGNTGKLIF

SEQ ID NO: 479118 - protein, 11 aa, Homo sapiens
  CDR3 for beta chain variable domain of TCR clone 239559 (TRBV11-2, TRBJ2-2)
CASSLPGELFL

SEQ ID NO: 479119 - protein, 13 aa, Homo sapiens
  CDR3 for alpha chain variable domain of TCR clone 239560 (TRAV12-3, TRAJ13)
CAMSSGGYQKVTF

SEQ ID NO: 479120 - protein, 14 aa, Homo sapiens
  CDR3 for beta chain variable domain of TCR clone 239560 (TRBV7-9, TRBJ2-1)
CASSPRDSLYEQFF

SEQ ID NO: 479121 - protein, 14 aa, Homo sapiens
  CDR3 for alpha chain variable domain of TCR clone 239561 (TRAV20, TRAJ56)
CAVQFGGANSKLTF

SEQ ID NO: 479122 - protein, 19 aa, Homo sapiens
  CDR3 for beta chain variable domain of TCR clone 239561 (TRBV4-2, TRBJ2-2)
CASSQESGRNSRRHGELFF

SEQ ID NO: 479123 - protein, 15 aa, Homo sapiens
  CDR3 for alpha chain variable domain of TCR clone 239562 (TRAV8-3, TRAJ37)
CAVVGLSSNTGKLIF

SEQ ID NO: 479124 - protein, 15 aa, Homo sapiens
  CDR3 for beta chain variable domain of TCR clone 239562 (TRBV7-8, TRBJ1-1)
CASSLGSGFDTEAFF

SEQ ID NO: 479125 - protein, 10 aa, Homo sapiens
  CDR3 for alpha chain variable domain of TCR clone 239563 (TRAV12-2, TRAJ49)
CAVRRNQFYF

SEQ ID NO: 479126 - protein, 13 aa, Homo sapiens
  CDR3 for beta chain variable domain of TCR clone 239563 (TRBV4-2, TRBJ2-7)
CASSQAAGYEQYF

SEQ ID NO: 479127 - protein, 19 aa, Homo sapiens
  CDR3 for alpha chain variable domain of TCR clone 239564 (TRAV26-1, TRAJ28)
CIVRVAHAYSGAGRYQLTF

SEQ ID NO: 479128 - protein, 15 aa, Homo sapiens
  CDR3 for beta chain variable domain of TCR clone 239564 (TRBV20-1, TRBJ1-1)
CSASRGVTGNTEAFF

SEQ ID NO: 479129 - protein, 13 aa, Homo sapiens
  CDR3 for alpha chain variable domain of TCR clone 239565 (TRAV25, TRAJ30)
CAGRVDRDDKIIF

SEQ ID NO: 479130 - protein, 14 aa, Homo sapiens
  CDR3 for beta chain variable domain of TCR clone 239565 (TRBV7-9, TRBJ2-2)
CASSLTANTGELFF

SEQ ID NO: 479131 - protein, 16 aa, Homo sapiens
  CDR3 for alpha chain variable domain of TCR clone 239566 (TRAV12-3, TRAJ53)
CAMSPVSGCSNYKLTF

SEQ ID NO: 479132 - protein, 11 aa, Homo sapiens
  CDR3 for beta chain variable domain of TCR clone 239566 (TRBV29-1, TRBJ2-5)
YSEDRTGTQYF

SEQ ID NO: 479133 - protein, 14 aa, Homo sapiens
  CDR3 for alpha chain variable domain of TCR clone 239567 (TRAV3, TRAJ17)
CAVRDAAAGNKLTF

SEQ ID NO: 479134 - protein, 15 aa, Homo sapiens
  CDR3 for beta chain variable domain of TCR clone 239567 (TRBV9, TRBJ1-6)
CASSVAGTGDSALHF

SEQ ID NO: 479135 - protein, 18 aa, Homo sapiens
  CDR3 for alpha chain variable domain of TCR clone 239568 (TRAV26-2, TRAJ45)
CILRVDKCSGGGADGLTF

SEQ ID NO: 479136 - protein, 14 aa, Homo sapiens
  CDR3 for beta chain variable domain of TCR clone 239568 (TRBV7-2, TRBJ2-7)
CASRSQGAAYEQYF

SEQ ID NO: 479137 - protein, 17 aa, Homo sapiens
  CDR3 for alpha chain variable domain of TCR clone 239569 (TRAV36/DV7, TRAJ52)
CAVAQRAGGTSYGKLTF

SEQ ID NO: 479138 - protein, 15 aa, Homo sapiens
  CDR3 for beta chain variable domain of TCR clone 239569 (TRBV10-3, TRBJ2-2)
CAIRTDREDTGELFF

SEQ ID NO: 479139 - protein, 15 aa, Homo sapiens
  CDR3 for alpha chain variable domain of TCR clone 239570 (TRAV3, TRAJ11)
CAVRDKGSGYSTLTF

SEQ ID NO: 479140 - protein, 11 aa, Homo sapiens
  CDR3 for beta chain variable domain of TCR clone 239570 (TRBV29-1, TRBJ2-5)
CSEDRTGTQYF

SEQ ID NO: 479141 - protein, 16 aa, Homo sapiens
  CDR3 for alpha chain variable domain of TCR clone 239571 (TRAV13-1, TRAJ52)
CAAKDAGGTSYGKLTF

SEQ ID NO: 479142 - protein, 15 aa, Homo sapiens
  CDR3 for beta chain variable domain of TCR clone 239571 (TRBV27, TRBJ2-1)
CASSSGGGSSNEQFF

SEQ ID NO: 479143 - protein, 12 aa, Homo sapiens
  CDR3 for alpha chain variable domain of TCR clone 239572 (TRAV13-1, TRAJ21)
CAAKEGFNKFYF

SEQ ID NO: 479144 - protein, 13 aa, Homo sapiens
  CDR3 for beta chain variable domain of TCR clone 239572 (TRBV7-3, TRBJ1-1)
CVSSQDWGAEAFF

SEQ ID NO: 479145 - protein, 12 aa, Homo sapiens
  CDR3 for alpha chain variable domain of TCR clone 239573 (TRAV8-1, TRAJ6)
CASSGGSNIPTF

SEQ ID NO: 479146 - protein, 12 aa, Homo sapiens
  CDR3 for beta chain variable domain of TCR clone 239573 (TRBV19, TRBJ1-1)
CASMNRYTEAFF

SEQ ID NO: 479147 - protein, 15 aa, Homo sapiens
  CDR3 for alpha chain variable domain of TCR clone 239574 (TRAV8-3, TRAJ45)
CASSYSGGGADGLTF

SEQ ID NO: 479148 - protein, 14 aa, Homo sapiens
  CDR3 for beta chain variable domain of TCR clone 239574 (TRBV10-3, TRBJ2-1)
CAISSDLAYNEQFF

SEQ ID NO: 479149 - protein, 12 aa, Homo sapiens
  CDR3 for alpha chain variable domain of TCR clone 239575 (TRAV8-4, TRAJ33)
WAVSDSNYQVIW

SEQ ID NO: 479150 - protein, 13 aa, Homo sapiens
  CDR3 for beta chain variable domain of TCR clone 239575 (TRBV7-8, TRBJ1-5)
CASSLGGDQPQHF

SEQ ID NO: 479151 - protein, 12 aa, Homo sapiens
  CDR3 for alpha chain variable domain of TCR clone 239576 (TRAV12-2, TRAJ47)
CAVAEYGNKLVF

SEQ ID NO: 479152 - protein, 16 aa, Homo sapiens
  CDR3 for beta chain variable domain of TCR clone 239576 (TRBV7-3, TRBJ2-3)
CASSPTGYQSTDTQYF

SEQ ID NO: 479153 - protein, 16 aa, Homo sapiens
  CDR3 for alpha chain variable domain of TCR clone 239577 (TRAV20, TRAJ52)
CAVLPDGGTSYGKLTF

SEQ ID NO: 479154 - protein, 12 aa, Homo sapiens
  CDR3 for beta chain variable domain of TCR clone 239577 (TRBV19, TRBJ2-1)
CPSSQISNEQFF

SEQ ID NO: 479155 - protein, 10 aa, Homo sapiens
  CDR3 for alpha chain variable domain of TCR clone 239578 (TRAV12-3, TRAJ18)
CAMSAEAQPW

SEQ ID NO: 479156 - protein, 14 aa, Homo sapiens
  CDR3 for beta chain variable domain of TCR clone 239578 (TRBV5-1, TRBJ2-7)
CASSRGESLYEQYF

SEQ ID NO: 479157 - protein, 14 aa, Homo sapiens
  CDR3 for alpha chain variable domain of TCR clone 239579 (TRAV26-1, TRAJ21)
CIAHTTSTNFTLDL

SEQ ID NO: 479158 - protein, 15 aa, Homo sapiens
  CDR3 for beta chain variable domain of TCR clone 239579 (TRBV20-1, TRBJ2-7)
CSARDRVSGMDEHYF

SEQ ID NO: 479159 - protein, 11 aa, Homo sapiens
  CDR3 for alpha chain variable domain of TCR clone 239580 (TRAV2, TRAJ13)
CASGGYQQVTF

SEQ ID NO: 479160 - protein, 15 aa, Homo sapiens
  CDR3 for beta chain variable domain of TCR clone 239580 (TRBV11-1, TRBJ2-7)
CASSLNYGASYEQYF

SEQ ID NO: 479161 - protein, 15 aa, Homo sapiens
  CDR3 for alpha chain variable domain of TCR clone 239581 (TRAV3, TRAJ33)
CAVRDFMDSNYQLIW

SEQ ID NO: 479162 - protein, 14 aa, Homo sapiens
  CDR3 for beta chain variable domain of TCR clone 239581 (TRBV19, TRBJ2-7)
CASSPRTGDYEQYF

SEQ ID NO: 479163 - protein, 13 aa, Homo sapiens
  CDR3 for alpha chain variable domain of TCR clone 239582 (TRAV23/DV6, TRAJ34)
CAAIENNTDKLIF

SEQ ID NO: 479164 - protein, 13 aa, Homo sapiens
  CDR3 for beta chain variable domain of TCR clone 239582 (TRBV29-1, TRBJ2-7)
CSVGPSGGYEEYF

SEQ ID NO: 479165 - protein, 11 aa, Homo sapiens
  CDR3 for alpha chain variable domain of TCR clone 239583 (TRAV21, TRAJ34)
CAHYNTDKLTF

SEQ ID NO: 479166 - protein, 13 aa, Homo sapiens
  CDR3 for beta chain variable domain of TCR clone 239583 (TRBV10-3, TRBJ2-7)
CASKLAVNYEQYF

SEQ ID NO: 479167 - protein, 14 aa, Homo sapiens
  CDR3 for alpha chain variable domain of TCR clone 239584 (TRAV26-1, TRAJ45)
CIEVTGGGADGLTF

SEQ ID NO: 479168 - protein, 14 aa, Homo sapiens
  CDR3 for beta chain variable domain of TCR clone 239584 (TRBV7-2, TRBJ1-6)
CASSLQGANSPLHF

SEQ ID NO: 479169 - protein, 13 aa, Homo sapiens
  CDR3 for alpha chain variable domain of TCR clone 239585 (TRAV12-2, TRAJ39)
CAVNNNAGNMITF

SEQ ID NO: 479170 - protein, 13 aa, Homo sapiens
  CDR3 for beta chain variable domain of TCR clone 239585 (TRBV2, TRBJ1-5)
CATAGPGNQPQHF

SEQ ID NO: 479171 - protein, 15 aa, Homo sapiens
  CDR3 for alpha chain variable domain of TCR clone 239586 (TRAV12-3, TRAJ6)
CAMSATTGGSYIPTF

SEQ ID NO: 479172 - protein, 14 aa, Homo sapiens
  CDR3 for beta chain variable domain of TCR clone 239586 (TRBV20-1, TRBJ2-1)
CSAQIGGSANEQFF

SEQ ID NO: 479173 - protein, 13 aa, Homo sapiens
  CDR3 for alpha chain variable domain of TCR clone 239587 (TRAV36/DV7, TRAJ53)
CALSGGSNYKLTF

SEQ ID NO: 479174 - protein, 14 aa, Homo sapiens
  CDR3 for beta chain variable domain of TCR clone 239587 (TRBV19, TRBJ2-1)
CASPTFVLSGEQFF

SEQ ID NO: 479175 - protein, 11 aa, Homo sapiens
  CDR3 for alpha chain variable domain of TCR clone 239588 (TRAV27, TRAJ47)
SIVEYGTKLVF

SEQ ID NO: 479176 - protein, 18 aa, Homo sapiens
  CDR3 for beta chain variable domain of TCR clone 239588 (TRBV2, TRBJ2-1)
CASRGLAGGPRTYNKQFF

SEQ ID NO: 479177 - protein, 14 aa, Homo sapiens
  CDR3 for alpha chain variable domain of TCR clone 239589 (TRAV12-3, TRAJ10)
SHLPLTGGGNKLTF

SEQ ID NO: 479178 - protein, 13 aa, Homo sapiens
  CDR3 for beta chain variable domain of TCR clone 239589 (TRBV6-1, TRBJ2-2)
CANSGHNTGELFF

SEQ ID NO: 479179 - protein, 18 aa, Homo sapiens
  CDR3 for alpha chain variable domain of TCR clone 239590 (TRAV26-2, TRAJ45)
CILRVDQYSGGGADGLTF

SEQ ID NO: 479180 - protein, 16 aa, Homo sapiens
  CDR3 for beta chain variable domain of TCR clone 239590 (TRBV2, TRBJ1-4)
CASNLLQGATNEKLFF

SEQ ID NO: 479181 - protein, 12 aa, Homo sapiens
  CDR3 for alpha chain variable domain of TCR clone 239591 (TRAV25, TRAJ11)
CAGASGYSTLTF

SEQ ID NO: 479182 - protein, 14 aa, Homo sapiens
  CDR3 for beta chain variable domain of TCR clone 239591 (TRBV5-8, TRBJ2-3)
LASSLGQGTDTQYF

SEQ ID NO: 479183 - protein, 13 aa, Homo sapiens
  CDR3 for alpha chain variable domain of TCR clone 239592 (TRAV20, TRAJ31)
CAVQAWNNARLMF

SEQ ID NO: 479184 - protein, 12 aa, Homo sapiens
  CDR3 for beta chain variable domain of TCR clone 239592 (TRBV12-4, TRBJ2-3)
CASSLGQDTQYF

SEQ ID NO: 479185 - protein, 16 aa, Homo sapiens
  CDR3 for alpha chain variable domain of TCR clone 239593 (TRAV12-2, TRAJ40)
CAVIRGGTSGTYKYIF

SEQ ID NO: 479186 - protein, 15 aa, Homo sapiens
  CDR3 for beta chain variable domain of TCR clone 239593 (TRBV28, TRBJ2-5)
CASSSGRTIQETQYF

SEQ ID NO: 479187 - protein, 14 aa, Homo sapiens
  CDR3 for alpha chain variable domain of TCR clone 239594 (TRAV1-2, TRAJ24)
CAVLTTDSWGKFQF

SEQ ID NO: 479188 - protein, 21 aa, Homo sapiens
  CDR3 for beta chain variable domain of TCR clone 239594 (TRBV6-5, TRBJ1-3)
CASSYWERIAQGMSPGNTIYF

SEQ ID NO: 479189 - protein, 12 aa, Homo sapiens
  CDR3 for alpha chain variable domain of TCR clone 239595 (TRAV12-3, TRAJ4)
YAMTGAGTRLAV

SEQ ID NO: 479190 - protein, 14 aa, Homo sapiens
  CDR3 for beta chain variable domain of TCR clone 239595 (TRBV10-3, TRBJ1-1)
CAISDTDRGVEAFF

SEQ ID NO: 479191 - protein, 10 aa, Homo sapiens
  CDR3 for alpha chain variable domain of TCR clone 239596 (TRAV30, TRAJ48)
CGIGNEKLTC

SEQ ID NO: 479192 - protein, 14 aa, Homo sapiens
  CDR3 for beta chain variable domain of TCR clone 239596 (TRBV7-6, TRBJ2-3)
CASSVAGGTDTQYF

SEQ ID NO: 479193 - protein, 16 aa, Homo sapiens
  CDR3 for alpha chain variable domain of TCR clone 239597 (TRAV23/DV6, TRAJ9)
CEASIGGNTGGFKTIF

SEQ ID NO: 479194 - protein, 18 aa, Homo sapiens
  CDR3 for beta chain variable domain of TCR clone 239597 (TRBV7-9, TRBJ2-7)
CASSLTTSGSRTWYEQYF

SEQ ID NO: 479195 - protein, 16 aa, Homo sapiens
  CDR3 for alpha chain variable domain of TCR clone 239598 (TRAV12-3, TRAJ53)
CAMSPGSGGSNYKLTF

SEQ ID NO: 479196 - protein, 14 aa, Homo sapiens
  CDR3 for beta chain variable domain of TCR clone 239598 (TRBV19, TRBJ1-5)
CASRAPDSFISQHF

SEQ ID NO: 479197 - protein, 12 aa, Homo sapiens
  CDR3 for alpha chain variable domain of TCR clone 239599 (TRAV9-2, TRAJ24)
CAQTDSWGKLQF

SEQ ID NO: 479198 - protein, 13 aa, Homo sapiens
  CDR3 for beta chain variable domain of TCR clone 239599 (TRBV12-4, TRBJ2-1)
CASIFQGYNEQFF

SEQ ID NO: 479199 - protein, 13 aa, Homo sapiens
  CDR3 for alpha chain variable domain of TCR clone 239600 (TRAV27, TRAJ45)
CRSSGGGADGLTF

SEQ ID NO: 479200 - protein, 13 aa, Homo sapiens
  CDR3 for beta chain variable domain of TCR clone 239600 (TRBV7-7, TRBJ2-5)
CASSRSGQETLYF

SEQ ID NO: 479201 - protein, 12 aa, Homo sapiens
  CDR3 for alpha chain variable domain of TCR clone 239601 (TRAV2, TRAJ36)
CAELTGATNLFF

SEQ ID NO: 479202 - protein, 14 aa, Homo sapiens
  CDR3 for beta chain variable domain of TCR clone 239601 (TRBV18, TRBJ2-7)
CASSPRGGAYEQYF

SEQ ID NO: 479203 - protein, 11 aa, Homo sapiens
  CDR3 for alpha chain variable domain of TCR clone 239602 (TRAV23/DV6, TRAJ58)
CAARLLRGETS

SEQ ID NO: 479204 - protein, 14 aa, Homo sapiens
  CDR3 for beta chain variable domain of TCR clone 239602 (TRBV7-9, TRBJ1-4)
CAITEGEANEKLFF

SEQ ID NO: 479205 - protein, 16 aa, Homo sapiens
  CDR3 for alpha chain variable domain of TCR clone 239603 (TRAV12-2, TRAJ45)
CAVNMYSGGVADGLTF

SEQ ID NO: 479206 - protein, 14 aa, Homo sapiens
  CDR3 for beta chain variable domain of TCR clone 239603 (TRBV12-5, TRBJ2-5)
CASGSRTHQETQYF

SEQ ID NO: 479207 - protein, 14 aa, Homo sapiens
  CDR3 for alpha chain variable domain of TCR clone 239604 (TRAV12-2, TRAJ17)
CAALFKAAGNKLTF

SEQ ID NO: 479208 - protein, 16 aa, Homo sapiens
  CDR3 for beta chain variable domain of TCR clone 239604 (TRBV20-1, TRBJ2-2)
CSASASGIPGTGELFF

SEQ ID NO: 479209 - protein, 11 aa, Homo sapiens
  CDR3 for alpha chain variable domain of TCR clone 239605 (TRAV17, TRAJ31)
CATDRTARLMF

SEQ ID NO: 479210 - protein, 16 aa, Homo sapiens
  CDR3 for beta chain variable domain of TCR clone 239605 (TRBV7-3, TRBJ2-2)
CASSLKRGTLSGELFF

SEQ ID NO: 479211 - protein, 13 aa, Homo sapiens
  CDR3 for alpha chain variable domain of TCR clone 239606 (TRAV21, TRAJ57)
CAVTQGGSEKLVF

SEQ ID NO: 479212 - protein, 13 aa, Homo sapiens
  CDR3 for beta chain variable domain of TCR clone 239606 (TRBV7-3, TRBJ1-1)
CASSQDWRAEAFF

SEQ ID NO: 479213 - protein, 13 aa, Homo sapiens
  CDR3 for alpha chain variable domain of TCR clone 239607 (TRAV27, TRAJ29)
CAGAHSGNKPLVF

SEQ ID NO: 479214 - protein, 14 aa, Homo sapiens
  CDR3 for beta chain variable domain of TCR clone 239607 (TRBV7-2, TRBJ2-7)
CASRSQGAAYEQYF

SEQ ID NO: 479215 - protein, 16 aa, Homo sapiens
  CDR3 for alpha chain variable domain of TCR clone 239608 (TRAV30, TRAJ24)
CGTEIVDADSWGNLQF

SEQ ID NO: 479216 - protein, 14 aa, Homo sapiens
  CDR3 for beta chain variable domain of TCR clone 239608 (TRBV12-5, TRBJ2-5)
CASGSRTHQETQYF

SEQ ID NO: 479217 - protein, 11 aa, Homo sapiens
  CDR3 for alpha chain variable domain of TCR clone 239609 (TRAV16, TRAJ33)
CALHSNYQLIW

SEQ ID NO: 479218 - protein, 19 aa, Homo sapiens
  CDR3 for beta chain variable domain of TCR clone 239609 (TRBV18, TRBJ2-1)
CASSPTGGLLAGVYNEQFF

SEQ ID NO: 479219 - protein, 13 aa, Homo sapiens
  CDR3 for alpha chain variable domain of TCR clone 239610 (TRAV8-4, TRAJ48)
CAESLFGNEKLTF

SEQ ID NO: 479220 - protein, 15 aa, Homo sapiens
  CDR3 for beta chain variable domain of TCR clone 239610 (TRBV20-1, TRBJ2-7)
CSARKGLAESYEQYF

SEQ ID NO: 479221 - protein, 11 aa, Homo sapiens
  CDR3 for alpha chain variable domain of TCR clone 239611 (TRAV22, TRAJ22)
CSGGSARQLTF

SEQ ID NO: 479222 - protein, 13 aa, Homo sapiens
  CDR3 for beta chain variable domain of TCR clone 239611 (TRBV15, TRBJ1-6)
CATSGGLNSPLHF

SEQ ID NO: 479223 - protein, 15 aa, Homo sapiens
  CDR3 for alpha chain variable domain of TCR clone 239612 (TRAV38-1, TRAJ57)
CAFMDSQGGSEKLVF

SEQ ID NO: 479224 - protein, 14 aa, Homo sapiens
  CDR3 for beta chain variable domain of TCR clone 239612 (TRBV5-1, TRBJ2-7)
CASSRGESLYEQYF

SEQ ID NO: 479225 - protein, 17 aa, Homo sapiens
  CDR3 for alpha chain variable domain of TCR clone 239613 (TRAV8-6, TRAJ8)
CAVNEGIENTGFQKLVF

SEQ ID NO: 479226 - protein, 12 aa, Homo sapiens
  CDR3 for beta chain variable domain of TCR clone 239613 (TRBV19, TRBJ1-4)
CASKDWPGGLFF

SEQ ID NO: 479227 - protein, 13 aa, Homo sapiens
  CDR3 for alpha chain variable domain of TCR clone 239614 (TRAV21, TRAJ10)
CAAPTGGGNKLTF

SEQ ID NO: 479228 - protein, 22 aa, Homo sapiens
  CDR3 for beta chain variable domain of TCR clone 239614 (TRBV19, TRBJ2-1)
CASSVRDRVTGTSGRIYNEQFF

SEQ ID NO: 479229 - protein, 11 aa, Homo sapiens
  CDR3 for alpha chain variable domain of TCR clone 239615 (TRAV21, TRAJ48)
CAVDGNEKLTF

SEQ ID NO: 479230 - protein, 15 aa, Homo sapiens
  CDR3 for beta chain variable domain of TCR clone 239615 (TRBV19, TRBJ2-3)
CAAGDTNAPNDTQYF

SEQ ID NO: 479231 - protein, 11 aa, Homo sapiens
  CDR3 for alpha chain variable domain of TCR clone 239616 (TRAV6, TRAJ4)
PISGGYNKLIF

SEQ ID NO: 479232 - protein, 15 aa, Homo sapiens
  CDR3 for beta chain variable domain of TCR clone 239616 (TRBV28, TRBJ2-5)
CSSSPPWSYQETQYF

SEQ ID NO: 479233 - protein, 12 aa, Homo sapiens
  CDR3 for alpha chain variable domain of TCR clone 239617 (TRAV12-3, TRAJ17)
CAMALTGNKLTF

SEQ ID NO: 479234 - protein, 15 aa, Homo sapiens
  CDR3 for beta chain variable domain of TCR clone 239617 (TRBV20-1, TRBJ2-7)
CSARDRVSGMVEQYF

SEQ ID NO: 479235 - protein, 16 aa, Homo sapiens
  CDR3 for alpha chain variable domain of TCR clone 239618 (TRAV12-2, TRAJ40)
CAVIRGGTSGTYKYIF

SEQ ID NO: 479236 - protein, 18 aa, Homo sapiens
  CDR3 for beta chain variable domain of TCR clone 239618 (TRBV7-6, TRBJ1-3)
CASSSPIGGDSSGNTMYF

SEQ ID NO: 479237 - protein, 14 aa, Homo sapiens
  CDR3 for alpha chain variable domain of TCR clone 239619 (TRAV9-2, TRAJ39)
CALYIYNAGNMLTF

SEQ ID NO: 479238 - protein, 14 aa, Homo sapiens
  CDR3 for beta chain variable domain of TCR clone 239619 (TRBV6-1, TRBJ1-3)
CASEQGGGGNTIYF

SEQ ID NO: 479239 - protein, 17 aa, Homo sapiens
  CDR3 for alpha chain variable domain of TCR clone 239620 (TRAV4, TRAJ42)
CLVGVLNYGGSQGNPIF

SEQ ID NO: 479240 - protein, 12 aa, Homo sapiens
  CDR3 for beta chain variable domain of TCR clone 239620 (TRBV6-3, TRBJ2-7)
CASSLTPYEQYF

SEQ ID NO: 479241 - protein, 18 aa, Homo sapiens
  CDR3 for alpha chain variable domain of TCR clone 239621 (TRAV1-2, TRAJ10)
CAVRALTPVTGGGNKPTF

SEQ ID NO: 479242 - protein, 14 aa, Homo sapiens
  CDR3 for beta chain variable domain of TCR clone 239621 (TRBV4-1, TRBJ1-1)
CASSQQGNGNEAFF

SEQ ID NO: 479243 - protein, 10 aa, Homo sapiens
  CDR3 for alpha chain variable domain of TCR clone 239622 (TRAV1-2, TRAJ23)
CAGQGGKLIF

SEQ ID NO: 479244 - protein, 15 aa, Homo sapiens
  CDR3 for beta chain variable domain of TCR clone 239622 (TRBV6-1, TRBJ2-6)
CASSSRPSGASVLTF

SEQ ID NO: 479245 - protein, 15 aa, Homo sapiens
  CDR3 for alpha chain variable domain of TCR clone 239623 (TRAV2, TRAJ11)
CAVGGRNSGYSTLTF

SEQ ID NO: 479246 - protein, 13 aa, Homo sapiens
  CDR3 for beta chain variable domain of TCR clone 239623 (TRBV6-4, TRBJ2-1)
CASSASVNNEQFF

SEQ ID NO: 479247 - protein, 15 aa, Homo sapiens
  CDR3 for alpha chain variable domain of TCR clone 239624 (TRAV26-2, TRAJ45)
CILRDRVDQEEVLTD

SEQ ID NO: 479248 - protein, 15 aa, Homo sapiens
  CDR3 for beta chain variable domain of TCR clone 239624 (TRBV7-6, TRBJ2-5)
CASSKPTGPQETKYF

SEQ ID NO: 479249 - protein, 23 aa, Homo sapiens
  CDR3 for alpha chain variable domain of TCR clone 239625 (TRAV12-2, TRAJ36)
SLLIRDSQPSDSATLERANNLFF

SEQ ID NO: 479250 - protein, 15 aa, Homo sapiens
  CDR3 for beta chain variable domain of TCR clone 239625 (TRBV10-3, TRBJ2-3)
CAISLTSGGTDTQYF

SEQ ID NO: 479251 - protein, 18 aa, Homo sapiens
  CDR3 for alpha chain variable domain of TCR clone 239626 (TRAV21, TRAJ52)
CAVRPSPAGGTSYGKLTF

SEQ ID NO: 479252 - protein, 17 aa, Homo sapiens
  CDR3 for beta chain variable domain of TCR clone 239626 (TRBV13, TRBJ2-3)
CASSLSRVAGGRNMQHF

SEQ ID NO: 479253 - protein, 12 aa, Homo sapiens
  CDR3 for alpha chain variable domain of TCR clone 239627 (TRAV3, TRAJ20)
CAVRDGDYKLSF

SEQ ID NO: 479254 - protein, 13 aa, Homo sapiens
  CDR3 for beta chain variable domain of TCR clone 239627 (TRBV15, TRBJ1-6)
CATSGGLNSPLHF

SEQ ID NO: 479255 - protein, 12 aa, Homo sapiens
  CDR3 for alpha chain variable domain of TCR clone 239628 (TRAV12-3, TRAJ17)
CAMTLTGNKLTF

SEQ ID NO: 479256 - protein, 13 aa, Homo sapiens
  CDR3 for beta chain variable domain of TCR clone 239628 (TRBV4-1, TRBJ2-5)
CASSQGHRETQYF

SEQ ID NO: 479257 - protein, 12 aa, Homo sapiens
  CDR3 for alpha chain variable domain of TCR clone 239629 (TRAV12-3, TRAJ17)
CSMTLTGNKLTF

SEQ ID NO: 479258 - protein, 14 aa, Homo sapiens
  CDR3 for beta chain variable domain of TCR clone 239629 (TRBV18, TRBJ2-7)
CASSPRGGAYEQYF

SEQ ID NO: 479259 - protein, 17 aa, Homo sapiens
  CDR3 for alpha chain variable domain of TCR clone 239630 (TRAV3, TRAJ6)
CAVRDGPRAGGSYITTF

SEQ ID NO: 479260 - protein, 15 aa, Homo sapiens
  CDR3 for beta chain variable domain of TCR clone 239630 (TRBV4-1, TRBJ2-7)
CASSQNTGRLYEQYF

SEQ ID NO: 479261 - protein, 10 aa, Homo sapiens
  CDR3 for alpha chain variable domain of TCR clone 239631 (TRAV8-4, TRAJ43)
CAVSADYMRF

SEQ ID NO: 479262 - protein, 16 aa, Homo sapiens
  CDR3 for beta chain variable domain of TCR clone 239631 (TRBV12-5, TRBJ2-5)
CASGPRTSGNQETQYF

SEQ ID NO: 479263 - protein, 11 aa, Homo sapiens
  CDR3 for alpha chain variable domain of TCR clone 239632 (TRAV23/DV6, TRAJ48)
CAPRWGGKLTF

SEQ ID NO: 479264 - protein, 14 aa, Homo sapiens
  CDR3 for beta chain variable domain of TCR clone 239632 (TRBV19, TRBJ2-5)
CASSSSGIQETQYF

SEQ ID NO: 479265 - protein, 12 aa, Homo sapiens
  CDR3 for alpha chain variable domain of TCR clone 239633 (TRAV8-3, TRAJ26)
CAGDNYGQNFVF

SEQ ID NO: 479266 - protein, 14 aa, Homo sapiens
  CDR3 for beta chain variable domain of TCR clone 239633 (TRBV20-1, TRBJ2-5)
CSALVPGYQETQYF

SEQ ID NO: 479267 - protein, 17 aa, Homo sapiens
  CDR3 for alpha chain variable domain of TCR clone 239634 (TRAV8-6, TRAJ58)
CAVSSWVGETSGSRLTF

SEQ ID NO: 479268 - protein, 15 aa, Homo sapiens
  CDR3 for beta chain variable domain of TCR clone 239634 (TRBV27, TRBJ2-1)
CASSNGGGSSNEQFF

SEQ ID NO: 479269 - protein, 14 aa, Homo sapiens
  CDR3 for alpha chain variable domain of TCR clone 239635 (TRAV9-2, TRAJ39)
CALYIYNAGNMLTF

SEQ ID NO: 479270 - protein, 16 aa, Homo sapiens
  CDR3 for beta chain variable domain of TCR clone 239635 (TRBV11-2, TRBJ2-7)
CASSTVTAPKTYEQYF

SEQ ID NO: 479271 - protein, 13 aa, Homo sapiens
  CDR3 for alpha chain variable domain of TCR clone 239636 (TRAV12-1, TRAJ53)
CVVNAESNYKLTF

SEQ ID NO: 479272 - protein, 14 aa, Homo sapiens
  CDR3 for beta chain variable domain of TCR clone 239636 (TRBV11-2, TRBJ2-5)
CASSRTGGIETQYF

SEQ ID NO: 479273 - protein, 14 aa, Homo sapiens
  CDR3 for alpha chain variable domain of TCR clone 239637 (TRAV12-1, TRAJ9)
CVVTGYTGGFKTIF

SEQ ID NO: 479274 - protein, 14 aa, Homo sapiens
  CDR3 for beta chain variable domain of TCR clone 239637 (TRBV7-2, TRBJ2-7)
CASSGLAGRGEQYF

SEQ ID NO: 479275 - protein, 16 aa, Homo sapiens
  CDR3 for alpha chain variable domain of TCR clone 239638 (TRAV3, TRAJ21)
CAVRDIERGNFNKFYF

SEQ ID NO: 479276 - protein, 14 aa, Homo sapiens
  CDR3 for beta chain variable domain of TCR clone 239638 (TRBV7-9, TRBJ2-3)
CASSLEQGTNTQYF

SEQ ID NO: 479277 - protein, 14 aa, Homo sapiens
  CDR3 for alpha chain variable domain of TCR clone 239639 (TRAV12-1, TRAJ43)
CVGNGRSNNNDMRF

SEQ ID NO: 479278 - protein, 13 aa, Homo sapiens
  CDR3 for beta chain variable domain of TCR clone 239639 (TRBV10-3, TRBJ2-7)
CASKLAVNYEQYF

SEQ ID NO: 479279 - protein, 13 aa, Homo sapiens
  CDR3 for alpha chain variable domain of TCR clone 239640 (TRAV12-1, TRAJ22)
CVVYSGSARQLTF

SEQ ID NO: 479280 - protein, 22 aa, Homo sapiens
  CDR3 for beta chain variable domain of TCR clone 239640 (TRBV11-2, TRBJ1-4)
CASSLDITRRGIPRKDNEKLFF

SEQ ID NO: 479281 - protein, 10 aa, Homo sapiens
  CDR3 for alpha chain variable domain of TCR clone 239641 (TRAV26-1, TRAJ40)
CISGTYKYIF

SEQ ID NO: 479282 - protein, 15 aa, Homo sapiens
  CDR3 for beta chain variable domain of TCR clone 239641 (TRBV19, TRBJ2-1)
CASSSPGVPLDEQFF

SEQ ID NO: 479283 - protein, 16 aa, Homo sapiens
  CDR3 for alpha chain variable domain of TCR clone 239642 (TRAV4, TRAJ5)
CLVGPDHGHVQESTYF

SEQ ID NO: 479284 - protein, 15 aa, Homo sapiens
  CDR3 for beta chain variable domain of TCR clone 239642 (TRBV27, TRBJ2-5)
CASSLIPSGGETQYV

SEQ ID NO: 479285 - protein, 12 aa, Homo sapiens
  CDR3 for alpha chain variable domain of TCR clone 239643 (TRAV16, TRAJ26)
CALRIYGQNFVL

SEQ ID NO: 479286 - protein, 14 aa, Homo sapiens
  CDR3 for beta chain variable domain of TCR clone 239643 (TRBV10-3, TRBJ2-1)
CAISSDLAYNEQFS

SEQ ID NO: 479287 - protein, 13 aa, Homo sapiens
  CDR3 for alpha chain variable domain of TCR clone 239644 (TRAV2, TRAJ15)
CAVASQAGTALIF

SEQ ID NO: 479288 - protein, 10 aa, Homo sapiens
  CDR3 for beta chain variable domain of TCR clone 239644 (TRBV12-4, TRBJ1-2)
CASSVIWLHL

SEQ ID NO: 479289 - protein, 14 aa, Homo sapiens
  CDR3 for alpha chain variable domain of TCR clone 239645 (TRAV2, TRAJ29)
CAVDLPSGNTPLVF

SEQ ID NO: 479290 - protein, 13 aa, Homo sapiens
  CDR3 for beta chain variable domain of TCR clone 239645 (TRBV10-3, TRBJ2-7)
CASKLAVNYEQYF

SEQ ID NO: 479291 - protein, 13 aa, Homo sapiens
  CDR3 for alpha chain variable domain of TCR clone 239646 (TRAV1-2, TRAJ17)
CAVGKAAGNKLTF

SEQ ID NO: 479292 - protein, 15 aa, Homo sapiens
  CDR3 for beta chain variable domain of TCR clone 239646 (TRBV7-9, TRBJ2-1)
CASSRTGGDYNEQFF

SEQ ID NO: 479293 - protein, 13 aa, Homo sapiens
  CDR3 for alpha chain variable domain of TCR clone 239647 (TRAV21, TRAJ57)
CAVIEGGSEKLAF

SEQ ID NO: 479294 - protein, 14 aa, Homo sapiens
  CDR3 for beta chain variable domain of TCR clone 239647 (TRBV19, TRBJ2-1)
CASPTFVLSGEQFF

SEQ ID NO: 479295 - protein, 13 aa, Homo sapiens
  CDR3 for alpha chain variable domain of TCR clone 239648 (TRAV1-2, TRAJ9)
CAALNTGGFKTIF

SEQ ID NO: 479296 - protein, 12 aa, Homo sapiens
  CDR3 for beta chain variable domain of TCR clone 239648 (TRBV19, TRBJ1-2)
ASSVPGQDGYTF

SEQ ID NO: 479297 - protein, 17 aa, Homo sapiens
  CDR3 for alpha chain variable domain of TCR clone 239649 (TRAV3, TRAJ28)
CAVREAYSGAGSYQLTF

SEQ ID NO: 479298 - protein, 15 aa, Homo sapiens
  CDR3 for beta chain variable domain of TCR clone 239649 (TRBV19, TRBJ1-1)
CASTSGQIQNTEALF

SEQ ID NO: 479299 - protein, 16 aa, Homo sapiens
  CDR3 for alpha chain variable domain of TCR clone 239650 (TRAV30, TRAJ24)
CGTEIVDADSWWKFQF

SEQ ID NO: 479300 - protein, 14 aa, Homo sapiens
  CDR3 for beta chain variable domain of TCR clone 239650 (TRBV7-2, TRBJ1-2)
CASSQTGSTYGYTF

SEQ ID NO: 479301 - protein, 15 aa, Homo sapiens
  CDR3 for alpha chain variable domain of TCR clone 239651 (TRAV2, TRAJ9)
CAVEDRGTGGFKTIF

SEQ ID NO: 479302 - protein, 16 aa, Homo sapiens
  CDR3 for beta chain variable domain of TCR clone 239651 (TRBV24-1, TRBJ2-3)
CATSDPGTLATDTQYF

SEQ ID NO: 479303 - protein, 11 aa, Homo sapiens
  CDR3 for alpha chain variable domain of TCR clone 239652 (TRAV35, TRAJ34)
CWARNTDKLIF

SEQ ID NO: 479304 - protein, 15 aa, Homo sapiens
  CDR3 for beta chain variable domain of TCR clone 239652 (TRBV7-9, TRBJ1-1)
CASSPELGGGTEAFF

SEQ ID NO: 479305 - protein, 11 aa, Homo sapiens
  CDR3 for alpha chain variable domain of TCR clone 239653 (TRAV12-1, TRAJ34)
CVVNKGRELIF

SEQ ID NO: 479306 - protein, 16 aa, Homo sapiens
  CDR3 for beta chain variable domain of TCR clone 239653 (TRBV5-4, TRBJ2-3)
CASQQPGAGGADQQYF

SEQ ID NO: 479307 - protein, 13 aa, Homo sapiens
  CDR3 for alpha chain variable domain of TCR clone 239654 (TRAV6, TRAJ20)
CALAVSNDYKLSF

SEQ ID NO: 479308 - protein, 16 aa, Homo sapiens
  CDR3 for beta chain variable domain of TCR clone 239654 (TRBV7-9, TRBJ2-1)
CASSDVAVGSYNEQFF

SEQ ID NO: 479309 - protein, 14 aa, Homo sapiens
  CDR3 for alpha chain variable domain of TCR clone 239655 (TRAV16, TRAJ34)
CALPGSYNTDKLIF

SEQ ID NO: 479310 - protein, 15 aa, Homo sapiens
  CDR3 for beta chain variable domain of TCR clone 239655 (TRBV19, TRBJ2-7)
CASSISGRSTYEQYF

SEQ ID NO: 479311 - protein, 16 aa, Homo sapiens
  CDR3 for alpha chain variable domain of TCR clone 239656 (TRAV17, TRAJ35)
CATAEGGRGFGNVLHC

SEQ ID NO: 479312 - protein, 16 aa, Homo sapiens
  CDR3 for beta chain variable domain of TCR clone 239656 (TRBV6-5, TRBJ2-7)
CASSSDPTSGFYEQYF

SEQ ID NO: 479313 - protein, 15 aa, Homo sapiens
  CDR3 for alpha chain variable domain of TCR clone 239657 (TRAV17, TRAJ22)
CATVAPSGSARQLTF

SEQ ID NO: 479314 - protein, 14 aa, Homo sapiens
  CDR3 for beta chain variable domain of TCR clone 239657 (TRBV4-1, TRBJ2-2)
CASSHAVNTGELFF

SEQ ID NO: 479315 - protein, 11 aa, Homo sapiens
  CDR3 for alpha chain variable domain of TCR clone 239658 (TRAV1-1, TRAJ23)
CAVRHGGKLIF

SEQ ID NO: 479316 - protein, 20 aa, Homo sapiens
  CDR3 for beta chain variable domain of TCR clone 239658 (TRBV7-8, TRBJ2-2)
CASSHLFPGPTVHITGELFF

SEQ ID NO: 479317 - protein, 15 aa, Homo sapiens
  CDR3 for alpha chain variable domain of TCR clone 239659 (TRAV3, TRAJ13)
CAVRDIGGGHQKVTF

SEQ ID NO: 479318 - protein, 16 aa, Homo sapiens
  CDR3 for beta chain variable domain of TCR clone 239659 (TRBV6-3, TRBJ2-6)
CASSSSGPSGANVLTF

SEQ ID NO: 479319 - protein, 12 aa, Homo sapiens
  CDR3 for alpha chain variable domain of TCR clone 239660 (TRAV1-2, TRAJ29)
CAVPSGNTPLIF

SEQ ID NO: 479320 - protein, 18 aa, Homo sapiens
  CDR3 for beta chain variable domain of TCR clone 239660 (TRBV7-9, TRBJ2-7)
CASSLTTSGSRTWYEQYF

SEQ ID NO: 479321 - protein, 12 aa, Homo sapiens
  CDR3 for alpha chain variable domain of TCR clone 239661 (TRAV36/DV7, TRAJ54)
CAVVRGAQKLVF

SEQ ID NO: 479322 - protein, 16 aa, Homo sapiens
  CDR3 for beta chain variable domain of TCR clone 239661 (TRBV28, TRBJ1-5)
CASSFRGGYSNQPQHF

SEQ ID NO: 479323 - protein, 15 aa, Homo sapiens
  CDR3 for alpha chain variable domain of TCR clone 239662 (TRAV8-1, TRAJ6)
CAVNTPPGGSYIPTF

SEQ ID NO: 479324 - protein, 14 aa, Homo sapiens
  CDR3 for beta chain variable domain of TCR clone 239662 (TRBV12-4, TRBJ2-1)
CASSLGQGVSEQFF

SEQ ID NO: 479325 - protein, 16 aa, Homo sapiens
  CDR3 for alpha chain variable domain of TCR clone 239663 (TRAV12-3, TRAJ53)
CAMSPGSGGSNYKLTF

SEQ ID NO: 479326 - protein, 13 aa, Homo sapiens
  CDR3 for beta chain variable domain of TCR clone 239663 (TRBV18, TRBJ2-3)
CASSTGRTDTQYF

SEQ ID NO: 479327 - protein, 12 aa, Homo sapiens
  CDR3 for alpha chain variable domain of TCR clone 239664 (TRAV4, TRAJ26)
CLVGDYGQNFVF

SEQ ID NO: 479328 - protein, 15 aa, Homo sapiens
  CDR3 for beta chain variable domain of TCR clone 239664 (TRBV28, TRBJ1-3)
CASSMGWASGNTIYF

SEQ ID NO: 479329 - protein, 17 aa, Homo sapiens
  CDR3 for alpha chain variable domain of TCR clone 239665 (TRAV3, TRAJ38)
CAVRDCLNAGNNRKLIW

SEQ ID NO: 479330 - protein, 13 aa, Homo sapiens
  CDR3 for beta chain variable domain of TCR clone 239665 (TRBV23-1, TRBJ1-4)
CASRGKFNEKLFF

SEQ ID NO: 479331 - protein, 13 aa, Homo sapiens
  CDR3 for alpha chain variable domain of TCR clone 239666 (TRAV1-2, TRAJ9)
CAVLNTGGFKTIF

SEQ ID NO: 479332 - protein, 15 aa, Homo sapiens
  CDR3 for beta chain variable domain of TCR clone 239666 (TRBV7-2, TRBJ2-7)
CASSPTGGGSYEQYF

SEQ ID NO: 479333 - protein, 19 aa, Homo sapiens
  CDR3 for alpha chain variable domain of TCR clone 239667 (TRAV29/DV5, TRAJ49)
CSVLLCSKLTVDTGNQFYF

SEQ ID NO: 479334 - protein, 13 aa, Homo sapiens
  CDR3 for beta chain variable domain of TCR clone 239667 (TRBV19, TRBJ1-2)
CASSQGQVYGYTF

SEQ ID NO: 479335 - protein, 17 aa, Homo sapiens
  CDR3 for alpha chain variable domain of TCR clone 239668 (TRAV3, TRAJ6)
CAVRDGPRAGGSYIPTF

SEQ ID NO: 479336 - protein, 17 aa, Homo sapiens
  CDR3 for beta chain variable domain of TCR clone 239668 (TRBV7-9, TRBJ2-1)
CASSLVASYPSYNEQFF

SEQ ID NO: 479337 - protein, 13 aa, Homo sapiens
  CDR3 for alpha chain variable domain of TCR clone 239669 (TRAV8-3, TRAJ48)
CAVVPFRNEKLTF

SEQ ID NO: 479338 - protein, 14 aa, Homo sapiens
  CDR3 for beta chain variable domain of TCR clone 239669 (TRBV18, TRBJ2-7)
CASSPRGGAYEQYF

SEQ ID NO: 479339 - protein, 14 aa, Homo sapiens
  CDR3 for alpha chain variable domain of TCR clone 239670 (TRAV13-1, TRAJ44)
CAAKATGTASKLTL

SEQ ID NO: 479340 - protein, 14 aa, Homo sapiens
  CDR3 for beta chain variable domain of TCR clone 239670 (TRBV25-1, TRBJ1-1)
CASTHLGGSTEAFF

SEQ ID NO: 479341 - protein, 19 aa, Homo sapiens
  CDR3 for alpha chain variable domain of TCR clone 239671 (TRAV10, TRAJ43)
TASQLSDSASYPAPNDMRF

SEQ ID NO: 479342 - protein, 15 aa, Homo sapiens
  CDR3 for beta chain variable domain of TCR clone 239671 (TRBV7-3, TRBJ2-1)
CASSLSSGSFDEQFF

SEQ ID NO: 479343 - protein, 14 aa, Homo sapiens
  CDR3 for alpha chain variable domain of TCR clone 239672 (TRAV1-2, TRAJ16)
CAVNRFSDSQKLLF

SEQ ID NO: 479344 - protein, 12 aa, Homo sapiens
  CDR3 for beta chain variable domain of TCR clone 239672 (TRBV7-9, TRBJ2-7)
CASSLEGYEQYF

SEQ ID NO: 479345 - protein, 15 aa, Homo sapiens
  CDR3 for alpha chain variable domain of TCR clone 239673 (TRAV13-1, TRAJ5)
CAASPRGHGQESTYS

SEQ ID NO: 479346 - protein, 15 aa, Homo sapiens
  CDR3 for beta chain variable domain of TCR clone 239673 (TRBV6-1, TRBJ2-3)
CASSERGGITDTQYF

SEQ ID NO: 479347 - protein, 12 aa, Homo sapiens
  CDR3 for alpha chain variable domain of TCR clone 239674 (TRAV12-3, TRAJ17)
CAMTLTGNKLTF

SEQ ID NO: 479348 - protein, 14 aa, Homo sapiens
  CDR3 for beta chain variable domain of TCR clone 239674 (TRBV7-8, TRBJ2-1)
CATERERSYNEQFF

SEQ ID NO: 479349 - protein, 13 aa, Homo sapiens
  CDR3 for alpha chain variable domain of TCR clone 239675 (TRAV2, TRAJ23)
CAVMGNQGGKIIF

SEQ ID NO: 479350 - protein, 15 aa, Homo sapiens
  CDR3 for beta chain variable domain of TCR clone 239675 (TRBV11-2, TRBJ2-1)
CASSSSTISYNEQFF

SEQ ID NO: 479351 - protein, 13 aa, Homo sapiens
  CDR3 for alpha chain variable domain of TCR clone 239676 (TRAV27, TRAJ6)
FAGGTRGSYIPTF

SEQ ID NO: 479352 - protein, 13 aa, Homo sapiens
  CDR3 for beta chain variable domain of TCR clone 239676 (TRBV4-1, TRBJ2-2)
CASSQENTGELFF

SEQ ID NO: 479353 - protein, 12 aa, Homo sapiens
  CDR3 for alpha chain variable domain of TCR clone 239677 (TRAV1-1, TRAJ23)
CAVTNQGGKLIF

SEQ ID NO: 479354 - protein, 15 aa, Homo sapiens
  CDR3 for beta chain variable domain of TCR clone 239677 (TRBV6-5, TRBJ2-1)
CASSYDAGAGNEQFF

SEQ ID NO: 479355 - protein, 14 aa, Homo sapiens
  CDR3 for alpha chain variable domain of TCR clone 239678 (TRAV17, TRAJ39)
CATDPVRAGNMLTY

SEQ ID NO: 479356 - protein, 13 aa, Homo sapiens
  CDR3 for beta chain variable domain of TCR clone 239678 (TRBV19, TRBJ1-2)
CASSVPGQDGYTF

SEQ ID NO: 479357 - protein, 12 aa, Homo sapiens
  CDR3 for alpha chain variable domain of TCR clone 239679 (TRAV1-2, TRAJ33)
CAALDSNYQLIW

SEQ ID NO: 479358 - protein, 13 aa, Homo sapiens
  CDR3 for beta chain variable domain of TCR clone 239679 (TRBV20-1, TRBJ1-1)
CSARGGGNTEAFF

SEQ ID NO: 479359 - protein, 15 aa, Homo sapiens
  CDR3 for alpha chain variable domain of TCR clone 239680 (TRAV21, TRAJ53)
CATLNSGGSNYKPTF

SEQ ID NO: 479360 - protein, 16 aa, Homo sapiens
  CDR3 for beta chain variable domain of TCR clone 239680 (TRBV29-1, TRBJ1-2)
CSVEANRDIANYGYTF

SEQ ID NO: 479361 - protein, 10 aa, Homo sapiens
  CDR3 for alpha chain variable domain of TCR clone 239681 (TRAV20, TRAJ22)
CAAPARQLTF

SEQ ID NO: 479362 - protein, 13 aa, Homo sapiens
  CDR3 for beta chain variable domain of TCR clone 239681 (TRBV12-4, TRBJ2-1)
CASRQPSNNEQFF

SEQ ID NO: 479363 - protein, 18 aa, Homo sapiens
  CDR3 for alpha chain variable domain of TCR clone 239682 (TRAV21, TRAJ52)
CAVRPSPVGGTSYGNLTF

SEQ ID NO: 479364 - protein, 17 aa, Homo sapiens
  CDR3 for beta chain variable domain of TCR clone 239682 (TRBV13, TRBJ2-3)
CASSLSRVAGGRNTQYF

SEQ ID NO: 479365 - protein, 15 aa, Homo sapiens
  CDR3 for alpha chain variable domain of TCR clone 239683 (TRAV3, TRAJ22)
CAVRDRGGSARQLTF

SEQ ID NO: 479366 - protein, 13 aa, Homo sapiens
  CDR3 for beta chain variable domain of TCR clone 239683 (TRBV13, TRBJ2-7)
CASSQGVSYEQYF

SEQ ID NO: 479367 - protein, 14 aa, Homo sapiens
  CDR3 for alpha chain variable domain of TCR clone 239684 (TRAV12-3, TRAJ10)
SHLPLTGGGHKLTF

SEQ ID NO: 479368 - protein, 16 aa, Homo sapiens
  CDR3 for beta chain variable domain of TCR clone 239684 (TRBV27, TRBJ2-2)
CASSSSGVSNTGELFF

SEQ ID NO: 479369 - protein, 14 aa, Homo sapiens
  CDR3 for alpha chain variable domain of TCR clone 239685 (TRAV12-3, TRAJ10)
SHLPLTGGGNKLTF

SEQ ID NO: 479370 - protein, 13 aa, Homo sapiens
  CDR3 for beta chain variable domain of TCR clone 239685 (TRBV2, TRBJ1-6)
CADSGSYNSPLHV

SEQ ID NO: 479371 - protein, 12 aa, Homo sapiens
  CDR3 for alpha chain variable domain of TCR clone 239686 (TRAV3, TRAJ20)
CAGRDPDYKLSF

SEQ ID NO: 479372 - protein, 14 aa, Homo sapiens
  CDR3 for beta chain variable domain of TCR clone 239686 (TRBV7-2, TRBJ2-7)
CASSPKTSFYEQYF

SEQ ID NO: 479373 - protein, 14 aa, Homo sapiens
  CDR3 for alpha chain variable domain of TCR clone 239687 (TRAV12-2, TRAJ3)
CAVKGYSSAAKIIF

SEQ ID NO: 479374 - protein, 14 aa, Homo sapiens
  CDR3 for beta chain variable domain of TCR clone 239687 (TRBV6-3, TRBJ1-2)
CASSEGGGSYGYTF

SEQ ID NO: 479375 - protein, 15 aa, Homo sapiens
  CDR3 for alpha chain variable domain of TCR clone 239688 (TRAV34, TRAJ38)
CGADFTPGDNRRLIW

SEQ ID NO: 479376 - protein, 16 aa, Homo sapiens
  CDR3 for beta chain variable domain of TCR clone 239688 (TRBV12-5, TRBJ2-5)
CASGPRTSGNQETQYF

SEQ ID NO: 479377 - protein, 14 aa, Homo sapiens
  CDR3 for alpha chain variable domain of TCR clone 239689 (TRAV12-3, TRAJ54)
CAMSSLQGAQKLIF

SEQ ID NO: 479378 - protein, 15 aa, Homo sapiens
  CDR3 for beta chain variable domain of TCR clone 239689 (TRBV19, TRBJ2-4)
CASSTPGIAKNIQYF

SEQ ID NO: 479379 - protein, 13 aa, Homo sapiens
  CDR3 for alpha chain variable domain of TCR clone 239690 (TRAV29/DV5, TRAJ31)
CAASRNNNARLML

SEQ ID NO: 479380 - protein, 14 aa, Homo sapiens
  CDR3 for beta chain variable domain of TCR clone 239690 (TRBV7-2, TRBJ2-7)
CASSPKTSFYEQYF

SEQ ID NO: 479381 - protein, 15 aa, Homo sapiens
  CDR3 for alpha chain variable domain of TCR clone 239691 (TRAV12-3, TRAJ13)
CAMSARSGGYQKVTF

SEQ ID NO: 479382 - protein, 13 aa, Homo sapiens
  CDR3 for beta chain variable domain of TCR clone 239691 (TRBV25-1, TRBJ2-5)
CASSESGRETQYF

SEQ ID NO: 479383 - protein, 16 aa, Homo sapiens
  CDR3 for alpha chain variable domain of TCR clone 239692 (TRAV13-1, TRAJ39)
CAASIVMQATCSPLEG

SEQ ID NO: 479384 - protein, 11 aa, Homo sapiens
  CDR3 for beta chain variable domain of TCR clone 239692 (TRBV12-4, TRBJ2-3)
CASTATDTQYF

SEQ ID NO: 479385 - protein, 14 aa, Homo sapiens
  CDR3 for alpha chain variable domain of TCR clone 239693 (TRAV26-1, TRAJ39)
CIVRGSRAGNMLTF

SEQ ID NO: 479386 - protein, 13 aa, Homo sapiens
  CDR3 for beta chain variable domain of TCR clone 239693 (TRBV20-1, TRBJ1-1)
CSARAGGNTEAFF

SEQ ID NO: 479387 - protein, 13 aa, Homo sapiens
  CDR3 for alpha chain variable domain of TCR clone 239694 (TRAV12-3, TRAJ13)
CAMSPGGYQEVTF

SEQ ID NO: 479388 - protein, 13 aa, Homo sapiens
  CDR3 for beta chain variable domain of TCR clone 239694 (TRBV20-1, TRBJ1-1)
CSAPPGGHTEAFF

SEQ ID NO: 479389 - protein, 14 aa, Homo sapiens
  CDR3 for alpha chain variable domain of TCR clone 239695 (TRAV3, TRAJ37)
CAVKEYGNTGKLIF

SEQ ID NO: 479390 - protein, 14 aa, Homo sapiens
  CDR3 for beta chain variable domain of TCR clone 239695 (TRBV2, TRBJ1-5)
CASSENRGGQPQHF

SEQ ID NO: 479391 - protein, 14 aa, Homo sapiens
  CDR3 for alpha chain variable domain of TCR clone 239696 (TRAV35, TRAJ40)
CWAARYLRNLKYIF

SEQ ID NO: 479392 - protein, 14 aa, Homo sapiens
  CDR3 for beta chain variable domain of TCR clone 239696 (TRBV7-3, TRBJ2-1)
CASSLAGGTNEQFF

SEQ ID NO: 479393 - protein, 16 aa, Homo sapiens
  CDR3 for alpha chain variable domain of TCR clone 239697 (TRAV14/DV4, TRAJ54)
CAMREGRIQGTQKLVF

SEQ ID NO: 479394 - protein, 14 aa, Homo sapiens
  CDR3 for beta chain variable domain of TCR clone 239697 (TRBV29-1, TRBJ2-3)
CSVEPGTRTDTQYF

SEQ ID NO: 479395 - protein, 14 aa, Homo sapiens
  CDR3 for alpha chain variable domain of TCR clone 239698 (TRAV38-1, TRAJ45)
CAYYSGGGADGLTF

SEQ ID NO: 479396 - protein, 15 aa, Homo sapiens
  CDR3 for beta chain variable domain of TCR clone 239698 (TRBV5-1, TRBJ1-2)
CASSYPGTGSSGYTF

SEQ ID NO: 479397 - protein, 13 aa, Homo sapiens
  CDR3 for alpha chain variable domain of TCR clone 239699 (TRAV27, TRAJ45)
CRSSGVGADGLTF

SEQ ID NO: 479398 - protein, 15 aa, Homo sapiens
  CDR3 for beta chain variable domain of TCR clone 239699 (TRBV7-2, TRBJ2-7)
CASSLDPAQGQEQYF

SEQ ID NO: 479399 - protein, 18 aa, Homo sapiens
  CDR3 for alpha chain variable domain of TCR clone 239700 (TRAV26-1, TRAJ5)
CIVRVVPPRATGRSALTF

SEQ ID NO: 479400 - protein, 15 aa, Homo sapiens
  CDR3 for beta chain variable domain of TCR clone 239700 (TRBV7-9, TRBJ2-7)
CASSLPMGQANEQYF

SEQ ID NO: 479401 - protein, 16 aa, Homo sapiens
  CDR3 for alpha chain variable domain of TCR clone 239701 (TRAV9-2, TRAJ6)
CALRGPASGGSYLPTF

SEQ ID NO: 479402 - protein, 13 aa, Homo sapiens
  CDR3 for beta chain variable domain of TCR clone 239701 (TRBV7-9, TRBJ2-7)
CASSAGLQYEQYF

SEQ ID NO: 479403 - protein, 13 aa, Homo sapiens
  CDR3 for alpha chain variable domain of TCR clone 239702 (TRAV2, TRAJ13)
CAVESGGYQKVTF

SEQ ID NO: 479404 - protein, 15 aa, Homo sapiens
  CDR3 for beta chain variable domain of TCR clone 239702 (TRBV7-3, TRBJ2-1)
CASSPTGGGEVEQFF

SEQ ID NO: 479405 - protein, 14 aa, Homo sapiens
  CDR3 for alpha chain variable domain of TCR clone 239703 (TRAV27, TRAJ58)
CAGDGETSGSRLTF

SEQ ID NO: 479406 - protein, 16 aa, Homo sapiens
  CDR3 for beta chain variable domain of TCR clone 239703 (TRBV19, TRBJ2-2)
CASRSPGTGATGELFF

SEQ ID NO: 479407 - protein, 13 aa, Homo sapiens
  CDR3 for alpha chain variable domain of TCR clone 239704 (TRAV21, TRAJ20)
CAVGLRVDYRLSF

SEQ ID NO: 479408 - protein, 14 aa, Homo sapiens
  CDR3 for beta chain variable domain of TCR clone 239704 (TRBV7-6, TRBJ2-3)
CASSLGTVTDTQYF

SEQ ID NO: 479409 - protein, 17 aa, Homo sapiens
  CDR3 for alpha chain variable domain of TCR clone 239705 (TRAV3, TRAJ38)
CAVRDCLNSGNNRKLIW

SEQ ID NO: 479410 - protein, 14 aa, Homo sapiens
  CDR3 for beta chain variable domain of TCR clone 239705 (TRBV5-5, TRBJ1-5)
CASSGQGVDQPQHF

SEQ ID NO: 479411 - protein, 16 aa, Homo sapiens
  CDR3 for alpha chain variable domain of TCR clone 239706 (TRAV26-1, TRAJ37)
CIVRGDGSGNTGKLIF

SEQ ID NO: 479412 - protein, 15 aa, Homo sapiens
  CDR3 for beta chain variable domain of TCR clone 239706 (TRBV19, TRBJ1-1)
CASTSGRIQNTEAFF

SEQ ID NO: 479413 - protein, 12 aa, Homo sapiens
  CDR3 for alpha chain variable domain of TCR clone 239707 (TRAV30, TRAJ39)
CGRGNASNMLTF

SEQ ID NO: 479414 - protein, 12 aa, Homo sapiens
  CDR3 for beta chain variable domain of TCR clone 239707 (TRBV10-3, TRBJ1-1)
CATMDRPPEAFF

SEQ ID NO: 479415 - protein, 16 aa, Homo sapiens
  CDR3 for alpha chain variable domain of TCR clone 239708 (TRAV8-3, TRAJ44)
CAVGTLMTGTARKLTF

SEQ ID NO: 479416 - protein, 13 aa, Homo sapiens
  CDR3 for beta chain variable domain of TCR clone 239708 (TRBV11-2, TRBJ2-1)
CASSLRLTHEQFF

SEQ ID NO: 479417 - protein, 15 aa, Homo sapiens
  CDR3 for alpha chain variable domain of TCR clone 239709 (TRAV17, TRAJ57)
CATGPSQGGSEKLVF

SEQ ID NO: 479418 - protein, 13 aa, Homo sapiens
  CDR3 for beta chain variable domain of TCR clone 239709 (TRBV5-4, TRBJ2-3)
CATQAGGRDTQYF

SEQ ID NO: 479419 - protein, 14 aa, Homo sapiens
  CDR3 for alpha chain variable domain of TCR clone 239710 (TRAV8-2, TRAJ45)
CVVSAGGGADGLTF

SEQ ID NO: 479420 - protein, 14 aa, Homo sapiens
  CDR3 for beta chain variable domain of TCR clone 239710 (TRBV12-4, TRBJ2-5)
CASGSRTHQETQYF

SEQ ID NO: 479421 - protein, 16 aa, Homo sapiens
  CDR3 for alpha chain variable domain of TCR clone 239711 (TRAV12-3, TRAJ53)
CAMSPGGGGSNYKLTF

SEQ ID NO: 479422 - protein, 13 aa, Homo sapiens
  CDR3 for beta chain variable domain of TCR clone 239711 (TRBV7-2, TRBJ2-5)
CASSQTSVETQYF

SEQ ID NO: 479423 - protein, 17 aa, Homo sapiens
  CDR3 for alpha chain variable domain of TCR clone 239712 (TRAV3, TRAJ6)
CAVRDGRRAGGSYIPTF

SEQ ID NO: 479424 - protein, 12 aa, Homo sapiens
  CDR3 for beta chain variable domain of TCR clone 239712 (TRBV11-2, TRBJ2-1)
CASSPGNNEQFF

SEQ ID NO: 479425 - protein, 13 aa, Homo sapiens
  CDR3 for alpha chain variable domain of TCR clone 239713 (TRAV38-2/DV8, TRAJ56)
CAYQSRANSKLTF

SEQ ID NO: 479426 - protein, 16 aa, Homo sapiens
  CDR3 for beta chain variable domain of TCR clone 239713 (TRBV28, TRBJ1-1)
CASSSWGQPVATEAFF

SEQ ID NO: 479427 - protein, 15 aa, Homo sapiens
  CDR3 for alpha chain variable domain of TCR clone 239714 (TRAV8-3, TRAJ11)
CAVGLFNSGYSALTF

SEQ ID NO: 479428 - protein, 16 aa, Homo sapiens
  CDR3 for beta chain variable domain of TCR clone 239714 (TRBV7-9, TRBJ1-2)
CASSLGFSSGEDGYTF

SEQ ID NO: 479429 - protein, 23 aa, Homo sapiens
  CDR3 for alpha chain variable domain of TCR clone 239715 (TRAV41, TRAJ32)
CAVRIMVVIQTSSSLELALCLLS

SEQ ID NO: 479430 - protein, 15 aa, Homo sapiens
  CDR3 for beta chain variable domain of TCR clone 239715 (TRBV11-2, TRBJ2-1)
CASSKNRGLIYEQFF

SEQ ID NO: 479431 - protein, 15 aa, Homo sapiens
  CDR3 for alpha chain variable domain of TCR clone 239716 (TRAV12-3, TRAJ6)
CAMSATSGGSYIPTF

SEQ ID NO: 479432 - protein, 16 aa, Homo sapiens
  CDR3 for beta chain variable domain of TCR clone 239716 (TRBV24-1, TRBJ2-3)
CATSDPGTGATDTQYF

SEQ ID NO: 479433 - protein, 15 aa, Homo sapiens
  CDR3 for alpha chain variable domain of TCR clone 239717 (TRAV39, TRAJ42)
CAVVNYGGSQGNLII

SEQ ID NO: 479434 - protein, 15 aa, Homo sapiens
  CDR3 for beta chain variable domain of TCR clone 239717 (TRBV10-3, TRBJ1-1)
CAISDLGRANTEAFF

SEQ ID NO: 479435 - protein, 12 aa, Homo sapiens
  CDR3 for alpha chain variable domain of TCR clone 239718 (TRAV12-2, TRAJ20)
CAVNWNDYKLSF

SEQ ID NO: 479436 - protein, 16 aa, Homo sapiens
  CDR3 for beta chain variable domain of TCR clone 239718 (TRBV7-3, TRBJ1-2)
CASSLGAPVPNYGYTF

SEQ ID NO: 479437 - protein, 14 aa, Homo sapiens
  CDR3 for alpha chain variable domain of TCR clone 239719 (TRAV21, TRAJ21)
CAVGVEDNFNKFYF

SEQ ID NO: 479438 - protein, 12 aa, Homo sapiens
  CDR3 for beta chain variable domain of TCR clone 239719 (TRBV19, TRBJ2-1)
CASSMQDTEQFF

SEQ ID NO: 479439 - protein, 12 aa, Homo sapiens
  CDR3 for alpha chain variable domain of TCR clone 239720 (TRAV12-3, TRAJ17)
CAMTLTGNKLTF

SEQ ID NO: 479440 - protein, 16 aa, Homo sapiens
  CDR3 for beta chain variable domain of TCR clone 239720 (TRBV7-3, TRBJ2-1)
CASSLEGYRSYNEKFF

SEQ ID NO: 479441 - protein, 13 aa, Homo sapiens
  CDR3 for alpha chain variable domain of TCR clone 239721 (TRAV20, TRAJ34)
CYVISYNTDKLIF

SEQ ID NO: 479442 - protein, 15 aa, Homo sapiens
  CDR3 for beta chain variable domain of TCR clone 239721 (TRBV18, TRBJ2-7)
CASSPSSTGNYEQYF

SEQ ID NO: 479443 - protein, 15 aa, Homo sapiens
  CDR3 for alpha chain variable domain of TCR clone 239722 (TRAV34, TRAJ38)
CGADFTPGNNRKLIW

SEQ ID NO: 479444 - protein, 16 aa, Homo sapiens
  CDR3 for beta chain variable domain of TCR clone 239722 (TRBV12-5, TRBJ2-5)
CASGPRTNGNQETQYF

SEQ ID NO: 479445 - protein, 15 aa, Homo sapiens
  CDR3 for alpha chain variable domain of TCR clone 239723 (TRAV23/DV6, TRAJ15)
CAASRRNQAGTALIF

SEQ ID NO: 479446 - protein, 13 aa, Homo sapiens
  CDR3 for beta chain variable domain of TCR clone 239723 (TRBV12-4, TRBJ2-5)
CASRLAVQETQYF

SEQ ID NO: 479447 - protein, 13 aa, Homo sapiens
  CDR3 for alpha chain variable domain of TCR clone 239724 (TRAV21, TRAJ20)
CAVGLRVDYKLSF

SEQ ID NO: 479448 - protein, 17 aa, Homo sapiens
  CDR3 for beta chain variable domain of TCR clone 239724 (TRBV20-1, TRBJ2-1)
CSASSSGLAGSYNEQFF

SEQ ID NO: 479449 - protein, 12 aa, Homo sapiens
  CDR3 for alpha chain variable domain of TCR clone 239725 (TRAV25, TRAJ35)
CAGIGFGNVLHC

SEQ ID NO: 479450 - protein, 16 aa, Homo sapiens
  CDR3 for beta chain variable domain of TCR clone 239725 (TRBV2, TRBJ2-1)
CASSANPRDWQAEQFF

SEQ ID NO: 479451 - protein, 15 aa, Homo sapiens
  CDR3 for alpha chain variable domain of TCR clone 239726 (TRAV4, TRAJ39)
CLVGPNNNEGNMLTF

SEQ ID NO: 479452 - protein, 13 aa, Homo sapiens
  CDR3 for beta chain variable domain of TCR clone 239726 (TRBV29-1, TRBJ2-5)
CSVLLASGETQYF

SEQ ID NO: 479453 - protein, 12 aa, Homo sapiens
  CDR3 for alpha chain variable domain of TCR clone 239727 (TRAV8-3, TRAJ26)
CAGDNYGQNFVF

SEQ ID NO: 479454 - protein, 13 aa, Homo sapiens
  CDR3 for beta chain variable domain of TCR clone 239727 (TRBV20-1, TRBJ2-5)
CSARGGYQETQYF

SEQ ID NO: 479455 - protein, 15 aa, Homo sapiens
  CDR3 for alpha chain variable domain of TCR clone 239728 (TRAV13-1, TRAJ5)
CAASPTGHGQESTYF

SEQ ID NO: 479456 - protein, 15 aa, Homo sapiens
  CDR3 for beta chain variable domain of TCR clone 239728 (TRBV6-1, TRBJ2-3)
CASSERGGITDTQYF

SEQ ID NO: 479457 - protein, 14 aa, Homo sapiens
  CDR3 for alpha chain variable domain of TCR clone 239729 (TRAV21, TRAJ48)
CAVIAHFGNEKLTF

SEQ ID NO: 479458 - protein, 13 aa, Homo sapiens
  CDR3 for beta chain variable domain of TCR clone 239729 (TRBV7-3, TRBJ1-1)
CASSQDWGAEAFF

SEQ ID NO: 479459 - protein, 15 aa, Homo sapiens
  CDR3 for alpha chain variable domain of TCR clone 239730 (TRAV12-3, TRAJ49)
CAMTAPGNTGNQFYF

SEQ ID NO: 479460 - protein, 14 aa, Homo sapiens
  CDR3 for beta chain variable domain of TCR clone 239730 (TRBV18, TRBJ2-3)
CASSPRTSTDTQYF

SEQ ID NO: 479461 - protein, 14 aa, Homo sapiens
  CDR3 for alpha chain variable domain of TCR clone 239731 (TRAV27, TRAJ22)
CAGVYVLGKRQLTF

SEQ ID NO: 479462 - protein, 17 aa, Homo sapiens
  CDR3 for beta chain variable domain of TCR clone 239731 (TRBV14, TRBJ2-1)
CASSQDRRVTSYNEQFF

SEQ ID NO: 479463 - protein, 14 aa, Homo sapiens
  CDR3 for alpha chain variable domain of TCR clone 239732 (TRAV23/DV6, TRAJ37)
CAASTSSNTGKLIF

SEQ ID NO: 479464 - protein, 13 aa, Homo sapiens
  CDR3 for beta chain variable domain of TCR clone 239732 (TRBV19, TRBJ2-2)
CASSGRGTGELFF

SEQ ID NO: 479465 - protein, 11 aa, Homo sapiens
  CDR3 for alpha chain variable domain of TCR clone 239733 (TRAV21, TRAJ34)
CAHYNTDKLIF

SEQ ID NO: 479466 - protein, 20 aa, Homo sapiens
  CDR3 for beta chain variable domain of TCR clone 239733 (TRBV7-8, TRBJ2-2)
CASSHLFPGPTIHITGELFF

SEQ ID NO: 479467 - protein, 16 aa, Homo sapiens
  CDR3 for alpha chain variable domain of TCR clone 239734 (TRAV3, TRAJ37)
CALRPHGSGSTGKLIF

SEQ ID NO: 479468 - protein, 13 aa, Homo sapiens
  CDR3 for beta chain variable domain of TCR clone 239734 (TRBV2, TRBJ1-5)
CASGTGGYQPQHF

SEQ ID NO: 479469 - protein, 15 aa, Homo sapiens
  CDR3 for alpha chain variable domain of TCR clone 239735 (TRAV26-2, TRAJ50)
CILRDEETSYDKVIF

SEQ ID NO: 479470 - protein, 12 aa, Homo sapiens
  CDR3 for beta chain variable domain of TCR clone 239735 (TRBV5-6, TRBJ1-2)
CASSDGPYGYTF

SEQ ID NO: 479471 - protein, 16 aa, Homo sapiens
  CDR3 for alpha chain variable domain of TCR clone 239736 (TRAV8-3, TRAJ13)
CAVGAYPPGGYQKVTF

SEQ ID NO: 479472 - protein, 15 aa, Homo sapiens
  CDR3 for beta chain variable domain of TCR clone 239736 (TRBV19, TRBJ1-5)
CASSIVWADNQPQHF

SEQ ID NO: 479473 - protein, 20 aa, Homo sapiens
  CDR3 for alpha chain variable domain of TCR clone 239737 (TRAV26-1, TRAJ42)
CWGLLHLQTYYGGSQGNLIF

SEQ ID NO: 479474 - protein, 16 aa, Homo sapiens
  CDR3 for beta chain variable domain of TCR clone 239737 (TRBV4-1, TRBJ1-1)
CASSSMSERPNTEAFF

SEQ ID NO: 479475 - protein, 13 aa, Homo sapiens
  CDR3 for alpha chain variable domain of TCR clone 239738 (TRAV26-2, TRAJ43)
CILRAVINNDMRF

SEQ ID NO: 479476 - protein, 14 aa, Homo sapiens
  CDR3 for beta chain variable domain of TCR clone 239738 (TRBV20-1, TRBJ1-1)
CSAQTRIGGTEAFF

SEQ ID NO: 479477 - protein, 16 aa, Homo sapiens
  CDR3 for alpha chain variable domain of TCR clone 239739 (TRAV30, TRAJ24)
CGTEIVDADSWGKFQF

SEQ ID NO: 479478 - protein, 13 aa, Homo sapiens
  CDR3 for beta chain variable domain of TCR clone 239739 (TRBV18, TRBJ1-1)
CASSGGRDTEAFF

SEQ ID NO: 479479 - protein, 13 aa, Homo sapiens
  CDR3 for alpha chain variable domain of TCR clone 239740 (TRAV8-1, TRAJ34)
CAVRPYNTDKRIF

SEQ ID NO: 479480 - protein, 15 aa, Homo sapiens
  CDR3 for beta chain variable domain of TCR clone 239740 (TRBV7-9, TRBJ1-3)
CASSLRSGSGNTIYF

SEQ ID NO: 479481 - protein, 15 aa, Homo sapiens
  CDR3 for alpha chain variable domain of TCR clone 239741 (TRAV8-3, TRAJ34)
DAAEYFCAIPGKLIF

SEQ ID NO: 479482 - protein, 15 aa, Homo sapiens
  CDR3 for beta chain variable domain of TCR clone 239741 (TRBV5-7, TRBJ2-1)
CASSRRLAWDNEQFF

SEQ ID NO: 479483 - protein, 15 aa, Homo sapiens
  CDR3 for alpha chain variable domain of TCR clone 239742 (TRAV2, TRAJ22)
CAVPSRGGSARQLTF

SEQ ID NO: 479484 - protein, 11 aa, Homo sapiens
  CDR3 for beta chain variable domain of TCR clone 239742 (TRBV7-9, TRBJ2-3)
CASSGPDTQYF

SEQ ID NO: 479485 - protein, 14 aa, Homo sapiens
  CDR3 for alpha chain variable domain of TCR clone 239743 (TRAV29/DV5, TRAJ20)
CAASAPIEDYKLSF

SEQ ID NO: 479486 - protein, 16 aa, Homo sapiens
  CDR3 for beta chain variable domain of TCR clone 239743 (TRBV7-3, TRBJ2-2)
CASSLKRGTLSGELFF

SEQ ID NO: 479487 - protein, 11 aa, Homo sapiens
  CDR3 for alpha chain variable domain of TCR clone 239744 (TRAV17, TRAJ36)
CAPTGANNLFF

SEQ ID NO: 479488 - protein, 13 aa, Homo sapiens
  CDR3 for beta chain variable domain of TCR clone 239744 (TRBV20-1, TRBJ1-1)
CSAPPGGHTEALF

SEQ ID NO: 479489 - protein, 14 aa, Homo sapiens
  CDR3 for alpha chain variable domain of TCR clone 239745 (TRAV17, TRAJ45)
CATDARGGADGPTF

SEQ ID NO: 479490 - protein, 11 aa, Homo sapiens
  CDR3 for beta chain variable domain of TCR clone 239745 (TRBV28, TRBJ2-5)
CATGNQETQYF

SEQ ID NO: 479491 - protein, 20 aa, Homo sapiens
  CDR3 for alpha chain variable domain of TCR clone 239746 (TRAV4, TRAJ29)
CCVLLPRGCVPFSGNTPLVF

SEQ ID NO: 479492 - protein, 17 aa, Homo sapiens
  CDR3 for beta chain variable domain of TCR clone 239746 (TRBV25-1, TRBJ2-7)
CASSDARVVFSSYERYF

SEQ ID NO: 479493 - protein, 13 aa, Homo sapiens
  CDR3 for alpha chain variable domain of TCR clone 239747 (TRAV1-2, TRAJ24)
CAVTTDSWGKLQF

SEQ ID NO: 479494 - protein, 14 aa, Homo sapiens
  CDR3 for beta chain variable domain of TCR clone 239747 (TRBV7-2, TRBJ1-2)
CASSQTGSTYGYTV

SEQ ID NO: 479495 - protein, 12 aa, Homo sapiens
  CDR3 for alpha chain variable domain of TCR clone 239748 (TRAV3, TRAJ34)
CAVLGSTDKLIF

SEQ ID NO: 479496 - protein, 13 aa, Homo sapiens
  CDR3 for beta chain variable domain of TCR clone 239748 (TRBV19, TRBJ2-1)
CASSIGTGNEQFC

SEQ ID NO: 479497 - protein, 15 aa, Homo sapiens
  CDR3 for alpha chain variable domain of TCR clone 239749 (TRAV14/DV4, TRAJ48)
CAITLSNFGNEKLTF

SEQ ID NO: 479498 - protein, 16 aa, Homo sapiens
  CDR3 for beta chain variable domain of TCR clone 239749 (TRBV12-4, TRBJ2-1)
CASSAVGQGNGDEQFF

SEQ ID NO: 479499 - protein, 15 aa, Homo sapiens
  CDR3 for alpha chain variable domain of TCR clone 239750 (TRAV2, TRAJ44)
CAVEAYTGTASKLTF

SEQ ID NO: 479500 - protein, 17 aa, Homo sapiens
  CDR3 for beta chain variable domain of TCR clone 239750 (TRBV12-4, TRBJ2-1)
CANSPGLAGGRINEQFF

SEQ ID NO: 479501 - protein, 14 aa, Homo sapiens
  CDR3 for alpha chain variable domain of TCR clone 239751 (TRAV12-3, TRAJ10)
SHLPLTGGGNKLSF

SEQ ID NO: 479502 - protein, 15 aa, Homo sapiens
  CDR3 for beta chain variable domain of TCR clone 239751 (TRBV9, TRBJ1-6)
CASSVAGTGDSPLHF

SEQ ID NO: 479503 - protein, 12 aa, Homo sapiens
  CDR3 for alpha chain variable domain of TCR clone 239752 (TRAV12-3, TRAJ17)
CAMTLTGNKQTF

SEQ ID NO: 479504 - protein, 17 aa, Homo sapiens
  CDR3 for beta chain variable domain of TCR clone 239752 (TRBV13, TRBJ2-3)
CASSLSRVAGGRNTQYF

SEQ ID NO: 479505 - protein, 18 aa, Homo sapiens
  CDR3 for alpha chain variable domain of TCR clone 239753 (TRAV21, TRAJ52)
CAVRPSPAGGTSYGKLTF

SEQ ID NO: 479506 - protein, 13 aa, Homo sapiens
  CDR3 for beta chain variable domain of TCR clone 239753 (TRBV29-1, TRBJ2-2)
SAAFREDTGELFF

SEQ ID NO: 479507 - protein, 13 aa, Homo sapiens
  CDR3 for alpha chain variable domain of TCR clone 239754 (TRAV36/DV7, TRAJ54)
CAVDIQGARKLVF

SEQ ID NO: 479508 - protein, 15 aa, Homo sapiens
  CDR3 for beta chain variable domain of TCR clone 239754 (TRBV7-9, TRBJ1-4)
CASSATGGNNEKLFF

SEQ ID NO: 479509 - protein, 15 aa, Homo sapiens
  CDR3 for alpha chain variable domain of TCR clone 239755 (TRAV38-1, TRAJ58)
CAFMKHGTSGSRLTF

SEQ ID NO: 479510 - protein, 10 aa, Homo sapiens
  CDR3 for beta chain variable domain of TCR clone 239755 (TRBV19, TRBJ2-6)
CASSTGQVFS

SEQ ID NO: 479511 - protein, 15 aa, Homo sapiens
  CDR3 for alpha chain variable domain of TCR clone 239756 (TRAV26-2, TRAJ39)
CSLRGNNNACNMLTF

SEQ ID NO: 479512 - protein, 15 aa, Homo sapiens
  CDR3 for beta chain variable domain of TCR clone 239756 (TRBV6-6, TRBJ2-5)
CASSPGGGLEETQYF

SEQ ID NO: 479513 - protein, 14 aa, Homo sapiens
  CDR3 for alpha chain variable domain of TCR clone 239757 (TRAV14/DV4, TRAJ54)
CAMREAPGAQKLVF

SEQ ID NO: 479514 - protein, 15 aa, Homo sapiens
  CDR3 for beta chain variable domain of TCR clone 239757 (TRBV5-1, TRBJ2-7)
YASSLNGGPAREQYF

SEQ ID NO: 479515 - protein, 13 aa, Homo sapiens
  CDR3 for alpha chain variable domain of TCR clone 239758 (TRAV8-3, TRAJ48)
CAVVPFGNEKLTF

SEQ ID NO: 479516 - protein, 19 aa, Homo sapiens
  CDR3 for beta chain variable domain of TCR clone 239758 (TRBV25-1, TRBJ2-2)
CSILVYRVDRGRKTGELFF

SEQ ID NO: 479517 - protein, 16 aa, Homo sapiens
  CDR3 for alpha chain variable domain of TCR clone 239759 (TRAV30, TRAJ24)
CGTEIVDADSWGKLQC

SEQ ID NO: 479518 - protein, 19 aa, Homo sapiens
  CDR3 for beta chain variable domain of TCR clone 239759 (TRBV25-1, TRBJ2-2)
CAILVYRVDRGRKTGELFF

SEQ ID NO: 479519 - protein, 14 aa, Homo sapiens
  CDR3 for alpha chain variable domain of TCR clone 239760 (TRAV12-2, TRAJ33)
CAVKRARSNYQLIW

SEQ ID NO: 479520 - protein, 13 aa, Homo sapiens
  CDR3 for beta chain variable domain of TCR clone 239760 (TRBV19, TRBJ1-5)
CASSMRGYQPQHF

SEQ ID NO: 479521 - protein, 17 aa, Homo sapiens
  CDR3 for alpha chain variable domain of TCR clone 239761 (TRAV26-1, TRAJ37)
CIVRVITVSSNTGKLIF

SEQ ID NO: 479522 - protein, 14 aa, Homo sapiens
  CDR3 for beta chain variable domain of TCR clone 239761 (TRBV20-1, TRBJ2-7)
CSAKRGRSSYEQYF

SEQ ID NO: 479523 - protein, 14 aa, Homo sapiens
  CDR3 for alpha chain variable domain of TCR clone 239762 (TRAV2, TRAJ9)
CAVEDRSGGFKTIF

SEQ ID NO: 479524 - protein, 16 aa, Homo sapiens
  CDR3 for beta chain variable domain of TCR clone 239762 (TRBV15, TRBJ1-1)
CATSRSRGGTNTEAFF

SEQ ID NO: 479525 - protein, 14 aa, Homo sapiens
  CDR3 for alpha chain variable domain of TCR clone 239763 (TRAV17, TRAJ6)
CATDERRGCYIPTF

SEQ ID NO: 479526 - protein, 13 aa, Homo sapiens
  CDR3 for beta chain variable domain of TCR clone 239763 (TRBV27, TRBJ2-1)
CASSLGRIWGQFF

SEQ ID NO: 479527 - protein, 14 aa, Homo sapiens
  CDR3 for alpha chain variable domain of TCR clone 239764 (TRAV12-3, TRAJ43)
CAMSLGGAGTRLTV

SEQ ID NO: 479528 - protein, 13 aa, Homo sapiens
  CDR3 for beta chain variable domain of TCR clone 239764 (TRBV7-9, TRBJ1-2)
CASSLKQNYGYTF

SEQ ID NO: 479529 - protein, 18 aa, Homo sapiens
  CDR3 for alpha chain variable domain of TCR clone 239765 (TRAV29/DV5, TRAJ52)
CAAGFRGAGGTSYGKLTF

SEQ ID NO: 479530 - protein, 15 aa, Homo sapiens
  CDR3 for beta chain variable domain of TCR clone 239765 (TRBV6-1, TRBJ2-6)
CASSSRPSGANVLTF

SEQ ID NO: 479531 - protein, 15 aa, Homo sapiens
  CDR3 for alpha chain variable domain of TCR clone 239766 (TRAV13-1, TRAJ17)
CAASIHGGCRRQANF

SEQ ID NO: 479532 - protein, 14 aa, Homo sapiens
  CDR3 for beta chain variable domain of TCR clone 239766 (TRBV20-1, TRBJ2-4)
CSARDRGQGGIQYF

SEQ ID NO: 479533 - protein, 13 aa, Homo sapiens
  CDR3 for alpha chain variable domain of TCR clone 239767 (TRAV12-3, TRAJ9)
CAMRNTGGFKTIF

SEQ ID NO: 479534 - protein, 13 aa, Homo sapiens
  CDR3 for beta chain variable domain of TCR clone 239767 (TRBV9, TRBJ2-1)
CASSVGQGGEQFF

SEQ ID NO: 479535 - protein, 15 aa, Homo sapiens
  CDR3 for alpha chain variable domain of TCR clone 239768 (TRAV26-1, TRAJ29)
CIVKVDGSGNTPLVF

SEQ ID NO: 479536 - protein, 14 aa, Homo sapiens
  CDR3 for beta chain variable domain of TCR clone 239768 (TRBV18, TRBJ2-5)
CASSPGVSKETQYF

SEQ ID NO: 479537 - protein, 11 aa, Homo sapiens
  CDR3 for alpha chain variable domain of TCR clone 239769 (TRAV23/DV6, TRAJ9)
CAASLSPPNTG

SEQ ID NO: 479538 - protein, 12 aa, Homo sapiens
  CDR3 for beta chain variable domain of TCR clone 239769 (TRBV7-8, TRBJ2-7)
CASSLGDREQYF

SEQ ID NO: 479539 - protein, 15 aa, Homo sapiens
  CDR3 for alpha chain variable domain of TCR clone 239770 (TRAV23/DV6, TRAJ44)
CAASGGTGTASKLTF

SEQ ID NO: 479540 - protein, 15 aa, Homo sapiens
  CDR3 for beta chain variable domain of TCR clone 239770 (TRBV20-1, TRBJ2-7)
CSARVPAAYFYEQYF

SEQ ID NO: 479541 - protein, 16 aa, Homo sapiens
  CDR3 for alpha chain variable domain of TCR clone 239771 (TRAV8-3, TRAJ44)
GALGTLMTGTASKLTF

SEQ ID NO: 479542 - protein, 15 aa, Homo sapiens
  CDR3 for beta chain variable domain of TCR clone 239771 (TRBV10-2, TRBJ2-6)
CASSEQGTGANVLTF

SEQ ID NO: 479543 - protein, 13 aa, Homo sapiens
  CDR3 for alpha chain variable domain of TCR clone 239772 (TRAV2, TRAJ40)
CAVVTSGTCKYIF

SEQ ID NO: 479544 - protein, 14 aa, Homo sapiens
  CDR3 for beta chain variable domain of TCR clone 239772 (TRBV12-5, TRBJ2-5)
CASGSRTHQETQYF

SEQ ID NO: 479545 - protein, 15 aa, Homo sapiens
  CDR3 for alpha chain variable domain of TCR clone 239773 (TRAV26-1, TRAJ37)
CIVKAGSSNTGKLIF

SEQ ID NO: 479546 - protein, 12 aa, Homo sapiens
  CDR3 for beta chain variable domain of TCR clone 239773 (TRBV7-8, TRBJ2-7)
CASSLGDREQYF

SEQ ID NO: 479547 - protein, 12 aa, Homo sapiens
  CDR3 for alpha chain variable domain of TCR clone 239774 (TRAV21, TRAJ33)
CAKMDSNYQLIW

SEQ ID NO: 479548 - protein, 15 aa, Homo sapiens
  CDR3 for beta chain variable domain of TCR clone 239774 (TRBV28, TRBJ2-7)
CASSPGGRGFYERYF

SEQ ID NO: 479549 - protein, 12 aa, Homo sapiens
  CDR3 for alpha chain variable domain of TCR clone 239775 (TRAV13-1, TRAJ43)
CAASIGDNDMRF

SEQ ID NO: 479550 - protein, 17 aa, Homo sapiens
  CDR3 for beta chain variable domain of TCR clone 239775 (TRBV11-3, TRBJ2-3)
CASSPGSSGGRTDTQYC

SEQ ID NO: 479551 - protein, 16 aa, Homo sapiens
  CDR3 for alpha chain variable domain of TCR clone 239776 (TRAV30, TRAJ24)
CGTEIVDADSGGKFQF

SEQ ID NO: 479552 - protein, 15 aa, Homo sapiens
  CDR3 for beta chain variable domain of TCR clone 239776 (TRBV20-1, TRBJ2-4)
CSARDLTGGPNIQYF

SEQ ID NO: 479553 - protein, 15 aa, Homo sapiens
  CDR3 for alpha chain variable domain of TCR clone 239777 (TRAV12-2, TRAJ53)
CAVNGGGGSNYKLTF

SEQ ID NO: 479554 - protein, 13 aa, Homo sapiens
  CDR3 for beta chain variable domain of TCR clone 239777 (TRBV27, TRBJ2-7)
CASSLTTGYEQYF

SEQ ID NO: 479555 - protein, 14 aa, Homo sapiens
  CDR3 for alpha chain variable domain of TCR clone 239778 (TRAV35, TRAJ13)
CAGSPSGGYKKVTF

SEQ ID NO: 479556 - protein, 13 aa, Homo sapiens
  CDR3 for beta chain variable domain of TCR clone 239778 (TRBV20-1, TRBJ1-1)
CSAPLGGGTEAFF

SEQ ID NO: 479557 - protein, 13 aa, Homo sapiens
  CDR3 for alpha chain variable domain of TCR clone 239779 (TRAV16, TRAJ27)
CALRRTNAGKSTF

SEQ ID NO: 479558 - protein, 12 aa, Homo sapiens
  CDR3 for beta chain variable domain of TCR clone 239779 (TRBV28, TRBJ2-6)
CAIQAGANVLTF

SEQ ID NO: 479559 - protein, 13 aa, Homo sapiens
  CDR3 for alpha chain variable domain of TCR clone 239780 (TRAV1-1, TRAJ9)
CAAKNTGGFKTIF

SEQ ID NO: 479560 - protein, 14 aa, Homo sapiens
  CDR3 for beta chain variable domain of TCR clone 239780 (TRBV20-1, TRBJ2-1)
CSAQIGGSANEQIF

SEQ ID NO: 479561 - protein, 14 aa, Homo sapiens
  CDR3 for alpha chain variable domain of TCR clone 239781 (TRAV26-1, TRAJ38)
CIADNAGNNRKLIW

SEQ ID NO: 479562 - protein, 15 aa, Homo sapiens
  CDR3 for beta chain variable domain of TCR clone 239781 (TRBV20-1, TRBJ1-1)
CSASRGVTGNTEAFF

SEQ ID NO: 479563 - protein, 15 aa, Homo sapiens
  CDR3 for alpha chain variable domain of TCR clone 239782 (TRAV2, TRAJ9)
CAVEDRGSGGFKTIF

SEQ ID NO: 479564 - protein, 13 aa, Homo sapiens
  CDR3 for beta chain variable domain of TCR clone 239782 (TRBV19, TRBJ1-5)
CASSIGGNQPQHF

SEQ ID NO: 479565 - protein, 15 aa, Homo sapiens
  CDR3 for alpha chain variable domain of TCR clone 239783 (TRAV21, TRAJ13)
CAVRPTSGGYQKVTF

SEQ ID NO: 479566 - protein, 18 aa, Homo sapiens
  CDR3 for beta chain variable domain of TCR clone 239783 (TRBV11-3, TRBJ2-1)
CASSSYPGGRDSYNEQLF

SEQ ID NO: 479567 - protein, 15 aa, Homo sapiens
  CDR3 for alpha chain variable domain of TCR clone 239784 (TRAV17, TRAJ56)
CATEPFTGANSKLTF

SEQ ID NO: 479568 - protein, 15 aa, Homo sapiens
  CDR3 for beta chain variable domain of TCR clone 239784 (TRBV28, TRBJ1-5)
CASSRTGGYVQPQHF

SEQ ID NO: 479569 - protein, 13 aa, Homo sapiens
  CDR3 for alpha chain variable domain of TCR clone 239785 (TRAV13-1, TRAJ20)
CLPEGSNDYKLSF

SEQ ID NO: 479570 - protein, 13 aa, Homo sapiens
  CDR3 for beta chain variable domain of TCR clone 239785 (TRBV10-2, TRBJ1-1)
CASNDQMNTEAFF

SEQ ID NO: 479571 - protein, 12 aa, Homo sapiens
  CDR3 for alpha chain variable domain of TCR clone 239786 (TRAV29/DV5, TRAJ49)
CAATDTGNQFYF

SEQ ID NO: 479572 - protein, 12 aa, Homo sapiens
  CDR3 for beta chain variable domain of TCR clone 239786 (TRBV12-4, TRBJ2-7)
SASSLGGYEQYF

SEQ ID NO: 479573 - protein, 13 aa, Homo sapiens
  CDR3 for alpha chain variable domain of TCR clone 239787 (TRAV22, TRAJ40)
FAVGVSGTYKYIF

SEQ ID NO: 479574 - protein, 10 aa, Homo sapiens
  CDR3 for beta chain variable domain of TCR clone 239787 (TRBV19, TRBJ1-1)
CASRQVEAFF

SEQ ID NO: 479575 - protein, 12 aa, Homo sapiens
  CDR3 for alpha chain variable domain of TCR clone 239788 (TRAV25, TRAJ38)
CAGTGNNRKLIC

SEQ ID NO: 479576 - protein, 14 aa, Homo sapiens
  CDR3 for beta chain variable domain of TCR clone 239788 (TRBV19, TRBJ1-5)
CASSKMTGPQPQHF

SEQ ID NO: 479577 - protein, 14 aa, Homo sapiens
  CDR3 for alpha chain variable domain of TCR clone 239789 (TRAV8-6, TRAJ49)
CAVSVRYTGNQFYF

SEQ ID NO: 479578 - protein, 19 aa, Homo sapiens
  CDR3 for beta chain variable domain of TCR clone 239789 (TRBV28, TRBJ2-1)
CTSSFSIRGSGRTRYEQFF

SEQ ID NO: 479579 - protein, 10 aa, Homo sapiens
  CDR3 for alpha chain variable domain of TCR clone 239790 (TRAV13-1, TRAJ8)
CAAPFQKLVF

SEQ ID NO: 479580 - protein, 13 aa, Homo sapiens
  CDR3 for beta chain variable domain of TCR clone 239790 (TRBV4-2, TRBJ2-3)
CASSLTSRDTQYF

SEQ ID NO: 479581 - protein, 14 aa, Homo sapiens
  CDR3 for alpha chain variable domain of TCR clone 239791 (TRAV13-1, TRAJ35)
CAASKGGCGNVLHC

SEQ ID NO: 479582 - protein, 16 aa, Homo sapiens
  CDR3 for beta chain variable domain of TCR clone 239791 (TRBV2, TRBJ1-4)
CASNLLQGATNEKLFF

SEQ ID NO: 479583 - protein, 18 aa, Homo sapiens
  CDR3 for alpha chain variable domain of TCR clone 239792 (TRAV9-2, TRAJ52)
CALSRHNAGGTSYGKLTF

SEQ ID NO: 479584 - protein, 13 aa, Homo sapiens
  CDR3 for beta chain variable domain of TCR clone 239792 (TRBV7-9, TRBJ1-2)
CSSSLKQNYGYTF

SEQ ID NO: 479585 - protein, 15 aa, Homo sapiens
  CDR3 for alpha chain variable domain of TCR clone 239793 (TRAV12-3, TRAJ6)
CSMSATPGGSYIPTF

SEQ ID NO: 479586 - protein, 11 aa, Homo sapiens
  CDR3 for beta chain variable domain of TCR clone 239793 (TRBV20-1, TRBJ1-5)
CSAQGDKPQHF

SEQ ID NO: 479587 - protein, 14 aa, Homo sapiens
  CDR3 for alpha chain variable domain of TCR clone 239794 (TRAV35, TRAJ33)
CAGSSQDSNYQVIW

SEQ ID NO: 479588 - protein, 18 aa, Homo sapiens
  CDR3 for beta chain variable domain of TCR clone 239794 (TRBV20-1, TRBJ2-6)
CSAETTPTHGSGANVLTF

SEQ ID NO: 479589 - protein, 12 aa, Homo sapiens
  CDR3 for alpha chain variable domain of TCR clone 239795 (TRAV1-2, TRAJ26)
CAVRYYGQNFVF

SEQ ID NO: 479590 - protein, 14 aa, Homo sapiens
  CDR3 for beta chain variable domain of TCR clone 239795 (TRBV11-1, TRBJ2-7)
CASSFRQGSYVQYF

SEQ ID NO: 479591 - protein, 13 aa, Homo sapiens
  CDR3 for alpha chain variable domain of TCR clone 239796 (TRAV26-1, TRAJ33)
CIVRVEGNYRLIW

SEQ ID NO: 479592 - protein, 16 aa, Homo sapiens
  CDR3 for beta chain variable domain of TCR clone 239796 (TRBV15, TRBJ2-7)
CATSRDRGRRRGEQYF

SEQ ID NO: 479593 - protein, 15 aa, Homo sapiens
  CDR3 for alpha chain variable domain of TCR clone 239797 (TRAV25, TRAJ52)
CAGRPGGTSYGKLTF

SEQ ID NO: 479594 - protein, 12 aa, Homo sapiens
  CDR3 for beta chain variable domain of TCR clone 239797 (TRBV2, TRBJ2-1)
CAYGPPGNEQFF

SEQ ID NO: 479595 - protein, 11 aa, Homo sapiens
  CDR3 for alpha chain variable domain of TCR clone 239798 (TRAV4, TRAJ23)
CLVAPGGKLIF

SEQ ID NO: 479596 - protein, 15 aa, Homo sapiens
  CDR3 for beta chain variable domain of TCR clone 239798 (TRBV7-2, TRBJ2-1)
CAISFQADEYNEQFF

SEQ ID NO: 479597 - protein, 13 aa, Homo sapiens
  CDR3 for alpha chain variable domain of TCR clone 239799 (TRAV26-1, TRAJ54)
CIVRVKGAQKLEF

SEQ ID NO: 479598 - protein, 15 aa, Homo sapiens
  CDR3 for beta chain variable domain of TCR clone 239799 (TRBV20-1, TRBJ2-1)
CSAQPGGGPYNEQFF

SEQ ID NO: 479599 - protein, 17 aa, Homo sapiens
  CDR3 for alpha chain variable domain of TCR clone 239800 (TRAV3, TRAJ6)
CAVRDGPRAGGSYIPTF

SEQ ID NO: 479600 - protein, 16 aa, Homo sapiens
  CDR3 for beta chain variable domain of TCR clone 239800 (TRBV12-4, TRBJ2-7)
CASSLIGGTGTYEQYC

SEQ ID NO: 479601 - protein, 13 aa, Homo sapiens
  CDR3 for alpha chain variable domain of TCR clone 239801 (TRAV27, TRAJ41)
CAGEGNSGYALNF

SEQ ID NO: 479602 - protein, 14 aa, Homo sapiens
  CDR3 for beta chain variable domain of TCR clone 239801 (TRBV15, TRBJ2-5)
CATSIGGLGETQYF

SEQ ID NO: 479603 - protein, 15 aa, Homo sapiens
  CDR3 for alpha chain variable domain of TCR clone 239802 (TRAV25, TRAJ52)
CAGRPGGTSYGKLTF

SEQ ID NO: 479604 - protein, 14 aa, Homo sapiens
  CDR3 for beta chain variable domain of TCR clone 239802 (TRBV7-2, TRBJ2-7)
CASGSQGAAYEQYF

SEQ ID NO: 479605 - protein, 11 aa, Homo sapiens
  CDR3 for alpha chain variable domain of TCR clone 239803 (TRAV17, TRAJ39)
CATGAGNMLAF

SEQ ID NO: 479606 - protein, 16 aa, Homo sapiens
  CDR3 for beta chain variable domain of TCR clone 239803 (TRBV5-1, TRBJ2-1)
CASSFGVSGSYNEQFF

SEQ ID NO: 479607 - protein, 11 aa, Homo sapiens
  CDR3 for alpha chain variable domain of TCR clone 239804 (TRAV3, TRAJ21)
CAMGHFNKFYF

SEQ ID NO: 479608 - protein, 15 aa, Homo sapiens
  CDR3 for beta chain variable domain of TCR clone 239804 (TRBV29-1, TRBJ2-1)
CSVEGGPASYNEQFF

SEQ ID NO: 479609 - protein, 11 aa, Homo sapiens
  CDR3 for alpha chain variable domain of TCR clone 239805 (TRAV12-3, TRAJ43)
CAMSVSNDMRF

SEQ ID NO: 479610 - protein, 13 aa, Homo sapiens
  CDR3 for beta chain variable domain of TCR clone 239805 (TRBV20-1, TRBJ1-1)
CSAPLGEGTKAFF

SEQ ID NO: 479611 - protein, 14 aa, Homo sapiens
  CDR3 for alpha chain variable domain of TCR clone 239806 (TRAV9-2, TRAJ39)
CALYIYNAGNMLTF

SEQ ID NO: 479612 - protein, 13 aa, Homo sapiens
  CDR3 for beta chain variable domain of TCR clone 239806 (TRBV7-9, TRBJ1-2)
CASSLRQNYGYTF

SEQ ID NO: 479613 - protein, 11 aa, Homo sapiens
  CDR3 for alpha chain variable domain of TCR clone 239807 (TRAV1-2, TRAJ20)
CAVSNDYKLTF

SEQ ID NO: 479614 - protein, 12 aa, Homo sapiens
  CDR3 for beta chain variable domain of TCR clone 239807 (TRBV7-9, TRBJ2-7)
CASSIKREEQYF

SEQ ID NO: 479615 - protein, 15 aa, Homo sapiens
  CDR3 for alpha chain variable domain of TCR clone 239808 (TRAV21, TRAJ40)
CAVRPQTSGTYKYIF

SEQ ID NO: 479616 - protein, 13 aa, Homo sapiens
  CDR3 for beta chain variable domain of TCR clone 239808 (TRBV7-2, TRBJ2-2)
CASSSVRAGELFS

SEQ ID NO: 479617 - protein, 12 aa, Homo sapiens
  CDR3 for alpha chain variable domain of TCR clone 239809 (TRAV13-1, TRAJ21)
CAAKEGFNKFYF

SEQ ID NO: 479618 - protein, 15 aa, Homo sapiens
  CDR3 for beta chain variable domain of TCR clone 239809 (TRBV12-4, TRBJ2-5)
CASSPPTGLQETKYF

SEQ ID NO: 479619 - protein, 13 aa, Homo sapiens
  CDR3 for alpha chain variable domain of TCR clone 239810 (TRAV20, TRAJ21)
CAVEGYSFNKFYF

SEQ ID NO: 479620 - protein, 14 aa, Homo sapiens
  CDR3 for beta chain variable domain of TCR clone 239810 (TRBV12-5, TRBJ2-5)
CASGSRTHQETQYF

SEQ ID NO: 479621 - protein, 10 aa, Homo sapiens
  CDR3 for alpha chain variable domain of TCR clone 239811 (TRAV30, TRAJ48)
CGIGNEKLTF

SEQ ID NO: 479622 - protein, 15 aa, Homo sapiens
  CDR3 for beta chain variable domain of TCR clone 239811 (TRBV18, TRBJ2-1)
CASSPPSASYNEQFF

SEQ ID NO: 479623 - protein, 16 aa, Homo sapiens
  CDR3 for alpha chain variable domain of TCR clone 239812 (TRAV30, TRAJ24)
CGTEILDADSWGKFQF

SEQ ID NO: 479624 - protein, 14 aa, Homo sapiens
  CDR3 for beta chain variable domain of TCR clone 239812 (TRBV7-2, TRBJ2-7)
CASSPKTSFYEQYF

SEQ ID NO: 479625 - protein, 13 aa, Homo sapiens
  CDR3 for alpha chain variable domain of TCR clone 239813 (TRAV17, TRAJ40)
CATRPSGTYTYIF

SEQ ID NO: 479626 - protein, 16 aa, Homo sapiens
  CDR3 for beta chain variable domain of TCR clone 239813 (TRBV19, TRBJ2-5)
CASSIGTSGSQETQYF

SEQ ID NO: 479627 - protein, 12 aa, Homo sapiens
  CDR3 for alpha chain variable domain of TCR clone 239814 (TRAV27, TRAJ38)
YPVAGNNRKLIW

SEQ ID NO: 479628 - protein, 13 aa, Homo sapiens
  CDR3 for beta chain variable domain of TCR clone 239814 (TRBV19, TRBJ1-4)
CASPTQGNEKLFF

SEQ ID NO: 479629 - protein, 17 aa, Homo sapiens
  CDR3 for alpha chain variable domain of TCR clone 239815 (TRAV13-1, TRAJ10)
CAASLWRGTGGGNKLTF

SEQ ID NO: 479630 - protein, 13 aa, Homo sapiens
  CDR3 for beta chain variable domain of TCR clone 239815 (TRBV20-1, TRBJ1-1)
CSARGGGNTEAFF

SEQ ID NO: 479631 - protein, 15 aa, Homo sapiens
  CDR3 for alpha chain variable domain of TCR clone 239816 (TRAV17, TRAJ35)
CATAFVIGFGDVLPC

SEQ ID NO: 479632 - protein, 15 aa, Homo sapiens
  CDR3 for beta chain variable domain of TCR clone 239816 (TRBV7-9, TRBJ2-7)
CASSLALAEAYEQYF

SEQ ID NO: 479633 - protein, 17 aa, Homo sapiens
  CDR3 for alpha chain variable domain of TCR clone 239817 (TRAV27, TRAJ18)
CAGLHRGRGSTLGRLYF

SEQ ID NO: 479634 - protein, 15 aa, Homo sapiens
  CDR3 for beta chain variable domain of TCR clone 239817 (TRBV27, TRBJ2-6)
CASSLVGSGANVLTF

SEQ ID NO: 479635 - protein, 16 aa, Homo sapiens
  CDR3 for alpha chain variable domain of TCR clone 239818 (TRAV12-1, TRAJ53)
CVVASVAGGSNYKLTF

SEQ ID NO: 479636 - protein, 13 aa, Homo sapiens
  CDR3 for beta chain variable domain of TCR clone 239818 (TRBV7-2, TRBJ2-2)
CASSSVRAGELFF

SEQ ID NO: 479637 - protein, 13 aa, Homo sapiens
  CDR3 for alpha chain variable domain of TCR clone 239819 (TRAV13-2, TRAJ48)
CAEMDFGNEKLTF

SEQ ID NO: 479638 - protein, 15 aa, Homo sapiens
  CDR3 for beta chain variable domain of TCR clone 239819 (TRBV28, TRBJ2-5)
CASSPGQGSIETQYF

SEQ ID NO: 479639 - protein, 15 aa, Homo sapiens
  CDR3 for alpha chain variable domain of TCR clone 239820 (TRAV8-4, TRAJ13)
CAVSDWSGGYQKVTF

SEQ ID NO: 479640 - protein, 15 aa, Homo sapiens
  CDR3 for beta chain variable domain of TCR clone 239820 (TRBV6-1, TRBJ2-3)
CASSERGGITDTQYF

SEQ ID NO: 479641 - protein, 14 aa, Homo sapiens
  CDR3 for alpha chain variable domain of TCR clone 239821 (TRAV1-2, TRAJ17)
CAVRDITAGNKLTF

SEQ ID NO: 479642 - protein, 15 aa, Homo sapiens
  CDR3 for beta chain variable domain of TCR clone 239821 (TRBV20-1, TRBJ2-7)
CSARDRVSGMDEQYF

SEQ ID NO: 479643 - protein, 14 aa, Homo sapiens
  CDR3 for alpha chain variable domain of TCR clone 239822 (TRAV1-1, TRAJ35)
CAVRSIGFGNVLHC

SEQ ID NO: 479644 - protein, 14 aa, Homo sapiens
  CDR3 for beta chain variable domain of TCR clone 239822 (TRBV19, TRBJ2-1)
CASPTVVLSGEQFF

SEQ ID NO: 479645 - protein, 15 aa, Homo sapiens
  CDR3 for alpha chain variable domain of TCR clone 239823 (TRAV12-2, TRAJ53)
CAVNGGGGSNYKLTF

SEQ ID NO: 479646 - protein, 13 aa, Homo sapiens
  CDR3 for beta chain variable domain of TCR clone 239823 (TRBV10-2, TRBJ2-7)
CASGASGGYEQYF

SEQ ID NO: 479647 - protein, 16 aa, Homo sapiens
  CDR3 for alpha chain variable domain of TCR clone 239824 (TRAV16, TRAJ57)
CAPYLITQGGSEKLVF

SEQ ID NO: 479648 - protein, 14 aa, Homo sapiens
  CDR3 for beta chain variable domain of TCR clone 239824 (TRBV7-2, TRBJ2-7)
CASSLYPGRYEQYF

SEQ ID NO: 479649 - protein, 16 aa, Homo sapiens
  CDR3 for alpha chain variable domain of TCR clone 239825 (TRAV16, TRAJ42)
CALSGYYGGSQGNLIF

SEQ ID NO: 479650 - protein, 13 aa, Homo sapiens
  CDR3 for beta chain variable domain of TCR clone 239825 (TRBV20-1, TRBJ1-1)
CSARGGGNTEAFF

SEQ ID NO: 479651 - protein, 14 aa, Homo sapiens
  CDR3 for alpha chain variable domain of TCR clone 239826 (TRAV2, TRAJ39)
CAVEGDNAANMLTF

SEQ ID NO: 479652 - protein, 14 aa, Homo sapiens
  CDR3 for beta chain variable domain of TCR clone 239826 (TRBV28, TRBJ2-7)
CASSLRARGNEQYF

SEQ ID NO: 479653 - protein, 21 aa, Homo sapiens
  CDR3 for alpha chain variable domain of TCR clone 239827 (TRAV1-1, TRAJ6)
CLLLLRCERLERTGGSYIPTF

SEQ ID NO: 479654 - protein, 13 aa, Homo sapiens
  CDR3 for beta chain variable domain of TCR clone 239827 (TRBV10-2, TRBJ2-7)
CASGASRGYEQYF

SEQ ID NO: 479655 - protein, 12 aa, Homo sapiens
  CDR3 for alpha chain variable domain of TCR clone 239828 (TRAV3, TRAJ43)
CAVRDPNNDMRF

SEQ ID NO: 479656 - protein, 12 aa, Homo sapiens
  CDR3 for beta chain variable domain of TCR clone 239828 (TRBV24-1, TRBJ2-7)
CATSDPGYEQYF

SEQ ID NO: 479657 - protein, 13 aa, Homo sapiens
  CDR3 for alpha chain variable domain of TCR clone 239829 (TRAV21, TRAJ57)
CAVTQGGPEKLVF

SEQ ID NO: 479658 - protein, 16 aa, Homo sapiens
  CDR3 for beta chain variable domain of TCR clone 239829 (TRBV29-1, TRBJ2-7)
RSVEDAEDGTAYEQYF

SEQ ID NO: 479659 - protein, 14 aa, Homo sapiens
  CDR3 for alpha chain variable domain of TCR clone 239830 (TRAV12-1, TRAJ24)
CMVRSTDSWGKFQF

SEQ ID NO: 479660 - protein, 13 aa, Homo sapiens
  CDR3 for beta chain variable domain of TCR clone 239830 (TRBV2, TRBJ2-3)
CASILAGGQGQYF

SEQ ID NO: 479661 - protein, 13 aa, Homo sapiens
  CDR3 for alpha chain variable domain of TCR clone 239831 (TRAV12-3, TRAJ7)
CAMTPYGNNRLAF

SEQ ID NO: 479662 - protein, 15 aa, Homo sapiens
  CDR3 for beta chain variable domain of TCR clone 239831 (TRBV7-9, TRBJ2-7)
CASSLPMGQANEQYF

SEQ ID NO: 479663 - protein, 12 aa, Homo sapiens
  CDR3 for alpha chain variable domain of TCR clone 239832 (TRAV20, TRAJ23)
CAVHNQGGELIF

SEQ ID NO: 479664 - protein, 13 aa, Homo sapiens
  CDR3 for beta chain variable domain of TCR clone 239832 (TRBV19, TRBJ1-2)
CASSVPGQDGYTF

SEQ ID NO: 479665 - protein, 13 aa, Homo sapiens
  CDR3 for alpha chain variable domain of TCR clone 239833 (TRAV21, TRAJ20)
CAVGLRVDYKLSF

SEQ ID NO: 479666 - protein, 13 aa, Homo sapiens
  CDR3 for beta chain variable domain of TCR clone 239833 (TRBV14, TRBJ2-7)
CASSQDRRYEQYF

SEQ ID NO: 479667 - protein, 13 aa, Homo sapiens
  CDR3 for alpha chain variable domain of TCR clone 239834 (TRAV8-4, TRAJ4)
CCEPSGGYNKLIF

SEQ ID NO: 479668 - protein, 15 aa, Homo sapiens
  CDR3 for beta chain variable domain of TCR clone 239834 (TRBV7-8, TRBJ2-3)
CASSLSADSGGAQYF

SEQ ID NO: 479669 - protein, 14 aa, Homo sapiens
  CDR3 for alpha chain variable domain of TCR clone 239835 (TRAV17, TRAJ35)
CATDRPGFGNVLHC

SEQ ID NO: 479670 - protein, 14 aa, Homo sapiens
  CDR3 for beta chain variable domain of TCR clone 239835 (TRBV7-8, TRBJ2-3)
CASSLEAGTETQYF

SEQ ID NO: 479671 - protein, 16 aa, Homo sapiens
  CDR3 for alpha chain variable domain of TCR clone 239836 (TRAV8-3, TRAJ8)
CAVPRDGNTGFQKLVF

SEQ ID NO: 479672 - protein, 14 aa, Homo sapiens
  CDR3 for beta chain variable domain of TCR clone 239836 (TRBV28, TRBJ1-1)
CASSQSGRGTEAFF

SEQ ID NO: 479673 - protein, 13 aa, Homo sapiens
  CDR3 for alpha chain variable domain of TCR clone 239837 (TRAV13-2, TRAJ54)
CAENYQGAQKLLF

SEQ ID NO: 479674 - protein, 15 aa, Homo sapiens
  CDR3 for beta chain variable domain of TCR clone 239837 (TRBV3-1, TRBJ2-5)
CASSRGLALRETQYF

SEQ ID NO: 479675 - protein, 11 aa, Homo sapiens
  CDR3 for alpha chain variable domain of TCR clone 239838 (TRAV12-1, TRAJ42)
CERRKPRNLIS

SEQ ID NO: 479676 - protein, 18 aa, Homo sapiens
  CDR3 for beta chain variable domain of TCR clone 239838 (TRBV11-2, TRBJ2-3)
CASSLGGASRGAPNTQYF

SEQ ID NO: 479677 - protein, 15 aa, Homo sapiens
  CDR3 for alpha chain variable domain of TCR clone 239839 (TRAV4, TRAJ39)
CLVGPNNNAGNILTF

SEQ ID NO: 479678 - protein, 14 aa, Homo sapiens
  CDR3 for beta chain variable domain of TCR clone 239839 (TRBV12-4, TRBJ1-1)
CASSLGTGGTEAFF

SEQ ID NO: 479679 - protein, 15 aa, Homo sapiens
  CDR3 for alpha chain variable domain of TCR clone 239840 (TRAV13-1, TRAJ52)
SYYNAGGTSYGKLTF

SEQ ID NO: 479680 - protein, 13 aa, Homo sapiens
  CDR3 for beta chain variable domain of TCR clone 239840 (TRBV15, TRBJ1-6)
CATSGGLNSPLHF

SEQ ID NO: 479681 - protein, 13 aa, Homo sapiens
  CDR3 for alpha chain variable domain of TCR clone 239841 (TRAV12-2, TRAJ12)
CAVNWDSSYKLIF

SEQ ID NO: 479682 - protein, 13 aa, Homo sapiens
  CDR3 for beta chain variable domain of TCR clone 239841 (TRBV4-2, TRBJ1-1)
CASSQAGNTEAFF

SEQ ID NO: 479683 - protein, 12 aa, Homo sapiens
  CDR3 for alpha chain variable domain of TCR clone 239842 (TRAV27, TRAJ35)
CAGADFGNVLHC

SEQ ID NO: 479684 - protein, 16 aa, Homo sapiens
  CDR3 for beta chain variable domain of TCR clone 239842 (TRBV29-1, TRBJ2-7)
CSVEDAEDGTAYEQYF

SEQ ID NO: 479685 - protein, 16 aa, Homo sapiens
  CDR3 for alpha chain variable domain of TCR clone 239843 (TRAV38-1, TRAJ37)
CAFKVDGSSNTGKLIF

SEQ ID NO: 479686 - protein, 13 aa, Homo sapiens
  CDR3 for beta chain variable domain of TCR clone 239843 (TRBV12-4, TRBJ2-5)
CASSLFRRETQYF

SEQ ID NO: 479687 - protein, 17 aa, Homo sapiens
  CDR3 for alpha chain variable domain of TCR clone 239844 (TRAV1-1, TRAJ4)
CAPYNKLIFGAGTRLAV

SEQ ID NO: 479688 - protein, 16 aa, Homo sapiens
  CDR3 for beta chain variable domain of TCR clone 239844 (TRBV7-3, TRBJ2-2)
CASSLKRGTLSGELFS

SEQ ID NO: 479689 - protein, 14 aa, Homo sapiens
  CDR3 for alpha chain variable domain of TCR clone 239845 (TRAV38-1, TRAJ45)
CSSHSGVGADGLTF

SEQ ID NO: 479690 - protein, 13 aa, Homo sapiens
  CDR3 for beta chain variable domain of TCR clone 239845 (TRBV10-3, TRBJ1-2)
CAISERDSYGYTF

SEQ ID NO: 479691 - protein, 10 aa, Homo sapiens
  CDR3 for alpha chain variable domain of TCR clone 239846 (TRAV21, TRAJ48)
CCDGNEKLTF

SEQ ID NO: 479692 - protein, 15 aa, Homo sapiens
  CDR3 for beta chain variable domain of TCR clone 239846 (TRBV27, TRBJ2-1)
CASSNGGGSSNEQFF

SEQ ID NO: 479693 - protein, 14 aa, Homo sapiens
  CDR3 for alpha chain variable domain of TCR clone 239847 (TRAV12-3, TRAJ10)
SHLPLTGGGNKLTF

SEQ ID NO: 479694 - protein, 15 aa, Homo sapiens
  CDR3 for beta chain variable domain of TCR clone 239847 (TRBV4-1, TRBJ1-4)
CASSDTGATNEKLFF

SEQ ID NO: 479695 - protein, 14 aa, Homo sapiens
  CDR3 for alpha chain variable domain of TCR clone 239848 (TRAV13-1, TRAJ35)
CAASKGGFGNVLHC

SEQ ID NO: 479696 - protein, 12 aa, Homo sapiens
  CDR3 for beta chain variable domain of TCR clone 239848 (TRBV7-9, TRBJ1-5)
CASSPQGQPQHF

SEQ ID NO: 479697 - protein, 15 aa, Homo sapiens
  CDR3 for alpha chain variable domain of TCR clone 239849 (TRAV17, TRAJ4)
CATGTWSGGYNKLIF

SEQ ID NO: 479698 - protein, 15 aa, Homo sapiens
  CDR3 for beta chain variable domain of TCR clone 239849 (TRBV6-6, TRBJ2-7)
CASSQSTSPSSTSGR

SEQ ID NO: 479699 - protein, 14 aa, Homo sapiens
  CDR3 for alpha chain variable domain of TCR clone 239850 (TRAV6, TRAJ40)
CALDATSGTYKYLF

SEQ ID NO: 479700 - protein, 16 aa, Homo sapiens
  CDR3 for beta chain variable domain of TCR clone 239850 (TRBV7-8, TRBJ2-5)
CASSPAGGRNQETQYF

SEQ ID NO: 479701 - protein, 15 aa, Homo sapiens
  CDR3 for alpha chain variable domain of TCR clone 239851 (TRAV26-1, TRAJ23)
CIVRVAGYQGGKLIF

SEQ ID NO: 479702 - protein, 18 aa, Homo sapiens
  CDR3 for beta chain variable domain of TCR clone 239851 (TRBV12-4, TRBJ2-2)
CASSRSGGAIPNTGELFF

SEQ ID NO: 479703 - protein, 13 aa, Homo sapiens
  CDR3 for alpha chain variable domain of TCR clone 239852 (TRAV12-1, TRAJ29)
CVVRNSGNTPPVF

SEQ ID NO: 479704 - protein, 14 aa, Homo sapiens
  CDR3 for beta chain variable domain of TCR clone 239852 (TRBV7-2, TRBJ2-7)
CASRSQGAAYEQYF

SEQ ID NO: 479705 - protein, 13 aa, Homo sapiens
  CDR3 for alpha chain variable domain of TCR clone 239853 (TRAV38-2/DV8, TRAJ34)
CAYRTWNTDKLIF

SEQ ID NO: 479706 - protein, 11 aa, Homo sapiens
  CDR3 for beta chain variable domain of TCR clone 239853 (TRBV12-4, TRBJ2-3)
CASSFTDTQYF

SEQ ID NO: 479707 - protein, 14 aa, Homo sapiens
  CDR3 for alpha chain variable domain of TCR clone 239854 (TRAV12-3, TRAJ10)
SHLPLTGGGNKLTF

SEQ ID NO: 479708 - protein, 15 aa, Homo sapiens
  CDR3 for beta chain variable domain of TCR clone 239854 (TRBV28, TRBJ2-7)
CASSSPGTEPFEQYF

SEQ ID NO: 479709 - protein, 14 aa, Homo sapiens
  CDR3 for alpha chain variable domain of TCR clone 239855 (TRAV1-2, TRAJ16)
CAVNRFSDGQKLLF

SEQ ID NO: 479710 - protein, 13 aa, Homo sapiens
  CDR3 for beta chain variable domain of TCR clone 239855 (TRBV2, TRBJ2-7)
CASSRDRAYEQYF

SEQ ID NO: 479711 - protein, 14 aa, Homo sapiens
  CDR3 for alpha chain variable domain of TCR clone 239856 (TRAV1-2, TRAJ15)
CAVRDRQAGTALIF

SEQ ID NO: 479712 - protein, 13 aa, Homo sapiens
  CDR3 for beta chain variable domain of TCR clone 239856 (TRBV7-7, TRBJ2-2)
CASSLTSAGELFF

SEQ ID NO: 479713 - protein, 19 aa, Homo sapiens
  CDR3 for alpha chain variable domain of TCR clone 239857 (TRAV2, TRAJ20)
ILQVRDADAAVYRDCKLSF

SEQ ID NO: 479714 - protein, 12 aa, Homo sapiens
  CDR3 for beta chain variable domain of TCR clone 239857 (TRBV11-2, TRBJ2-2)
CASSLGGGELFF

SEQ ID NO: 479715 - protein, 14 aa, Homo sapiens
  CDR3 for alpha chain variable domain of TCR clone 239858 (TRAV12-2, TRAJ53)
CRERGGGSNYKLTF

SEQ ID NO: 479716 - protein, 17 aa, Homo sapiens
  CDR3 for beta chain variable domain of TCR clone 239858 (TRBV7-3, TRBJ2-3)
CASSLMKGMRGADTQYF

SEQ ID NO: 479717 - protein, 16 aa, Homo sapiens
  CDR3 for alpha chain variable domain of TCR clone 239859 (TRAV36/DV7, TRAJ30)
CAVETYGLDRDDKIIF

SEQ ID NO: 479718 - protein, 15 aa, Homo sapiens
  CDR3 for beta chain variable domain of TCR clone 239859 (TRBV6-3, TRBJ2-7)
CASSSPGTVFYEQYF

SEQ ID NO: 479719 - protein, 15 aa, Homo sapiens
  CDR3 for alpha chain variable domain of TCR clone 239860 (TRAV3, TRAJ12)
CAVRDIRDSSYKLIF

SEQ ID NO: 479720 - protein, 15 aa, Homo sapiens
  CDR3 for beta chain variable domain of TCR clone 239860 (TRBV27, TRBJ2-7)
CASSLRNEHGYEQYF

SEQ ID NO: 479721 - protein, 15 aa, Homo sapiens
  CDR3 for alpha chain variable domain of TCR clone 239861 (TRAV8-6, TRAJ10)
CAVSDQAGGGNKLTF

SEQ ID NO: 479722 - protein, 15 aa, Homo sapiens
  CDR3 for beta chain variable domain of TCR clone 239861 (TRBV3-1, TRBJ2-5)
CASSASLGGPETQYF

SEQ ID NO: 479723 - protein, 13 aa, Homo sapiens
  CDR3 for alpha chain variable domain of TCR clone 239862 (TRAV26-2, TRAJ43)
CILRAVNNNDMRF

SEQ ID NO: 479724 - protein, 16 aa, Homo sapiens
  CDR3 for beta chain variable domain of TCR clone 239862 (TRBV13, TRBJ2-2)
CASSPRTGEHTGELFF

SEQ ID NO: 479725 - protein, 14 aa, Homo sapiens
  CDR3 for alpha chain variable domain of TCR clone 239863 (TRAV1-2, TRAJ16)
CAVNRFSDGQKLLL

SEQ ID NO: 479726 - protein, 15 aa, Homo sapiens
  CDR3 for beta chain variable domain of TCR clone 239863 (TRBV24-1, TRBJ2-5)
CATSETTGAVGAQYF

SEQ ID NO: 479727 - protein, 13 aa, Homo sapiens
  CDR3 for alpha chain variable domain of TCR clone 239864 (TRAV12-1, TRAJ26)
SATYLYYGQNFVF

SEQ ID NO: 479728 - protein, 15 aa, Homo sapiens
  CDR3 for beta chain variable domain of TCR clone 239864 (TRBV5-1, TRBJ2-6)
CASSLDPSGAIVLTF

SEQ ID NO: 479729 - protein, 16 aa, Homo sapiens
  CDR3 for alpha chain variable domain of TCR clone 239865 (TRAV14/DV4, TRAJ54)
CAMREGRIQGAQKLVF

SEQ ID NO: 479730 - protein, 12 aa, Homo sapiens
  CDR3 for beta chain variable domain of TCR clone 239865 (TRBV28, TRBJ2-3)
CASSLYRDTQYF

SEQ ID NO: 479731 - protein, 13 aa, Homo sapiens
  CDR3 for alpha chain variable domain of TCR clone 239866 (TRAV13-2, TRAJ53)
CEENMGSNYKLTF

SEQ ID NO: 479732 - protein, 13 aa, Homo sapiens
  CDR3 for beta chain variable domain of TCR clone 239866 (TRBV4-1, TRBJ2-2)
CASSQENTGELFF

SEQ ID NO: 479733 - protein, 16 aa, Homo sapiens
  CDR3 for alpha chain variable domain of TCR clone 239867 (TRAV17, TRAJ52)
CATDPMGGPSYGKLTF

SEQ ID NO: 479734 - protein, 16 aa, Homo sapiens
  CDR3 for beta chain variable domain of TCR clone 239867 (TRBV6-6, TRBJ2-3)
CASSYLKATSTDTQYF

SEQ ID NO: 479735 - protein, 16 aa, Homo sapiens
  CDR3 for alpha chain variable domain of TCR clone 239868 (TRAV30, TRAJ24)
GGTEIVDADSGGKFQC

SEQ ID NO: 479736 - protein, 14 aa, Homo sapiens
  CDR3 for beta chain variable domain of TCR clone 239868 (TRBV12-5, TRBJ2-5)
CASGSRTHQETQYF

SEQ ID NO: 479737 - protein, 14 aa, Homo sapiens
  CDR3 for alpha chain variable domain of TCR clone 239869 (TRAV23/DV6, TRAJ27)
CAASRDTNAGKSTF

SEQ ID NO: 479738 - protein, 13 aa, Homo sapiens
  CDR3 for beta chain variable domain of TCR clone 239869 (TRBV11-3, TRBJ1-5)
CASSSGGNQPQHF

SEQ ID NO: 479739 - protein, 14 aa, Homo sapiens
  CDR3 for alpha chain variable domain of TCR clone 239870 (TRAV29/DV5, TRAJ48)
CAAAANFGNEKLTF

SEQ ID NO: 479740 - protein, 14 aa, Homo sapiens
  CDR3 for beta chain variable domain of TCR clone 239870 (TRBV23-1, TRBJ2-5)
CASSFLRSQETQYF

SEQ ID NO: 479741 - protein, 12 aa, Homo sapiens
  CDR3 for alpha chain variable domain of TCR clone 239871 (TRAV36/DV7, TRAJ54)
CAVVRGAQQLVF

SEQ ID NO: 479742 - protein, 14 aa, Homo sapiens
  CDR3 for beta chain variable domain of TCR clone 239871 (TRBV7-3, TRBJ1-1)
CASSVKGGNTEAFF

SEQ ID NO: 479743 - protein, 14 aa, Homo sapiens
  CDR3 for alpha chain variable domain of TCR clone 239872 (TRAV12-2, TRAJ13)
CAVKKTGGYQKVTF

SEQ ID NO: 479744 - protein, 13 aa, Homo sapiens
  CDR3 for beta chain variable domain of TCR clone 239872 (TRBV12-4, TRBJ1-2)
CTSMPAVSYGYTF

SEQ ID NO: 479745 - protein, 16 aa, Homo sapiens
  CDR3 for alpha chain variable domain of TCR clone 239873 (TRAV21, TRAJ37)
CAVRPRGSSNTGKLIF

SEQ ID NO: 479746 - protein, 13 aa, Homo sapiens
  CDR3 for beta chain variable domain of TCR clone 239873 (TRBV7-9, TRBJ2-5)
CASLSPGQETQYY

SEQ ID NO: 479747 - protein, 16 aa, Homo sapiens
  CDR3 for alpha chain variable domain of TCR clone 239874 (TRAV17, TRAJ52)
CATGIIGGTSYGKLTF

SEQ ID NO: 479748 - protein, 11 aa, Homo sapiens
  CDR3 for beta chain variable domain of TCR clone 239874 (TRBV7-3, TRBJ2-1)
CQQLHNNEQFF

SEQ ID NO: 479749 - protein, 16 aa, Homo sapiens
  CDR3 for alpha chain variable domain of TCR clone 239875 (TRAV20, TRAJ52)
CAVLQDGGTRYGKLTF

SEQ ID NO: 479750 - protein, 12 aa, Homo sapiens
  CDR3 for beta chain variable domain of TCR clone 239875 (TRBV19, TRBJ2-1)
CASSQISNEQFF

SEQ ID NO: 479751 - protein, 15 aa, Homo sapiens
  CDR3 for alpha chain variable domain of TCR clone 239876 (TRAV2, TRAJ22)
CAVPSRGGSARQLTF

SEQ ID NO: 479752 - protein, 16 aa, Homo sapiens
  CDR3 for beta chain variable domain of TCR clone 239876 (TRBV7-3, TRBJ2-1)
CASSLEGYRSYNEQFF

SEQ ID NO: 479753 - protein, 15 aa, Homo sapiens
  CDR3 for alpha chain variable domain of TCR clone 239877 (TRAV20, TRAJ6)
CAVRLQSGGSYIPTF

SEQ ID NO: 479754 - protein, 17 aa, Homo sapiens
  CDR3 for beta chain variable domain of TCR clone 239877 (TRBV7-9, TRBJ2-3)
CASSPTVAGDLTDTQYF

SEQ ID NO: 479755 - protein, 16 aa, Homo sapiens
  CDR3 for alpha chain variable domain of TCR clone 239878 (TRAV13-2, TRAJ22)
CAENRGSTGSARQLTF

SEQ ID NO: 479756 - protein, 17 aa, Homo sapiens
  CDR3 for beta chain variable domain of TCR clone 239878 (TRBV14, TRBJ2-1)
CASSQDRRVSSYNKQFF

SEQ ID NO: 479757 - protein, 13 aa, Homo sapiens
  CDR3 for alpha chain variable domain of TCR clone 239879 (TRAV8-3, TRAJ36)
CAVGATGANNLFF

SEQ ID NO: 479758 - protein, 12 aa, Homo sapiens
  CDR3 for beta chain variable domain of TCR clone 239879 (TRBV28, TRBJ2-3)
CASSLYRDTQYF

SEQ ID NO: 479759 - protein, 13 aa, Homo sapiens
  CDR3 for alpha chain variable domain of TCR clone 239880 (TRAV8-3, TRAJ20)
CAVGRPNDYKLSF

SEQ ID NO: 479760 - protein, 15 aa, Homo sapiens
  CDR3 for beta chain variable domain of TCR clone 239880 (TRBV11-2, TRBJ2-1)
CASSLTSGGYNEQFF

SEQ ID NO: 479761 - protein, 16 aa, Homo sapiens
  CDR3 for alpha chain variable domain of TCR clone 239881 (TRAV3, TRAJ10)
CAVRDMRAGGGNKLTF

SEQ ID NO: 479762 - protein, 12 aa, Homo sapiens
  CDR3 for beta chain variable domain of TCR clone 239881 (TRBV7-9, TRBJ2-7)
CASSQGVYEQYF

SEQ ID NO: 479763 - protein, 11 aa, Homo sapiens
  CDR3 for alpha chain variable domain of TCR clone 239882 (TRAV2, TRAJ20)
CAVGGDYKLSF

SEQ ID NO: 479764 - protein, 15 aa, Homo sapiens
  CDR3 for beta chain variable domain of TCR clone 239882 (TRBV3-1, TRBJ2-7)
CASSQVRQGAYEQYF

SEQ ID NO: 479765 - protein, 15 aa, Homo sapiens
  CDR3 for alpha chain variable domain of TCR clone 239883 (TRAV12-3, TRAJ6)
CAMSAASGGSYIPNF

SEQ ID NO: 479766 - protein, 13 aa, Homo sapiens
  CDR3 for beta chain variable domain of TCR clone 239883 (TRBV20-1, TRBJ1-2)
CSASPEFNYGYTF

SEQ ID NO: 479767 - protein, 12 aa, Homo sapiens
  CDR3 for alpha chain variable domain of TCR clone 239884 (TRAV1-1, TRAJ43)
CAPRVSSNDIRF

SEQ ID NO: 479768 - protein, 14 aa, Homo sapiens
  CDR3 for beta chain variable domain of TCR clone 239884 (TRBV7-2, TRBJ2-7)
CASSPKTSFYEQYF

SEQ ID NO: 479769 - protein, 10 aa, Homo sapiens
  CDR3 for alpha chain variable domain of TCR clone 239885 (TRAV21, TRAJ49)
CAVTGNQFYF

SEQ ID NO: 479770 - protein, 15 aa, Homo sapiens
  CDR3 for beta chain variable domain of TCR clone 239885 (TRBV6-1, TRBJ2-3)
CASTTLAGHTDTQYS

SEQ ID NO: 479771 - protein, 10 aa, Homo sapiens
  CDR3 for alpha chain variable domain of TCR clone 239886 (TRAV12-2, TRAJ31)
CAVNNARLMF

SEQ ID NO: 479772 - protein, 16 aa, Homo sapiens
  CDR3 for beta chain variable domain of TCR clone 239886 (TRBV24-1, TRBJ2-3)
CATSDPGTGATDTQYF

SEQ ID NO: 479773 - protein, 14 aa, Homo sapiens
  CDR3 for alpha chain variable domain of TCR clone 239887 (TRAV21, TRAJ45)
CAVSSGGGADGLTF

SEQ ID NO: 479774 - protein, 15 aa, Homo sapiens
  CDR3 for beta chain variable domain of TCR clone 239887 (TRBV6-1, TRBJ2-4)
CASCEAVWTINIQYF

SEQ ID NO: 479775 - protein, 16 aa, Homo sapiens
  CDR3 for alpha chain variable domain of TCR clone 239888 (TRAV3, TRAJ10)
CAVRDMNAGGGNKLTF

SEQ ID NO: 479776 - protein, 16 aa, Homo sapiens
  CDR3 for beta chain variable domain of TCR clone 239888 (TRBV6-3, TRBJ1-2)
CASSYSRRASNYGYSF

SEQ ID NO: 479777 - protein, 15 aa, Homo sapiens
  CDR3 for alpha chain variable domain of TCR clone 239889 (TRAV20, TRAJ4)
CAVQVFSGGYNKLIF

SEQ ID NO: 479778 - protein, 14 aa, Homo sapiens
  CDR3 for beta chain variable domain of TCR clone 239889 (TRBV7-6, TRBJ2-3)
CASNSGGDANTQYL

SEQ ID NO: 479779 - protein, 11 aa, Homo sapiens
  CDR3 for alpha chain variable domain of TCR clone 239890 (TRAV1-1, TRAJ23)
CAVRQGGKLIF

SEQ ID NO: 479780 - protein, 12 aa, Homo sapiens
  CDR3 for beta chain variable domain of TCR clone 239890 (TRBV27, TRBJ2-5)
CASSPTGETQYF

SEQ ID NO: 479781 - protein, 23 aa, Homo sapiens
  CDR3 for alpha chain variable domain of TCR clone 239891 (TRAV16, TRAJ10)
CSRGRLRHVLLFSRTGGGNKLTF

SEQ ID NO: 479782 - protein, 15 aa, Homo sapiens
  CDR3 for beta chain variable domain of TCR clone 239891 (TRBV6-3, TRBJ2-7)
CASSSPGTVFYEQYF

SEQ ID NO: 479783 - protein, 17 aa, Homo sapiens
  CDR3 for alpha chain variable domain of TCR clone 239892 (TRAV38-2/DV8, TRAJ38)
CAYRSARGAGNNRKLFW

SEQ ID NO: 479784 - protein, 13 aa, Homo sapiens
  CDR3 for beta chain variable domain of TCR clone 239892 (TRBV12-4, TRBJ2-5)
CASSPGTEETQYF

SEQ ID NO: 479785 - protein, 13 aa, Homo sapiens
  CDR3 for alpha chain variable domain of TCR clone 239893 (TRAV29/DV5, TRAJ31)
CAASRNNNARLMV

SEQ ID NO: 479786 - protein, 12 aa, Homo sapiens
  CDR3 for beta chain variable domain of TCR clone 239893 (TRBV14, TRBJ2-4)
CASSNLKSIQYF

SEQ ID NO: 479787 - protein, 14 aa, Homo sapiens
  CDR3 for alpha chain variable domain of TCR clone 239894 (TRAV17, TRAJ6)
CATVFQGGSYIPTF

SEQ ID NO: 479788 - protein, 17 aa, Homo sapiens
  CDR3 for beta chain variable domain of TCR clone 239894 (TRBV7-8, TRBJ2-5)
CASSLASGGRFQETQYF

SEQ ID NO: 479789 - protein, 15 aa, Homo sapiens
  CDR3 for alpha chain variable domain of TCR clone 239895 (TRAV4, TRAJ10)
CLVGDGSGGGNKLTF

SEQ ID NO: 479790 - protein, 12 aa, Homo sapiens
  CDR3 for beta chain variable domain of TCR clone 239895 (TRBV29-1, TRBJ2-3)
CSVTGGADTQYF

SEQ ID NO: 479791 - protein, 23 aa, Homo sapiens
  CDR3 for alpha chain variable domain of TCR clone 239896 (TRAV12-2, TRAJ36)
SLLIRDSQPSDSATLERANNLFF

SEQ ID NO: 479792 - protein, 14 aa, Homo sapiens
  CDR3 for beta chain variable domain of TCR clone 239896 (TRBV5-1, TRBJ2-7)
CASSRGESLYEQYF

SEQ ID NO: 479793 - protein, 13 aa, Homo sapiens
  CDR3 for alpha chain variable domain of TCR clone 239897 (TRAV1-2, TRAJ9)
CAALNTGGFKTIF

SEQ ID NO: 479794 - protein, 10 aa, Homo sapiens
  CDR3 for beta chain variable domain of TCR clone 239897 (TRBV6-3, TRBJ2-7)
CASSSPGQFS

SEQ ID NO: 479795 - protein, 10 aa, Homo sapiens
  CDR3 for alpha chain variable domain of TCR clone 239898 (TRAV1-2, TRAJ31)
CVSEDARLMF

SEQ ID NO: 479796 - protein, 11 aa, Homo sapiens
  CDR3 for beta chain variable domain of TCR clone 239898 (TRBV19, TRBJ2-2)
CASRYSGELFF

SEQ ID NO: 479797 - protein, 12 aa, Homo sapiens
  CDR3 for alpha chain variable domain of TCR clone 239899 (TRAV27, TRAJ35)
CAGADFGNVLHC

SEQ ID NO: 479798 - protein, 16 aa, Homo sapiens
  CDR3 for beta chain variable domain of TCR clone 239899 (TRBV6-1, TRBJ2-1)
CASILRQGSSYNEEFF

SEQ ID NO: 479799 - protein, 15 aa, Homo sapiens
  CDR3 for alpha chain variable domain of TCR clone 239900 (TRAV16, TRAJ20)
CALTGGLTADYKLSF

SEQ ID NO: 479800 - protein, 16 aa, Homo sapiens
  CDR3 for beta chain variable domain of TCR clone 239900 (TRBV11-3, TRBJ2-2)
CASSSRTSPGTGELFF

SEQ ID NO: 479801 - protein, 15 aa, Homo sapiens
  CDR3 for alpha chain variable domain of TCR clone 239901 (TRAV13-1, TRAJ52)
SYYNAGGTSDGKLTF

SEQ ID NO: 479802 - protein, 11 aa, Homo sapiens
  CDR3 for beta chain variable domain of TCR clone 239901 (TRBV12-4, TRBJ2-2)
CASSSAGELFF

SEQ ID NO: 479803 - protein, 14 aa, Homo sapiens
  CDR3 for alpha chain variable domain of TCR clone 239902 (TRAV13-1, TRAJ28)
CAASKGAGSYQLTF

SEQ ID NO: 479804 - protein, 16 aa, Homo sapiens
  CDR3 for beta chain variable domain of TCR clone 239902 (TRBV4-2, TRBJ2-3)
CASSQGGARGGGEAVF

SEQ ID NO: 479805 - protein, 16 aa, Homo sapiens
  CDR3 for alpha chain variable domain of TCR clone 239903 (TRAV23/DV6, TRAJ48)
CAASGVVNFGNENLTF

SEQ ID NO: 479806 - protein, 15 aa, Homo sapiens
  CDR3 for beta chain variable domain of TCR clone 239903 (TRBV7-9, TRBJ2-1)
CASSLGWGRANEQFF

SEQ ID NO: 479807 - protein, 12 aa, Homo sapiens
  CDR3 for alpha chain variable domain of TCR clone 239904 (TRAV36/DV7, TRAJ43)
CAVVGNNNDMRF

SEQ ID NO: 479808 - protein, 14 aa, Homo sapiens
  CDR3 for beta chain variable domain of TCR clone 239904 (TRBV7-2, TRBJ2-7)
CASSPKTSFYEQYF

SEQ ID NO: 479809 - protein, 13 aa, Homo sapiens
  CDR3 for alpha chain variable domain of TCR clone 239905 (TRAV12-3, TRAJ33)
CAMSVNSNYQLIW

SEQ ID NO: 479810 - protein, 16 aa, Homo sapiens
  CDR3 for beta chain variable domain of TCR clone 239905 (TRBV13, TRBJ2-5)
CASSSRTGGSWETQYF

SEQ ID NO: 479811 - protein, 14 aa, Homo sapiens
  CDR3 for alpha chain variable domain of TCR clone 239906 (TRAV2, TRAJ22)
CCPLPGGSARQLTF

SEQ ID NO: 479812 - protein, 14 aa, Homo sapiens
  CDR3 for beta chain variable domain of TCR clone 239906 (TRBV7-6, TRBJ2-3)
CASSLGTVTDTQYF

SEQ ID NO: 479813 - protein, 14 aa, Homo sapiens
  CDR3 for alpha chain variable domain of TCR clone 239907 (TRAV12-2, TRAJ17)
CAVPFKAAGNKLTF

SEQ ID NO: 479814 - protein, 13 aa, Homo sapiens
  CDR3 for beta chain variable domain of TCR clone 239907 (TRBV19, TRBJ1-2)
CASSQGQVYGYTF

SEQ ID NO: 479815 - protein, 14 aa, Homo sapiens
  CDR3 for alpha chain variable domain of TCR clone 239908 (TRAV12-2, TRAJ5)
CAVKGDTGRRALTF

SEQ ID NO: 479816 - protein, 14 aa, Homo sapiens
  CDR3 for beta chain variable domain of TCR clone 239908 (TRBV5-1, TRBJ2-5)
CASSLAGKQETQYF

SEQ ID NO: 479817 - protein, 15 aa, Homo sapiens
  CDR3 for alpha chain variable domain of TCR clone 239909 (TRAV26-1, TRAJ39)
CIVRVVGDAGNMLTF

SEQ ID NO: 479818 - protein, 14 aa, Homo sapiens
  CDR3 for beta chain variable domain of TCR clone 239909 (TRBV4-2, TRBJ2-1)
CASGLDRAYNEQSF

SEQ ID NO: 479819 - protein, 16 aa, Homo sapiens
  CDR3 for alpha chain variable domain of TCR clone 239910 (TRAV12-3, TRAJ53)
CAMSPGMGGSHYKLTF

SEQ ID NO: 479820 - protein, 11 aa, Homo sapiens
  CDR3 for beta chain variable domain of TCR clone 239910 (TRBV29-1, TRBJ2-5)
CSEDRTGTQYS

SEQ ID NO: 479821 - protein, 12 aa, Homo sapiens
  CDR3 for alpha chain variable domain of TCR clone 239911 (TRAV29/DV5, TRAJ34)
CAASDNTGTLIF

SEQ ID NO: 479822 - protein, 13 aa, Homo sapiens
  CDR3 for beta chain variable domain of TCR clone 239911 (TRBV4-2, TRBJ1-1)
CASSQAGNTEAFF

SEQ ID NO: 479823 - protein, 17 aa, Homo sapiens
  CDR3 for alpha chain variable domain of TCR clone 239912 (TRAV23/DV6, TRAJ58)
CAARLLRGETSGSRLTF

SEQ ID NO: 479824 - protein, 17 aa, Homo sapiens
  CDR3 for beta chain variable domain of TCR clone 239912 (TRBV19, TRBJ2-7)
CASSISLYDSYPYEQYF

SEQ ID NO: 479825 - protein, 17 aa, Homo sapiens
  CDR3 for alpha chain variable domain of TCR clone 239913 (TRAV26-1, TRAJ53)
CIVRVDDSGGSNYKLTF

SEQ ID NO: 479826 - protein, 14 aa, Homo sapiens
  CDR3 for beta chain variable domain of TCR clone 239913 (TRBV18, TRBJ2-5)
CASSPGVSQETQYF

SEQ ID NO: 479827 - protein, 17 aa, Homo sapiens
  CDR3 for alpha chain variable domain of TCR clone 239914 (TRAV26-1, TRAJ47)
CIVPSLLYMEYGNKLVF

SEQ ID NO: 479828 - protein, 15 aa, Homo sapiens
  CDR3 for beta chain variable domain of TCR clone 239914 (TRBV27, TRBJ2-7)
CASSPIVTGAYEQYL

SEQ ID NO: 479829 - protein, 13 aa, Homo sapiens
  CDR3 for alpha chain variable domain of TCR clone 239915 (TRAV8-6, TRAJ43)
CAVSDLGNNDMRF

SEQ ID NO: 479830 - protein, 13 aa, Homo sapiens
  CDR3 for beta chain variable domain of TCR clone 239915 (TRBV4-2, TRBJ1-1)
CASSQAGNTEAFF

SEQ ID NO: 479831 - protein, 13 aa, Homo sapiens
  CDR3 for alpha chain variable domain of TCR clone 239916 (TRAV8-3, TRAJ44)
CAVVPCTASKLTF

SEQ ID NO: 479832 - protein, 14 aa, Homo sapiens
  CDR3 for beta chain variable domain of TCR clone 239916 (TRBV11-2, TRBJ2-3)
CASSRLARTDTQYF

SEQ ID NO: 479833 - protein, 12 aa, Homo sapiens
  CDR3 for alpha chain variable domain of TCR clone 239917 (TRAV16, TRAJ10)
CSRTRGGNKLTF

SEQ ID NO: 479834 - protein, 15 aa, Homo sapiens
  CDR3 for beta chain variable domain of TCR clone 239917 (TRBV6-3, TRBJ2-7)
CASSSPGTVFYEQYF

SEQ ID NO: 479835 - protein, 14 aa, Homo sapiens
  CDR3 for alpha chain variable domain of TCR clone 239918 (TRAV1-2, TRAJ8)
CAVREDTGLQKLVF

SEQ ID NO: 479836 - protein, 15 aa, Homo sapiens
  CDR3 for beta chain variable domain of TCR clone 239918 (TRBV20-1, TRBJ1-1)
CSASRGVTGNTEAFF

SEQ ID NO: 479837 - protein, 16 aa, Homo sapiens
  CDR3 for alpha chain variable domain of TCR clone 239919 (TRAV3, TRAJ10)
CAVRDMRAGGGNKLTF

SEQ ID NO: 479838 - protein, 14 aa, Homo sapiens
  CDR3 for beta chain variable domain of TCR clone 239919 (TRBV19, TRBJ2-1)
CASSRLASINEQFF

SEQ ID NO: 479839 - protein, 16 aa, Homo sapiens
  CDR3 for alpha chain variable domain of TCR clone 239920 (TRAV30, TRAJ24)
CGTEIVDADSWGKFQF

SEQ ID NO: 479840 - protein, 13 aa, Homo sapiens
  CDR3 for beta chain variable domain of TCR clone 239920 (TRBV5-1, TRBJ2-5)
CASRGTAQETQYF

SEQ ID NO: 479841 - protein, 15 aa, Homo sapiens
  CDR3 for alpha chain variable domain of TCR clone 239921 (TRAV4, TRAJ42)
CLVGGYGGSQGKLIF

SEQ ID NO: 479842 - protein, 16 aa, Homo sapiens
  CDR3 for beta chain variable domain of TCR clone 239921 (TRBV27, TRBJ1-1)
CASSTRTGGVGTEAFF

SEQ ID NO: 479843 - protein, 18 aa, Homo sapiens
  CDR3 for alpha chain variable domain of TCR clone 239922 (TRAV21, TRAJ52)
CAVRPYPAGGTSYGKLTL

SEQ ID NO: 479844 - protein, 17 aa, Homo sapiens
  CDR3 for beta chain variable domain of TCR clone 239922 (TRBV13, TRBJ2-3)
CASSLSRVAGGRNTQYF

SEQ ID NO: 479845 - protein, 13 aa, Homo sapiens
  CDR3 for alpha chain variable domain of TCR clone 239923 (TRAV38-2/DV8, TRAJ34)
CAYRTWNTDKLIF

SEQ ID NO: 479846 - protein, 14 aa, Homo sapiens
  CDR3 for beta chain variable domain of TCR clone 239923 (TRBV11-2, TRBJ2-5)
CASSRTGGIETQYF

SEQ ID NO: 479847 - protein, 14 aa, Homo sapiens
  CDR3 for alpha chain variable domain of TCR clone 239924 (TRAV8-3, TRAJ31)
CAVGRGLNNDRLMF

SEQ ID NO: 479848 - protein, 15 aa, Homo sapiens
  CDR3 for beta chain variable domain of TCR clone 239924 (TRBV7-2, TRBJ2-2)
CASSLAGGLTGELFF

SEQ ID NO: 479849 - protein, 23 aa, Homo sapiens
  CDR3 for alpha chain variable domain of TCR clone 239925 (TRAV26-1, TRAJ38)
CIADNAGNNHIQNPDPAVYQLRD

SEQ ID NO: 479850 - protein, 13 aa, Homo sapiens
  CDR3 for beta chain variable domain of TCR clone 239925 (TRBV28, TRBJ2-5)
CASSFAGGETQYF

SEQ ID NO: 479851 - protein, 12 aa, Homo sapiens
  CDR3 for alpha chain variable domain of TCR clone 239926 (TRAV12-3, TRAJ42)
CAPGGSQGNLII

SEQ ID NO: 479852 - protein, 13 aa, Homo sapiens
  CDR3 for beta chain variable domain of TCR clone 239926 (TRBV5-7, TRBJ2-6)
CASTFSGANVLTF

SEQ ID NO: 479853 - protein, 18 aa, Homo sapiens
  CDR3 for alpha chain variable domain of TCR clone 239927 (TRAV21, TRAJ52)
CAVRPSPAGGTSYGKLTF

SEQ ID NO: 479854 - protein, 15 aa, Homo sapiens
  CDR3 for beta chain variable domain of TCR clone 239927 (TRBV20-1, TRBJ2-1)
CSATSSGTSGGEQVC

SEQ ID NO: 479855 - protein, 13 aa, Homo sapiens
  CDR3 for alpha chain variable domain of TCR clone 239928 (TRAV27, TRAJ45)
CRSSEGGADGLTF

SEQ ID NO: 479856 - protein, 17 aa, Homo sapiens
  CDR3 for beta chain variable domain of TCR clone 239928 (TRBV11-2, TRBJ2-1)
CASSLYPPGAEYNEQFF

SEQ ID NO: 479857 - protein, 16 aa, Homo sapiens
  CDR3 for alpha chain variable domain of TCR clone 239929 (TRAV3, TRAJ4)
CAVRPSPSGGYNKLLF

SEQ ID NO: 479858 - protein, 12 aa, Homo sapiens
  CDR3 for beta chain variable domain of TCR clone 239929 (TRBV7-9, TRBJ1-5)
CASSPQGQPQHF

SEQ ID NO: 479859 - protein, 16 aa, Homo sapiens
  CDR3 for alpha chain variable domain of TCR clone 239930 (TRAV30, TRAJ24)
CGTEIVDADSWGKFQF

SEQ ID NO: 479860 - protein, 15 aa, Homo sapiens
  CDR3 for beta chain variable domain of TCR clone 239930 (TRBV27, TRBJ2-1)
CASSNGGGTSNEQFF

SEQ ID NO: 479861 - protein, 14 aa, Homo sapiens
  CDR3 for alpha chain variable domain of TCR clone 239931 (TRAV12-3, TRAJ10)
SHLPLTGGGNKLTF

SEQ ID NO: 479862 - protein, 17 aa, Homo sapiens
  CDR3 for beta chain variable domain of TCR clone 239931 (TRBV13, TRBJ2-3)
CASSLARVAGGRNTQYF

SEQ ID NO: 479863 - protein, 15 aa, Homo sapiens
  CDR3 for alpha chain variable domain of TCR clone 239932 (TRAV27, TRAJ38)
CAAHRNAGNNRKLIW

SEQ ID NO: 479864 - protein, 13 aa, Homo sapiens
  CDR3 for beta chain variable domain of TCR clone 239932 (TRBV7-3, TRBJ2-1)
CASSLDSYNEQFF

SEQ ID NO: 479865 - protein, 16 aa, Homo sapiens
  CDR3 for alpha chain variable domain of TCR clone 239933 (TRAV21, TRAJ52)
CAVTNAGGTSYGKLTF

SEQ ID NO: 479866 - protein, 16 aa, Homo sapiens
  CDR3 for beta chain variable domain of TCR clone 239933 (TRBV9, TRBJ2-1)
CASSVPSGSSYNEQFF

SEQ ID NO: 479867 - protein, 19 aa, Homo sapiens
  CDR3 for alpha chain variable domain of TCR clone 239934 (TRAV26-2, TRAJ52)
CILRTGFNAGGTSYGKLTF

SEQ ID NO: 479868 - protein, 15 aa, Homo sapiens
  CDR3 for beta chain variable domain of TCR clone 239934 (TRBV25-1, TRBJ1-4)
CASSKRIATNEKLFF

SEQ ID NO: 479869 - protein, 16 aa, Homo sapiens
  CDR3 for alpha chain variable domain of TCR clone 239935 (TRAV12-3, TRAJ53)
CAMSSGSGGSNYKLTF

SEQ ID NO: 479870 - protein, 13 aa, Homo sapiens
  CDR3 for beta chain variable domain of TCR clone 239935 (TRBV7-3, TRBJ1-1)
CASSQDWGAEAFF

SEQ ID NO: 479871 - protein, 11 aa, Homo sapiens
  CDR3 for alpha chain variable domain of TCR clone 239936 (TRAV12-1, TRAJ33)
CVVNMNYQLIW

SEQ ID NO: 479872 - protein, 15 aa, Homo sapiens
  CDR3 for beta chain variable domain of TCR clone 239936 (TRBV7-9, TRBJ1-5)
CASSQGHQPNQTQHF

SEQ ID NO: 479873 - protein, 11 aa, Homo sapiens
  CDR3 for alpha chain variable domain of TCR clone 239937 (TRAV2, TRAJ13)
CASGGYQNVTF

SEQ ID NO: 479874 - protein, 15 aa, Homo sapiens
  CDR3 for beta chain variable domain of TCR clone 239937 (TRBV20-1, TRBJ2-7)
CSTRDRVSGMDEQYF

SEQ ID NO: 479875 - protein, 18 aa, Homo sapiens
  CDR3 for alpha chain variable domain of TCR clone 239938 (TRAV12-3, TRAJ52)
CAMSRTNAGGTSYGKLTF

SEQ ID NO: 479876 - protein, 16 aa, Homo sapiens
  CDR3 for beta chain variable domain of TCR clone 239938 (TRBV24-1, TRBJ2-3)
CATSDPGTGATDTQYF

SEQ ID NO: 479877 - protein, 14 aa, Homo sapiens
  CDR3 for alpha chain variable domain of TCR clone 239939 (TRAV3, TRAJ22)
CAVRDYGSARQLTF

SEQ ID NO: 479878 - protein, 15 aa, Homo sapiens
  CDR3 for beta chain variable domain of TCR clone 239939 (TRBV11-2, TRBJ2-1)
CASSSPSTRYNEQFF

SEQ ID NO: 479879 - protein, 13 aa, Homo sapiens
  CDR3 for alpha chain variable domain of TCR clone 239940 (TRAV3, TRAJ27)
CAVRPLGAGKSTF

SEQ ID NO: 479880 - protein, 22 aa, Homo sapiens
  CDR3 for beta chain variable domain of TCR clone 239940 (TRBV29-1, TRBJ2-5)
TVSNMSPEDSSIYLCSAGTQYF

SEQ ID NO: 479881 - protein, 11 aa, Homo sapiens
  CDR3 for alpha chain variable domain of TCR clone 239941 (TRAV13-1, TRAJ49)
CACVGGNQFYF

SEQ ID NO: 479882 - protein, 15 aa, Homo sapiens
  CDR3 for beta chain variable domain of TCR clone 239941 (TRBV11-2, TRBJ2-7)
CASSSPGTVFYEQYF

SEQ ID NO: 479883 - protein, 11 aa, Homo sapiens
  CDR3 for alpha chain variable domain of TCR clone 239942 (TRAV23/DV6, TRAJ56)
CAAPANSKLTF

SEQ ID NO: 479884 - protein, 16 aa, Homo sapiens
  CDR3 for beta chain variable domain of TCR clone 239942 (TRBV4-2, TRBJ2-3)
CASSQELAGDTDTQYF

SEQ ID NO: 479885 - protein, 11 aa, Homo sapiens
  CDR3 for alpha chain variable domain of TCR clone 239943 (TRAV12-3, TRAJ27)
CAMANAGKSTF

SEQ ID NO: 479886 - protein, 18 aa, Homo sapiens
  CDR3 for beta chain variable domain of TCR clone 239943 (TRBV11-2, TRBJ2-3)
CASSLGGASRGAPNTQYF

SEQ ID NO: 479887 - protein, 14 aa, Homo sapiens
  CDR3 for alpha chain variable domain of TCR clone 239944 (TRAV30, TRAJ33)
CGTVAPRSNYQLIW

SEQ ID NO: 479888 - protein, 16 aa, Homo sapiens
  CDR3 for beta chain variable domain of TCR clone 239944 (TRBV28, TRBJ2-1)
CASSSPEYPRDNEQFF

SEQ ID NO: 479889 - protein, 13 aa, Homo sapiens
  CDR3 for alpha chain variable domain of TCR clone 239945 (TRAV21, TRAJ36)
CAEIKTGANNLFF

SEQ ID NO: 479890 - protein, 13 aa, Homo sapiens
  CDR3 for beta chain variable domain of TCR clone 239945 (TRBV29-1, TRBJ2-3)
CSATRGGRDTQYF

SEQ ID NO: 479891 - protein, 12 aa, Homo sapiens
  CDR3 for alpha chain variable domain of TCR clone 239946 (TRAV26-2, TRAJ21)
CILKGNFNKFYF

SEQ ID NO: 479892 - protein, 14 aa, Homo sapiens
  CDR3 for beta chain variable domain of TCR clone 239946 (TRBV7-9, TRBJ1-1)
CASTTLQSYTEAFF

SEQ ID NO: 479893 - protein, 10 aa, Homo sapiens
  CDR3 for alpha chain variable domain of TCR clone 239947 (TRAV1-2, TRAJ20)
CALNDYKHSF

SEQ ID NO: 479894 - protein, 16 aa, Homo sapiens
  CDR3 for beta chain variable domain of TCR clone 239947 (TRBV20-1, TRBJ1-1)
CSARALTQGMNTEAFF

SEQ ID NO: 479895 - protein, 14 aa, Homo sapiens
  CDR3 for alpha chain variable domain of TCR clone 239948 (TRAV26-1, TRAJ26)
CIVRATFLGQNFVF

SEQ ID NO: 479896 - protein, 16 aa, Homo sapiens
  CDR3 for beta chain variable domain of TCR clone 239948 (TRBV12-4, TRBJ2-7)
SASRSTGTGPSYEQYF

SEQ ID NO: 479897 - protein, 11 aa, Homo sapiens
  CDR3 for alpha chain variable domain of TCR clone 239949 (TRAV2, TRAJ33)
CAVGSNYQLIW

SEQ ID NO: 479898 - protein, 14 aa, Homo sapiens
  CDR3 for beta chain variable domain of TCR clone 239949 (TRBV11-2, TRBJ2-3)
CVSSRLARTDTQYF

SEQ ID NO: 479899 - protein, 15 aa, Homo sapiens
  CDR3 for alpha chain variable domain of TCR clone 239950 (TRAV2, TRAJ9)
CAVEDRGTGGFKTIF

SEQ ID NO: 479900 - protein, 15 aa, Homo sapiens
  CDR3 for beta chain variable domain of TCR clone 239950 (TRBV24-1, TRBJ2-3)
CPSDPGTGATDTQYF

SEQ ID NO: 479901 - protein, 13 aa, Homo sapiens
  CDR3 for alpha chain variable domain of TCR clone 239951 (TRAV1-1, TRAJ9)
CAAKNTGGFKTIF

SEQ ID NO: 479902 - protein, 17 aa, Homo sapiens
  CDR3 for beta chain variable domain of TCR clone 239951 (TRBV7-2, TRBJ2-3)
CASSSYSGTRRADTQYF

SEQ ID NO: 479903 - protein, 14 aa, Homo sapiens
  CDR3 for alpha chain variable domain of TCR clone 239952 (TRAV13-1, TRAJ20)
CAARPGSNDYKLSF

SEQ ID NO: 479904 - protein, 13 aa, Homo sapiens
  CDR3 for beta chain variable domain of TCR clone 239952 (TRBV7-3, TRBJ2-1)
CASSLWPYNEQFF

SEQ ID NO: 479905 - protein, 11 aa, Homo sapiens
  CDR3 for alpha chain variable domain of TCR clone 239953 (TRAV29/DV5, TRAJ37)
CATSNTGKLIF

SEQ ID NO: 479906 - protein, 18 aa, Homo sapiens
  CDR3 for beta chain variable domain of TCR clone 239953 (TRBV20-1, TRBJ2-6)
CSARTLAGDPSGANVLTF

SEQ ID NO: 479907 - protein, 14 aa, Homo sapiens
  CDR3 for alpha chain variable domain of TCR clone 239954 (TRAV13-1, TRAJ45)
VSVPEGGGADGLTF

SEQ ID NO: 479908 - protein, 14 aa, Homo sapiens
  CDR3 for beta chain variable domain of TCR clone 239954 (TRBV27, TRBJ1-1)
CASSPQGKRAESFF

SEQ ID NO: 479909 - protein, 14 aa, Homo sapiens
  CDR3 for alpha chain variable domain of TCR clone 239955 (TRAV26-1, TRAJ38)
CIADNAGSNRKLIW

SEQ ID NO: 479910 - protein, 13 aa, Homo sapiens
  CDR3 for beta chain variable domain of TCR clone 239955 (TRBV2, TRBJ1-5)
CATAGPGNQPQHF

SEQ ID NO: 479911 - protein, 18 aa, Homo sapiens
  CDR3 for alpha chain variable domain of TCR clone 239956 (TRAV21, TRAJ52)
CAVRPSPAGGTSYGKLTF

SEQ ID NO: 479912 - protein, 12 aa, Homo sapiens
  CDR3 for beta chain variable domain of TCR clone 239956 (TRBV18, TRBJ2-1)
CASSLTVGEQFF

SEQ ID NO: 479913 - protein, 13 aa, Homo sapiens
  CDR3 for alpha chain variable domain of TCR clone 239957 (TRAV8-6, TRAJ16)
CAVSSPNGQKLLF

SEQ ID NO: 479914 - protein, 16 aa, Homo sapiens
  CDR3 for beta chain variable domain of TCR clone 239957 (TRBV5-7, TRBJ2-3)
CASSSLGDAITDTQYF

SEQ ID NO: 479915 - protein, 12 aa, Homo sapiens
  CDR3 for alpha chain variable domain of TCR clone 239958 (TRAV35, TRAJ40)
CAGRAGTYKSIF

SEQ ID NO: 479916 - protein, 14 aa, Homo sapiens
  CDR3 for beta chain variable domain of TCR clone 239958 (TRBV7-2, TRBJ1-3)
CASSRGGTGNTIYF

SEQ ID NO: 479917 - protein, 14 aa, Homo sapiens
  CDR3 for alpha chain variable domain of TCR clone 239959 (TRAV1-2, TRAJ16)
CAVNRFSDGKKLLF

SEQ ID NO: 479918 - protein, 16 aa, Homo sapiens
  CDR3 for beta chain variable domain of TCR clone 239959 (TRBV9, TRBJ2-1)
CASSVGGGGNYNEQFF

SEQ ID NO: 479919 - protein, 11 aa, Homo sapiens
  CDR3 for alpha chain variable domain of TCR clone 239960 (TRAV13-2, TRAJ20)
CADSNDYKLSF

SEQ ID NO: 479920 - protein, 12 aa, Homo sapiens
  CDR3 for beta chain variable domain of TCR clone 239960 (TRBV5-1, TRBJ2-3)
CASSLAADTRYF

SEQ ID NO: 479921 - protein, 16 aa, Homo sapiens
  CDR3 for alpha chain variable domain of TCR clone 239961 (TRAV3, TRAJ37)
SAVRPHGSGNTGKLIF

SEQ ID NO: 479922 - protein, 16 aa, Homo sapiens
  CDR3 for beta chain variable domain of TCR clone 239961 (TRBV20-1, TRBJ1-4)
CSAPGQGLLTNEKLFF

SEQ ID NO: 479923 - protein, 15 aa, Homo sapiens
  CDR3 for alpha chain variable domain of TCR clone 239962 (TRAV3, TRAJ5)
CAVRDLDPGRRALTF

SEQ ID NO: 479924 - protein, 15 aa, Homo sapiens
  CDR3 for beta chain variable domain of TCR clone 239962 (TRBV12-4, TRBJ2-7)
CASSPTETYEGTSGR

SEQ ID NO: 479925 - protein, 13 aa, Homo sapiens
  CDR3 for alpha chain variable domain of TCR clone 239963 (TRAV9-2, TRAJ12)
CARGEDSSYKLIF

SEQ ID NO: 479926 - protein, 14 aa, Homo sapiens
  CDR3 for beta chain variable domain of TCR clone 239963 (TRBV25-1, TRBJ1-1)
CASTHLGGNTEAFF

SEQ ID NO: 479927 - protein, 16 aa, Homo sapiens
  CDR3 for alpha chain variable domain of TCR clone 239964 (TRAV12-2, TRAJ48)
CAVNPTSNFGNEKLTF

SEQ ID NO: 479928 - protein, 12 aa, Homo sapiens
  CDR3 for beta chain variable domain of TCR clone 239964 (TRBV9, TRBJ2-3)
CASSLRAGTHYF

SEQ ID NO: 479929 - protein, 15 aa, Homo sapiens
  CDR3 for alpha chain variable domain of TCR clone 239965 (TRAV3, TRAJ9)
CAVRARNTGGFKTIF

SEQ ID NO: 479930 - protein, 16 aa, Homo sapiens
  CDR3 for beta chain variable domain of TCR clone 239965 (TRBV6-1, TRBJ1-3)
CASVQGGVETPYILER

SEQ ID NO: 479931 - protein, 11 aa, Homo sapiens
  CDR3 for alpha chain variable domain of TCR clone 239966 (TRAV1-1, TRAJ23)
CAVRQGGKLIF

SEQ ID NO: 479932 - protein, 16 aa, Homo sapiens
  CDR3 for beta chain variable domain of TCR clone 239966 (TRBV6-1, TRBJ2-1)
CASSDLPGQLNNEQFF

SEQ ID NO: 479933 - protein, 14 aa, Homo sapiens
  CDR3 for alpha chain variable domain of TCR clone 239967 (TRAV12-2, TRAJ13)
CAVKKTGGYQKVTF

SEQ ID NO: 479934 - protein, 17 aa, Homo sapiens
  CDR3 for beta chain variable domain of TCR clone 239967 (TRBV13, TRBJ2-3)
CASSRSRVAGGRNTQYF

SEQ ID NO: 479935 - protein, 17 aa, Homo sapiens
  CDR3 for alpha chain variable domain of TCR clone 239968 (TRAV3, TRAJ42)
CAVKDRDYGGSQVNLIF

SEQ ID NO: 479936 - protein, 18 aa, Homo sapiens
  CDR3 for beta chain variable domain of TCR clone 239968 (TRBV20-1, TRBJ2-3)
CSASGLAGGPGTTDTQYF

SEQ ID NO: 479937 - protein, 13 aa, Homo sapiens
  CDR3 for alpha chain variable domain of TCR clone 239969 (TRAV8-3, TRAJ36)
CAVGVTGANNLFF

SEQ ID NO: 479938 - protein, 13 aa, Homo sapiens
  CDR3 for beta chain variable domain of TCR clone 239969 (TRBV12-4, TRBJ1-2)
CASSLRQGKGYTF

SEQ ID NO: 479939 - protein, 13 aa, Homo sapiens
  CDR3 for alpha chain variable domain of TCR clone 239970 (TRAV20, TRAJ49)
CAVQARTGNQFYF

SEQ ID NO: 479940 - protein, 14 aa, Homo sapiens
  CDR3 for beta chain variable domain of TCR clone 239970 (TRBV5-1, TRBJ1-1)
CASSLQGASTEAVF

SEQ ID NO: 479941 - protein, 14 aa, Homo sapiens
  CDR3 for alpha chain variable domain of TCR clone 239971 (TRAV1-2, TRAJ16)
CAVNRFSDGQKLLF

SEQ ID NO: 479942 - protein, 18 aa, Homo sapiens
  CDR3 for beta chain variable domain of TCR clone 239971 (TRBV5-5, TRBJ1-4)
CASSYPGQGFNKGEKLFF

SEQ ID NO: 479943 - protein, 14 aa, Homo sapiens
  CDR3 for alpha chain variable domain of TCR clone 239972 (TRAV16, TRAJ26)
CALSSANYGHNFFF

SEQ ID NO: 479944 - protein, 14 aa, Homo sapiens
  CDR3 for beta chain variable domain of TCR clone 239972 (TRBV28, TRBJ2-1)
CASSLNGRNNEQFF

SEQ ID NO: 479945 - protein, 11 aa, Homo sapiens
  CDR3 for alpha chain variable domain of TCR clone 239973 (TRAV21, TRAJ39)
LLVNAGNMLTF

SEQ ID NO: 479946 - protein, 14 aa, Homo sapiens
  CDR3 for beta chain variable domain of TCR clone 239973 (TRBV27, TRBJ1-1)
CASSPQGKRAEAFF

SEQ ID NO: 479947 - protein, 14 aa, Homo sapiens
  CDR3 for alpha chain variable domain of TCR clone 239974 (TRAV12-2, TRAJ13)
CAVKKTGGYQKVTF

SEQ ID NO: 479948 - protein, 18 aa, Homo sapiens
  CDR3 for beta chain variable domain of TCR clone 239974 (TRBV19, TRBJ2-6)
CASSADRAGSSGANDLTF

SEQ ID NO: 479949 - protein, 10 aa, Homo sapiens
  CDR3 for alpha chain variable domain of TCR clone 239975 (TRAV1-2, TRAJ20)
CAVTDYKLSF

SEQ ID NO: 479950 - protein, 14 aa, Homo sapiens
  CDR3 for beta chain variable domain of TCR clone 239975 (TRBV4-3, TRBJ1-1)
CASSQGWTPARAFF

SEQ ID NO: 479951 - protein, 14 aa, Homo sapiens
  CDR3 for alpha chain variable domain of TCR clone 239976 (TRAV26-1, TRAJ38)
CIADNAGNNRKLIW

SEQ ID NO: 479952 - protein, 15 aa, Homo sapiens
  CDR3 for beta chain variable domain of TCR clone 239976 (TRBV9, TRBJ2-1)
GASSLAGSSYNEQFF

SEQ ID NO: 479953 - protein, 15 aa, Homo sapiens
  CDR3 for alpha chain variable domain of TCR clone 239977 (TRAV3, TRAJ32)
CAVSSYGGATNKLIV

SEQ ID NO: 479954 - protein, 13 aa, Homo sapiens
  CDR3 for beta chain variable domain of TCR clone 239977 (TRBV20-1, TRBJ2-7)
CSARPSTNYEQYF

SEQ ID NO: 479955 - protein, 18 aa, Homo sapiens
  CDR3 for alpha chain variable domain of TCR clone 239978 (TRAV13-1, TRAJ52)
CAAKNPNAGGTSYGKLTF

SEQ ID NO: 479956 - protein, 14 aa, Homo sapiens
  CDR3 for beta chain variable domain of TCR clone 239978 (TRBV20-1, TRBJ2-1)
CSAQIGGSANEQFF

SEQ ID NO: 479957 - protein, 13 aa, Homo sapiens
  CDR3 for alpha chain variable domain of TCR clone 239979 (TRAV5, TRAJ30)
CAEIANRDDKIIF

SEQ ID NO: 479958 - protein, 14 aa, Homo sapiens
  CDR3 for beta chain variable domain of TCR clone 239979 (TRBV7-2, TRBJ2-3)
CASSQTGSSYTQYF

SEQ ID NO: 479959 - protein, 14 aa, Homo sapiens
  CDR3 for alpha chain variable domain of TCR clone 239980 (TRAV26-1, TRAJ38)
CIADNAGNNRKLIW

SEQ ID NO: 479960 - protein, 20 aa, Homo sapiens
  CDR3 for beta chain variable domain of TCR clone 239980 (TRBV7-8, TRBJ2-2)
CAGSHLFPGPTIHITGELFF

SEQ ID NO: 479961 - protein, 14 aa, Homo sapiens
  CDR3 for alpha chain variable domain of TCR clone 239981 (TRAV1-2, TRAJ16)
CAVNRFSDGQKMLF

SEQ ID NO: 479962 - protein, 13 aa, Homo sapiens
  CDR3 for beta chain variable domain of TCR clone 239981 (TRBV24-1, TRBJ2-2)
CATRVDNTGELFF

SEQ ID NO: 479963 - protein, 14 aa, Homo sapiens
  CDR3 for alpha chain variable domain of TCR clone 239982 (TRAV13-2, TRAJ9)
CAENLETGVFKTIF

SEQ ID NO: 479964 - protein, 16 aa, Homo sapiens
  CDR3 for beta chain variable domain of TCR clone 239982 (TRBV28, TRBJ2-5)
CASSFSPAGGWETQYF

SEQ ID NO: 479965 - protein, 11 aa, Homo sapiens
  CDR3 for alpha chain variable domain of TCR clone 239983 (TRAV23/DV6, TRAJ58)
CAARLLRGETR

SEQ ID NO: 479966 - protein, 17 aa, Homo sapiens
  CDR3 for beta chain variable domain of TCR clone 239983 (TRBV11-2, TRBJ2-1)
CASSLYPPGVEYNEQFF

SEQ ID NO: 479967 - protein, 14 aa, Homo sapiens
  CDR3 for alpha chain variable domain of TCR clone 239984 (TRAV26-1, TRAJ38)
CIADNAGNNRKMIC

SEQ ID NO: 479968 - protein, 13 aa, Homo sapiens
  CDR3 for beta chain variable domain of TCR clone 239984 (TRBV20-1, TRBJ1-1)
CSARGGGNTEAFF

SEQ ID NO: 479969 - protein, 14 aa, Homo sapiens
  CDR3 for alpha chain variable domain of TCR clone 239985 (TRAV12-2, TRAJ9)
CAVNMEGGGFKTIF

SEQ ID NO: 479970 - protein, 11 aa, Homo sapiens
  CDR3 for beta chain variable domain of TCR clone 239985 (TRBV13, TRBJ2-3)
CASGNADTQYF

SEQ ID NO: 479971 - protein, 13 aa, Homo sapiens
  CDR3 for alpha chain variable domain of TCR clone 239986 (TRAV35, TRAJ44)
CAGLSGTASKLTF

SEQ ID NO: 479972 - protein, 19 aa, Homo sapiens
  CDR3 for beta chain variable domain of TCR clone 239986 (TRBV19, TRBJ2-5)
CASSIGQVTDFFLGETQYF

SEQ ID NO: 479973 - protein, 14 aa, Homo sapiens
  CDR3 for alpha chain variable domain of TCR clone 239987 (TRAV12-2, TRAJ13)
CAVKKTGGYQKVTF

SEQ ID NO: 479974 - protein, 14 aa, Homo sapiens
  CDR3 for beta chain variable domain of TCR clone 239987 (TRBV19, TRBJ2-1)
CASPTVVLSSEQFF

SEQ ID NO: 479975 - protein, 13 aa, Homo sapiens
  CDR3 for alpha chain variable domain of TCR clone 239988 (TRAV14/DV4, TRAJ22)
CAMRDLSARQLTL

SEQ ID NO: 479976 - protein, 18 aa, Homo sapiens
  CDR3 for beta chain variable domain of TCR clone 239988 (TRBV19, TRBJ1-5)
CASSKGQVSIHSNQPQHF

SEQ ID NO: 479977 - protein, 13 aa, Homo sapiens
  CDR3 for alpha chain variable domain of TCR clone 239989 (TRAV3, TRAJ15)
CAVRDQAGTALIF

SEQ ID NO: 479978 - protein, 15 aa, Homo sapiens
  CDR3 for beta chain variable domain of TCR clone 239989 (TRBV5-1, TRBJ2-7)
CASSLNGGPAREQYF

SEQ ID NO: 479979 - protein, 15 aa, Homo sapiens
  CDR3 for alpha chain variable domain of TCR clone 239990 (TRAV3, TRAJ29)
CAVRDINSGNTPFVF

SEQ ID NO: 479980 - protein, 16 aa, Homo sapiens
  CDR3 for beta chain variable domain of TCR clone 239990 (TRBV4-1, TRBJ2-5)
CASSQTFYGDQETQYF

SEQ ID NO: 479981 - protein, 10 aa, Homo sapiens
  CDR3 for alpha chain variable domain of TCR clone 239991 (TRAV13-1, TRAJ52)
CSAKTPMLVV

SEQ ID NO: 479982 - protein, 14 aa, Homo sapiens
  CDR3 for beta chain variable domain of TCR clone 239991 (TRBV6-5, TRBJ1-1)
CASSFGQGLTEAFF

SEQ ID NO: 479983 - protein, 18 aa, Homo sapiens
  CDR3 for alpha chain variable domain of TCR clone 239992 (TRAV26-2, TRAJ33)
CCVLLHPEEPASDYQLIW

SEQ ID NO: 479984 - protein, 18 aa, Homo sapiens
  CDR3 for beta chain variable domain of TCR clone 239992 (TRBV10-3, TRBJ2-2)
CTSVPSTRQGANTGELFF

SEQ ID NO: 479985 - protein, 12 aa, Homo sapiens
  CDR3 for alpha chain variable domain of TCR clone 239993 (TRAV13-1, TRAJ21)
CAAKEGFNKFYF

SEQ ID NO: 479986 - protein, 19 aa, Homo sapiens
  CDR3 for beta chain variable domain of TCR clone 239993 (TRBV28, TRBJ2-7)
CASSYSGTSRLGWVYEQYF

SEQ ID NO: 479987 - protein, 14 aa, Homo sapiens
  CDR3 for alpha chain variable domain of TCR clone 239994 (TRAV26-1, TRAJ45)
CIEVTGGGADGLTF

SEQ ID NO: 479988 - protein, 17 aa, Homo sapiens
  CDR3 for beta chain variable domain of TCR clone 239994 (TRBV19, TRBJ2-7)
CASSISFYDSYPYEQYF

SEQ ID NO: 479989 - protein, 11 aa, Homo sapiens
  CDR3 for alpha chain variable domain of TCR clone 239995 (TRAV1-1, TRAJ23)
CAVRQGGKLIF

SEQ ID NO: 479990 - protein, 14 aa, Homo sapiens
  CDR3 for beta chain variable domain of TCR clone 239995 (TRBV28, TRBJ1-5)
CASSLGVLVKPQHF

SEQ ID NO: 479991 - protein, 15 aa, Homo sapiens
  CDR3 for alpha chain variable domain of TCR clone 239996 (TRAV13-1, TRAJ8)
CAASIPNTGFQKLVF

SEQ ID NO: 479992 - protein, 16 aa, Homo sapiens
  CDR3 for beta chain variable domain of TCR clone 239996 (TRBV12-5, TRBJ2-5)
CASGPRTSGNQETQYF

SEQ ID NO: 479993 - protein, 12 aa, Homo sapiens
  CDR3 for alpha chain variable domain of TCR clone 239997 (TRAV16, TRAJ10)
CSRTGGGNKLTF

SEQ ID NO: 479994 - protein, 15 aa, Homo sapiens
  CDR3 for beta chain variable domain of TCR clone 239997 (TRBV15, TRBJ2-1)
CATSRDLGSYNEQFF

SEQ ID NO: 479995 - protein, 16 aa, Homo sapiens
  CDR3 for alpha chain variable domain of TCR clone 239998 (TRAV9-2, TRAJ6)
CALRGPASGGSYIPPF

SEQ ID NO: 479996 - protein, 13 aa, Homo sapiens
  CDR3 for beta chain variable domain of TCR clone 239998 (TRBV7-9, TRBJ2-7)
CASSAGLQYEQYF

SEQ ID NO: 479997 - protein, 14 aa, Homo sapiens
  CDR3 for alpha chain variable domain of TCR clone 239999 (TRAV8-4, TRAJ43)
CAVSDPRKNNDMRF

SEQ ID NO: 479998 - protein, 15 aa, Homo sapiens
  CDR3 for beta chain variable domain of TCR clone 239999 (TRBV4-2, TRBJ1-2)
CASSQRTGGRDGYTF

SEQ ID NO: 479999 - protein, 14 aa, Homo sapiens
  CDR3 for alpha chain variable domain of TCR clone 240000 (TRAV26-1, TRAJ44)
CIVSNTGTASKLTF

SEQ ID NO: 480000 - protein, 11 aa, Homo sapiens
  CDR3 for beta chain variable domain of TCR clone 240000 (TRBV19, TRBJ2-7)
CASSILGEQYL

SEQ ID NO: 480001 - protein, 13 aa, Homo sapiens
  CDR3 for alpha chain variable domain of TCR clone 240001 (TRAV21, TRAJ27)
CAARPGNAGKLTF

SEQ ID NO: 480002 - protein, 14 aa, Homo sapiens
  CDR3 for beta chain variable domain of TCR clone 240001 (TRBV11-2, TRBJ2-7)
CASSLGAGAYEQYF

SEQ ID NO: 480003 - protein, 13 aa, Homo sapiens
  CDR3 for alpha chain variable domain of TCR clone 240002 (TRAV30, TRAJ24)
CGTVTDSWGKLQF

SEQ ID NO: 480004 - protein, 13 aa, Homo sapiens
  CDR3 for beta chain variable domain of TCR clone 240002 (TRBV11-2, TRBJ1-6)
CASSLAGVSPLHF

SEQ ID NO: 480005 - protein, 16 aa, Homo sapiens
  CDR3 for alpha chain variable domain of TCR clone 240003 (TRAV12-3, TRAJ53)
CAMSPGSGGSNYKLTF

SEQ ID NO: 480006 - protein, 20 aa, Homo sapiens
  CDR3 for beta chain variable domain of TCR clone 240003 (TRBV7-8, TRBJ2-2)
CASSHLLPGPTIHITGELFF

SEQ ID NO: 480007 - protein, 16 aa, Homo sapiens
  CDR3 for alpha chain variable domain of TCR clone 240004 (TRAV1-1, TRAJ29)
CAVRSTRNSGNTPLVF

SEQ ID NO: 480008 - protein, 13 aa, Homo sapiens
  CDR3 for beta chain variable domain of TCR clone 240004 (TRBV10-3, TRBJ1-2)
CAISERDSYGYTF

SEQ ID NO: 480009 - protein, 14 aa, Homo sapiens
  CDR3 for alpha chain variable domain of TCR clone 240005 (TRAV12-2, TRAJ40)
CAVKIPSGTYKYIF

SEQ ID NO: 480010 - protein, 17 aa, Homo sapiens
  CDR3 for beta chain variable domain of TCR clone 240005 (TRBV15, TRBJ1-4)
CATSRYGTGDPNEKLFF

SEQ ID NO: 480011 - protein, 15 aa, Homo sapiens
  CDR3 for alpha chain variable domain of TCR clone 240006 (TRAV25, TRAJ10)
CAGLGLTGGGNKLTF

SEQ ID NO: 480012 - protein, 15 aa, Homo sapiens
  CDR3 for beta chain variable domain of TCR clone 240006 (TRBV11-3, TRBJ2-3)
CASLKDGREGDTQYF

SEQ ID NO: 480013 - protein, 12 aa, Homo sapiens
  CDR3 for alpha chain variable domain of TCR clone 240007 (TRAV3, TRAJ20)
CAVRDYDYKLSF

SEQ ID NO: 480014 - protein, 15 aa, Homo sapiens
  CDR3 for beta chain variable domain of TCR clone 240007 (TRBV9, TRBJ1-6)
CASSVAGTGDSPLHF

SEQ ID NO: 480015 - protein, 13 aa, Homo sapiens
  CDR3 for alpha chain variable domain of TCR clone 240008 (TRAV35, TRAJ22)
CWARPGSARQLTF

SEQ ID NO: 480016 - protein, 15 aa, Homo sapiens
  CDR3 for beta chain variable domain of TCR clone 240008 (TRBV12-4, TRBJ2-5)
RASSPPTGLQETQYF

SEQ ID NO: 480017 - protein, 12 aa, Homo sapiens
  CDR3 for alpha chain variable domain of TCR clone 240009 (TRAV12-3, TRAJ17)
CAMTLTGNKLTF

SEQ ID NO: 480018 - protein, 16 aa, Homo sapiens
  CDR3 for beta chain variable domain of TCR clone 240009 (TRBV5-1, TRBJ2-3)
CASSSIGAGSTDTQYF

SEQ ID NO: 480019 - protein, 15 aa, Homo sapiens
  CDR3 for alpha chain variable domain of TCR clone 240010 (TRAV2, TRAJ15)
CAVEDRGQAETALIF

SEQ ID NO: 480020 - protein, 13 aa, Homo sapiens
  CDR3 for beta chain variable domain of TCR clone 240010 (TRBV10-2, TRBJ2-7)
CASGASGGHEQYF

SEQ ID NO: 480021 - protein, 12 aa, Homo sapiens
  CDR3 for alpha chain variable domain of TCR clone 240011 (TRAV12-3, TRAJ17)
CAMTLTGNKLTF

SEQ ID NO: 480022 - protein, 15 aa, Homo sapiens
  CDR3 for beta chain variable domain of TCR clone 240011 (TRBV9, TRBJ1-6)
CASSVSGTGDSPLHF

SEQ ID NO: 480023 - protein, 15 aa, Homo sapiens
  CDR3 for alpha chain variable domain of TCR clone 240012 (TRAV13-1, TRAJ5)
RAASSSDTGRRALTF

SEQ ID NO: 480024 - protein, 12 aa, Homo sapiens
  CDR3 for beta chain variable domain of TCR clone 240012 (TRBV14, TRBJ2-5)
CASSQLKETQYF

SEQ ID NO: 480025 - protein, 15 aa, Homo sapiens
  CDR3 for alpha chain variable domain of TCR clone 240013 (TRAV12-3, TRAJ6)
CAMSATSGGSYIPTF

SEQ ID NO: 480026 - protein, 14 aa, Homo sapiens
  CDR3 for beta chain variable domain of TCR clone 240013 (TRBV28, TRBJ2-5)
CASSLGDRAGTQYF

SEQ ID NO: 480027 - protein, 15 aa, Homo sapiens
  CDR3 for alpha chain variable domain of TCR clone 240014 (TRAV3, TRAJ22)
CAVRDRGGSARQLTF

SEQ ID NO: 480028 - protein, 16 aa, Homo sapiens
  CDR3 for beta chain variable domain of TCR clone 240014 (TRBV5-4, TRBJ2-3)
CASQRPGAGGAETQYF

SEQ ID NO: 480029 - protein, 14 aa, Homo sapiens
  CDR3 for alpha chain variable domain of TCR clone 240015 (TRAV1-2, TRAJ16)
CAVNLFSDGQKLLF

SEQ ID NO: 480030 - protein, 12 aa, Homo sapiens
  CDR3 for beta chain variable domain of TCR clone 240015 (TRBV28, TRBJ2-6)
CAIQAGANDLTF

SEQ ID NO: 480031 - protein, 22 aa, Homo sapiens
  CDR3 for alpha chain variable domain of TCR clone 240016 (TRAV12-3, TRAJ26)
CSSETHSPVIQPPTSPNQNFVF

SEQ ID NO: 480032 - protein, 13 aa, Homo sapiens
  CDR3 for beta chain variable domain of TCR clone 240016 (TRBV7-9, TRBJ2-3)
CASSAAGSDTQYF

SEQ ID NO: 480033 - protein, 13 aa, Homo sapiens
  CDR3 for alpha chain variable domain of TCR clone 240017 (TRAV3, TRAJ8)
CAVRFTGCQKLVF

SEQ ID NO: 480034 - protein, 15 aa, Homo sapiens
  CDR3 for beta chain variable domain of TCR clone 240017 (TRBV20-1, TRBJ2-7)
CSARDRVSGMDEQYF

SEQ ID NO: 480035 - protein, 13 aa, Homo sapiens
  CDR3 for alpha chain variable domain of TCR clone 240018 (TRAV35, TRAJ42)
CAGFPGSQGNLIF

SEQ ID NO: 480036 - protein, 13 aa, Homo sapiens
  CDR3 for beta chain variable domain of TCR clone 240018 (TRBV29-1, TRBJ2-1)
CSVEGGRVKEQFF

SEQ ID NO: 480037 - protein, 12 aa, Homo sapiens
  CDR3 for alpha chain variable domain of TCR clone 240019 (TRAV8-3, TRAJ26)
CAGDNCGQNFVF

SEQ ID NO: 480038 - protein, 16 aa, Homo sapiens
  CDR3 for beta chain variable domain of TCR clone 240019 (TRBV12-5, TRBJ2-5)
CASGPRTSGNQETQYF

SEQ ID NO: 480039 - protein, 16 aa, Homo sapiens
  CDR3 for alpha chain variable domain of TCR clone 240020 (TRAV16, TRAJ4)
CARSRMFSGGYNKLIF

SEQ ID NO: 480040 - protein, 16 aa, Homo sapiens
  CDR3 for beta chain variable domain of TCR clone 240020 (TRBV24-1, TRBJ2-3)
CATSAPGTGATDTQYF

SEQ ID NO: 480041 - protein, 14 aa, Homo sapiens
  CDR3 for alpha chain variable domain of TCR clone 240021 (TRAV12-2, TRAJ17)
CTVLFKAAGNKLTF

SEQ ID NO: 480042 - protein, 20 aa, Homo sapiens
  CDR3 for beta chain variable domain of TCR clone 240021 (TRBV19, TRBJ2-1)
CASSISRTVTSTRLNNEQFF

SEQ ID NO: 480043 - protein, 13 aa, Homo sapiens
  CDR3 for alpha chain variable domain of TCR clone 240022 (TRAV27, TRAJ49)
CAPRPYTGNQFYF

SEQ ID NO: 480044 - protein, 16 aa, Homo sapiens
  CDR3 for beta chain variable domain of TCR clone 240022 (TRBV7-3, TRBJ2-3)
CASSLSGYRPEDTQYF

SEQ ID NO: 480045 - protein, 13 aa, Homo sapiens
  CDR3 for alpha chain variable domain of TCR clone 240023 (TRAV8-6, TRAJ21)
CAVIPSSLNKFYF

SEQ ID NO: 480046 - protein, 14 aa, Homo sapiens
  CDR3 for beta chain variable domain of TCR clone 240023 (TRBV7-9, TRBJ2-5)
CASSLDTAQETQYF

SEQ ID NO: 480047 - protein, 13 aa, Homo sapiens
  CDR3 for alpha chain variable domain of TCR clone 240024 (TRAV13-2, TRAJ15)
CAERPQAGTDLIF

SEQ ID NO: 480048 - protein, 15 aa, Homo sapiens
  CDR3 for beta chain variable domain of TCR clone 240024 (TRBV11-2, TRBJ2-7)
CASRFPGTGGYEQYF

SEQ ID NO: 480049 - protein, 14 aa, Homo sapiens
  CDR3 for alpha chain variable domain of TCR clone 240025 (TRAV20, TRAJ10)
CAVRVEGGGNKLNL

SEQ ID NO: 480050 - protein, 18 aa, Homo sapiens
  CDR3 for beta chain variable domain of TCR clone 240025 (TRBV24-1, TRBJ2-1)
YATSDLMFLGRGVHEQFF

SEQ ID NO: 480051 - protein, 12 aa, Homo sapiens
  CDR3 for alpha chain variable domain of TCR clone 240026 (TRAV8-3, TRAJ43)
CAVGAGNNEMSF

SEQ ID NO: 480052 - protein, 14 aa, Homo sapiens
  CDR3 for beta chain variable domain of TCR clone 240026 (TRBV4-2, TRBJ1-5)
CASSRDRGNQPQHF

SEQ ID NO: 480053 - protein, 17 aa, Homo sapiens
  CDR3 for alpha chain variable domain of TCR clone 240027 (TRAV13-1, TRAJ52)
CAASSGAGGTSYGNLTF

SEQ ID NO: 480054 - protein, 17 aa, Homo sapiens
  CDR3 for beta chain variable domain of TCR clone 240027 (TRBV11-2, TRBJ2-1)
CASSLYPPGVEYNEQFF

SEQ ID NO: 480055 - protein, 13 aa, Homo sapiens
  CDR3 for alpha chain variable domain of TCR clone 240028 (TRAV8-3, TRAJ41)
CAVGADSGYALNS

SEQ ID NO: 480056 - protein, 14 aa, Homo sapiens
  CDR3 for beta chain variable domain of TCR clone 240028 (TRBV2, TRBJ1-1)
CASRALLMNTEAFF

SEQ ID NO: 480057 - protein, 15 aa, Homo sapiens
  CDR3 for alpha chain variable domain of TCR clone 240029 (TRAV27, TRAJ38)
YAARRNAGNNRKLIW

SEQ ID NO: 480058 - protein, 13 aa, Homo sapiens
  CDR3 for beta chain variable domain of TCR clone 240029 (TRBV12-5, TRBJ2-3)
CASGDGQSDTQYF

SEQ ID NO: 480059 - protein, 13 aa, Homo sapiens
  CDR3 for alpha chain variable domain of TCR clone 240030 (TRAV8-4, TRAJ47)
CAVTALYGNKLVF

SEQ ID NO: 480060 - protein, 14 aa, Homo sapiens
  CDR3 for beta chain variable domain of TCR clone 240030 (TRBV19, TRBJ2-7)
CASSIGGAVAEQYC

SEQ ID NO: 480061 - protein, 13 aa, Homo sapiens
  CDR3 for alpha chain variable domain of TCR clone 240031 (TRAV21, TRAJ20)
CAVGLRVDYKLSF

SEQ ID NO: 480062 - protein, 15 aa, Homo sapiens
  CDR3 for beta chain variable domain of TCR clone 240031 (TRBV7-9, TRBJ2-7)
CASSLALAEAYEQYF

SEQ ID NO: 480063 - protein, 13 aa, Homo sapiens
  CDR3 for alpha chain variable domain of TCR clone 240032 (TRAV2, TRAJ15)
CAVASQAVTALIF

SEQ ID NO: 480064 - protein, 16 aa, Homo sapiens
  CDR3 for beta chain variable domain of TCR clone 240032 (TRBV7-8, TRBJ2-4)
CASSAERTLAKNIQYF

SEQ ID NO: 480065 - protein, 18 aa, Homo sapiens
  CDR3 for alpha chain variable domain of TCR clone 240033 (TRAV26-2, TRAJ54)
CILRDVEVGIQGAQKLVF

SEQ ID NO: 480066 - protein, 17 aa, Homo sapiens
  CDR3 for beta chain variable domain of TCR clone 240033 (TRBV20-1, TRBJ1-5)
CSASLSPGQGGNQPKHF

SEQ ID NO: 480067 - protein, 12 aa, Homo sapiens
  CDR3 for alpha chain variable domain of TCR clone 240034 (TRAV12-1, TRAJ15)
CVVNQAGTALIF

SEQ ID NO: 480068 - protein, 15 aa, Homo sapiens
  CDR3 for beta chain variable domain of TCR clone 240034 (TRBV18, TRBJ2-1)
CASSPPSASYNEQFF

SEQ ID NO: 480069 - protein, 14 aa, Homo sapiens
  CDR3 for alpha chain variable domain of TCR clone 240035 (TRAV35, TRAJ22)
CDGLSPGSARQLTF

SEQ ID NO: 480070 - protein, 15 aa, Homo sapiens
  CDR3 for beta chain variable domain of TCR clone 240035 (TRBV12-4, TRBJ2-5)
CASSPPTGLQETQYF

SEQ ID NO: 480071 - protein, 14 aa, Homo sapiens
  CDR3 for alpha chain variable domain of TCR clone 240036 (TRAV8-1, TRAJ23)
CAVGTYNQGGNLIF

SEQ ID NO: 480072 - protein, 16 aa, Homo sapiens
  CDR3 for beta chain variable domain of TCR clone 240036 (TRBV18, TRBJ1-5)
CASSPSTGNSNQPQHF

SEQ ID NO: 480073 - protein, 14 aa, Homo sapiens
  CDR3 for alpha chain variable domain of TCR clone 240037 (TRAV2, TRAJ37)
CAVDFTSNTGKLIY

SEQ ID NO: 480074 - protein, 13 aa, Homo sapiens
  CDR3 for beta chain variable domain of TCR clone 240037 (TRBV4-1, TRBJ2-2)
CASSQENTGELFF

SEQ ID NO: 480075 - protein, 14 aa, Homo sapiens
  CDR3 for alpha chain variable domain of TCR clone 240038 (TRAV12-2, TRAJ17)
CAVLFKAAGHKLTF

SEQ ID NO: 480076 - protein, 14 aa, Homo sapiens
  CDR3 for beta chain variable domain of TCR clone 240038 (TRBV7-2, TRBJ2-7)
CASRSQGAAYEQYF

SEQ ID NO: 480077 - protein, 13 aa, Homo sapiens
  CDR3 for alpha chain variable domain of TCR clone 240039 (TRAV17, TRAJ40)
CAGALGGTYKYSF

SEQ ID NO: 480078 - protein, 16 aa, Homo sapiens
  CDR3 for beta chain variable domain of TCR clone 240039 (TRBV7-2, TRBJ1-4)
CASSLAPGRRDEKLFF

SEQ ID NO: 480079 - protein, 15 aa, Homo sapiens
  CDR3 for alpha chain variable domain of TCR clone 240040 (TRAV21, TRAJ3)
CAASTAVLPRQSLDQ

SEQ ID NO: 480080 - protein, 15 aa, Homo sapiens
  CDR3 for beta chain variable domain of TCR clone 240040 (TRBV20-1, TRBJ2-7)
CSARDRVSGMDEQYF

SEQ ID NO: 480081 - protein, 11 aa, Homo sapiens
  CDR3 for alpha chain variable domain of TCR clone 240041 (TRAV2, TRAJ33)
CAVDSNYQLIW

SEQ ID NO: 480082 - protein, 14 aa, Homo sapiens
  CDR3 for beta chain variable domain of TCR clone 240041 (TRBV20-1, TRBJ2-5)
CSAHRQGLWETQYF

SEQ ID NO: 480083 - protein, 14 aa, Homo sapiens
  CDR3 for alpha chain variable domain of TCR clone 240042 (TRAV4, TRAJ17)
CLVGDMAAGNKLTF

SEQ ID NO: 480084 - protein, 13 aa, Homo sapiens
  CDR3 for beta chain variable domain of TCR clone 240042 (TRBV18, TRBJ2-7)
CASQSGGGYERYF

SEQ ID NO: 480085 - protein, 13 aa, Homo sapiens
  CDR3 for alpha chain variable domain of TCR clone 240043 (TRAV26-1, TRAJ48)
CIVRVVGDEKLTF

SEQ ID NO: 480086 - protein, 14 aa, Homo sapiens
  CDR3 for beta chain variable domain of TCR clone 240043 (TRBV12-5, TRBJ2-5)
CASGSLTHQETQYF

SEQ ID NO: 480087 - protein, 15 aa, Homo sapiens
  CDR3 for alpha chain variable domain of TCR clone 240044 (TRAV3, TRAJ22)
CAVRDRGGSARQLNF

SEQ ID NO: 480088 - protein, 16 aa, Homo sapiens
  CDR3 for beta chain variable domain of TCR clone 240044 (TRBV5-4, TRBJ2-3)
RASQQPGAGGADTQYF

SEQ ID NO: 480089 - protein, 12 aa, Homo sapiens
  CDR3 for alpha chain variable domain of TCR clone 240045 (TRAV8-6, TRAJ13)
CAVSGGYQKVTF

SEQ ID NO: 480090 - protein, 16 aa, Homo sapiens
  CDR3 for beta chain variable domain of TCR clone 240045 (TRBV19, TRBJ2-1)
CASSKAGPSSYNEQFF

SEQ ID NO: 480091 - protein, 13 aa, Homo sapiens
  CDR3 for alpha chain variable domain of TCR clone 240046 (TRAV27, TRAJ41)
CAGEGNSGYALNF

SEQ ID NO: 480092 - protein, 14 aa, Homo sapiens
  CDR3 for beta chain variable domain of TCR clone 240046 (TRBV4-1, TRBJ2-2)
YASSQAVNTGELFF

SEQ ID NO: 480093 - protein, 19 aa, Homo sapiens
  CDR3 for alpha chain variable domain of TCR clone 240047 (TRAV2, TRAJ20)
ILQVREADAAVYRDCKLSF

SEQ ID NO: 480094 - protein, 15 aa, Homo sapiens
  CDR3 for beta chain variable domain of TCR clone 240047 (TRBV7-9, TRBJ1-1)
CASSLLEQGGTEAFF

SEQ ID NO: 480095 - protein, 15 aa, Homo sapiens
  CDR3 for alpha chain variable domain of TCR clone 240048 (TRAV3, TRAJ11)
CAVRDRGSGYSTLNF

SEQ ID NO: 480096 - protein, 15 aa, Homo sapiens
  CDR3 for beta chain variable domain of TCR clone 240048 (TRBV7-2, TRBJ2-7)
CASSLYGQGRYEQYF

SEQ ID NO: 480097 - protein, 14 aa, Homo sapiens
  CDR3 for alpha chain variable domain of TCR clone 240049 (TRAV13-1, TRAJ35)
CASSKGGFGNVLHC

SEQ ID NO: 480098 - protein, 14 aa, Homo sapiens
  CDR3 for beta chain variable domain of TCR clone 240049 (TRBV7-8, TRBJ2-3)
CASSFPDGQDTQYF

SEQ ID NO: 480099 - protein, 16 aa, Homo sapiens
  CDR3 for alpha chain variable domain of TCR clone 240050 (TRAV27, TRAJ13)
CAGAKSDSGGYQKVTF

SEQ ID NO: 480100 - protein, 13 aa, Homo sapiens
  CDR3 for beta chain variable domain of TCR clone 240050 (TRBV5-7, TRBJ2-3)
CQPNERGTDTQYF

SEQ ID NO: 480101 - protein, 15 aa, Homo sapiens
  CDR3 for alpha chain variable domain of TCR clone 240051 (TRAV14/DV4, TRAJ15)
CAMRGSNQAGTALIF

SEQ ID NO: 480102 - protein, 14 aa, Homo sapiens
  CDR3 for beta chain variable domain of TCR clone 240051 (TRBV20-1, TRBJ2-7)
CSAKTGTGGYEQYF

SEQ ID NO: 480103 - protein, 13 aa, Homo sapiens
  CDR3 for alpha chain variable domain of TCR clone 240052 (TRAV12-1, TRAJ33)
CGDAPDSNYQLIW

SEQ ID NO: 480104 - protein, 13 aa, Homo sapiens
  CDR3 for beta chain variable domain of TCR clone 240052 (TRBV3-1, TRBJ2-7)
CASSLRDGYEQYF

SEQ ID NO: 480105 - protein, 13 aa, Homo sapiens
  CDR3 for alpha chain variable domain of TCR clone 240053 (TRAV3, TRAJ16)
CAVRDRNGQKLLF

SEQ ID NO: 480106 - protein, 15 aa, Homo sapiens
  CDR3 for beta chain variable domain of TCR clone 240053 (TRBV5-1, TRBJ2-1)
CASSPPRAPYNEQFC

SEQ ID NO: 480107 - protein, 16 aa, Homo sapiens
  CDR3 for alpha chain variable domain of TCR clone 240054 (TRAV38-2/DV8, TRAJ44)
CAYRSARGGTASKLTF

SEQ ID NO: 480108 - protein, 14 aa, Homo sapiens
  CDR3 for beta chain variable domain of TCR clone 240054 (TRBV20-1, TRBJ1-1)
CSAQTRIGGTEAFF

SEQ ID NO: 480109 - protein, 16 aa, Homo sapiens
  CDR3 for alpha chain variable domain of TCR clone 240055 (TRAV2, TRAJ4)
CAVEDRFSGGYNKLIF

SEQ ID NO: 480110 - protein, 14 aa, Homo sapiens
  CDR3 for beta chain variable domain of TCR clone 240055 (TRBV18, TRBJ2-3)
CASSLGGGSDTQYF

SEQ ID NO: 480111 - protein, 13 aa, Homo sapiens
  CDR3 for alpha chain variable domain of TCR clone 240056 (TRAV27, TRAJ27)
CAGGITYAGKSTF

SEQ ID NO: 480112 - protein, 13 aa, Homo sapiens
  CDR3 for beta chain variable domain of TCR clone 240056 (TRBV20-1, TRBJ1-2)
CSASLGVGYGYTF

SEQ ID NO: 480113 - protein, 17 aa, Homo sapiens
  CDR3 for alpha chain variable domain of TCR clone 240057 (TRAV14/DV4, TRAJ28)
CTMREVSSGAGSYQLTF

SEQ ID NO: 480114 - protein, 15 aa, Homo sapiens
  CDR3 for beta chain variable domain of TCR clone 240057 (TRBV11-2, TRBJ1-6)
CASTLRETGNSPLLF

SEQ ID NO: 480115 - protein, 15 aa, Homo sapiens
  CDR3 for alpha chain variable domain of TCR clone 240058 (TRAV38-2/DV8, TRAJ45)
CAYWDSGGGADGLTF

SEQ ID NO: 480116 - protein, 13 aa, Homo sapiens
  CDR3 for beta chain variable domain of TCR clone 240058 (TRBV10-3, TRBJ2-7)
CASKLAVNYEQYF

SEQ ID NO: 480117 - protein, 14 aa, Homo sapiens
  CDR3 for alpha chain variable domain of TCR clone 240059 (TRAV26-1, TRAJ21)
CIVRVLGNFNKFYF

SEQ ID NO: 480118 - protein, 15 aa, Homo sapiens
  CDR3 for beta chain variable domain of TCR clone 240059 (TRBV6-1, TRBJ2-7)
CASSEAVAGVDEQYF

SEQ ID NO: 480119 - protein, 13 aa, Homo sapiens
  CDR3 for alpha chain variable domain of TCR clone 240060 (TRAV1-2, TRAJ9)
CAVLNTGGFKTIF

SEQ ID NO: 480120 - protein, 13 aa, Homo sapiens
  CDR3 for beta chain variable domain of TCR clone 240060 (TRBV13, TRBJ2-1)
CASIVGGRGEQFF

SEQ ID NO: 480121 - protein, 14 aa, Homo sapiens
  CDR3 for alpha chain variable domain of TCR clone 240061 (TRAV13-1, TRAJ44)
CAAKATGTASKLTF

SEQ ID NO: 480122 - protein, 14 aa, Homo sapiens
  CDR3 for beta chain variable domain of TCR clone 240061 (TRBV19, TRBJ1-1)
CASLRTGLNTEAFF

SEQ ID NO: 480123 - protein, 14 aa, Homo sapiens
  CDR3 for alpha chain variable domain of TCR clone 240062 (TRAV1-2, TRAJ8)
CAVREDTGFQKLVF

SEQ ID NO: 480124 - protein, 12 aa, Homo sapiens
  CDR3 for beta chain variable domain of TCR clone 240062 (TRBV11-1, TRBJ2-2)
CASSLPTGELFF

SEQ ID NO: 480125 - protein, 14 aa, Homo sapiens
  CDR3 for alpha chain variable domain of TCR clone 240063 (TRAV8-4, TRAJ15)
CAVTIPEAGTALIF

SEQ ID NO: 480126 - protein, 13 aa, Homo sapiens
  CDR3 for beta chain variable domain of TCR clone 240063 (TRBV10-3, TRBJ2-7)
CAISEKGGYEQYF

SEQ ID NO: 480127 - protein, 11 aa, Homo sapiens
  CDR3 for alpha chain variable domain of TCR clone 240064 (TRAV3, TRAJ21)
CAVGNFNKFYF

SEQ ID NO: 480128 - protein, 18 aa, Homo sapiens
  CDR3 for beta chain variable domain of TCR clone 240064 (TRBV15, TRBJ2-3)
CATSRDGARIWDTDTQYF

SEQ ID NO: 480129 - protein, 12 aa, Homo sapiens
  CDR3 for alpha chain variable domain of TCR clone 240065 (TRAV29/DV5, TRAJ49)
CAATDTGNQFYF

SEQ ID NO: 480130 - protein, 15 aa, Homo sapiens
  CDR3 for beta chain variable domain of TCR clone 240065 (TRBV28, TRBJ2-5)
CASSAPRQVQETQYF

SEQ ID NO: 480131 - protein, 14 aa, Homo sapiens
  CDR3 for alpha chain variable domain of TCR clone 240066 (TRAV26-1, TRAJ45)
CIVRVVGGADGLTF

SEQ ID NO: 480132 - protein, 18 aa, Homo sapiens
  CDR3 for beta chain variable domain of TCR clone 240066 (TRBV7-9, TRBJ1-1)
CASSLTRSVQTLKLSLDK

SEQ ID NO: 480133 - protein, 16 aa, Homo sapiens
  CDR3 for alpha chain variable domain of TCR clone 240067 (TRAV3, TRAJ21)
CAVRDIERGNFNKFYL

SEQ ID NO: 480134 - protein, 15 aa, Homo sapiens
  CDR3 for beta chain variable domain of TCR clone 240067 (TRBV20-1, TRBJ2-7)
CSAESGTSGAYEQYF

SEQ ID NO: 480135 - protein, 14 aa, Homo sapiens
  CDR3 for alpha chain variable domain of TCR clone 240068 (TRAV12-1, TRAJ28)
CVSYSGAGRYQLTF

SEQ ID NO: 480136 - protein, 13 aa, Homo sapiens
  CDR3 for beta chain variable domain of TCR clone 240068 (TRBV12-5, TRBJ2-3)
CASQNRGTDTQYF

SEQ ID NO: 480137 - protein, 14 aa, Homo sapiens
  CDR3 for alpha chain variable domain of TCR clone 240069 (TRAV3, TRAJ34)
CAVRDINNTEKLIF

SEQ ID NO: 480138 - protein, 15 aa, Homo sapiens
  CDR3 for beta chain variable domain of TCR clone 240069 (TRBV20-1, TRBJ2-7)
CSARDRVSGMDEQYF

SEQ ID NO: 480139 - protein, 14 aa, Homo sapiens
  CDR3 for alpha chain variable domain of TCR clone 240070 (TRAV12-2, TRAJ13)
CALKKTGGYQKATF

SEQ ID NO: 480140 - protein, 15 aa, Homo sapiens
  CDR3 for beta chain variable domain of TCR clone 240070 (TRBV27, TRBJ2-1)
CASSNGGGSSNEQFF

SEQ ID NO: 480141 - protein, 15 aa, Homo sapiens
  CDR3 for alpha chain variable domain of TCR clone 240071 (TRAV34, TRAJ38)
CGPDFTPGNNRKLIW

SEQ ID NO: 480142 - protein, 16 aa, Homo sapiens
  CDR3 for beta chain variable domain of TCR clone 240071 (TRBV12-5, TRBJ2-5)
CASGPRTSGNQETQYF

SEQ ID NO: 480143 - protein, 20 aa, Homo sapiens
  CDR3 for alpha chain variable domain of TCR clone 240072 (TRAV4, TRAJ29)
CCVLLPRGCVPFSGNTPLVF

SEQ ID NO: 480144 - protein, 16 aa, Homo sapiens
  CDR3 for beta chain variable domain of TCR clone 240072 (TRBV11-2, TRBJ1-2)
CASSLDTGGADYGYTF

SEQ ID NO: 480145 - protein, 13 aa, Homo sapiens
  CDR3 for alpha chain variable domain of TCR clone 240073 (TRAV12-2, TRAJ9)
CAVKWAGGFKTIS

SEQ ID NO: 480146 - protein, 15 aa, Homo sapiens
  CDR3 for beta chain variable domain of TCR clone 240073 (TRBV5-1, TRBJ1-4)
CASSLTADSDEKLFF

SEQ ID NO: 480147 - protein, 14 aa, Homo sapiens
  CDR3 for alpha chain variable domain of TCR clone 240074 (TRAV1-2, TRAJ16)
CAVNRFSDGQKLLF

SEQ ID NO: 480148 - protein, 16 aa, Homo sapiens
  CDR3 for beta chain variable domain of TCR clone 240074 (TRBV9, TRBJ2-1)
CASSVGGGENYNEQFF

SEQ ID NO: 480149 - protein, 18 aa, Homo sapiens
  CDR3 for alpha chain variable domain of TCR clone 240075 (TRAV13-1, TRAJ52)
YAAKNPNAGGTSYGKLTF

SEQ ID NO: 480150 - protein, 14 aa, Homo sapiens
  CDR3 for beta chain variable domain of TCR clone 240075 (TRBV7-3, TRBJ2-1)
CASSLAGGTNEQFF

SEQ ID NO: 480151 - protein, 12 aa, Homo sapiens
  CDR3 for alpha chain variable domain of TCR clone 240076 (TRAV17, TRAJ39)
CATGAAGNMLTF

SEQ ID NO: 480152 - protein, 13 aa, Homo sapiens
  CDR3 for beta chain variable domain of TCR clone 240076 (TRBV4-1, TRBJ2-5)
CASSQGHRETQYF

SEQ ID NO: 480153 - protein, 12 aa, Homo sapiens
  CDR3 for alpha chain variable domain of TCR clone 240077 (TRAV21, TRAJ11)
CAATSGYSTLNF

SEQ ID NO: 480154 - protein, 14 aa, Homo sapiens
  CDR3 for beta chain variable domain of TCR clone 240077 (TRBV20-1, TRBJ2-7)
GSAPELAGVGEQYF

SEQ ID NO: 480155 - protein, 14 aa, Homo sapiens
  CDR3 for alpha chain variable domain of TCR clone 240078 (TRAV2, TRAJ22)
CAVEGKRAARQLTF

SEQ ID NO: 480156 - protein, 14 aa, Homo sapiens
  CDR3 for beta chain variable domain of TCR clone 240078 (TRBV19, TRBJ2-2)
CASTPGYSGGELFF

SEQ ID NO: 480157 - protein, 12 aa, Homo sapiens
  CDR3 for alpha chain variable domain of TCR clone 240079 (TRAV8-3, TRAJ26)
CAGDNYGQNFVF

SEQ ID NO: 480158 - protein, 16 aa, Homo sapiens
  CDR3 for beta chain variable domain of TCR clone 240079 (TRBV5-4, TRBJ2-3)
CASRQPGAGGADTQYF

SEQ ID NO: 480159 - protein, 13 aa, Homo sapiens
  CDR3 for alpha chain variable domain of TCR clone 240080 (TRAV8-3, TRAJ40)
CAVGAQYLRNLQI

SEQ ID NO: 480160 - protein, 17 aa, Homo sapiens
  CDR3 for beta chain variable domain of TCR clone 240080 (TRBV15, TRBJ1-4)
CATSRYGTGDPNEKLFF

SEQ ID NO: 480161 - protein, 15 aa, Homo sapiens
  CDR3 for alpha chain variable domain of TCR clone 240081 (TRAV2, TRAJ24)
CAVVRLKNSWGKLQF

SEQ ID NO: 480162 - protein, 17 aa, Homo sapiens
  CDR3 for beta chain variable domain of TCR clone 240081 (TRBV5-1, TRBJ1-1)
CASRPIRTGGVNTEAFF

SEQ ID NO: 480163 - protein, 12 aa, Homo sapiens
  CDR3 for alpha chain variable domain of TCR clone 240082 (TRAV2, TRAJ9)
CAVGAGGFKTIF

SEQ ID NO: 480164 - protein, 16 aa, Homo sapiens
  CDR3 for beta chain variable domain of TCR clone 240082 (TRBV19, TRBJ1-6)
CASSVAPVAGNSPLHF

SEQ ID NO: 480165 - protein, 17 aa, Homo sapiens
  CDR3 for alpha chain variable domain of TCR clone 240083 (TRAV3, TRAJ42)
CAVRDRDYGGSQGSLIF

SEQ ID NO: 480166 - protein, 12 aa, Homo sapiens
  CDR3 for beta chain variable domain of TCR clone 240083 (TRBV11-2, TRBJ2-1)
CASSPGNNEQFF

SEQ ID NO: 480167 - protein, 17 aa, Homo sapiens
  CDR3 for alpha chain variable domain of TCR clone 240084 (TRAV12-2, TRAJ4)
CAVNVRPVSVGYNKLIF

SEQ ID NO: 480168 - protein, 17 aa, Homo sapiens
  CDR3 for beta chain variable domain of TCR clone 240084 (TRBV6-3, TRBJ2-1)
CASSYSSGTRGLDEQFF

SEQ ID NO: 480169 - protein, 15 aa, Homo sapiens
  CDR3 for alpha chain variable domain of TCR clone 240085 (TRAV3, TRAJ42)
FAVRGGTGSQGNLIF

SEQ ID NO: 480170 - protein, 14 aa, Homo sapiens
  CDR3 for beta chain variable domain of TCR clone 240085 (TRBV19, TRBJ1-2)
CAISSLFARDVYTF

SEQ ID NO: 480171 - protein, 13 aa, Homo sapiens
  CDR3 for alpha chain variable domain of TCR clone 240086 (TRAV8-3, TRAJ36)
CAVGATGANNLFF

SEQ ID NO: 480172 - protein, 13 aa, Homo sapiens
  CDR3 for beta chain variable domain of TCR clone 240086 (TRBV18, TRBJ2-5)
CASSPAGKETQYF

SEQ ID NO: 480173 - protein, 14 aa, Homo sapiens
  CDR3 for alpha chain variable domain of TCR clone 240087 (TRAV12-2, TRAJ13)
CAVKKTGGYQKGTF

SEQ ID NO: 480174 - protein, 11 aa, Homo sapiens
  CDR3 for beta chain variable domain of TCR clone 240087 (TRBV29-1, TRBJ2-5)
CSEDRTGTQYF

SEQ ID NO: 480175 - protein, 14 aa, Homo sapiens
  CDR3 for alpha chain variable domain of TCR clone 240088 (TRAV13-1, TRAJ39)
FAASYNNAGNMPTF

SEQ ID NO: 480176 - protein, 13 aa, Homo sapiens
  CDR3 for beta chain variable domain of TCR clone 240088 (TRBV24-1, TRBJ1-4)
CATNNGRSEKLFF

SEQ ID NO: 480177 - protein, 16 aa, Homo sapiens
  CDR3 for alpha chain variable domain of TCR clone 240089 (TRAV21, TRAJ37)
CAVRPRGSSNTGKLIF

SEQ ID NO: 480178 - protein, 14 aa, Homo sapiens
  CDR3 for beta chain variable domain of TCR clone 240089 (TRBV7-2, TRBJ2-5)
CASSPRGSSETQYF

SEQ ID NO: 480179 - protein, 14 aa, Homo sapiens
  CDR3 for alpha chain variable domain of TCR clone 240090 (TRAV23/DV6, TRAJ22)
CEASVSGSARQLTF

SEQ ID NO: 480180 - protein, 12 aa, Homo sapiens
  CDR3 for beta chain variable domain of TCR clone 240090 (TRBV11-2, TRBJ2-2)
CASSLGGGELFF

SEQ ID NO: 480181 - protein, 13 aa, Homo sapiens
  CDR3 for alpha chain variable domain of TCR clone 240091 (TRAV2, TRAJ40)
CAVVTSGTYKYIF

SEQ ID NO: 480182 - protein, 12 aa, Homo sapiens
  CDR3 for beta chain variable domain of TCR clone 240091 (TRBV12-4, TRBJ2-7)
CASSLGGYEQYS

SEQ ID NO: 480183 - protein, 14 aa, Homo sapiens
  CDR3 for alpha chain variable domain of TCR clone 240092 (TRAV12-2, TRAJ13)
CAVKKTGGYQKVTF

SEQ ID NO: 480184 - protein, 19 aa, Homo sapiens
  CDR3 for beta chain variable domain of TCR clone 240092 (TRBV25-1, TRBJ2-2)
CAILVYRVDRGRETGELFF

SEQ ID NO: 480185 - protein, 13 aa, Homo sapiens
  CDR3 for alpha chain variable domain of TCR clone 240093 (TRAV13-2, TRAJ48)
CAEMDFGNEKLTF

SEQ ID NO: 480186 - protein, 16 aa, Homo sapiens
  CDR3 for beta chain variable domain of TCR clone 240093 (TRBV6-1, TRBJ2-1)
CASISRQGSSYNEQFF

SEQ ID NO: 480187 - protein, 14 aa, Homo sapiens
  CDR3 for alpha chain variable domain of TCR clone 240094 (TRAV13-1, TRAJ40)
CAASMTSGTYKYIF

SEQ ID NO: 480188 - protein, 13 aa, Homo sapiens
  CDR3 for beta chain variable domain of TCR clone 240094 (TRBV4-1, TRBJ2-5)
CASSEEVQETQYF

SEQ ID NO: 480189 - protein, 12 aa, Homo sapiens
  CDR3 for alpha chain variable domain of TCR clone 240095 (TRAV3, TRAJ43)
CAVRDPNNDMRF

SEQ ID NO: 480190 - protein, 16 aa, Homo sapiens
  CDR3 for beta chain variable domain of TCR clone 240095 (TRBV28, TRBJ2-5)
CASSFSPAGGWETQYF

SEQ ID NO: 480191 - protein, 10 aa, Homo sapiens
  CDR3 for alpha chain variable domain of TCR clone 240096 (TRAV12-2, TRAJ41)
CAVTGYAPNF

SEQ ID NO: 480192 - protein, 15 aa, Homo sapiens
  CDR3 for beta chain variable domain of TCR clone 240096 (TRBV4-2, TRBJ2-1)
CASSQDVGLAGEQFF

SEQ ID NO: 480193 - protein, 12 aa, Homo sapiens
  CDR3 for alpha chain variable domain of TCR clone 240097 (TRAV8-3, TRAJ26)
CAGDNYGQNFVF

SEQ ID NO: 480194 - protein, 16 aa, Homo sapiens
  CDR3 for beta chain variable domain of TCR clone 240097 (TRBV4-1, TRBJ2-3)
CASSQRAGGLTDTQYF

SEQ ID NO: 480195 - protein, 13 aa, Homo sapiens
  CDR3 for alpha chain variable domain of TCR clone 240098 (TRAV21, TRAJ27)
CAARPGNAGKSTF

SEQ ID NO: 480196 - protein, 14 aa, Homo sapiens
  CDR3 for beta chain variable domain of TCR clone 240098 (TRBV6-6, TRBJ1-6)
CASSFEGTTSPLHF

SEQ ID NO: 480197 - protein, 13 aa, Homo sapiens
  CDR3 for alpha chain variable domain of TCR clone 240099 (TRAV23/DV6, TRAJ22)
CAPYSGSARQLTF

SEQ ID NO: 480198 - protein, 15 aa, Homo sapiens
  CDR3 for beta chain variable domain of TCR clone 240099 (TRBV4-1, TRBJ2-3)
CASSLQRVGPDTQYF

SEQ ID NO: 480199 - protein, 13 aa, Homo sapiens
  CDR3 for alpha chain variable domain of TCR clone 240100 (TRAV35, TRAJ22)
CAGLSGSASQLTF

SEQ ID NO: 480200 - protein, 16 aa, Homo sapiens
  CDR3 for beta chain variable domain of TCR clone 240100 (TRBV7-9, TRBJ2-1)
CAGSLVLTGQGNEQFF

SEQ ID NO: 480201 - protein, 12 aa, Homo sapiens
  CDR3 for alpha chain variable domain of TCR clone 240101 (TRAV12-3, TRAJ3)
CTIDSSASKIIF

SEQ ID NO: 480202 - protein, 17 aa, Homo sapiens
  CDR3 for beta chain variable domain of TCR clone 240101 (TRBV7-9, TRBJ2-3)
CASSLEEAGAYPDTQYF

SEQ ID NO: 480203 - protein, 18 aa, Homo sapiens
  CDR3 for alpha chain variable domain of TCR clone 240102 (TRAV21, TRAJ52)
CAVRPSPAGGTSYGKRTF

SEQ ID NO: 480204 - protein, 11 aa, Homo sapiens
  CDR3 for beta chain variable domain of TCR clone 240102 (TRBV11-2, TRBJ2-2)
CASSLPGELFF

SEQ ID NO: 480205 - protein, 14 aa, Homo sapiens
  CDR3 for alpha chain variable domain of TCR clone 240103 (TRAV1-1, TRAJ27)
CAVIYNTNAGKSTF

SEQ ID NO: 480206 - protein, 16 aa, Homo sapiens
  CDR3 for beta chain variable domain of TCR clone 240103 (TRBV28, TRBJ1-5)
CASSFRGGYSNQPQHF

SEQ ID NO: 480207 - protein, 13 aa, Homo sapiens
  CDR3 for alpha chain variable domain of TCR clone 240104 (TRAV2, TRAJ40)
CAVVPSGAYKYIF

SEQ ID NO: 480208 - protein, 14 aa, Homo sapiens
  CDR3 for beta chain variable domain of TCR clone 240104 (TRBV19, TRBJ2-1)
CASPTFVLSGEQFF

SEQ ID NO: 480209 - protein, 12 aa, Homo sapiens
  CDR3 for alpha chain variable domain of TCR clone 240105 (TRAV21, TRAJ23)
CAVGPQGGKLIF

SEQ ID NO: 480210 - protein, 13 aa, Homo sapiens
  CDR3 for beta chain variable domain of TCR clone 240105 (TRBV20-1, TRBJ2-7)
CSARTGAGYEQFF

SEQ ID NO: 480211 - protein, 12 aa, Homo sapiens
  CDR3 for alpha chain variable domain of TCR clone 240106 (TRAV1-2, TRAJ33)
CAALDSNYQLIW

SEQ ID NO: 480212 - protein, 16 aa, Homo sapiens
  CDR3 for beta chain variable domain of TCR clone 240106 (TRBV6-4, TRBJ1-2)
CASSEAVGYPNYGYTF

SEQ ID NO: 480213 - protein, 13 aa, Homo sapiens
  CDR3 for alpha chain variable domain of TCR clone 240107 (TRAV12-1, TRAJ16)
CVVNGPDGQKLLF

SEQ ID NO: 480214 - protein, 15 aa, Homo sapiens
  CDR3 for beta chain variable domain of TCR clone 240107 (TRBV6-3, TRBJ2-7)
CASSTPGTVFYEQYF

SEQ ID NO: 480215 - protein, 13 aa, Homo sapiens
  CDR3 for alpha chain variable domain of TCR clone 240108 (TRAV21, TRAJ24)
GLMTTDSWGKLQF

SEQ ID NO: 480216 - protein, 12 aa, Homo sapiens
  CDR3 for beta chain variable domain of TCR clone 240108 (TRBV11-2, TRBJ2-7)
CASNPPADEQYF

SEQ ID NO: 480217 - protein, 13 aa, Homo sapiens
  CDR3 for alpha chain variable domain of TCR clone 240109 (TRAV13-1, TRAJ10)
CAAPTGGGNKLTF

SEQ ID NO: 480218 - protein, 15 aa, Homo sapiens
  CDR3 for beta chain variable domain of TCR clone 240109 (TRBV7-2, TRBJ1-1)
CASSFAGDRDTEAFF

SEQ ID NO: 480219 - protein, 13 aa, Homo sapiens
  CDR3 for alpha chain variable domain of TCR clone 240110 (TRAV12-1, TRAJ26)
CVVRRNYGQNFVF

SEQ ID NO: 480220 - protein, 15 aa, Homo sapiens
  CDR3 for beta chain variable domain of TCR clone 240110 (TRBV28, TRBJ2-1)
CASSIRAGGRSEQFF

SEQ ID NO: 480221 - protein, 13 aa, Homo sapiens
  CDR3 for alpha chain variable domain of TCR clone 240111 (TRAV3, TRAJ21)
CAVREPDFNKFYF

SEQ ID NO: 480222 - protein, 17 aa, Homo sapiens
  CDR3 for beta chain variable domain of TCR clone 240111 (TRBV28, TRBJ1-4)
CASRLPGTGIINEKLFF

SEQ ID NO: 480223 - protein, 14 aa, Homo sapiens
  CDR3 for alpha chain variable domain of TCR clone 240112 (TRAV8-2, TRAJ37)
CVVSISGNTGKLIF

SEQ ID NO: 480224 - protein, 15 aa, Homo sapiens
  CDR3 for beta chain variable domain of TCR clone 240112 (TRBV20-1, TRBJ2-7)
RSARDRVSGMDEQYF

SEQ ID NO: 480225 - protein, 11 aa, Homo sapiens
  CDR3 for alpha chain variable domain of TCR clone 240113 (TRAV3, TRAJ21)
CAVGNFNKFYF

SEQ ID NO: 480226 - protein, 17 aa, Homo sapiens
  CDR3 for beta chain variable domain of TCR clone 240113 (TRBV24-1, TRBJ2-1)
CVTSDVSTSGTYNEQFF

SEQ ID NO: 480227 - protein, 13 aa, Homo sapiens
  CDR3 for alpha chain variable domain of TCR clone 240114 (TRAV21, TRAJ32)
CAVSGGATNKLIF

SEQ ID NO: 480228 - protein, 18 aa, Homo sapiens
  CDR3 for beta chain variable domain of TCR clone 240114 (TRBV23-1, TRBJ2-1)
TVSLRQQLMAPAHNEQFF

SEQ ID NO: 480229 - protein, 15 aa, Homo sapiens
  CDR3 for alpha chain variable domain of TCR clone 240115 (TRAV10, TRAJ6)
CVVRPRTGGRYIPPF

SEQ ID NO: 480230 - protein, 15 aa, Homo sapiens
  CDR3 for beta chain variable domain of TCR clone 240115 (TRBV20-1, TRBJ2-7)
CSARDRVSGMDEQYF

SEQ ID NO: 480231 - protein, 13 aa, Homo sapiens
  CDR3 for alpha chain variable domain of TCR clone 240116 (TRAV23/DV6, TRAJ34)
CAAIENNTDQLIF

SEQ ID NO: 480232 - protein, 13 aa, Homo sapiens
  CDR3 for beta chain variable domain of TCR clone 240116 (TRBV29-1, TRBJ2-7)
CSVGPSGGYEQYF

SEQ ID NO: 480233 - protein, 12 aa, Homo sapiens
  CDR3 for alpha chain variable domain of TCR clone 240117 (TRAV12-3, TRAJ17)
CAMTLTGNKLTF

SEQ ID NO: 480234 - protein, 13 aa, Homo sapiens
  CDR3 for beta chain variable domain of TCR clone 240117 (TRBV10-2, TRBJ2-3)
CASSESGDHTQYF

SEQ ID NO: 480235 - protein, 17 aa, Homo sapiens
  CDR3 for alpha chain variable domain of TCR clone 240118 (TRAV3, TRAJ12)
CAVKDGGRMDSSYKLIF

SEQ ID NO: 480236 - protein, 14 aa, Homo sapiens
  CDR3 for beta chain variable domain of TCR clone 240118 (TRBV7-9, TRBJ1-2)
CASSRQGANYGYTF

SEQ ID NO: 480237 - protein, 15 aa, Homo sapiens
  CDR3 for alpha chain variable domain of TCR clone 240119 (TRAV12-2, TRAJ53)
CAVNGGGGSNYKLTF

SEQ ID NO: 480238 - protein, 15 aa, Homo sapiens
  CDR3 for beta chain variable domain of TCR clone 240119 (TRBV28, TRBJ2-1)
CASSGLPEVDNEQFF

SEQ ID NO: 480239 - protein, 16 aa, Homo sapiens
  CDR3 for alpha chain variable domain of TCR clone 240120 (TRAV3, TRAJ10)
CAVRDMNAGGGNKLNF

SEQ ID NO: 480240 - protein, 15 aa, Homo sapiens
  CDR3 for beta chain variable domain of TCR clone 240120 (TRBV20-1, TRBJ2-7)
CSARDRVSGMDEQYF

SEQ ID NO: 480241 - protein, 12 aa, Homo sapiens
  CDR3 for alpha chain variable domain of TCR clone 240121 (TRAV8-3, TRAJ26)
CAGDNYDQNSVF

SEQ ID NO: 480242 - protein, 13 aa, Homo sapiens
  CDR3 for beta chain variable domain of TCR clone 240121 (TRBV27, TRBJ1-1)
CASSLSIGAEAFF

SEQ ID NO: 480243 - protein, 14 aa, Homo sapiens
  CDR3 for alpha chain variable domain of TCR clone 240122 (TRAV2, TRAJ9)
CAAEDRSGGFKTIF

SEQ ID NO: 480244 - protein, 13 aa, Homo sapiens
  CDR3 for beta chain variable domain of TCR clone 240122 (TRBV11-2, TRBJ2-5)
CASSSTGEETQYF

SEQ ID NO: 480245 - protein, 23 aa, Homo sapiens
  CDR3 for alpha chain variable domain of TCR clone 240123 (TRAV30, TRAJ29)
PAQLLRNLLLWHIAFSGNTPLVF

SEQ ID NO: 480246 - protein, 15 aa, Homo sapiens
  CDR3 for beta chain variable domain of TCR clone 240123 (TRBV5-1, TRBJ2-2)
CASSLFGQNTGELFF

SEQ ID NO: 480247 - protein, 13 aa, Homo sapiens
  CDR3 for alpha chain variable domain of TCR clone 240124 (TRAV23/DV6, TRAJ27)
CAASKPMQANQPL

SEQ ID NO: 480248 - protein, 18 aa, Homo sapiens
  CDR3 for beta chain variable domain of TCR clone 240124 (TRBV7-9, TRBJ2-7)
CASSLTTSGSRTWYEQYF

SEQ ID NO: 480249 - protein, 15 aa, Homo sapiens
  CDR3 for alpha chain variable domain of TCR clone 240125 (TRAV8-4, TRAJ47)
CAVSDPEEYGNKMGF

SEQ ID NO: 480250 - protein, 15 aa, Homo sapiens
  CDR3 for beta chain variable domain of TCR clone 240125 (TRBV11-2, TRBJ2-1)
CASSLGPDSYNEQFF

SEQ ID NO: 480251 - protein, 14 aa, Homo sapiens
  CDR3 for alpha chain variable domain of TCR clone 240126 (TRAV21, TRAJ52)
CGRAGGTSYGKLTF

SEQ ID NO: 480252 - protein, 13 aa, Homo sapiens
  CDR3 for beta chain variable domain of TCR clone 240126 (TRBV19, TRBJ1-2)
CASSLVADYGYTF

SEQ ID NO: 480253 - protein, 14 aa, Homo sapiens
  CDR3 for alpha chain variable domain of TCR clone 240127 (TRAV8-3, TRAJ24)
CAVGSTDSWGKLQF

SEQ ID NO: 480254 - protein, 13 aa, Homo sapiens
  CDR3 for beta chain variable domain of TCR clone 240127 (TRBV19, TRBJ1-2)
CASSVPGQDGYTF

SEQ ID NO: 480255 - protein, 14 aa, Homo sapiens
  CDR3 for alpha chain variable domain of TCR clone 240128 (TRAV20, TRAJ42)
CAVQAGGSQGNVIV

SEQ ID NO: 480256 - protein, 14 aa, Homo sapiens
  CDR3 for beta chain variable domain of TCR clone 240128 (TRBV28, TRBJ1-2)
CASRIQGANYGYTF

SEQ ID NO: 480257 - protein, 14 aa, Homo sapiens
  CDR3 for alpha chain variable domain of TCR clone 240129 (TRAV8-2, TRAJ11)
CVVSEKSGSSTLTF

SEQ ID NO: 480258 - protein, 16 aa, Homo sapiens
  CDR3 for beta chain variable domain of TCR clone 240129 (TRBV28, TRBJ2-1)
CASSSPEYPRDNEQFF

SEQ ID NO: 480259 - protein, 13 aa, Homo sapiens
  CDR3 for alpha chain variable domain of TCR clone 240130 (TRAV8-3, TRAJ42)
CARYGGGQGNLIF

SEQ ID NO: 480260 - protein, 14 aa, Homo sapiens
  CDR3 for beta chain variable domain of TCR clone 240130 (TRBV20-1, TRBJ2-1)
CSALDRGTYNEQFF

SEQ ID NO: 480261 - protein, 15 aa, Homo sapiens
  CDR3 for alpha chain variable domain of TCR clone 240131 (TRAV3, TRAJ47)
CAVRDIGESGNKLVF

SEQ ID NO: 480262 - protein, 14 aa, Homo sapiens
  CDR3 for beta chain variable domain of TCR clone 240131 (TRBV13, TRBJ2-5)
CASSLERVGETQYF

SEQ ID NO: 480263 - protein, 13 aa, Homo sapiens
  CDR3 for alpha chain variable domain of TCR clone 240132 (TRAV2, TRAJ15)
CAVASQAGTALIF

SEQ ID NO: 480264 - protein, 14 aa, Homo sapiens
  CDR3 for beta chain variable domain of TCR clone 240132 (TRBV19, TRBJ2-1)
CATSQGDTYNEQFF

SEQ ID NO: 480265 - protein, 14 aa, Homo sapiens
  CDR3 for alpha chain variable domain of TCR clone 240133 (TRAV13-1, TRAJ29)
CAASSNSGNTPLAF

SEQ ID NO: 480266 - protein, 13 aa, Homo sapiens
  CDR3 for beta chain variable domain of TCR clone 240133 (TRBV10-2, TRBJ1-1)
CASNDQMNTEAFF

SEQ ID NO: 480267 - protein, 14 aa, Homo sapiens
  CDR3 for alpha chain variable domain of TCR clone 240134 (TRAV13-1, TRAJ35)
CAASKGGFGNVLHC

SEQ ID NO: 480268 - protein, 13 aa, Homo sapiens
  CDR3 for beta chain variable domain of TCR clone 240134 (TRBV12-4, TRBJ1-2)
CASSLRQGKGYTF

SEQ ID NO: 480269 - protein, 11 aa, Homo sapiens
  CDR3 for alpha chain variable domain of TCR clone 240135 (TRAV17, TRAJ31)
CATSNNARLMF

SEQ ID NO: 480270 - protein, 18 aa, Homo sapiens
  CDR3 for beta chain variable domain of TCR clone 240135 (TRBV7-8, TRBJ2-4)
CASSAERTLAKNIQYLAP

SEQ ID NO: 480271 - protein, 23 aa, Homo sapiens
  CDR3 for alpha chain variable domain of TCR clone 240136 (TRAV26-1, TRAJ38)
CIADNAGNNHIQNPDPAVYQLRD

SEQ ID NO: 480272 - protein, 15 aa, Homo sapiens
  CDR3 for beta chain variable domain of TCR clone 240136 (TRBV7-9, TRBJ1-4)
CASSRTGGFNEKLFF

SEQ ID NO: 480273 - protein, 13 aa, Homo sapiens
  CDR3 for alpha chain variable domain of TCR clone 240137 (TRAV2, TRAJ40)
CAVVTSGTYKYIF

SEQ ID NO: 480274 - protein, 15 aa, Homo sapiens
  CDR3 for beta chain variable domain of TCR clone 240137 (TRBV11-3, TRBJ2-3)
CASLKDGRERGYAVF

SEQ ID NO: 480275 - protein, 15 aa, Homo sapiens
  CDR3 for alpha chain variable domain of TCR clone 240138 (TRAV27, TRAJ38)
CAARRNAGNNRKLIW

SEQ ID NO: 480276 - protein, 18 aa, Homo sapiens
  CDR3 for beta chain variable domain of TCR clone 240138 (TRBV6-6, TRBJ1-3)
CASSYSKWDSISGNTIYF

SEQ ID NO: 480277 - protein, 15 aa, Homo sapiens
  CDR3 for alpha chain variable domain of TCR clone 240139 (TRAV12-3, TRAJ6)
CAMSATTGGSYIPTS

SEQ ID NO: 480278 - protein, 14 aa, Homo sapiens
  CDR3 for beta chain variable domain of TCR clone 240139 (TRBV11-2, TRBJ2-1)
CASTTGQGNNEQFF

SEQ ID NO: 480279 - protein, 12 aa, Homo sapiens
  CDR3 for alpha chain variable domain of TCR clone 240140 (TRAV12-3, TRAJ34)
CAMGYNTDKLIF

SEQ ID NO: 480280 - protein, 14 aa, Homo sapiens
  CDR3 for beta chain variable domain of TCR clone 240140 (TRBV4-1, TRBJ2-2)
CASSQAANTGELFF

SEQ ID NO: 480281 - protein, 14 aa, Homo sapiens
  CDR3 for alpha chain variable domain of TCR clone 240141 (TRAV2, TRAJ9)
CAVEDRSGGFKTIF

SEQ ID NO: 480282 - protein, 16 aa, Homo sapiens
  CDR3 for beta chain variable domain of TCR clone 240141 (TRBV15, TRBJ2-7)
CATSRDGEIPSYEQYF

SEQ ID NO: 480283 - protein, 16 aa, Homo sapiens
  CDR3 for alpha chain variable domain of TCR clone 240142 (TRAV13-1, TRAJ22)
CAAKGGRSGSARQLTF

SEQ ID NO: 480284 - protein, 14 aa, Homo sapiens
  CDR3 for beta chain variable domain of TCR clone 240142 (TRBV9, TRBJ2-7)
CASSVGVGSYEQYF

SEQ ID NO: 480285 - protein, 15 aa, Homo sapiens
  CDR3 for alpha chain variable domain of TCR clone 240143 (TRAV29/DV5, TRAJ53)
CAVSSRVGSNYKLTF

SEQ ID NO: 480286 - protein, 17 aa, Homo sapiens
  CDR3 for beta chain variable domain of TCR clone 240143 (TRBV4-1, TRBJ1-6)
CASSQDRNRDYNSPLHF

SEQ ID NO: 480287 - protein, 17 aa, Homo sapiens
  CDR3 for alpha chain variable domain of TCR clone 240144 (TRAV23/DV6, TRAJ57)
CAASSTLSPGGSVKLVF

SEQ ID NO: 480288 - protein, 14 aa, Homo sapiens
  CDR3 for beta chain variable domain of TCR clone 240144 (TRBV25-1, TRBJ1-1)
CASTHLGGNTEAFF

SEQ ID NO: 480289 - protein, 14 aa, Homo sapiens
  CDR3 for alpha chain variable domain of TCR clone 240145 (TRAV12-2, TRAJ5)
CAVNRSTGRRALTF

SEQ ID NO: 480290 - protein, 12 aa, Homo sapiens
  CDR3 for beta chain variable domain of TCR clone 240145 (TRBV19, TRBJ1-5)
CASNIAQQPQHF

SEQ ID NO: 480291 - protein, 12 aa, Homo sapiens
  CDR3 for alpha chain variable domain of TCR clone 240146 (TRAV38-1, TRAJ57)
CAFMKLPPTLVF

SEQ ID NO: 480292 - protein, 19 aa, Homo sapiens
  CDR3 for beta chain variable domain of TCR clone 240146 (TRBV19, TRBJ2-5)
CASSIGQVTDFFLGETQYF

SEQ ID NO: 480293 - protein, 11 aa, Homo sapiens
  CDR3 for alpha chain variable domain of TCR clone 240147 (TRAV29/DV5, TRAJ31)
CAASYRDRLMF

SEQ ID NO: 480294 - protein, 19 aa, Homo sapiens
  CDR3 for beta chain variable domain of TCR clone 240147 (TRBV19, TRBJ2-5)
FASSIGQVTDFFLGETQFF

SEQ ID NO: 480295 - protein, 14 aa, Homo sapiens
  CDR3 for alpha chain variable domain of TCR clone 240148 (TRAV1-2, TRAJ16)
CAVNRFSYGQKLLF

SEQ ID NO: 480296 - protein, 14 aa, Homo sapiens
  CDR3 for beta chain variable domain of TCR clone 240148 (TRBV7-2, TRBJ2-5)
CASSPLGQSETQYF

SEQ ID NO: 480297 - protein, 17 aa, Homo sapiens
  CDR3 for alpha chain variable domain of TCR clone 240149 (TRAV12-2, TRAJ4)
CAVNVRPVSGGYNKLIF

SEQ ID NO: 480298 - protein, 17 aa, Homo sapiens
  CDR3 for beta chain variable domain of TCR clone 240149 (TRBV6-3, TRBJ2-1)
CASSYSAGTRGLDEQFF

SEQ ID NO: 480299 - protein, 15 aa, Homo sapiens
  CDR3 for alpha chain variable domain of TCR clone 240150 (TRAV21, TRAJ53)
CATLNSGGSNYKLTF

SEQ ID NO: 480300 - protein, 13 aa, Homo sapiens
  CDR3 for beta chain variable domain of TCR clone 240150 (TRBV12-4, TRBJ1-2)
CASSLDSNYGYTF

SEQ ID NO: 480301 - protein, 11 aa, Homo sapiens
  CDR3 for alpha chain variable domain of TCR clone 240151 (TRAV21, TRAJ34)
CAHYNTDKLIL

SEQ ID NO: 480302 - protein, 13 aa, Homo sapiens
  CDR3 for beta chain variable domain of TCR clone 240151 (TRBV7-6, TRBJ1-2)
CASSLVADYGYTF

SEQ ID NO: 480303 - protein, 12 aa, Homo sapiens
  CDR3 for alpha chain variable domain of TCR clone 240152 (TRAV35, TRAJ30)
CAGLNRDDKIIF

SEQ ID NO: 480304 - protein, 13 aa, Homo sapiens
  CDR3 for beta chain variable domain of TCR clone 240152 (TRBV19, TRBJ1-2)
CATEPTGRYGYTF

SEQ ID NO: 480305 - protein, 12 aa, Homo sapiens
  CDR3 for alpha chain variable domain of TCR clone 240153 (TRAV17, TRAJ4)
CATRGGYNKLIF

SEQ ID NO: 480306 - protein, 13 aa, Homo sapiens
  CDR3 for beta chain variable domain of TCR clone 240153 (TRBV15, TRBJ1-6)
CATSGGLNSPLHF

SEQ ID NO: 480307 - protein, 13 aa, Homo sapiens
  CDR3 for alpha chain variable domain of TCR clone 240154 (TRAV20, TRAJ20)
CAVRWVRDYKLSF

SEQ ID NO: 480308 - protein, 14 aa, Homo sapiens
  CDR3 for beta chain variable domain of TCR clone 240154 (TRBV7-3, TRBJ2-1)
CASSLAGGTNEQFF

SEQ ID NO: 480309 - protein, 17 aa, Homo sapiens
  CDR3 for alpha chain variable domain of TCR clone 240155 (TRAV3, TRAJ6)
CAVRDGPRAGGSFIPPF

SEQ ID NO: 480310 - protein, 14 aa, Homo sapiens
  CDR3 for beta chain variable domain of TCR clone 240155 (TRBV7-2, TRBJ2-7)
CASSPKTSFYEQYF

SEQ ID NO: 480311 - protein, 16 aa, Homo sapiens
  CDR3 for alpha chain variable domain of TCR clone 240156 (TRAV12-1, TRAJ48)
CVVNMVSNFGNEKLTF

SEQ ID NO: 480312 - protein, 18 aa, Homo sapiens
  CDR3 for beta chain variable domain of TCR clone 240156 (TRBV11-2, TRBJ2-6)
CGSSLNPFLGTGANVLTF

SEQ ID NO: 480313 - protein, 10 aa, Homo sapiens
  CDR3 for alpha chain variable domain of TCR clone 240157 (TRAV8-4, TRAJ43)
CAVSADDMRF

SEQ ID NO: 480314 - protein, 13 aa, Homo sapiens
  CDR3 for beta chain variable domain of TCR clone 240157 (TRBV19, TRBJ1-2)
CASSVPGQDGYTF

SEQ ID NO: 480315 - protein, 16 aa, Homo sapiens
  CDR3 for alpha chain variable domain of TCR clone 240158 (TRAV26-1, TRAJ28)
CIVRVGLWGWALPTHF

SEQ ID NO: 480316 - protein, 16 aa, Homo sapiens
  CDR3 for beta chain variable domain of TCR clone 240158 (TRBV20-1, TRBJ1-2)
CSASMGQGVANYGYTF

SEQ ID NO: 480317 - protein, 14 aa, Homo sapiens
  CDR3 for alpha chain variable domain of TCR clone 240159 (TRAV12-1, TRAJ38)
CVVNNAGNNRKLSW

SEQ ID NO: 480318 - protein, 14 aa, Homo sapiens
  CDR3 for beta chain variable domain of TCR clone 240159 (TRBV11-2, TRBJ2-7)
CASSSTGEGYEQYF

SEQ ID NO: 480319 - protein, 16 aa, Homo sapiens
  CDR3 for alpha chain variable domain of TCR clone 240160 (TRAV20, TRAJ26)
CAVQHRRDNYGQNFVF

SEQ ID NO: 480320 - protein, 13 aa, Homo sapiens
  CDR3 for beta chain variable domain of TCR clone 240160 (TRBV7-3, TRBJ2-5)
CASSFRGGETQYF

SEQ ID NO: 480321 - protein, 16 aa, Homo sapiens
  CDR3 for alpha chain variable domain of TCR clone 240161 (TRAV17, TRAJ35)
CATAEGGIGFGNVLHC

SEQ ID NO: 480322 - protein, 19 aa, Homo sapiens
  CDR3 for beta chain variable domain of TCR clone 240161 (TRBV19, TRBJ2-5)
CASSIGQVTDCFLGETQYF

SEQ ID NO: 480323 - protein, 13 aa, Homo sapiens
  CDR3 for alpha chain variable domain of TCR clone 240162 (TRAV12-1, TRAJ20)
CVVNVPNDYKLSF

SEQ ID NO: 480324 - protein, 17 aa, Homo sapiens
  CDR3 for beta chain variable domain of TCR clone 240162 (TRBV11-2, TRBJ2-1)
CASSLYPPGVEYNEQFF

SEQ ID NO: 480325 - protein, 14 aa, Homo sapiens
  CDR3 for alpha chain variable domain of TCR clone 240163 (TRAV2, TRAJ9)
CAVEDRRGGFKTIF

SEQ ID NO: 480326 - protein, 17 aa, Homo sapiens
  CDR3 for beta chain variable domain of TCR clone 240163 (TRBV4-2, TRBJ1-1)
CASTQFGGGSGNTEAFF

SEQ ID NO: 480327 - protein, 14 aa, Homo sapiens
  CDR3 for alpha chain variable domain of TCR clone 240164 (TRAV1-2, TRAJ16)
CAVIRFSDGQKLLF

SEQ ID NO: 480328 - protein, 15 aa, Homo sapiens
  CDR3 for beta chain variable domain of TCR clone 240164 (TRBV7-9, TRBJ1-6)
CASSSPGRGNSPLRF

SEQ ID NO: 480329 - protein, 13 aa, Homo sapiens
  CDR3 for alpha chain variable domain of TCR clone 240165 (TRAV25, TRAJ30)
RAGRVDRDDKIIF

SEQ ID NO: 480330 - protein, 17 aa, Homo sapiens
  CDR3 for beta chain variable domain of TCR clone 240165 (TRBV7-9, TRBJ2-6)
CASSFGAGYSGANVLTF

SEQ ID NO: 480331 - protein, 14 aa, Homo sapiens
  CDR3 for alpha chain variable domain of TCR clone 240166 (TRAV20, TRAJ29)
CAVQAWVGNTPLVF

SEQ ID NO: 480332 - protein, 14 aa, Homo sapiens
  CDR3 for beta chain variable domain of TCR clone 240166 (TRBV5-1, TRBJ1-2)
CASSLEPVNYGYTF

SEQ ID NO: 480333 - protein, 13 aa, Homo sapiens
  CDR3 for alpha chain variable domain of TCR clone 240167 (TRAV2, TRAJ15)
CAVASQAGTALIF

SEQ ID NO: 480334 - protein, 15 aa, Homo sapiens
  CDR3 for beta chain variable domain of TCR clone 240167 (TRBV7-7, TRBJ2-2)
CATSKLAKNTGELFF

SEQ ID NO: 480335 - protein, 16 aa, Homo sapiens
  CDR3 for alpha chain variable domain of TCR clone 240168 (TRAV8-1, TRAJ39)
CAVNVSSYNAGNMLTF

SEQ ID NO: 480336 - protein, 15 aa, Homo sapiens
  CDR3 for beta chain variable domain of TCR clone 240168 (TRBV4-1, TRBJ2-3)
CASRSTRAGTDTQYF

SEQ ID NO: 480337 - protein, 12 aa, Homo sapiens
  CDR3 for alpha chain variable domain of TCR clone 240169 (TRAV21, TRAJ33)
CAVQDSNYQLIW

SEQ ID NO: 480338 - protein, 14 aa, Homo sapiens
  CDR3 for beta chain variable domain of TCR clone 240169 (TRBV28, TRBJ2-1)
CASGPGEGGNEQFF

SEQ ID NO: 480339 - protein, 14 aa, Homo sapiens
  CDR3 for alpha chain variable domain of TCR clone 240170 (TRAV12-2, TRAJ40)
CAVKIPSVTYKYIF

SEQ ID NO: 480340 - protein, 15 aa, Homo sapiens
  CDR3 for beta chain variable domain of TCR clone 240170 (TRBV6-3, TRBJ2-7)
CASSSPGTVFYEQYF

SEQ ID NO: 480341 - protein, 11 aa, Homo sapiens
  CDR3 for alpha chain variable domain of TCR clone 240171 (TRAV13-1, TRAJ15)
CAATPGTALIF

SEQ ID NO: 480342 - protein, 15 aa, Homo sapiens
  CDR3 for beta chain variable domain of TCR clone 240171 (TRBV28, TRBJ2-5)
CASSPAWSYQETQYF

SEQ ID NO: 480343 - protein, 20 aa, Homo sapiens
  CDR3 for alpha chain variable domain of TCR clone 240172 (TRAV21, TRAJ4)
AASQPGDSATLAGGYNKLIF

SEQ ID NO: 480344 - protein, 14 aa, Homo sapiens
  CDR3 for beta chain variable domain of TCR clone 240172 (TRBV7-9, TRBJ2-2)
CASSGLSDTGELFF

SEQ ID NO: 480345 - protein, 12 aa, Homo sapiens
  CDR3 for alpha chain variable domain of TCR clone 240173 (TRAV13-1, TRAJ15)
CAASQAGTALIF

SEQ ID NO: 480346 - protein, 16 aa, Homo sapiens
  CDR3 for beta chain variable domain of TCR clone 240173 (TRBV5-1, TRBJ2-3)
CASSLGLAVYTDTQYF

SEQ ID NO: 480347 - protein, 13 aa, Homo sapiens
  CDR3 for alpha chain variable domain of TCR clone 240174 (TRAV25, TRAJ26)
CAGMDNYGQNFVF

SEQ ID NO: 480348 - protein, 15 aa, Homo sapiens
  CDR3 for beta chain variable domain of TCR clone 240174 (TRBV7-6, TRBJ2-1)
CASSPGQGPYNEQFF

SEQ ID NO: 480349 - protein, 13 aa, Homo sapiens
  CDR3 for alpha chain variable domain of TCR clone 240175 (TRAV12-3, TRAJ53)
CAMSPGSEVATIN

SEQ ID NO: 480350 - protein, 11 aa, Homo sapiens
  CDR3 for beta chain variable domain of TCR clone 240175 (TRBV29-1, TRBJ2-5)
CSEDRTGTQYF

SEQ ID NO: 480351 - protein, 18 aa, Homo sapiens
  CDR3 for alpha chain variable domain of TCR clone 240176 (TRAV8-4, TRAJ52)
CAVTRANAGGTSYVKLTF

SEQ ID NO: 480352 - protein, 20 aa, Homo sapiens
  CDR3 for beta chain variable domain of TCR clone 240176 (TRBV19, TRBJ2-1)
CASSISRTVTSTRLNNERFF

SEQ ID NO: 480353 - protein, 14 aa, Homo sapiens
  CDR3 for alpha chain variable domain of TCR clone 240177 (TRAV12-2, TRAJ6)
CASKWGGGSYIPTF

SEQ ID NO: 480354 - protein, 12 aa, Homo sapiens
  CDR3 for beta chain variable domain of TCR clone 240177 (TRBV7-9, TRBJ2-7)
CASSIKREEQYF

SEQ ID NO: 480355 - protein, 18 aa, Homo sapiens
  CDR3 for alpha chain variable domain of TCR clone 240178 (TRAV9-2, TRAJ52)
CALSRHNAGGTSYGKLTF

SEQ ID NO: 480356 - protein, 16 aa, Homo sapiens
  CDR3 for beta chain variable domain of TCR clone 240178 (TRBV6-1, TRBJ2-5)
CASSETLDRGAETQYF

SEQ ID NO: 480357 - protein, 13 aa, Homo sapiens
  CDR3 for alpha chain variable domain of TCR clone 240179 (TRAV17, TRAJ4)
CATKSGGYNKLIF

SEQ ID NO: 480358 - protein, 15 aa, Homo sapiens
  CDR3 for beta chain variable domain of TCR clone 240179 (TRBV6-5, TRBJ2-7)
CASSARRGSDNEQYF

SEQ ID NO: 480359 - protein, 13 aa, Homo sapiens
  CDR3 for alpha chain variable domain of TCR clone 240180 (TRAV12-3, TRAJ13)
CAMSSGGYQKVTF

SEQ ID NO: 480360 - protein, 15 aa, Homo sapiens
  CDR3 for beta chain variable domain of TCR clone 240180 (TRBV5-1, TRBJ2-5)
CASSLGGRGQETRYF

SEQ ID NO: 480361 - protein, 14 aa, Homo sapiens
  CDR3 for alpha chain variable domain of TCR clone 240181 (TRAV16, TRAJ32)
CSLKSGGATNRLIF

SEQ ID NO: 480362 - protein, 13 aa, Homo sapiens
  CDR3 for beta chain variable domain of TCR clone 240181 (TRBV15, TRBJ1-6)
CATSGGLNSPLHF

SEQ ID NO: 480363 - protein, 14 aa, Homo sapiens
  CDR3 for alpha chain variable domain of TCR clone 240182 (TRAV1-2, TRAJ16)
CAFNRFSDGQKLLF

SEQ ID NO: 480364 - protein, 16 aa, Homo sapiens
  CDR3 for beta chain variable domain of TCR clone 240182 (TRBV28, TRBJ2-1)
CASSSSYSGSLNEQFF

SEQ ID NO: 480365 - protein, 13 aa, Homo sapiens
  CDR3 for alpha chain variable domain of TCR clone 240183 (TRAV23/DV6, TRAJ16)
CAASISDGKKLLF

SEQ ID NO: 480366 - protein, 13 aa, Homo sapiens
  CDR3 for beta chain variable domain of TCR clone 240183 (TRBV12-5, TRBJ2-3)
CASGDRQSDTQYF

SEQ ID NO: 480367 - protein, 14 aa, Homo sapiens
  CDR3 for alpha chain variable domain of TCR clone 240184 (TRAV1-2, TRAJ16)
CAVNRFSDGQKLLF

SEQ ID NO: 480368 - protein, 12 aa, Homo sapiens
  CDR3 for beta chain variable domain of TCR clone 240184 (TRBV7-9, TRBJ2-7)
CASSQGVYEQYF

SEQ ID NO: 480369 - protein, 15 aa, Homo sapiens
  CDR3 for alpha chain variable domain of TCR clone 240185 (TRAV29/DV5, TRAJ29)
CAASEVLRGKHTSCL

SEQ ID NO: 480370 - protein, 11 aa, Homo sapiens
  CDR3 for beta chain variable domain of TCR clone 240185 (TRBV6-3, TRBJ2-3)
CATGQADTQYF

SEQ ID NO: 480371 - protein, 15 aa, Homo sapiens
  CDR3 for alpha chain variable domain of TCR clone 240186 (TRAV13-1, TRAJ44)
CSASRGGGTASKLTF

SEQ ID NO: 480372 - protein, 13 aa, Homo sapiens
  CDR3 for beta chain variable domain of TCR clone 240186 (TRBV29-1, TRBJ2-1)
CSVEGGRVNEQFF

SEQ ID NO: 480373 - protein, 13 aa, Homo sapiens
  CDR3 for alpha chain variable domain of TCR clone 240187 (TRAV23/DV6, TRAJ16)
CAASISDGQKLLF

SEQ ID NO: 480374 - protein, 12 aa, Homo sapiens
  CDR3 for beta chain variable domain of TCR clone 240187 (TRBV12-4, TRBJ1-2)
CASSFIWLHLRF

SEQ ID NO: 480375 - protein, 15 aa, Homo sapiens
  CDR3 for alpha chain variable domain of TCR clone 240188 (TRAV12-2, TRAJ43)
CAFDTRFGAGTRLIV

SEQ ID NO: 480376 - protein, 18 aa, Homo sapiens
  CDR3 for beta chain variable domain of TCR clone 240188 (TRBV20-1, TRBJ2-3)
CSASGLAGGPGTTDTQYF

SEQ ID NO: 480377 - protein, 14 aa, Homo sapiens
  CDR3 for alpha chain variable domain of TCR clone 240189 (TRAV1-2, TRAJ8)
CAVREDSGFQRLVF

SEQ ID NO: 480378 - protein, 15 aa, Homo sapiens
  CDR3 for beta chain variable domain of TCR clone 240189 (TRBV6-3, TRBJ2-7)
CASSSPGTVFYEQYF

SEQ ID NO: 480379 - protein, 15 aa, Homo sapiens
  CDR3 for alpha chain variable domain of TCR clone 240190 (TRAV25, TRAJ52)
CAGTSGGTSYGKLTF

SEQ ID NO: 480380 - protein, 13 aa, Homo sapiens
  CDR3 for beta chain variable domain of TCR clone 240190 (TRBV6-5, TRBJ2-5)
CASSPQGCETQYF

SEQ ID NO: 480381 - protein, 16 aa, Homo sapiens
  CDR3 for alpha chain variable domain of TCR clone 240191 (TRAV3, TRAJ37)
CAVSGKGSGNTGKLIF

SEQ ID NO: 480382 - protein, 15 aa, Homo sapiens
  CDR3 for beta chain variable domain of TCR clone 240191 (TRBV20-1, TRBJ2-1)
CSARGGTRYYNEQFS

SEQ ID NO: 480383 - protein, 13 aa, Homo sapiens
  CDR3 for alpha chain variable domain of TCR clone 240192 (TRAV16, TRAJ11)
CALTQSGYSTLTI

SEQ ID NO: 480384 - protein, 14 aa, Homo sapiens
  CDR3 for beta chain variable domain of TCR clone 240192 (TRBV19, TRBJ2-7)
CASSTTRSSYEQYF

SEQ ID NO: 480385 - protein, 13 aa, Homo sapiens
  CDR3 for alpha chain variable domain of TCR clone 240193 (TRAV12-1, TRAJ6)
CVVFPGGSYIPTF

SEQ ID NO: 480386 - protein, 13 aa, Homo sapiens
  CDR3 for beta chain variable domain of TCR clone 240193 (TRBV7-9, TRBJ1-2)
CASSLKQNYGYSF

SEQ ID NO: 480387 - protein, 10 aa, Homo sapiens
  CDR3 for alpha chain variable domain of TCR clone 240194 (TRAV12-3, TRAJ49)
CAMNDDQFYF

SEQ ID NO: 480388 - protein, 13 aa, Homo sapiens
  CDR3 for beta chain variable domain of TCR clone 240194 (TRBV7-9, TRBJ2-1)
CASSWESYNEQFF

SEQ ID NO: 480389 - protein, 12 aa, Homo sapiens
  CDR3 for alpha chain variable domain of TCR clone 240195 (TRAV2, TRAJ36)
CAELTGANNLFF

SEQ ID NO: 480390 - protein, 13 aa, Homo sapiens
  CDR3 for beta chain variable domain of TCR clone 240195 (TRBV18, TRBJ2-7)
ASSPRGGAYEQYF

SEQ ID NO: 480391 - protein, 13 aa, Homo sapiens
  CDR3 for alpha chain variable domain of TCR clone 240196 (TRAV12-3, TRAJ47)
CAMKKEYGNKLVF

SEQ ID NO: 480392 - protein, 14 aa, Homo sapiens
  CDR3 for beta chain variable domain of TCR clone 240196 (TRBV11-3, TRBJ2-7)
CASSPGWGTYEQYF

SEQ ID NO: 480393 - protein, 13 aa, Homo sapiens
  CDR3 for alpha chain variable domain of TCR clone 240197 (TRAV8-4, TRAJ10)
CAAFTGGRNKLTF

SEQ ID NO: 480394 - protein, 15 aa, Homo sapiens
  CDR3 for beta chain variable domain of TCR clone 240197 (TRBV2, TRBJ2-3)
CASSDFEKATDTQYF

SEQ ID NO: 480395 - protein, 14 aa, Homo sapiens
  CDR3 for alpha chain variable domain of TCR clone 240198 (TRAV17, TRAJ39)
CATDPVRAGNMLTF

SEQ ID NO: 480396 - protein, 13 aa, Homo sapiens
  CDR3 for beta chain variable domain of TCR clone 240198 (TRBV10-2, TRBJ2-7)
CASGASGGYEQYF

SEQ ID NO: 480397 - protein, 14 aa, Homo sapiens
  CDR3 for alpha chain variable domain of TCR clone 240199 (TRAV1-2, TRAJ8)
CAVREDTGFQKLVF

SEQ ID NO: 480398 - protein, 17 aa, Homo sapiens
  CDR3 for beta chain variable domain of TCR clone 240199 (TRBV11-2, TRBJ2-1)
CASSLHPPGVEYNEQFF

SEQ ID NO: 480399 - protein, 12 aa, Homo sapiens
  CDR3 for alpha chain variable domain of TCR clone 240200 (TRAV35, TRAJ31)
CAAASNNARLMF

SEQ ID NO: 480400 - protein, 12 aa, Homo sapiens
  CDR3 for beta chain variable domain of TCR clone 240200 (TRBV7-3, TRBJ1-2)
CASSKKGVPVTF

SEQ ID NO: 480401 - protein, 15 aa, Homo sapiens
  CDR3 for alpha chain variable domain of TCR clone 240201 (TRAV17, TRAJ13)
CATDAGSGGYQKVTF

SEQ ID NO: 480402 - protein, 17 aa, Homo sapiens
  CDR3 for beta chain variable domain of TCR clone 240201 (TRBV11-2, TRBJ2-1)
CASSVYPPGVEYNEQFF

SEQ ID NO: 480403 - protein, 17 aa, Homo sapiens
  CDR3 for alpha chain variable domain of TCR clone 240202 (TRAV20, TRAJ28)
CVVQGGYSGAGSYQLTF

SEQ ID NO: 480404 - protein, 15 aa, Homo sapiens
  CDR3 for beta chain variable domain of TCR clone 240202 (TRBV7-2, TRBJ2-7)
CASSLSSGRTYEQYF

SEQ ID NO: 480405 - protein, 14 aa, Homo sapiens
  CDR3 for alpha chain variable domain of TCR clone 240203 (TRAV3, TRAJ9)
CAVRGNTGGFKTIF

SEQ ID NO: 480406 - protein, 13 aa, Homo sapiens
  CDR3 for beta chain variable domain of TCR clone 240203 (TRBV2, TRBJ1-5)
CATAGPGNQPQHF

SEQ ID NO: 480407 - protein, 12 aa, Homo sapiens
  CDR3 for alpha chain variable domain of TCR clone 240204 (TRAV12-2, TRAJ40)
CVVYSGTYKYIF

SEQ ID NO: 480408 - protein, 12 aa, Homo sapiens
  CDR3 for beta chain variable domain of TCR clone 240204 (TRBV11-2, TRBJ2-3)
GASRGAPNTQYF

SEQ ID NO: 480409 - protein, 15 aa, Homo sapiens
  CDR3 for alpha chain variable domain of TCR clone 240205 (TRAV14/DV4, TRAJ33)
CAMREGRDSNYKLIW

SEQ ID NO: 480410 - protein, 15 aa, Homo sapiens
  CDR3 for beta chain variable domain of TCR clone 240205 (TRBV5-5, TRBJ1-5)
CASSSTPGSNQPQHF

SEQ ID NO: 480411 - protein, 17 aa, Homo sapiens
  CDR3 for alpha chain variable domain of TCR clone 240206 (TRAV3, TRAJ6)
CAVRDGPRAGGSYIPTF

SEQ ID NO: 480412 - protein, 13 aa, Homo sapiens
  CDR3 for beta chain variable domain of TCR clone 240206 (TRBV7-2, TRBJ1-2)
CASSLVADYGYTF

SEQ ID NO: 480413 - protein, 22 aa, Homo sapiens
  CDR3 for alpha chain variable domain of TCR clone 240207 (TRAV27, TRAJ38)
CAARRNAGNNHIQNPDPALYQL

SEQ ID NO: 480414 - protein, 13 aa, Homo sapiens
  CDR3 for beta chain variable domain of TCR clone 240207 (TRBV12-5, TRBJ2-3)
CASGDRQSDTQYF

SEQ ID NO: 480415 - protein, 13 aa, Homo sapiens
  CDR3 for alpha chain variable domain of TCR clone 240208 (TRAV23/DV6, TRAJ36)
CAAGQTGANNLFF

SEQ ID NO: 480416 - protein, 15 aa, Homo sapiens
  CDR3 for beta chain variable domain of TCR clone 240208 (TRBV6-3, TRBJ2-2)
CASSFLATLTGELFF

SEQ ID NO: 480417 - protein, 17 aa, Homo sapiens
  CDR3 for alpha chain variable domain of TCR clone 240209 (TRAV29/DV5, TRAJ45)
CAADGPFSGGGADGLTF

SEQ ID NO: 480418 - protein, 16 aa, Homo sapiens
  CDR3 for beta chain variable domain of TCR clone 240209 (TRBV19, TRBJ2-2)
CASSTARASNTGELFF

SEQ ID NO: 480419 - protein, 14 aa, Homo sapiens
  CDR3 for alpha chain variable domain of TCR clone 240210 (TRAV8-1, TRAJ13)
CAVKRSGGYQKVTF

SEQ ID NO: 480420 - protein, 13 aa, Homo sapiens
  CDR3 for beta chain variable domain of TCR clone 240210 (TRBV11-2, TRBJ1-2)
CASSLDSPSGYTF

SEQ ID NO: 480421 - protein, 15 aa, Homo sapiens
  CDR3 for alpha chain variable domain of TCR clone 240211 (TRAV8-2, TRAJ15)
CVVSDRYQAGTALIF

SEQ ID NO: 480422 - protein, 13 aa, Homo sapiens
  CDR3 for beta chain variable domain of TCR clone 240211 (TRBV20-1, TRBJ1-1)
FSAPDRRNTEAFF

SEQ ID NO: 480423 - protein, 15 aa, Homo sapiens
  CDR3 for alpha chain variable domain of TCR clone 240212 (TRAV8-4, TRAJ13)
CAVSDWGGGYQKVNF

SEQ ID NO: 480424 - protein, 15 aa, Homo sapiens
  CDR3 for beta chain variable domain of TCR clone 240212 (TRBV25-1, TRBJ1-4)
CASSPGDSTNEKLFF

SEQ ID NO: 480425 - protein, 14 aa, Homo sapiens
  CDR3 for alpha chain variable domain of TCR clone 240213 (TRAV16, TRAJ33)
CALSAIDSNYQLIW

SEQ ID NO: 480426 - protein, 15 aa, Homo sapiens
  CDR3 for beta chain variable domain of TCR clone 240213 (TRBV9, TRBJ1-6)
CASSVAGTGDSPLHF

SEQ ID NO: 480427 - protein, 14 aa, Homo sapiens
  CDR3 for alpha chain variable domain of TCR clone 240214 (TRAV8-3, TRAJ34)
CAVGAWENTDKLIF

SEQ ID NO: 480428 - protein, 15 aa, Homo sapiens
  CDR3 for beta chain variable domain of TCR clone 240214 (TRBV11-3, TRBJ2-3)
CASLKDGREGDTQYF

SEQ ID NO: 480429 - protein, 15 aa, Homo sapiens
  CDR3 for alpha chain variable domain of TCR clone 240215 (TRAV26-1, TRAJ29)
CIVRGSSDQETHLLS

SEQ ID NO: 480430 - protein, 15 aa, Homo sapiens
  CDR3 for beta chain variable domain of TCR clone 240215 (TRBV7-9, TRBJ1-5)
CASSQGHQPNQPQHF

SEQ ID NO: 480431 - protein, 14 aa, Homo sapiens
  CDR3 for alpha chain variable domain of TCR clone 240216 (TRAV14/DV4, TRAJ7)
CAMREAYGNNRLAF

SEQ ID NO: 480432 - protein, 15 aa, Homo sapiens
  CDR3 for beta chain variable domain of TCR clone 240216 (TRBV19, TRBJ2-1)
CASIINREPSHEQFF

SEQ ID NO: 480433 - protein, 13 aa, Homo sapiens
  CDR3 for alpha chain variable domain of TCR clone 240217 (TRAV12-1, TRAJ40)
CVVPTSGTYKYNF

SEQ ID NO: 480434 - protein, 18 aa, Homo sapiens
  CDR3 for beta chain variable domain of TCR clone 240217 (TRBV7-6, TRBJ2-1)
CASSPRTSGMSSYNEQFF

SEQ ID NO: 480435 - protein, 14 aa, Homo sapiens
  CDR3 for alpha chain variable domain of TCR clone 240218 (TRAV1-2, TRAJ16)
CAVNRFSDGQKLLF

SEQ ID NO: 480436 - protein, 16 aa, Homo sapiens
  CDR3 for beta chain variable domain of TCR clone 240218 (TRBV20-1, TRBJ1-4)
CSAPGQGLLTNEKLFF

SEQ ID NO: 480437 - protein, 16 aa, Homo sapiens
  CDR3 for alpha chain variable domain of TCR clone 240219 (TRAV30, TRAJ24)
CGTEIVDADSWGKFQF

SEQ ID NO: 480438 - protein, 15 aa, Homo sapiens
  CDR3 for beta chain variable domain of TCR clone 240219 (TRBV7-9, TRBJ1-4)
CASSARTRGNEKLFF

SEQ ID NO: 480439 - protein, 11 aa, Homo sapiens
  CDR3 for alpha chain variable domain of TCR clone 240220 (TRAV21, TRAJ34)
CAHYNTDKLIF

SEQ ID NO: 480440 - protein, 15 aa, Homo sapiens
  CDR3 for beta chain variable domain of TCR clone 240220 (TRBV28, TRBJ2-3)
CASSPDRQGANTQYF

SEQ ID NO: 480441 - protein, 15 aa, Homo sapiens
  CDR3 for alpha chain variable domain of TCR clone 240221 (TRAV1-2, TRAJ28)
CAVQDSGAGSYQLTF

SEQ ID NO: 480442 - protein, 15 aa, Homo sapiens
  CDR3 for beta chain variable domain of TCR clone 240221 (TRBV7-2, TRBJ1-5)
CASSLGRGAGQPQHF

SEQ ID NO: 480443 - protein, 14 aa, Homo sapiens
  CDR3 for alpha chain variable domain of TCR clone 240222 (TRAV26-1, TRAJ39)
CIVRGSRSGNMLTF

SEQ ID NO: 480444 - protein, 15 aa, Homo sapiens
  CDR3 for beta chain variable domain of TCR clone 240222 (TRBV7-9, TRBJ1-5)
CASSQGHQPNQPHHF

SEQ ID NO: 480445 - protein, 17 aa, Homo sapiens
  CDR3 for alpha chain variable domain of TCR clone 240223 (TRAV13-1, TRAJ28)
CAASPPYSGAGSYQLTL

SEQ ID NO: 480446 - protein, 15 aa, Homo sapiens
  CDR3 for beta chain variable domain of TCR clone 240223 (TRBV7-2, TRBJ2-1)
CASSFQADEYNEQFF

SEQ ID NO: 480447 - protein, 14 aa, Homo sapiens
  CDR3 for alpha chain variable domain of TCR clone 240224 (TRAV13-1, TRAJ40)
CAARMTSGTYKYIF

SEQ ID NO: 480448 - protein, 14 aa, Homo sapiens
  CDR3 for beta chain variable domain of TCR clone 240224 (TRBV7-3, TRBJ2-1)
CQQPDGGGEVEQFF

SEQ ID NO: 480449 - protein, 16 aa, Homo sapiens
  CDR3 for alpha chain variable domain of TCR clone 240225 (TRAV35, TRAJ28)
CAGQKYSGAGSYQLTF

SEQ ID NO: 480450 - protein, 16 aa, Homo sapiens
  CDR3 for beta chain variable domain of TCR clone 240225 (TRBV7-3, TRBJ2-2)
CASSLKRGTLSGELFF

SEQ ID NO: 480451 - protein, 17 aa, Homo sapiens
  CDR3 for alpha chain variable domain of TCR clone 240226 (TRAV3, TRAJ42)
CAVRDRDYGGSQGNLIL

SEQ ID NO: 480452 - protein, 14 aa, Homo sapiens
  CDR3 for beta chain variable domain of TCR clone 240226 (TRBV7-2, TRBJ2-7)
CASRSQGAAYEQYF

SEQ ID NO: 480453 - protein, 15 aa, Homo sapiens
  CDR3 for alpha chain variable domain of TCR clone 240227 (TRAV12-2, TRAJ20)
CAVKGGFGAGPTVTV

SEQ ID NO: 480454 - protein, 13 aa, Homo sapiens
  CDR3 for beta chain variable domain of TCR clone 240227 (TRBV12-4, TRBJ2-7)
CASSPGQLYEQYF

SEQ ID NO: 480455 - protein, 15 aa, Homo sapiens
  CDR3 for alpha chain variable domain of TCR clone 240228 (TRAV3, TRAJ13)
CAVRDIAGGYQKVNF

SEQ ID NO: 480456 - protein, 13 aa, Homo sapiens
  CDR3 for beta chain variable domain of TCR clone 240228 (TRBV2, TRBJ2-2)
CASSKKNTGELFF

SEQ ID NO: 480457 - protein, 14 aa, Homo sapiens
  CDR3 for alpha chain variable domain of TCR clone 240229 (TRAV12-1, TRAJ27)
CGDHIRTNAGKSTF

SEQ ID NO: 480458 - protein, 15 aa, Homo sapiens
  CDR3 for beta chain variable domain of TCR clone 240229 (TRBV19, TRBJ1-1)
CASTSGQIQNTEAFF

SEQ ID NO: 480459 - protein, 12 aa, Homo sapiens
  CDR3 for alpha chain variable domain of TCR clone 240230 (TRAV27, TRAJ35)
CAGAEFGNVLHC

SEQ ID NO: 480460 - protein, 16 aa, Homo sapiens
  CDR3 for beta chain variable domain of TCR clone 240230 (TRBV6-1, TRBJ2-1)
CASILRQGSSYNEQFF

SEQ ID NO: 480461 - protein, 17 aa, Homo sapiens
  CDR3 for alpha chain variable domain of TCR clone 240231 (TRAV21, TRAJ52)
CCEAFPAGGTSYGKLTF

SEQ ID NO: 480462 - protein, 15 aa, Homo sapiens
  CDR3 for beta chain variable domain of TCR clone 240231 (TRBV28, TRBJ2-4)
CAAGSGTLLMGIQYF

SEQ ID NO: 480463 - protein, 14 aa, Homo sapiens
  CDR3 for alpha chain variable domain of TCR clone 240232 (TRAV17, TRAJ12)
CATDEKDSSYKLIF

SEQ ID NO: 480464 - protein, 15 aa, Homo sapiens
  CDR3 for beta chain variable domain of TCR clone 240232 (TRBV7-8, TRBJ2-1)
CASSLAGGLYNEQFF

SEQ ID NO: 480465 - protein, 15 aa, Homo sapiens
  CDR3 for alpha chain variable domain of TCR clone 240233 (TRAV14/DV4, TRAJ33)
CAMREGRDSNYQLIW

SEQ ID NO: 480466 - protein, 15 aa, Homo sapiens
  CDR3 for beta chain variable domain of TCR clone 240233 (TRBV5-5, TRBJ1-5)
CASSSTPGSNQPQNF

SEQ ID NO: 480467 - protein, 14 aa, Homo sapiens
  CDR3 for alpha chain variable domain of TCR clone 240234 (TRAV8-2, TRAJ37)
CVVSISGNTGQLIF

SEQ ID NO: 480468 - protein, 17 aa, Homo sapiens
  CDR3 for beta chain variable domain of TCR clone 240234 (TRBV7-9, TRBJ2-3)
CASSPTVAGDLTDTQYF

SEQ ID NO: 480469 - protein, 15 aa, Homo sapiens
  CDR3 for alpha chain variable domain of TCR clone 240235 (TRAV3, TRAJ3)
CAVRDRDSSASKIIF

SEQ ID NO: 480470 - protein, 18 aa, Homo sapiens
  CDR3 for beta chain variable domain of TCR clone 240235 (TRBV25-1, TRBJ1-2)
GASSGLQNGQGLIFGYSF

SEQ ID NO: 480471 - protein, 14 aa, Homo sapiens
  CDR3 for alpha chain variable domain of TCR clone 240236 (TRAV35, TRAJ30)
CAGHQPNRDDKIIF

SEQ ID NO: 480472 - protein, 14 aa, Homo sapiens
  CDR3 for beta chain variable domain of TCR clone 240236 (TRBV5-1, TRBJ2-5)
CASSLAGKQETQYF

SEQ ID NO: 480473 - protein, 14 aa, Homo sapiens
  CDR3 for alpha chain variable domain of TCR clone 240237 (TRAV27, TRAJ22)
CAGVVPGSARQLTF

SEQ ID NO: 480474 - protein, 15 aa, Homo sapiens
  CDR3 for beta chain variable domain of TCR clone 240237 (TRBV28, TRBJ2-1)
CASSIIAGGRSEQFF

SEQ ID NO: 480475 - protein, 17 aa, Homo sapiens
  CDR3 for alpha chain variable domain of TCR clone 240238 (TRAV3, TRAJ28)
CAVREAYSGAGSYQLTF

SEQ ID NO: 480476 - protein, 14 aa, Homo sapiens
  CDR3 for beta chain variable domain of TCR clone 240238 (TRBV28, TRBJ1-5)
CASSGQALYQPQHF

SEQ ID NO: 480477 - protein, 13 aa, Homo sapiens
  CDR3 for alpha chain variable domain of TCR clone 240239 (TRAV20, TRAJ21)
CSVEGYNFNKFYF

SEQ ID NO: 480478 - protein, 16 aa, Homo sapiens
  CDR3 for beta chain variable domain of TCR clone 240239 (TRBV12-5, TRBJ2-5)
CASGPRTSGNQETQYF

SEQ ID NO: 480479 - protein, 14 aa, Homo sapiens
  CDR3 for alpha chain variable domain of TCR clone 240240 (TRAV17, TRAJ57)
CATDPQGGSEKLVF

SEQ ID NO: 480480 - protein, 15 aa, Homo sapiens
  CDR3 for beta chain variable domain of TCR clone 240240 (TRBV27, TRBJ2-1)
CASSDGGGSSNEQFF

SEQ ID NO: 480481 - protein, 15 aa, Homo sapiens
  CDR3 for alpha chain variable domain of TCR clone 240241 (TRAV26-1, TRAJ56)
CIVRVDNGGNSMLTF

SEQ ID NO: 480482 - protein, 15 aa, Homo sapiens
  CDR3 for beta chain variable domain of TCR clone 240241 (TRBV20-1, TRBJ2-7)
RSARDPTEVGHEQYF

SEQ ID NO: 480483 - protein, 14 aa, Homo sapiens
  CDR3 for alpha chain variable domain of TCR clone 240242 (TRAV26-1, TRAJ26)
CIVRATFLGQNFVF

SEQ ID NO: 480484 - protein, 16 aa, Homo sapiens
  CDR3 for beta chain variable domain of TCR clone 240242 (TRBV12-4, TRBJ2-7)
CASRSTGTGPSYEHYF

SEQ ID NO: 480485 - protein, 12 aa, Homo sapiens
  CDR3 for alpha chain variable domain of TCR clone 240243 (TRAV12-3, TRAJ42)
CAPGGSQGNLIF

SEQ ID NO: 480486 - protein, 15 aa, Homo sapiens
  CDR3 for beta chain variable domain of TCR clone 240243 (TRBV11-3, TRBJ2-3)
CASLKDGREGDTQYF

SEQ ID NO: 480487 - protein, 14 aa, Homo sapiens
  CDR3 for alpha chain variable domain of TCR clone 240244 (TRAV24, TRAJ42)
CAQNYGGSTGNLIF

SEQ ID NO: 480488 - protein, 15 aa, Homo sapiens
  CDR3 for beta chain variable domain of TCR clone 240244 (TRBV19, TRBJ1-5)
CASSIPGGAGQPQHF

SEQ ID NO: 480489 - protein, 16 aa, Homo sapiens
  CDR3 for alpha chain variable domain of TCR clone 240245 (TRAV17, TRAJ9)
CATGEWGGTGGFKTIF

SEQ ID NO: 480490 - protein, 15 aa, Homo sapiens
  CDR3 for beta chain variable domain of TCR clone 240245 (TRBV20-1, TRBJ1-2)
CSARDSRGRNNGYTF

SEQ ID NO: 480491 - protein, 14 aa, Homo sapiens
  CDR3 for alpha chain variable domain of TCR clone 240246 (TRAV12-2, TRAJ40)
CAVKIPSGTYKYIF

SEQ ID NO: 480492 - protein, 15 aa, Homo sapiens
  CDR3 for beta chain variable domain of TCR clone 240246 (TRBV18, TRBJ2-1)
CASSPPSASYNEQFF

SEQ ID NO: 480493 - protein, 15 aa, Homo sapiens
  CDR3 for alpha chain variable domain of TCR clone 240247 (TRAV12-1, TRAJ22)
CVVRISSGSARQLTF

SEQ ID NO: 480494 - protein, 15 aa, Homo sapiens
  CDR3 for beta chain variable domain of TCR clone 240247 (TRBV9, TRBJ1-6)
CASSVAGTGDSPLHF

SEQ ID NO: 480495 - protein, 12 aa, Homo sapiens
  CDR3 for alpha chain variable domain of TCR clone 240248 (TRAV2, TRAJ9)
CAVGAGGFKTIF

SEQ ID NO: 480496 - protein, 11 aa, Homo sapiens
  CDR3 for beta chain variable domain of TCR clone 240248 (TRBV13, TRBJ2-2)
CASRPRTGEHT

SEQ ID NO: 480497 - protein, 15 aa, Homo sapiens
  CDR3 for alpha chain variable domain of TCR clone 240249 (TRAV26-1, TRAJ29)
CIVRVEGSGSTPLVF

SEQ ID NO: 480498 - protein, 13 aa, Homo sapiens
  CDR3 for beta chain variable domain of TCR clone 240249 (TRBV7-3, TRBJ1-2)
CASSLKRGYGYTF

SEQ ID NO: 480499 - protein, 13 aa, Homo sapiens
  CDR3 for alpha chain variable domain of TCR clone 240250 (TRAV13-1, TRAJ6)
CAASKGGSYIPTF

SEQ ID NO: 480500 - protein, 14 aa, Homo sapiens
  CDR3 for beta chain variable domain of TCR clone 240250 (TRBV7-2, TRBJ2-1)
CATSLGVGYNEQFF

SEQ ID NO: 480501 - protein, 14 aa, Homo sapiens
  CDR3 for alpha chain variable domain of TCR clone 240251 (TRAV12-3, TRAJ10)
SHLPLTGGGNKLTF

SEQ ID NO: 480502 - protein, 14 aa, Homo sapiens
  CDR3 for beta chain variable domain of TCR clone 240251 (TRBV4-3, TRBJ2-1)
WASGLDRAYNEQFF

SEQ ID NO: 480503 - protein, 15 aa, Homo sapiens
  CDR3 for alpha chain variable domain of TCR clone 240252 (TRAV12-3, TRAJ6)
CAMSATTGGSYIPTF

SEQ ID NO: 480504 - protein, 15 aa, Homo sapiens
  CDR3 for beta chain variable domain of TCR clone 240252 (TRBV5-1, TRBJ2-7)
CASILNGGPAREQYF

SEQ ID NO: 480505 - protein, 17 aa, Homo sapiens
  CDR3 for alpha chain variable domain of TCR clone 240253 (TRAV3, TRAJ42)
CAVRDRNYGGSQGNLIF

SEQ ID NO: 480506 - protein, 17 aa, Homo sapiens
  CDR3 for beta chain variable domain of TCR clone 240253 (TRBV7-9, TRBJ2-3)
CASSPTVAGDLTDTQYF

SEQ ID NO: 480507 - protein, 14 aa, Homo sapiens
  CDR3 for alpha chain variable domain of TCR clone 240254 (TRAV20, TRAJ10)
CAVRVEGGGNKLTF

SEQ ID NO: 480508 - protein, 18 aa, Homo sapiens
  CDR3 for beta chain variable domain of TCR clone 240254 (TRBV24-1, TRBJ2-1)
CATSDLMFLGRGVHEQYF

SEQ ID NO: 480509 - protein, 11 aa, Homo sapiens
  CDR3 for alpha chain variable domain of TCR clone 240255 (TRAV12-1, TRAJ15)
CVVNAGTALIF

SEQ ID NO: 480510 - protein, 13 aa, Homo sapiens
  CDR3 for beta chain variable domain of TCR clone 240255 (TRBV10-3, TRBJ2-7)
CASKLAVNYEQYF

SEQ ID NO: 480511 - protein, 16 aa, Homo sapiens
  CDR3 for alpha chain variable domain of TCR clone 240256 (TRAV12-2, TRAJ32)
CAVDLGQGGATNKLIF

SEQ ID NO: 480512 - protein, 15 aa, Homo sapiens
  CDR3 for beta chain variable domain of TCR clone 240256 (TRBV20-1, TRBJ2-7)
CSARGPLAGGREQYF

SEQ ID NO: 480513 - protein, 11 aa, Homo sapiens
  CDR3 for alpha chain variable domain of TCR clone 240257 (TRAV17, TRAJ9)
CGFTGGFKTIF

SEQ ID NO: 480514 - protein, 14 aa, Homo sapiens
  CDR3 for beta chain variable domain of TCR clone 240257 (TRBV7-9, TRBJ2-2)
CPSSLVQDTGELFF

SEQ ID NO: 480515 - protein, 13 aa, Homo sapiens
  CDR3 for alpha chain variable domain of TCR clone 240258 (TRAV13-2, TRAJ13)
CAERPGGYQKVTF

SEQ ID NO: 480516 - protein, 15 aa, Homo sapiens
  CDR3 for beta chain variable domain of TCR clone 240258 (TRBV20-1, TRBJ2-7)
CSAESGTSGAYEQYF

SEQ ID NO: 480517 - protein, 16 aa, Homo sapiens
  CDR3 for alpha chain variable domain of TCR clone 240259 (TRAV21, TRAJ53)
CASAPASGGSNYKLTF

SEQ ID NO: 480518 - protein, 15 aa, Homo sapiens
  CDR3 for beta chain variable domain of TCR clone 240259 (TRBV7-9, TRBJ2-1)
CASSPGQGAYNEQFF

SEQ ID NO: 480519 - protein, 13 aa, Homo sapiens
  CDR3 for alpha chain variable domain of TCR clone 240260 (TRAV35, TRAJ57)
CAGSQGGSEKLVF

SEQ ID NO: 480520 - protein, 13 aa, Homo sapiens
  CDR3 for beta chain variable domain of TCR clone 240260 (TRBV4-2, TRBJ2-3)
CASSLTSTDTQYF

SEQ ID NO: 480521 - protein, 11 aa, Homo sapiens
  CDR3 for alpha chain variable domain of TCR clone 240261 (TRAV2, TRAJ13)
CASGGYQKVAF

SEQ ID NO: 480522 - protein, 14 aa, Homo sapiens
  CDR3 for beta chain variable domain of TCR clone 240261 (TRBV7-6, TRBJ2-3)
CASSLGTVTDTQYF

SEQ ID NO: 480523 - protein, 14 aa, Homo sapiens
  CDR3 for alpha chain variable domain of TCR clone 240262 (TRAV8-3, TRAJ9)
CAVVYNTGGFTPIF

SEQ ID NO: 480524 - protein, 14 aa, Homo sapiens
  CDR3 for beta chain variable domain of TCR clone 240262 (TRBV7-3, TRBJ2-2)
FASSSGGYTGELFF

SEQ ID NO: 480525 - protein, 22 aa, Homo sapiens
  CDR3 for alpha chain variable domain of TCR clone 240263 (TRAV21, TRAJ6)
CAVKEEATYLHLEEEPALLFIR

SEQ ID NO: 480526 - protein, 13 aa, Homo sapiens
  CDR3 for beta chain variable domain of TCR clone 240263 (TRBV11-2, TRBJ1-1)
CASSFTENTEAFF

SEQ ID NO: 480527 - protein, 14 aa, Homo sapiens
  CDR3 for alpha chain variable domain of TCR clone 240264 (TRAV26-2, TRAJ38)
CILYNAGNNSKLIW

SEQ ID NO: 480528 - protein, 14 aa, Homo sapiens
  CDR3 for beta chain variable domain of TCR clone 240264 (TRBV19, TRBJ2-1)
CASPTFVLSGEQFF

SEQ ID NO: 480529 - protein, 22 aa, Homo sapiens
  CDR3 for alpha chain variable domain of TCR clone 240265 (TRAV12-1, TRAJ10)
CVWGRYTHGRRKQTHLWDRQSA

SEQ ID NO: 480530 - protein, 16 aa, Homo sapiens
  CDR3 for beta chain variable domain of TCR clone 240265 (TRBV20-1, TRBJ2-1)
CSARSTSESSYNEQFF

SEQ ID NO: 480531 - protein, 15 aa, Homo sapiens
  CDR3 for alpha chain variable domain of TCR clone 240266 (TRAV26-1, TRAJ29)
CIVRVEGSGNTPLVF

SEQ ID NO: 480532 - protein, 15 aa, Homo sapiens
  CDR3 for beta chain variable domain of TCR clone 240266 (TRBV7-9, TRBJ1-5)
CASSQGHHPKQPQHF

SEQ ID NO: 480533 - protein, 20 aa, Homo sapiens
  CDR3 for alpha chain variable domain of TCR clone 240267 (TRAV26-1, TRAJ38)
CIADNAGNNHTQNPDPAVYQ

SEQ ID NO: 480534 - protein, 13 aa, Homo sapiens
  CDR3 for beta chain variable domain of TCR clone 240267 (TRBV20-1, TRBJ1-1)
CSARGGGNTEAFF

SEQ ID NO: 480535 - protein, 14 aa, Homo sapiens
  CDR3 for alpha chain variable domain of TCR clone 240268 (TRAV12-1, TRAJ12)
CVVTRMASSYKLIF

SEQ ID NO: 480536 - protein, 13 aa, Homo sapiens
  CDR3 for beta chain variable domain of TCR clone 240268 (TRBV20-1, TRBJ1-1)
CSARGGGNTETFF

SEQ ID NO: 480537 - protein, 15 aa, Homo sapiens
  CDR3 for alpha chain variable domain of TCR clone 240269 (TRAV1-1, TRAJ20)
CAVRDNVANDYKLSF

SEQ ID NO: 480538 - protein, 14 aa, Homo sapiens
  CDR3 for beta chain variable domain of TCR clone 240269 (TRBV7-2, TRBJ1-1)
CASSLRQGGGTLES

SEQ ID NO: 480539 - protein, 15 aa, Homo sapiens
  CDR3 for alpha chain variable domain of TCR clone 240270 (TRAV27, TRAJ53)
CRAINSGGSNYKLTF

SEQ ID NO: 480540 - protein, 14 aa, Homo sapiens
  CDR3 for beta chain variable domain of TCR clone 240270 (TRBV7-3, TRBJ2-1)
CASSLAGGTKEQFF

SEQ ID NO: 480541 - protein, 16 aa, Homo sapiens
  CDR3 for alpha chain variable domain of TCR clone 240271 (TRAV12-2, TRAJ10)
CAVNRVLTGGGNKLTF

SEQ ID NO: 480542 - protein, 14 aa, Homo sapiens
  CDR3 for beta chain variable domain of TCR clone 240271 (TRBV19, TRBJ2-1)
CASPTFVLSGEQFL

SEQ ID NO: 480543 - protein, 17 aa, Homo sapiens
  CDR3 for alpha chain variable domain of TCR clone 240272 (TRAV17, TRAJ28)
CATDPRRGGAGSYQLTF

SEQ ID NO: 480544 - protein, 10 aa, Homo sapiens
  CDR3 for beta chain variable domain of TCR clone 240272 (TRBV12-4, TRBJ2-2)
CASSLVAGTR

SEQ ID NO: 480545 - protein, 11 aa, Homo sapiens
  CDR3 for alpha chain variable domain of TCR clone 240273 (TRAV1-2, TRAJ31)
CAVNNNARLMF

SEQ ID NO: 480546 - protein, 16 aa, Homo sapiens
  CDR3 for beta chain variable domain of TCR clone 240273 (TRBV12-4, TRBJ1-5)
CASSRPVGGSNQPQHF

SEQ ID NO: 480547 - protein, 13 aa, Homo sapiens
  CDR3 for alpha chain variable domain of TCR clone 240274 (TRAV12-1, TRAJ6)
CVVFPGGSYIPTF

SEQ ID NO: 480548 - protein, 13 aa, Homo sapiens
  CDR3 for beta chain variable domain of TCR clone 240274 (TRBV4-2, TRBJ1-1)
CASSQAGNTGAFF

SEQ ID NO: 480549 - protein, 12 aa, Homo sapiens
  CDR3 for alpha chain variable domain of TCR clone 240275 (TRAV1-1, TRAJ39)
CAVPVVGNMLTF

SEQ ID NO: 480550 - protein, 15 aa, Homo sapiens
  CDR3 for beta chain variable domain of TCR clone 240275 (TRBV19, TRBJ1-6)
CASSIQGAVGSPLHF

SEQ ID NO: 480551 - protein, 19 aa, Homo sapiens
  CDR3 for alpha chain variable domain of TCR clone 240276 (TRAV26-1, TRAJ52)
CIVRAHRNAGGTSYGKLTF

SEQ ID NO: 480552 - protein, 13 aa, Homo sapiens
  CDR3 for beta chain variable domain of TCR clone 240276 (TRBV20-1, TRBJ1-6)
CSAPLGVGSPLLF

SEQ ID NO: 480553 - protein, 12 aa, Homo sapiens
  CDR3 for alpha chain variable domain of TCR clone 240277 (TRAV3, TRAJ27)
CAVRDKAGKSTF

SEQ ID NO: 480554 - protein, 16 aa, Homo sapiens
  CDR3 for beta chain variable domain of TCR clone 240277 (TRBV4-1, TRBJ2-3)
CASSQSTSGAEDTQYF

SEQ ID NO: 480555 - protein, 14 aa, Homo sapiens
  CDR3 for alpha chain variable domain of TCR clone 240278 (TRAV12-2, TRAJ13)
CAVKKTGGYQIVTF

SEQ ID NO: 480556 - protein, 13 aa, Homo sapiens
  CDR3 for beta chain variable domain of TCR clone 240278 (TRBV2, TRBJ2-7)
CASSVGGSGEQYF

SEQ ID NO: 480557 - protein, 15 aa, Homo sapiens
  CDR3 for alpha chain variable domain of TCR clone 240279 (TRAV14/DV4, TRAJ26)
CAMREGQNYGQNFVF

SEQ ID NO: 480558 - protein, 16 aa, Homo sapiens
  CDR3 for beta chain variable domain of TCR clone 240279 (TRBV11-2, TRBJ1-1)
CASSLRQGGEHSKAFF

SEQ ID NO: 480559 - protein, 12 aa, Homo sapiens
  CDR3 for alpha chain variable domain of TCR clone 240280 (TRAV13-2, TRAJ58)
CAERRLGSRLTF

SEQ ID NO: 480560 - protein, 15 aa, Homo sapiens
  CDR3 for beta chain variable domain of TCR clone 240280 (TRBV5-1, TRBJ2-5)
CASSSGREMVETQYL

SEQ ID NO: 480561 - protein, 13 aa, Homo sapiens
  CDR3 for alpha chain variable domain of TCR clone 240281 (TRAV2, TRAJ40)
CAVVTSGTYKYIF

SEQ ID NO: 480562 - protein, 14 aa, Homo sapiens
  CDR3 for beta chain variable domain of TCR clone 240281 (TRBV27, TRBJ2-1)
CASSATGGYNEQFF

SEQ ID NO: 480563 - protein, 13 aa, Homo sapiens
  CDR3 for alpha chain variable domain of TCR clone 240282 (TRAV12-1, TRAJ26)
CVVSRNYGQNFVF

SEQ ID NO: 480564 - protein, 14 aa, Homo sapiens
  CDR3 for beta chain variable domain of TCR clone 240282 (TRBV4-2, TRBJ2-1)
CASGLDRAYNEQFF

SEQ ID NO: 480565 - protein, 14 aa, Homo sapiens
  CDR3 for alpha chain variable domain of TCR clone 240283 (TRAV1-2, TRAJ16)
CAVNRFSDGQKLLF

SEQ ID NO: 480566 - protein, 13 aa, Homo sapiens
  CDR3 for beta chain variable domain of TCR clone 240283 (TRBV20-1, TRBJ1-6)
CSAPTGLGSALHF

SEQ ID NO: 480567 - protein, 13 aa, Homo sapiens
  CDR3 for alpha chain variable domain of TCR clone 240284 (TRAV12-2, TRAJ4)
CAGFSGGYNKLIF

SEQ ID NO: 480568 - protein, 12 aa, Homo sapiens
  CDR3 for beta chain variable domain of TCR clone 240284 (TRBV11-2, TRBJ2-2)
CASSLPTGELFF

SEQ ID NO: 480569 - protein, 15 aa, Homo sapiens
  CDR3 for alpha chain variable domain of TCR clone 240285 (TRAV8-3, TRAJ45)
CASSYSGGGADGLTF

SEQ ID NO: 480570 - protein, 17 aa, Homo sapiens
  CDR3 for beta chain variable domain of TCR clone 240285 (TRBV7-8, TRBJ1-2)
GASSLRPLQGHLYGYTF

SEQ ID NO: 480571 - protein, 13 aa, Homo sapiens
  CDR3 for alpha chain variable domain of TCR clone 240286 (TRAV3, TRAJ28)
CACSGAGSYQLTF

SEQ ID NO: 480572 - protein, 17 aa, Homo sapiens
  CDR3 for beta chain variable domain of TCR clone 240286 (TRBV20-1, TRBJ2-1)
CSASSSGLAGSYNEQFF

SEQ ID NO: 480573 - protein, 13 aa, Homo sapiens
  CDR3 for alpha chain variable domain of TCR clone 240287 (TRAV8-6, TRAJ13)
CAVSSVGYQKVTF

SEQ ID NO: 480574 - protein, 15 aa, Homo sapiens
  CDR3 for beta chain variable domain of TCR clone 240287 (TRBV7-9, TRBJ2-7)
CASSLPMGQANEQYF

SEQ ID NO: 480575 - protein, 15 aa, Homo sapiens
  CDR3 for alpha chain variable domain of TCR clone 240288 (TRAV13-1, TRAJ45)
CADSGSGGGADGLTF

SEQ ID NO: 480576 - protein, 14 aa, Homo sapiens
  CDR3 for beta chain variable domain of TCR clone 240288 (TRBV12-4, TRBJ1-2)
CASSFVGTAYGYTF

SEQ ID NO: 480577 - protein, 15 aa, Homo sapiens
  CDR3 for alpha chain variable domain of TCR clone 240289 (TRAV12-2, TRAJ53)
CAVNGGGGSNYKLTF

SEQ ID NO: 480578 - protein, 15 aa, Homo sapiens
  CDR3 for beta chain variable domain of TCR clone 240289 (TRBV12-4, TRBJ2-5)
CASSPPAGLQETQYF

SEQ ID NO: 480579 - protein, 15 aa, Homo sapiens
  CDR3 for alpha chain variable domain of TCR clone 240290 (TRAV26-1, TRAJ29)
CIVRVEGSGNTPLVF

SEQ ID NO: 480580 - protein, 14 aa, Homo sapiens
  CDR3 for beta chain variable domain of TCR clone 240290 (TRBV7-9, TRBJ1-5)
CASQGHQPNQPQHF

SEQ ID NO: 480581 - protein, 10 aa, Homo sapiens
  CDR3 for alpha chain variable domain of TCR clone 240291 (TRAV13-1, TRAJ8)
CTAPFQKLVC

SEQ ID NO: 480582 - protein, 20 aa, Homo sapiens
  CDR3 for beta chain variable domain of TCR clone 240291 (TRBV3-1, TRBJ2-6)
CASSPRPGLEGGAGANDLTF

SEQ ID NO: 480583 - protein, 12 aa, Homo sapiens
  CDR3 for alpha chain variable domain of TCR clone 240292 (TRAV21, TRAJ42)
CAVGGSQGDLIF

SEQ ID NO: 480584 - protein, 14 aa, Homo sapiens
  CDR3 for beta chain variable domain of TCR clone 240292 (TRBV12-4, TRBJ1-1)
CASSLGTGGTEAFF

SEQ ID NO: 480585 - protein, 13 aa, Homo sapiens
  CDR3 for alpha chain variable domain of TCR clone 240293 (TRAV27, TRAJ41)
CAGEGNSGYALNF

SEQ ID NO: 480586 - protein, 15 aa, Homo sapiens
  CDR3 for beta chain variable domain of TCR clone 240293 (TRBV6-3, TRBJ2-7)
CASSSPRTVFYEQYF

SEQ ID NO: 480587 - protein, 14 aa, Homo sapiens
  CDR3 for alpha chain variable domain of TCR clone 240294 (TRAV2, TRAJ22)
CAVGRGGSARQLPF

SEQ ID NO: 480588 - protein, 12 aa, Homo sapiens
  CDR3 for beta chain variable domain of TCR clone 240294 (TRBV19, TRBJ2-1)
CASSMQDTEQFF

SEQ ID NO: 480589 - protein, 13 aa, Homo sapiens
  CDR3 for alpha chain variable domain of TCR clone 240295 (TRAV13-2, TRAJ40)
CAEFTSGTYIYIF

SEQ ID NO: 480590 - protein, 14 aa, Homo sapiens
  CDR3 for beta chain variable domain of TCR clone 240295 (TRBV10-2, TRBJ1-5)
CASSSTGRNQPQHF

SEQ ID NO: 480591 - protein, 13 aa, Homo sapiens
  CDR3 for alpha chain variable domain of TCR clone 240296 (TRAV17, TRAJ9)
CATDYTGGCKTIF

SEQ ID NO: 480592 - protein, 14 aa, Homo sapiens
  CDR3 for beta chain variable domain of TCR clone 240296 (TRBV7-6, TRBJ2-3)
CASSLGTVTDTQYF

SEQ ID NO: 480593 - protein, 16 aa, Homo sapiens
  CDR3 for alpha chain variable domain of TCR clone 240297 (TRAV22, TRAJ45)
CAVERGKGGGADRLTF

SEQ ID NO: 480594 - protein, 13 aa, Homo sapiens
  CDR3 for beta chain variable domain of TCR clone 240297 (TRBV27, TRBJ1-1)
CASSLSIGAEAFF

SEQ ID NO: 480595 - protein, 14 aa, Homo sapiens
  CDR3 for alpha chain variable domain of TCR clone 240298 (TRAV12-2, TRAJ44)
CAVNPAGTASKLAF

SEQ ID NO: 480596 - protein, 13 aa, Homo sapiens
  CDR3 for beta chain variable domain of TCR clone 240298 (TRBV20-1, TRBJ1-6)
CSAPLGVGSPLHF

SEQ ID NO: 480597 - protein, 13 aa, Homo sapiens
  CDR3 for alpha chain variable domain of TCR clone 240299 (TRAV23/DV6, TRAJ47)
CAASIRNGIWKQT

SEQ ID NO: 480598 - protein, 13 aa, Homo sapiens
  CDR3 for beta chain variable domain of TCR clone 240299 (TRBV19, TRBJ1-2)
CASSQGQIYGYTF

SEQ ID NO: 480599 - protein, 11 aa, Homo sapiens
  CDR3 for alpha chain variable domain of TCR clone 240300 (TRAV29/DV5, TRAJ49)
CAAFTGNQFYF

SEQ ID NO: 480600 - protein, 14 aa, Homo sapiens
  CDR3 for beta chain variable domain of TCR clone 240300 (TRBV20-1, TRBJ1-3)
CSASPTGAGNTIYF

SEQ ID NO: 480601 - protein, 21 aa, Homo sapiens
  CDR3 for alpha chain variable domain of TCR clone 240301 (TRAV1-1, TRAJ6)
CLLLLRCERLERTGGSYIPTF

SEQ ID NO: 480602 - protein, 16 aa, Homo sapiens
  CDR3 for beta chain variable domain of TCR clone 240301 (TRBV20-1, TRBJ1-4)
CSAPGQGLLTNEKLFF

SEQ ID NO: 480603 - protein, 15 aa, Homo sapiens
  CDR3 for alpha chain variable domain of TCR clone 240302 (TRAV25, TRAJ53)
CPTSNSGGINYKLTF

SEQ ID NO: 480604 - protein, 14 aa, Homo sapiens
  CDR3 for beta chain variable domain of TCR clone 240302 (TRBV11-2, TRBJ2-3)
CASSRLARTDTQYF

SEQ ID NO: 480605 - protein, 15 aa, Homo sapiens
  CDR3 for alpha chain variable domain of TCR clone 240303 (TRAV8-3, TRAJ6)
CAVGPLGGGSYIPNF

SEQ ID NO: 480606 - protein, 14 aa, Homo sapiens
  CDR3 for beta chain variable domain of TCR clone 240303 (TRBV19, TRBJ2-2)
CASSTGQGAGELFF

SEQ ID NO: 480607 - protein, 14 aa, Homo sapiens
  CDR3 for alpha chain variable domain of TCR clone 240304 (TRAV12-3, TRAJ9)
CAMSVETGGFKTIF

SEQ ID NO: 480608 - protein, 15 aa, Homo sapiens
  CDR3 for beta chain variable domain of TCR clone 240304 (TRBV7-2, TRBJ2-1)
CASTHGTGIYNEQFF

SEQ ID NO: 480609 - protein, 11 aa, Homo sapiens
  CDR3 for alpha chain variable domain of TCR clone 240305 (TRAV13-2, TRAJ54)
RAVQGAQKLVF

SEQ ID NO: 480610 - protein, 15 aa, Homo sapiens
  CDR3 for beta chain variable domain of TCR clone 240305 (TRBV11-2, TRBJ1-1)
CASSSRSSLLLSLDK

SEQ ID NO: 480611 - protein, 14 aa, Homo sapiens
  CDR3 for alpha chain variable domain of TCR clone 240306 (TRAV13-1, TRAJ44)
CAAKATGTASKLTF

SEQ ID NO: 480612 - protein, 14 aa, Homo sapiens
  CDR3 for beta chain variable domain of TCR clone 240306 (TRBV19, TRBJ2-2)
CATSTLHRSGELFF

SEQ ID NO: 480613 - protein, 14 aa, Homo sapiens
  CDR3 for alpha chain variable domain of TCR clone 240307 (TRAV20, TRAJ10)
CAVRVEGRGNKLTF

SEQ ID NO: 480614 - protein, 13 aa, Homo sapiens
  CDR3 for beta chain variable domain of TCR clone 240307 (TRBV13, TRBJ2-2)
CASSPGLTGELFF

SEQ ID NO: 480615 - protein, 11 aa, Homo sapiens
  CDR3 for alpha chain variable domain of TCR clone 240308 (TRAV13-1, TRAJ6)
CATLGSYIPTF

SEQ ID NO: 480616 - protein, 13 aa, Homo sapiens
  CDR3 for beta chain variable domain of TCR clone 240308 (TRBV6-6, TRBJ2-1)
CASSLHQVDEQFF

SEQ ID NO: 480617 - protein, 13 aa, Homo sapiens
  CDR3 for alpha chain variable domain of TCR clone 240309 (TRAV8-2, TRAJ29)
CALPGAGNTPLVF

SEQ ID NO: 480618 - protein, 16 aa, Homo sapiens
  CDR3 for beta chain variable domain of TCR clone 240309 (TRBV5-1, TRBJ2-5)
CASSSSGLGGEETQYF

SEQ ID NO: 480619 - protein, 12 aa, Homo sapiens
  CDR3 for alpha chain variable domain of TCR clone 240310 (TRAV21, TRAJ13)
PCPSGGYQKVTF

SEQ ID NO: 480620 - protein, 13 aa, Homo sapiens
  CDR3 for beta chain variable domain of TCR clone 240310 (TRBV7-9, TRBJ1-2)
CASSLKQNYGYTF

SEQ ID NO: 480621 - protein, 14 aa, Homo sapiens
  CDR3 for alpha chain variable domain of TCR clone 240311 (TRAV13-2, TRAJ52)
CAETGGTSYGKLTF

SEQ ID NO: 480622 - protein, 14 aa, Homo sapiens
  CDR3 for beta chain variable domain of TCR clone 240311 (TRBV10-3, TRBJ2-1)
CAISSDLAYNEQFF

SEQ ID NO: 480623 - protein, 14 aa, Homo sapiens
  CDR3 for alpha chain variable domain of TCR clone 240312 (TRAV1-2, TRAJ8)
CAVREYTGFQKLVF

SEQ ID NO: 480624 - protein, 12 aa, Homo sapiens
  CDR3 for beta chain variable domain of TCR clone 240312 (TRBV11-2, TRBJ2-2)
CASSLGGGELFF

SEQ ID NO: 480625 - protein, 16 aa, Homo sapiens
  CDR3 for alpha chain variable domain of TCR clone 240313 (TRAV3, TRAJ37)
CAVRGKGSGNTGKLIF

SEQ ID NO: 480626 - protein, 11 aa, Homo sapiens
  CDR3 for beta chain variable domain of TCR clone 240313 (TRBV11-2, TRBJ2-2)
CASSLPRELFF

SEQ ID NO: 480627 - protein, 13 aa, Homo sapiens
  CDR3 for alpha chain variable domain of TCR clone 240314 (TRAV34, TRAJ22)
CGAGAGSARQLTF

SEQ ID NO: 480628 - protein, 16 aa, Homo sapiens
  CDR3 for beta chain variable domain of TCR clone 240314 (TRBV7-3, TRBJ2-1)
CASSKPLAGGCNEQFF

SEQ ID NO: 480629 - protein, 15 aa, Homo sapiens
  CDR3 for alpha chain variable domain of TCR clone 240315 (TRAV2, TRAJ39)
CAVEDRRNAGNMLTF

SEQ ID NO: 480630 - protein, 16 aa, Homo sapiens
  CDR3 for beta chain variable domain of TCR clone 240315 (TRBV7-8, TRBJ2-7)
CASSVASGTSVYEQYF

SEQ ID NO: 480631 - protein, 12 aa, Homo sapiens
  CDR3 for alpha chain variable domain of TCR clone 240316 (TRAV12-3, TRAJ10)
CAPAGGGNKLTF

SEQ ID NO: 480632 - protein, 13 aa, Homo sapiens
  CDR3 for beta chain variable domain of TCR clone 240316 (TRBV12-4, TRBJ2-7)
CAGSPTETHEQYF

SEQ ID NO: 480633 - protein, 22 aa, Homo sapiens
  CDR3 for alpha chain variable domain of TCR clone 240317 (TRAV21, )
CAVRQDAGNNHIQNPDPAVYQL

SEQ ID NO: 480634 - protein, 16 aa, Homo sapiens
  CDR3 for beta chain variable domain of TCR clone 240317 (TRBV7-9, TRBJ1-2)
CASSLGFSSGEDGYTF

SEQ ID NO: 480635 - protein, 13 aa, Homo sapiens
  CDR3 for alpha chain variable domain of TCR clone 240318 (TRAV21, TRAJ27)
CAARPGNAGKSTF

SEQ ID NO: 480636 - protein, 14 aa, Homo sapiens
  CDR3 for beta chain variable domain of TCR clone 240318 (TRBV11-2, TRBJ2-7)
CASSLGAGAYEQFF

SEQ ID NO: 480637 - protein, 13 aa, Homo sapiens
  CDR3 for alpha chain variable domain of TCR clone 240319 (TRAV25, TRAJ54)
CAGTIQGAQKRVF

SEQ ID NO: 480638 - protein, 15 aa, Homo sapiens
  CDR3 for beta chain variable domain of TCR clone 240319 (TRBV19, TRBJ1-5)
CASSILTGENQPQHF

SEQ ID NO: 480639 - protein, 13 aa, Homo sapiens
  CDR3 for alpha chain variable domain of TCR clone 240320 (TRAV2, TRAJ20)
CAVEDPSEYKLRF

SEQ ID NO: 480640 - protein, 16 aa, Homo sapiens
  CDR3 for beta chain variable domain of TCR clone 240320 (TRBV25-1, TRBJ2-7)
CASSELTGGGIYEQYF

SEQ ID NO: 480641 - protein, 15 aa, Homo sapiens
  CDR3 for alpha chain variable domain of TCR clone 240321 (TRAV26-1, TRAJ40)
CIDRYATSGTYKYIC

SEQ ID NO: 480642 - protein, 11 aa, Homo sapiens
  CDR3 for beta chain variable domain of TCR clone 240321 (TRBV7-9, TRBJ2-1)
CASSSQNEQFF

SEQ ID NO: 480643 - protein, 13 aa, Homo sapiens
  CDR3 for alpha chain variable domain of TCR clone 240322 (TRAV3, TRAJ21)
CAVREPDFNKFYF

SEQ ID NO: 480644 - protein, 13 aa, Homo sapiens
  CDR3 for beta chain variable domain of TCR clone 240322 (TRBV19, TRBJ1-5)
CASSIGGNQPQHF

SEQ ID NO: 480645 - protein, 13 aa, Homo sapiens
  CDR3 for alpha chain variable domain of TCR clone 240323 (TRAV8-6, TRAJ54)
CAVSDQGAQKLVF

SEQ ID NO: 480646 - protein, 17 aa, Homo sapiens
  CDR3 for beta chain variable domain of TCR clone 240323 (TRBV19, TRBJ1-1)
CASSIAGRGLMTTEAFF

SEQ ID NO: 480647 - protein, 14 aa, Homo sapiens
  CDR3 for alpha chain variable domain of TCR clone 240324 (TRAV26-1, TRAJ45)
CIVSEGGGADGLTF

SEQ ID NO: 480648 - protein, 14 aa, Homo sapiens
  CDR3 for beta chain variable domain of TCR clone 240324 (TRBV2, TRBJ1-2)
CASNEGTGPYGYTF

SEQ ID NO: 480649 - protein, 16 aa, Homo sapiens
  CDR3 for alpha chain variable domain of TCR clone 240325 (TRAV3, TRAJ37)
CAVRGKGSGNTGKLIF

SEQ ID NO: 480650 - protein, 15 aa, Homo sapiens
  CDR3 for beta chain variable domain of TCR clone 240325 (TRBV4-1, TRBJ2-1)
CASSQDAGGLYEQFF

SEQ ID NO: 480651 - protein, 15 aa, Homo sapiens
  CDR3 for alpha chain variable domain of TCR clone 240326 (TRAV25, TRAJ10)
CAGPLLTGGGNKLTF

SEQ ID NO: 480652 - protein, 15 aa, Homo sapiens
  CDR3 for beta chain variable domain of TCR clone 240326 (TRBV12-5, TRBJ2-2)
CASGRIGGNTGELFF

SEQ ID NO: 480653 - protein, 14 aa, Homo sapiens
  CDR3 for alpha chain variable domain of TCR clone 240327 (TRAV12-1, TRAJ42)
CVVIAGGSQGNLIF

SEQ ID NO: 480654 - protein, 13 aa, Homo sapiens
  CDR3 for beta chain variable domain of TCR clone 240327 (TRBV18, TRBJ2-5)
CASSPPGKETQYF

SEQ ID NO: 480655 - protein, 13 aa, Homo sapiens
  CDR3 for alpha chain variable domain of TCR clone 240328 (TRAV21, TRAJ37)
CAVSSGNTGKLIF

SEQ ID NO: 480656 - protein, 15 aa, Homo sapiens
  CDR3 for beta chain variable domain of TCR clone 240328 (TRBV12-4, TRBJ1-2)
CASSFVDRGNYGYAF

SEQ ID NO: 480657 - protein, 14 aa, Homo sapiens
  CDR3 for alpha chain variable domain of TCR clone 240329 (TRAV12-2, TRAJ52)
CAVPGGTSYGKLTF

SEQ ID NO: 480658 - protein, 12 aa, Homo sapiens
  CDR3 for beta chain variable domain of TCR clone 240329 (TRBV18, TRBJ2-1)
CASSPGTSEAFF

SEQ ID NO: 480659 - protein, 14 aa, Homo sapiens
  CDR3 for alpha chain variable domain of TCR clone 240330 (TRAV16, TRAJ15)
CALSGPQAGTALIF

SEQ ID NO: 480660 - protein, 11 aa, Homo sapiens
  CDR3 for beta chain variable domain of TCR clone 240330 (TRBV18, TRBJ2-5)
CQLTFKRDQYF

SEQ ID NO: 480661 - protein, 16 aa, Homo sapiens
  CDR3 for alpha chain variable domain of TCR clone 240331 (TRAV38-1, TRAJ56)
CAFMKRQTGANSKLTF

SEQ ID NO: 480662 - protein, 14 aa, Homo sapiens
  CDR3 for beta chain variable domain of TCR clone 240331 (TRBV5-1, TRBJ2-4)
CASSPQGGQNSQYF

SEQ ID NO: 480663 - protein, 11 aa, Homo sapiens
  CDR3 for alpha chain variable domain of TCR clone 240332 (TRAV16, TRAJ34)
CALYNTDKLIF

SEQ ID NO: 480664 - protein, 13 aa, Homo sapiens
  CDR3 for beta chain variable domain of TCR clone 240332 (TRBV25-1, TRBJ1-1)
CASSVQVRAEAFF

SEQ ID NO: 480665 - protein, 12 aa, Homo sapiens
  CDR3 for alpha chain variable domain of TCR clone 240333 (TRAV12-3, TRAJ17)
CAMTLTGNKLTF

SEQ ID NO: 480666 - protein, 14 aa, Homo sapiens
  CDR3 for beta chain variable domain of TCR clone 240333 (TRBV5-4, TRBJ2-5)
CASGFSGGQETQYF

SEQ ID NO: 480667 - protein, 12 aa, Homo sapiens
  CDR3 for alpha chain variable domain of TCR clone 240334 (TRAV12-2, TRAJ8)
CAVNTGFQKLVF

SEQ ID NO: 480668 - protein, 16 aa, Homo sapiens
  CDR3 for beta chain variable domain of TCR clone 240334 (TRBV12-4, TRBJ1-5)
CASSRPVGGSNQPQHF

SEQ ID NO: 480669 - protein, 11 aa, Homo sapiens
  CDR3 for alpha chain variable domain of TCR clone 240335 (TRAV2, TRAJ33)
CAVESNYQLIW

SEQ ID NO: 480670 - protein, 14 aa, Homo sapiens
  CDR3 for beta chain variable domain of TCR clone 240335 (TRBV4-2, TRBJ2-1)
CASGLDRAYNEQFF

SEQ ID NO: 480671 - protein, 11 aa, Homo sapiens
  CDR3 for alpha chain variable domain of TCR clone 240336 (TRAV2, TRAJ13)
CTSGGYQKVTF

SEQ ID NO: 480672 - protein, 15 aa, Homo sapiens
  CDR3 for beta chain variable domain of TCR clone 240336 (TRBV7-9, TRBJ1-6)
CASSSPGRGNSPLHF

SEQ ID NO: 480673 - protein, 16 aa, Homo sapiens
  CDR3 for alpha chain variable domain of TCR clone 240337 (TRAV30, TRAJ24)
CGTEIVDADSWGKFQF

SEQ ID NO: 480674 - protein, 14 aa, Homo sapiens
  CDR3 for beta chain variable domain of TCR clone 240337 (TRBV7-2, TRBJ1-2)
CASSQTGSTYGETF

SEQ ID NO: 480675 - protein, 13 aa, Homo sapiens
  CDR3 for alpha chain variable domain of TCR clone 240338 (TRAV36/DV7, TRAJ37)
CAVFSSNTGKLIF

SEQ ID NO: 480676 - protein, 15 aa, Homo sapiens
  CDR3 for beta chain variable domain of TCR clone 240338 (TRBV12-4, TRBJ2-5)
CQQFSVRGRQETQYF

SEQ ID NO: 480677 - protein, 14 aa, Homo sapiens
  CDR3 for alpha chain variable domain of TCR clone 240339 (TRAV12-2, TRAJ11)
CAVRKNSGYSTLTV

SEQ ID NO: 480678 - protein, 14 aa, Homo sapiens
  CDR3 for beta chain variable domain of TCR clone 240339 (TRBV7-2, TRBJ2-5)
CASWQERFRETQYF

SEQ ID NO: 480679 - protein, 14 aa, Homo sapiens
  CDR3 for alpha chain variable domain of TCR clone 240340 (TRAV12-3, TRAJ42)
CAMNYGGSQGNLIF

SEQ ID NO: 480680 - protein, 14 aa, Homo sapiens
  CDR3 for beta chain variable domain of TCR clone 240340 (TRBV7-2, TRBJ2-5)
CASSFTQGQEAQYF

SEQ ID NO: 480681 - protein, 15 aa, Homo sapiens
  CDR3 for alpha chain variable domain of TCR clone 240341 (TRAV13-1, TRAJ32)
CAASIYGGATNKLIF

SEQ ID NO: 480682 - protein, 14 aa, Homo sapiens
  CDR3 for beta chain variable domain of TCR clone 240341 (TRBV7-9, TRBJ2-1)
CASSLAGGSNEQFF

SEQ ID NO: 480683 - protein, 11 aa, Homo sapiens
  CDR3 for alpha chain variable domain of TCR clone 240342 (TRAV2, TRAJ13)
CASGGYQKATF

SEQ ID NO: 480684 - protein, 14 aa, Homo sapiens
  CDR3 for beta chain variable domain of TCR clone 240342 (TRBV6-3, TRBJ1-1)
CASSNLLPGAEAFF

SEQ ID NO: 480685 - protein, 14 aa, Homo sapiens
  CDR3 for alpha chain variable domain of TCR clone 240343 (TRAV9-2, TRAJ39)
CALYIYNAVNMLTF

SEQ ID NO: 480686 - protein, 15 aa, Homo sapiens
  CDR3 for beta chain variable domain of TCR clone 240343 (TRBV2, TRBJ2-7)
CASSEGLARSYEQYF

SEQ ID NO: 480687 - protein, 13 aa, Homo sapiens
  CDR3 for alpha chain variable domain of TCR clone 240344 (TRAV12-3, TRAJ4)
CSEQAGGYNKLIF

SEQ ID NO: 480688 - protein, 15 aa, Homo sapiens
  CDR3 for beta chain variable domain of TCR clone 240344 (TRBV5-1, TRBJ1-1)
CASSLSDLGGTEAFF

SEQ ID NO: 480689 - protein, 14 aa, Homo sapiens
  CDR3 for alpha chain variable domain of TCR clone 240345 (TRAV1-2, TRAJ16)
CAVNRSSDGQKLLF

SEQ ID NO: 480690 - protein, 15 aa, Homo sapiens
  CDR3 for beta chain variable domain of TCR clone 240345 (TRBV6-1, TRBJ1-1)
CASSVLGQLNTEAFF

SEQ ID NO: 480691 - protein, 13 aa, Homo sapiens
  CDR3 for alpha chain variable domain of TCR clone 240346 (TRAV39, TRAJ58)
CAGEETSASRLTF

SEQ ID NO: 480692 - protein, 13 aa, Homo sapiens
  CDR3 for beta chain variable domain of TCR clone 240346 (TRBV14, TRBJ1-1)
CASSREFGTEAFF

SEQ ID NO: 480693 - protein, 12 aa, Homo sapiens
  CDR3 for alpha chain variable domain of TCR clone 240347 (TRAV26-2, TRAJ21)
CILKGNLNKFYF

SEQ ID NO: 480694 - protein, 14 aa, Homo sapiens
  CDR3 for beta chain variable domain of TCR clone 240347 (TRBV12-4, TRBJ1-1)
CASSLGTGGTEAFF

SEQ ID NO: 480695 - protein, 13 aa, Homo sapiens
  CDR3 for alpha chain variable domain of TCR clone 240348 (TRAV12-1, TRAJ47)
CVVNMEYGNKLVF

SEQ ID NO: 480696 - protein, 16 aa, Homo sapiens
  CDR3 for beta chain variable domain of TCR clone 240348 (TRBV7-3, TRBJ2-1)
CASSLVSGSSNNEQFF

SEQ ID NO: 480697 - protein, 16 aa, Homo sapiens
  CDR3 for alpha chain variable domain of TCR clone 240349 (TRAV3, TRAJ37)
CAVRGKVSGNTGKLIF

SEQ ID NO: 480698 - protein, 13 aa, Homo sapiens
  CDR3 for beta chain variable domain of TCR clone 240349 (TRBV14, TRBJ2-7)
CASSQDRRYGQYF

SEQ ID NO: 480699 - protein, 13 aa, Homo sapiens
  CDR3 for alpha chain variable domain of TCR clone 240350 (TRAV20, TRAJ37)
CAGCSSNTGKLIF

SEQ ID NO: 480700 - protein, 11 aa, Homo sapiens
  CDR3 for beta chain variable domain of TCR clone 240350 (TRBV12-4, TRBJ2-3)
WASAATDTQYF

SEQ ID NO: 480701 - protein, 12 aa, Homo sapiens
  CDR3 for alpha chain variable domain of TCR clone 240351 (TRAV13-1, TRAJ53)
CAAGGSNYKLTF

SEQ ID NO: 480702 - protein, 11 aa, Homo sapiens
  CDR3 for beta chain variable domain of TCR clone 240351 (TRBV2, TRBJ1-1)
CASRVGTEAFF

SEQ ID NO: 480703 - protein, 13 aa, Homo sapiens
  CDR3 for alpha chain variable domain of TCR clone 240352 (TRAV17, TRAJ29)
CATDAFRKHTSCL

SEQ ID NO: 480704 - protein, 13 aa, Homo sapiens
  CDR3 for beta chain variable domain of TCR clone 240352 (TRBV5-7, TRBJ2-6)
YASTSSGANVLTF

SEQ ID NO: 480705 - protein, 13 aa, Homo sapiens
  CDR3 for alpha chain variable domain of TCR clone 240353 (TRAV1-1, TRAJ9)
CAAKNTGGVKTIL

SEQ ID NO: 480706 - protein, 14 aa, Homo sapiens
  CDR3 for beta chain variable domain of TCR clone 240353 (TRBV20-1, TRBJ2-1)
CSAQIGGSANEQFF

SEQ ID NO: 480707 - protein, 15 aa, Homo sapiens
  CDR3 for alpha chain variable domain of TCR clone 240354 (TRAV26-1, TRAJ29)
CIVRVEGSGNTPLVF

SEQ ID NO: 480708 - protein, 13 aa, Homo sapiens
  CDR3 for beta chain variable domain of TCR clone 240354 (TRBV28, TRBJ1-1)
CVSSKQGWTEAFF

SEQ ID NO: 480709 - protein, 11 aa, Homo sapiens
  CDR3 for alpha chain variable domain of TCR clone 240355 (TRAV13-1, TRAJ39)
CASHAGNMLTF

SEQ ID NO: 480710 - protein, 13 aa, Homo sapiens
  CDR3 for beta chain variable domain of TCR clone 240355 (TRBV7-9, TRBJ2-3)
CASSPGSTDTQYF

SEQ ID NO: 480711 - protein, 16 aa, Homo sapiens
  CDR3 for alpha chain variable domain of TCR clone 240356 (TRAV3, TRAJ4)
CAVIPSPSGGYNKLIF

SEQ ID NO: 480712 - protein, 12 aa, Homo sapiens
  CDR3 for beta chain variable domain of TCR clone 240356 (TRBV7-9, TRBJ2-7)
CASSQGVYEQYF

SEQ ID NO: 480713 - protein, 13 aa, Homo sapiens
  CDR3 for alpha chain variable domain of TCR clone 240357 (TRAV16, TRAJ22)
SAMLAGSARQLTF

SEQ ID NO: 480714 - protein, 18 aa, Homo sapiens
  CDR3 for beta chain variable domain of TCR clone 240357 (TRBV7-2, TRBJ2-3)
CASSVDTSRGRKADTQYF

SEQ ID NO: 480715 - protein, 15 aa, Homo sapiens
  CDR3 for alpha chain variable domain of TCR clone 240358 (TRAV25, TRAJ52)
CAGRPGGTSYGKLTF

SEQ ID NO: 480716 - protein, 16 aa, Homo sapiens
  CDR3 for beta chain variable domain of TCR clone 240358 (TRBV7-6, TRBJ2-3)
CASSPLAGGSTDTQYF

SEQ ID NO: 480717 - protein, 12 aa, Homo sapiens
  CDR3 for alpha chain variable domain of TCR clone 240359 (TRAV16, TRAJ26)
CALRSYGQNFVF

SEQ ID NO: 480718 - protein, 16 aa, Homo sapiens
  CDR3 for beta chain variable domain of TCR clone 240359 (TRBV19, TRBJ2-2)
CASRSPGTGATGELFF

SEQ ID NO: 480719 - protein, 18 aa, Homo sapiens
  CDR3 for alpha chain variable domain of TCR clone 240360 (TRAV29/DV5, TRAJ53)
CSILLCSKRGGSNYKLTF

SEQ ID NO: 480720 - protein, 17 aa, Homo sapiens
  CDR3 for beta chain variable domain of TCR clone 240360 (TRBV7-8, TRBJ2-6)
CASSAGTGGAGANVLTF

SEQ ID NO: 480721 - protein, 13 aa, Homo sapiens
  CDR3 for alpha chain variable domain of TCR clone 240361 (TRAV26-1, TRAJ41)
RIVRINSGYALNF

SEQ ID NO: 480722 - protein, 13 aa, Homo sapiens
  CDR3 for beta chain variable domain of TCR clone 240361 (TRBV20-1, TRBJ1-5)
CSATAAGGQPQHF

SEQ ID NO: 480723 - protein, 13 aa, Homo sapiens
  CDR3 for alpha chain variable domain of TCR clone 240362 (TRAV3, TRAJ27)
CAVRPPGAGKSSF

SEQ ID NO: 480724 - protein, 13 aa, Homo sapiens
  CDR3 for beta chain variable domain of TCR clone 240362 (TRBV7-9, TRBJ2-3)
CASSPGSTDTQYF

SEQ ID NO: 480725 - protein, 13 aa, Homo sapiens
  CDR3 for alpha chain variable domain of TCR clone 240363 (TRAV8-6, TRAJ54)
CAVIAQGAQKLVF

SEQ ID NO: 480726 - protein, 13 aa, Homo sapiens
  CDR3 for beta chain variable domain of TCR clone 240363 (TRBV10-3, TRBJ2-7)
CASKLAVNYEQYF

SEQ ID NO: 480727 - protein, 14 aa, Homo sapiens
  CDR3 for alpha chain variable domain of TCR clone 240364 (TRAV13-1, TRAJ44)
CAAKATGTASKLTF

SEQ ID NO: 480728 - protein, 17 aa, Homo sapiens
  CDR3 for beta chain variable domain of TCR clone 240364 (TRBV7-3, TRBJ2-3)
RASSLMKRMRGADTEYF

SEQ ID NO: 480729 - protein, 13 aa, Homo sapiens
  CDR3 for alpha chain variable domain of TCR clone 240365 (TRAV23/DV6, TRAJ21)
CAASIGNFNKFYF

SEQ ID NO: 480730 - protein, 16 aa, Homo sapiens
  CDR3 for beta chain variable domain of TCR clone 240365 (TRBV19, TRBJ1-5)
CASSIDRGGPRQPQHF

SEQ ID NO: 480731 - protein, 13 aa, Homo sapiens
  CDR3 for alpha chain variable domain of TCR clone 240366 (TRAV12-1, TRAJ33)
CGDAPDSNYQLIW

SEQ ID NO: 480732 - protein, 14 aa, Homo sapiens
  CDR3 for beta chain variable domain of TCR clone 240366 (TRBV7-2, TRBJ1-1)
CASSFLTGTTEAFF

SEQ ID NO: 480733 - protein, 12 aa, Homo sapiens
  CDR3 for alpha chain variable domain of TCR clone 240367 (TRAV8-3, TRAJ26)
CAGDNHGQNFFF

SEQ ID NO: 480734 - protein, 12 aa, Homo sapiens
  CDR3 for beta chain variable domain of TCR clone 240367 (TRBV11-2, TRBJ2-1)
CASSPGNNEQFF

SEQ ID NO: 480735 - protein, 16 aa, Homo sapiens
  CDR3 for alpha chain variable domain of TCR clone 240368 (TRAV3, TRAJ10)
CAVRDMRAGGGNKLTF

SEQ ID NO: 480736 - protein, 16 aa, Homo sapiens
  CDR3 for beta chain variable domain of TCR clone 240368 (TRBV5-6, TRBJ1-5)
CASSLQQDREYQPQHF

SEQ ID NO: 480737 - protein, 16 aa, Homo sapiens
  CDR3 for alpha chain variable domain of TCR clone 240369 (TRAV22, TRAJ45)
GAVERGKRGGADGLTF

SEQ ID NO: 480738 - protein, 13 aa, Homo sapiens
  CDR3 for beta chain variable domain of TCR clone 240369 (TRBV27, TRBJ1-1)
CASSLSIGAEAFF

SEQ ID NO: 480739 - protein, 16 aa, Homo sapiens
  CDR3 for alpha chain variable domain of TCR clone 240370 (TRAV3, TRAJ37)
CAVRPHGSGHTGKLIF

SEQ ID NO: 480740 - protein, 16 aa, Homo sapiens
  CDR3 for beta chain variable domain of TCR clone 240370 (TRBV20-1, TRBJ1-4)
CSAPGQGLLTNEKLFF

SEQ ID NO: 480741 - protein, 16 aa, Homo sapiens
  CDR3 for alpha chain variable domain of TCR clone 240371 (TRAV3, TRAJ5)
CAVRNLMDTGRRALTF

SEQ ID NO: 480742 - protein, 16 aa, Homo sapiens
  CDR3 for beta chain variable domain of TCR clone 240371 (TRBV4-2, TRBJ2-7)
CASSQEGLANSNEQYF

SEQ ID NO: 480743 - protein, 20 aa, Homo sapiens
  CDR3 for alpha chain variable domain of TCR clone 240372 (TRAV26-1, TRAJ42)
CCVLLHRQTDYGGSQGNRIF

SEQ ID NO: 480744 - protein, 16 aa, Homo sapiens
  CDR3 for beta chain variable domain of TCR clone 240372 (TRBV7-3, TRBJ2-2)
CASSLKRGTLSGELFF

SEQ ID NO: 480745 - protein, 15 aa, Homo sapiens
  CDR3 for alpha chain variable domain of TCR clone 240373 (TRAV17, TRAJ10)
CATDASGGGGNKLTF

SEQ ID NO: 480746 - protein, 13 aa, Homo sapiens
  CDR3 for beta chain variable domain of TCR clone 240373 (TRBV20-1, TRBJ1-1)
CSARGGGNTEAFF

SEQ ID NO: 480747 - protein, 13 aa, Homo sapiens
  CDR3 for alpha chain variable domain of TCR clone 240374 (TRAV23/DV6, TRAJ21)
CAASIGNFNKFYF

SEQ ID NO: 480748 - protein, 14 aa, Homo sapiens
  CDR3 for beta chain variable domain of TCR clone 240374 (TRBV19, TRBJ2-1)
CASPTFVLSGEQFF

SEQ ID NO: 480749 - protein, 12 aa, Homo sapiens
  CDR3 for alpha chain variable domain of TCR clone 240375 (TRAV8-3, TRAJ15)
CAVGAPLSAMIF

SEQ ID NO: 480750 - protein, 17 aa, Homo sapiens
  CDR3 for beta chain variable domain of TCR clone 240375 (TRBV5-5, TRBJ1-1)
CASSLRFRGLMNTEAFF

SEQ ID NO: 480751 - protein, 14 aa, Homo sapiens
  CDR3 for alpha chain variable domain of TCR clone 240376 (TRAV16, TRAJ31)
CSKWWRGENARLMF

SEQ ID NO: 480752 - protein, 16 aa, Homo sapiens
  CDR3 for beta chain variable domain of TCR clone 240376 (TRBV28, TRBJ2-7)
CASSLFFETGGPEQYF

SEQ ID NO: 480753 - protein, 13 aa, Homo sapiens
  CDR3 for alpha chain variable domain of TCR clone 240377 (TRAV3, TRAJ20)
CAVRDTPHYKLSF

SEQ ID NO: 480754 - protein, 16 aa, Homo sapiens
  CDR3 for beta chain variable domain of TCR clone 240377 (TRBV20-1, TRBJ2-7)
CSARAPGLALSYEQYF

SEQ ID NO: 480755 - protein, 14 aa, Homo sapiens
  CDR3 for alpha chain variable domain of TCR clone 240378 (TRAV13-1, TRAJ35)
CAASKGCFGSVLHC

SEQ ID NO: 480756 - protein, 13 aa, Homo sapiens
  CDR3 for beta chain variable domain of TCR clone 240378 (TRBV7-3, TRBJ1-1)
CASSQDWGAEAFF

SEQ ID NO: 480757 - protein, 10 aa, Homo sapiens
  CDR3 for alpha chain variable domain of TCR clone 240379 (TRAV26-1, TRAJ40)
CIAGTYKYIF

SEQ ID NO: 480758 - protein, 12 aa, Homo sapiens
  CDR3 for beta chain variable domain of TCR clone 240379 (TRBV7-9, TRBJ2-7)
CATRTDAYEQYF

SEQ ID NO: 480759 - protein, 14 aa, Homo sapiens
  CDR3 for alpha chain variable domain of TCR clone 240380 (TRAV1-2, TRAJ16)
CAVNRFSDGQKLLF

SEQ ID NO: 480760 - protein, 14 aa, Homo sapiens
  CDR3 for beta chain variable domain of TCR clone 240380 (TRBV7-9, TRBJ2-1)
CASSPRNSLYEQFF

SEQ ID NO: 480761 - protein, 13 aa, Homo sapiens
  CDR3 for alpha chain variable domain of TCR clone 240381 (TRAV13-1, TRAJ40)
CAARTSGTYKYIF

SEQ ID NO: 480762 - protein, 14 aa, Homo sapiens
  CDR3 for beta chain variable domain of TCR clone 240381 (TRBV7-9, TRBJ2-7)
CASSLDRPTDEQYF

SEQ ID NO: 480763 - protein, 13 aa, Homo sapiens
  CDR3 for alpha chain variable domain of TCR clone 240382 (TRAV1-1, TRAJ13)
CAVNSGGYLKVTF

SEQ ID NO: 480764 - protein, 12 aa, Homo sapiens
  CDR3 for beta chain variable domain of TCR clone 240382 (TRBV28, TRBJ2-1)
CASSVQINEQFF

SEQ ID NO: 480765 - protein, 15 aa, Homo sapiens
  CDR3 for alpha chain variable domain of TCR clone 240383 (TRAV8-1, TRAJ6)
CAVNTPPGGSYIPTF

SEQ ID NO: 480766 - protein, 14 aa, Homo sapiens
  CDR3 for beta chain variable domain of TCR clone 240383 (TRBV12-4, TRBJ2-1)
CASSLGQGASAQFF

SEQ ID NO: 480767 - protein, 14 aa, Homo sapiens
  CDR3 for alpha chain variable domain of TCR clone 240384 (TRAV12-1, TRAJ17)
CVVNYKAAGNKLTF

SEQ ID NO: 480768 - protein, 12 aa, Homo sapiens
  CDR3 for beta chain variable domain of TCR clone 240384 (TRBV19, TRBJ2-1)
CASSRQGAEQFF

SEQ ID NO: 480769 - protein, 15 aa, Homo sapiens
  CDR3 for alpha chain variable domain of TCR clone 240385 (TRAV26-1, TRAJ44)
CSIRANTGTASKLTF

SEQ ID NO: 480770 - protein, 16 aa, Homo sapiens
  CDR3 for beta chain variable domain of TCR clone 240385 (TRBV7-7, TRBJ2-1)
CASSLASGTSYNEQFF

SEQ ID NO: 480771 - protein, 16 aa, Homo sapiens
  CDR3 for alpha chain variable domain of TCR clone 240386 (TRAV23/DV6, TRAJ9)
CAASIGGNTGGFKTIF

SEQ ID NO: 480772 - protein, 16 aa, Homo sapiens
  CDR3 for beta chain variable domain of TCR clone 240386 (TRBV7-9, TRBJ2-5)
CASSPSGQGVKGTQYF

SEQ ID NO: 480773 - protein, 12 aa, Homo sapiens
  CDR3 for alpha chain variable domain of TCR clone 240387 (TRAV13-1, TRAJ15)
CAACQAGTALIF

SEQ ID NO: 480774 - protein, 14 aa, Homo sapiens
  CDR3 for beta chain variable domain of TCR clone 240387 (TRBV19, TRBJ2-2)
CASSTLHRSGELFF

SEQ ID NO: 480775 - protein, 13 aa, Homo sapiens
  CDR3 for alpha chain variable domain of TCR clone 240388 (TRAV2, TRAJ40)
CAVVTSGTYKYIF

SEQ ID NO: 480776 - protein, 16 aa, Homo sapiens
  CDR3 for beta chain variable domain of TCR clone 240388 (TRBV7-3, TRBJ2-2)
CASILKRGTLSGELFF

SEQ ID NO: 480777 - protein, 12 aa, Homo sapiens
  CDR3 for alpha chain variable domain of TCR clone 240389 (TRAV2, TRAJ9)
CAVGAGGFKTIF

SEQ ID NO: 480778 - protein, 13 aa, Homo sapiens
  CDR3 for beta chain variable domain of TCR clone 240389 (TRBV13, TRBJ2-2)
CASSQENTGELFF

SEQ ID NO: 480779 - protein, 14 aa, Homo sapiens
  CDR3 for alpha chain variable domain of TCR clone 240390 (TRAV3, TRAJ7)
CAVREEEREQQTRF

SEQ ID NO: 480780 - protein, 14 aa, Homo sapiens
  CDR3 for beta chain variable domain of TCR clone 240390 (TRBV19, TRBJ1-4)
CASSMGRHNEKLFF

SEQ ID NO: 480781 - protein, 14 aa, Homo sapiens
  CDR3 for alpha chain variable domain of TCR clone 240391 (TRAV12-1, TRAJ13)
CVVIDSGGYQKVTF

SEQ ID NO: 480782 - protein, 17 aa, Homo sapiens
  CDR3 for beta chain variable domain of TCR clone 240391 (TRBV15, TRBJ1-5)
CATSRAPPGTRNQTQHF

SEQ ID NO: 480783 - protein, 11 aa, Homo sapiens
  CDR3 for alpha chain variable domain of TCR clone 240392 (TRAV1-2, TRAJ20)
CAVANDYKLSF

SEQ ID NO: 480784 - protein, 19 aa, Homo sapiens
  CDR3 for beta chain variable domain of TCR clone 240392 (TRBV7-9, TRBJ2-6)
CASSLESATVLPGANVLTF

SEQ ID NO: 480785 - protein, 13 aa, Homo sapiens
  CDR3 for alpha chain variable domain of TCR clone 240393 (TRAV2, TRAJ40)
CAVVTSGTYKYIF

SEQ ID NO: 480786 - protein, 14 aa, Homo sapiens
  CDR3 for beta chain variable domain of TCR clone 240393 (TRBV12-5, TRBJ2-5)
CASGSRTHQGTQYF

SEQ ID NO: 480787 - protein, 13 aa, Homo sapiens
  CDR3 for alpha chain variable domain of TCR clone 240394 (TRAV30, TRAJ26)
CGTEIPLGQNFVF

SEQ ID NO: 480788 - protein, 14 aa, Homo sapiens
  CDR3 for beta chain variable domain of TCR clone 240394 (TRBV11-1, TRBJ2-7)
CASSWTGTAYEQYF

SEQ ID NO: 480789 - protein, 17 aa, Homo sapiens
  CDR3 for alpha chain variable domain of TCR clone 240395 (TRAV3, TRAJ6)
CALRDGPRAGGSYIPTF

SEQ ID NO: 480790 - protein, 13 aa, Homo sapiens
  CDR3 for beta chain variable domain of TCR clone 240395 (TRBV27, TRBJ1-1)
CASSLSIGAEAFF

SEQ ID NO: 480791 - protein, 17 aa, Homo sapiens
  CDR3 for alpha chain variable domain of TCR clone 240396 (TRAV3, TRAJ6)
CAVRDGPRVGVSHIPTF

SEQ ID NO: 480792 - protein, 12 aa, Homo sapiens
  CDR3 for beta chain variable domain of TCR clone 240396 (TRBV11-2, TRBJ2-2)
CASSLGGGELFF

SEQ ID NO: 480793 - protein, 23 aa, Homo sapiens
  CDR3 for alpha chain variable domain of TCR clone 240397 (TRAV30, TRAJ29)
PAQLLRNLLLWHRAFSGNTPLVF

SEQ ID NO: 480794 - protein, 15 aa, Homo sapiens
  CDR3 for beta chain variable domain of TCR clone 240397 (TRBV5-1, TRBJ2-2)
CASSLFGQSTGELFF

SEQ ID NO: 480795 - protein, 14 aa, Homo sapiens
  CDR3 for alpha chain variable domain of TCR clone 240398 (TRAV16, TRAJ39)
CALSKNNAGNMLTF

SEQ ID NO: 480796 - protein, 13 aa, Homo sapiens
  CDR3 for beta chain variable domain of TCR clone 240398 (TRBV15, TRBJ1-6)
CATSGGLNSPLHF

SEQ ID NO: 480797 - protein, 14 aa, Homo sapiens
  CDR3 for alpha chain variable domain of TCR clone 240399 (TRAV1-2, TRAJ33)
CAVRAPDSNYQLIL

SEQ ID NO: 480798 - protein, 14 aa, Homo sapiens
  CDR3 for beta chain variable domain of TCR clone 240399 (TRBV11-3, TRBJ1-6)
CASSFSGGDSPLHF

SEQ ID NO: 480799 - protein, 12 aa, Homo sapiens
  CDR3 for alpha chain variable domain of TCR clone 240400 (TRAV12-1, TRAJ40)
CVVYSGTYKYIF

SEQ ID NO: 480800 - protein, 14 aa, Homo sapiens
  CDR3 for beta chain variable domain of TCR clone 240400 (TRBV12-4, TRBJ1-4)
CASSRQGANEKLFF

SEQ ID NO: 480801 - protein, 13 aa, Homo sapiens
  CDR3 for alpha chain variable domain of TCR clone 240401 (TRAV4, TRAJ34)
CLVGDYNTDKLIC

SEQ ID NO: 480802 - protein, 23 aa, Homo sapiens
  CDR3 for beta chain variable domain of TCR clone 240401 (TRBV4-2, TRBJ2-3)
CASSQDPPRASSISGGRGDTQYF

SEQ ID NO: 480803 - protein, 14 aa, Homo sapiens
  CDR3 for alpha chain variable domain of TCR clone 240402 (TRAV13-2, TRAJ17)
CAEYSKAAGNKLTF

SEQ ID NO: 480804 - protein, 11 aa, Homo sapiens
  CDR3 for beta chain variable domain of TCR clone 240402 (TRBV6-3, TRBJ2-3)
CATGQADTQYF

SEQ ID NO: 480805 - protein, 15 aa, Homo sapiens
  CDR3 for alpha chain variable domain of TCR clone 240403 (TRAV26-1, TRAJ40)
CIVRVTTSGTYKYIF

SEQ ID NO: 480806 - protein, 14 aa, Homo sapiens
  CDR3 for beta chain variable domain of TCR clone 240403 (TRBV4-1, TRBJ2-7)
CDSSPVAGGDEQYF

SEQ ID NO: 480807 - protein, 15 aa, Homo sapiens
  CDR3 for alpha chain variable domain of TCR clone 240404 (TRAV26-1, TRAJ39)
CIVRVARNSGNMLTF

SEQ ID NO: 480808 - protein, 16 aa, Homo sapiens
  CDR3 for beta chain variable domain of TCR clone 240404 (TRBV5-1, TRBJ2-1)
CASSLTLAGGRNEQFF

SEQ ID NO: 480809 - protein, 16 aa, Homo sapiens
  CDR3 for alpha chain variable domain of TCR clone 240405 (TRAV8-3, TRAJ13)
CAVGAYPSGGYPKVIF

SEQ ID NO: 480810 - protein, 15 aa, Homo sapiens
  CDR3 for beta chain variable domain of TCR clone 240405 (TRBV19, TRBJ1-5)
CASSIVWADNQPQHF

SEQ ID NO: 480811 - protein, 14 aa, Homo sapiens
  CDR3 for alpha chain variable domain of TCR clone 240406 (TRAV27, TRAJ21)
CAGVRQLQQILLWI

SEQ ID NO: 480812 - protein, 14 aa, Homo sapiens
  CDR3 for beta chain variable domain of TCR clone 240406 (TRBV7-9, TRBJ1-4)
CASSLEGKSEKLFF

SEQ ID NO: 480813 - protein, 14 aa, Homo sapiens
  CDR3 for alpha chain variable domain of TCR clone 240407 (TRAV2, TRAJ9)
CAVEDRSGGFKTIF

SEQ ID NO: 480814 - protein, 17 aa, Homo sapiens
  CDR3 for beta chain variable domain of TCR clone 240407 (TRBV7-9, TRBJ2-7)
CASSFDGSRGGAYEQYF

SEQ ID NO: 480815 - protein, 14 aa, Homo sapiens
  CDR3 for alpha chain variable domain of TCR clone 240408 (TRAV12-1, TRAJ43)
CVVNGRSNNNDMRF

SEQ ID NO: 480816 - protein, 17 aa, Homo sapiens
  CDR3 for beta chain variable domain of TCR clone 240408 (TRBV20-1, TRBJ2-1)
CSSPPRLAGTRYNEQFF

SEQ ID NO: 480817 - protein, 13 aa, Homo sapiens
  CDR3 for alpha chain variable domain of TCR clone 240409 (TRAV21, TRAJ57)
CAVTQGGYEKLVF

SEQ ID NO: 480818 - protein, 17 aa, Homo sapiens
  CDR3 for beta chain variable domain of TCR clone 240409 (TRBV10-3, TRBJ2-6)
CAISELAESSGANVLTF

SEQ ID NO: 480819 - protein, 15 aa, Homo sapiens
  CDR3 for alpha chain variable domain of TCR clone 240410 (TRAV12-3, TRAJ6)
CAMSATTGGSYIPTF

SEQ ID NO: 480820 - protein, 13 aa, Homo sapiens
  CDR3 for beta chain variable domain of TCR clone 240410 (TRBV7-9, TRBJ1-2)
CASSVRQNYGYTF

SEQ ID NO: 480821 - protein, 18 aa, Homo sapiens
  CDR3 for alpha chain variable domain of TCR clone 240411 (TRAV26-1, TRAJ56)
CIVRVASRVTGATSKLTF

SEQ ID NO: 480822 - protein, 15 aa, Homo sapiens
  CDR3 for beta chain variable domain of TCR clone 240411 (TRBV7-9, TRBJ2-5)
CASSDTGRGRETQYF

SEQ ID NO: 480823 - protein, 13 aa, Homo sapiens
  CDR3 for alpha chain variable domain of TCR clone 240412 (TRAV13-1, TRAJ29)
CAASIGLNTPLVF

SEQ ID NO: 480824 - protein, 13 aa, Homo sapiens
  CDR3 for beta chain variable domain of TCR clone 240412 (TRBV10-3, TRBJ2-7)
CASKLAVNYEQYF

SEQ ID NO: 480825 - protein, 15 aa, Homo sapiens
  CDR3 for alpha chain variable domain of TCR clone 240413 (TRAV3, TRAJ11)
CAVRDRGSGYSTLTS

SEQ ID NO: 480826 - protein, 13 aa, Homo sapiens
  CDR3 for beta chain variable domain of TCR clone 240413 (TRBV7-9, TRBJ1-2)
CASSLKQNYGYTF

SEQ ID NO: 480827 - protein, 15 aa, Homo sapiens
  CDR3 for alpha chain variable domain of TCR clone 240414 (TRAV16, TRAJ17)
CALSGQEAAGNKLTF

SEQ ID NO: 480828 - protein, 12 aa, Homo sapiens
  CDR3 for beta chain variable domain of TCR clone 240414 (TRBV11-2, TRBJ2-2)
CASSLPTGELFF

SEQ ID NO: 480829 - protein, 18 aa, Homo sapiens
  CDR3 for alpha chain variable domain of TCR clone 240415 (TRAV13-1, TRAJ52)
CSANNPNAGGTSYGKVTF

SEQ ID NO: 480830 - protein, 15 aa, Homo sapiens
  CDR3 for beta chain variable domain of TCR clone 240415 (TRBV6-1, TRBJ2-3)
CASSERGGITDTQYF

SEQ ID NO: 480831 - protein, 12 aa, Homo sapiens
  CDR3 for alpha chain variable domain of TCR clone 240416 (TRAV21, TRAJ33)
CAKMDSNYKLIW

SEQ ID NO: 480832 - protein, 14 aa, Homo sapiens
  CDR3 for beta chain variable domain of TCR clone 240416 (TRBV2, TRBJ2-7)
CASSLTSDGYEQYF

SEQ ID NO: 480833 - protein, 11 aa, Homo sapiens
  CDR3 for alpha chain variable domain of TCR clone 240417 (TRAV13-1, TRAJ5)
CAPKGRRALTF

SEQ ID NO: 480834 - protein, 15 aa, Homo sapiens
  CDR3 for beta chain variable domain of TCR clone 240417 (TRBV5-7, TRBJ1-2)
CASSLAWTGGYGYTF

SEQ ID NO: 480835 - protein, 14 aa, Homo sapiens
  CDR3 for alpha chain variable domain of TCR clone 240418 (TRAV17, TRAJ4)
CATAPLGGYNKLIF

SEQ ID NO: 480836 - protein, 13 aa, Homo sapiens
  CDR3 for beta chain variable domain of TCR clone 240418 (TRBV12-4, TRBJ1-3)
CASSLASGNTIDF

SEQ ID NO: 480837 - protein, 19 aa, Homo sapiens
  CDR3 for alpha chain variable domain of TCR clone 240419 (TRAV2, TRAJ20)
ILQVREADAAVYRDCKLSF

SEQ ID NO: 480838 - protein, 12 aa, Homo sapiens
  CDR3 for beta chain variable domain of TCR clone 240419 (TRBV29-1, TRBJ2-3)
CSVTGGADTQYF
